United States Patent Application Publication US 2007/0214517 A1 - sequence listing, part 18

SEQ ID NO: 22903 - DNA, 1894 bp, Arabidopsis thaliana
  misc_feature (1)..(1894): Ceres Seq. ID no. 12327192
  misc_feature: MA Experiment ID: 20000169 Result: Up-regulated in Transcription
  misc_feature: MA Experiment 20000169 PARAMETER Experiment Name: At_100uM_ABA_P Parameter: Age (day) Value: 14
  misc_feature: MA Experiment 20000169 PARAMETER Experiment Name: At_100uM_ABA_P Parameter: Organism Value: A. thaliana
  misc_feature: MA Experiment 20000169 PARAMETER Experiment Name: At_100uM_ABA_P Parameter: Plant Line Value: WS
  misc_feature: MA Experiment 20000169 PARAMETER Experiment Name: At_100uM_ABA_P Parameter: Timepoint (hr) Value: 6
  misc_feature: MA Experiment 20000169 PARAMETER Experiment Name: At_100uM_ABA_P Parameter: Tissue Value: Aerial
  misc_feature: MA Experiment 20000169 PARAMETER Experiment Name: At_100uM_ABA_P Parameter: Treatment Value: 100uM ABA vs. No Treatment
  misc_feature: MA Experiment ID: 20000184 Result: Down-regulated in Transcription
  misc_feature: MA Experiment 20000184 PARAMETER Experiment Name: At_Shoots__P Parameter: Age (day) Value: 7
  misc_feature: MA Experiment 20000184 PARAMETER Experiment Name: At_Shoots__P Parameter: Tissue Value: Shoots vs. Whole Plant
  misc_feature: MA Experiment ID: 20000234 Result: Down-regulated in Transcription
  misc_feature: MA Experiment 20000234 PARAMETER Experiment Name: At_Siliques_P Parameter: Age (day) Value: 21
  misc_feature: MA Experiment 20000234 PARAMETER Experiment Name: At_Siliques_P Parameter: Organism Value: A. thaliana
  misc_feature: MA Experiment 20000234 PARAMETER Experiment Name: At_Siliques_P Parameter: Plant Line Value: WS
  misc_feature: MA Experiment 20000234 PARAMETER Experiment Name: At_Siliques_P Parameter: Tissue Value: Less Than 5mm Siliques vs. Whole Plant
  misc_feature: MA Experiment ID: 20000235 Result: Down-regulated in Transcription
  misc_feature: MA Experiment 20000235 PARAMETER Experiment Name: At_Siliques_P Parameter: Age (day) Value: 21
  misc_feature: MA Experiment 20000235 PARAMETER Experiment Name: At_Siliques_P Parameter: Organism Value: A. thaliana
  misc_feature: MA Experiment 20000235 PARAMETER Experiment Name: At_Siliques_P Parameter: Plant Line Value: WS
  misc_feature: MA Experiment 20000235 PARAMETER Experiment Name: At_Siliques_P Parameter: Tissue Value: 5-10mm Siliques vs. Whole Plant
  misc_feature: MA Experiment ID: 20000264 Result: Down-regulated in Transcription
  misc_feature: MA Experiment 20000264 PARAMETER Experiment Name: At_Open_Flower_P Parameter: Age (day) Value: 21
  misc_feature: MA Experiment 20000264 PARAMETER Experiment Name: At_Open_Flower_P Parameter: Plant Line Value: WS
  misc_feature: MA Experiment 20000264 PARAMETER Experiment Name: At_Open_Flower_P Parameter: Tissue Value: Open Flower vs. Whole Plant
  misc_feature: MA Experiment ID: 20000265 Result: Down-regulated in Transcription
  misc_feature: MA Experiment 20000265 PARAMETER Experiment Name: At_Open_Flower_P Parameter: Age (day) Value: 21
  misc_feature: MA Experiment 20000265 PARAMETER Experiment Name: At_Open_Flower_P Parameter: Plant Line Value: WS
  misc_feature: MA Experiment 20000265 PARAMETER Experiment Name: At_Open_Flower_P Parameter: Tissue Value: Closed Flower vs. Whole Plant
  misc_feature: MA Experiment ID: 20000286 Result: Down-regulated in Transcription
  misc_feature: MA Experiment 20000286 PARAMETER Experiment Name: At_Open_Flower_P Parameter: Age (day) Value: 21
  misc_feature: MA Experiment 20000286 PARAMETER Experiment Name: At_Open_Flower_P Parameter: Plant Line Value: WS
  misc_feature: MA Experiment 20000286 PARAMETER Experiment Name: At_Open_Flower_P Parameter: Tissue Value: Half Open vs. Whole Plant
  misc_feature: MA Experiment ID: 20000437 Result: Up-regulated in Transcription
  misc_feature: MA Experiment 20000437 PARAMETER Experiment Name: At_Drought_P Parameter: Age (day) Value: 8
  misc_feature: MA Experiment 20000437 PARAMETER Experiment Name: At_Drought_P Parameter: Organism Value: A. thaliana
  misc_feature: MA Experiment 20000437 PARAMETER Experiment Name: At_Drought_P Parameter: Plant Line Value: WS
  misc_feature: MA Experiment 20000437 PARAMETER Experiment Name: At_Drought_P Parameter: Timepoint (hr) Value: 24
  misc_feature: MA Experiment 20000437 PARAMETER Experiment Name: At_Drought_P Parameter: Tissue Value: Whole Plant
  misc_feature: MA Experiment 20000437 PARAMETER Experiment Name: At_Drought_P Parameter: Treatment Value: Drought vs. No Drought
  misc_feature: MA Experiment ID: 20000453 Result: Up-regulated in Transcription
  misc_feature: MA Experiment 20000453 PARAMETER Experiment Name: At_100uM_ABA_P Parameter: Age (day) Value: 15
  misc_feature: MA Experiment 20000453 PARAMETER Experiment Name: At_100uM_ABA_P Parameter: Organism Value: A. thaliana
  misc_feature: MA Experiment 20000453 PARAMETER Experiment Name: At_100uM_ABA_P Parameter: Plant Line Value: WS
  misc_feature: MA Experiment 20000453 PARAMETER Experiment Name: At_100uM_ABA_P Parameter: Timepoint (hr) Value: 24
  misc_feature: MA Experiment 20000453 PARAMETER Experiment Name: At_100uM_ABA_P Parameter: Tissue Value: Aerial
  misc_feature: MA Experiment 20000453 PARAMETER Experiment Name: At_100uM_ABA_P Parameter: Treatment Value: 100uM ABA vs. No Treatment
  misc_feature: MA Experiment ID: 20001458 Result: Up-regulated in Transcription
  misc_feature: MA Experiment 20001458 PARAMETER Experiment Name: At_50mM_NH4NO3_L-to-H_P Parameter: Age (day) Value: Undefined
  misc_feature: MA Experiment 20001458 PARAMETER Experiment Name: At_50mM_NH4NO3_L-to-H_P Parameter: Organism Value: Undefined
  misc_feature: MA Experiment 20001458 PARAMETER Experiment Name: At_50mM_NH4NO3_L-to-H_P Parameter: Plant Line Value: Undefined
  misc_feature: MA Experiment 20001458 PARAMETER Experiment Name: At_50mM_NH4NO3_L-to-H_P Parameter: Timepoint (hr) Value: 2
  misc_feature: MA Experiment 20001458 PARAMETER Experiment Name: At_50mM_NH4NO3_L-to-H_P Parameter: Tissue Value: Siliques
  misc_feature: MA Experiment 20001458 PARAMETER Experiment Name: At_50mM_NH4NO3_L-to-H_P Parameter: Treatment Value: 50mM NH4NO3 vs. 100mM Manitol
  misc_feature: MA Experiment ID: 20001459 Result: Up-regulated in Transcription
  misc_feature: MA Experiment 20001459 PARAMETER Experiment Name: At_50mM_NH4NO3_L-to-H_P Parameter: Age (day) Value: Undefined
  misc_feature: MA Experiment 20001459 PARAMETER Experiment Name: At_50mM_NH4NO3_L-to-H_P Parameter: Organism Value: Undefined
  misc_feature: MA Experiment 20001459 PARAMETER Experiment Name: At_50mM_NH4NO3_L-to-H_P Parameter: Plant Line Value: Undefined
  misc_feature: MA Experiment 20001459 PARAMETER Experiment Name: At_50mM_NH4NO3_L-to-H_P Parameter: Timepoint (hr) Value: 4
  misc_feature: MA Experiment 20001459 PARAMETER Experiment Name: At_50mM_NH4NO3_L-to-H_P Parameter: Tissue Value: Siliques
  misc_feature: MA Experiment 20001459 PARAMETER Experiment Name: At_50mM_NH4NO3_L-to-H_P Parameter: Treatment Value: 50mM NH4NO3 vs. 100mM Manitol
  misc_feature: MA Experiment ID: 20001759 Result: Up-regulated in Transcription
  misc_feature: MA Experiment 20001759 PARAMETER Experiment Name: At_50mM_NH4NO3_L-to-H_P Parameter: Timepoint (hr) Value: 1
  misc_feature: MA Experiment 20001759 PARAMETER Experiment Name: At_50mM_NH4NO3_L-to-H_P Parameter: Tissue Value: Siliques
  misc_feature: MA Experiment 20001759 PARAMETER Experiment Name: At_50mM_NH4NO3_L-to-H_P Parameter: Treatment Value: 50mM NH4NO3 vs 100mM Mannitol
atggactccaatttctctgatcattccctctaatttcggatttttgcatcttctccgatcatcttcaccactatgggtgcttcatcttctacagacgacaaagaatcatcggagaaacgagaaatcgaaagccttgctgcttcaaccggagctcttcctctgcttaaacgatccttctccaaactcgtcgattctcaaaccaatactgttccttttcaatccttgaagcaaagttttggtttgagctacgatacaattactactgaaggagagcaaaaagtttcagacttgtttcccaaattgttggagcatttaggatcatctttagtagatttgttcttcgtgcctgataaagaaggattgagttgggttgagtttgctagtggttatgtcaaatgttgtggaagaatgtcgaattcgatgtctttcaacactttgttgagagtttactatgtgacagctaaaaatgcaggcttttctccaaagcttgagtttgaatctgatgaagctgattgtaagattaacgggtcgatttcggttagtgaattgcttgtgtttctttggatgtgttggacaatgtcttgggatggtcgaagctctaaagctgctgaaatgaaagggtgtttgtttcttccggatattagtcatttgattctatcagcagtggtgtcttgcactgattctgaatctggaaatagtttggatgtttgggagactgatgtttctggtttagaacttgaacttcctatcgggaaattcttaacgtgggctttgatgacagttccttgcctcactgagtgcctttctcacttttgtaactcgaggcttcaaaatgtgacaagtgcagaggatggatctggaccttcaaagtccactgctgtagatgattctgcgtccaagacaagcgaaaacacccttctaacatgtggaagggcatgggcgatttctttgacgagcaaaagtacaataagcgaggagattttgagctcatgttttcccggcaatagcggtgaaccaaatgaacatcttctataccgctcatattatcacgggaaaggcatgaatcgactgtggtccaacgttgaagggtatcatgctcctatactagtgataatttctgcaagttgtaaagtcgaacatgaggctacttcaagcgagaggaagtgggtcattggtgcaatcttgcagcaaggttttgagaacagagatgcattttatggaagctctgggaacttgttctccataagtccagtctttcacgcattctcatcttctggtaaggagaaaaactttgcgtatagccatctgcaccctgctggcggagtgtacgacgcacatcccaagcctgttggaattggattcgggggaacacttggaaatgagagaattttcattgatgaagactttgctaaaatcacagtccgtcatcatgcagttgataaaacttaccagtcaggctctcttttcccaaaccagggttatttaccagtagaggctttggttctagatattgaagcatgggggttaggtggaaacaaggctagggaaattcaacaaaaataccagaaaagagaagagcttttcactaaccaacgtcgaaagatcgacttgaaaacgtttacgaactgggaagattcacctgagaaaatgatgatggatatgatgggtaatcctaatgctcctagaaaggaagagaggtaatgaatgaaagacgagaactggtttgatatatacacacatatacgttgttgtctcttaaaatatatatgcaagaaactcttttgctgttcatgagctcttggattcaatgtgtaagttatgtatactagtgttgccaaaacttgaaccagccagttgatttgatatttgcctataaaaattggtttttattccc

SEQ ID NO: 22904 - protein, 542 aa, Arabidopsis thaliana
  peptide (1)..(542): Ceres Seq. ID no. 12327193
  misc_feature (1)..(542): Homolog of NCBI NO: 38346079 NR Description: OSJNBa0084K01.19 [Oryza sativa (japonica
  misc_feature (1)..(542): Homolog of NCBI NO: 27450531 NR Description: hypothetical protein [Prunus persica]
  misc_feature (1)..(542): Homolog of NCBI NO: 15010732 NR Description: AT5g39590/MIJ24_60 [Arabidopsis thaliana]
  misc_feature (1)..(542): Homolog of NCBI NO: 15241814 NR Description: putative protein
  misc_feature (1)..(542): Homolog of NCBI NO: 38346079 NR Description: OSJNBa0084K01.19 [Oryza sativa (japonica
  misc_feature (1)..(542): Homolog of NCBI NO: 27450531 NR Description: hypothetical protein [Prunus persica]
  misc_feature (1)..(542): Homolog of NCBI NO: 15010732 NR Description: AT5g39590/MIJ24_60 [Arabidopsis thaliana]
  misc_feature (1)..(542): Homolog of NCBI NO: 15241814 NR Description: putative protein
MGASSSTDDKESSEKREIESLAASTGALPLLKRSFSKLVDSQTNTVPFQSLKQSFGLSYDTITTEGEQKVSDLFPKLLEHLGSSLVDLFFVPDKEGLSWVEFASGYVKCCGRMSNSMSFNTLLRVYYVTAKNAGFSPKLEFESDEADCKINGSISVSELLVFLWMCWTMSWDGRSSKAAEMKGCLFLPDISHLILSAVVSCTDSESGNSLDVWETDVSGLELELPIGKFLTWALMTVPCLTECLSHFCNSRLQNVTSAEDGSGPSKSTAVDDSASKTSENTLLTCGRAWAISLTSKSTISEEILSSCFPGNSGEPNEHLLYRSYYHGKGMNRLWSNVEGYHAPILVIISASCKVEHEATSSERKWVIGAILQQGFENRDAFYGSSGNLFSISPVFHAFSSSGKEKNFAYSHLHPAGGVYDAHPKPVGIGFGGTLGNERIFIDEDFAKITVRHHAVDKTYQSGSLFPNQGYLPVEALVLDIEAWGLGGNKAREIQQKYQKREELFTNQRRKIDLKTFTNWEDSPEKMMMDMMGNPNAPRKEER

SEQ ID NO: 22905 - protein, 430 aa, Arabidopsis thaliana
  peptide (1)..(430): Ceres Seq. ID no. 12327194
  misc_feature (1)..(430): Homolog of NCBI NO: 38346079 NR Description: OSJNBa0084K01.19 [Oryza sativa (japonica
  misc_feature (1)..(430): Homolog of NCBI NO: 27450531 NR Description: hypothetical protein [Prunus persica]
  misc_feature (1)..(430): Homolog of NCBI NO: 15010732 NR Description: AT5g39590/MIJ24_60 [Arabidopsis thaliana]
  misc_feature (1)..(430): Homolog of NCBI NO: 15241814 NR Description: putative protein
  misc_feature (1)..(430): Homolog of NCBI NO: 38346079 NR Description: OSJNBa0084K01.19 [Oryza sativa (japonica
  misc_feature (1)..(430): Homolog of NCBI NO: 27450531 NR Description: hypothetical protein [Prunus persica]
  misc_feature (1)..(430): Homolog of NCBI NO: 15010732 NR Description: AT5g39590/MIJ24_60 [Arabidopsis thaliana]
  misc_feature (1)..(430): Homolog of NCBI NO: 15241814 NR Description: putative protein
MSNSMSFNTLLRVYYVTAKNAGFSPKLEFESDEADCKINGSISVSELLVFLWMCWTMSWDGRSSKAAEMKGCLFLPDISHLILSAVVSCTDSESGNSLDVWETDVSGLELELPIGKFLTWALMTVPCLTECLSHFCNSRLQNVTSAEDGSGPSKSTAVDDSASKTSENTLLTCGRAWAISLTSKSTISEEILSSCFPGNSGEPNEHLLYRSYYHGKGMNRLWSNVEGYHAPILVIISASCKVEHEATSSERKWVIGAILQQGFENRDAFYGSSGNLFSISPVFHAFSSSGKEKNFAYSHLHPAGGVYDAHPKPVGIGFGGTLGNERIFIDEDFAKITVRHHAVDKTYQSGSLFPNQGYLPVEALVLDIEAWGLGGNKAREIQQKYQKREELFTNQRRKIDLKTFTNWEDSPEKMMMDMMGNPNAPRKEER

SEQ ID NO: 22906 - protein, 426 aa, Arabidopsis thaliana
  peptide (1)..(426): Ceres Seq. ID no. 12327195
  misc_feature (1)..(426): Homolog of NCBI NO: 38346079 NR Description: OSJNBa0084K01.19 [Oryza sativa (japonica
  misc_feature (1)..(426): Homolog of NCBI NO: 27450531 NR Description: hypothetical protein [Prunus persica]
  misc_feature (1)..(426): Homolog of NCBI NO: 15010732 NR Description: AT5g39590/MIJ24_60 [Arabidopsis thaliana]
  misc_feature (1)..(426): Homolog of NCBI NO: 15241814 NR Description: putative protein
  misc_feature (1)..(426): Homolog of NCBI NO: 38346079 NR Description: OSJNBa0084K01.19 [Oryza sativa (japonica
  misc_feature (1)..(426): Homolog of NCBI NO: 27450531 NR Description: hypothetical protein [Prunus persica]
  misc_feature (1)..(426): Homolog of NCBI NO: 15010732 NR Description: AT5g39590/MIJ24_60 [Arabidopsis thaliana]
  misc_feature (1)..(426): Homolog of NCBI NO: 15241814 NR Description: putative protein
MSFNTLLRVYYVTAKNAGFSPKLEFESDEADCKINGSISVSELLVFLWMCWTMSWDGRSSKAAEMKGCLFLPDISHLILSAVVSCTDSESGNSLDVWETDVSGLELELPIGKFLTWALMTVPCLTECLSHFCNSRLQNVTSAEDGSGPSKSTAVDDSASKTSENTLLTCGRAWAISLTSKSTISEEILSSCFPGNSGEPNEHLLYRSYYHGKGMNRLWSNVEGYHAPILVIISASCKVEHEATSSERKWVIGAILQQGFENRDAFYGSSGNLFSISPVFHAFSSSGKEKNFAYSHLHPAGGVYDAHPKPVGIGFGGTLGNERIFIDEDFAKITVRHHAVDKTYQSGSLFPNQGYLPVEALVLDIEAWGLGGNKAREIQQKYQKREELFTNQRRKIDLKTFTNWEDSPEKMMMDMMGNPNAPRKEER

SEQ ID NO: 22907 - DNA, 1670 bp, Arabidopsis thaliana
  misc_feature (1)..(1670): Ceres Seq. ID no. 12334991
  misc_feature: MA Experiment ID: 108569 Result: Up-regulated in Transcription
  misc_feature: MA Experiment 108569 PARAMETER Experiment Name: At_0.001%_MeJA__cDNA_P Parameter: Timepoint (hr) Value: 6
  misc_feature: MA Experiment 108569 PARAMETER Experiment Name: At_0.001%_MeJA__cDNA_P Parameter: Tissue Value: Aerial
  misc_feature: MA Experiment 108569 PARAMETER Experiment Name: At_0.001%_MeJA__cDNA_P Parameter: Treatment Value: 0.001% MeJA vs. No Treatment
  misc_feature: MA Experiment ID: 20000111 Result: Up-regulated in Transcription
  misc_feature: MA Experiment 20000111 PARAMETER Experiment Name: At_42deg_Heat_cDNA_P Parameter: Temperature (deg C) Value: 42 vs. 22
  misc_feature: MA Experiment 20000111 PARAMETER Experiment Name: At_42deg_Heat_cDNA_P Parameter: Timepoint (hr) Value: 6
  misc_feature: MA Experiment 20000111 PARAMETER Experiment Name: At_42deg_Heat_cDNA_P Parameter: Tissue Value: Aerial
  misc_feature: MA Experiment ID: 20000112 Result: Up-regulated in Transcription
  misc_feature: MA Experiment 20000112 PARAMETER Experiment Name: At_42deg_Heat_cDNA_P Parameter: Temperature (deg C) Value: 42 vs. 22
  misc_feature: MA Experiment 20000112 PARAMETER Experiment Name: At_42deg_Heat_cDNA_P Parameter: Timepoint (hr) Value: 2
  misc_feature: MA Experiment 20000112 PARAMETER Experiment Name: At_42deg_Heat_cDNA_P Parameter: Tissue Value: Aerial
  misc_feature: MA Experiment ID: 20000180 Result: Up-regulated in Transcription
  misc_feature: MA Experiment 20000180 PARAMETER Experiment Name: At_Germinating_Seeds_P Parameter: Age (hr) Value: 24 vs. 0
  misc_feature: MA Experiment 20000180 PARAMETER Experiment Name: At_Germinating_Seeds_P Parameter: Tissue Value: Germinating Seeds
  misc_feature: MA Experiment ID: 20000495 Result: Up-regulated in Transcription
  misc_feature: MA Experiment 20000495 PARAMETER Experiment Name: At_Guard_Cells_P Parameter: Harvest Date Value: 8/2/2002
  misc_feature: MA Experiment 20000495 PARAMETER Experiment Name: At_Guard_Cells_P Parameter: Organism Value: A. thaliana
  misc_feature: MA Experiment 20000495 PARAMETER Experiment Name: At_Guard_Cells_P Parameter: Tissue Value: Guard Cells vs. Leaves
atcttcaaatgaaaatcgctgggctctcgctgtcaacgctgggcgtgagtgagatctaacaatcggtagcgaattttgtaaattttgttccggttttgaagtctcaatctcggggttccggttttagcaactacttcttctgacatttcagctgttctagttgatctttatatactttatatgatctgggattttgaagagtttttagggaggaaccaaaatttctgagagagaaaaatgaagttatcgagctgcgttttgatcttccttctatgtaacacattctcctcgatttctgctttccgtctgagtcggagtcaaccaactgagcgaatttcaggtagtgctggtgatgtgttggaagatgatcccgtgggaagactgaaagtctttgtttatgagcttccaagtaaatacaacaagaagatacttcagaaggatccgagatgtctaaaccacatgtttgctgctgagatatatatgcaacggtttcttttatctagcccagttcgaacacttaatcccgaggaagctgattggttctacgtacctgtgtacaccacttgtgatctcacgcctaatgggcttcctcttccttttaaatctccacgaatgatgagaagtgccattcagcttattgcttccaattggccatactggaatcgcacagaaggagcagaccacttctttgttgtgcctcatgactttggagcctgtttccattatcaagaagagaaggcaataggaagaggaatactacccttgcttcaacgagctacactggtgcagacatttggacaaaggaatcatgtttgcttgaaagaaggttcaatcactgttcctccatatgctccaccacagaagatgcagtcacacttaattcccgaaaaaactcctcgatccatcttcgtttatttcagaggattgttttatgatgtgggaaatgaccctgagggtggttattatgcgaggggtgcaagagcagctgtatgggaaaacttcaaagacaatccgctgtttgacatctcaacagagcacccaacaacatattatgaggacatgcagagagcaatcttctgcctatgcccacttggatgggccccatggagtccaagactggtggaagcagtgatattcggttgcatccctgtgatcatagcagacgacatcgtgttaccttttgcagatgcaatcccttgggaagatattggtgtgtttgtggatgagaaagatgtcccttacctggacacaatactcacatcgatcccaccagaggttatactgagaaaacagaggttgttggcaaacccgtcgatgaaacaagccatgctgttcccgcaaccggctcaaccaggggatgcgtttcatcaagtattgaatgggttggctcgtaagctgcctcatgagaggagtgtgtatctgagaccaggtgagaagctgttgaactggacggcaggaccggtcgctgatctgaaaccttggtaaggaccagtgttggaatttgattgaatgagctattgtttggttggtttctgtcttctcgtgtctgtattttgtagaatcataacttttttttgctatgtagaagggaaaaagctttgtcattgtaatgtaactagaatccttttgacatctcacgagaaagacaagtaaaagaaaaattattgttg

SEQ ID NO: 22908 - protein, 415 aa, Arabidopsis thaliana
  peptide (1)..(415): Ceres Seq. ID no. 12334992
  misc_feature (51)..(355): Pfam Name: Exostosin family Pfam Description: Exostosin family
  misc_feature (7)..(415): Homolog of NCBI NO: 18642697 NR Description: Unknown protein [Oryza sativa]
  misc_feature (7)..(415): Homolog of NCBI NO: 37531708 NR Description: unknown protein [Oryza sativa (japonica
  misc_feature (3)..(415): Homolog of NCBI NO: 34907044 NR Description: hypothetical protein~similar to Arabidopsis
  misc_feature (75)..(415): Homolog of NCBI NO: 23821292 NR Description: pectin-glucuronyltransferase [Nicotiana
  misc_feature (75)..(415): Homolog of NCBI NO: 10176877 NR Description: gb|AAC80624.1~gene_id:MAC9.17~strong similarity
  misc_feature (1)..(415): Homolog of NCBI NO: 34907046 NR Description: contains EST D39982(S1682)~similar to Arabidopsis
  misc_feature (1)..(415): Homolog of NCBI NO: 34907048 NR Description: contains EST D24978(R2878)~similar to Arabidopsis
  misc_feature (1)..(415): Homolog of NCBI NO: 15223522 NR Description: unknown protein; protein id: At1g27440.1
  misc_feature (1)..(415): Homolog of NCBI NO: 21592991 NR Description: unknown [Arabidopsis thaliana]
  misc_feature (1)..(415): Homolog of NCBI NO: 18424516 NR Description: putative protein
MKLSSCVLIFLLCNTFSSISAFRLSRSQPTERISGSAGDVLEDDPVGRLKVFVYELPSKYNKKILQKDPRCLNHMFAAEIYMQRFLLSSPVRTLNPEEADWFYVPVYTTCDLTPNGLPLPFKSPRMMRSAIQLIASNWPYWNRTEGADHFFVVPHDFGACFHYQEEKAIGRGILPLLQRATLVQTFGQRNHVCLKEGSITVPPYAPPQKMQSHLIPEKTPRSIFVYFRGLFYDVGNDPEGGYYARGARAAVWENFKDNPLFDISTEHPTTYYEDMQRAIFCLCPLGWAPWSPRLVEAVIFGCIPVIIADDIVLPFADAIPWEDIGVFVDEKDVPYLDTILTSIPPEVILRKQRLLANPSMKQAMLFPQPAQPGDAFHQVLNGLARKLPHERSVYLRPGEKLLNWTAGPVADLKPW

SEQ ID NO: 22909 - protein, 341 aa, Arabidopsis thaliana
  peptide (1)..(341): Ceres Seq. ID no. 12334993
  misc_feature (1)..(281): Pfam Name: Exostosin family Pfam Description: Exostosin family
  misc_feature (1)..(341): Homolog of NCBI NO: 18642697 NR Description: Unknown protein [Oryza sativa]
  misc_feature (1)..(341): Homolog of NCBI NO: 37531708 NR Description: unknown protein [Oryza sativa (japonica
  misc_feature (1)..(341): Homolog of NCBI NO: 34907044 NR Description: hypothetical protein~similar to Arabidopsis
  misc_feature (1)..(341): Homolog of NCBI NO: 23821292 NR Description: pectin-glucuronyltransferase [Nicotiana
  misc_feature (1)..(341): Homolog of NCBI NO: 10176877 NR Description: gb|AAC80624.1~gene_id:MAC9.17~strong similarity
  misc_feature (1)..(341): Homolog of NCBI NO: 34907046 NR Description: contains EST D39982(S1682)~similar to Arabidopsis
  misc_feature (1)..(341): Homolog of NCBI NO: 34907048 NR Description: contains EST D24978(R2878)~similar to Arabidopsis
  misc_feature (1)..(341): Homolog of NCBI NO: 15223522 NR Description: unknown protein; protein id: At1g27440.1
  misc_feature (1)..(341): Homolog of NCBI NO: 21592991 NR Description: unknown [Arabidopsis thaliana]
  misc_feature (1)..(341): Homolog of NCBI NO: 18424516 NR Description: putative protein
MFAAEIYMQRFLLSSPVRTLNPEEADWFYVPVYTTCDLTPNGLPLPFKSPRMMRSAIQLIASNWPYWNRTEGADHFFVVPHDFGACFHYQEEKAIGRGILPLLQRATLVQTFGQRNHVCLKEGSITVPPYAPPQKMQSHLIPEKTPRSIFVYFRGLFYDVGNDPEGGYYARGARAAVWENFKDNPLFDISTEHPTTYYEDMQRAIFCLCPLGWAPWSPRLVEAVIFGCIPVIIADDIVLPFADAIPWEDIGVFVDEKDVPYLDTILTSIPPEVILRKQRLLANPSMKQAMLFPQPAQPGDAFHQVLNGLARKLPHERSVYLRPGEKLLNWTAGPVADLKPW

SEQ ID NO: 22910 - protein, 334 aa, Arabidopsis thaliana
  peptide (1)..(334): Ceres Seq. ID no. 12334994
  misc_feature (1)..(274): Pfam Name: Exostosin family Pfam Description: Exostosin family
  misc_feature (1)..(334): Homolog of NCBI NO: 18642697 NR Description: Unknown protein [Oryza sativa]
  misc_feature (1)..(334): Homolog of NCBI NO: 37531708 NR Description: unknown protein [Oryza sativa (japonica
  misc_feature (1)..(334): Homolog of NCBI NO: 34907044 NR Description: hypothetical protein~similar to Arabidopsis
  misc_feature (1)..(334): Homolog of NCBI NO: 23821292 NR Description: pectin-glucuronyltransferase [Nicotiana
  misc_feature (1)..(334): Homolog of NCBI NO: 10176877 NR Description: gb|AAC80624.1~gene_id:MAC9.17~strong similarity
  misc_feature (1)..(334): Homolog of NCBI NO: 34907046 NR Description: contains EST D39982(S1682)~similar to Arabidopsis
  misc_feature (1)..(334): Homolog of NCBI NO: 34907048 NR Description: contains EST D24978(R2878)~similar to Arabidopsis
  misc_feature (1)..(334): Homolog of NCBI NO: 15223522 NR Description: unknown protein; protein id: At1g27440.1
  misc_feature (1)..(334): Homolog of NCBI NO: 21592991 NR Description: unknown [Arabidopsis thaliana]
  misc_feature (1)..(334): Homolog of NCBI NO: 18424516 NR Description: putative protein
MQRFLLSSPVRTLNPEEADWFYVPVYTTCDLTPNGLPLPFKSPRMMRSAIQLIASNWPYWNRTEGADHFFVVPHDFGACFHYQEEKAIGRGILPLLQRATLVQTFGQRNHVCLKEGSITVPPYAPPQKMQSHLIPEKTPRSIFVYFRGLFYDVGNDPEGGYYARGARAAVWENFKDNPLFDISTEHPTTYYEDMQRAIFCLCPLGWAPWSPRLVEAVIFGCIPVIIADDIVLPFADAIPWEDIGVFVDEKDVPYLDTILTSIPPEVILRKQRLLANPSMKQAMLFPQPAQPGDAFHQVLNGLARKLPHERSVYLRPGEKLLNWTAGPVADLKPW

SEQ ID NO: 22911 - DNA, 1246 bp, Arabidopsis thaliana
  misc_feature (1)..(1246): Ceres Seq. ID no. 12334716
  misc_feature: MA Experiment ID: 108435 Result: Down-regulated in Transcription
  misc_feature: MA Experiment 108435 PARAMETER Experiment Name: At_stm_Mutants_cDNA_P Parameter: Plant Line Value: wt Landsburg vs stm
  misc_feature: MA Experiment 108435 PARAMETER Experiment Name: At_stm_Mutants_cDNA_P Parameter: Tissue Value: Shoot Apical Meristem Region
  misc_feature: MA Experiment ID: 108461 Result: Up-regulated in Transcription
  misc_feature: MA Experiment 108461 PARAMETER Experiment Name: At_Germinating_Seeds_cDNA_P Parameter: Age (day) Value: 1 vs. 0
  misc_feature: MA Experiment 108461 PARAMETER Experiment Name: At_Germinating_Seeds_cDNA_P Parameter: Tissue Value: Germinating Seeds
  misc_feature: MA Experiment ID: 108462 Result: Up-regulated in Transcription
  misc_feature: MA Experiment 108462 PARAMETER Experiment Name: At_Germinating_Seeds_cDNA_P Parameter: Age (day) Value: 2 vs. 0
  misc_feature: MA Experiment 108462 PARAMETER Experiment Name: At_Germinating_Seeds_cDNA_P Parameter: Tissue Value: Germinating Seeds
  misc_feature: MA Experiment ID: 108488 Result: Up-regulated in Transcription
  misc_feature: MA Experiment ID: 108595 Result: Down-regulated in Transcription
  misc_feature: MA Experiment 108595 PARAMETER Experiment Name: At_Ler-pi_Ovule_cDNA_P Parameter: Plant Line Value: null
  misc_feature: MA Experiment ID: 20000069 Result: Down-regulated in Transcription
  misc_feature: MA Experiment 20000069 PARAMETER Experiment Name: At_100uM_ABA_Mutants_cDNA_P Parameter: Plant Line Value: CS23
  misc_feature: MA Experiment 20000069 PARAMETER Experiment Name: At_100uM_ABA_Mutants_cDNA_P Parameter: Timepoint (hr) Value: 6
  misc_feature: MA Experiment 20000069 PARAMETER Experiment Name: At_100uM_ABA_Mutants_cDNA_P Parameter: Tissue Value: Aerial
  misc_feature: MA Experiment 20000069 PARAMETER Experiment Name: At_100uM_ABA_Mutants_cDNA_P Parameter: Treatment Value: 100uM ABA vs. No Treatment
  misc_feature: MA Experiment ID: 20000086 Result: Down-regulated in Transcription
  misc_feature: MA Experiment 20000086 PARAMETER Experiment Name: At_100uM_ABA_Mutants_cDNA_P Parameter: Plant Line Value: CS22
  misc_feature: MA Experiment 20000086 PARAMETER Experiment Name: At_100uM_ABA_Mutants_cDNA_P Parameter: Timepoint (hr) Value: 6
  misc_feature: MA Experiment 20000086 PARAMETER Experiment Name: At_100uM_ABA_Mutants_cDNA_P Parameter: Tissue Value: Aerial
  misc_feature: MA Experiment 20000086 PARAMETER Experiment Name: At_100uM_ABA_Mutants_cDNA_P Parameter: Treatment Value: 100uM ABA vs. No Treatment
  misc_feature: MA Experiment ID: 20000087 Result: Down-regulated in Transcription
  misc_feature: MA Experiment 20000087 PARAMETER Experiment Name: At_100uM_ABA_Mutants_cDNA_P Parameter: Plant Line Value: WS
  misc_feature: MA Experiment 20000087 PARAMETER Experiment Name: At_100uM_ABA_Mutants_cDNA_P Parameter: Timepoint (hr) Value: 6
  misc_feature: MA Experiment 20000087 PARAMETER Experiment Name: At_100uM_ABA_Mutants_cDNA_P Parameter: Tissue Value: Aerial
  misc_feature: MA Experiment 20000087 PARAMETER Experiment Name: At_100uM_ABA_Mutants_cDNA_P Parameter: Treatment Value: 100uM ABA vs. No Treatment
  misc_feature: MA Experiment ID: 20000179 Result: Up-regulated in Transcription
  misc_feature: MA Experiment 20000179 PARAMETER Experiment Name: At_Germinating_Seeds_P Parameter: Age (hr) Value: 6 vs. 0
  misc_feature: MA Experiment 20000179 PARAMETER Experiment Name: At_Germinating_Seeds_P Parameter: Tissue Value: Germinating Seeds
  misc_feature: MA Experiment ID: 20000180 Result: Up-regulated in Transcription
  misc_feature: MA Experiment 20000180 PARAMETER Experiment Name: At_Germinating_Seeds_P Parameter: Age (hr) Value: 24 vs. 0
  misc_feature: MA Experiment 20000180 PARAMETER Experiment Name: At_Germinating_Seeds_P Parameter: Tissue Value: Germinating Seeds
  misc_feature: MA Experiment ID: 20000439 Result: Down-regulated in Transcription
  misc_feature: MA Experiment 20000439 PARAMETER Experiment Name: At_Roots__P Parameter: Age (day) Value: 14 vs. 21
  misc_feature: MA Experiment 20000439 PARAMETER Experiment Name: At_Roots__P Parameter: Organism Value: A. thaliana
  misc_feature: MA Experiment 20000439 PARAMETER Experiment Name: At_Roots__P Parameter: Tissue Value: Roots vs. Whole Plant
  misc_feature: MA Experiment ID: 20000495 Result: Down-regulated in Transcription
  misc_feature: MA Experiment 20000495 PARAMETER Experiment Name: At_Guard_Cells_P Parameter: Harvest Date Value: 8/2/2002
  misc_feature: MA Experiment 20000495 PARAMETER Experiment Name: At_Guard_Cells_P Parameter: Organism Value: A. thaliana
  misc_feature: MA Experiment 20000495 PARAMETER Experiment Name: At_Guard_Cells_P Parameter: Tissue Value: Guard Cells vs. Leaves
  misc_feature: MA Experiment ID: 20001248 Result: Down-regulated in Transcription
  misc_feature: MA Experiment 20001248 PARAMETER Experiment Name: At_Far-red-induction_P Parameter: Age (day) Value: 7
  misc_feature: MA Experiment 20001248 PARAMETER Experiment Name: At_Far-red-induction_P Parameter: Light Value: Far-red vs. White
  misc_feature: MA Experiment 20001248 PARAMETER Experiment Name: At_Far-red-induction_P Parameter: Organism Value: A. thaliana
  misc_feature: MA Experiment 20001248 PARAMETER Experiment Name: At_Far-red-induction_P Parameter: Plant Line Value: Columbia
  misc_feature: MA Experiment 20001248 PARAMETER Experiment Name: At_Far-red-induction_P Parameter: Timepoint (hr) Value: 4
  misc_feature: MA Experiment 20001248 PARAMETER Experiment Name: At_Far-red-induction_P Parameter: Tissue Value: Whole Plant
  misc_feature: MA Experiment ID: 20001450 Result: Down-regulated in Transcription
  misc_feature: MA Experiment 20001450 PARAMETER Experiment Name: At_Far-red-induction_P Parameter: Age (day) Value: 7
  misc_feature: MA Experiment 20001450 PARAMETER Experiment Name: At_Far-red-induction_P Parameter: Light Value: Far-red vs. White
  misc_feature: MA Experiment 20001450 PARAMETER Experiment Name: At_Far-red-induction_P Parameter: Organism Value: A. thaliana
  misc_feature: MA Experiment 20001450 PARAMETER Experiment Name: At_Far-red-induction_P Parameter: Plant Line Value: Columbia
  misc_feature: MA Experiment 20001450 PARAMETER Experiment Name: At_Far-red-induction_P Parameter: Timepoint (hr) Value: 8
  misc_feature: MA Experiment 20001450 PARAMETER Experiment Name: At_Far-red-induction_P Parameter: Tissue Value: Whole Plant
  misc_feature: MA Experiment ID: 20001451 Result: Down-regulated in Transcription
  misc_feature: MA Experiment 20001451 PARAMETER Experiment Name: At_Far-red-induction_P Parameter: Age (day) Value: 7
  misc_feature: MA Experiment 20001451 PARAMETER Experiment Name: At_Far-red-induction_P Parameter: Light Value: Far-red vs. White
  misc_feature: MA Experiment 20001451 PARAMETER Experiment Name: At_Far-red-induction_P Parameter: Organism Value: A. thaliana
  misc_feature: MA Experiment 20001451 PARAMETER Experiment Name: At_Far-red-induction_P Parameter: Plant Line Value: Columbia
  misc_feature: MA Experiment 20001451 PARAMETER Experiment Name: At_Far-red-induction_P Parameter: Timepoint (hr) Value: 24
  misc_feature: MA Experiment 20001451 PARAMETER Experiment Name: At_Far-red-induction_P Parameter: Tissue Value: Whole Plant
gatccaaccagagccatcatcatccttccaatggctattacttgagaactcttctgattaaacatagcaacaacaacaactcttcttctcctctctttctcacttcaatttagcgatggctgcaactgcaatctcttctctttccttcccagctttgggtcaatcggacaagatctccaatttcgcatcttctcgtcctctcgcctccgcaattcgcatctgcacaaagttttctcgcctttctttgaattcgcgttccacttcgaaatctcttattcactgcatgtccaatgttaccgccgatgtgcctcctgtatcagagacaaagtcgaaattcctaaaagcttacaagcgacccatcccgagtatctacaacacggttttgcaggagctcattgtccagcagcatttgatgaggtataagaagacttatcgttatgatcctgtttttgcccttggatttgtcactgtatatgatcagctcatggaaggatatccgagtgatcaagaccgagatgccatttttaaggcttacattgaagccttgaatgaggatcctaagcaataccgaattgatgctcagaagatggaggaatgggcacgaagtcagacttctgcttcactagttgacttttcctctaaagaaggagatattgaagcagttcttaaggacattgcaggaagagctggtagtaaggaggggtttagttacagcaggttcttcgctgttgggctctttcgtttgcttgagcttgcaagtgctactgatccaactgtcttggacaagctttgtgcatccctaaatatcaacaagaaaagcgtggatcgggacctggatgtgtatcgtaacctgctttcaaagcttgtccaagccaatgaattgcttaaggagtatgtcgagagggagaagaagaagcaagaagaaagagcccaatctcagaaggctaacgaaacaatctccaagtgtctgggagatactctatataacccatctttcttggttgaacggaaatcttagaaaatcatttgtgacttctttttttgttttcttagcaacaactatgcccaagaacatatatatctcatttctaagaacatttcagacgtgtatatgtttgctttttttcctttcaattacatgagtttacataatgttgattcatgtagtattttatacattgatgaggttactgttgtgctgttactagtatatgacaagtttctttaagatttaggcactgtctcc

SEQ ID NO: 22912 - protein, 300 aa, Arabidopsis thaliana
  peptide (1)..(300): Ceres Seq. ID no. 12334717
  misc_feature (67)..(274): Homolog of NCBI NO: 16330615 NR Description: hypothetical protein [Synechocystis sp. PCC 6803]
  misc_feature (67)..(275): Homolog of NCBI NO: 37520969 NR Description: hypothetical protein glr1400 [Gloeobacter
  misc_feature (67)..(282): Homolog of NCBI NO: 22298677 NR Description: ORF_ID:tlr1134~hypothetical protein
  misc_feature (63)..(277): Homolog of NCBI NO: 23124166 NR Description: hypothetical protein [Nostoc punctiforme]
  misc_feature (67)..(273): Homolog of NCBI NO: 17228142 NR Description: hypothetical protein [Nostoc sp. PCC 7120]
  misc_feature (67)..(282): Homolog of NCBI NO: 23041708 NR Description: hypothetical protein [Trichodesmium erythraeum
  misc_feature (5)..(283): Homolog of NCBI NO: 29367385 NR Description: inositol phosphatase-like protein
  misc_feature (5)..(290): Homolog of NCBI NO: 33469614 NR Description: light-regulated chloroplast-localized protein
  misc_feature (1)..(300): Homolog of NCBI NO: 18399513 NR Description: expressed protein
  misc_feature (1)..(300): Homolog of NCBI NO: 21592994 NR Description: unknown [Arabidopsis thaliana]
MAATAISSLSFPALGQSDKISNFASSRPLASAIRICTKFSRLSLNSRSTSKSLIHCMSNVTADVPPVSETKSKFLKAYKRPIPSIYNTVLQELIVQQHLMRYKKTYRYDPVFALGFVTVYDQLMEGYPSDQDRDAIFKAYIEALNEDPKQYRIDAQKMEEWARSQTSASLVDFSSKEGDIEAVLKDIAGRAGSKEGFSYSRFFAVGLFRLLELASATDPTVLDKLCASLNINKKSVDRDLDVYRNLLSKLVQANELLKEYVEREKKKQEERAQSQKANETISKCLGDTLYNPSFLVERKS

SEQ ID NO: 22913 - protein, 244 aa, Arabidopsis thaliana
  peptide (1)..(244): Ceres Seq. ID no. 12334718
  misc_feature (11)..(218): Homolog of NCBI NO: 16330615 NR Description: hypothetical protein [Synechocystis sp. PCC 6803]
  misc_feature (11)..(219): Homolog of NCBI NO: 37520969 NR Description: hypothetical protein glr1400 [Gloeobacter
  misc_feature (11)..(226): Homolog of NCBI NO: 22298677 NR Description: ORF_ID:tlr1134~hypothetical protein
  misc_feature (7)..(221): Homolog of NCBI NO: 23124166 NR Description: hypothetical protein [Nostoc punctiforme]
  misc_feature (11)..(217): Homolog of NCBI NO: 17228142 NR Description: hypothetical protein [Nostoc sp. PCC 7120]
  misc_feature (11)..(226): Homolog of NCBI NO: 23041708 NR Description: hypothetical protein [Trichodesmium erythraeum
  misc_feature (1)..(227): Homolog of NCBI NO: 29367385 NR Description: inositol phosphatase-like protein
  misc_feature (1)..(234): Homolog of NCBI NO: 33469614 NR Description: light-regulated chloroplast-localized protein
  misc_feature (1)..(244): Homolog of NCBI NO: 18399513 NR Description: expressed protein
  misc_feature (1)..(244): Homolog of NCBI NO: 21592994 NR Description: unknown [Arabidopsis thaliana]
MSNVTADVPPVSETKSKFLKAYKRPIPSIYNTVLQELIVQQHLMRYKKTYRYDPVFALGFVTVYDQLMEGYPSDQDRDAIFKAYIEALNEDPKQYRIDAQKMEEWARSQTSASLVDFSSKEGDIEAVLKDIAGRAGSKEGFSYSRFFAVGLFRLLELASATDPTVLDKLCASLNINKKSVDRDLDVYRNLLSKLVQANELLKEYVEREKKKQEERAQSQKANETISKCLGDTLYNPSFLVERKS

SEQ ID NO: 22914 - protein, 201 aa, Arabidopsis thaliana
  peptide (1)..(201): Ceres Seq. ID no. 12334719
  misc_feature (1)..(175): Homolog of NCBI NO: 16330615 NR Description: hypothetical protein [Synechocystis sp. PCC 6803]
  misc_feature (1)..(176): Homolog of NCBI NO: 37520969 NR Description: hypothetical protein glr1400 [Gloeobacter
  misc_feature (1)..(183): Homolog of NCBI NO: 22298677 NR Description: ORF_ID:tlr1134~hypothetical protein
  misc_feature (1)..(178): Homolog of NCBI NO: 23124166 NR Description: hypothetical protein [Nostoc punctiforme]
  misc_feature (1)..(174): Homolog of NCBI NO: 17228142 NR Description: hypothetical protein [Nostoc sp. PCC 7120]
  misc_feature (1)..(183): Homolog of NCBI NO: 23041708 NR Description: hypothetical protein [Trichodesmium erythraeum
  misc_feature (1)..(184): Homolog of NCBI NO: 29367385 NR Description: inositol phosphatase-like protein
  misc_feature (1)..(191): Homolog of NCBI NO: 33469614 NR Description: light-regulated chloroplast-localized protein
  misc_feature (1)..(201): Homolog of NCBI NO: 18399513 NR Description: expressed protein
  misc_feature (1)..(201): Homolog of NCBI NO: 21592994 NR Description: unknown [Arabidopsis thaliana]
MRYKKTYRYDPVFALGFVTVYDQLMEGYPSDQDRDAIFKAYIEALNEDPKQYRIDAQKMEEWARSQTSASLVDFSSKEGDIEAVLKDIAGRAGSKEGFSYSRFFAVGLFRLLELASATDPTVLDKLCASLNINKKSVDRDLDVYRNLLSKLVQANELLKEYVEREKKKQEERAQSQKANETISKCLGDTLYNPSFLVERKS

SEQ ID NO: 22915 - DNA, 1277 bp, Arabidopsis thaliana
  misc_feature (1)..(1277): Ceres Seq. ID no. 12334866
  misc_feature: MA Experiment ID: 108464 Result: Down-regulated in Transcription
  misc_feature: MA Experiment 108464 PARAMETER Experiment Name: At_Germinating_Seeds_cDNA_P Parameter: Age (day) Value: 4 vs. 0
  misc_feature: MA Experiment 108464 PARAMETER Experiment Name: At_Germinating_Seeds_cDNA_P Parameter: Tissue Value: Germinating Seeds
  misc_feature: MA Experiment ID: 108569 Result: Up-regulated in Transcription
  misc_feature: MA Experiment 108569 PARAMETER Experiment Name: At_0.001%_MeJA__cDNA_P Parameter: Timepoint (hr) Value: 6
  misc_feature: MA Experiment 108569 PARAMETER Experiment Name: At_0.001%_MeJA__cDNA_P Parameter: Tissue Value: Aerial
  misc_feature: MA Experiment 108569 PARAMETER Experiment Name: At_0.001%_MeJA__cDNA_P Parameter: Treatment Value: 0.001% MeJA vs. No Treatment
  misc_feature: MA Experiment ID: 108573 Result: Up-regulated in Transcription
  misc_feature: MA Experiment 108573 PARAMETER Experiment Name: At_Drought_cDNA_P Parameter: Timepoint (hr) Value: 6
  misc_feature: MA Experiment 108573 PARAMETER Experiment Name: At_Drought_cDNA_P Parameter: Tissue Value: Aerial
  misc_feature: MA Experiment 108573 PARAMETER Experiment Name: At_Drought_cDNA_P Parameter: Treatment Value: Drought vs. No Drought
  misc_feature: MA Experiment ID: 108585 Result: Up-regulated in Transcription
  misc_feature: MA Experiment 108585 PARAMETER Experiment Name: At_5mM_NaNP_cDNA_P Parameter: Timepoint (hr) Value: 6
  misc_feature: MA Experiment 108585 PARAMETER Experiment Name: At_5mM_NaNP_cDNA_P Parameter: Tissue Value: Aerial
  misc_feature: MA Experiment 108585 PARAMETER Experiment Name: At_5mM_NaNP_cDNA_P Parameter: Treatment Value: null
  misc_feature: MA Experiment ID: 108595 Result: Down-regulated in Transcription
  misc_feature: MA Experiment 108595 PARAMETER Experiment Name: At_Ler-pi_Ovule_cDNA_P Parameter: Plant Line Value: null
atctgaaaccaatctgttcatatgatgaagaagtttctctcgttctcctccaacgcgtagaaaattctgacggcttaacgatgtggcgaagatctgttgtttctcgtttctcttcaagaatctctgtttcttcttcgttaccaaaccctagactgattccttggtcccgcgaattatgtgccgttaatagcttctcccagcctccggtctcgacggaatcaactgctaagttagggatcactggtgttagatctgatgccaatcgagtttttgccactgctactgccgccgctacagctacagctaccaccggtgagatttcgtctagagttgcggctttggctggattagggcatcactacgctcgttgttattgggagctttctaaagctaaacttagtatgcttgtggttgcaacttctggaactgggtatattctgggtacgggaaatgctgcaattagcttcccggggctttgttacacatgtgcaggaaccatgatgattgctgcatctgctaattccttgaatcagatttttgagataagcaatgattctaagatgaaaagaacgatgctaaggccattgccttcaggacgtattagtgttccacacgctgttgcatgggctactattgctggtgcttctggtgcttgtttgttggccagcaagactaatatgttggctgctggacttgcatctgccaatcttgtactttatgcgtttgtttatactccgttgaagcaacttcaccctatcaatacatgggttggcgctgttgttggtgctatcccacccttgcttgggtgggcggcagcgtctggtcagatttcatacaattcgatgattcttccagctgctctttacttttggcagatacctcattttatggcccttgcacatctctgccgcaatgattatgcagctggaggttacaagatgttgtcactctttgatccgtcagggaagagaatagcagcagtggctctaaggaactgcttttacatgatccctctcggtttcatcgcctatgactgggggttaacctcaagttggttttgcctcgaatcaacacttctcacactagcaatcgctgcaacagcattttcattctactctccatgataacctttaagcaagctattgaatttttggaaacagaaattaaaaaaaaaatctgaaaagttcttaagtttaatctttggttaataatgaagtggagaacgcatacaagtttatgtattttttctcatctccacataattgtattttttctcc

SEQ ID NO: 22916 - protein, 373 aa, Arabidopsis thaliana
  peptide (1)..(373): Ceres Seq. ID no. 12334867
  misc_feature (133)..(371): Pfam Name: UbiA prenyltransferase family Pfam Description: UbiA prenyltransferase family
  misc_feature (27)..(371): Homolog of NCBI NO: 18406556 NR Description: putative heme A:farnesyltransferase
  misc_feature (27)..(370): Homolog of NCBI NO: 34913400 NR Description: putative heme A farnesyltransferase homolog
  misc_feature (124)..(371): Homolog of NCBI NO: 19921064 NR Description: CG5037-PA [Drosophila melanogaster]
  misc_feature (126)..(371): Homolog of NCBI NO: 30584237 NR Description: Homo sapiens COX10 homolog, cytochrome c oxidase
  misc_feature (127)..(371): Homolog of NCBI NO: 30410008 NR Description: RIKEN cDNA 2410004F01 [Mus musculus]
  misc_feature (103)..(371): Homolog of NCBI NO: 31237553 NR Description: ENSANGP00000013941 [Anopheles gambiae]
  misc_feature (126)..(371): Homolog of NCBI NO: 20141419 NR Description: Protoheme IX farnesyltransferase, mitochondrial
  misc_feature (127)..(371): Homolog of NCBI NO: 17921982 NR Description: heme A:farnesyltransferase
  misc_feature (27)..(371): Homolog of NCBI NO: 25408912 NR Description: probable heme A farnesyltransferase
  misc_feature (1)..(371): Homolog of NCBI NO: 7485006 NR Description: heme A farnesyltransferase homolog F16B22.1 -
LKPICSYDEEVSLVLLQRVENSDGLTMWRRSVVSRFSSRISVSSSLPNPRLIPWSRELCAVNSFSQPPVSTESTAKLGITGVRSDANRVFATATAAATATATTGEISSRVAALAGLGHHYARCYWELSKAKLSMLVVATSGTGYILGTGNAAISFPGLCYTCAGTMMIAASANSLNQIFEISNDSKMKRTMLRPLPSGRISVPHAVAWATIAGASGACLLASKTNMLAAGLASANLVLYAFVYTPLKQLHPINTWVGAVVGAIPPLLGWAAASGQISYNSMILPAALYFWQIPHFMALAHLCRNDYAAGGYKMLSLFDPSGKRIAAVALRNCFYMIPLGFIAYDWGLTSSWFCLESTLLTLAIAATAFSFYSP

SEQ ID NO: 22917 - protein, 347 aa, Arabidopsis thaliana
  peptide (1)..(347): Ceres Seq. ID no. 12334868
  misc_feature (107)..(345): Pfam Name: UbiA prenyltransferase family Pfam Description: UbiA prenyltransferase family
  misc_feature (98)..(345): Homolog of NCBI NO: 19921064 NR Description: CG5037-PA [Drosophila melanogaster]
  misc_feature (101)..(345): Homolog of NCBI NO: 17921982 NR Description: heme A:farnesyltransferase
  misc_feature (100)..(345): Homolog of NCBI NO: 30584237 NR Description: Homo sapiens COX10 homolog, cytochrome c oxidase
  misc_feature (100)..(345): Homolog of NCBI NO: 20141419 NR Description: Protoheme IX farnesyltransferase, mitochondrial
  misc_feature (101)..(345): Homolog of NCBI NO: 30410008 NR Description: RIKEN cDNA 2410004F01 [Mus musculus]
  misc_feature (77)..(345): Homolog of NCBI NO: 31237553 NR Description: ENSANGP00000013941 [Anopheles gambiae]
  misc_feature (1)..(344): Homolog of NCBI NO: 34913400 NR Description: putative heme A farnesyltransferase homolog
  misc_feature (1)..(345): Homolog of NCBI NO: 25408912 NR Description: probable heme A farnesyltransferase
  misc_feature (1)..(345): Homolog of NCBI NO: 18406556 NR Description: putative heme A:farnesyltransferase
  misc_feature (1)..(345): Homolog of NCBI NO: 7485006 NR Description: heme A farnesyltransferase homolog F16B22.1 -
MWRRSVVSRFSSRISVSSSLPNPRLIPWSRELCAVNSFSQPPVSTESTAKLGITGVRSDANRVFATATAAATATATTGEISSRVAALAGLGHHYARCYWELSKAKLSMLVVATSGTGYILGTGNAAISFPGLCYTCAGTMMIAASANSLNQIFEISNDSKMKRTMLRPLPSGRISVPHAVAWATIAGASGACLLASKTNMLAAGLASANLVLYAFVYTPLKQLHPINTWVGAVVGAIPPLLGWAAASGQISYNSMILPAALYFWQIPHFMALAHLCRNDYAAGGYKMLSLFDPSGKRIAAVALRNCFYMIPLGFIAYDWGLTSSWFCLESTLLTLAIAATAFSFYSP

SEQ ID NO: 22918 - protein, 240 aa, Arabidopsis thaliana
  peptide (1)..(240): Ceres Seq. ID no. 12334869
  misc_feature (1)..(238): Pfam Name: UbiA prenyltransferase family Pfam Description: UbiA prenyltransferase family
  misc_feature (1)..(238): Homolog of NCBI NO: 19921064 NR Description: CG5037-PA [Drosophila melanogaster]
  misc_feature (1)..(238): Homolog of NCBI NO: 17921982 NR Description: heme A:farnesyltransferase
  misc_feature (1)..(238): Homolog of NCBI NO: 30584237 NR Description: Homo sapiens COX10 homolog, cytochrome c oxidase
  misc_feature (1)..(238): Homolog of NCBI NO: 20141419 NR Description: Protoheme IX farnesyltransferase, mitochondrial
  misc_feature (1)..(238): Homolog of NCBI NO: 30410008 NR Description: RIKEN cDNA 2410004F01 [Mus musculus]
  misc_feature (1)..(238): Homolog of NCBI NO: 31237553 NR Description: ENSANGP00000013941 [Anopheles gambiae]
  misc_feature (1)..(237): Homolog of NCBI NO: 34913400 NR Description: putative heme A farnesyltransferase homolog
  misc_feature (1)..(238): Homolog of NCBI NO: 25408912 NR Description: probable heme A farnesyltransferase
  misc_feature (1)..(238): Homolog of NCBI NO: 18406556 NR Description: putative heme A:farnesyltransferase
  misc_feature (1)..(238): Homolog of NCBI NO: 7485006 NR Description: heme A farnesyltransferase homolog F16B22.1 -
MLVVATSGTGYILGTGNAAISFPGLCYTCAGTMMIAASANSLNQIFEISNDSKMKRTMLRPLPSGRISVPHAVAWATIAGASGACLLASKTNMLAAGLASANLVLYAFVYTPLKQLHPINTWVGAVVGAIPPLLGWAAASGQISYNSMILPAALYFWQIPHFMALAHLCRNDYAAGGYKMLSLFDPSGKRIAAVALRNCFYMIPLGFIAYDWGLTSSWFCLESTLLTLAIAATAFSFYSP

SEQ ID NO: 22919 - DNA, 1205 bp, Arabidopsis thaliana
  misc_feature (1)..(1205): Ceres Seq. ID no. 12327635
  misc_feature: MA Experiment ID: 108433 Result: Down-regulated in Transcription
  misc_feature: MA Experiment 108433 PARAMETER Experiment Name: At_rhl_Mutant2_cDNA_P Parameter: Age (day) Value: 7
  misc_feature: MA Experiment 108433 PARAMETER Experiment Name: At_rhl_Mutant2_cDNA_P Parameter: Organism Value: A. thaliana
  misc_feature: MA Experiment 108433 PARAMETER Experiment Name: At_rhl_Mutant2_cDNA_P Parameter: Plant Line Value: rhl Mutant vs. wt landsburg
  misc_feature: MA Experiment 108433 PARAMETER Experiment Name: At_rhl_Mutant2_cDNA_P Parameter: Tissue Value: Roots
  misc_feature: MA Experiment ID: 108461 Result: Up-regulated in Transcription
  misc_feature: MA Experiment 108461 PARAMETER Experiment Name: At_Germinating_Seeds_cDNA_P Parameter: Age (day) Value: 1 vs. 0
  misc_feature: MA Experiment 108461 PARAMETER Experiment Name: At_Germinating_Seeds_cDNA_P Parameter: Tissue Value: Germinating Seeds
  misc_feature: MA Experiment ID: 108462 Result: Up-regulated in Transcription
  misc_feature: MA Experiment 108462 PARAMETER Experiment Name: At_Germinating_Seeds_cDNA_P Parameter: Age (day) Value: 2 vs. 0
  misc_feature: MA Experiment 108462 PARAMETER Experiment Name: At_Germinating_Seeds_cDNA_P Parameter: Tissue Value: Germinating Seeds
  misc_feature: MA Experiment ID: 108463 Result: Up-regulated in Transcription
  misc_feature: MA Experiment 108463 PARAMETER Experiment Name: At_Germinating_Seeds_cDNA_P Parameter: Age (day) Value: 3 vs. 0
  misc_feature: MA Experiment 108463 PARAMETER Experiment Name: At_Germinating_Seeds_cDNA_P Parameter: Tissue Value: Germinating Seeds
  misc_feature: MA Experiment ID: 108464 Result: Up-regulated in Transcription
  misc_feature: MA Experiment 108464 PARAMETER Experiment Name: At_Germinating_Seeds_cDNA_P Parameter: Age (day) Value: 4 vs. 0
  misc_feature: MA Experiment 108464 PARAMETER Experiment Name: At_Germinating_Seeds_cDNA_P Parameter: Tissue Value: Germinating Seeds
  misc_feature: MA Experiment ID: 108594 Result: Down-regulated in Transcription
  misc_feature: MA Experiment 108594 PARAMETER Experiment Name: At_Ler-rhl_Root_cDNA_P Parameter: Plant Line Value: null
  misc_feature: MA Experiment ID: 20000185 Result: Up-regulated in Transcription
  misc_feature: MA Experiment 20000185 PARAMETER Experiment Name: At_Roots__P Parameter: Age (day) Value: 7 vs. 21
  misc_feature: MA Experiment 20000185 PARAMETER Experiment Name: At_Roots__P Parameter: Organism Value: A. thaliana
  misc_feature: MA Experiment 20000185 PARAMETER Experiment Name: At_Roots__P Parameter: Tissue Value: Roots vs. Whole Plant
  misc_feature: MA Experiment ID: 20000227 Result: Up-regulated in Transcription
  misc_feature: MA Experiment 20000227 PARAMETER Experiment Name: At_Root-Tips-vs-Tops_P Parameter: Tissue Value: Root Tips vs. Root Tops
  misc_feature: MA Experiment ID: 20000439 Result: Up-regulated in Transcription
  misc_feature: MA Experiment 20000439 PARAMETER Experiment Name: At_Roots__P Parameter: Age (day) Value: 14 vs. 21
  misc_feature: MA Experiment 20000439 PARAMETER Experiment Name: At_Roots__P Parameter: Organism Value: A. thaliana
  misc_feature: MA Experiment 20000439 PARAMETER Experiment Name: At_Roots__P Parameter: Tissue Value: Roots vs. Whole Plant
  misc_feature: MA Experiment ID: 20000460 Result: Down-regulated in Transcription
  misc_feature: MA Experiment 20000460 PARAMETER Experiment Name: At_10percent_PEG_P Parameter: Age (day) Value: 12
  misc_feature: MA Experiment 20000460 PARAMETER Experiment Name: At_10percent_PEG_P Parameter: Organism Value: A. thaliana
  misc_feature: MA Experiment 20000460 PARAMETER Experiment Name: At_10percent_PEG_P Parameter: Plant Line Value: WS
  misc_feature: MA Experiment 20000460 PARAMETER Experiment Name: At_10percent_PEG_P Parameter: Timepoint (day) Value: 12
  misc_feature: MA Experiment 20000460 PARAMETER Experiment Name: At_10percent_PEG_P Parameter: Tissue Value: Whole Plant
  misc_feature: MA Experiment 20000460 PARAMETER Experiment Name: At_10percent_PEG_P Parameter: Treatment Value: 10percent PEG vs. No Treatment
  misc_feature: MA Experiment ID: 20000527 Result: Down-regulated in Transcription
  misc_feature: MA Experiment 20000527 PARAMETER Experiment Name: At_10percent_PEG_P Parameter: Age (day) Value: 20
  misc_feature: MA Experiment 20000527 PARAMETER Experiment Name: At_10percent_PEG_P Parameter: Organism Value: A. thaliana
  misc_feature: MA Experiment 20000527 PARAMETER Experiment Name: At_10percent_PEG_P Parameter: Plant Line Value: WS
  misc_feature: MA Experiment 20000527 PARAMETER Experiment Name: At_10percent_PEG_P Parameter: Timepoint (day) Value: 20
  misc_feature: MA Experiment 20000527 PARAMETER Experiment Name: At_10percent_PEG_P Parameter: Tissue Value: Whole Plant
  misc_feature: MA Experiment 20000527 PARAMETER Experiment Name: At_10percent_PEG_P Parameter: Treatment Value: 10percent PEG vs. No Treatment
  misc_feature: MA Experiment ID: 20001451 Result: Up-regulated in Transcription
  misc_feature: MA Experiment 20001451 PARAMETER Experiment Name: At_Far-red-induction_P Parameter: Age (day) Value: 7
  misc_feature: MA Experiment 20001451 PARAMETER Experiment Name: At_Far-red-induction_P Parameter: Light Value: Far-red vs. White
  misc_feature: MA Experiment 20001451 PARAMETER Experiment Name: At_Far-red-induction_P Parameter: Organism Value: A. thaliana
  misc_feature: MA Experiment 20001451 PARAMETER Experiment Name: At_Far-red-induction_P Parameter: Plant Line Value: Columbia
  misc_feature: MA Experiment 20001451 PARAMETER Experiment Name: At_Far-red-induction_P Parameter: Timepoint (hr) Value: 24
  misc_feature: MA Experiment 20001451 PARAMETER Experiment Name: At_Far-red-induction_P Parameter: Tissue Value: Whole Plant
  misc_feature: MA Experiment ID: 20001774 Result: Down-regulated in Transcription
  misc_feature: MA Experiment 20001774 PARAMETER Experiment Name: At_Far-red-enriched-adult_P Parameter: Age (day) Value: 31
  misc_feature: MA Experiment 20001774 PARAMETER Experiment Name: At_Far-red-enriched-adult_P Parameter: Light Value: Far-red enriched vs. White
  misc_feature: MA Experiment 20001774 PARAMETER Experiment Name: At_Far-red-enriched-adult_P Parameter: Organism Value: A. thaliana
  misc_feature: MA Experiment 20001774 PARAMETER Experiment Name: At_Far-red-enriched-adult_P Parameter: Plant Line Value: Columbia
  misc_feature: MA Experiment 20001774 PARAMETER Experiment Name: At_Far-red-enriched-adult_P Parameter: Timepoint (hr) Value: 72
  misc_feature: MA Experiment 20001774 PARAMETER Experiment Name: At_Far-red-enriched-adult_P Parameter: Tissue Value: Aerial
acaacactcgacacagaagcaaaaacaaaaatgggtgagaaagatattccaaggaacttgaaggaagaagaagaaaaccaaagtgaagattccaaaagtttgatctcttcacttccttcagacatagattgctctgggaccaagttgtacaagtatcaaggatgttggtacgataaagacattctccaagcaatcctcaaattcaacaaaatctttcagccacaagaaaccgatataattgttgcttctttccccaaatcaggtacgacttggctcaaggcactcacattcgcactcgctcaaagatcaaaacatacttcagaaaatcatcctctgctaactcataatcctcatgagctagtgccgtacctcgagctcgatctttatctcaaaagctcgaaaccggatatgtccaagttaccatcatcatctccgagattgttctcaacccacatgtctttcgatgcgcttaaagtaccaatgaaggagactccttgcaagatagtgtatgtgtgcaggaacgtaaaagacgtgttggtatcactttggtgtttcgaaaactccattagtggagaaaacaatttaagtctcgaggctttgttcgagtctttatgtagcggagttaacttatgcggtcccttgtgggaaaatgtgttaggctattggagaggaagcttggaagatcctaagcatgtgcttttcttgaggtacgaggagttgaagacggagcctcgtgtgcaaatcaagagacttgcagagttcttagattttccattcacaaaggaagaagaagatagtggaggtgtagacaagatcttggaactttgttctctaagaaaccttagcggtttggagatcaacaaaacaggaagcttgtcggaaggagtaagtttcaagagttttttccgtaaaggggaagttggtgattggaagagttatatgactcctgaaatggaaaacaaaatcgacatgattgttgaggagaaacttcaaggctctggtttgatattgtagagttcatatctctatgtatatgtgaacaggtttaatctcaaacctaataatgctggtttgttcttttcttgtatgcaatgtaataaaagttactttgatgtaaggttaagagtttaagattctgagcgatgtgtcgtttttgtttcctttgataatcaataaagctagcggcttttcttcttcgccaaggc

SEQ ID NO: 22920 - protein, 337 aa, Arabidopsis thaliana
  peptide (1)..(337): Ceres Seq. ID no. 12327636
  misc_feature (76)..(334): Pfam Name: Sulfotransferase domain Pfam Description: Sulfotransferase domain
  misc_feature (10)..(335): Homolog of NCBI NO: 9759557 NR Description: steroid sulfotransferase-like protein
  misc_feature (16)..(336): Homolog of NCBI NO: 25288806 NR Description: probable steroid sulfotransferase
  misc_feature (16)..(336): Homolog of NCBI NO: 18395604 NR Description: putative steroid sulfotransferase
  misc_feature (11)..(335): Homolog of NCBI NO: 15230603 NR Description: sulfotransferase-like protein; protein id:
  misc_feature (11)..(335): Homolog of NCBI NO: 15217849 NR Description: steroid sulfotransferase, putative; protein id:
  misc_feature (19)..(335): Homolog of NCBI NO: 15230602 NR Description: sulfotransferase-like protein; protein id:
  misc_feature (12)..(335): Homolog of NCBI NO: 15239947 NR Description: steroid sulfotransferase-like; protein id:
  misc_feature (11)..(335): Homolog of NCBI NO: 15226028 NR Description: putative steroid sulfotransferase; protein id:
  misc_feature (11)..(337): Homolog of NCBI NO: 21553545 NR Description: steroid sulfotransferase, putative [Arabidopsis
  misc_feature (11)..(337): Homolog of NCBI NO: 15222843 NR Description: steroid sulfotransferase, putative
TTLDTEAKTKMGEKDIPRNLKEEEENQSEDSKSLISSLPSDIDCSGTKLYKYQGCWYDKDILQAILKFNKIFQPQETDIIVASFPKSGTTWLKALTFALAQRSKHTSENHPLLTHNPHELVPYLELDLYLKSSKPDMSKLPSSSPRLFSTHMSFDALKVPMKETPCKIVYVCRNVKDVLVSLWCFENSISGENNLSLEALFESLCSGVNLCGPLWENVLGYWRGSLEDPKHVLFLRYEELKTEPRVQIKRLAEFLDFPFTKEEEDSGGVDKILELCSLRNLSGLEINKTGSLSEGVSFKSFFRKGEVGDWKSYMTPEMENKIDMIVEEKLQGSGLIL

SEQ ID NO: 22921 - protein, 327 aa, Arabidopsis thaliana
  peptide (1)..(327): Ceres Seq. ID no. 12327637
  misc_feature (66)..(324): Pfam Name: Sulfotransferase domain Pfam Description: Sulfotransferase domain
  misc_feature (1)..(325): Homolog of NCBI NO: 9759557 NR Description: steroid sulfotransferase-like protein
  misc_feature (6)..(326): Homolog of NCBI NO: 25288806 NR Description: probable steroid sulfotransferase
  misc_feature (6)..(326): Homolog of NCBI NO: 18395604 NR Description: putative steroid sulfotransferase
  misc_feature (1)..(325): Homolog of NCBI NO: 15230603 NR Description: sulfotransferase-like protein; protein id:
  misc_feature (1)..(325): Homolog of NCBI NO: 15217849 NR Description: steroid sulfotransferase, putative; protein id:
  misc_feature (9)..(325): Homolog of NCBI NO: 15230602 NR Description: sulfotransferase-like protein; protein id:
  misc_feature (2)..(325): Homolog of NCBI NO: 15239947 NR Description: steroid sulfotransferase-like; protein id:
  misc_feature (1)..(325): Homolog of NCBI NO: 15226028 NR Description: putative steroid sulfotransferase; protein id:
  misc_feature (1)..(327): Homolog of NCBI NO: 21553545 NR Description: steroid sulfotransferase, putative [Arabidopsis
  misc_feature (1)..(327): Homolog of NCBI NO: 15222843 NR Description: steroid sulfotransferase, putative
MGEKDIPRNLKEEEENQSEDSKSLISSLPSDIDCSGTKLYKYQGCWYDKDILQAILKFNKIFQPQETDIIVASFPKSGTTWLKALTFALAQRSKHTSENHPLLTHNPHELVPYLELDLYLKSSKPDMSKLPSSSPRLFSTHMSFDALKVPMKETPCKIVYVCRNVKDVLVSLWCFENSISGENNLSLEALFESLCSGVNLCGPLWENVLGYWRGSLEDPKHVLFLRYEELKTEPRVQIKRLAEFLDFPFTKEEEDSGGVDKILELCSLRNLSGLEINKTGSLSEGVSFKSFFRKGEVGDWKSYMTPEMENKIDMIVEEKLQGSGLIL

SEQ ID NO: 22922 - protein, 201 aa, Arabidopsis thaliana
  peptide (1)..(201): Ceres Seq. ID no. 12327638
  misc_feature (1)..(198): Pfam Name: Sulfotransferase domain Pfam Description: Sulfotransferase domain
  misc_feature (1)..(199): Homolog of NCBI NO: 9759557 NR Description: steroid sulfotransferase-like protein
  misc_feature (1)..(200): Homolog of NCBI NO: 25288806 NR Description: probable steroid sulfotransferase
  misc_feature (1)..(200): Homolog of NCBI NO: 18395604 NR Description: putative steroid sulfotransferase
  misc_feature (1)..(199): Homolog of NCBI NO: 15230603 NR Description: sulfotransferase-like protein; protein id:
  misc_feature (1)..(199): Homolog of NCBI NO: 15217849 NR Description: steroid sulfotransferase, putative; protein id:
  misc_feature (1)..(199): Homolog of NCBI NO: 15230602 NR Description: sulfotransferase-like protein; protein id:
  misc_feature (1)..(199): Homolog of NCBI NO: 15239947 NR Description: steroid sulfotransferase-like; protein id:
  misc_feature (1)..(199): Homolog of NCBI NO: 15226028 NR Description: putative steroid sulfotransferase; protein id:
  misc_feature (1)..(201): Homolog of NCBI NO: 21553545 NR Description: steroid sulfotransferase, putative [Arabidopsis
  misc_feature (1)..(201): Homolog of NCBI NO: 15222843 NR Description: steroid sulfotransferase, putative
MSKLPSSSPRLFSTHMSFDALKVPMKETPCKIVYVCRNVKDVLVSLWCFENSISGENNLSLEALFESLCSGVNLCGPLWENVLGYWRGSLEDPKHVLFLRYEELKTEPRVQIKRLAEFLDFPFTKEEEDSGGVDKILELCSLRNLSGLEINKTGSLSEGVSFKSFFRKGEVGDWKSYMTPEMENKIDMIVEEKLQGSGLIL

SEQ ID NO: 22923 - DNA, 1041 bp, Arabidopsis thaliana
  misc_feature (1)..(1041): Ceres Seq. ID no. 12370421
  misc_feature: MA Experiment ID: 108434 Result: Down-regulated in Transcription
  misc_feature: MA Experiment 108434 PARAMETER Experiment Name: At_Root_Tips_cDNA_P Parameter: Tissue Value: Root Tips
  misc_feature: MA Experiment ID: 108461 Result: Up-regulated in Transcription
  misc_feature: MA Experiment 108461 PARAMETER Experiment Name: At_Germinating_Seeds_cDNA_P Parameter: Age (day) Value: 1 vs. 0
  misc_feature: MA Experiment 108461 PARAMETER Experiment Name: At_Germinating_Seeds_cDNA_P Parameter: Tissue Value: Germinating Seeds
  misc_feature: MA Experiment ID: 108561 Result: Up-regulated in Transcription
  misc_feature: MA Experiment 108561 PARAMETER Experiment Name: At_100uM_ABA_cDNA_P Parameter: Timepoint (hr) Value: 6
  misc_feature: MA Experiment 108561 PARAMETER Experiment Name: At_100uM_ABA_cDNA_P Parameter: Tissue Value: Aerial
  misc_feature: MA Experiment 108561 PARAMETER Experiment Name: At_100uM_ABA_cDNA_P Parameter: Treatment Value: 100uM ABA vs. No Treatment
  misc_feature: MA Experiment ID: 108579 Result: Down-regulated in Transcription
  misc_feature: MA Experiment 108579 PARAMETER Experiment Name: At_4deg_Cold_cDNA_P Parameter: Temperature (deg C) Value: 4 vs. 22
  misc_feature: MA Experiment 108579 PARAMETER Experiment Name: At_4deg_Cold_cDNA_P Parameter: Timepoint (hr) Value: 6
  misc_feature: MA Experiment 108579 PARAMETER Experiment Name: At_4deg_Cold_cDNA_P Parameter: Tissue Value: Aerial
  misc_feature: MA Experiment ID: 108605 Result: Up-regulated in Transcription
  misc_feature: MA Experiment 108605 PARAMETER Experiment Name: At_100uM_ABA_cDNA_P Parameter: Timepoint (hr) Value: 6
  misc_feature: MA Experiment 108605 PARAMETER Experiment Name: At_100uM_ABA_cDNA_P Parameter: Tissue Value: Aerial
  misc_feature: MA Experiment 108605 PARAMETER Experiment Name: At_100uM_ABA_cDNA_P Parameter: Treatment Value: 100uM ABA vs. No Treatment
  misc_feature: MA Experiment ID: 108607 Result: Up-regulated in Transcription
  misc_feature: MA Experiment 108607 PARAMETER Experiment Name: At_100uM_ABA_cDNA_P Parameter: Timepoint (hr) Value: 4
  misc_feature: MA Experiment 108607 PARAMETER Experiment Name: At_100uM_ABA_cDNA_P Parameter: Tissue Value: Aerial
  misc_feature: MA Experiment 108607 PARAMETER Experiment Name: At_100uM_ABA_cDNA_P Parameter: Treatment Value: 100uM ABA vs. No Treatment
  misc_feature: MA Experiment ID: 20000069 Result: Up-regulated in Transcription
  misc_feature: MA Experiment 20000069 PARAMETER Experiment Name: At_100uM_ABA_Mutants_cDNA_P Parameter: Plant Line Value: CS23
  misc_feature: MA Experiment 20000069 PARAMETER Experiment Name: At_100uM_ABA_Mutants_cDNA_P Parameter: Timepoint (hr) Value: 6
  misc_feature: MA Experiment 20000069 PARAMETER Experiment Name: At_100uM_ABA_Mutants_cDNA_P Parameter: Tissue Value: Aerial
  misc_feature: MA Experiment 20000069 PARAMETER Experiment Name: At_100uM_ABA_Mutants_cDNA_P Parameter: Treatment Value: 100uM ABA vs. No Treatment
  misc_feature: MA Experiment ID: 20000070 Result: Up-regulated in Transcription
  misc_feature: MA Experiment 20000070 PARAMETER Experiment Name: At_100uM_ABA_Mutants_cDNA_P Parameter: Plant Line Value: CS24
  misc_feature: MA Experiment 20000070 PARAMETER Experiment Name: At_100uM_ABA_Mutants_cDNA_P Parameter: Timepoint (hr) Value: 6
  misc_feature: MA Experiment 20000070 PARAMETER Experiment Name: At_100uM_ABA_Mutants_cDNA_P Parameter: Tissue Value: Aerial
  misc_feature: MA Experiment 20000070 PARAMETER Experiment Name: At_100uM_ABA_Mutants_cDNA_P Parameter: Treatment Value: 100uM ABA vs. No Treatment
  misc_feature: MA Experiment ID: 20000071 Result: Up-regulated in Transcription
  misc_feature: MA Experiment 20000071 PARAMETER Experiment Name: At_100uM_ABA_Mutants_cDNA_P Parameter: Plant Line Value: CS8104
  misc_feature: MA Experiment 20000071 PARAMETER Experiment Name: At_100uM_ABA_Mutants_cDNA_P Parameter: Timepoint (hr) Value: 6
  misc_feature: MA Experiment 20000071 PARAMETER Experiment Name: At_100uM_ABA_Mutants_cDNA_P Parameter: Tissue Value: Aerial
  misc_feature: MA Experiment 20000071 PARAMETER Experiment Name: At_100uM_ABA_Mutants_cDNA_P Parameter: Treatment Value: 100uM ABA vs. No Treatment
  misc_feature: MA Experiment ID: 20000087 Result: Up-regulated in Transcription
  misc_feature: MA Experiment 20000087 PARAMETER Experiment Name: At_100uM_ABA_Mutants_cDNA_P Parameter: Plant Line Value: WS
  misc_feature: MA Experiment 20000087 PARAMETER Experiment Name: At_100uM_ABA_Mutants_cDNA_P Parameter: Timepoint (hr) Value: 6
  misc_feature: MA Experiment 20000087 PARAMETER Experiment Name: At_100uM_ABA_Mutants_cDNA_P Parameter: Tissue Value: Aerial
  misc_feature: MA Experiment 20000087 PARAMETER Experiment Name: At_100uM_ABA_Mutants_cDNA_P Parameter: Treatment Value: 100uM ABA vs. No Treatment
  misc_feature: MA Experiment ID: 20000088 Result: Up-regulated in Transcription
  misc_feature: MA Experiment 20000088 PARAMETER Experiment Name: At_100uM_ABA_Mutants_cDNA_P Parameter: Plant Line Value: Landsberg
  misc_feature: MA Experiment 20000088 PARAMETER Experiment Name: At_100uM_ABA_Mutants_cDNA_P Parameter: Timepoint (hr) Value: 6
  misc_feature: MA Experiment 20000088 PARAMETER Experiment Name: At_100uM_ABA_Mutants_cDNA_P Parameter: Tissue Value: Aerial
  misc_feature: MA Experiment 20000088 PARAMETER Experiment Name: At_100uM_ABA_Mutants_cDNA_P Parameter: Treatment Value: 100uM ABA vs. No Treatment
  misc_feature: MA Experiment ID: 20000111 Result: Down-regulated in Transcription
  misc_feature: MA Experiment 20000111 PARAMETER Experiment Name: At_42deg_Heat_cDNA_P Parameter: Temperature (deg C) Value: 42 vs. 22
  misc_feature: MA Experiment 20000111 PARAMETER Experiment Name: At_42deg_Heat_cDNA_P Parameter: Timepoint (hr) Value: 6
  misc_feature: MA Experiment 20000111 PARAMETER Experiment Name: At_42deg_Heat_cDNA_P Parameter: Tissue Value: Aerial
  misc_feature: MA Experiment ID: 20000113 Result: Down-regulated in Transcription
  misc_feature: MA Experiment 20000113 PARAMETER Experiment Name: At_42deg_Heat_cDNA_P Parameter: Temperature (deg C) Value: 42 vs. 22
  misc_feature: MA Experiment 20000113 PARAMETER Experiment Name: At_42deg_Heat_cDNA_P Parameter: Timepoint (hr) Value: 8
  misc_feature: MA Experiment 20000113 PARAMETER Experiment Name: At_42deg_Heat_cDNA_P Parameter: Tissue Value: Aerial
  misc_feature: MA Experiment ID: 20000117 Result: Up-regulated in Transcription
  misc_feature: MA Experiment 20000117 PARAMETER Experiment Name: At_100uM_ABA_Mutants_cDNA_P Parameter: Plant Line Value: Columbia
  misc_feature: MA Experiment 20000117 PARAMETER Experiment Name: At_100uM_ABA_Mutants_cDNA_P Parameter: Timepoint (hr) Value: 6
  misc_feature: MA Experiment 20000117 PARAMETER Experiment Name: At_100uM_ABA_Mutants_cDNA_P Parameter: Tissue Value: Aerial
  misc_feature: MA Experiment 20000117 PARAMETER Experiment Name: At_100uM_ABA_Mutants_cDNA_P Parameter: Treatment Value: 100uM ABA vs. No Treatment
  misc_feature: MA Experiment ID: 20000169 Result: Up-regulated in Transcription
  misc_feature: MA Experiment 20000169 PARAMETER Experiment Name: At_100uM_ABA_P Parameter: Age (day) Value: 14
  misc_feature: MA Experiment 20000169 PARAMETER Experiment Name: At_100uM_ABA_P Parameter: Organism Value: A. thaliana
  misc_feature: MA Experiment 20000169 PARAMETER Experiment Name: At_100uM_ABA_P Parameter: Plant Line Value: WS
  misc_feature: MA Experiment 20000169 PARAMETER Experiment Name: At_100uM_ABA_P Parameter: Timepoint (hr) Value: 6
  misc_feature: MA Experiment 20000169 PARAMETER Experiment Name: At_100uM_ABA_P Parameter: Tissue Value: Aerial
  misc_feature: MA Experiment 20000169 PARAMETER Experiment Name: At_100uM_ABA_P Parameter: Treatment Value: 100uM ABA vs. No Treatment
  misc_feature: MA Experiment ID: 20000173 Result: Down-regulated in Transcription
  misc_feature: MA Experiment 20000173 PARAMETER Experiment Name: At_42deg_Heat_P Parameter: Age (day) Value: 14
  misc_feature: MA Experiment 20000173 PARAMETER Experiment Name: At_42deg_Heat_P Parameter: Organism Value: A. thaliana
  misc_feature: MA Experiment 20000173 PARAMETER Experiment Name: At_42deg_Heat_P Parameter: Plant Line Value: WS
  misc_feature: MA Experiment 20000173 PARAMETER Experiment Name: At_42deg_Heat_P Parameter: Temperature (deg C) Value: 42 vs. 22
  misc_feature: MA Experiment 20000173 PARAMETER Experiment Name: At_42deg_Heat_P Parameter: Timepoint (hr) Value: 6
  misc_feature: MA Experiment 20000173 PARAMETER Experiment Name: At_42deg_Heat_P Parameter: Tissue Value: Aerial
  misc_feature: MA Experiment ID: 20000179 Result: Up-regulated in Transcription
  misc_feature: MA Experiment 20000179 PARAMETER Experiment Name: At_Germinating_Seeds_P Parameter: Age (hr) Value: 6 vs. 0
  misc_feature: MA Experiment 20000179 PARAMETER Experiment Name: At_Germinating_Seeds_P Parameter: Tissue Value: Germinating Seeds
  misc_feature: MA Experiment ID: 20000180 Result: Up-regulated in Transcription
  misc_feature: MA Experiment 20000180 PARAMETER Experiment Name: At_Germinating_Seeds_P Parameter: Age (hr) Value: 24 vs. 0
  misc_feature: MA Experiment 20000180 PARAMETER Experiment Name: At_Germinating_Seeds_P Parameter: Tissue Value: Germinating Seeds
  misc_feature: MA Experiment ID: 20000184 Result: Down-regulated in Transcription
  misc_feature: MA Experiment 20000184 PARAMETER Experiment Name: At_Shoots__P Parameter: Age (day) Value: 7
  misc_feature: MA Experiment 20000184 PARAMETER Experiment Name: At_Shoots__P Parameter: Tissue Value: Shoots vs. Whole Plant
  misc_feature: MA Experiment ID: 20000185 Result: Up-regulated in Transcription
  misc_feature: MA Experiment 20000185 PARAMETER Experiment Name: At_Roots__P Parameter: Age (day) Value: 7 vs. 21
  misc_feature: MA Experiment 20000185 PARAMETER Experiment Name: At_Roots__P Parameter: Organism Value: A. thaliana
  misc_feature: MA Experiment 20000185 PARAMETER Experiment Name: At_Roots__P Parameter: Tissue Value: Roots vs. Whole Plant
  misc_feature: MA Experiment ID: 20000224 Result: Down-regulated in Transcription
  misc_feature: MA Experiment ID: 20000227 Result: Down-regulated in Transcription
  misc_feature: MA Experiment 20000227 PARAMETER Experiment Name: At_Root-Tips-vs-Tops_P Parameter: Tissue Value: Root Tips vs. Root Tops
  misc_feature: MA Experiment ID: 20000453 Result: Up-regulated in Transcription
  misc_feature: MA Experiment 20000453 PARAMETER Experiment Name: At_100uM_ABA_P Parameter: Age (day) Value: 15
  misc_feature: MA Experiment 20000453 PARAMETER Experiment Name: At_100uM_ABA_P Parameter: Organism Value: A. thaliana
  misc_feature: MA Experiment 20000453 PARAMETER Experiment Name: At_100uM_ABA_P Parameter: Plant Line Value: WS
  misc_feature: MA Experiment 20000453 PARAMETER Experiment Name: At_100uM_ABA_P Parameter: Timepoint (hr) Value: 24
  misc_feature: MA Experiment 20000453 PARAMETER Experiment Name: At_100uM_ABA_P Parameter: Tissue Value: Aerial
  misc_feature: MA Experiment 20000453 PARAMETER Experiment Name: At_100uM_ABA_P Parameter: Treatment Value: 100uM ABA vs. No Treatment
  misc_feature: MA Experiment ID: 20000794 Result: Up-regulated in Transcription
  misc_feature: MA Experiment 20000794 PARAMETER Experiment Name: At_Petals_P Parameter: Age (day) Value: 23-25 days
  misc_feature: MA Experiment 20000794 PARAMETER Experiment Name: At_Petals_P Parameter: Plant Line Value: WS
  misc_feature: MA Experiment 20000794 PARAMETER Experiment Name: At_Petals_P Parameter: Tissue Value: Petals vs. Whole plant
  misc_feature: MA Experiment ID: 20001451 Result: Up-regulated in Transcription
  misc_feature: MA Experiment 20001451 PARAMETER Experiment Name: At_Far-red-induction_P Parameter: Age (day) Value: 7
  misc_feature: MA Experiment 20001451 PARAMETER Experiment Name: At_Far-red-induction_P Parameter: Light Value: Far-red vs. White
  misc_feature: MA Experiment 20001451 PARAMETER Experiment Name: At_Far-red-induction_P Parameter: Organism Value: A. thaliana
  misc_feature: MA Experiment 20001451 PARAMETER Experiment Name: At_Far-red-induction_P Parameter: Plant Line Value: Columbia
  misc_feature: MA Experiment 20001451 PARAMETER Experiment Name: At_Far-red-induction_P Parameter: Timepoint (hr) Value: 24
  misc_feature: MA Experiment 20001451 PARAMETER Experiment Name: At_Far-red-induction_P Parameter: Tissue Value: Whole Plant
  misc_feature: MA Experiment ID: 20001557 Result: Down-regulated in Transcription
  misc_feature: MA Experiment 20001557 PARAMETER Experiment Name: At_Drought_Soil_Dry_P Parameter: Age (day) Value: 27
  misc_feature: MA Experiment 20001557 PARAMETER Experiment Name: At_Drought_Soil_Dry_P Parameter: Organism Value: A. thaliana
  misc_feature: MA Experiment 20001557 PARAMETER Experiment Name: At_Drought_Soil_Dry_P Parameter: Plant Line Value: WS
  misc_feature: MA Experiment 20001557 PARAMETER Experiment Name: At_Drought_Soil_Dry_P Parameter: Post Timepoint (hr) Value: 3
  misc_feature: MA Experiment 20001557 PARAMETER Experiment Name: At_Drought_Soil_Dry_P Parameter: Post-Treatment Value: Re-Water vs. No Drought
  misc_feature: MA Experiment 20001557 PARAMETER Experiment Name: At_Drought_Soil_Dry_P Parameter: Timepoint (day) Value: 13
  misc_feature: MA Experiment 20001557 PARAMETER Experiment Name: At_Drought_Soil_Dry_P Parameter: Treatment Value: Drought vs. No Drought
  misc_feature: MA Experiment ID: 20001905 Result: Down-regulated in Transcription
  misc_feature: MA Experiment 20001905 PARAMETER Experiment Name: At_Drought_Reproduction_P Parameter: Age (day) Value: 40
  misc_feature: MA Experiment 20001905 PARAMETER Experiment Name: At_Drought_Reproduction_P Parameter: Organism Value: A. thaliana
  misc_feature: MA Experiment 20001905 PARAMETER Experiment Name: At_Drought_Reproduction_P Parameter: Plant Line Value: WS
  misc_feature: MA Experiment 20001905 PARAMETER Experiment Name: At_Drought_Reproduction_P Parameter: Timepoint (day) Value: 10
  misc_feature: MA Experiment 20001905 PARAMETER Experiment Name: At_Drought_Reproduction_P Parameter: Tissue Value: Rosettes
  misc_feature: MA Experiment 20001905 PARAMETER Experiment Name: At_Drought_Reproduction_P Parameter: Treatment Value: Drought vs. No Drought
ttttacgtttcttgatcatcttattgaactgggtttgatctaaagttgtattgatgggttctgaaggaccaacgggtgtgacgattcatatcacagggttcaagaagttccatggagtagctgagaatcctacagagaaaatggctaacaatttgaaagaatatttggctaagaattgtgtttcgaaagatgtgaatcttggaagttgtactgtgcttgagactgctggtcaaggagctcttgcttctctctatcagttgctacaatccgcggttaacacaaaagagtcagagtcgttgaccggaaaaaccatatgggttcactttggagttaatagtggcgctacaaaatttgcaattgagcaacaagctgtgaatgaagcgacttttcgttgtcctgatgaattgggttggaaacctcagaatttgccaattgttccctctgatggtccaatctcaactgtaagaaagactaatcttcctgttgaagagataacaaaggcgttggagaagaatggctttgaagtgataacatcagatgatgcaggtcgatttgtgtgtaactatgtctattaccattctctgagatttgcagagcagaataagaccagatcactctttgttcacgttcctcttttcgttgccgtggatgaagaaacccaaatgagattcactgtttctctgctggaggtactcgcttctatttgcaagtaatgttatcccaaatgtggctattcttattcatgaaatgtgcatcatggaccgattgtctccccacgggaaaaattcgcttatcaataaatggaatataagttcacttctctactatctcctcttcatatatgcatcatttcattcaagtttcataaactagattcattttcttcttcaaaagtggtatcaaatgaaaaatgatatatgcctacttgccagtggtgccaatgcaatgagatttggaaatatgcaatctttctgctcaaagtactaatcattttgaggaaaattcaatgtatgaatctgatttaagggtcttcttctgttt

SEQ ID NO: 22924 - protein, 219 aa, Arabidopsis thaliana
  peptide (1)..(219): Ceres Seq. ID no. 12370422
  misc_feature (11)..(201): Pfam Name: Pyroglutamyl peptidase Pfam Description: Pyroglutamyl peptidase
  misc_feature (13)..(193): Homolog of NCBI NO: 13787025 NR Description: Chain A, X-Ray Crystalline Structures Of Carboxyl Peptidase From A Hyperthermophile, Pyrococcus Furiosus,
  misc_feature (1)..(88): Homolog of NCBI NO: 15220751 NR Description: hypothetical protein; protein id: At1g23430.1
  misc_feature (1)..(88): Homolog of NCBI NO: 9295697 NR Description: F26F24.31 [Arabidopsis thaliana]
  misc_feature (87)..(218): Homolog of NCBI NO: 15220753 NR Description: hypothetical protein; protein id: At1g23440.1
  misc_feature (1)..(88): Homolog of NCBI NO: 8778575 NR Description: F28C11.8 [Arabidopsis thaliana]
  misc_feature (91)..(218): Homolog of NCBI NO: 8778575 NR Description: F28C11.8 [Arabidopsis thaliana]
  misc_feature (1)..(218): Homolog of NCBI NO: 13430708 NR Description: unknown protein [Arabidopsis thaliana]
  misc_feature (1)..(216): Homolog of NCBI NO: 12039349 NR Description: putative pyrrolidone carboxyl peptidase [Oryza
  misc_feature (1)..(215): Homolog of NCBI NO: 38175741 NR Description: pyrrolidone carboxyl peptidase-like protein
  misc_feature (1)..(219): Homolog of NCBI NO: 18405940 NR Description: expressed protein
MGSEGPTGVTIHITGFKKFHGVAENPTEKMANNLKEYLAKNCVSKDVNLGSCTVLETAGQGALASLYQLLQSAVNTKESESLTGKTIWVHFGVNSGATKFAIEQQAVNEATFRCPDELGWKPQNLPIVPSDGPISTVRKTNLPVEEITKALEKNGFEVITSDDAGRFVCNYVYYHSLRFAEQNKTRSLFVHVPLFVAVDEETQMRFTVSLLEVLASICK

SEQ ID NO: 22925 - protein, 190 aa, Arabidopsis thaliana
  peptide (1)..(190): Ceres Seq. ID no. 12370423
  misc_feature (1)..(172): Pfam Name: Pyroglutamyl peptidase Pfam Description: Pyroglutamyl peptidase
  misc_feature (1)..(187): Homolog of NCBI NO: 12039349 NR Description: putative pyrrolidone carboxyl peptidase [Oryza
  misc_feature (1)..(186): Homolog of NCBI NO: 38175741 NR Description: pyrrolidone carboxyl peptidase-like protein
  misc_feature (1)..(59): Homolog of NCBI NO: 15220751 NR Description: hypothetical protein; protein id: At1g23430.1
  misc_feature (58)..(189): Homolog of NCBI NO: 15220753 NR Description: hypothetical protein; protein id: At1g23440.1
  misc_feature (62)..(189): Homolog of NCBI NO: 8778575 NR Description: F28C11.8 [Arabidopsis thaliana]
  misc_feature (1)..(189): Homolog of NCBI NO: 13430708 NR Description: unknown protein [Arabidopsis thaliana]
  misc_feature (1)..(59): Homolog of NCBI NO: 8778575 NR Description: F28C11.8 [Arabidopsis thaliana]
  misc_feature (1)..(59): Homolog of NCBI NO: 9295697 NR Description: F26F24.31 [Arabidopsis thaliana]
  misc_feature (1)..(164): Homolog of NCBI NO: 13787025 NR Description: Chain A, X-Ray Crystalline Structures Of Carboxyl Peptidase From A Hyperthermophile, Pyrococcus Furiosus,
  misc_feature (1)..(190): Homolog of NCBI NO: 18405940 NR Description: expressed protein
MANNLKEYLAKNCVSKDVNLGSCTVLETAGQGALASLYQLLQSAVNTKESESLTGKTIWVHFGVNSGATKFAIEQQAVNEATFRCPDELGWKPQNLPIVPSDGPISTVRKTNLPVEEITKALEKNGFEVITSDDAGRFVCNYVYYHSLRFAEQNKTRSLFVHVPLFVAVDEETQMRFTVSLLEVLASICK

SEQ ID NO: 22926 - DNA, 1389 bp, Arabidopsis thaliana
  misc_feature (1)..(1389): Ceres Seq. ID no. 12334720
  misc_feature: MA Experiment ID: 108463 Result: Up-regulated in Transcription
  misc_feature: MA Experiment 108463 PARAMETER Experiment Name: At_Germinating_Seeds_cDNA_P Parameter: Age (day) Value: 3 vs. 0
  misc_feature: MA Experiment 108463 PARAMETER Experiment Name: At_Germinating_Seeds_cDNA_P Parameter: Tissue Value: Germinating Seeds
  misc_feature: MA Experiment ID: 108464 Result: Up-regulated in Transcription
  misc_feature: MA Experiment 108464 PARAMETER Experiment Name: At_Germinating_Seeds_cDNA_P Parameter: Age (day) Value: 4 vs. 0
  misc_feature: MA Experiment 108464 PARAMETER Experiment Name: At_Germinating_Seeds_cDNA_P Parameter: Tissue Value: Germinating Seeds
  misc_feature: MA Experiment ID: 108474 Result: Down-regulated in Transcription
  misc_feature: MA Experiment 108474 PARAMETER Experiment Name: At_Drought_Flowers_cDNA_P Parameter: Timepoint (hr) Value: null
  misc_feature: MA Experiment 108474 PARAMETER Experiment Name: At_Drought_Flowers_cDNA_P Parameter: Treatment Value: Drought vs. No Drought
  misc_feature: MA Experiment ID: 108573 Result: Up-regulated in Transcription
  misc_feature: MA Experiment 108573 PARAMETER Experiment Name: At_Drought_cDNA_P Parameter: Timepoint (hr) Value: 6
  misc_feature: MA Experiment 108573 PARAMETER Experiment Name: At_Drought_cDNA_P Parameter: Tissue Value: Aerial
  misc_feature: MA Experiment 108573 PARAMETER Experiment Name: At_Drought_cDNA_P Parameter: Treatment Value: Drought vs. No Drought
  misc_feature: MA Experiment ID: 20000113 Result: Down-regulated in Transcription
  misc_feature: MA Experiment 20000113 PARAMETER Experiment Name: At_42deg_Heat_cDNA_P Parameter: Temperature (deg C) Value: 42 vs. 22
  misc_feature: MA Experiment 20000113 PARAMETER Experiment Name: At_42deg_Heat_cDNA_P Parameter: Timepoint (hr) Value: 8
  misc_feature: MA Experiment 20000113 PARAMETER Experiment Name: At_42deg_Heat_cDNA_P Parameter: Tissue Value: Aerial
  misc_feature: MA Experiment ID: 20000144 Result: Down-regulated in Transcription
  misc_feature: MA Experiment 20000144 PARAMETER Experiment Name: At_42deg_Heat_cDNA_P Parameter: Temperature (deg C) Value: 42 vs. 22
  misc_feature: MA Experiment 20000144 PARAMETER Experiment Name: At_42deg_Heat_cDNA_P Parameter: Timepoint (hr) Value: 1
  misc_feature: MA Experiment 20000144 PARAMETER Experiment Name: At_42deg_Heat_cDNA_P Parameter: Tissue Value: Aerial
  misc_feature: MA Experiment ID: 20000224 Result: Down-regulated in Transcription
  misc_feature: MA Experiment ID: 20000234 Result: Down-regulated in Transcription
  misc_feature: MA Experiment 20000234 PARAMETER Experiment Name: At_Siliques_P Parameter: Age (day) Value: 21
  misc_feature: MA Experiment 20000234 PARAMETER Experiment Name: At_Siliques_P Parameter: Organism Value: A. thaliana
  misc_feature: MA Experiment 20000234 PARAMETER Experiment Name: At_Siliques_P Parameter: Plant Line Value: WS
  misc_feature: MA Experiment 20000234 PARAMETER Experiment Name: At_Siliques_P Parameter: Tissue Value: Less Than 5mm Siliques vs. Whole Plant
  misc_feature: MA Experiment ID: 20000264 Result: Up-regulated in Transcription
  misc_feature: MA Experiment 20000264 PARAMETER Experiment Name: At_Open_Flower_P Parameter: Age (day) Value: 21
  misc_feature: MA Experiment 20000264 PARAMETER Experiment Name: At_Open_Flower_P Parameter: Plant Line Value: WS
  misc_feature: MA Experiment 20000264 PARAMETER Experiment Name: At_Open_Flower_P Parameter: Tissue Value: Open Flower vs. Whole Plant
  misc_feature: MA Experiment ID: 20000265 Result: Up-regulated in Transcription
  misc_feature: MA Experiment 20000265 PARAMETER Experiment Name: At_Open_Flower_P Parameter: Age (day) Value: 21
  misc_feature: MA Experiment 20000265 PARAMETER Experiment Name: At_Open_Flower_P Parameter: Plant Line Value: WS
  misc_feature: MA Experiment 20000265 PARAMETER Experiment Name: At_Open_Flower_P Parameter: Tissue Value: Closed Flower vs. Whole Plant
  misc_feature: MA Experiment ID: 20000286 Result: Up-regulated in Transcription
  misc_feature: MA Experiment 20000286 PARAMETER Experiment Name: At_Open_Flower_P Parameter: Age (day) Value: 21
  misc_feature: MA Experiment 20000286 PARAMETER Experiment Name: At_Open_Flower_P Parameter: Plant Line Value: WS
  misc_feature: MA Experiment 20000286 PARAMETER Experiment Name: At_Open_Flower_P Parameter: Tissue Value: Half Open vs. Whole Plant
  misc_feature: MA Experiment ID: 20000438 Result: Down-regulated in Transcription
  misc_feature: MA Experiment 20000438 PARAMETER Experiment Name: At_Shoots__P Parameter: Age (day) Value: 14
  misc_feature: MA Experiment 20000438 PARAMETER Experiment Name: At_Shoots__P Parameter: Tissue Value: Shoots vs. Whole Plant
  misc_feature: MA Experiment ID: 20000794 Result: Up-regulated in Transcription
  misc_feature: MA Experiment 20000794 PARAMETER Experiment Name: At_Petals_P Parameter: Age (day) Value: 23-25 days
  misc_feature: MA Experiment 20000794 PARAMETER Experiment Name: At_Petals_P Parameter: Plant Line Value: WS
  misc_feature: MA Experiment 20000794 PARAMETER Experiment Name: At_Petals_P Parameter: Tissue Value: Petals vs. Whole plant
  misc_feature: MA Experiment ID: 20001773 Result: Up-regulated in Transcription
  misc_feature: MA Experiment 20001773 PARAMETER Experiment Name: At_Far-red-enriched-adult_P Parameter: Age (day) Value: 30
  misc_feature: MA Experiment 20001773 PARAMETER Experiment Name: At_Far-red-enriched-adult_P Parameter: Light Value: Far-red enriched vs. White
  misc_feature: MA Experiment 20001773 PARAMETER Experiment Name: At_Far-red-enriched-adult_P Parameter: Organism Value: A. thaliana
  misc_feature: MA Experiment 20001773 PARAMETER Experiment Name: At_Far-red-enriched-adult_P Parameter: Plant Line Value: Columbia
  misc_feature: MA Experiment 20001773 PARAMETER Experiment Name: At_Far-red-enriched-adult_P Parameter: Timepoint (hr) Value: 48
  misc_feature: MA Experiment 20001773 PARAMETER Experiment Name: At_Far-red-enriched-adult_P Parameter: Tissue Value: Aerial
  misc_feature: MA Experiment ID: 20001906 Result: Up-regulated in Transcription
  misc_feature: MA Experiment 20001906 PARAMETER Experiment Name: At_Drought_Reproduction_P Parameter: Age (day) Value: 35
  misc_feature: MA Experiment 20001906 PARAMETER Experiment Name: At_Drought_Reproduction_P Parameter: Organism Value: A. thaliana
  misc_feature: MA Experiment 20001906 PARAMETER Experiment Name: At_Drought_Reproduction_P Parameter: Plant Line Value: WS
  misc_feature: MA Experiment 20001906 PARAMETER Experiment Name: At_Drought_Reproduction_P Parameter: Timepoint (day) Value: 5
  misc_feature: MA Experiment 20001906 PARAMETER Experiment Name: At_Drought_Reproduction_P Parameter: Tissue Value: Siliques
  misc_feature: MA Experiment 20001906 PARAMETER Experiment Name: At_Drought_Reproduction_P Parameter: Treatment Value: Drought vs. No Drought
  misc_feature: MA Experiment ID: 20001911 Result: Down-regulated in Transcription
  misc_feature: MA Experiment 20001911 PARAMETER Experiment Name: At_Drought_Reproduction_P Parameter: Age (day) Value: 40
  misc_feature: MA Experiment 20001911 PARAMETER Experiment Name: At_Drought_Reproduction_P Parameter: Organism Value: A. thaliana
  misc_feature: MA Experiment 20001911 PARAMETER Experiment Name: At_Drought_Reproduction_P Parameter: Plant Line Value: WS
  misc_feature: MA Experiment 20001911 PARAMETER Experiment Name: At_Drought_Reproduction_P Parameter: Timepoint (day) Value: 10
  misc_feature: MA Experiment 20001911 PARAMETER Experiment Name: At_Drought_Reproduction_P Parameter: Tissue Value: Flowers
  misc_feature: MA Experiment 20001911 PARAMETER Experiment Name: At_Drought_Reproduction_P Parameter: Treatment Value: Drought vs. No Drought
tttacatccatcgttccaagcttttaaagaagcaatattttttgtgttttgttttaagttttaacacacaaacacattacctcgaattcgatacgtcatagtaattagcaactatggaacgatgtcgttctggtcatcatcgcatcatttcttattatctctcttcttcgttgatactattttggtgtattttcgttctcgtgctgttatctacgacaagtactacaaatgctttagtgaaaatcccgaaaaacacgaccgttccggcggtaatagtgttcggtgattcaattgtcgatgccgggaataacgacgacatgataacagaagctagatgcgattatgctccctacggcattgattttgacggtggagttgctacgggaagattctctaatggcaaagtccctggtgatattgtagcggaagagctagggattaaacccaatataccggcatatcgaaatccgaatttaaaaccagaagagctcttaaccggtgtaacatttgcttctggtggtgctggttatgttcctttgacaaccaaaatagcgggaggaatacctttaccacagcaattgatatattttgaggaatatatagagaaattgaagcaaatggttggagaaaagaggacaaagttcataatcaagaatagcttgttcgttgttatatgtggtagtaacgatatcgccaacgacttctttactctccccccggtccggctacactacaccgtcgcttctttcaccgctcttatggccgacaatgctcgttcttttgctcagacactctatggatatggagcaagaagaatacttgtatttggtgcaccaccaataggatgtgttccttcgcagagaaccgtagcaggaggacctacaagagattgtgttgctaggtttaatgatgcagcaaaacttttcaatactaagctctctgcaaatattgatgtcttgtcaaggactctacaagacccaacaataatctatattgacatctatagtcctcttcttgatctcattttaaaccctcatcaatatggatttaaggtggccaataaaggatgttgcggaaccggattaatagaagttactgcgctatgcaacaactatacagcttctgtatgtcccataagatctgattatgtgttttgggacagttttcatcctactgaaaaagcttacagaattatagttgcaaagcttttggatagatacctcaacagattcttctaatcgatatagctcctatttcttagcatgttccatacacttttaaataatcatttcaactcaaagagagaattacacttctgtcaattttctctttttcaaggcttgtaatggtctcttatgatatttgatggttatatatatacaaggttat

SEQ ID NO: 22927 - protein, 374 aa, Arabidopsis thaliana
  peptide (1)..(374): Ceres Seq. ID no. 12334721
  misc_feature (53)..(337): Pfam Name: GDSL-like Lipase/Acylhydrolase Pfam Description: GDSL-like Lipase/Acylhydrolase
  misc_feature (40)..(374): Homolog of NCBI NO: 18394825 NR Description: anter-specific proline-rich protein APG
  misc_feature (26)..(374): Homolog of NCBI NO: 18406327 NR Description: proline-rich protein, putative; protein id:
  misc_feature (24)..(374): Homolog of NCBI NO: 25404994 NR Description: protein T4O12.13 [imported] - Arabidopsis
  misc_feature (24)..(373): Homolog of NCBI NO: 26449364 NR Description: putative family II lipase EXL3 [Arabidopsis
  misc_feature (24)..(373): Homolog of NCBI NO: 15222901 NR Description: family II extracellular lipase 3 (EXL3)
  misc_feature (34)..(370): Homolog of NCBI NO: 8778807 NR Description: T4O12.12 [Arabidopsis thaliana]
  misc_feature (1)..(370): Homolog of NCBI NO: 18410956 NR Description: family II extracellular lipase 2 (EXL2)
  misc_feature (1)..(337): Homolog of NCBI NO: 8778807 NR Description: T4O12.12 [Arabidopsis thaliana]
  misc_feature (1)..(374): Homolog of NCBI NO: 18410954 NR Description: family II extracellular lipase 1 (EXL1)
  misc_feature (1)..(374): Homolog of NCBI NO: 28393626 NR Description: putative family II extracellular lipase 1 (EXL1)
MERCRSGHHRIISYYLSSSLILFWCIFVLVLLSTTSTTNALVKIPKNTTVPAVIVFGDSIVDAGNNDDMITEARCDYAPYGIDFDGGVATGRFSNGKVPGDIVAEELGIKPNIPAYRNPNLKPEELLTGVTFASGGAGYVPLTTKIAGGIPLPQQLIYFEEYIEKLKQMVGEKRTKFIIKNSLFVVICGSNDIANDFFTLPPVRLHYTVASFTALMADNARSFAQTLYGYGARRILVFGAPPIGCVPSQRTVAGGPTRDCVARFNDAAKLFNTKLSANIDVLSRTLQDPTIIYIDIYSPLLDLILNPHQYGFKVANKGCCGTGLIEVTALCNNYTASVCPIRSDYVFWDSFHPTEKAYRIIVAKLLDRYLNRFF

SEQ ID NO: 22928 - protein, 306 aa, Arabidopsis thaliana
  peptide (1)..(306): Ceres Seq. ID no. 12334722
  misc_feature (1)..(269): Pfam Name: GDSL-like Lipase/Acylhydrolase Pfam Description: GDSL-like Lipase/Acylhydrolase
  misc_feature (1)..(306): Homolog of NCBI NO: 18394825 NR Description: anter-specific proline-rich protein APG
  misc_feature (1)..(306): Homolog of NCBI NO: 18406327 NR Description: proline-rich protein, putative; protein id:
  misc_feature (1)..(306): Homolog of NCBI NO: 25404994 NR Description: protein T4O12.13 [imported] - Arabidopsis
  misc_feature (1)..(305): Homolog of NCBI NO: 26449364 NR Description: putative family II lipase EXL3 [Arabidopsis
  misc_feature (1)..(305): Homolog of NCBI NO: 15222901 NR Description: family II extracellular lipase 3 (EXL3)
  misc_feature (1)..(302): Homolog of NCBI NO: 8778807 NR Description: T4O12.12 [Arabidopsis thaliana]
  misc_feature (1)..(302): Homolog of NCBI NO: 18410956 NR Description: family II extracellular lipase 2 (EXL2)
  misc_feature (1)..(269): Homolog of NCBI NO: 8778807 NR Description: T4O12.12 [Arabidopsis thaliana]
  misc_feature (1)..(306): Homolog of NCBI NO: 18410954 NR Description: family II extracellular lipase 1 (EXL1)
  misc_feature (1)..(306): Homolog of NCBI NO: 28393626 NR Description: putative family II extracellular lipase 1 (EXL1)
MITEARCDYAPYGIDFDGGVATGRFSNGKVPGDIVAEELGIKPNIPAYRNPNLKPEELLTGVTFASGGAGYVPLTTKIAGGIPLPQQLIYFEEYIEKLKQMVGEKRTKFIIKNSLFVVICGSNDIANDFFTLPPVRLHYTVASFTALMADNARSFAQTLYGYGARRILVFGAPPIGCVPSQRTVAGGPTRDCVARFNDAAKLFNTKLSANIDVLSRTLQDPTIIYIDIYSPLLDLILNPHQYGFKVANKGCCGTGLIEVTALCNNYTASVCPIRSDYVFWDSFHPTEKAYRIIVAKLLDRYLNRFF

SEQ ID NO: 22929 - protein, 206 aa, Arabidopsis thaliana
  peptide (1)..(206): Ceres Seq. ID no. 12334723
  misc_feature (1)..(169): Pfam Name: GDSL-like Lipase/Acylhydrolase Pfam Description: GDSL-like Lipase/Acylhydrolase
  misc_feature (1)..(206): Homolog of NCBI NO: 18394825 NR Description: anter-specific proline-rich protein APG
  misc_feature (1)..(206): Homolog of NCBI NO: 18406327 NR Description: proline-rich protein, putative; protein id:
  misc_feature (1)..(206): Homolog of NCBI NO: 25404994 NR Description: protein T4O12.13 [imported] - Arabidopsis
  misc_feature (1)..(205): Homolog of NCBI NO: 26449364 NR Description: putative family II lipase EXL3 [Arabidopsis
  misc_feature (1)..(205): Homolog of NCBI NO: 15222901 NR Description: family II extracellular lipase 3 (EXL3)
  misc_feature (1)..(202): Homolog of NCBI NO: 8778807 NR Description: T4O12.12 [Arabidopsis thaliana]
  misc_feature (1)..(202): Homolog of NCBI NO: 18410956 NR Description: family II extracellular lipase 2 (EXL2)
  misc_feature (1)..(169): Homolog of NCBI NO: 8778807 NR Description: T4O12.12 [Arabidopsis thaliana]
  misc_feature (1)..(206): Homolog of NCBI NO: 18410954 NR Description: family II extracellular lipase 1 (EXL1)
  misc_feature (1)..(206): Homolog of NCBI NO: 28393626 NR Description: putative family II extracellular lipase 1 (EXL1)
MVGEKRTKFIIKNSLFVVICGSNDIANDFFTLPPVRLHYTVASFTALMADNARSFAQTLYGYGARRILVFGAPPIGCVPSQRTVAGGPTRDCVARFNDAAKLFNTKLSANIDVLSRTLQDPTIIYIDIYSPLLDLILNPHQYGFKVANKGCCGTGLIEVTALCNNYTASVCPIRSDYVFWDSFHPTEKAYRIIVAKLLDRYLNRFF

SEQ ID NO: 22930 - DNA, 1907 bp, Arabidopsis thaliana
  misc_feature (1)..(1907): Ceres Seq. ID no. 12325994
  misc_feature: MA Experiment ID: 108434 Result: Up-regulated in Transcription
  misc_feature: MA Experiment 108434 PARAMETER Experiment Name: At_Root_Tips_cDNA_P Parameter: Tissue Value: Root Tips
  misc_feature: MA Experiment ID: 108461 Result: Up-regulated in Transcription
  misc_feature: MA Experiment 108461 PARAMETER Experiment Name: At_Germinating_Seeds_cDNA_P Parameter: Age (day) Value: 1 vs. 0
  misc_feature: MA Experiment 108461 PARAMETER Experiment Name: At_Germinating_Seeds_cDNA_P Parameter: Tissue Value: Germinating Seeds
  misc_feature: MA Experiment ID: 108579 Result: Down-regulated in Transcription
  misc_feature: MA Experiment 108579 PARAMETER Experiment Name: At_4deg_Cold_cDNA_P Parameter: Temperature (deg C) Value: 4 vs. 22
  misc_feature: MA Experiment 108579 PARAMETER Experiment Name: At_4deg_Cold_cDNA_P Parameter: Timepoint (hr) Value: 6
  misc_feature: MA Experiment 108579 PARAMETER Experiment Name: At_4deg_Cold_cDNA_P Parameter: Tissue Value: Aerial
  misc_feature: MA Experiment ID: 108668 Result: Down-regulated in Transcription
  misc_feature: MA Experiment 108668 PARAMETER Experiment Name: At_2mM_SA_cDNA_P Parameter: Plant Line Value: WS
  misc_feature: MA Experiment 108668 PARAMETER Experiment Name: At_2mM_SA_cDNA_P Parameter: Timepoint (hr) Value: 6
  misc_feature: MA Experiment 108668 PARAMETER Experiment Name: At_2mM_SA_cDNA_P Parameter: Treatment Value: 2mM SA vs. No Treatment
  misc_feature: MA Experiment ID: 20000113 Result: Down-regulated in Transcription
  misc_feature: MA Experiment 20000113 PARAMETER Experiment Name: At_42deg_Heat_cDNA_P Parameter: Temperature (deg C) Value: 42 vs. 22
  misc_feature: MA Experiment 20000113 PARAMETER Experiment Name: At_42deg_Heat_cDNA_P Parameter: Timepoint (hr) Value: 8
  misc_feature: MA Experiment 20000113 PARAMETER Experiment Name: At_42deg_Heat_cDNA_P Parameter: Tissue Value: Aerial
  misc_feature: MA Experiment ID: 20000495 Result: Up-regulated in Transcription
  misc_feature: MA Experiment 20000495 PARAMETER Experiment Name: At_Guard_Cells_P Parameter: Harvest Date Value: 8/2/2002
  misc_feature: MA Experiment 20000495 PARAMETER Experiment Name: At_Guard_Cells_P Parameter: Organism Value: A. thaliana
  misc_feature: MA Experiment 20000495 PARAMETER Experiment Name: At_Guard_Cells_P Parameter: Tissue Value: Guard Cells vs. Leaves
  misc_feature: MA Experiment ID: 20001248 Result: Up-regulated in Transcription
  misc_feature: MA Experiment 20001248 PARAMETER Experiment Name: At_Far-red-induction_P Parameter: Age (day) Value: 7
  misc_feature: MA Experiment 20001248 PARAMETER Experiment Name: At_Far-red-induction_P Parameter: Light Value: Far-red vs. White
  misc_feature: MA Experiment 20001248 PARAMETER Experiment Name: At_Far-red-induction_P Parameter: Organism Value: A. thaliana
  misc_feature: MA Experiment 20001248 PARAMETER Experiment Name: At_Far-red-induction_P Parameter: Plant Line Value: Columbia
  misc_feature: MA Experiment 20001248 PARAMETER Experiment Name: At_Far-red-induction_P Parameter: Timepoint (hr) Value: 4
  misc_feature: MA Experiment 20001248 PARAMETER Experiment Name: At_Far-red-induction_P Parameter: Tissue Value: Whole Plant
acctttcttcttccttcttcatcattcatcattcatcattcatcattctcatatctctcttcttttactggggatcacaatatctatctagttgtaagttgtgaatgatagatcctgagccttcttgccgccacctcttgaacttaatgtacttgaaaccagtctccacatagcgatagagagagagatctgttatgtgtgtattcatcaagttctctttttttgggctcaaagtgtcaaaggagacattttcaattctgagttcttttgttttcttataataaaatctgggttttctgagattttcttcacatcgtccgaaacgtggacacattttgatcttttgggtgtcactgtgtcaataaaggttgaaactttgattacatttctctcaaaaggattaatttttatttctctatctgggtgagatttggattaattggtgaggaatcggaagaaactggcgagattacaagcgattgtgaaatatcagaatctaataagaggaagaagaggcatggcggctcctacagggaaagggccagtgataccaattctaggtttccttacatgtgtggcttttatctatctctcctttggagatttgtggttcggtctcaaaacggagggcgagttagcattcgtgaaacggaatgggacacagtttgtggtcgatggtaaggctctgtatgtgaatggttggaactcttattggttcatggaccatgctgtgaatgatcatagtagacaccgtgtcggagctatgcttgaagctggagctaaaatgggtctcactgtttgtagaacatgggcttttaatgatggaggctacaatgctcttcagatctctcctggtagattcgatgaacgagtctttaaggctttggatcatgtaatcgcagaggccaaaacacatggtgttaggttgcttctgagcttagtgaataacttacaagcttatggagggaagactcagtacgtcaattgggcatggcaagaaggtgtaggcctcagctcctccaatgattccttcttctttgacccatctatccgcagatacttcaagaattatctcacggtgctgctgacccgcaaaaactctttaaccgggattgagtacagaaacgacccaacaatttttgcatgggagttgataaacgagcctcgctgcatgtctgatgtctctggggatactctacaagactggattaacgaaatgacagcattcattaaatcaattgacaacaagcatcttctaaccgttggcttggaagggttctacggtcccaatagccctaaaaagctgacagttaaccccaacggtgggcctctgagcttgggtcagattttgttcgaaactctgattcgccaaacatcgattttgcctcggttcatatctaccctgatcactggtttcacgatcaagggtttgaagaaaaactcaagttcgttgtaaaatggatgctatctcacattgaagatggggacaaggaactgaagaagcctgttctgttcactgagtttggcctctcgaatctgaacaaggactatgatccatcgcagcgggatcggttctacagaaccatctttgatgttatttacaaatcagccaagcggaagcggtctggtgcaggaacactagtgtggcagtttctgatagaaggcatggaaggtttcaacgatgactttggaatagtcccatgggaacaagactccattcagagattaatgattgaacagtcttgcagattgagtcgaatcactggacgccatcttcttgacaaaaagtccatagaaatgtgttcccatagaccatgagaatacagtttctttttttgttcttgcctctcatgtggccatataaccaaactcaaacatttatataaaagagtaaatttaaccttccc

SEQ ID NO: 22931 - protein, 312 aa, Arabidopsis thaliana
  peptide (1)..(312): Ceres Seq. ID no. 12325995
  misc_feature (47)..(135): Pfam Name: Cellulase (glycosyl hydrolase family 5) Pfam Description: Cellulase (glycosyl hydrolase family 5)
  misc_feature (41)..(267): Homolog of NCBI NO: 29786430 NR Description: endo-beta-1,4-mannanase [Lactuca sativa]
  misc_feature (10)..(269): Homolog of NCBI NO: 15239973 NR Description: glycosyl hydrolase family 5/cellulase
  misc_feature (37)..(268): Homolog of NCBI NO: 15241093 NR Description: glycosyl hydrolase family 5/cellulase
  misc_feature (42)..(269): Homolog of NCBI NO: 34912090 NR Description: putative mannan endo-1,4-beta-mannosidase
  misc_feature (28)..(267): Homolog of NCBI NO: 10178872 NR Description: (1-4)-beta-mannan endohydrolase [Coffea arabica]
  misc_feature (6)..(267): Homolog of NCBI NO: 34909462 NR Description: putative (1-4)-beta-mannan endohydrolase
  misc_feature (4)..(275): Homolog of NCBI NO: 15235255 NR Description: glycosyl hydrolase family 5/cellulase
  misc_feature (164)..(275): Homolog of NCBI NO: 25354515 NR Description: (1-4)-beta-mannan endohydrolase [imported] -
  misc_feature (1)..(135): Homolog of NCBI NO: 25354515 NR Description: (1-4)-beta-mannan endohydrolase [imported] -
  misc_feature (1)..(275): Homolog of NCBI NO: 30681096 NR Description: glycosyl hydrolase family 5/cellulase
MAAPTGKGPVIPILGFLTCVAFIYLSFGDLWFGLKTEGELAFVKRNGTQFVVDGKALYVNGWNSYWFMDHAVNDHSRHRVGAMLEAGAKMGLTVCRTWAFNDGGYNALQISPGRFDERVFKALDHVIAEAKTHGVRLLLSLVNNLQAYGGKTQYVNWAWQEGVGLSSSNDSFFFDPSIRRYFKNYLTVLLTRKNSLTGIEYRNDPTIFAWELINEPRCMSDVSGDTLQDWINEMTAFIKSIDNKHLLTVGLEGFYGPNSPKKLTVNPNGGPLSLGQILFETLIRQTSILPRFISTLITGFTIKGLKKNSSSL

SEQ ID NO: 22932 - protein, 245 aa, Arabidopsis thaliana
  peptide (1)..(245): Ceres Seq. ID no. 12325996
  misc_feature (1)..(68): Pfam Name: Cellulase (glycosyl hydrolase family 5) Pfam Description: Cellulase (glycosyl hydrolase family 5)
  misc_feature (1)..(200): Homolog of NCBI NO: 29786430 NR Description: endo-beta-1,4-mannanase [Lactuca sativa]
  misc_feature (1)..(202): Homolog of NCBI NO: 15239973 NR Description: glycosyl hydrolase family 5/cellulase
  misc_feature (1)..(201): Homolog of NCBI NO: 15241093 NR Description: glycosyl hydrolase family 5/cellulase
  misc_feature (1)..(202): Homolog of NCBI NO: 34912090 NR Description: putative mannan endo-1,4-beta-mannosidase
  misc_feature (1)..(200): Homolog of NCBI NO: 10178872 NR Description: (1-4)-beta-mannan endohydrolase [Coffea arabica]
  misc_feature (1)..(200): Homolog of NCBI NO: 34909462 NR Description: putative (1-4)-beta-mannan endohydrolase
  misc_feature (1)..(208): Homolog of NCBI NO: 15235255 NR Description: glycosyl hydrolase family 5/cellulase
  misc_feature (97)..(208): Homolog of NCBI NO: 25354515 NR Description: (1-4)-beta-mannan endohydrolase [imported] -
  misc_feature (1)..(68): Homolog of NCBI NO: 25354515 NR Description: (1-4)-beta-mannan endohydrolase [imported] -
  misc_feature (1)..(208): Homolog of NCBI NO: 30681096 NR Description: glycosyl hydrolase family 5/cellulase
MDHAVNDHSRHRVGAMLEAGAKMGLTVCRTWAFNDGGYNALQISPGRFDERVFKALDHVIAEAKTHGVRLLLSLVNNLQAYGGKTQYVNWAWQEGVGLSSSNDSFFFDPSIRRYFKNYLTVLLTRKNSLTGIEYRNDPTIFAWELINEPRCMSDVSGDTLQDWINEMTAFIKSIDNKHLLTVGLEGFYGPNSPKKLTVNPNGGPLSLGQILFETLIRQTSILPRFISTLITGFTIKGLKKNSSSL

SEQ ID NO: 22933 - protein, 230 aa, Arabidopsis thaliana
  peptide (1)..(230): Ceres Seq. ID no. 12325997
  misc_feature (1)..(53): Pfam Name: Cellulase (glycosyl hydrolase family 5) Pfam Description: Cellulase (glycosyl hydrolase family 5)
  misc_feature (1)..(185): Homolog of NCBI NO: 29786430 NR Description: endo-beta-1,4-mannanase [Lactuca sativa]
  misc_feature (1)..(187): Homolog of NCBI NO: 15239973 NR Description: glycosyl hydrolase family 5/cellulase
  misc_feature (1)..(186): Homolog of NCBI NO: 15241093 NR Description: glycosyl hydrolase family 5/cellulase
  misc_feature (1)..(187): Homolog of NCBI NO: 34912090 NR Description: putative mannan endo-1,4-beta-mannosidase
  misc_feature (1)..(185): Homolog of NCBI NO: 10178872 NR Description: (1-4)-beta-mannan endohydrolase [Coffea arabica]
  misc_feature (1)..(185): Homolog of NCBI NO: 34909462 NR Description: putative (1-4)-beta-mannan endohydrolase
  misc_feature (1)..(193): Homolog of NCBI NO: 15235255 NR Description: glycosyl hydrolase family 5/cellulase
  misc_feature (82)..(193): Homolog of NCBI NO: 25354515 NR Description: (1-4)-beta-mannan endohydrolase [imported] -
  misc_feature (1)..(53): Homolog of NCBI NO: 25354515 NR Description: (1-4)-beta-mannan endohydrolase [imported] -
  misc_feature (1)..(193): Homolog of NCBI NO: 30681096 NR Description: glycosyl hydrolase family 5/cellulase
MLEAGAKMGLTVCRTWAFNDGGYNALQISPGRFDERVFKALDHVIAEAKTHGVRLLLSLVNNLQAYGGKTQYVNWAWQEGVGLSSSNDSFFFDPSIRRYFKNYLTVLLTRKNSLTGIEYRNDPTIFAWELINEPRCMSDVSGDTLQDWINEMTAFIKSIDNKHLLTVGLEGFYGPNSPKKLTVNPNGGPLSLGQILFETLIRQTSILPRFISTLITGFTIKGLKKNSSSL

SEQ ID NO: 22934 - DNA, 1827 bp, Arabidopsis thaliana
  misc_feature (1)..(1827): Ceres Seq. ID no. 12372037
  misc_feature: MA Experiment ID: 108461 Result: Up-regulated in Transcription
  misc_feature: MA Experiment 108461 PARAMETER Experiment Name: At_Germinating_Seeds_cDNA_P Parameter: Age (day) Value: 1 vs. 0
  misc_feature: MA Experiment 108461 PARAMETER Experiment Name: At_Germinating_Seeds_cDNA_P Parameter: Tissue Value: Germinating Seeds
  misc_feature: MA Experiment ID: 108462 Result: Up-regulated in Transcription
  misc_feature: MA Experiment 108462 PARAMETER Experiment Name: At_Germinating_Seeds_cDNA_P Parameter: Age (day) Value: 2 vs. 0
  misc_feature: MA Experiment 108462 PARAMETER Experiment Name: At_Germinating_Seeds_cDNA_P Parameter: Tissue Value: Germinating Seeds
  misc_feature: MA Experiment ID: 108489 Result: Down-regulated in Transcription
  misc_feature: MA Experiment ID: 20000179 Result: Up-regulated in Transcription
  misc_feature: MA Experiment 20000179 PARAMETER Experiment Name: At_Germinating_Seeds_P Parameter: Age (hr) Value: 6 vs. 0
  misc_feature: MA Experiment 20000179 PARAMETER Experiment Name: At_Germinating_Seeds_P Parameter: Tissue Value: Germinating Seeds
  misc_feature: MA Experiment ID: 20000180 Result: Up-regulated in Transcription
  misc_feature: MA Experiment 20000180 PARAMETER Experiment Name: At_Germinating_Seeds_P Parameter: Age (hr) Value: 24 vs. 0
  misc_feature: MA Experiment 20000180 PARAMETER Experiment Name: At_Germinating_Seeds_P Parameter: Tissue Value: Germinating Seeds
  misc_feature: MA Experiment ID: 20001558 Result: Down-regulated in Transcription
  misc_feature: MA Experiment 20001558 PARAMETER Experiment Name: At_Drought_Soil_Dry_P Parameter: Age (day) Value: 27
  misc_feature: MA Experiment 20001558 PARAMETER Experiment Name: At_Drought_Soil_Dry_P Parameter: Organism Value: A. thaliana
  misc_feature: MA Experiment 20001558 PARAMETER Experiment Name: At_Drought_Soil_Dry_P Parameter: Plant Line Value: WS
  misc_feature: MA Experiment 20001558 PARAMETER Experiment Name: At_Drought_Soil_Dry_P Parameter: Post Timepoint (hr) Value: 6
  misc_feature: MA Experiment 20001558 PARAMETER Experiment Name: At_Drought_Soil_Dry_P Parameter: Post-Treatment Value: Re-Water vs. No Drought
  misc_feature: MA Experiment 20001558 PARAMETER Experiment Name: At_Drought_Soil_Dry_P Parameter: Timepoint (day) Value: 13
  misc_feature: MA Experiment 20001558 PARAMETER Experiment Name: At_Drought_Soil_Dry_P Parameter: Treatment Value: Drought vs. No Drought
  misc_feature: MA Experiment ID: 20001905 Result: Down-regulated in Transcription
  misc_feature: MA Experiment 20001905 PARAMETER Experiment Name: At_Drought_Reproduction_P Parameter: Age (day) Value: 40
  misc_feature: MA Experiment 20001905 PARAMETER Experiment Name: At_Drought_Reproduction_P Parameter: Organism Value: A. thaliana
  misc_feature: MA Experiment 20001905 PARAMETER Experiment Name: At_Drought_Reproduction_P Parameter: Plant Line Value: WS
  misc_feature: MA Experiment 20001905 PARAMETER Experiment Name: At_Drought_Reproduction_P Parameter: Timepoint (day) Value: 10
  misc_feature: MA Experiment 20001905 PARAMETER Experiment Name: At_Drought_Reproduction_P Parameter: Tissue Value: Rosettes
  misc_feature: MA Experiment 20001905 PARAMETER Experiment Name: At_Drought_Reproduction_P Parameter: Treatment Value: Drought vs. No Drought
agaacaaggaaaaaagagaggctttttcgttttgatcctcctactcttcttcattagtgaaagctacttataaagtccaaatcttgaagtgcgtgcacggtgcaccacgaatccacgatccagtgagcagcagcaactccatctccggagctctagattcagataagaacaatggcgattccgatgcctactcgccagctattcatcgacggcgaatggagagaacccatcttgaagaagcgaatcccgatcgttaatccagctactgaagaggtcattggtgatattcctgcagctacaacggaggacgtggatgttgctgtcaacgctgctcgaagagcattatcaaggaataaagggaaagattgggccaaagcacctggagctgttcgtgctaagtatttacgtgctattgctgctaaggtaaatgaaagaaagacggatctggcaaagctcgaggcgcttgattgtggtaaaccattggatgaagcagtatgggatatggatgatgttgctggatgttttgaattttatgctgaccttgctgaaggattagatgctaagcagaaagcaccagtctcgcttcccatggagagttttaagagttatgttctgaagcaacctctcggagttgtgggacttattacaccatggaattacccccttttgatggctgtttggaaggtggctccttcccttgctgcagggtgcactgcgattctcaagccatcagagctggcatcagttacttgtttggagcttgctgatatttgtcgagaagttggtcttcctcctggggtcctcaatgttttgactggtttcggttcggaagctggtgctcctttggcatcacatcctggcgtggacaagattgcatttactggaagtttcgccacaggaagtaaggtcatgacagccgctgctcagttggtgaagcctgtttctatggaacttggtgggaagagccctctcattgtgtttgatgacgttgatcttgataaagctgctgaatgggctcttttcggttgcttctggacaaatggtcaaatctgcagtgcaacttcccgccttcttgttcacgaaagcatcgcatctgagttcatagagaagcttgtaaaatggagcaagaacattaaaatttcagaccccatggaagaaggatgcaggcttggtcctgtagttagcaaaggacagtacgagaagatattgaagtttatctcaacggccaagagtgaaggagcaacgatcttgcatggtggttcccgacctgagcatctggaaaagggcttcttcattgaaccaaccatcataactgatgtaaccacttcaatgcaaatatggagagaagaagttttcgggcctgttctttgcgtgaaaacatttgccagtgaggacgaggcaattgagctagcaaatgactctcattacggactaggagctgcagtgatatctaatgacacagaaagatgtgaccgtataagcgaggcctttgaagctgggattgtctggattaactgctcgcagccttgctttacccaagccccatggggtggtgtcaaacgcagtgggtttggacgagaacttggagaatggggacttgataactacttgagtgtgaagcaagtgactctctacacttcaaacgatccctggggatggtacaaatctcccaactaagtaatgaatacattgtcatggaaatggaaaccaaaccaaatgctgtctgttcaaatctttgtgcttttattatcagtctgtctagttcggtcctgaaactcttttgtaaaacctgttgaatttataatgaataaaagatgctttgctgat

SEQ ID NO: 22935 - protein, 501 aa, Arabidopsis thaliana
  peptide (1)..(501): Ceres Seq. ID no. 12372038
  misc_feature (1)..(500): Homolog of NCBI NO: 21655211 NR Description: betaine aldehyde dehydrogenase [Atriplex
  misc_feature (1)..(500): Homolog of NCBI NO: 17936 NR Description: betaine aldehyd dehydrogenase [Beta vulgaris]
  misc_feature (1)..(500): Homolog of NCBI NO: 118490 NR Description: Betaine-aldehyde dehydrogenase, chloroplast
  misc_feature (1)..(501): Homolog of NCBI NO: 11414910 NR Description: betaine aldehyde dehydrogenase [Avicennia marina]
  misc_feature (1)..(501): Homolog of NCBI NO: 30698520 NR Description: betaine aldehyde dehydrogenase
  misc_feature (1)..(500): Homolog of NCBI NO: 2811031 NR Description: Betaine-aldehyde dehydrogenase, chloroplast
  misc_feature (1)..(500): Homolog of NCBI NO: 11251896 NR Description: betaine-aldehyde dehydrogenase (EC 1.2.1.8)
  misc_feature (1)..(501): Homolog of NCBI NO: 15228346 NR Description: betaine aldehyde dehydrogenase-like protein
  misc_feature (1)..(500): Homolog of NCBI NO: 15131692 NR Description: putative aminoaldehyde dehydrogenase [Pisum
  misc_feature (1)..(501): Homolog of NCBI NO: 18410730 NR Description: betaine aldehyde dehydrogenase, putative
MAIPMPTRQLFIDGEWREPILKKRIPIVNPATEEVIGDIPAATTEDVDVAVNAARRALSRNKGKDWAKAPGAVRAKYLRAIAAKVNERKTDLAKLEALDCGKPLDEAVWDMDDVAGCFEFYADLAEGLDAKQKAPVSLPMESFKSYVLKQPLGVVGLITPWNYPLLMAVWKVAPSLAAGCTAILKPSELASVTCLELADICREVGLPPGVLNVLTGFGSEAGAPLASHPGVDKIAFTGSFATGSKVMTAAAQLVKPVSMELGGKSPLIVFDDVDLDKAAEWALFGCFWTNGQICSATSRLLVHESIASEFIEKLVKWSKNIKISDPMEEGCRLGPVVSKGQYEKILKFISTAKSEGATILHGGSRPEHLEKGFFIEPTIITDVTTSMQIWREEVFGPVLCVKTFASEDEAIELANDSHYGLGAAVISNDTERCDRISEAFEAGIVWINCSQPCFTQAPWGGVKRSGFGRELGEWGLDNYLSVKQVTLYTSNDPWGWYKSPN

SEQ ID NO: 22936 - protein, 497 aa, Arabidopsis thaliana
  peptide (1)..(497): Ceres Seq. ID no. 12372039
  misc_feature (1)..(496): Homolog of NCBI NO: 21655211 NR Description: betaine aldehyde dehydrogenase [Atriplex
  misc_feature (1)..(496): Homolog of NCBI NO: 17936 NR Description: betaine aldehyd dehydrogenase [Beta vulgaris]
  misc_feature (1)..(496): Homolog of NCBI NO: 118490 NR Description: Betaine-aldehyde dehydrogenase, chloroplast
  misc_feature (1)..(497): Homolog of NCBI NO: 11414910 NR Description: betaine aldehyde dehydrogenase [Avicennia marina]
  misc_feature (1)..(497): Homolog of NCBI NO: 30698520 NR Description: betaine aldehyde dehydrogenase
  misc_feature (1)..(496): Homolog of NCBI NO: 2811031 NR Description: Betaine-aldehyde dehydrogenase, chloroplast
  misc_feature (1)..(496): Homolog of NCBI NO: 11251896 NR Description: betaine-aldehyde dehydrogenase (EC 1.2.1.8)
  misc_feature (1)..(497): Homolog of NCBI NO: 15228346 NR Description: betaine aldehyde dehydrogenase-like protein
  misc_feature (1)..(496): Homolog of NCBI NO: 15131692 NR Description: putative aminoaldehyde dehydrogenase [Pisum
  misc_feature (1)..(497): Homolog of NCBI NO: 18410730 NR Description: betaine aldehyde dehydrogenase, putative
MPTRQLFIDGEWREPILKKRIPIVNPATEEVIGDIPAATTEDVDVAVNAARRALSRNKGKDWAKAPGAVRAKYLRAIAAKVNERKTDLAKLEALDCGKPLDEAVWDMDDVAGCFEFYADLAEGLDAKQKAPVSLPMESFKSYVLKQPLGVVGLITPWNYPLLMAVWKVAPSLAAGCTAILKPSELASVTCLELADICREVGLPPGVLNVLTGFGSEAGAPLASHPGVDKIAFTGSFATGSKVMTAAAQLVKPVSMELGGKSPLIVFDDVDLDKAAEWALFGCFWTNGQICSATSRLLVHESIASEFIEKLVKWSKNIKISDPMEEGCRLGPVVSKGQYEKILKFISTAKSEGATILHGGSRPEHLEKGFFIEPTIITDVTTSMQIWREEVFGPVLCVKTFASEDEAIELANDSHYGLGAAVISNDTERCDRISEAFEAGIVWINCSQPCFTQAPWGGVKRSGFGRELGEWGLDNYLSVKQVTLYTSNDPWGWYKSPN

SEQ ID NO: 22937 - protein, 391 aa, Arabidopsis thaliana
  peptide (1)..(391): Ceres Seq. ID no. 12372040
  misc_feature (1)..(390): Homolog of NCBI NO: 21655211 NR Description: betaine aldehyde dehydrogenase [Atriplex
  misc_feature (1)..(390): Homolog of NCBI NO: 17936 NR Description: betaine aldehyd dehydrogenase [Beta vulgaris]
  misc_feature (1)..(390): Homolog of NCBI NO: 118490 NR Description: Betaine-aldehyde dehydrogenase, chloroplast
  misc_feature (1)..(391): Homolog of NCBI NO: 11414910 NR Description: betaine aldehyde dehydrogenase [Avicennia marina]
  misc_feature (1)..(391): Homolog of NCBI NO: 30698520 NR Description: betaine aldehyde dehydrogenase
  misc_feature (1)..(390): Homolog of NCBI NO: 2811031 NR Description: Betaine-aldehyde dehydrogenase, chloroplast
  misc_feature (1)..(390): Homolog of NCBI NO: 11251896 NR Description: betaine-aldehyde dehydrogenase (EC 1.2.1.8)
  misc_feature (1)..(391): Homolog of NCBI NO: 15228346 NR Description: betaine aldehyde dehydrogenase-like protein
  misc_feature (1)..(390): Homolog of NCBI NO: 15131692 NR Description: putative aminoaldehyde dehydrogenase [Pisum
  misc_feature (1)..(391): Homolog of NCBI NO: 18410730 NR Description: betaine aldehyde dehydrogenase, putative
MDDVAGCFEFYADLAEGLDAKQKAPVSLPMESFKSYVLKQPLGVVGLITPWNYPLLMAVWKVAPSLAAGCTAILKPSELASVTCLELADICREVGLPPGVLNVLTGFGSEAGAPLASHPGVDKIAFTGSFATGSKVMTAAAQLVKPVSMELGGKSPLIVFDDVDLDKAAEWALFGCFWTNGQICSATSRLLVHESIASEFIEKLVKWSKNIKISDPMEEGCRLGPVVSKGQYEKILKFISTAKSEGATILHGGSRPEHLEKGFFIEPTIITDVTTSMQIWREEVFGPVLCVKTFASEDEAIELANDSHYGLGAAVISNDTERCDRISEAFEAGIVWINCSQPCFTQAPWGGVKRSGFGRELGEWGLDNYLSVKQVTLYTSNDPWGWYKSPN

SEQ ID NO: 22938 - DNA, 1466 bp, Arabidopsis thaliana
  misc_feature (1)..(1466): Ceres Seq. ID no. 12326356
  misc_feature: MA Experiment ID: 108488 Result: Down-regulated in Transcription
  misc_feature: MA Experiment ID: 20000087 Result: Up-regulated in Transcription
  misc_feature: MA Experiment 20000087 PARAMETER Experiment Name: At_100uM_ABA_Mutants_cDNA_P Parameter: Plant Line Value: WS
  misc_feature: MA Experiment 20000087 PARAMETER Experiment Name: At_100uM_ABA_Mutants_cDNA_P Parameter: Timepoint (hr) Value: 6
  misc_feature: MA Experiment 20000087 PARAMETER Experiment Name: At_100uM_ABA_Mutants_cDNA_P Parameter: Tissue Value: Aerial
  misc_feature: MA Experiment 20000087 PARAMETER Experiment Name: At_100uM_ABA_Mutants_cDNA_P Parameter: Treatment Value: 100uM ABA vs. No Treatment
  misc_feature: MA Experiment ID: 20000112 Result: Up-regulated in Transcription
  misc_feature: MA Experiment 20000112 PARAMETER Experiment Name: At_42deg_Heat_cDNA_P Parameter: Temperature (deg C) Value: 42 vs. 22
  misc_feature: MA Experiment 20000112 PARAMETER Experiment Name: At_42deg_Heat_cDNA_P Parameter: Timepoint (hr) Value: 2
  misc_feature: MA Experiment 20000112 PARAMETER Experiment Name: At_42deg_Heat_cDNA_P Parameter: Tissue Value: Aerial
  misc_feature: MA Experiment ID: 20000113 Result: Up-regulated in Transcription
  misc_feature: MA Experiment 20000113 PARAMETER Experiment Name: At_42deg_Heat_cDNA_P Parameter: Temperature (deg C) Value: 42 vs. 22
  misc_feature: MA Experiment 20000113 PARAMETER Experiment Name: At_42deg_Heat_cDNA_P Parameter: Timepoint (hr) Value: 8
  misc_feature: MA Experiment 20000113 PARAMETER Experiment Name: At_42deg_Heat_cDNA_P Parameter: Tissue Value: Aerial
aaaaacaaaaaaacaaagaggatttaagggttacgagtcgcctccccaaaacccttgtccctagtctcttctgcttcttcttcttcaaaatctctctcttcaccaaatcctcagaagatgagcaacgacaaggatagcttcaacgtctccgatcttactgctgctcttaaggacgaggatcgagctggccttgtcaatgctctaaagaacaagctgcagaatctggctggtcagcgttctgatgtgctcgagaatctgactcccaatgtgagaaagcgcgttgatgccttgagggatatacagagccaacatgatgaactagaggcaaaattccgtgaggagagagctattcttgaagccaagtatcaaacgctgtatcagcctttgtatgtcaagcgttatgagattgtgaatggcactactgaagttgaactggctccagaggatgataccaaggtggaccaaggagaggagaaaactgcagaagagaaaggagttccaagtttctggctgacagctctgaaaaataacgatgttatttccgaggaggtcacagagcgtgatgaaggggctctcaaatatcttaaagatattaagtggtgcaagattgaagagcctaaaggattcaaacttgagtttttctttgacacgaatccgtattttaagaacactgtcttgacaaagtcttatcatatgattgatgaagatgagccactgcttgagaaggctatggggacagaaattgattggtatcctggaaagtgtctaactcagaagattctcaagaagaagcctaagaaaggttcaaagaatactaaaccaatcaccaaactcgaagattgtgaaagcttcttcaacttctttagtcctccagaagttccggatgaagatgaagatatcgacgaggaaagagctgaggatcttcaaaacctgatggaacaagattatgacattggatctactattcgggaaaagattattcctcgtgctgtctcatggtttactggtgaggctatggaagcagaggattttgaaatagatgacgatgaggaagatgacattgatgaggatgaaggtgaggaagacgaagaggatgaggatgaggaggacgatgatgatgaggatgaagaagaaagcaagaccaaaaagaagccatcaatcggaaacaagaagggagggagatctcagatagttggtgaaggtaaacaagatgagaggccacccgaatgcaagcaacagtaatcttttactacgctctaccagatataaaaggattgcgtgaaaatataattcaggtcattctctgttcatcaagaatgaggattgagaaaaggttttgggatttttaaaagtgaaattcatcttgtaggagtttcgttcgtttttctattggtgtgtttattttctctaaagcactttaataatataccttggtatttaatttatgaatcaagcatcatcatctc

SEQ ID NO: 22939 - protein, 374 aa, Arabidopsis thaliana
  peptide (1)..(374): Ceres Seq. ID no. 12326357
  misc_feature (52)..(301): Pfam Name: Nucleosome assembly protein (NAP) Pfam Description: Nucleosome assembly protein (NAP)
  misc_feature (17)..(322): Homolog of NCBI NO: 34910504 NR Description: putative nucleosome assembly protein 1
  misc_feature (1)..(355): Homolog of NCBI NO: 21898560 NR Description: nucleosome/chromatin assembly factor group A [Zea
  misc_feature (1)..(374): Homolog of NCBI NO: 29569109 NR Description: nucleosome/chromatin assembly factor group A [Zea
  misc_feature (1)..(374): Homolog of NCBI NO: 2129840 NR Description: nucleosome assembly protein 1 - soybean
  misc_feature (1)..(374): Homolog of NCBI NO: 7488816 NR Description: nucleosome assembly protein 1 - garden pea
  misc_feature (1)..(374): Homolog of NCBI NO: 15224782 NR Description: putative nucleosome assembly protein
  misc_feature (1)..(374): Homolog of NCBI NO: 8777435 NR Description: nucleosome assembly protein [Arabidopsis thaliana]
  misc_feature (1)..(374): Homolog of NCBI NO: 18423918 NR Description: nucleosome assembly protein
  misc_feature (1)..(374): Homolog of NCBI NO: 15236115 NR Description: nucleosome assembly protein I-like protein
  misc_feature (1)..(374): Homolog of NCBI NO: 549975 NR Description: nucleosome assembly protein I-like protein
MSNDKDSFNVSDLTAALKDEDRAGLVNALKNKLQNLAGQRSDVLENLTPNVRKRVDALRDIQSQHDELEAKFREERAILEAKYQTLYQPLYVKRYEIVNGTTEVELAPEDDTKVDQGEEKTAEEKGVPSFWLTALKNNDVISEEVTERDEGALKYLKDIKWCKIEEPKGFKLEFFFDTNPYFKNTVLTKSYHMIDEDEPLLEKAMGTEIDWYPGKCLTQKILKKKPKKGSKNTKPITKLEDCESFFNFFSPPEVPDEDEDIDEERAEDLQNLMEQDYDIGSTIREKIIPRAVSWFTGEAMEAEDFEIDDDEEDDIDEDEGEEDEEDEDEEDDDDEDEEESKTKKKPSIGNKKGGRSQIVGEGKQDERPPECKQQ

SEQ ID NO: 22940 - DNA, 1970 bp, Arabidopsis thaliana
  misc_feature (1)..(1970): Ceres Seq. ID no. 12371409
  misc_feature: MA Experiment ID: 20000182 Result: Up-regulated in Transcription
  misc_feature: MA Experiment 20000182 PARAMETER Experiment Name: At_2mM_SA_P Parameter: Age (day) Value: 14
  misc_feature: MA Experiment 20000182 PARAMETER Experiment Name: At_2mM_SA_P Parameter: Organism Value: A. thaliana
  misc_feature: MA Experiment 20000182 PARAMETER Experiment Name: At_2mM_SA_P Parameter: Plant Line Value: WS
  misc_feature: MA Experiment 20000182 PARAMETER Experiment Name: At_2mM_SA_P Parameter: Timepoint (hr) Value: 6
  misc_feature: MA Experiment 20000182 PARAMETER Experiment Name: At_2mM_SA_P Parameter: Tissue Value: Aerial
  misc_feature: MA Experiment 20000182 PARAMETER Experiment Name: At_2mM_SA_P Parameter: Treatment Value: 2mM SA vs. No Treatment
aaaaaagaatacacagaccagtcttcgtgtgctcgtaattggcgattctcaaattcgatctccgtacaaacaatggccgaaacctcgaagcaagtcaacggcgacgatgcccaggatcttcactcgcttctttcttctccggcgagggatttcctcgttcgtaatgacggcgaacaggtgaaagttgacagcttgttagggaagaagattggattgtatttttcagctgcttggtgtggaccgtgtcagcggtttactccacagctggtggaagtctacaacgagctctcttcgaaagttggttttgagattgtgtttgtgtcaggtgatgaggatgaagagtcatttggagattatttcagaaagatgccctggctcgctgttccgtttactgattcggaaacccgtgaccgtttggatgagttgtttaaggttaggggaatacctaacctagtgatggttgatgatcatggtaaacttgtgaatgagaatggtgttggggtcatacgaagctatggagctgatgcttatcctttcacaccagagaaaatgaaggagatcaaagaggatgaagatagagctcggagaggacagaccttaagatctgtcttggtgactccttcacgagactttgtgatttcgcctgacggaaacaaggtacccgtatcagagcttgagggaaaaaccattggccttctcttctctgtggcctcttacaggaaatgcacagagcttactccaaagcttgttgagttttatacgaagctgaaggagaataaggaggattttgagattgtgttgatatctcttgaagatgatgaggagtcttttaatcaagacttcaagaccaagccatggctagcattgccgttcaacgacaaaagtggatcaaaattggctcggcatttcatgctgtcaacactaccgacactggtcattctcggccctgatggaaaaacccgtcactcgaatgtcgctgaagctattgatgactatggagttcttgcgtatcctttcactccagagaagtttcaagaactcaaggagctagaaaaggcaaaggtagaggctcaaacgctcgagtcacttcttgtctcaggtgatctcaactacgttctcggaaaagatggggcaaaggtgcttgtttcggatctggtggggaagactattcttatgtacttctcagctcactggtgtcctccttgtcgcgcttttacaccaaagcttgttgaagtatacaagcagataaaggagcggaatgaagcgtttgaattgatcttcatctccagtgaccgtgaccaggaatcattcgatgagtactattcgcaaatgccgtggctggctcttccatttggtgatcctaggaaagcatccttggcaaaaacctttaaggttggtgggatcccaatgctagcagctctgggaccaactgggcaaaccgtaacaaaagaagcaagggaccttgtcgtagcccatggagccgatgcttacccttttactgaggaacgtttgaaggagattgaagctaagtacgatgagatagcaaaagattggcctaagaaggtgaaacatgttctccatgaagaacatgagctagaactaactcgtgttcaggtttacacatgcgataagtgtgaggaagaagggacaatatggtcttaccattgcgacgaatgcgactttgatcttcacgccaagtgtgctttaaacgaggacacaaaagaaaacggcgatgaggctgtgaaagttggtggcgacgagtccaaagatggttgggtttgtgaaggaaacgtatgcaccaaggcctgataggtagcttcaggcacagttatgtcactatgtgtatgcaaagctatttcctttctttgtataattgctaagagtgagaatgtgtggttacaatctgatatctgattaagaccttggagataaactctgttaatctaaagtaataataaaagaatcttctt

SEQ ID NO: 22941 - protein, 602 aa, Arabidopsis thaliana
  peptide (1)..(602): Ceres Seq. ID no. 12371410
  misc_feature (540)..(568): Pfam Name: DC1 domain Pfam Description: DC1 domain
  misc_feature (30)..(367): Homolog of NCBI NO: 23304737 NR Description: PDI-like protein [Quercus suber]
  misc_feature (212)..(540): Homolog of NCBI NO: 38567893 NR Description: OSJNBa0060N03.13 [Oryza sativa (japonica
  misc_feature (36)..(352): Homolog of NCBI NO: 31415911 NR Description: putative trypanothione-dependent peroxidase
  misc_feature (200)..(572): Homolog of NCBI NO: 18417767 NR Description: similar to putative receptor kinase
  misc_feature (33)..(523): Homolog of NCBI NO: 23304737 NR Description: PDI-like protein [Quercus suber]
  misc_feature (43)..(601): Homolog of NCBI NO: 31415911 NR Description: putative trypanothione-dependent peroxidase
  misc_feature (25)..(602): Homolog of NCBI NO: 4056568 NR Description: PDI-like protein [Zea mays]
  misc_feature (36)..(602): Homolog of NCBI NO: 31415915 NR Description: putative trypanothione-dependent peroxidase
  misc_feature (25)..(602): Homolog of NCBI NO: 21592996 NR Description: PDI-like protein [Arabidopsis thaliana]
  misc_feature (25)..(602): Homolog of NCBI NO: 18406743 NR Description: expressed protein
KKEYTDQSSCARNWRFSNSISVQTMAETSKQVNGDDAQDLHSLLSSPARDFLVRNDGEQVKVDSLLGKKIGLYFSAAWCGPCQRFTPQLVEVYNELSSKVGFEIVFVSGDEDEESFGDYFRKMPWLAVPFTDSETRDRLDELFKVRGIPNLVMVDDHGKLVNENGVGVIRSYGADAYPFTPEKMKEIKEDEDRARRGQTLRSVLVTPSRDFVISPDGNKVPVSELEGKTIGLLFSVASYRKCTELTPKLVEFYTKLKENKEDFEIVLISLEDDEESFNQDFKTKPWLALPFNDKSGSKLARHFMLSTLPTLVILGPDGKTRHSNVAEAIDDYGVLAYPFTPEKFQELKELEKAKVEAQTLESLLVSGDLNYVLGKDGAKVLVSDLVGKTILMYFSAHWCPPCRAFTPKLVEVYKQIKERNEAFELIFISSDRDQESFDEYYSQMPWLALPFGDPRKASLAKTFKVGGIPMLAALGPTGQTVTKEARDLVVAHGADAYPFTEERLKEIEAKYDEIAKDWPKKVKHVLHEEHELELTRVQVYTCDKCEEEGTIWSYHCDECDFDLHAKCALNEDTKENGDEAVKVGGDESKDGWVCEGNVCTKA

SEQ ID NO: 22942 - protein, 578 aa, Arabidopsis thaliana
  peptide (1)..(578): Ceres Seq. ID no. 12371411
  misc_feature (516)..(544): Pfam Name: DC1 domain Pfam Description: DC1 domain
  misc_feature (6)..(343): Homolog of NCBI NO: 23304737 NR Description: PDI-like protein [Quercus suber]
  misc_feature (188)..(516): Homolog of NCBI NO: 38567893 NR Description: OSJNBa0060N03.13 [Oryza sativa (japonica
  misc_feature (12)..(328): Homolog of NCBI NO: 31415911 NR Description: putative trypanothione-dependent peroxidase
  misc_feature (176)..(548): Homolog of NCBI NO: 18417767 NR Description: similar to putative receptor kinase
  misc_feature (9)..(499): Homolog of NCBI NO: 23304737 NR Description: PDI-like protein [Quercus suber]
  misc_feature (19)..(577): Homolog of NCBI NO: 31415911 NR Description: putative trypanothione-dependent peroxidase
  misc_feature (1)..(578): Homolog of NCBI NO: 4056568 NR Description: PDI-like protein [Zea mays]
  misc_feature (12)..(578): Homolog of NCBI NO: 31415915 NR Description: putative trypanothione-dependent peroxidase
  misc_feature (1)..(578): Homolog of NCBI NO: 21592996 NR Description: PDI-like protein [Arabidopsis thaliana]
  misc_feature (1)..(578): Homolog of NCBI NO: 18406743 NR Description: expressed protein
MAETSKQVNGDDAQDLHSLLSSPARDFLVRNDGEQVKVDSLLGKKIGLYFSAAWCGPCQRFTPQLVEVYNELSSKVGFEIVFVSGDEDEESFGDYFRKMPWLAVPFTDSETRDRLDELFKVRGIPNLVMVDDHGKLVNENGVGVIRSYGADAYPFTPEKMKEIKEDEDRARRGQTLRSVLVTPSRDFVISPDGNKVPVSELEGKTIGLLFSVASYRKCTELTPKLVEFYTKLKENKEDFEIVLISLEDDEESFNQDFKTKPWLALPFNDKSGSKLARHFMLSTLPTLVILGPDGKTRHSNVAEAIDDYGVLAYPFTPEKFQELKELEKAKVEAQTLESLLVSGDLNYVLGKDGAKVLVSDLVGKTILMYFSAHWCPPCRAFTPKLVEVYKQIKERNEAFELIFISSDRDQESFDEYYSQMPWLALPFGDPRKASLAKTFKVGGIPMLAALGPTGQTVTKEARDLVVAHGADAYPFTEERLKEIEAKYDEIAKDWPKKVKHVLHEEHELELTRVQVYTCDKCEEEGTIWSYHCDECDFDLHAKCALNEDTKENGDEAVKVGGDESKDGWVCEGNVCTKA

SEQ ID NO: 22943 - protein, 480 aa, Arabidopsis thaliana
  peptide (1)..(480): Ceres Seq. ID no. 12371412
  misc_feature (418)..(446): Pfam Name: DC1 domain Pfam Description: DC1 domain
  misc_feature (1)..(245): Homolog of NCBI NO: 23304737 NR Description: PDI-like protein [Quercus suber]
  misc_feature (90)..(418): Homolog of NCBI NO: 38567893 NR Description: OSJNBa0060N03.13 [Oryza sativa (japonica
  misc_feature (1)..(230): Homolog of NCBI NO: 31415911 NR Description: putative trypanothione-dependent peroxidase
  misc_feature (78)..(450): Homolog of NCBI NO: 18417767 NR Description: similar to putative receptor kinase
  misc_feature (1)..(401): Homolog of NCBI NO: 23304737 NR Description: PDI-like protein [Quercus suber]
  misc_feature (1)..(479): Homolog of NCBI NO: 31415911 NR Description: putative trypanothione-dependent peroxidase
  misc_feature (1)..(480): Homolog of NCBI NO: 4056568 NR Description: PDI-like protein [Zea mays]
  misc_feature (1)..(480): Homolog of NCBI NO: 31415915 NR Description: putative trypanothione-dependent peroxidase
  misc_feature (1)..(480): Homolog of NCBI NO: 21592996 NR Description: PDI-like protein [Arabidopsis thaliana]
  misc_feature (1)..(480): Homolog of NCBI NO: 18406743 NR Description: expressed protein
MPWLAVPFTDSETRDRLDELFKVRGIPNLVMVDDHGKLVNENGVGVIRSYGADAYPFTPEKMKEIKEDEDRARRGQTLRSVLVTPSRDFVISPDGNKVPVSELEGKTIGLLFSVASYRKCTELTPKLVEFYTKLKENKEDFEIVLISLEDDEESFNQDFKTKPWLALPFNDKSGSKLARHFMLSTLPTLVILGPDGKTRHSNVAEAIDDYGVLAYPFTPEKFQELKELEKAKVEAQTLESLLVSGDLNYVLGKDGAKVLVSDLVGKTILMYFSAHWCPPCRAFTPKLVEVYKQIKERNEAFELIFISSDRDQESFDEYYSQMPWLALPFGDPRKASLAKTFKVGGIPMLAALGPTGQTVTKEARDLVVAHGADAYPFTEERLKEIEAKYDEIAKDWPKKVKHVLHEEHELELTRVQVYTCDKCEEEGTIWSYHCDECDFDLHAKCALNEDTKENGDEAVKVGGDESKDGWVCEGNVCTKA

SEQ ID NO: 22944 - DNA, 1095 bp, Arabidopsis thaliana
  misc_feature (1)..(1095): Ceres Seq. ID no. 12422727
  misc_feature: MA Experiment ID: 20000184 Result: Down-regulated in Transcription
  misc_feature: MA Experiment 20000184 PARAMETER Experiment Name: At_Shoots__P Parameter: Age (day) Value: 7
  misc_feature: MA Experiment 20000184 PARAMETER Experiment Name: At_Shoots__P Parameter: Tissue Value: Shoots vs. Whole Plant
  misc_feature: MA Experiment ID: 20000224 Result: Down-regulated in Transcription
  misc_feature: MA Experiment ID: 20000437 Result: Up-regulated in Transcription
  misc_feature: MA Experiment 20000437 PARAMETER Experiment Name: At_Drought_P Parameter: Age (day) Value: 8
  misc_feature: MA Experiment 20000437 PARAMETER Experiment Name: At_Drought_P Parameter: Organism Value: A. thaliana
  misc_feature: MA Experiment 20000437 PARAMETER Experiment Name: At_Drought_P Parameter: Plant Line Value: WS
  misc_feature: MA Experiment 20000437 PARAMETER Experiment Name: At_Drought_P Parameter: Timepoint (hr) Value: 24
  misc_feature: MA Experiment 20000437 PARAMETER Experiment Name: At_Drought_P Parameter: Tissue Value: Whole Plant
  misc_feature: MA Experiment 20000437 PARAMETER Experiment Name: At_Drought_P Parameter: Treatment Value: Drought vs. No Drought
  misc_feature: MA Experiment ID: 20000794 Result: Up-regulated in Transcription
  misc_feature: MA Experiment 20000794 PARAMETER Experiment Name: At_Petals_P Parameter: Age (day) Value: 23-25 days
  misc_feature: MA Experiment 20000794 PARAMETER Experiment Name: At_Petals_P Parameter: Plant Line Value: WS
  misc_feature: MA Experiment 20000794 PARAMETER Experiment Name: At_Petals_P Parameter: Tissue Value: Petals vs. Whole plant
  misc_feature: MA Experiment ID: 20001911 Result: Up-regulated in Transcription
  misc_feature: MA Experiment 20001911 PARAMETER Experiment Name: At_Drought_Reproduction_P Parameter: Age (day) Value: 40
  misc_feature: MA Experiment 20001911 PARAMETER Experiment Name: At_Drought_Reproduction_P Parameter: Organism Value: A. thaliana
  misc_feature: MA Experiment 20001911 PARAMETER Experiment Name: At_Drought_Reproduction_P Parameter: Plant Line Value: WS
  misc_feature: MA Experiment 20001911 PARAMETER Experiment Name: At_Drought_Reproduction_P Parameter: Timepoint (day) Value: 10
  misc_feature: MA Experiment 20001911 PARAMETER Experiment Name: At_Drought_Reproduction_P Parameter: Tissue Value: Flowers
  misc_feature: MA Experiment 20001911 PARAMETER Experiment Name: At_Drought_Reproduction_P Parameter: Treatment Value: Drought vs. No Drought
atctatctacgcatcatcgatctcgaagtacgtttcggttttcaggccaatctctgaatctgcgtgacaaaagcaacaaattacatatctctctctctgcgcgacttcgaagatcaacatccatggcgtcacaggtaaggtcagtaaaagttggcaatctctcttcaggagcaactgagcatgatattaaagagtttttctctttctctggtgaagttgaaagcatcgatatccaaagtaacgagcatagtgcttatgtcacatttaaagaaactcaaggagcagagactgctgtgctcttatctggaccgagtattgccgatcaatcagtcatcattgagttggctcccaactacagtccaccagcagcccctcatgctgaaacacagagcagcggtgcagaatctgttgtccagaaggcagaagatgttgtgagcagcatgttagcaaagggtttcattcttgggaaagatgctgtcggcaaagcaaaagcttttgatgagaaacatggtttcacctcaaccgccaccgcaggagttgcttcactagaccaaaaaatcggtcttagccagaaacttacagctggaacaagcttggtgaacgaaaaaatcaaggcggtggaccaaaactttcaggtaacagagaggaccaagtctgtgtatgcagctgcggagcagactgtgagcagtgcaggaagcgctgtgatgaagaaccgttacgtgttaactggtgtgagctgggccgcaggagcattcaatagagtggctcaagcagctggagaggttggacagaaaacaaaagagaaggttgaagctgagcaaccatcgcaaccagcacagtcgcagcagcaactgccagaagggtattctccgattcattcgtccgaatactcgaagaactaatatcatcaagttaaacagtttcctttgtttctccttgttggtttctttgacatggaagttggaaatctggtttggtctttgggatgtaccatataagctatgcctggattttccctaccactattagactatagtttgggttttttccaatatacatatttaataagttgacatttaaatctttctttacccc

SEQ ID NO: 22945 - protein, 299 aa, Arabidopsis thaliana
  peptide (1)..(299): Ceres Seq. ID no. 12422728
  misc_feature (48)..(112): Pfam Name: RNA recognition motif. (a.k.a. RRM, RBD, or RNP domain) Pfam Description: RNA recognition motif. (a.k.a. RRM, RBD, or RNP
  misc_feature (44)..(297): Homolog of NCBI NO: 18071362 NR Description: putative splicing regulatory protein
  misc_feature (38)..(291): Homolog of NCBI NO: 34897896 NR Description: ESTs D15336(C0474),C98053(C0474) correspond to a of the predicted gene.~Similar to Arabidopsis thaliana DNA
  misc_feature (42)..(295): Homolog of NCBI NO: 38347069 NR Description: OSJNBa0006A01.10 [Oryza sativa (japonica
  misc_feature (47)..(298): Homolog of NCBI NO: 30695063 NR Description: RNA recognition motif (RRM)-containing protein
  misc_feature (47)..(298): Homolog of NCBI NO: 8809670 NR Description: gene_id:MSD23.5~pir||C71447~similar to unknown
  misc_feature (45)..(299): Homolog of NCBI NO: 38344181 NR Description: OSJNBa0053K19.20 [Oryza sativa (japonica
  misc_feature (47)..(298): Homolog of NCBI NO: 18414951 NR Description: RRM-containing protein
  misc_feature (41)..(299): Homolog of NCBI NO: 21592997 NR Description: unknown [Arabidopsis thaliana]
  misc_feature (41)..(299): Homolog of NCBI NO: 15237419 NR Description: RRM-containing protein
  misc_feature (41)..(299): Homolog of NCBI NO: 16648740 NR Description: AT5g16840/F5E19_180 [Arabidopsis thaliana]
LSTHHRSRSTFRFSGQSLNLRDKSNKLHISLSARLRRSTSMASQVRSVKVGNLSSGATEHDIKEFFSFSGEVESIDIQSNEHSAYVTFKETQGAETAVLLSGPSIADQSVIIELAPNYSPPAAPHAETQSSGAESVVQKAEDVVSSMLAKGFILGKDAVGKAKAFDEKHGFTSTATAGVASLDQKIGLSQKLTAGTSLVNEKIKAVDQNFQVTERTKSVYAAAEQTVSSAGSAVMKNRYVLTGVSWAAGAFNRVAQAAGEVGQKTKEKVEAEQPSQPAQSQQQLPEGYSPIHSSEYSKN

SEQ ID NO: 22946 - protein, 259 aa, Arabidopsis thaliana
  peptide (1)..(259): Ceres Seq. ID no. 12422729
  misc_feature (8)..(72): Pfam Name: RNA recognition motif. (a.k.a. RRM, RBD, or RNP domain) Pfam Description: RNA recognition motif. (a.k.a. RRM, RBD, or RNP
  misc_feature (4)..(257): Homolog of NCBI NO: 18071362 NR Description: putative splicing regulatory protein
  misc_feature (1)..(251): Homolog of NCBI NO: 34897896 NR Description: ESTs D15336(C0474),C98053(C0474) correspond to a of the predicted gene.~Similar to Arabidopsis thaliana DNA
  misc_feature (2)..(255): Homolog of NCBI NO: 38347069 NR Description: OSJNBa0006A01.10 [Oryza sativa (japonica
  misc_feature (7)..(258): Homolog of NCBI NO: 30695063 NR Description: RNA recognition motif (RRM)-containing protein
  misc_feature (7)..(258): Homolog of NCBI NO: 8809670 NR Description: gene_id:MSD23.5~pir||C71447~similar to unknown
  misc_feature (5)..(259): Homolog of NCBI NO: 38344181 NR Description: OSJNBa0053K19.20 [Oryza sativa (japonica
  misc_feature (7)..(258): Homolog of NCBI NO: 18414951 NR Description: RRM-containing protein
  misc_feature (1)..(259): Homolog of NCBI NO: 21592997 NR Description: unknown [Arabidopsis thaliana]
  misc_feature (1)..(259): Homolog of NCBI NO: 15237419 NR Description: RRM-containing protein
  misc_feature (1)..(259): Homolog of NCBI NO: 16648740 NR Description: AT5g16840/F5E19_180 [Arabidopsis thaliana]
MASQVRSVKVGNLSSGATEHDIKEFFSFSGEVESIDIQSNEHSAYVTFKETQGAETAVLLSGPSIADQSVIIELAPNYSPPAAPHAETQSSGAESVVQKAEDVVSSMLAKGFILGKDAVGKAKAFDEKHGFTSTATAGVASLDQKIGLSQKLTAGTSLVNEKIKAVDQNFQVTERTKSVYAAAEQTVSSAGSAVMKNRYVLTGVSWAAGAFNRVAQAAGEVGQKTKEKVEAEQPSQPAQSQQQLPEGYSPIHSSEYSKN

SEQ ID NO: 22947 - protein, 153 aa, Arabidopsis thaliana
  peptide (1)..(153): Ceres Seq. ID no. 12422730
  misc_feature (1)..(151): Homolog of NCBI NO: 18071362 NR Description: putative splicing regulatory protein
  misc_feature (1)..(145): Homolog of NCBI NO: 34897896 NR Description: ESTs D15336(C0474),C98053(C0474) correspond to a of the predicted gene.~Similar to Arabidopsis thaliana DNA
  misc_feature (1)..(149): Homolog of NCBI NO: 38347069 NR Description: OSJNBa0006A01.10 [Oryza sativa (japonica
  misc_feature (1)..(152): Homolog of NCBI NO: 30695063 NR Description: RNA recognition motif (RRM)-containing protein
  misc_feature (1)..(152): Homolog of NCBI NO: 8809670 NR Description: gene_id:MSD23.5~pir||C71447~similar to unknown
  misc_feature (1)..(153): Homolog of NCBI NO: 38344181 NR Description: OSJNBa0053K19.20 [Oryza sativa (japonica
  misc_feature (1)..(152): Homolog of NCBI NO: 18414951 NR Description: RRM-containing protein
  misc_feature (1)..(153): Homolog of NCBI NO: 21592997 NR Description: unknown [Arabidopsis thaliana]
  misc_feature (1)..(153): Homolog of NCBI NO: 15237419 NR Description: RRM-containing protein
  misc_feature (1)..(153): Homolog of NCBI NO: 16648740 NR Description: AT5g16840/F5E19_180 [Arabidopsis thaliana]
MLAKGFILGKDAVGKAKAFDEKHGFTSTATAGVASLDQKIGLSQKLTAGTSLVNEKIKAVDQNFQVTERTKSVYAAAEQTVSSAGSAVMKNRYVLTGVSWAAGAFNRVAQAAGEVGQKTKEKVEAEQPSQPAQSQQQLPEGYSPIHSSEYSKN

SEQ ID NO: 22948 - DNA, 1110 bp, Arabidopsis thaliana
  misc_feature (1)..(1110): Ceres Seq. ID no. 13509156
  misc_feature: MA Experiment ID: 20000227 Result: Down-regulated in Transcription
  misc_feature: MA Experiment 20000227 PARAMETER Experiment Name: At_Root-Tips-vs-Tops_P Parameter: Tissue Value: Root Tips vs. Root Tops
  misc_feature: MA Experiment ID: 20000234 Result: Down-regulated in Transcription
  misc_feature: MA Experiment 20000234 PARAMETER Experiment Name: At_Siliques_P Parameter: Age (day) Value: 21
  misc_feature: MA Experiment 20000234 PARAMETER Experiment Name: At_Siliques_P Parameter: Organism Value: A. thaliana
  misc_feature: MA Experiment 20000234 PARAMETER Experiment Name: At_Siliques_P Parameter: Plant Line Value: WS
  misc_feature: MA Experiment 20000234 PARAMETER Experiment Name: At_Siliques_P Parameter: Tissue Value: Less Than 5mm Siliques vs. Whole Plant
  misc_feature: MA Experiment ID: 20000235 Result: Down-regulated in Transcription
  misc_feature: MA Experiment 20000235 PARAMETER Experiment Name: At_Siliques_P Parameter: Age (day) Value: 21
  misc_feature: MA Experiment 20000235 PARAMETER Experiment Name: At_Siliques_P Parameter: Organism Value: A. thaliana
  misc_feature: MA Experiment 20000235 PARAMETER Experiment Name: At_Siliques_P Parameter: Plant Line Value: WS
  misc_feature: MA Experiment 20000235 PARAMETER Experiment Name: At_Siliques_P Parameter: Tissue Value: 5-10mm Siliques vs. Whole Plant
  misc_feature: MA Experiment ID: 20000264 Result: Down-regulated in Transcription
  misc_feature: MA Experiment 20000264 PARAMETER Experiment Name: At_Open_Flower_P Parameter: Age (day) Value: 21
  misc_feature: MA Experiment 20000264 PARAMETER Experiment Name: At_Open_Flower_P Parameter: Plant Line Value: WS
  misc_feature: MA Experiment 20000264 PARAMETER Experiment Name: At_Open_Flower_P Parameter: Tissue Value: Open Flower vs. Whole Plant
  misc_feature: MA Experiment ID: 20000265 Result: Down-regulated in Transcription
  misc_feature: MA Experiment 20000265 PARAMETER Experiment Name: At_Open_Flower_P Parameter: Age (day) Value: 21
  misc_feature: MA Experiment 20000265 PARAMETER Experiment Name: At_Open_Flower_P Parameter: Plant Line Value: WS
  misc_feature: MA Experiment 20000265 PARAMETER Experiment Name: At_Open_Flower_P Parameter: Tissue Value: Closed Flower vs. Whole Plant
  misc_feature: MA Experiment ID: 20000268 Result: Down-regulated in Transcription
  misc_feature: MA Experiment 20000268 PARAMETER Experiment Name: At_100mM_NaCl__P Parameter: Age (day) Value: 14
  misc_feature: MA Experiment 20000268 PARAMETER Experiment Name: At_100mM_NaCl__P Parameter: Organism Value: A. thaliana
  misc_feature: MA Experiment 20000268 PARAMETER Experiment Name: At_100mM_NaCl__P Parameter: Plant Line Value: WS
  misc_feature: MA Experiment 20000268 PARAMETER Experiment Name: At_100mM_NaCl__P Parameter: Timepoint (hr) Value: 6
  misc_feature: MA Experiment 20000268 PARAMETER Experiment Name: At_100mM_NaCl__P Parameter: Tissue Value: Whole Plant
  misc_feature: MA Experiment 20000268 PARAMETER Experiment Name: At_100mM_NaCl__P Parameter: Treatment Value: 100mM NaCl vs. No Treatment
  misc_feature: MA Experiment ID: 20000286 Result: Down-regulated in Transcription
  misc_feature: MA Experiment 20000286 PARAMETER Experiment Name: At_Open_Flower_P Parameter: Age (day) Value: 21
  misc_feature: MA Experiment 20000286 PARAMETER Experiment Name: At_Open_Flower_P Parameter: Plant Line Value: WS
  misc_feature: MA Experiment 20000286 PARAMETER Experiment Name: At_Open_Flower_P Parameter: Tissue Value: Half Open vs. Whole Plant
  misc_feature: MA Experiment ID: 20000438 Result: Down-regulated in Transcription
  misc_feature: MA Experiment 20000438 PARAMETER Experiment Name: At_Shoots__P Parameter: Age (day) Value: 14
  misc_feature: MA Experiment 20000438 PARAMETER Experiment Name: At_Shoots__P Parameter: Tissue Value: Shoots vs. Whole Plant
  misc_feature: MA Experiment ID: 20000439 Result: Down-regulated in Transcription
  misc_feature: MA Experiment 20000439 PARAMETER Experiment Name: At_Roots__P Parameter: Age (day) Value: 14 vs. 21
  misc_feature: MA Experiment 20000439 PARAMETER Experiment Name: At_Roots__P Parameter: Organism Value: A. thaliana
  misc_feature: MA Experiment 20000439 PARAMETER Experiment Name: At_Roots__P Parameter: Tissue Value: Roots vs. Whole Plant
  misc_feature: MA Experiment ID: 20000460 Result: Up-regulated in Transcription
  misc_feature: MA Experiment 20000460 PARAMETER Experiment Name: At_10percent_PEG_P Parameter: Age (day) Value: 12
  misc_feature: MA Experiment 20000460 PARAMETER Experiment Name: At_10percent_PEG_P Parameter: Organism Value: A. thaliana
  misc_feature: MA Experiment 20000460 PARAMETER Experiment Name: At_10percent_PEG_P Parameter: Plant Line Value: WS
  misc_feature: MA Experiment 20000460 PARAMETER Experiment Name: At_10percent_PEG_P Parameter: Timepoint (day) Value: 12
  misc_feature: MA Experiment 20000460 PARAMETER Experiment Name: At_10percent_PEG_P Parameter: Tissue Value: Whole Plant
  misc_feature: MA Experiment 20000460 PARAMETER Experiment Name: At_10percent_PEG_P Parameter: Treatment Value: 10percent PEG vs. No Treatment
  misc_feature: MA Experiment ID: 20000495 Result: Down-regulated in Transcription
  misc_feature: MA Experiment 20000495 PARAMETER Experiment Name: At_Guard_Cells_P Parameter: Harvest Date Value: 8/2/2002
  misc_feature: MA Experiment 20000495 PARAMETER Experiment Name: At_Guard_Cells_P Parameter: Organism Value: A. thaliana
  misc_feature: MA Experiment 20000495 PARAMETER Experiment Name: At_Guard_Cells_P Parameter: Tissue Value: Guard Cells vs. Leaves
  misc_feature: MA Experiment ID: 20000794 Result: Down-regulated in Transcription
  misc_feature: MA Experiment 20000794 PARAMETER Experiment Name: At_Petals_P Parameter: Age (day) Value: 23-25 days
  misc_feature: MA Experiment 20000794 PARAMETER Experiment Name: At_Petals_P Parameter: Plant Line Value: WS
  misc_feature: MA Experiment 20000794 PARAMETER Experiment Name: At_Petals_P Parameter: Tissue Value: Petals vs. Whole plant
  misc_feature: MA Experiment ID: 20001247 Result: Up-regulated in Transcription
  misc_feature: MA Experiment 20001247 PARAMETER Experiment Name: At_Far-red-induction_P Parameter: Age (day) Value: 7
  misc_feature: MA Experiment 20001247 PARAMETER Experiment Name: At_Far-red-induction_P Parameter: Light Value: Far-red vs. White
  misc_feature: MA Experiment 20001247 PARAMETER Experiment Name: At_Far-red-induction_P Parameter: Organism Value: A. thaliana
  misc_feature: MA Experiment 20001247 PARAMETER Experiment Name: At_Far-red-induction_P Parameter: Plant Line Value: Columbia
  misc_feature: MA Experiment 20001247 PARAMETER Experiment Name: At_Far-red-induction_P Parameter: Timepoint (hr) Value: 1
  misc_feature: MA Experiment 20001247 PARAMETER Experiment Name: At_Far-red-induction_P Parameter: Tissue Value: Whole Plant
  misc_feature: MA Experiment ID: 20001905 Result: Up-regulated in Transcription
  misc_feature: MA Experiment 20001905 PARAMETER Experiment Name: At_Drought_Reproduction_P Parameter: Age (day) Value: 40
  misc_feature: MA Experiment 20001905 PARAMETER Experiment Name: At_Drought_Reproduction_P Parameter: Organism Value: A. thaliana
  misc_feature: MA Experiment 20001905 PARAMETER Experiment Name: At_Drought_Reproduction_P Parameter: Plant Line Value: WS
  misc_feature: MA Experiment 20001905 PARAMETER Experiment Name: At_Drought_Reproduction_P Parameter: Timepoint (day) Value: 10
  misc_feature: MA Experiment 20001905 PARAMETER Experiment Name: At_Drought_Reproduction_P Parameter: Tissue Value: Rosettes
  misc_feature: MA Experiment 20001905 PARAMETER Experiment Name: At_Drought_Reproduction_P Parameter: Treatment Value: Drought vs. No Drought
cccactcaaattctgtttcagtgttcttcaaattctcaatctttctctcaattcatctaaagggttcctcaaagtttcaatctttctctctgaatctaaaccatggctcgttgtagcaacaatctcgtagggatactcaatttcctagtatttcttctctcgatcccaatcttagctggtggaatctggctaagccaaaaagggtcaacagagtgtgaaagattcctagacaaaccagtgattgctcttggtgttttccttatggttgtagcaatagctggtctaataggttcatgttgtagagtcacatggcttctttgggtttatctctttgtcatgttccttttgattctccttgtgttctgtataacagtttttgcctttgttgttactaacaaaggagctggtgaagctattgaaggaaaaggttataaagagtataaacttggtgattactctacttggttacagaaacgtgttgagaatggtaaaaattggaataagattaggagttgtcttgtggagagcaaagtttgttctaagcttgaagccaagtttgttaatgttcctgtcaatagtttctacaaggaacatcttactgctcttcagtctggttgctgcaaaccttcagatgaatgtggtttcgagtacgtaaacccaacaacctggaccaagaacacaacgggaacacacactaatccagactgccaaacctgggacaacgcaaaagaaaagctctgcttcgattgtcaatcttgtaaagcgggtctactcgacaacgtcaaaagcgcttggaagaaagttgcaatcgttaacatcgtcttccttgtcttcctcatcattgtctactctgttggttgctgtgctttcaggaacaacaagagggatgacagttattcccgtacctacggatataagccttgaacatagtttatcgggttttaggacagagattcgttgatacattgttggagtttggttttatgtttgatgatttttatctttggtgttttgatgagacctattgcttgtacagctcacttatgagactattatcagtatgttctgccttttgggctaaaccttgatattgatttattatatncnttt

SEQ ID NO: 22949 - protein, 273 aa, Arabidopsis thaliana
  peptide (1)..(273): Ceres Seq. ID no. 13509157
  misc_feature (4)..(245): Pfam Name: Tetraspanin family Pfam Description: Tetraspanin family
  misc_feature (1)..(271): Homolog of NCBI NO: 15234743 NR Description: senescence-associated protein family [Arabidopsis
  misc_feature (79)..(273): Homolog of NCBI NO: 30682205 NR Description: senescence-associated protein family [Arabidopsis
  misc_feature (3)..(264): Homolog of NCBI NO: 15231187 NR Description: senescence-associated protein family [Arabidopsis
  misc_feature (3)..(263): Homolog of NCBI NO: 29367553 NR Description: senescence-associated protein-like protein
  misc_feature (1)..(271): Homolog of NCBI NO: 21537169 NR Description: senescence-associated protein-like protein
  misc_feature (1)..(261): Homolog of NCBI NO: 15234374 NR Description: senescence-associated protein, putative
  misc_feature (1)..(266): Homolog of NCBI NO: 3551954 NR Description: senescence-associated protein 5 [Hemerocallis
  misc_feature (1)..(148): Homolog of NCBI NO: 20197300 NR Description: hypothetical protein [Arabidopsis thaliana]
  misc_feature (3)..(261): Homolog of NCBI NO: 15238641 NR Description: senescence-associated protein family [Arabidopsis
  misc_feature (1)..(273): Homolog of NCBI NO: 20197174 NR Description: hypothetical protein [Arabidopsis thaliana]
MARCSNNLVGILNFLVFLLSIPILAGGIWLSQKGSTECERFLDKPVIALGVFLMVVAIAGLIGSCCRVTWLLWVYLFVMFLLILLVFCITVFAFVVTNKGAGEAIEGKGYKEYKLGDYSTWLQKRVENGKNWNKIRSCLVESKVCSKLEAKFVNVPVNSFYKEHLTALQSGCCKPSDECGFEYVNPTTWTKNTTGTHTNPDCQTWDNAKEKLCFDCQSCKAGLLDNVKSAWKKVAIVNIVFLVFLIIVYSVGCCAFRNNKRDDSYSRTYGYKP

SEQ ID NO: 22950 - protein, 220 aa, Arabidopsis thaliana
  peptide (1)..(220): Ceres Seq. ID no. 13509158
  misc_feature (1)..(192): Pfam Name: Tetraspanin family Pfam Description: Tetraspanin family
  misc_feature (1)..(208): Homolog of NCBI NO: 15238641 NR Description: senescence-associated protein family [Arabidopsis
  misc_feature (1)..(211): Homolog of NCBI NO: 15231187 NR Description: senescence-associated protein family [Arabidopsis
  misc_feature (1)..(95): Homolog of NCBI NO: 20197300 NR Description: hypothetical protein [Arabidopsis thaliana]
  misc_feature (1)..(210): Homolog of NCBI NO: 29367553 NR Description: senescence-associated protein-like protein
  misc_feature (1)..(213): Homolog of NCBI NO: 3551954 NR Description: senescence-associated protein 5 [Hemerocallis
  misc_feature (1)..(218): Homolog of NCBI NO: 21537169 NR Description: senescence-associated protein-like protein
  misc_feature (1)..(208): Homolog of NCBI NO: 15234374 NR Description: senescence-associated protein, putative
  misc_feature (1)..(218): Homolog of NCBI NO: 15234743 NR Description: senescence-associated protein family [Arabidopsis
  misc_feature (26)..(220): Homolog of NCBI NO: 30682205 NR Description: senescence-associated protein family [Arabidopsis
  misc_feature (1)..(220): Homolog of NCBI NO: 20197174 NR Description: hypothetical protein [Arabidopsis thaliana]
MVVAIAGLIGSCCRVTWLLWVYLFVMFLLILLVFCITVFAFVVTNKGAGEAIEGKGYKEYKLGDYSTWLQKRVENGKNWNKIRSCLVESKVCSKLEAKFVNVPVNSFYKEHLTALQSGCCKPSDECGFEYVNPTTWTKNTTGTHTNPDCQTWDNAKEKLCFDCQSCKAGLLDNVKSAWKKVAIVNIVFLVFLIIVYSVGCCAFRNNKRDDSYSRTYGYKP

SEQ ID NO: 22951 - protein, 195 aa, Arabidopsis thaliana
  peptide (1)..(195): Ceres Seq. ID no. 13509159
  misc_feature (1)..(167): Pfam Name: Tetraspanin family Pfam Description: Tetraspanin family
  misc_feature (1)..(183): Homolog of NCBI NO: 15238641 NR Description: senescence-associated protein family [Arabidopsis
  misc_feature (1)..(186): Homolog of NCBI NO: 15231187 NR Description: senescence-associated protein family [Arabidopsis
  misc_feature (1)..(70): Homolog of NCBI NO: 20197300 NR Description: hypothetical protein [Arabidopsis thaliana]
  misc_feature (1)..(185): Homolog of NCBI NO: 29367553 NR Description: senescence-associated protein-like protein
  misc_feature (1)..(188): Homolog of NCBI NO: 3551954 NR Description: senescence-associated protein 5 [Hemerocallis
  misc_feature (1)..(193): Homolog of NCBI NO: 21537169 NR Description: senescence-associated protein-like protein
  misc_feature (1)..(183): Homolog of NCBI NO: 15234374 NR Description: senescence-associated protein, putative
  misc_feature (1)..(193): Homolog of NCBI NO: 15234743 NR Description: senescence-associated protein family [Arabidopsis
  misc_feature (1)..(195): Homolog of NCBI NO: 30682205 NR Description: senescence-associated protein family [Arabidopsis
  misc_feature (1)..(195): Homolog of NCBI NO: 20197174 NR Description: hypothetical protein [Arabidopsis thaliana]
MFLLILLVFCITVFAFVVTNKGAGEAIEGKGYKEYKLGDYSTWLQKRVENGKNWNKIRSCLVESKVCSKLEAKFVNVPVNSFYKEHLTALQSGCCKPSDECGFEYVNPTTWTKNTTGTHTNPDCQTWDNAKEKLCFDCQSCKAGLLDNVKSAWKKVAIVNIVFLVFLIIVYSVGCCAFRNNKRDDSYSRTYGYKP

SEQ ID NO: 22952 - DNA, 895 bp, Arabidopsis thaliana
  misc_feature (1)..(895): Ceres Seq. ID no. 12393234
  misc_feature: MA Experiment ID: 108434 Result: Up-regulated in Transcription
  misc_feature: MA Experiment 108434 PARAMETER Experiment Name: At_Root_Tips_cDNA_P Parameter: Tissue Value: Root Tips
  misc_feature: MA Experiment ID: 108462 Result: Down-regulated in Transcription
  misc_feature: MA Experiment 108462 PARAMETER Experiment Name: At_Germinating_Seeds_cDNA_P Parameter: Age (day) Value: 2 vs. 0
  misc_feature: MA Experiment 108462 PARAMETER Experiment Name: At_Germinating_Seeds_cDNA_P Parameter: Tissue Value: Germinating Seeds
  misc_feature: MA Experiment ID: 108463 Result: Down-regulated in Transcription
  misc_feature: MA Experiment 108463 PARAMETER Experiment Name: At_Germinating_Seeds_cDNA_P Parameter: Age (day) Value: 3 vs. 0
  misc_feature: MA Experiment 108463 PARAMETER Experiment Name: At_Germinating_Seeds_cDNA_P Parameter: Tissue Value: Germinating Seeds
  misc_feature: MA Experiment ID: 108464 Result: Down-regulated in Transcription
  misc_feature: MA Experiment 108464 PARAMETER Experiment Name: At_Germinating_Seeds_cDNA_P Parameter: Age (day) Value: 4 vs. 0
  misc_feature: MA Experiment 108464 PARAMETER Experiment Name: At_Germinating_Seeds_cDNA_P Parameter: Tissue Value: Germinating Seeds
  misc_feature: MA Experiment ID: 20000111 Result: Up-regulated in Transcription
  misc_feature: MA Experiment 20000111 PARAMETER Experiment Name: At_42deg_Heat_cDNA_P Parameter: Temperature (deg C) Value: 42 vs. 22
  misc_feature: MA Experiment 20000111 PARAMETER Experiment Name: At_42deg_Heat_cDNA_P Parameter: Timepoint (hr) Value: 6
  misc_feature: MA Experiment 20000111 PARAMETER Experiment Name: At_42deg_Heat_cDNA_P Parameter: Tissue Value: Aerial
  misc_feature: MA Experiment ID: 20000113 Result: Up-regulated in Transcription
  misc_feature: MA Experiment 20000113 PARAMETER Experiment Name: At_42deg_Heat_cDNA_P Parameter: Temperature (deg C) Value: 42 vs. 22
  misc_feature: MA Experiment 20000113 PARAMETER Experiment Name: At_42deg_Heat_cDNA_P Parameter: Timepoint (hr) Value: 8
  misc_feature: MA Experiment 20000113 PARAMETER Experiment Name: At_42deg_Heat_cDNA_P Parameter: Tissue Value: Aerial
accattagggctctctctaaattcctcagtctcgtgagaatcgtcatcgtcttcacggagctcactcgaagatgttaacggcagatataccaccgaatcattcaatctacatccaaaacctcaatgaaaggatcaagaaagaggaattgaagagatctctttactgtttgttctctcagtttgggagaatacttgatgtggttgctttgaagactccgaagctccgaggacaagcttgggttacttttagtgaagtcactgctgctggtcatgctgttcgtcagatgcaaaattttcccttctatgataaaccaatgcgcttacaatatgcaaaagcaaagtcagattgtctagctaaagctgagggaactttcgttccaaaagataagaagaggaagcaagaagaaaaagttgaaagaaagcgtgaagaatcccaacgaccaaacacagctaatggtccaagtgctaatggtccaagtgccaataacggagtccctgcgccttcgttccagccgagcgggcaagaaacaatgccaccaaacaacatactcttcattcagaatctcccacacgagacaacaagcatgatgctccagcttctcttcgaacagtaccctggattcaaagagataagaatgatcgacgcaaaaccaggaatcgcgtttgtagagtacgaagacgatgttcaagcttccatagctatgcaacctcttcaaggtttcaaaatcactccccagaatccaatggtcatctctttcgccaagaaatgataagagtcttgtttttgtttgtttgttgtcctttaagacgatagtactggaccaaccaaacctggtgtgtataaccaaccaacggttctattggttaacggattaatccggttttggtttaatcg

SEQ ID NO: 22953 - protein, 232 aa, Arabidopsis thaliana
  peptide (1)..(232): Ceres Seq. ID no. 12393235
  misc_feature (12)..(84): Pfam Name: RNA recognition motif. (a.k.a. RRM, RBD, or RNP domain) Pfam Description: RNA recognition motif. (a.k.a. RRM, RBD, or RNP
  misc_feature (4)..(232): Homolog of NCBI NO: 15226631 NR Description: small nuclear ribonucleoprotein U1A
  misc_feature (7)..(232): Homolog of NCBI NO: 34897622 NR Description: putative small nuclear ribonucleoprotein U1A
  misc_feature (5)..(232): Homolog of NCBI NO: 2119045 NR Description: small nuclear ribonucleoprotein U1A - potato
  misc_feature (1)..(232): Homolog of NCBI NO: 421960 NR Description: small nuclear ribonucleoprotein U2B'' - potato
  misc_feature (1)..(232): Homolog of NCBI NO: 25294325 NR Description: hypothetical protein [imported] - Arabidopsis
  misc_feature (1)..(232): Homolog of NCBI NO: 19347861 NR Description: putative spliceosomal protein (U2B) [Arabidopsis
  misc_feature (1)..(232): Homolog of NCBI NO: 30679897 NR Description: small nuclear ribonucleoprotein U2B (spliceosomal
  misc_feature (1)..(232): Homolog of NCBI NO: 30679892 NR Description: small nuclear ribonucleoprotein U2B (spliceosomal
  misc_feature (1)..(232): Homolog of NCBI NO: 15227729 NR Description: small nuclear ribonucleoprotein U2B, putative
  misc_feature (1)..(232): Homolog of NCBI NO: 21593001 NR Description: putative small nuclear ribonucleoprotein U2B
MLTADIPPNHSIYIQNLNERIKKEELKRSLYCLFSQFGRILDVVALKTPKLRGQAWVTFSEVTAAGHAVRQMQNFPFYDKPMRLQYAKAKSDCLAKAEGTFVPKDKKRKQEEKVERKREESQRPNTANGPSANGPSANNGVPAPSFQPSGQETMPPNNILFIQNLPHETTSMMLQLLFEQYPGFKEIRMIDAKPGIAFVEYEDDVQASIAMQPLQGFKITPQNPMVISFAKK

SEQ ID NO: 22954 - protein, 161 aa, Arabidopsis thaliana
  peptide (1)..(161): Ceres Seq. ID no. 12393236
  misc_feature (1)..(161): Homolog of NCBI NO: 15226631 NR Description: small nuclear ribonucleoprotein U1A
  misc_feature (1)..(161): Homolog of NCBI NO: 34897622 NR Description: putative small nuclear ribonucleoprotein U1A
  misc_feature (1)..(161): Homolog of NCBI NO: 2119045 NR Description: small nuclear ribonucleoprotein U1A - potato
  misc_feature (1)..(161): Homolog of NCBI NO: 421960 NR Description: small nuclear ribonucleoprotein U2B'' - potato
  misc_feature (1)..(161): Homolog of NCBI NO: 25294325 NR Description: hypothetical protein [imported] - Arabidopsis
  misc_feature (1)..(161): Homolog of NCBI NO: 19347861 NR Description: putative spliceosomal protein (U2B) [Arabidopsis
  misc_feature (1)..(161): Homolog of NCBI NO: 30679897 NR Description: small nuclear ribonucleoprotein U2B (spliceosomal
  misc_feature (1)..(161): Homolog of NCBI NO: 30679892 NR Description: small nuclear ribonucleoprotein U2B (spliceosomal
  misc_feature (1)..(161): Homolog of NCBI NO: 15227729 NR Description: small nuclear ribonucleoprotein U2B, putative
  misc_feature (1)..(161): Homolog of NCBI NO: 21593001 NR Description: putative small nuclear ribonucleoprotein U2B
MQNFPFYDKPMRLQYAKAKSDCLAKAEGTFVPKDKKRKQEEKVERKREESQRPNTANGPSANGPSANNGVPAPSFQPSGQETMPPNNILFIQNLPHETTSMMLQLLFEQYPGFKEIRMIDAKPGIAFVEYEDDVQASIAMQPLQGFKITPQNPMVISFAKK

SEQ ID NO: 22955 - protein, 151 aa, Arabidopsis thaliana
  peptide (1)..(151): Ceres Seq. ID no. 12393237
  misc_feature (1)..(151): Homolog of NCBI NO: 15226631 NR Description: small nuclear ribonucleoprotein U1A
  misc_feature (1)..(151): Homolog of NCBI NO: 34897622 NR Description: putative small nuclear ribonucleoprotein U1A
  misc_feature (1)..(151): Homolog of NCBI NO: 2119045 NR Description: small nuclear ribonucleoprotein U1A - potato
  misc_feature (1)..(151): Homolog of NCBI NO: 421960 NR Description: small nuclear ribonucleoprotein U2B'' - potato
  misc_feature (1)..(151): Homolog of NCBI NO: 25294325 NR Description: hypothetical protein [imported] - Arabidopsis
  misc_feature (1)..(151): Homolog of NCBI NO: 19347861 NR Description: putative spliceosomal protein (U2B) [Arabidopsis
  misc_feature (1)..(151): Homolog of NCBI NO: 30679897 NR Description: small nuclear ribonucleoprotein U2B (spliceosomal
  misc_feature (1)..(151): Homolog of NCBI NO: 30679892 NR Description: small nuclear ribonucleoprotein U2B (spliceosomal
  misc_feature (1)..(151): Homolog of NCBI NO: 15227729 NR Description: small nuclear ribonucleoprotein U2B, putative
  misc_feature (1)..(151): Homolog of NCBI NO: 21593001 NR Description: putative small nuclear ribonucleoprotein U2B
MRLQYAKAKSDCLAKAEGTFVPKDKKRKQEEKVERKREESQRPNTANGPSANGPSANNGVPAPSFQPSGQETMPPNNILFIQNLPHETTSMMLQLLFEQYPGFKEIRMIDAKPGIAFVEYEDDVQASIAMQPLQGFKITPQNPMVISFAKK

SEQ ID NO: 22956 - DNA, 748 bp, Arabidopsis thaliana
  misc_feature (1)..(748): Ceres Seq. ID no. 12334180
  misc_feature: MA Experiment ID: 108434 Result: Down-regulated in Transcription
  misc_feature: MA Experiment 108434 PARAMETER Experiment Name: At_Root_Tips_cDNA_P Parameter: Tissue Value: Root Tips
  misc_feature: MA Experiment ID: 108435 Result: Down-regulated in Transcription
  misc_feature: MA Experiment 108435 PARAMETER Experiment Name: At_stm_Mutants_cDNA_P Parameter: Plant Line Value: wt Landsburg vs stm
  misc_feature: MA Experiment 108435 PARAMETER Experiment Name: At_stm_Mutants_cDNA_P Parameter: Tissue Value: Shoot Apical Meristem Region
  misc_feature: MA Experiment ID: 108461 Result: Up-regulated in Transcription
  misc_feature: MA Experiment 108461 PARAMETER Experiment Name: At_Germinating_Seeds_cDNA_P Parameter: Age (day) Value: 1 vs. 0
  misc_feature: MA Experiment 108461 PARAMETER Experiment Name: At_Germinating_Seeds_cDNA_P Parameter: Tissue Value: Germinating Seeds
  misc_feature: MA Experiment ID: 108462 Result: Up-regulated in Transcription
  misc_feature: MA Experiment 108462 PARAMETER Experiment Name: At_Germinating_Seeds_cDNA_P Parameter: Age (day) Value: 2 vs. 0
  misc_feature: MA Experiment 108462 PARAMETER Experiment Name: At_Germinating_Seeds_cDNA_P Parameter: Tissue Value: Germinating Seeds
  misc_feature: MA Experiment ID: 108464 Result: Up-regulated in Transcription
  misc_feature: MA Experiment 108464 PARAMETER Experiment Name: At_Germinating_Seeds_cDNA_P Parameter: Age (day) Value: 4 vs. 0
  misc_feature: MA Experiment 108464 PARAMETER Experiment Name: At_Germinating_Seeds_cDNA_P Parameter: Tissue Value: Germinating Seeds
  misc_feature: MA Experiment ID: 108488 Result: Up-regulated in Transcription
  misc_feature: MA Experiment ID: 108489 Result: Down-regulated in Transcription
  misc_feature: MA Experiment ID: 108594 Result: Down-regulated in Transcription
  misc_feature: MA Experiment 108594 PARAMETER Experiment Name: At_Ler-rhl_Root_cDNA_P Parameter: Plant Line Value: null
  misc_feature: MA Experiment ID: 108595 Result: Down-regulated in Transcription
  misc_feature: MA Experiment 108595 PARAMETER Experiment Name: At_Ler-pi_Ovule_cDNA_P Parameter: Plant Line Value: null
  misc_feature: MA Experiment ID: 20000180 Result: Up-regulated in Transcription
  misc_feature: MA Experiment 20000180 PARAMETER Experiment Name: At_Germinating_Seeds_P Parameter: Age (hr) Value: 24 vs. 0
  misc_feature: MA Experiment 20000180 PARAMETER Experiment Name: At_Germinating_Seeds_P Parameter: Tissue Value: Germinating Seeds
  misc_feature: MA Experiment ID: 20000185 Result: Down-regulated in Transcription
  misc_feature: MA Experiment 20000185 PARAMETER Experiment Name: At_Roots__P Parameter: Age (day) Value: 7 vs. 21
  misc_feature: MA Experiment 20000185 PARAMETER Experiment Name: At_Roots__P Parameter: Organism Value: A. thaliana
  misc_feature: MA Experiment 20000185 PARAMETER Experiment Name: At_Roots__P Parameter: Tissue Value: Roots vs. Whole Plant
  misc_feature: MA Experiment ID: 20000224 Result: Down-regulated in Transcription
  misc_feature: MA Experiment ID: 20000439 Result: Down-regulated in Transcription
  misc_feature: MA Experiment 20000439 PARAMETER Experiment Name: At_Roots__P Parameter: Age (day) Value: 14 vs. 21
  misc_feature: MA Experiment 20000439 PARAMETER Experiment Name: At_Roots__P Parameter: Organism Value: A. thaliana
  misc_feature: MA Experiment 20000439 PARAMETER Experiment Name: At_Roots__P Parameter: Tissue Value: Roots vs. Whole Plant
  misc_feature: MA Experiment ID: 20000794 Result: Down-regulated in Transcription
  misc_feature: MA Experiment 20000794 PARAMETER Experiment Name: At_Petals_P Parameter: Age (day) Value: 23-25 days
  misc_feature: MA Experiment 20000794 PARAMETER Experiment Name: At_Petals_P Parameter: Plant Line Value: WS
  misc_feature: MA Experiment 20000794 PARAMETER Experiment Name: At_Petals_P Parameter: Tissue Value: Petals vs. Whole plant
  misc_feature: MA Experiment ID: 20001556 Result: Down-regulated in Transcription
  misc_feature: MA Experiment 20001556 PARAMETER Experiment Name: At_Drought_Soil_Dry_P Parameter: Age (day) Value: 26
  misc_feature: MA Experiment 20001556 PARAMETER Experiment Name: At_Drought_Soil_Dry_P Parameter: Organism Value: A. thaliana
  misc_feature: MA Experiment 20001556 PARAMETER Experiment Name: At_Drought_Soil_Dry_P Parameter: Plant Line Value: WS
  misc_feature: MA Experiment 20001556 PARAMETER Experiment Name: At_Drought_Soil_Dry_P Parameter: Post Timepoint (hr) Value: None
  misc_feature: MA Experiment 20001556 PARAMETER Experiment Name: At_Drought_Soil_Dry_P Parameter: Post-Treatment Value: None
  misc_feature: MA Experiment 20001556 PARAMETER Experiment Name: At_Drought_Soil_Dry_P Parameter: Timepoint (day) Value: 12
  misc_feature: MA Experiment 20001556 PARAMETER Experiment Name: At_Drought_Soil_Dry_P Parameter: Treatment Value: Drought vs. No Drought
  misc_feature: MA Experiment ID: 20001557 Result: Down-regulated in Transcription
  misc_feature: MA Experiment 20001557 PARAMETER Experiment Name: At_Drought_Soil_Dry_P Parameter: Age (day) Value: 27
  misc_feature: MA Experiment 20001557 PARAMETER Experiment Name: At_Drought_Soil_Dry_P Parameter: Organism Value: A. thaliana
  misc_feature: MA Experiment 20001557 PARAMETER Experiment Name: At_Drought_Soil_Dry_P Parameter: Plant Line Value: WS
  misc_feature: MA Experiment 20001557 PARAMETER Experiment Name: At_Drought_Soil_Dry_P Parameter: Post Timepoint (hr) Value: 3
  misc_feature: MA Experiment 20001557 PARAMETER Experiment Name: At_Drought_Soil_Dry_P Parameter: Post-Treatment Value: Re-Water vs. No Drought
  misc_feature: MA Experiment 20001557 PARAMETER Experiment Name: At_Drought_Soil_Dry_P Parameter: Timepoint (day) Value: 13
  misc_feature: MA Experiment 20001557 PARAMETER Experiment Name: At_Drought_Soil_Dry_P Parameter: Treatment Value: Drought vs. No Drought
  misc_feature: MA Experiment ID: 20001558 Result: Down-regulated in Transcription
  misc_feature: MA Experiment 20001558 PARAMETER Experiment Name: At_Drought_Soil_Dry_P Parameter: Age (day) Value: 27
  misc_feature: MA Experiment 20001558 PARAMETER Experiment Name: At_Drought_Soil_Dry_P Parameter: Organism Value: A. thaliana
  misc_feature: MA Experiment 20001558 PARAMETER Experiment Name: At_Drought_Soil_Dry_P Parameter: Plant Line Value: WS
  misc_feature: MA Experiment 20001558 PARAMETER Experiment Name: At_Drought_Soil_Dry_P Parameter: Post Timepoint (hr) Value: 6
  misc_feature: MA Experiment 20001558 PARAMETER Experiment Name: At_Drought_Soil_Dry_P Parameter: Post-Treatment Value: Re-Water vs. No Drought
  misc_feature: MA Experiment 20001558 PARAMETER Experiment Name: At_Drought_Soil_Dry_P Parameter: Timepoint (day) Value: 13
  misc_feature: MA Experiment 20001558 PARAMETER Experiment Name: At_Drought_Soil_Dry_P Parameter: Treatment Value: Drought vs. No Drought
  misc_feature: MA Experiment ID: 20001560 Result: Down-regulated in Transcription
  misc_feature: MA Experiment 20001560 PARAMETER Experiment Name: At_Drought_Soil_Dry_P Parameter: Age (day) Value: 28
  misc_feature: MA Experiment 20001560 PARAMETER Experiment Name: At_Drought_Soil_Dry_P Parameter: Organism Value: A. thaliana
  misc_feature: MA Experiment 20001560 PARAMETER Experiment Name: At_Drought_Soil_Dry_P Parameter: Plant Line Value: WS
  misc_feature: MA Experiment 20001560 PARAMETER Experiment Name: At_Drought_Soil_Dry_P Parameter: Post Timepoint (hr) Value: None
  misc_feature: MA Experiment 20001560 PARAMETER Experiment Name: At_Drought_Soil_Dry_P Parameter: Post-Treatment Value: None
  misc_feature: MA Experiment 20001560 PARAMETER Experiment Name: At_Drought_Soil_Dry_P Parameter: Timepoint (day) Value: 14
  misc_feature: MA Experiment 20001560 PARAMETER Experiment Name: At_Drought_Soil_Dry_P Parameter: Treatment Value: Drought vs. No Drought
  misc_feature: MA Experiment ID: 20001906 Result: Down-regulated in Transcription
  misc_feature: MA Experiment 20001906 PARAMETER Experiment Name: At_Drought_Reproduction_P Parameter: Age (day) Value: 35
  misc_feature: MA Experiment 20001906 PARAMETER Experiment Name: At_Drought_Reproduction_P Parameter: Organism Value: A. thaliana
  misc_feature: MA Experiment 20001906 PARAMETER Experiment Name: At_Drought_Reproduction_P Parameter: Plant Line Value: WS
  misc_feature: MA Experiment 20001906 PARAMETER Experiment Name: At_Drought_Reproduction_P Parameter: Timepoint (day) Value: 5
  misc_feature: MA Experiment 20001906 PARAMETER Experiment Name: At_Drought_Reproduction_P Parameter: Tissue Value: Siliques
  misc_feature: MA Experiment 20001906 PARAMETER Experiment Name: At_Drought_Reproduction_P Parameter: Treatment Value: Drought vs. No Drought
  misc_feature: MA Experiment ID: 20001908 Result: Down-regulated in Transcription
  misc_feature: MA Experiment 20001908 PARAMETER Experiment Name: At_Drought_Reproduction_P Parameter: Age (day) Value: 40
  misc_feature: MA Experiment 20001908 PARAMETER Experiment Name: At_Drought_Reproduction_P Parameter: Organism Value: A. thaliana
  misc_feature: MA Experiment 20001908 PARAMETER Experiment Name: At_Drought_Reproduction_P Parameter: Plant Line Value: WS
  misc_feature: MA Experiment 20001908 PARAMETER Experiment Name: At_Drought_Reproduction_P Parameter: Timepoint (day) Value: 10
  misc_feature: MA Experiment 20001908 PARAMETER Experiment Name: At_Drought_Reproduction_P Parameter: Tissue Value: Siliques
  misc_feature: MA Experiment 20001908 PARAMETER Experiment Name: At_Drought_Reproduction_P Parameter: Treatment Value: Drought vs. No Drought
atccaccacatatttatgtttgatccaaaagccaacacaagcaaagaaattaaaagtgttcttgttgctgtagaacacaaacagaacaaacaaaaaatcaattgaagagtctctcagtcgttaggggaagcaaatagagaaatggctagctttactgcctccgcttccaccgtctccgccgctcgtccggctctccttctcaagcctaccgtcgccatctctgctcctgttcttggtttgcctccaatgggtaagaagaagggaggagtgagatgttcaatggagacaaagcaaggaaacgtctcagtcatgggggctggagtttcagctgcagcaacagctgctttgacggcggtgatgagcaatcccgcgatggctttggttgatgagaggatgtcaacagaaggaacaggattaccctttggtctaagcaacaacctcttgggttggattctgtttggagtctttggtttgatctggactttcttcttcgtctacacttcatctctcgaggaggatgaagaatctggtctttcactctgaaggaagaatcaatctttcgtcttctcatttccattttcatgtgagaacatgaatcaagtgttcacccttctagtttcttgtaattgttaagtaaagactaaaaactattttcatgtgtgtttactttcccccattctctttatcttgtcataacattgataaggaggagattatgtgattattaaatatcatgcatgacatgttc

SEQ ID NO: 22957 - protein, 133 aa, Arabidopsis thaliana; identical to SEQ ID NO: 20530
  peptide (1)..(133): Ceres Seq. ID no. 12334181
  misc_feature (28)..(133): Homolog of NCBI NO: 20139842 NR Description: Photosystem II reaction center W protein,
  misc_feature (68)..(133): Homolog of NCBI NO: 12584904 NR Description: PSII subunit PsbW [Physcomitrella patens]
  misc_feature (29)..(118): Homolog of NCBI NO: 12584902 NR Description: PSII subunit PsbW [Physcomitrella patens]
  misc_feature (1)..(118): Homolog of NCBI NO: 12584906 NR Description: PSII subunit PsbW [Physcomitrella patens]
  misc_feature (41)..(133): Homolog of NCBI NO: 16930765 NR Description: photosystem II reaction center [Retama raetam]
  misc_feature (1)..(133): Homolog of NCBI NO: 2493694 NR Description: Photosystem II reaction center W protein,
  misc_feature (1)..(112): Homolog of NCBI NO: 16226722 NR Description: At2g30570/T6B20.8 [Arabidopsis thaliana]
  misc_feature (1)..(133): Homolog of NCBI NO: 2129672 NR Description: photosystem II protein psbW - Arabidopsis
  misc_feature (1)..(133): Homolog of NCBI NO: 15224531 NR Description: photosystem II reaction center 6.1KD protein

SEQ ID NO: 22958 - protein, 98 aa, Arabidopsis thaliana; identical to SEQ ID NO: 20531
  peptide (1)..(98): Ceres Seq. ID no. 12334182
  misc_feature (1)..(98): Homolog of NCBI NO: 20139842 NR Description: Photosystem II reaction center W protein,
  misc_feature (33)..(98): Homolog of NCBI NO: 12584904 NR Description: PSII subunit PsbW [Physcomitrella patens]
  misc_feature (1)..(83): Homolog of NCBI NO: 12584902 NR Description: PSII subunit PsbW [Physcomitrella patens]
  misc_feature (1)..(83): Homolog of NCBI NO: 12584906 NR Description: PSII subunit PsbW [Physcomitrella patens]
  misc_feature (6)..(98): Homolog of NCBI NO: 16930765 NR Description: photosystem II reaction center [Retama raetam]
  misc_feature (1)..(98): Homolog of NCBI NO: 2493694 NR Description: Photosystem II reaction center W protein,
  misc_feature (1)..(77): Homolog of NCBI NO: 16226722 NR Description: At2g30570/T6B20.8 [Arabidopsis thaliana]
  misc_feature (1)..(98): Homolog of NCBI NO: 2129672 NR Description: photosystem II protein psbW - Arabidopsis
  misc_feature (1)..(98): Homolog of NCBI NO: 15224531 NR Description: photosystem II reaction center 6.1KD protein

SEQ ID NO: 22959 - protein, 87 aa, Arabidopsis thaliana; identical to SEQ ID NO: 20532
  peptide (1)..(87): Ceres Seq. ID no. 12334183
  misc_feature (1)..(87): Homolog of NCBI NO: 20139842 NR Description: Photosystem II reaction center W protein,
  misc_feature (22)..(87): Homolog of NCBI NO: 12584904 NR Description: PSII subunit PsbW [Physcomitrella patens]
  misc_feature (1)..(72): Homolog of NCBI NO: 12584902 NR Description: PSII subunit PsbW [Physcomitrella patens]
  misc_feature (1)..(72): Homolog of NCBI NO: 12584906 NR Description: PSII subunit PsbW [Physcomitrella patens]
  misc_feature (1)..(87): Homolog of NCBI NO: 16930765 NR Description: photosystem II reaction center [Retama raetam]
  misc_feature (1)..(87): Homolog of NCBI NO: 2493694 NR Description: Photosystem II reaction center W protein,
  misc_feature (1)..(66): Homolog of NCBI NO: 16226722 NR Description: At2g30570/T6B20.8 [Arabidopsis thaliana]
  misc_feature (1)..(87): Homolog of NCBI NO: 2129672 NR Description: photosystem II protein psbW - Arabidopsis
  misc_feature (1)..(87): Homolog of NCBI NO: 15224531 NR Description: photosystem II reaction center 6.1KD protein

SEQ ID NO: 22960 - DNA, 1358 bp, Arabidopsis thaliana
  misc_feature (1)..(1358): Ceres Seq. ID no. 12324690
  misc_feature: MA Experiment ID: 108433 Result: Down-regulated in Transcription
  misc_feature: MA Experiment 108433 PARAMETER Experiment Name: At_rhl_Mutant2_cDNA_P Parameter: Age (day) Value: 7
  misc_feature: MA Experiment 108433 PARAMETER Experiment Name: At_rhl_Mutant2_cDNA_P Parameter: Organism Value: A. thaliana
  misc_feature: MA Experiment 108433 PARAMETER Experiment Name: At_rhl_Mutant2_cDNA_P Parameter: Plant Line Value: rhl Mutant vs. wt landsburg
  misc_feature: MA Experiment 108433 PARAMETER Experiment Name: At_rhl_Mutant2_cDNA_P Parameter: Tissue Value: Roots
  misc_feature: MA Experiment ID: 108434 Result: Up-regulated in Transcription
  misc_feature: MA Experiment 108434 PARAMETER Experiment Name: At_Root_Tips_cDNA_P Parameter: Tissue Value: Root Tips
  misc_feature: MA Experiment ID: 108461 Result: Up-regulated in Transcription
  misc_feature: MA Experiment 108461 PARAMETER Experiment Name: At_Germinating_Seeds_cDNA_P Parameter: Age (day) Value: 1 vs. 0
  misc_feature: MA Experiment 108461 PARAMETER Experiment Name: At_Germinating_Seeds_cDNA_P Parameter: Tissue Value: Germinating Seeds
  misc_feature: MA Experiment ID: 108473 Result: Down-regulated in Transcription
  misc_feature: MA Experiment 108473 PARAMETER Experiment Name: At_Drought_Flowers_cDNA_P Parameter: Timepoint (hr) Value: 7 d
  misc_feature: MA Experiment 108473 PARAMETER Experiment Name: At_Drought_Flowers_cDNA_P Parameter: Tissue Value: Flower
  misc_feature: MA Experiment 108473 PARAMETER Experiment Name: At_Drought_Flowers_cDNA_P Parameter: Treatment Value: Drought vs. No Drought
  misc_feature: MA Experiment ID: 108573 Result: Up-regulated in Transcription
  misc_feature: MA Experiment 108573 PARAMETER Experiment Name: At_Drought_cDNA_P Parameter: Timepoint (hr) Value: 6
  misc_feature: MA Experiment 108573 PARAMETER Experiment Name: At_Drought_cDNA_P Parameter: Tissue Value: Aerial
  misc_feature: MA Experiment 108573 PARAMETER Experiment Name: At_Drought_cDNA_P Parameter: Treatment Value: Drought vs. No Drought
  misc_feature: MA Experiment ID: 20000111 Result: Down-regulated in Transcription
  misc_feature: MA Experiment 20000111 PARAMETER Experiment Name: At_42deg_Heat_cDNA_P Parameter: Temperature (deg C) Value: 42 vs. 22
  misc_feature: MA Experiment 20000111 PARAMETER Experiment Name: At_42deg_Heat_cDNA_P Parameter: Timepoint (hr) Value: 6
  misc_feature: MA Experiment 20000111 PARAMETER Experiment Name: At_42deg_Heat_cDNA_P Parameter: Tissue Value: Aerial
  misc_feature: MA Experiment ID: 20000171 Result: Down-regulated in Transcription
  misc_feature: MA Experiment 20000171 PARAMETER Experiment Name: At_42deg_Heat_P Parameter: Age (day) Value: 14
  misc_feature: MA Experiment 20000171 PARAMETER Experiment Name: At_42deg_Heat_P Parameter: Organism Value: A. thaliana
  misc_feature: MA Experiment 20000171 PARAMETER Experiment Name: At_42deg_Heat_P Parameter: Plant Line Value: WS
  misc_feature: MA Experiment 20000171 PARAMETER Experiment Name: At_42deg_Heat_P Parameter: Temperature (deg C) Value: 42 vs. 22
  misc_feature: MA Experiment 20000171 PARAMETER Experiment Name: At_42deg_Heat_P Parameter: Timepoint (hr) Value: 1
  misc_feature: MA Experiment 20000171 PARAMETER Experiment Name: At_42deg_Heat_P Parameter: Tissue Value: Aerial
  misc_feature: MA Experiment ID: 20000173 Result: Down-regulated in Transcription
  misc_feature: MA Experiment 20000173 PARAMETER Experiment Name: At_42deg_Heat_P Parameter: Age (day) Value: 14
  misc_feature: MA Experiment 20000173 PARAMETER Experiment Name: At_42deg_Heat_P Parameter: Organism Value: A. thaliana
  misc_feature: MA Experiment 20000173 PARAMETER Experiment Name: At_42deg_Heat_P Parameter: Plant Line Value: WS
  misc_feature: MA Experiment 20000173 PARAMETER Experiment Name: At_42deg_Heat_P Parameter: Temperature (deg C) Value: 42 vs. 22
  misc_feature: MA Experiment 20000173 PARAMETER Experiment Name: At_42deg_Heat_P Parameter: Timepoint (hr) Value: 6
  misc_feature: MA Experiment 20000173 PARAMETER Experiment Name: At_42deg_Heat_P Parameter: Tissue Value: Aerial
  misc_feature: MA Experiment ID: 20000180 Result: Up-regulated in Transcription
  misc_feature: MA Experiment 20000180 PARAMETER Experiment Name: At_Germinating_Seeds_P Parameter: Age (hr) Value: 24 vs. 0
  misc_feature: MA Experiment 20000180 PARAMETER Experiment Name: At_Germinating_Seeds_P Parameter: Tissue Value: Germinating Seeds
  misc_feature: MA Experiment ID: 20000184 Result: Down-regulated in Transcription
  misc_feature: MA Experiment 20000184 PARAMETER Experiment Name: At_Shoots__P Parameter: Age (day) Value: 7
  misc_feature: MA Experiment 20000184 PARAMETER Experiment Name: At_Shoots__P Parameter: Tissue Value: Shoots vs. Whole Plant
  misc_feature: MA Experiment ID: 20000224 Result: Up-regulated in Transcription
  misc_feature: MA Experiment ID: 20000265 Result: Up-regulated in Transcription
  misc_feature: MA Experiment 20000265 PARAMETER Experiment Name: At_Open_Flower_P Parameter: Age (day) Value: 21
  misc_feature: MA Experiment 20000265 PARAMETER Experiment Name: At_Open_Flower_P Parameter: Plant Line Value: WS
  misc_feature: MA Experiment 20000265 PARAMETER Experiment Name: At_Open_Flower_P Parameter: Tissue Value: Closed Flower vs. Whole Plant
  misc_feature: MA Experiment ID: 20000445 Result: Up-regulated in Transcription
  misc_feature: MA Experiment 20000445 PARAMETER Experiment Name: At_100uM_NAA__P Parameter: Age (day) Value: 14
  misc_feature: MA Experiment 20000445 PARAMETER Experiment Name: At_100uM_NAA__P Parameter: Organism Value: A. thaliana
  misc_feature: MA Experiment 20000445 PARAMETER Experiment Name: At_100uM_NAA__P Parameter: Plant Line Value: WS
  misc_feature: MA Experiment 20000445 PARAMETER Experiment Name: At_100uM_NAA__P Parameter: Timepoint (hr) Value: 6
  misc_feature: MA Experiment 20000445 PARAMETER Experiment Name: At_100uM_NAA__P Parameter: Tissue Value: Aerial
  misc_feature: MA Experiment 20000445 PARAMETER Experiment Name: At_100uM_NAA__P Parameter: Treatment Value: 100uM NAA vs. No Treatment
aagttcataactgaaaaataaaaataagacagaaaacaaagttaaaaataaaataaaaacggaagagagaaaataaataaataaaatcactcaaagaatttccacagtttttctttccatgttgatttagcccattcgtagacttcctccgcgccgccgttagacgccgcctcggaagtatcagcaaccgccgtggtgttcgtcgccttcaaagactcgtttctctcctctctctgagatctgaatttgagatgtttaaaaaaatgagtgctactacaagcaagacggatcagaaagcggcattagacattgcatcatggctattcaatgtggttacttccgttggaatcatcctcgttaacaaagctttaatggctacttatggctttagtttcgctactacattaaccggtttgcatttcggaacaacgacattgttgacaactttcttgacatggcttggttatatccaaccttctcagcttccttggcctgatcttttgaaattcgttttgttcgctaacttctctatcgttgggatgaacgtcagtctcatgtggaattctgttggcttctaccagattgcgaagctgagtatgatcccggtttcttgtcttctagaagttatgcttgacaatgtcaggtattcaagagatacaaagcttagcattttgttagttcttgctggtgttgccgtctgtactgtaaccgatgttagtgtcaatctcaacggatttctagctgccgctattgctgtctggagcaccgcgcttcagcaatactatgtacattatctacaacggaaatattcactcggttctttcaatttactggcgcataccgctccagttcaagctgcgtcattgttgttggtcggaccatttctagactactggttgactaaccaaagagtggatgcatacaacttttcatttgtatctctgttcttcttaatactctcgtgcagtatcgcggttgggaccaatctcagccaattcatctgtattggaagattcacggcggtgtctttccaagtacttggtcacatgaagacaattctggttttggttttgggattcactttcttcggtaaggaaggattaaacctacaagtagtgcttggaatgctgattgctatactcggtatgatctggtacggtaatgcatcttctaaaccgggtggtaaagaacgtcgtagcctgtctattcccataaccaagtcacagaaactatctgaaacaaacgaatctgatgaaaaggtgtagaagaaagaagtgaatcgcattgacatagaaacaaaaacaagatactcagatacaaacaggtagagttatcaaatgggatattatttataaacc

SEQ ID NO: 22961 - protein, 337 aa, Arabidopsis thaliana
  peptide (1)..(337): Ceres Seq. ID no. 12324691
  misc_feature (5)..(337): Homolog of NCBI NO: 21593003 NR Description: unknown [Arabidopsis thaliana]
  misc_feature (1)..(337): Homolog of NCBI NO: 18420440 NR Description: putative protein
  misc_feature (11)..(337): Homolog of NCBI NO: 18411172 NR Description: expressed protein
  misc_feature (5)..(337): Homolog of NCBI NO: 21536703 NR Description: unknown [Arabidopsis thaliana]
  misc_feature (5)..(337): Homolog of NCBI NO: 18394949 NR Description: expressed protein
  misc_feature (7)..(337): Homolog of NCBI NO: 30313364 NR Description: putative transmembrane protein [Oryza sativa]
  misc_feature (7)..(335): Homolog of NCBI NO: 21595054 NR Description: unknown [Arabidopsis thaliana]
  misc_feature (7)..(335): Homolog of NCBI NO: 18399097 NR Description: expressed protein
  misc_feature (7)..(335): Homolog of NCBI NO: 15234794 NR Description: hypothetical protein; protein id: At4g09810.1
  misc_feature (5)..(337): Homolog of NCBI NO: 7486049 NR Description: hypothetical protein F23K16.20 - Arabidopsis
MFKKMSATTSKTDQKAALDIASWLFNVVTSVGIILVNKALMATYGFSFATTLTGLHFGTTTLLTTFLTWLGYIQPSQLPWPDLLKFVLFANFSIVGMNVSLMWNSVGFYQIAKLSMIPVSCLLEVMLDNVRYSRDTKLSILLVLAGVAVCTVTDVSVNLNGFLAAAIAVWSTALQQYYVHYLQRKYSLGSFNLLAHTAPVQAASLLLVGPFLDYWLTNQRVDAYNFSFVSLFFLILSCSIAVGTNLSQFICIGRFTAVSFQVLGHMKTILVLVLGFTFFGKEGLNLQVVLGMLIAILGMIWYGNASSKPGGKERRSLSIPITKSQKLSETNESDEKV

SEQ ID NO: 22962 - protein, 333 aa, Arabidopsis thaliana
  peptide (1)..(333): Ceres Seq. ID no. 12324692
  misc_feature (7)..(333): Homolog of NCBI NO: 18411172 NR Description: expressed protein
  misc_feature (1)..(333): Homolog of NCBI NO: 21536703 NR Description: unknown [Arabidopsis thaliana]
  misc_feature (1)..(333): Homolog of NCBI NO: 18394949 NR Description: expressed protein
  misc_feature (3)..(333): Homolog of NCBI NO: 30313364 NR Description: putative transmembrane protein [Oryza sativa]
  misc_feature (3)..(331): Homolog of NCBI NO: 21595054 NR Description: unknown [Arabidopsis thaliana]
  misc_feature (3)..(331): Homolog of NCBI NO: 18399097 NR Description: expressed protein
  misc_feature (3)..(331): Homolog of NCBI NO: 15234794 NR Description: hypothetical protein; protein id: At4g09810.1
  misc_feature (1)..(333): Homolog of NCBI NO: 7486049 NR Description: hypothetical protein F23K16.20 - Arabidopsis
  misc_feature (1)..(333): Homolog of NCBI NO: 21593003 NR Description: unknown [Arabidopsis thaliana]
  misc_feature (1)..(333): Homolog of NCBI NO: 18420440 NR Description: putative protein
MSATTSKTDQKAALDIASWLFNVVTSVGIILVNKALMATYGFSFATTLTGLHFGTTTLLTTFLTWLGYIQPSQLPWPDLLKFVLFANFSIVGMNVSLMWNSVGFYQIAKLSMIPVSCLLEVMLDNVRYSRDTKLSILLVLAGVAVCTVTDVSVNLNGFLAAAIAVWSTALQQYYVHYLQRKYSLGSFNLLAHTAPVQAASLLLVGPFLDYWLTNQRVDAYNFSFVSLFFLILSCSIAVGTNLSQFICIGRFTAVSFQVLGHMKTILVLVLGFTFFGKEGLNLQVVLGMLIAILGMIWYGNASSKPGGKERRSLSIPITKSQKLSETNESDEKV

SEQ ID NO: 22963 - protein, 297 aa, Arabidopsis thaliana
  peptide (1)..(297): Ceres Seq. ID no. 12324693
  misc_feature (1)..(297): Homolog of NCBI NO: 18411172 NR Description: expressed protein
  misc_feature (1)..(297): Homolog of NCBI NO: 21536703 NR Description: unknown [Arabidopsis thaliana]
  misc_feature (1)..(297): Homolog of NCBI NO: 18394949 NR Description: expressed protein
  misc_feature (1)..(297): Homolog of NCBI NO: 30313364 NR Description: putative transmembrane protein [Oryza sativa]
  misc_feature (1)..(295): Homolog of NCBI NO: 21595054 NR Description: unknown [Arabidopsis thaliana]
  misc_feature (1)..(295): Homolog of NCBI NO: 18399097 NR Description: expressed protein
  misc_feature (1)..(295): Homolog of NCBI NO: 15234794 NR Description: hypothetical protein; protein id: At4g09810.1
  misc_feature (1)..(297): Homolog of NCBI NO: 7486049 NR Description: hypothetical protein F23K16.20 - Arabidopsis
  misc_feature (1)..(297): Homolog of NCBI NO: 21593003 NR Description: unknown [Arabidopsis thaliana]
  misc_feature (1)..(297): Homolog of NCBI NO: 18420440 NR Description: putative protein
MATYGFSFATTLTGLHFGTTTLLTTFLTWLGYIQPSQLPWPDLLKFVLFANFSIVGMNVSLMWNSVGFYQIAKLSMIPVSCLLEVMLDNVRYSRDTKLSILLVLAGVAVCTVTDVSVNLNGFLAAAIAVWSTALQQYYVHYLQRKYSLGSFNLLAHTAPVQAASLLLVGPFLDYWLTNQRVDAYNFSFVSLFFLILSCSIAVGTNLSQFICIGRFTAVSFQVLGHMKTILVLVLGFTFFGKEGLNLQVVLGMLIAILGMIWYGNASSKPGGKERRSLSIPITKSQKLSETNESDEKV

SEQ ID NO: 22964 - DNA, 1113 bp, Arabidopsis thaliana
  misc_feature (1)..(1113): Ceres Seq. ID no. 12371633
  misc_feature: MA Experiment ID: 108434 Result: Up-regulated in Transcription
  misc_feature: MA Experiment 108434 PARAMETER Experiment Name: At_Root_Tips_cDNA_P Parameter: Tissue Value: Root Tips
  misc_feature: MA Experiment ID: 108461 Result: Up-regulated in Transcription
  misc_feature: MA Experiment 108461 PARAMETER Experiment Name: At_Germinating_Seeds_cDNA_P Parameter: Age (day) Value: 1 vs. 0
  misc_feature: MA Experiment 108461 PARAMETER Experiment Name: At_Germinating_Seeds_cDNA_P Parameter: Tissue Value: Germinating Seeds
  misc_feature: MA Experiment ID: 108572 Result: Down-regulated in Transcription
  misc_feature: MA Experiment 108572 PARAMETER Experiment Name: At_Drought_cDNA_P Parameter: Timepoint (hr) Value: 1
  misc_feature: MA Experiment 108572 PARAMETER Experiment Name: At_Drought_cDNA_P Parameter: Tissue Value: Aerial
  misc_feature: MA Experiment 108572 PARAMETER Experiment Name: At_Drought_cDNA_P Parameter: Treatment Value: Drought vs. No Drought
  misc_feature: MA Experiment ID: 20000111 Result: Down-regulated in Transcription
  misc_feature: MA Experiment 20000111 PARAMETER Experiment Name: At_42deg_Heat_cDNA_P Parameter: Temperature (deg C) Value: 42 vs. 22
  misc_feature: MA Experiment 20000111 PARAMETER Experiment Name: At_42deg_Heat_cDNA_P Parameter: Timepoint (hr) Value: 6
  misc_feature: MA Experiment 20000111 PARAMETER Experiment Name: At_42deg_Heat_cDNA_P Parameter: Tissue Value: Aerial
  misc_feature: MA Experiment ID: 20000113 Result: Down-regulated in Transcription
  misc_feature: MA Experiment 20000113 PARAMETER Experiment Name: At_42deg_Heat_cDNA_P Parameter: Temperature (deg C) Value: 42 vs. 22
  misc_feature: MA Experiment 20000113 PARAMETER Experiment Name: At_42deg_Heat_cDNA_P Parameter: Timepoint (hr) Value: 8
  misc_feature: MA Experiment 20000113 PARAMETER Experiment Name: At_42deg_Heat_cDNA_P Parameter: Tissue Value: Aerial
  misc_feature: MA Experiment ID: 20000173 Result: Down-regulated in Transcription
  misc_feature: MA Experiment 20000173 PARAMETER Experiment Name: At_42deg_Heat_P Parameter: Age (day) Value: 14
  misc_feature: MA Experiment 20000173 PARAMETER Experiment Name: At_42deg_Heat_P Parameter: Organism Value: A. thaliana
  misc_feature: MA Experiment 20000173 PARAMETER Experiment Name: At_42deg_Heat_P Parameter: Plant Line Value: WS
  misc_feature: MA Experiment 20000173 PARAMETER Experiment Name: At_42deg_Heat_P Parameter: Temperature (deg C) Value: 42 vs. 22
  misc_feature: MA Experiment 20000173 PARAMETER Experiment Name: At_42deg_Heat_P Parameter: Timepoint (hr) Value: 6
  misc_feature: MA Experiment 20000173 PARAMETER Experiment Name: At_42deg_Heat_P Parameter: Tissue Value: Aerial
  misc_feature: MA Experiment ID: 20000180 Result: Up-regulated in Transcription
  misc_feature: MA Experiment 20000180 PARAMETER Experiment Name: At_Germinating_Seeds_P Parameter: Age (hr) Value: 24 vs. 0
  misc_feature: MA Experiment 20000180 PARAMETER Experiment Name: At_Germinating_Seeds_P Parameter: Tissue Value: Germinating Seeds
  misc_feature: MA Experiment ID: 20000185 Result: Down-regulated in Transcription
  misc_feature: MA Experiment 20000185 PARAMETER Experiment Name: At_Roots__P Parameter: Age (day) Value: 7 vs. 21
  misc_feature: MA Experiment 20000185 PARAMETER Experiment Name: At_Roots__P Parameter: Organism Value: A. thaliana
  misc_feature: MA Experiment 20000185 PARAMETER Experiment Name: At_Roots__P Parameter: Tissue Value: Roots vs. Whole Plant
  misc_feature: MA Experiment ID: 20000268 Result: Down-regulated in Transcription
  misc_feature: MA Experiment 20000268 PARAMETER Experiment Name: At_100mM_NaCl__P Parameter: Age (day) Value: 14
  misc_feature: MA Experiment 20000268 PARAMETER Experiment Name: At_100mM_NaCl__P Parameter: Organism Value: A. thaliana
  misc_feature: MA Experiment 20000268 PARAMETER Experiment Name: At_100mM_NaCl__P Parameter: Plant Line Value: WS
  misc_feature: MA Experiment 20000268 PARAMETER Experiment Name: At_100mM_NaCl__P Parameter: Timepoint (hr) Value: 6
  misc_feature: MA Experiment 20000268 PARAMETER Experiment Name: At_100mM_NaCl__P Parameter: Tissue Value: Whole Plant
  misc_feature: MA Experiment 20000268 PARAMETER Experiment Name: At_100mM_NaCl__P Parameter: Treatment Value: 100mM NaCl vs. No Treatment
  misc_feature: MA Experiment ID: 20000436 Result: Down-regulated in Transcription
  misc_feature: MA Experiment 20000436 PARAMETER Experiment Name: At_Drought_P Parameter: Age (day) Value: 7
  misc_feature: MA Experiment 20000436 PARAMETER Experiment Name: At_Drought_P Parameter: Organism Value: A. thaliana
  misc_feature: MA Experiment 20000436 PARAMETER Experiment Name: At_Drought_P Parameter: Plant Line Value: WS
  misc_feature: MA Experiment 20000436 PARAMETER Experiment Name: At_Drought_P Parameter: Timepoint (hr) Value: 12
  misc_feature: MA Experiment 20000436 PARAMETER Experiment Name: At_Drought_P Parameter: Tissue Value: Whole Plant
  misc_feature: MA Experiment 20000436 PARAMETER Experiment Name: At_Drought_P Parameter: Treatment Value: Drought vs. No Drought
  misc_feature: MA Experiment ID: 20000437 Result: Down-regulated in Transcription
  misc_feature: MA Experiment 20000437 PARAMETER Experiment Name: At_Drought_P Parameter: Age (day) Value: 8
  misc_feature: MA Experiment 20000437 PARAMETER Experiment Name: At_Drought_P Parameter: Organism Value: A. thaliana
  misc_feature: MA Experiment 20000437 PARAMETER Experiment Name: At_Drought_P Parameter: Plant Line Value: WS
  misc_feature: MA Experiment 20000437 PARAMETER Experiment Name: At_Drought_P Parameter: Timepoint (hr) Value: 24
  misc_feature: MA Experiment 20000437 PARAMETER Experiment Name: At_Drought_P Parameter: Tissue Value: Whole Plant
  misc_feature: MA Experiment 20000437 PARAMETER Experiment Name: At_Drought_P Parameter: Treatment Value: Drought vs. No Drought
  misc_feature: MA Experiment ID: 20000439 Result: Down-regulated in Transcription
  misc_feature: MA Experiment 20000439 PARAMETER Experiment Name: At_Roots__P Parameter: Age (day) Value: 14 vs. 21
  misc_feature: MA Experiment 20000439 PARAMETER Experiment Name: At_Roots__P Parameter: Organism Value: A. thaliana
  misc_feature: MA Experiment 20000439 PARAMETER Experiment Name: At_Roots__P Parameter: Tissue Value: Roots vs. Whole Plant
  misc_feature: MA Experiment ID: 20001554 Result: Down-regulated in Transcription
  misc_feature: MA Experiment 20001554 PARAMETER Experiment Name: At_Drought_Soil_Dry_P Parameter: Age (day) Value: 21
  misc_feature: MA Experiment 20001554 PARAMETER Experiment Name: At_Drought_Soil_Dry_P Parameter: Organism Value: A. thaliana
  misc_feature: MA Experiment 20001554 PARAMETER Experiment Name: At_Drought_Soil_Dry_P Parameter: Plant Line Value: WS
  misc_feature: MA Experiment 20001554 PARAMETER Experiment Name: At_Drought_Soil_Dry_P Parameter: Post Timepoint (hr) Value: None
  misc_feature: MA Experiment 20001554 PARAMETER Experiment Name: At_Drought_Soil_Dry_P Parameter: Post-Treatment Value: None
  misc_feature: MA Experiment 20001554 PARAMETER Experiment Name: At_Drought_Soil_Dry_P Parameter: Timepoint (day) Value: 7
  misc_feature: MA Experiment 20001554 PARAMETER Experiment Name: At_Drought_Soil_Dry_P Parameter: Treatment Value: Drought vs. No Drought
  misc_feature: MA Experiment ID: 20001555 Result: Down-regulated in Transcription
  misc_feature: MA Experiment 20001555 PARAMETER Experiment Name: At_Drought_Soil_Dry_P Parameter: Age (day) Value: 24
  misc_feature: MA Experiment 20001555 PARAMETER Experiment Name: At_Drought_Soil_Dry_P Parameter: Organism Value: A. thaliana
  misc_feature: MA Experiment 20001555 PARAMETER Experiment Name: At_Drought_Soil_Dry_P Parameter: Plant Line Value: WS
  misc_feature: MA Experiment 20001555 PARAMETER Experiment Name: At_Drought_Soil_Dry_P Parameter: Post Timepoint (hr) Value: None
  misc_feature: MA Experiment 20001555 PARAMETER Experiment Name: At_Drought_Soil_Dry_P Parameter: Post-Treatment Value: None
  misc_feature: MA Experiment 20001555 PARAMETER Experiment Name: At_Drought_Soil_Dry_P Parameter: Timepoint (day) Value: 10
  misc_feature: MA Experiment 20001555 PARAMETER Experiment Name: At_Drought_Soil_Dry_P Parameter: Treatment Value: Drought vs. No Drought
  misc_feature: MA Experiment ID: 20001556 Result: Down-regulated in Transcription
  misc_feature: MA Experiment 20001556 PARAMETER Experiment Name: At_Drought_Soil_Dry_P Parameter: Age (day) Value: 26
  misc_feature: MA Experiment 20001556 PARAMETER Experiment Name: At_Drought_Soil_Dry_P Parameter: Organism Value: A. thaliana
  misc_feature: MA Experiment 20001556 PARAMETER Experiment Name: At_Drought_Soil_Dry_P Parameter: Plant Line Value: WS
  misc_feature: MA Experiment 20001556 PARAMETER Experiment Name: At_Drought_Soil_Dry_P Parameter: Post Timepoint (hr) Value: None
  misc_feature: MA Experiment 20001556 PARAMETER Experiment Name: At_Drought_Soil_Dry_P Parameter: Post-Treatment Value: None
  misc_feature: MA Experiment 20001556 PARAMETER Experiment Name: At_Drought_Soil_Dry_P Parameter: Timepoint (day) Value: 12
  misc_feature: MA Experiment 20001556 PARAMETER Experiment Name: At_Drought_Soil_Dry_P Parameter: Treatment Value: Drought vs. No Drought
  misc_feature: MA Experiment ID: 20001560 Result: Up-regulated in Transcription
  misc_feature: MA Experiment 20001560 PARAMETER Experiment Name: At_Drought_Soil_Dry_P Parameter: Age (day) Value: 28
  misc_feature: MA Experiment 20001560 PARAMETER Experiment Name: At_Drought_Soil_Dry_P Parameter: Organism Value: A. thaliana
  misc_feature: MA Experiment 20001560 PARAMETER Experiment Name: At_Drought_Soil_Dry_P Parameter: Plant Line Value: WS
  misc_feature: MA Experiment 20001560 PARAMETER Experiment Name: At_Drought_Soil_Dry_P Parameter: Post Timepoint (hr) Value: None
  misc_feature: MA Experiment 20001560 PARAMETER Experiment Name: At_Drought_Soil_Dry_P Parameter: Post-Treatment Value: None
  misc_feature: MA Experiment 20001560 PARAMETER Experiment Name: At_Drought_Soil_Dry_P Parameter: Timepoint (day) Value: 14
  misc_feature: MA Experiment 20001560 PARAMETER Experiment Name: At_Drought_Soil_Dry_P Parameter: Treatment Value: Drought vs. No Drought
  misc_feature: MA Experiment ID: 20001911 Result: Down-regulated in Transcription
  misc_feature: MA Experiment 20001911 PARAMETER Experiment Name: At_Drought_Reproduction_P Parameter: Age (day) Value: 40
  misc_feature: MA Experiment 20001911 PARAMETER Experiment Name: At_Drought_Reproduction_P Parameter: Organism Value: A. thaliana
  misc_feature: MA Experiment 20001911 PARAMETER Experiment Name: At_Drought_Reproduction_P Parameter: Plant Line Value: WS
  misc_feature: MA Experiment 20001911 PARAMETER Experiment Name: At_Drought_Reproduction_P Parameter: Timepoint (day) Value: 10
  misc_feature: MA Experiment 20001911 PARAMETER Experiment Name: At_Drought_Reproduction_P Parameter: Tissue Value: Flowers
  misc_feature: MA Experiment 20001911 PARAMETER Experiment Name: At_Drought_Reproduction_P Parameter: Treatment Value: Drought vs. No Drought
aaattctcactgacccatttgttttctctcaatcttttgcagaaccctgaaccaaattttgcatctttctctttgaattttgtgtctttctttaattctttggaggggtttttcaaaagcaacaaccttgaaaaaatgggtatgggcacaagcactttcgttatcagatgggtcaatcttcttacaatgctattggctgtggcagtgataatatttggggtgtggatgagtacacacaatgatggttgcagaaggtcacttacatttccagttatagctcttggtggtttcatcttcttgatatccataatcggatttcttggcgcgtgcaagagaagtgtggcgcttctttggatttatcttgccgtgctcctgatcgttttgatcgcgattcttgtctttaccgtactggcgttcattgtaacaaacaatggttctggccatactaaccctggtttaaggtacaaggagtataagctgaatgattacagctcatggtttctaaaacagcttaacaacaccagtaactggataagactaaagagttgtcttgttaaatccgagcaatgtcggaagctttccaagaaatacaagaccatcaaacagttgaaatccgcagaattaaccccgatagaagctggatgttgtcgaccaccatctgagtgtggttatcctgcggtgaatgcttcttactatgacttgagctttcattcgataagttctaacaaagattgtaagctttacaagaatttgaggactatcaagtgctacaactgtgattcttgcaaagctggagttgctcagtacatgaaaaccgagtggcgacttgttgcgatcttcaatgtggtcctgtttgttgtcttgtcaatggtttactttgttggatgctgtgcgagaagaaatgctgctagttaccgatccaaagcttagaaaccgaagcccgggttaaagaaaacacttcaccggattctcccaagctacagatgaatcacattctcttccatgttggtgaatgcttccaagagagacacaagagcaacaacttctcatcgttctttttactctgtaatctatatgttgttgaaacagagcaaaaatttgatcagatttttc

SEQ ID NO: 22965 - protein, 309 aa, Arabidopsis thaliana
  peptide (1)..(309): Ceres Seq. ID no. 12371634
  misc_feature (50)..(288): Pfam Name: Tetraspanin family Pfam Description: Tetraspanin family
  misc_feature (48)..(302): Homolog of NCBI NO: 15237490 NR Description: senescence-associated protein 5-like protein
  misc_feature (51)..(301): Homolog of NCBI NO: 21537169 NR Description: senescence-associated protein-like protein
  misc_feature (51)..(301): Homolog of NCBI NO: 15234743 NR Description: senescence-associated protein homolog
  misc_feature (48)..(301): Homolog of NCBI NO: 15231187 NR Description: putative protein
  misc_feature (58)..(301): Homolog of NCBI NO: 3551954 NR Description: senescence-associated protein 5 [Hemerocallis
  misc_feature (58)..(301): Homolog of NCBI NO: 20197174 NR Description: hypothetical protein [Arabidopsis thaliana]
  misc_feature (46)..(301): Homolog of NCBI NO: 29367553 NR Description: senescence-associated protein-like protein
  misc_feature (120)..(288): Homolog of NCBI NO: 25404415 NR Description: hypothetical protein F9N12.12 [imported] -
  misc_feature (46)..(308): Homolog of NCBI NO: 37535820 NR Description: putative senescence-associated protein
  misc_feature (46)..(309): Homolog of NCBI NO: 30696823 NR Description: senescence-associated protein family [Arabidopsis
KFSLTHLFSLNLLQNPEPNFASFSLNFVSFFNSLEGFFKSNNLEKMGMGTSTFVIRWVNLLTMLLAVAVIIFGVWMSTHNDGCRRSLTFPVIALGGFIFLISIIGFLGACKRSVALLWIYLAVLLIVLIAILVFTVLAFIVTNNGSGHTNPGLRYKEYKLNDYSSWFLKQLNNTSNWIRLKSCLVKSEQCRKLSKKYKTIKQLKSAELTPIEAGCCRPPSECGYPAVNASYYDLSFHSISSNKDCKLYKNLRTIKCYNCDSCKAGVAQYMKTEWRLVAIFNVVLFVVLSMVYFVGCCARRNAASYRSKA

SEQ ID NO: 22966 - protein, 264 aa, Arabidopsis thaliana
  peptide (1)..(264): Ceres Seq. ID no. 12371635
  misc_feature (5)..(243): Pfam Name: Tetraspanin family Pfam Description: Tetraspanin family
  misc_feature (3)..(257): Homolog of NCBI NO: 15237490 NR Description: senescence-associated protein 5-like protein
  misc_feature (6)..(256): Homolog of NCBI NO: 21537169 NR Description: senescence-associated protein-like protein
  misc_feature (6)..(256): Homolog of NCBI NO: 15234743 NR Description: senescence-associated protein homolog
  misc_feature (3)..(256): Homolog of NCBI NO: 15231187 NR Description: putative protein
  misc_feature (13)..(256): Homolog of NCBI NO: 3551954 NR Description: senescence-associated protein 5 [Hemerocallis
  misc_feature (13)..(256): Homolog of NCBI NO: 20197174 NR Description: hypothetical protein [Arabidopsis thaliana]
  misc_feature (1)..(256): Homolog of NCBI NO: 29367553 NR Description: senescence-associated protein-like protein
  misc_feature (75)..(243): Homolog of NCBI NO: 25404415 NR Description: hypothetical protein F9N12.12 [imported] -
  misc_feature (1)..(263): Homolog of NCBI NO: 37535820 NR Description: putative senescence-associated protein
  misc_feature (1)..(264): Homolog of NCBI NO: 30696823 NR Description: senescence-associated protein family [Arabidopsis
MGMGTSTFVIRWVNLLTMLLAVAVIIFGVWMSTHNDGCRRSLTFPVIALGGFIFLISIIGFLGACKRSVALLWIYLAVLLIVLIAILVFTVLAFIVTNNGSGHTNPGLRYKEYKLNDYSSWFLKQLNNTSNWIRLKSCLVKSEQCRKLSKKYKTIKQLKSAELTPIEAGCCRPPSECGYPAVNASYYDLSFHSISSNKDCKLYKNLRTIKCYNCDSCKAGVAQYMKTEWRLVAIFNVVLFVVLSMVYFVGCCARRNAASYRSKA

SEQ ID NO: 22967 - protein, 262 aa, Arabidopsis thaliana
  peptide (1)..(262): Ceres Seq. ID no. 12371636
  misc_feature (3)..(241): Pfam Name: Tetraspanin family Pfam Description: Tetraspanin family
  misc_feature (1)..(255): Homolog of NCBI NO: 15237490 NR Description: senescence-associated protein 5-like protein
  misc_feature (4)..(254): Homolog of NCBI NO: 21537169 NR Description: senescence-associated protein-like protein
  misc_feature (4)..(254): Homolog of NCBI NO: 15234743 NR Description: senescence-associated protein homolog
  misc_feature (1)..(254): Homolog of NCBI NO: 15231187 NR Description: putative protein
  misc_feature (11)..(254): Homolog of NCBI NO: 3551954 NR Description: senescence-associated protein 5 [Hemerocallis
  misc_feature (11)..(254): Homolog of NCBI NO: 20197174 NR Description: hypothetical protein [Arabidopsis thaliana]
  misc_feature (1)..(254): Homolog of NCBI NO: 29367553 NR Description: senescence-associated protein-like protein
  misc_feature (73)..(241): Homolog of NCBI NO: 25404415 NR Description: hypothetical protein F9N12.12 [imported] -
  misc_feature (1)..(261): Homolog of NCBI NO: 37535820 NR Description: putative senescence-associated protein
  misc_feature (1)..(262): Homolog of NCBI NO: 30696823 NR Description: senescence-associated protein family [Arabidopsis
MGTSTFVIRWVNLLTMLLAVAVIIFGVWMSTHNDGCRRSLTFPVIALGGFIFLISIIGFLGACKRSVALLWIYLAVLLIVLIAILVFTVLAFIVTNNGSGHTNPGLRYKEYKLNDYSSWFLKQLNNTSNWIRLKSCLVKSEQCRKLSKKYKTIKQLKSAELTPIEAGCCRPPSECGYPAVNASYYDLSFHSISSNKDCKLYKNLRTIKCYNCDSCKAGVAQYMKTEWRLVAIFNVVLFVVLSMVYFVGCCARRNAASYRSKA

SEQ ID NO: 22968 - DNA, 1321 bp, Arabidopsis thaliana
  misc_feature (1)..(1321): Ceres Seq. ID no. 13500046
  misc_feature: MA Experiment ID: 108434 Result: Up-regulated in Transcription
  misc_feature: MA Experiment 108434 PARAMETER Experiment Name: At_Root_Tips_cDNA_P Parameter: Tissue Value: Root Tips
  misc_feature: MA Experiment ID: 108585 Result: Down-regulated in Transcription
  misc_feature: MA Experiment 108585 PARAMETER Experiment Name: At_5mM_NaNP_cDNA_P Parameter: Timepoint (hr) Value: 6
  misc_feature: MA Experiment 108585 PARAMETER Experiment Name: At_5mM_NaNP_cDNA_P Parameter: Tissue Value: Aerial
  misc_feature: MA Experiment 108585 PARAMETER Experiment Name: At_5mM_NaNP_cDNA_P Parameter: Treatment Value: null
  misc_feature: MA Experiment ID: 108595 Result: Down-regulated in Transcription
  misc_feature: MA Experiment 108595 PARAMETER Experiment Name: At_Ler-pi_Ovule_cDNA_P Parameter: Plant Line Value: null
  misc_feature: MA Experiment ID: 20000111 Result: Down-regulated in Transcription
  misc_feature: MA Experiment 20000111 PARAMETER Experiment Name: At_42deg_Heat_cDNA_P Parameter: Temperature (deg C) Value: 42 vs. 22
  misc_feature: MA Experiment 20000111 PARAMETER Experiment Name: At_42deg_Heat_cDNA_P Parameter: Timepoint (hr) Value: 6
  misc_feature: MA Experiment 20000111 PARAMETER Experiment Name: At_42deg_Heat_cDNA_P Parameter: Tissue Value: Aerial
  misc_feature: MA Experiment ID: 20000113 Result: Down-regulated in Transcription
  misc_feature: MA Experiment 20000113 PARAMETER Experiment Name: At_42deg_Heat_cDNA_P Parameter: Temperature (deg C) Value: 42 vs. 22
  misc_feature: MA Experiment 20000113 PARAMETER Experiment Name: At_42deg_Heat_cDNA_P Parameter: Timepoint (hr) Value: 8
  misc_feature: MA Experiment 20000113 PARAMETER Experiment Name: At_42deg_Heat_cDNA_P Parameter: Tissue Value: Aerial
  misc_feature: MA Experiment ID: 20000144 Result: Down-regulated in Transcription
  misc_feature: MA Experiment 20000144 PARAMETER Experiment Name: At_42deg_Heat_cDNA_P Parameter: Temperature (deg C) Value: 42 vs. 22
  misc_feature: MA Experiment 20000144 PARAMETER Experiment Name: At_42deg_Heat_cDNA_P Parameter: Timepoint (hr) Value: 1
  misc_feature: MA Experiment 20000144 PARAMETER Experiment Name: At_42deg_Heat_cDNA_P Parameter: Tissue Value: Aerial
  misc_feature: MA Experiment ID: 20000264 Result: Up-regulated in Transcription
  misc_feature: MA Experiment 20000264 PARAMETER Experiment Name: At_Open_Flower_P Parameter: Age (day) Value: 21
  misc_feature: MA Experiment 20000264 PARAMETER Experiment Name: At_Open_Flower_P Parameter: Plant Line Value: WS
  misc_feature: MA Experiment 20000264 PARAMETER Experiment Name: At_Open_Flower_P Parameter: Tissue Value: Open Flower vs. Whole Plant
  misc_feature: MA Experiment ID: 20000265 Result: Up-regulated in Transcription
  misc_feature: MA Experiment 20000265 PARAMETER Experiment Name: At_Open_Flower_P Parameter: Age (day) Value: 21
  misc_feature: MA Experiment 20000265 PARAMETER Experiment Name: At_Open_Flower_P Parameter: Plant Line Value: WS
  misc_feature: MA Experiment 20000265 PARAMETER Experiment Name: At_Open_Flower_P Parameter: Tissue Value: Closed Flower vs. Whole Plant
tctgcaatttgaattcaaaatttaaaccactctacttttgaatctctctctcactaaacctagaaagtagaaaaccctagcatttgtgatcttcaacgggaaaaatgacgactgtgactccgtccgccggtcgtgagctctcgaatccgccgtccgacggcatttctaatctccgattttctaataacagtgatcatctcctcgtttcttcatgggataagcgtgtgagattgtatgatgtgagcaccaattcgttgaaaggagagttcttacatggcggagcagtactcgattgctgttttcacgatgacttctccggcttcagtgttggcgctgattacaaagtccgacggattgtattcaatgtcggcaaagaggacattttggggacacatgacaaagcagtgcgatgtgttgagtattcttacgctgcgggacaagtgatcactggatcttgggataaaacagttaaatgttgggatccaagaggcgctagtgggcctgaacgcacccaagtgggaacatatttgcaaccagaacgtgtttactctatgtctcttgttggacatcgtttggtagtggctacagcaggaaggcatgtaaacatctatgatctcagaaatatgtctcagcctgagcaaagaagggagtcttcactgaaataccagacgagatgtgtgcgttgttatcctaatggaacaggctatgctcttagctctgttgaaggaagggttgcaatggagttttttgatctgtcagaggctgctcaagctaaaaaatatgctttcaaatgtcatcggaaatcagaggctggaagggacattgtttaccctgtaaattccattgccttccatccaatctatggcacctttgcaactggaggctgtgatggtttcgtcaacatttgggatggtaacaacaagaagaggctatatcagtactcaaagtatccaacgagtatctcggcactgtcattcagtcgagatggtcagctgctggctgttgcttcaagttacacatttgaagagggagagaaatcgcaagaaccggaggccatctttgtaagaagcgtgaatgaaatcgaagtgaaaccaaaaccgaaagtatacccgaatcctgcggcgtagaaaggaagaaacacaagttatttcctatgttggttgtttttgtatttgctaggagtgttccaaagattgaatcaacgtatgtttgagcttttaaataactagtgaaatatccacattcaccgtatatgtttaaatttctgtagtcaaactctcttgtcaaacatataatataagatgacaaatttccagtgttt

SEQ ID NO: 22969 - protein, 340 aa, Arabidopsis thaliana
  peptide (1)..(340): Ceres Seq. ID no. 13500047
  misc_feature (15)..(331): Homolog of NCBI NO: 39591225 NR Description: Hypothetical protein CBG20696 [Caenorhabditis
  misc_feature (1)..(331): Homolog of NCBI NO: 17537541 NR Description: Mitotic checkpoint (38.1 kD) [Caenorhabditis
  misc_feature (11)..(331): Homolog of NCBI NO: 37362190 NR Description: BUB3 budding uninhibited by benzimidazoles 3-like
  misc_feature (4)..(331): Homolog of NCBI NO: 13122448 NR Description: WD repeat protein Bub3 [Xenopus laevis]
  misc_feature (2)..(331): Homolog of NCBI NO: 3986296 NR Description: mitotic checkpoint [Xenopus laevis]
  misc_feature (4)..(331): Homolog of NCBI NO: 4757880 NR Description: BUB3 budding uninhibited by benzimidazoles 3
  misc_feature (3)..(251): Homolog of NCBI NO: 12323596 NR Description: mitotic checkpoint protein, 3' partial;
  misc_feature (9)..(338): Homolog of NCBI NO: 28564814 NR Description: putative mitotic checkpoint protein
  misc_feature (3)..(338): Homolog of NCBI NO: 15222841 NR Description: mitotic checkpoint protein, putative [Arabidopsis
  misc_feature (1)..(340): Homolog of NCBI NO: 18402300 NR Description: mitotic checkpoint protein [Arabidopsis thaliana]
MTTVTPSAGRELSNPPSDGISNLRFSNNSDHLLVSSWDKRVRLYDVSTNSLKGEFLHGGAVLDCCFHDDFSGFSVGADYKVRRIVFNVGKEDILGTHDKAVRCVEYSYAAGQVITGSWDKTVKCWDPRGASGPERTQVGTYLQPERVYSMSLVGHRLVVATAGRHVNIYDLRNMSQPEQRRESSLKYQTRCVRCYPNGTGYALSSVEGRVAMEFFDLSEAAQAKKYAFKCHRKSEAGRDIVYPVNSIAFHPIYGTFATGGCDGFVNIWDGNNKKRLYQYSKYPTSISALSFSRDGQLLAVASSYTFEEGEKSQEPEAIFVRSVNEIEVKPKPKVYPNPAA

SEQ ID NO: 22970 - protein, 191 aa, Arabidopsis thaliana
  peptide (1)..(191): Ceres Seq. ID no. 13500048
  misc_feature (1)..(182): Homolog of NCBI NO: 39591225 NR Description: Hypothetical protein CBG20696 [Caenorhabditis
  misc_feature (1)..(182): Homolog of NCBI NO: 17537541 NR Description: Mitotic checkpoint (38.1 kD) [Caenorhabditis
  misc_feature (1)..(182): Homolog of NCBI NO: 37362190 NR Description: BUB3 budding uninhibited by benzimidazoles 3-like
  misc_feature (1)..(182): Homolog of NCBI NO: 13122448 NR Description: WD repeat protein Bub3 [Xenopus laevis]
  misc_feature (1)..(182): Homolog of NCBI NO: 3986296 NR Description: mitotic checkpoint [Xenopus laevis]
  misc_feature (1)..(182): Homolog of NCBI NO: 4757880 NR Description: BUB3 budding uninhibited by benzimidazoles 3
  misc_feature (1)..(102): Homolog of NCBI NO: 12323596 NR Description: mitotic checkpoint protein, 3' partial;
  misc_feature (1)..(189): Homolog of NCBI NO: 28564814 NR Description: putative mitotic checkpoint protein
  misc_feature (1)..(189): Homolog of NCBI NO: 15222841 NR Description: mitotic checkpoint protein, putative [Arabidopsis
  misc_feature (1)..(191): Homolog of NCBI NO: 18402300 NR Description: mitotic checkpoint protein [Arabidopsis thaliana]
MSLVGHRLVVATAGRHVNIYDLRNMSQPEQRRESSLKYQTRCVRCYPNGTGYALSSVEGRVAMEFFDLSEAAQAKKYAFKCHRKSEAGRDIVYPVNSIAFHPIYGTFATGGCDGFVNIWDGNNKKRLYQYSKYPTSISALSFSRDGQLLAVASSYTFEEGEKSQEPEAIFVRSVNEIEVKPKPKVYPNPAA

SEQ ID NO: 22971 - DNA, 888 bp, Arabidopsis thaliana
  misc_feature (1)..(888): Ceres Seq. ID no. 12384885
  misc_feature: MA Experiment ID: 20000088 Result: Down-regulated in Transcription
  misc_feature: MA Experiment 20000088 PARAMETER Experiment Name: At_100uM_ABA_Mutants_cDNA_P Parameter: Plant Line Value: Landsberg
  misc_feature: MA Experiment 20000088 PARAMETER Experiment Name: At_100uM_ABA_Mutants_cDNA_P Parameter: Timepoint (hr) Value: 6
  misc_feature: MA Experiment 20000088 PARAMETER Experiment Name: At_100uM_ABA_Mutants_cDNA_P Parameter: Tissue Value: Aerial
  misc_feature: MA Experiment 20000088 PARAMETER Experiment Name: At_100uM_ABA_Mutants_cDNA_P Parameter: Treatment Value: 100uM ABA vs. No Treatment
  misc_feature: MA Experiment ID: 20000438 Result: Up-regulated in Transcription
  misc_feature: MA Experiment 20000438 PARAMETER Experiment Name: At_Shoots__P Parameter: Age (day) Value: 14
  misc_feature: MA Experiment 20000438 PARAMETER Experiment Name: At_Shoots__P Parameter: Tissue Value: Shoots vs. Whole Plant
  misc_feature: MA Experiment ID: 20000495 Result: Down-regulated in Transcription
  misc_feature: MA Experiment 20000495 PARAMETER Experiment Name: At_Guard_Cells_P Parameter: Harvest Date Value: 8/2/2002
  misc_feature: MA Experiment 20000495 PARAMETER Experiment Name: At_Guard_Cells_P Parameter: Organism Value: A. thaliana
  misc_feature: MA Experiment 20000495 PARAMETER Experiment Name: At_Guard_Cells_P Parameter: Tissue Value: Guard Cells vs. Leaves
  misc_feature: MA Experiment ID: 20001451 Result: Down-regulated in Transcription
  misc_feature: MA Experiment 20001451 PARAMETER Experiment Name: At_Far-red-induction_P Parameter: Age (day) Value: 7
  misc_feature: MA Experiment 20001451 PARAMETER Experiment Name: At_Far-red-induction_P Parameter: Light Value: Far-red vs. White
  misc_feature: MA Experiment 20001451 PARAMETER Experiment Name: At_Far-red-induction_P Parameter: Organism Value: A. thaliana
  misc_feature: MA Experiment 20001451 PARAMETER Experiment Name: At_Far-red-induction_P Parameter: Plant Line Value: Columbia
  misc_feature: MA Experiment 20001451 PARAMETER Experiment Name: At_Far-red-induction_P Parameter: Timepoint (hr) Value: 24
  misc_feature: MA Experiment 20001451 PARAMETER Experiment Name: At_Far-red-induction_P Parameter: Tissue Value: Whole Plant
  misc_feature: MA Experiment ID: 20001557 Result: Down-regulated in Transcription
  misc_feature: MA Experiment 20001557 PARAMETER Experiment Name: At_Drought_Soil_Dry_P Parameter: Age (day) Value: 27
  misc_feature: MA Experiment 20001557 PARAMETER Experiment Name: At_Drought_Soil_Dry_P Parameter: Organism Value: A. thaliana
  misc_feature: MA Experiment 20001557 PARAMETER Experiment Name: At_Drought_Soil_Dry_P Parameter: Plant Line Value: WS
  misc_feature: MA Experiment 20001557 PARAMETER Experiment Name: At_Drought_Soil_Dry_P Parameter: Post Timepoint (hr) Value: 3
  misc_feature: MA Experiment 20001557 PARAMETER Experiment Name: At_Drought_Soil_Dry_P Parameter: Post-Treatment Value: Re-Water vs. No Drought
  misc_feature: MA Experiment 20001557 PARAMETER Experiment Name: At_Drought_Soil_Dry_P Parameter: Timepoint (day) Value: 13
  misc_feature: MA Experiment 20001557 PARAMETER Experiment Name: At_Drought_Soil_Dry_P Parameter: Treatment Value: Drought vs. No Drought
acaaacaaaacaaaaccagagatttcgttatccactgaagttcgtttgcttctgtcaaatttgccaaatcgtaaccaaaaaaagatggcagcttcttctccatctctccttctaccactaggttcagcatctagaaatggtctaaccaccaagaatccaaattcatcaagatatatagctgcaagagtcatagcttcagaaacaagagagcaaagctgtaaaatcagtaatctctctagccgtagagaagcaatgcttttggtactcggcgtctcaggaggattatcaatgagctcacttgcggcgtatgcagctggtttacctccagaagataaaccaagactctgtgaagcagaatgcgagaaagagcttgaaaatgttccaatggtaactacagagtcagggcttcagtataaggatattaaagttggtagaggcccgagtccaccggttggttttcaggttgctgctaattatgtggctatggttccatcagggcaaatattcgacagttctctggagaaaggtctaccgtatctatttcgcgttggctctggccaggtgatcaaaggacttgatgaaggaatcttgagtatgaaagctggtggcaaacgtagactctacatcccagggcctttggcgtttccaaagggtctagtttcagctccagggaggccgagagttgcgccaaacagcccggtgatatttgacgtgagcttagagttcataccaggtctcgattcagaggaagagtgaaactctgttttttcaagtgcaaattgtaatcttccatacacaattacaagattctatgtatgatatttatctcattgtactcattcattgaagaacatcacattgattaaaaacgtcagtatttttcaatcc

SEQ ID NO: 22972 - protein, 251 aa, Arabidopsis thaliana
  peptide (1)..(251): Ceres Seq. ID no. 12384886
  misc_feature (144)..(241): Pfam Name: FKBP-type peptidyl-prolyl cis-trans isomerase Pfam Description: FKBP-type peptidyl-prolyl cis-trans isomerase
  misc_feature (73)..(249): Homolog of NCBI NO: 38636681 NR Description: putative immunophilin / FKBP-type peptidyl-prolyl
  misc_feature (85)..(251): Homolog of NCBI NO: 25408885 NR Description: hypothetical protein At2g43560 [imported] -
  misc_feature (130)..(240): Homolog of NCBI NO: 39997372 NR Description: FKBP-type peptidyl-prolyl cis-trans isomerase
  misc_feature (130)..(240): Homolog of NCBI NO: 23053670 NR Description: hypothetical protein [Geobacter metallireducens]
  misc_feature (104)..(240): Homolog of NCBI NO: 22298646 NR Description: FKBP-type peptidyl-prolyl cis-trans isomerase
  misc_feature (87)..(251): Homolog of NCBI NO: 18252321 NR Description: putative FKBP type peptidyl-prolyl cis-trans
  misc_feature (85)..(240): Homolog of NCBI NO: 16329650 NR Description: FKBP-type peptidyl-prolyl cis-trans isomerase
  misc_feature (85)..(240): Homolog of NCBI NO: 23129112 NR Description: hypothetical protein [Nostoc punctiforme]
  misc_feature (113)..(240): Homolog of NCBI NO: 23042526 NR Description: hypothetical protein [Trichodesmium erythraeum
  misc_feature (29)..(251): Homolog of NCBI NO: 15224305 NR Description: FKBP-type peptidyl-prolyl cis-trans isomerase
TNKTKPEISLSTEVRLLLSNLPNRNQKKMAASSPSLLLPLGSASRNGLTTKNPNSSRYIAARVIASETREQSCKISNLSSRREAMLLVLGVSGGLSMSSLAAYAAGLPPEDKPRLCEAECEKELENVPMVTTESGLQYKDIKVGRGPSPPVGFQVAANYVAMVPSGQIFDSSLEKGLPYLFRVGSGQVIKGLDEGILSMKAGGKRRLYIPGPLAFPKGLVSAPGRPRVAPNSPVIFDVSLEFIPGLDSEEE

SEQ ID NO: 22973 - protein, 223 aa, Arabidopsis thaliana
  peptide (1)..(223): Ceres Seq. ID no. 12384887
  misc_feature (116)..(213): Pfam Name: FKBP-type peptidyl-prolyl cis-trans isomerase Pfam Description: FKBP-type peptidyl-prolyl cis-trans isomerase
  misc_feature (85)..(212): Homolog of NCBI NO: 23042526 NR Description: hypothetical protein [Trichodesmium erythraeum
  misc_feature (102)..(212): Homolog of NCBI NO: 39997372 NR Description: FKBP-type peptidyl-prolyl cis-trans isomerase
  misc_feature (57)..(212): Homolog of NCBI NO: 23129112 NR Description: hypothetical protein [Nostoc punctiforme]
  misc_feature (102)..(212): Homolog of NCBI NO: 23053670 NR Description: hypothetical protein [Geobacter metallireducens]
  misc_feature (57)..(212): Homolog of NCBI NO: 16329650 NR Description: FKBP-type peptidyl-prolyl cis-trans isomerase
  misc_feature (76)..(212): Homolog of NCBI NO: 22298646 NR Description: FKBP-type peptidyl-prolyl cis-trans isomerase
  misc_feature (59)..(223): Homolog of NCBI NO: 18252321 NR Description: putative FKBP type peptidyl-prolyl cis-trans
  misc_feature (45)..(221): Homolog of NCBI NO: 38636681 NR Description: putative immunophilin / FKBP-type peptidyl-prolyl
  misc_feature (57)..(223): Homolog of NCBI NO: 25408885 NR Description: hypothetical protein At2g43560 [imported] -
  misc_feature (1)..(223): Homolog of NCBI NO: 15224305 NR Description: FKBP-type peptidyl-prolyl cis-trans isomerase
MAASSPSLLLPLGSASRNGLTTKNPNSSRYIAARVIASETREQSCKISNLSSRREAMLLVLGVSGGLSMSSLAAYAAGLPPEDKPRLCEAECEKELENVPMVTTESGLQYKDIKVGRGPSPPVGFQVAANYVAMVPSGQIFDSSLEKGLPYLFRVGSGQVIKGLDEGILSMKAGGKRRLYIPGPLAFPKGLVSAPGRPRVAPNSPVIFDVSLEFIPGLDSEEE

SEQ ID NO: 22974 - protein, 167 aa, Arabidopsis thaliana
  peptide (1)..(167): Ceres Seq. ID no. 12384888
  misc_feature (60)..(157): Pfam Name: FKBP-type peptidyl-prolyl cis-trans isomerase Pfam Description: FKBP-type peptidyl-prolyl cis-trans isomerase
  misc_feature (29)..(156): Homolog of NCBI NO: 23042526 NR Description: hypothetical protein [Trichodesmium erythraeum
  misc_feature (46)..(156): Homolog of NCBI NO: 39997372 NR Description: FKBP-type peptidyl-prolyl cis-trans isomerase
  misc_feature (1)..(156): Homolog of NCBI NO: 23129112 NR Description: hypothetical protein [Nostoc punctiforme]
  misc_feature (46)..(156): Homolog of NCBI NO: 23053670 NR Description: hypothetical protein [Geobacter metallireducens]
  misc_feature (1)..(156): Homolog of NCBI NO: 16329650 NR Description: FKBP-type peptidyl-prolyl cis-trans isomerase
  misc_feature (20)..(156): Homolog of NCBI NO: 22298646 NR Description: FKBP-type peptidyl-prolyl cis-trans isomerase
  misc_feature (3)..(167): Homolog of NCBI NO: 18252321 NR Description: putative FKBP type peptidyl-prolyl cis-trans
  misc_feature (1)..(165): Homolog of NCBI NO: 38636681 NR Description: putative immunophilin / FKBP-type peptidyl-prolyl
  misc_feature (1)..(167): Homolog of NCBI NO: 25408885 NR Description: hypothetical protein At2g43560 [imported] -
  misc_feature (1)..(167): Homolog of NCBI NO: 15224305 NR Description: FKBP-type peptidyl-prolyl cis-trans isomerase
MLLVLGVSGGLSMSSLAAYAAGLPPEDKPRLCEAECEKELENVPMVTTESGLQYKDIKVGRGPSPPVGFQVAANYVAMVPSGQIFDSSLEKGLPYLFRVGSGQVIKGLDEGILSMKAGGKRRLYIPGPLAFPKGLVSAPGRPRVAPNSPVIFDVSLEFIPGLDSEEE

SEQ ID NO: 22975 - DNA, 1316 bp, Arabidopsis thaliana
  misc_feature (1)..(1316): Ceres Seq. ID no. 12334911
  misc_feature: MA Experiment ID: 108434 Result: Up-regulated in Transcription
  misc_feature: MA Experiment 108434 PARAMETER Experiment Name: At_Root_Tips_cDNA_P Parameter: Tissue Value: Root Tips
  misc_feature: MA Experiment ID: 108462 Result: Down-regulated in Transcription
  misc_feature: MA Experiment 108462 PARAMETER Experiment Name: At_Germinating_Seeds_cDNA_P Parameter: Age (day) Value: 2 vs. 0
  misc_feature: MA Experiment 108462 PARAMETER Experiment Name: At_Germinating_Seeds_cDNA_P Parameter: Tissue Value: Germinating Seeds
  misc_feature: MA Experiment ID: 108463 Result: Down-regulated in Transcription
  misc_feature: MA Experiment 108463 PARAMETER Experiment Name: At_Germinating_Seeds_cDNA_P Parameter: Age (day) Value: 3 vs. 0
  misc_feature: MA Experiment 108463 PARAMETER Experiment Name: At_Germinating_Seeds_cDNA_P Parameter: Tissue Value: Germinating Seeds
  misc_feature: MA Experiment ID: 108464 Result: Down-regulated in Transcription
  misc_feature: MA Experiment 108464 PARAMETER Experiment Name: At_Germinating_Seeds_cDNA_P Parameter: Age (day) Value: 4 vs. 0
  misc_feature: MA Experiment 108464 PARAMETER Experiment Name: At_Germinating_Seeds_cDNA_P Parameter: Tissue Value: Germinating Seeds
  misc_feature: MA Experiment ID: 108595 Result: Down-regulated in Transcription
  misc_feature: MA Experiment 108595 PARAMETER Experiment Name: At_Ler-pi_Ovule_cDNA_P Parameter: Plant Line Value: null
  misc_feature: MA Experiment ID: 20001560 Result: Up-regulated in Transcription
  misc_feature: MA Experiment 20001560 PARAMETER Experiment Name: At_Drought_Soil_Dry_P Parameter: Age (day) Value: 28
  misc_feature: MA Experiment 20001560 PARAMETER Experiment Name: At_Drought_Soil_Dry_P Parameter: Organism Value: A. thaliana
  misc_feature: MA Experiment 20001560 PARAMETER Experiment Name: At_Drought_Soil_Dry_P Parameter: Plant Line Value: WS
  misc_feature: MA Experiment 20001560 PARAMETER Experiment Name: At_Drought_Soil_Dry_P Parameter: Post Timepoint (hr) Value: None
  misc_feature: MA Experiment 20001560 PARAMETER Experiment Name: At_Drought_Soil_Dry_P Parameter: Post-Treatment Value: None
  misc_feature: MA Experiment 20001560 PARAMETER Experiment Name: At_Drought_Soil_Dry_P Parameter: Timepoint (day) Value: 14
  misc_feature: MA Experiment 20001560 PARAMETER Experiment Name: At_Drought_Soil_Dry_P Parameter: Treatment Value: Drought vs. No Drought
aaggaatcaaaattgtcagccgaacaacaaaaaaaacaagggcttttcagaaaaataaaaaacctttaaaccctttttttgtgtatccgattccgtcgcaagtacattcggactctttcacggcgtcaatgtctgagaacgcagccaacaacatcatggagaccaagatttgtacagacgccatcgtgtctgaattacagaagaagaaagttcatctcttttactgcttagagtgcgaagaacttgctcgcaacatcgccgctgaatctgatcacatcactctccaatccatcaactggaggagttttgctgatggattcccgaatctatttatcaacaacgcacatgatatccgaggccagcacgttgcgttccttgcttcattcagttcccctgctgtcatctttgagcagatctctgtcatttacttgctccctcgattgtttgttgcgtccttcactttggtgttgcctttcttccccactggctcctttgagagaatggaagaggaaggagatgtagcaactgcttttaccatggcaaggattgtctctaatatccccatttcacgcggtggtccgactagtgttgtcatctatgacattcacgctttgcaggaaaggttttactttgccgatcaggttcttcctttgtttgagactggaatcccgttgttgactaaacgccttcaacagcttcctgaaactgagaaagtcatagttgcatttcctgatgatggagcctggaagcgtttccataagctgttggatcattatcccacggttgtgtgtacaaaggttcgtgaaggcgataagagaatagtcaggctgaaggaaggaaaccctgctggttgtcacgttgttatcgtggatgatcttgtgcagtctgggggtacactcattgaatgccagaaagtattggcagcgcatggagctgtgaaggtgagtgcttatgtaactcatggtgtcttcccaaagagctcgtgggagcgtttcacccacaagaagaacggattagaagaagcgtttgcttacttctggatcacggattcttgtccacagacggttaaggccatcggaaacaaggctcctttcgaagtcttgagcctcgctggatccattgctgatgctctgcagatttgaagcagtagagataaagcctggttctttgctcgttttggacttttggtggttttatactcttaagagatgtgctttggatgatcatttatgaaataatcatatcacttttgctgaaataactagacagattgttgaaaccttgtactctgttcttgttgattgatcttcttttgc

SEQ ID NO: 22976 - protein, 379 aa, Arabidopsis thaliana
  peptide (1)..(379): Ceres Seq. ID no. 12334912
  misc_feature (237)..(331): Homolog of NCBI NO: 6573738 NR Description: F20B24.13 [Arabidopsis thaliana]
  misc_feature (68)..(239): Homolog of NCBI NO: 6573738 NR Description: F20B24.13 [Arabidopsis thaliana]
  misc_feature (68)..(379): Homolog of NCBI NO: 25402614 NR Description: hypothetical protein [imported] - Arabidopsis
  misc_feature (68)..(379): Homolog of NCBI NO: 34910736 NR Description: putative phosphoribosyl pyrophosphate synthase
  misc_feature (68)..(379): Homolog of NCBI NO: 25529012 NR Description: ribose-phosphate diphosphokinase (EC 2.7.6.1)
  misc_feature (68)..(379): Homolog of NCBI NO: 15220191 NR Description: phosphoribosyl diphosphate synthase
  misc_feature (2)..(379): Homolog of NCBI NO: 4902877 NR Description: phosphoribosyl pyrophosphate synthase isozyme 3
  misc_feature (67)..(379): Homolog of NCBI NO: 22671730 NR Description: phosphoribosyl pyrophosphate synthetase
  misc_feature (68)..(379): Homolog of NCBI NO: 4902879 NR Description: phosphoribosyl pyrophosphate synthase isozyme 4
  misc_feature (43)..(379): Homolog of NCBI NO: 15228027 NR Description: putative ribose phosphate pyrophosphokinase
GIKIVSRTTKKTRAFQKNKKPLNPFFVYPIPSQVHSDSFTASMSENAANNIMETKICTDAIVSELQKKKVHLFYCLECEELARNIAAESDHITLQSINWRSFADGFPNLFINNAHDIRGQHVAFLASFSSPAVIFEQISVIYLLPRLFVASFTLVLPFFPTGSFERMEEEGDVATAFTMARIVSNIPISRGGPTSVVIYDIHALQERFYFADQVLPLFETGIPLLTKRLQQLPETEKVIVAFPDDGAWKRFHKLLDHYPTVVCTKVREGDKRIVRLKEGNPAGCHVVIVDDLVQSGGTLIECQKVLAAHGAVKVSAYVTHGVFPKSSWERFTHKKNGLEEAFAYFWITDSCPQTVKAIGNKAPFEVLSLAGSIADALQI

SEQ ID NO: 22977 - protein, 337 aa, Arabidopsis thaliana
  peptide (1)..(337): Ceres Seq. ID no. 12334913
  misc_feature (195)..(289): Homolog of NCBI NO: 6573738 NR Description: F20B24.13 [Arabidopsis thaliana]
  misc_feature (26)..(197): Homolog of NCBI NO: 6573738 NR Description: F20B24.13 [Arabidopsis thaliana]
  misc_feature (26)..(337): Homolog of NCBI NO: 25402614 NR Description: hypothetical protein [imported] - Arabidopsis
  misc_feature (26)..(337): Homolog of NCBI NO: 34910736 NR Description: putative phosphoribosyl pyrophosphate synthase
  misc_feature (26)..(337): Homolog of NCBI NO: 25529012 NR Description: ribose-phosphate diphosphokinase (EC 2.7.6.1)
  misc_feature (26)..(337): Homolog of NCBI NO: 15220191 NR Description: phosphoribosyl diphosphate synthase
  misc_feature (1)..(337): Homolog of NCBI NO: 4902877 NR Description: phosphoribosyl pyrophosphate synthase isozyme 3
  misc_feature (25)..(337): Homolog of NCBI NO: 22671730 NR Description: phosphoribosyl pyrophosphate synthetase
  misc_feature (26)..(337): Homolog of NCBI NO: 4902879 NR Description: phosphoribosyl pyrophosphate synthase isozyme 4
  misc_feature (1)..(337): Homolog of NCBI NO: 15228027 NR Description: putative ribose phosphate pyrophosphokinase
MSENAANNIMETKICTDAIVSELQKKKVHLFYCLECEELARNIAAESDHITLQSINWRSFADGFPNLFINNAHDIRGQHVAFLASFSSPAVIFEQISVIYLLPRLFVASFTLVLPFFPTGSFERMEEEGDVATAFTMARIVSNIPISRGGPTSVVIYDIHALQERFYFADQVLPLFETGIPLLTKRLQQLPETEKVIVAFPDDGAWKRFHKLLDHYPTVVCTKVREGDKRIVRLKEGNPAGCHVVIVDDLVQSGGTLIECQKVLAAHGAVKVSAYVTHGVFPKSSWERFTHKKNGLEEAFAYFWITDSCPQTVKAIGNKAPFEVLSLAGSIADALQI

SEQ ID NO: 22978 - protein, 328 aa, Arabidopsis thaliana
  peptide (1)..(328): Ceres Seq. ID no. 12334914
  misc_feature (186)..(280): Homolog of NCBI NO: 6573738 NR Description: F20B24.13 [Arabidopsis thaliana]
  misc_feature (17)..(188): Homolog of NCBI NO: 6573738 NR Description: F20B24.13 [Arabidopsis thaliana]
  misc_feature (17)..(328): Homolog of NCBI NO: 25402614 NR Description: hypothetical protein [imported] - Arabidopsis
  misc_feature (17)..(328): Homolog of NCBI NO: 34910736 NR Description: putative phosphoribosyl pyrophosphate synthase
  misc_feature (17)..(328): Homolog of NCBI NO: 25529012 NR Description: ribose-phosphate diphosphokinase (EC 2.7.6.1)
  misc_feature (17)..(328): Homolog of NCBI NO: 15220191 NR Description: phosphoribosyl diphosphate synthase
  misc_feature (1)..(328): Homolog of NCBI NO: 4902877 NR Description: phosphoribosyl pyrophosphate synthase isozyme 3
  misc_feature (16)..(328): Homolog of NCBI NO: 22671730 NR Description: phosphoribosyl pyrophosphate synthetase
  misc_feature (17)..(328): Homolog of NCBI NO: 4902879 NR Description: phosphoribosyl pyrophosphate synthase isozyme 4
  misc_feature (1)..(328): Homolog of NCBI NO: 15228027 NR Description: putative ribose phosphate pyrophosphokinase
METKICTDAIVSELQKKKVHLFYCLECEELARNIAAESDHITLQSINWRSFADGFPNLFINNAHDIRGQHVAFLASFSSPAVIFEQISVIYLLPRLFVASFTLVLPFFPTGSFERMEEEGDVATAFTMARIVSNIPISRGGPTSVVIYDIHALQERFYFADQVLPLFETGIPLLTKRLQQLPETEKVIVAFPDDGAWKRFHKLLDHYPTVVCTKVREGDKRIVRLKEGNPAGCHVVIVDDLVQSGGTLIECQKVLAAHGAVKVSAYVTHGVFPKSSWERFTHKKNGLEEAFAYFWITDSCPQTVKAIGNKAPFEVLSLAGSIADALQI

SEQ ID NO: 22979 - DNA, 1516 bp, Arabidopsis thaliana
  misc_feature (1)..(1516): Ceres Seq. ID no. 13494209
  misc_feature: MA Experiment ID: 20000071 Result: Down-regulated in Transcription
  misc_feature: MA Experiment 20000071 PARAMETER Experiment Name: At_100uM_ABA_Mutants_cDNA_P Parameter: Plant Line Value: CS8104
  misc_feature: MA Experiment 20000071 PARAMETER Experiment Name: At_100uM_ABA_Mutants_cDNA_P Parameter: Timepoint (hr) Value: 6
  misc_feature: MA Experiment 20000071 PARAMETER Experiment Name: At_100uM_ABA_Mutants_cDNA_P Parameter: Tissue Value: Aerial
  misc_feature: MA Experiment 20000071 PARAMETER Experiment Name: At_100uM_ABA_Mutants_cDNA_P Parameter: Treatment Value: 100uM ABA vs. No Treatment
  misc_feature: MA Experiment ID: 20000306 Result: Down-regulated in Transcription
  misc_feature: MA Experiment 20000306 PARAMETER Experiment Name: At_Germinating_Seeds_Sub_P Parameter: Age (hr) Value: 6 vs. 0
  misc_feature: MA Experiment 20000306 PARAMETER Experiment Name: At_Germinating_Seeds_Sub_P Parameter: Organism Value: A. thaliana
  misc_feature: MA Experiment 20000306 PARAMETER Experiment Name: At_Germinating_Seeds_Sub_P Parameter: Plant Line Value: WS
  misc_feature: MA Experiment 20000306 PARAMETER Experiment Name: At_Germinating_Seeds_Sub_P Parameter: Tissue Value: Germinating Seeds
  misc_feature: MA Experiment ID: 20000307 Result: Down-regulated in Transcription
  misc_feature: MA Experiment 20000307 PARAMETER Experiment Name: At_Germinating_Seeds_Sub_P Parameter: Age (hr) Value: 24 vs. 0
  misc_feature: MA Experiment 20000307 PARAMETER Experiment Name: At_Germinating_Seeds_Sub_P Parameter: Organism Value: A. thaliana
  misc_feature: MA Experiment 20000307 PARAMETER Experiment Name: At_Germinating_Seeds_Sub_P Parameter: Plant Line Value: WS
  misc_feature: MA Experiment 20000307 PARAMETER Experiment Name: At_Germinating_Seeds_Sub_P Parameter: Tissue Value: Germinating Seeds
  misc_feature: MA Experiment ID: 20000314 Result: Down-regulated in Transcription
  misc_feature: MA Experiment 20000314 PARAMETER Experiment Name: At_14day_Shoots-Roots_Sub_P Parameter: Age (day) Value: 14
  misc_feature: MA Experiment 20000314 PARAMETER Experiment Name: At_14day_Shoots-Roots_Sub_P Parameter: Organism Value: A. thaliana
  misc_feature: MA Experiment 20000314 PARAMETER Experiment Name: At_14day_Shoots-Roots_Sub_P Parameter: Plant Line Value: WS
  misc_feature: MA Experiment 20000314 PARAMETER Experiment Name: At_14day_Shoots-Roots_Sub_P Parameter: Tissue Value: Roots vs. Whole Plant
  misc_feature: MA Experiment ID: 20000315 Result: Down-regulated in Transcription
  misc_feature: MA Experiment 20000315 PARAMETER Experiment Name: At_14day_Shoots-Roots_Sub_P Parameter: Age (day) Value: 14
  misc_feature: MA Experiment 20000315 PARAMETER Experiment Name: At_14day_Shoots-Roots_Sub_P Parameter: Organism Value: A. thaliana
  misc_feature: MA Experiment 20000315 PARAMETER Experiment Name: At_14day_Shoots-Roots_Sub_P Parameter: Plant Line Value: WS
  misc_feature: MA Experiment 20000315 PARAMETER Experiment Name: At_14day_Shoots-Roots_Sub_P Parameter: Tissue Value: Shoots vs. Whole Plant
  misc_feature: MA Experiment ID: 20000328 Result: Up-regulated in Transcription
  misc_feature: MA Experiment 20000328 PARAMETER Experiment Name: At_42deg_Heat_Sub_P Parameter: Age (day) Value: 14
  misc_feature: MA Experiment 20000328 PARAMETER Experiment Name: At_42deg_Heat_Sub_P Parameter: Organism Value: A. thaliana
  misc_feature: MA Experiment 20000328 PARAMETER Experiment Name: At_42deg_Heat_Sub_P Parameter: Plant Line Value: WS
  misc_feature: MA Experiment 20000328 PARAMETER Experiment Name: At_42deg_Heat_Sub_P Parameter: Temperature (deg C) Value: 42 vs. 22
  misc_feature: MA Experiment 20000328 PARAMETER Experiment Name: At_42deg_Heat_Sub_P Parameter: Timepoint (hr) Value: 6
  misc_feature: MA Experiment 20000328 PARAMETER Experiment Name: At_42deg_Heat_Sub_P Parameter: Tissue Value: Aerial
  misc_feature: MA Experiment ID: 20000346 Result: Up-regulated in Transcription
  misc_feature: MA Experiment 20000346 PARAMETER Experiment Name: At_2mM_SA_Sub_P Parameter: Age (day) Value: 14
  misc_feature: MA Experiment 20000346 PARAMETER Experiment Name: At_2mM_SA_Sub_P Parameter: Organism Value: A. thaliana
  misc_feature: MA Experiment 20000346 PARAMETER Experiment Name: At_2mM_SA_Sub_P Parameter: Plant Line Value: WS
  misc_feature: MA Experiment 20000346 PARAMETER Experiment Name: At_2mM_SA_Sub_P Parameter: Timepoint (hr) Value: 1
  misc_feature: MA Experiment 20000346 PARAMETER Experiment Name: At_2mM_SA_Sub_P Parameter: Tissue Value: Aerial
  misc_feature: MA Experiment 20000346 PARAMETER Experiment Name: At_2mM_SA_Sub_P Parameter: Treatment Value: 2mM SA vs. No Treatment
  misc_feature: MA Experiment ID: 20000347 Result: Up-regulated in Transcription
  misc_feature: MA Experiment 20000347 PARAMETER Experiment Name: At_2mM_SA_Sub_P Parameter: Age (day) Value: 14
  misc_feature: MA Experiment 20000347 PARAMETER Experiment Name: At_2mM_SA_Sub_P Parameter: Organism Value: A. thaliana
  misc_feature: MA Experiment 20000347 PARAMETER Experiment Name: At_2mM_SA_Sub_P Parameter: Plant Line Value: WS
  misc_feature: MA Experiment 20000347 PARAMETER Experiment Name: At_2mM_SA_Sub_P Parameter: Timepoint (hr) Value: 6
  misc_feature: MA Experiment 20000347 PARAMETER Experiment Name: At_2mM_SA_Sub_P Parameter: Tissue Value: Aerial
  misc_feature: MA Experiment 20000347 PARAMETER Experiment Name: At_2mM_SA_Sub_P Parameter: Treatment Value: 2mM SA vs. No Treatment
  misc_feature: MA Experiment ID: 20000355 Result: Down-regulated in Transcription
  misc_feature: MA Experiment 20000355 PARAMETER Experiment Name: At_Siliques_Sub_P Parameter: Age (day) Value: 21
  misc_feature: MA Experiment 20000355 PARAMETER Experiment Name: At_Siliques_Sub_P Parameter: Organism Value: A. thaliana
  misc_feature: MA Experiment 20000355 PARAMETER Experiment Name: At_Siliques_Sub_P Parameter: Plant Line Value: WS
  misc_feature: MA Experiment 20000355 PARAMETER Experiment Name: At_Siliques_Sub_P Parameter: Tissue Value: Less Than 5mm Siliques vs. Whole Plant
  misc_feature: MA Experiment ID: 20000440 Result: Down-regulated in Transcription
  misc_feature: MA Experiment 20000440 PARAMETER Experiment Name: At_Closed-Flower__Sub_P Parameter: Tissue Value: Closed Flower vs. Whole Plant
  misc_feature: MA Experiment ID: 20000634 Result: Up-regulated in Transcription
  misc_feature: MA Experiment 20000634 PARAMETER Experiment Name: At_10percent_PEG_Sub_P Parameter: Age (day) Value: 12
  misc_feature: MA Experiment 20000634 PARAMETER Experiment Name: At_10percent_PEG_Sub_P Parameter: Organism Value: A. thaliana
  misc_feature: MA Experiment 20000634 PARAMETER Experiment Name: At_10percent_PEG_Sub_P Parameter: Plant Line Value: WS
  misc_feature: MA Experiment 20000634 PARAMETER Experiment Name: At_10percent_PEG_Sub_P Parameter: Timepoint (day) Value: 12
  misc_feature: MA Experiment 20000634 PARAMETER Experiment Name: At_10percent_PEG_Sub_P Parameter: Tissue Value: Whole Plant
  misc_feature: MA Experiment 20000634 PARAMETER Experiment Name: At_10percent_PEG_Sub_P Parameter: Treatment Value: 10% PEG vs. No Treatment
ctcaaattcaaaatttaacacacaaacacaaacacacacaccaaaaaaaacacagaccttaaaaaaataaaaatggttgatatggattggaagaggaagatggtatcatcagatttaccaaactcacctaagctttcttcaaagcttcacgtaactattccatcaccgttcaaaatcgtccctgtttcatctccgatctcatgttcagcacctgctctttgctctgcttacgagctttaccttcgtctccctgagctaagaaagctctggtcatctcgtgattttcctcaatggacatcagagccgattctcaaaccagctcttcaagctttggagatcagtttcagattagttttcgccgtttgttctgatactagaccgtacatcaaccaccgtgaatggaaccggaggctagattctctcatcacgaagcagatccagcttgtagcagcgatctgcgaagatgaagaagaagaaggtatatcagcggaggctccggtcggcggtggacggagttcgttgagtttgttaccgcagctagctacgtggaggagatcagaggctttggggaagaagatcttatatacgatcgataacgagatgagtcggtgtaagtacacgctcggactcggtgaacaaaacatcgccggaaaaccaaatctccggtacgatgcgatttgccgaccaaacgagatctatagcctcaaggataatccatacgcagatcatatcgataatcacgagaatcaaactctctatatcattcaccagatcctcgaatcgtggatctacgcatctggaaatcttctgaatcgaatcgtctcaagtatcgaagaagagaaattcggaaaagcttcaaacgatgtttacttgctggagaagatctggaaaattttagcggagattgaagatcttcatatgttgatggatccggaagattttttgaaattgaagaaacagttacagatcaaatcgacgggtaaaaacgatgcgttttgtttcagatctaaaggattagtggagatgatgaagatgtcgaaagatctgagacagaaagtaccggcggtcttggcggttgaggtagatccaaccggaggaccaagattacaagaggcggcgatgaagctttacgcgaggaagacagagtgcgataagattcatttgcttcaggggatgcaagcggtggaagcggcggcgaagagtttcttctttgggtataggcagttagtggcggctatgatgggaagtgcggagatgaacgcgacggcgagtcaagagtcgtgtgactcactgagtcagatatttatggagccgacgtatttcccgagccttgacgcggcaaagacgtttctgggagagttttggagtcatttgggatgattaaattttaatttctgctggtataattatttaatataaatttaaattggtggtttggtttaatttagtttgtaagatagtgaaatttttggaacatttgacgatccatatttgaatacaaattcatttttatatg

SEQ ID NO: 22980 - protein, 435 aa, Arabidopsis thaliana
  peptide (1)..(435): Ceres Seq. ID no. 13494210
  misc_feature (1)..(434): Homolog of NCBI NO: 21553529 NR Description: nematode resistance protein-like protein
  misc_feature (1)..(434): Homolog of NCBI NO: 15228750 NR Description: nematode resistance protein-related protein
  misc_feature (1)..(435): Homolog of NCBI NO: 27311581 NR Description: Unknown protein [Arabidopsis thaliana]
  misc_feature (1)..(435): Homolog of NCBI NO: 21593007 NR Description: putative nematode-resistance protein [Arabidopsis
  misc_feature (1)..(435): Homolog of NCBI NO: 15225612 NR Description: nematode-resistance protein -related [Arabidopsis
MVDMDWKRKMVSSDLPNSPKLSSKLHVTIPSPFKIVPVSSPISCSAPALCSAYELYLRLPELRKLWSSRDFPQWTSEPILKPALQALEISFRLVFAVCSDTRPYINHREWNRRLDSLITKQIQLVAAICEDEEEEGISAEAPVGGGRSSLSLLPQLATWRRSEALGKKILYTIDNEMSRCKYTLGLGEQNIAGKPNLRYDAICRPNEIYSLKDNPYADHIDNHENQTLYIIHQILESWIYASGNLLNRIVSSIEEEKFGKASNDVYLLEKIWKILAEIEDLHMLMDPEDFLKLKKQLQIKSTGKNDAFCFRSKGLVEMMKMSKDLRQKVPAVLAVEVDPTGGPRLQEAAMKLYARKTECDKIHLLQGMQAVEAAAKSFFFGYRQLVAAMMGSAEMNATASQESCDSLSQIFMEPTYFPSLDAAKTFLGEFWSHLG

SEQ ID NO: 22981 - protein, 432 aa, Arabidopsis thaliana
  peptide (1)..(432): Ceres Seq. ID no. 13494211
  misc_feature (1)..(431): Homolog of NCBI NO: 21553529 NR Description: nematode resistance protein-like protein
  misc_feature (1)..(431): Homolog of NCBI NO: 15228750 NR Description: nematode resistance protein-related protein
  misc_feature (1)..(432): Homolog of NCBI NO: 27311581 NR Description: Unknown protein [Arabidopsis thaliana]
  misc_feature (1)..(432): Homolog of NCBI NO: 21593007 NR Description: putative nematode-resistance protein [Arabidopsis
  misc_feature (1)..(432): Homolog of NCBI NO: 15225612 NR Description: nematode-resistance protein -related [Arabidopsis
MDWKRKMVSSDLPNSPKLSSKLHVTIPSPFKIVPVSSPISCSAPALCSAYELYLRLPELRKLWSSRDFPQWTSEPILKPALQALEISFRLVFAVCSDTRPYINHREWNRRLDSLITKQIQLVAAICEDEEEEGISAEAPVGGGRSSLSLLPQLATWRRSEALGKKILYTIDNEMSRCKYTLGLGEQNIAGKPNLRYDAICRPNEIYSLKDNPYADHIDNHENQTLYIIHQILESWIYASGNLLNRIVSSIEEEKFGKASNDVYLLEKIWKILAEIEDLHMLMDPEDFLKLKKQLQIKSTGKNDAFCFRSKGLVEMMKMSKDLRQKVPAVLAVEVDPTGGPRLQEAAMKLYARKTECDKIHLLQGMQAVEAAAKSFFFGYRQLVAAMMGSAEMNATASQESCDSLSQIFMEPTYFPSLDAAKTFLGEFWSHLG

SEQ ID NO: 22982 - protein, 426 aa, Arabidopsis thaliana
  peptide (1)..(426): Ceres Seq. ID no. 13494212
  misc_feature (1)..(425): Homolog of NCBI NO: 21553529 NR Description: nematode resistance protein-like protein
  misc_feature (1)..(425): Homolog of NCBI NO: 15228750 NR Description: nematode resistance protein-related protein
  misc_feature (1)..(426): Homolog of NCBI NO: 27311581 NR Description: Unknown protein [Arabidopsis thaliana]
  misc_feature (1)..(426): Homolog of NCBI NO: 21593007 NR Description: putative nematode-resistance protein [Arabidopsis
  misc_feature (1)..(426): Homolog of NCBI NO: 15225612 NR Description: nematode-resistance protein -related [Arabidopsis
MVSSDLPNSPKLSSKLHVTIPSPFKIVPVSSPISCSAPALCSAYELYLRLPELRKLWSSRDFPQWTSEPILKPALQALEISFRLVFAVCSDTRPYINHREWNRRLDSLITKQIQLVAAICEDEEEEGISAEAPVGGGRSSLSLLPQLATWRRSEALGKKILYTIDNEMSRCKYTLGLGEQNIAGKPNLRYDAICRPNEIYSLKDNPYADHIDNHENQTLYIIHQILESWIYASGNLLNRIVSSIEEEKFGKASNDVYLLEKIWKILAEIEDLHMLMDPEDFLKLKKQLQIKSTGKNDAFCFRSKGLVEMMKMSKDLRQKVPAVLAVEVDPTGGPRLQEAAMKLYARKTECDKIHLLQGMQAVEAAAKSFFFGYRQLVAAMMGSAEMNATASQESCDSLSQIFMEPTYFPSLDAAKTFLGEFWSHLG

SEQ ID NO: 22983 - DNA, 1084 bp, Arabidopsis thaliana
  misc_feature (1)..(1084): Ceres Seq. ID no. 13580622
  misc_feature: MA Experiment ID: 108595 Result: Up-regulated in Transcription
  misc_feature: MA Experiment 108595 PARAMETER Experiment Name: At_Ler-pi_Ovule_cDNA_P Parameter: Plant Line Value: null
  misc_feature: MA Experiment ID: 20000184 Result: Down-regulated in Transcription
  misc_feature: MA Experiment 20000184 PARAMETER Experiment Name: At_Shoots__P Parameter: Age (day) Value: 7
  misc_feature: MA Experiment 20000184 PARAMETER Experiment Name: At_Shoots__P Parameter: Tissue Value: Shoots vs. Whole Plant
tcttcttcgatcttcttcctctcgtcaggtttcgtggttctaatcctcgttttattctttctccaaggaagatggctctaaaggagcagctagataaattcaacaaacagcaagtgaaatgccaatctactctttcgagcattgcttcttcaagagaaagaacgagttcttcgaggcagaatgtgcctttgcctgcggcaatcactcagaagaagcctgatgcagctcctgtcaagttttcaagcgataccgagcgacttcagaacattaacaacattagaaaagctcctgttggagctcaaatcaagcgtgtcattgatcttctctatgagagaaggctagccttgacgccagagcaaataaatgaatggtgtcatgtagatatgcatgctaataaggctgtttttgatagtttaaggaagaatccgaaagcgcattatgatggaagaaggttctcttataaggctacgcacgatgttaatgataagaaccagcttctttcgttggtgagaaaataccttgatgggattgcggtggttgatctcaaagacgcttacccgaatgtaatggaggatttgaaggctctgagtgcttcaggggacatctacttgctatcaaattcacaagaggacattgcatacccaaatgatttcaagtgtgagattaaggttgatgacgaatttaaagctctattccgtgacataaacatcccgaacgacatgctggacgtggagaaggagctgctgaaaatcggtttgaagccggcgacaaacactgcggagaggagagctgctgcacagacccatggcatatcgaataaaccgaaggataagaagaagaagaaacaagagatcagcaagagaaccaaactcaccaatgcccatcttcccgagcttttccagaaccttaacggcagcagttcccggaactgaacctcataaatggatgatcatgcggttctaaattcaaattgagcctgaattttcttgtaattgtaattgttactatcttgagtttacaaattacaatggttctcatgtattctcacgacatttgctagaaatatagaataaacacatttgtg

SEQ ID NO: 22984 - protein, 309 aa, Arabidopsis thaliana
  peptide (1)..(309): Ceres Seq. ID no. 13580623
  misc_feature (82)..(304): Homolog of NCBI NO: 19074285 NR Description: TRANSCRIPTION INITIATION FACTOR TFIIE BETA
  misc_feature (24)..(303): Homolog of NCBI NO: 37534050 NR Description: putative Transcription initiation factor IIE,
  misc_feature (24)..(299): Homolog of NCBI NO: 39545898 NR Description: TFIIE-beta 1 [Arabidopsis thaliana]
  misc_feature (24)..(301): Homolog of NCBI NO: 15233477 NR Description: expressed protein [Arabidopsis thaliana]
  misc_feature (24)..(309): Homolog of NCBI NO: 15235379 NR Description: expressed protein [Arabidopsis thaliana]
FFDLLPLVRFRGSNPRFILSPRKMALKEQLDKFNKQQVKCQSTLSSIASSRERTSSSRQNVPLPAAITQKKPDAAPVKFSSDTERLQNINNIRKAPVGAQIKRVIDLLYERRLALTPEQINEWCHVDMHANKAVFDSLRKNPKAHYDGRRFSYKATHDVNDKNQLLSLVRKYLDGIAVVDLKDAYPNVMEDLKALSASGDIYLLSNSQEDIAYPNDFKCEIKVDDEFKALFRDINIPNDMLDVEKELLKIGLKPATNTAERRAAAQTHGISNKPKDKKKKKQEISKRTKLTNAHLPELFQNLNGSSSRN

SEQ ID NO: 22985 - protein, 286 aa, Arabidopsis thaliana
  peptide (1)..(286): Ceres Seq. ID no. 13580624
  misc_feature (59)..(281): Homolog of NCBI NO: 19074285 NR Description: TRANSCRIPTION INITIATION FACTOR TFIIE BETA
  misc_feature (1)..(280): Homolog of NCBI NO: 37534050 NR Description: putative Transcription initiation factor IIE,
  misc_feature (1)..(276): Homolog of NCBI NO: 39545898 NR Description: TFIIE-beta 1 [Arabidopsis thaliana]
  misc_feature (1)..(278): Homolog of NCBI NO: 15233477 NR Description: expressed protein [Arabidopsis thaliana]
  misc_feature (1)..(286): Homolog of NCBI NO: 15235379 NR Description: expressed protein [Arabidopsis thaliana]
MALKEQLDKFNKQQVKCQSTLSSIASSRERTSSSRQNVPLPAAITQKKPDAAPVKFSSDTERLQNINNIRKAPVGAQIKRVIDLLYERRLALTPEQINEWCHVDMHANKAVFDSLRKNPKAHYDGRRFSYKATHDVNDKNQLLSLVRKYLDGIAVVDLKDAYPNVMEDLKALSASGDIYLLSNSQEDIAYPNDFKCEIKVDDEFKALFRDINIPNDMLDVEKELLKIGLKPATNTAERRAAAQTHGISNKPKDKKKKKQEISKRTKLTNAHLPELFQNLNGSSSRN

SEQ ID NO: 22986 - protein, 182 aa, Arabidopsis thaliana
  peptide (1)..(182): Ceres Seq. ID no. 13580625
  misc_feature (1)..(177): Homolog of NCBI NO: 19074285 NR Description: TRANSCRIPTION INITIATION FACTOR TFIIE BETA
  misc_feature (1)..(176): Homolog of NCBI NO: 37534050 NR Description: putative Transcription initiation factor IIE,
  misc_feature (1)..(172): Homolog of NCBI NO: 39545898 NR Description: TFIIE-beta 1 [Arabidopsis thaliana]
  misc_feature (1)..(174): Homolog of NCBI NO: 15233477 NR Description: expressed protein [Arabidopsis thaliana]
  misc_feature (1)..(182): Homolog of NCBI NO: 15235379 NR Description: expressed protein [Arabidopsis thaliana]
MHANKAVFDSLRKNPKAHYDGRRFSYKATHDVNDKNQLLSLVRKYLDGIAVVDLKDAYPNVMEDLKALSASGDIYLLSNSQEDIAYPNDFKCEIKVDDEFKALFRDINIPNDMLDVEKELLKIGLKPATNTAERRAAAQTHGISNKPKDKKKKKQEISKRTKLTNAHLPELFQNLNGSSSRN

SEQ ID NO: 22987 - DNA, 972 bp, Arabidopsis thaliana
  misc_feature (1)..(972): Ceres Seq. ID no. 12370363
  misc_feature: MA Experiment ID: 20000179 Result: Up-regulated in Transcription
  misc_feature: MA Experiment 20000179 PARAMETER Experiment Name: At_Germinating_Seeds_P Parameter: Age (hr) Value: 6 vs. 0
  misc_feature: MA Experiment 20000179 PARAMETER Experiment Name: At_Germinating_Seeds_P Parameter: Tissue Value: Germinating Seeds
  misc_feature: MA Experiment ID: 20000227 Result: Up-regulated in Transcription
  misc_feature: MA Experiment 20000227 PARAMETER Experiment Name: At_Root-Tips-vs-Tops_P Parameter: Tissue Value: Root Tips vs. Root Tops
  misc_feature: MA Experiment ID: 20001911 Result: Down-regulated in Transcription
  misc_feature: MA Experiment 20001911 PARAMETER Experiment Name: At_Drought_Reproduction_P Parameter: Age (day) Value: 40
  misc_feature: MA Experiment 20001911 PARAMETER Experiment Name: At_Drought_Reproduction_P Parameter: Organism Value: A. thaliana
  misc_feature: MA Experiment 20001911 PARAMETER Experiment Name: At_Drought_Reproduction_P Parameter: Plant Line Value: WS
  misc_feature: MA Experiment 20001911 PARAMETER Experiment Name: At_Drought_Reproduction_P Parameter: Timepoint (day) Value: 10
  misc_feature: MA Experiment 20001911 PARAMETER Experiment Name: At_Drought_Reproduction_P Parameter: Tissue Value: Flowers
  misc_feature: MA Experiment 20001911 PARAMETER Experiment Name: At_Drought_Reproduction_P Parameter: Treatment Value: Drought vs. No Drought
acacacaattcttcgcggcttcttttagcttctaagcttcagagcagcaaaaaaaaaacaatggagaagcgccggagatagatctgctttcttccattctccggaccttctctagttcacgaaccaacttcttccactttattctcattcgttggagaaatggactctctcgcaaccgatccagctttcattgattcggatgtatacctcaggttaggacttattattgagggcaaacgattgaaaaagccaccgactgttctctcacgcctctcttcttctctggagagatctctgttactcaatcatgatgacaagattctgcttggatcgccagactctgttaccgtgtttgacgggagatctccccctgagatcagtattgcacactacttggatcgcattttcaagtactcttgctgcagtccctcctgcttcgtcattgcgcatatctacattgatcactttctccataagacccgagcccttctcaaaccccttaatgtccaccgccttatcattacaactgtcatgttagctgctaaagtcttcgatgataggtatttcaacaatgcatactacgcaagagtgggaggtgtgactacgagagagttaaacagattggagatggagttgttgtttacccttgacttcaagcttcaggtagatcctcagacgtttcacacacactgttgtcagttagaaaagcagaacagcgacggcttccagatcgagtggcccataaaagaagcatgccgagccaacaaagagacttggcagaagaggacacccgactcactctgctctcaaaccacagcacgctgatcggcaagggtaagataggattattttgtgttttagtagtgatgattcttttgcatgattgattgtttgtgacaattgtgtgtagtagaaaatctgaaatttctaccaactcattctttaagaagttgctataatatagtttccttg

SEQ ID NO: 22988 - protein, 221 aa, Arabidopsis thaliana
  peptide (1)..(221): Ceres Seq. ID no. 12370364
  misc_feature (33)..(168): Pfam Name: Cyclin, N-terminal domain Pfam Description: Cyclin, N-terminal domain
  misc_feature (25)..(184): Homolog of NCBI NO: 37536902 NR Description: hypothetical protein [Oryza sativa (japonica
  misc_feature (32)..(184): Homolog of NCBI NO: 15240306 NR Description: PREG-like - like protein; protein id: At5g61650.1
  misc_feature (32)..(184): Homolog of NCBI NO: 15240794 NR Description: putative protein; protein id: At5g07450.1
  misc_feature (2)..(192): Homolog of NCBI NO: 15232360 NR Description: regulatory protein - like; protein id:
  misc_feature (32)..(184): Homolog of NCBI NO: 15233185 NR Description: PREG-like protein, putative; protein id:
  misc_feature (1)..(192): Homolog of NCBI NO: 15225402 NR Description: putative PREG1-like negative regulator
  misc_feature (32)..(184): Homolog of NCBI NO: 15224950 NR Description: putative PREG1-like negative regulator; protein
  misc_feature (32)..(184): Homolog of NCBI NO: 25493992 NR Description: PREG-like protein [imported] - Picea mariana
  misc_feature (1)..(221): Homolog of NCBI NO: 15229382 NR Description: putative protein
  misc_feature (1)..(221): Homolog of NCBI NO: 21593009 NR Description: unknown [Arabidopsis thaliana]
MDSLATDPAFIDSDVYLRLGLIIEGKRLKKPPTVLSRLSSSLERSLLLNHDDKILLGSPDSVTVFDGRSPPEISIAHYLDRIFKYSCCSPSCFVIAHIYIDHFLHKTRALLKPLNVHRLIITTVMLAAKVFDDRYFNNAYYARVGGVTTRELNRLEMELLFTLDFKLQVDPQTFHTHCCQLEKQNSDGFQIEWPIKEACRANKETWQKRTPDSLCSQTTAR

SEQ ID NO: 22989 - DNA, 1133 bp, Arabidopsis thaliana
  misc_feature (1)..(1133): Ceres Seq. ID no. 12324313
  misc_feature: MA Experiment ID: 108434 Result: Down-regulated in Transcription
  misc_feature: MA Experiment 108434 PARAMETER Experiment Name: At_Root_Tips_cDNA_P Parameter: Tissue Value: Root Tips
  misc_feature: MA Experiment ID: 20000235 Result: Down-regulated in Transcription
  misc_feature: MA Experiment 20000235 PARAMETER Experiment Name: At_Siliques_P Parameter: Age (day) Value: 21
  misc_feature: MA Experiment 20000235 PARAMETER Experiment Name: At_Siliques_P Parameter: Organism Value: A. thaliana
  misc_feature: MA Experiment 20000235 PARAMETER Experiment Name: At_Siliques_P Parameter: Plant Line Value: WS
  misc_feature: MA Experiment 20000235 PARAMETER Experiment Name: At_Siliques_P Parameter: Tissue Value: 5-10mm Siliques vs. Whole Plant
  misc_feature: MA Experiment ID: 20000495 Result: Down-regulated in Transcription
  misc_feature: MA Experiment 20000495 PARAMETER Experiment Name: At_Guard_Cells_P Parameter: Harvest Date Value: 8/2/2002
  misc_feature: MA Experiment 20000495 PARAMETER Experiment Name: At_Guard_Cells_P Parameter: Organism Value: A. thaliana
  misc_feature: MA Experiment 20000495 PARAMETER Experiment Name: At_Guard_Cells_P Parameter: Tissue Value: Guard Cells vs. Leaves
  misc_feature: MA Experiment ID: 20000496 Result: Down-regulated in Transcription
  misc_feature: MA Experiment 20000496 PARAMETER Experiment Name: At_Guard_Cells_P Parameter: Harvest Date Value: 7/19/2002
  misc_feature: MA Experiment 20000496 PARAMETER Experiment Name: At_Guard_Cells_P Parameter: Organism Value: Canola
  misc_feature: MA Experiment 20000496 PARAMETER Experiment Name: At_Guard_Cells_P Parameter: Tissue Value: Guard Cells vs. Leaves
gttttcaattatttaaattttaaattaatccaacttatcgttgacggaaaatttgggagagaatattctcgatggggaaaggaggaggttgtgttccgagcaagaagaagaagccggccaccaccggcgatggtcccggaatcgatgatgataacgacgctactaatgctccgatccaaattgacgatgatcaaaccaccattgacggcgatcgaacaacggcgacgaatactggaggaacaacaacaccagcgattactactacggctgctaagatctcgtcaccgctcaagatcttcgtcgtgttctattcgatgtacggacatgtggagagcttagcgaagaggaaaaaagggagtggatagcgtcgaaggagtggaggcgacgttgtacagagttccggagacgctttcgcaggaggttgttgagcagatgaaggcgccggttaaggatttggagattccggagattacggcggcggaattgacggcggctgatggatttctgtttggatttccgactaggtatggttgtatggctgcgcagatgaaggcgttttttgattcgacgggatcattgtggaaggagcagagtcttgctggtaagcctgctggattctttgtgagcactggcactcaaggaggtggccaagagaccactgcatggacagcaatcacacagcttgtgcaccatgggatgctatttgtaccaataggctacacatttggagctggaatgttcaagatggactcgatacgtggaggctctccttatggagcaggtgtgttcgctggtgatgggtcaagagaagcaacagaaacagaattggctcttgctgaacatcaaggaaactacatggctgcaatagtcaaaagacttgctcaaccttaaaacaaaaacaaaaattgcttcctctatttgtctcttttcattcaattcctcctcctgctaaataatcataaaaaaaaaaatcttcctttcttttctcaattccatcgaaatttctttcttttctttatgagtgttttcagtttcgccattaatggttagtgtgtacatgtttctttatattatttgtctcttatttattccttgttgtaaaataaaaacaaaatttcattacgtgttctttc

SEQ ID NO: 22990 - protein, 152 aa, Arabidopsis thaliana
  peptide (1)..(152): Ceres Seq. ID no. 12324314
  misc_feature (1)..(149): Homolog of NCBI NO: 21068664 NR Description: putative quinone oxidoreductase [Cicer arietinum]
  misc_feature (1)..(149): Homolog of NCBI NO: 38636776 NR Description: putative quinone-oxidoreductase QR2
  misc_feature (1)..(152): Homolog of NCBI NO: 7445353 NR Description: hypothetical protein M4I22.80 - Arabidopsis
  misc_feature (1)..(149): Homolog of NCBI NO: 5031275 NR Description: unknown [Prunus armeniaca]
  misc_feature (1)..(149): Homolog of NCBI NO: 34910128 NR Description: putative 1,4-benzoquinone reductase
  misc_feature (1)..(149): Homolog of NCBI NO: 15239652 NR Description: quinone reductase, putative; protein id:
  misc_feature (1)..(152): Homolog of NCBI NO: 30687535 NR Description: quinone reductase family [Arabidopsis thaliana]
  misc_feature (1)..(152): Homolog of NCBI NO: 15529268 NR Description: C7A10_610/C7A10_610 [Arabidopsis thaliana]
  misc_feature (1)..(152): Homolog of NCBI NO: 21593010 NR Description: minor allergen [Arabidopsis thaliana]
  misc_feature (1)..(152): Homolog of NCBI NO: 15234512 NR Description: quinone reductase family
MKAPVKDLEIPEITAAELTAADGFLFGFPTRYGCMAAQMKAFFDSTGSLWKEQSLAGKPAGFFVSTGTQGGGQETTAWTAITQLVHHGMLFVPIGYTFGAGMFKMDSIRGGSPYGAGVFAGDGSREATETELALAEHQGNYMAAIVKRLAQP

SEQ ID NO: 22991 - protein, 118 aa, Arabidopsis thaliana
  peptide (1)..(118): Ceres Seq. ID no. 12324315
  misc_feature (1)..(115): Homolog of NCBI NO: 21068664 NR Description: putative quinone oxidoreductase [Cicer arietinum]
  misc_feature (1)..(115): Homolog of NCBI NO: 38636776 NR Description: putative quinone-oxidoreductase QR2
  misc_feature (1)..(118): Homolog of NCBI NO: 7445353 NR Description: hypothetical protein M4I22.80 - Arabidopsis
  misc_feature (1)..(115): Homolog of NCBI NO: 5031275 NR Description: unknown [Prunus armeniaca]
  misc_feature (1)..(115): Homolog of NCBI NO: 34910128 NR Description: putative 1,4-benzoquinone reductase
  misc_feature (1)..(115): Homolog of NCBI NO: 15239652 NR Description: quinone reductase, putative; protein id:
  misc_feature (1)..(118): Homolog of NCBI NO: 30687535 NR Description: quinone reductase family [Arabidopsis thaliana]
  misc_feature (1)..(118): Homolog of NCBI NO: 15529268 NR Description: C7A10_610/C7A10_610 [Arabidopsis thaliana]
  misc_feature (1)..(118): Homolog of NCBI NO: 21593010 NR Description: minor allergen [Arabidopsis thaliana]
  misc_feature (1)..(118): Homolog of NCBI NO: 15234512 NR Description: quinone reductase family
MAAQMKAFFDSTGSLWKEQSLAGKPAGFFVSTGTQGGGQETTAWTAITQLVHHGMLFVPIGYTFGAGMFKMDSIRGGSPYGAGVFAGDGSREATETELALAEHQGNYMAAIVKRLAQP

SEQ ID NO: 22992 - protein, 114 aa, Arabidopsis thaliana
  peptide (1)..(114): Ceres Seq. ID no. 12324316
  misc_feature (1)..(111): Homolog of NCBI NO: 21068664 NR Description: putative quinone oxidoreductase [Cicer arietinum]
  misc_feature (1)..(111): Homolog of NCBI NO: 38636776 NR Description: putative quinone-oxidoreductase QR2
  misc_feature (1)..(114): Homolog of NCBI NO: 7445353 NR Description: hypothetical protein M4I22.80 - Arabidopsis
  misc_feature (1)..(111): Homolog of NCBI NO: 5031275 NR Description: unknown [Prunus armeniaca]
  misc_feature (1)..(111): Homolog of NCBI NO: 34910128 NR Description: putative 1,4-benzoquinone reductase
  misc_feature (1)..(111): Homolog of NCBI NO: 15239652 NR Description: quinone reductase, putative; protein id:
  misc_feature (1)..(114): Homolog of NCBI NO: 30687535 NR Description: quinone reductase family [Arabidopsis thaliana]
  misc_feature (1)..(114): Homolog of NCBI NO: 15529268 NR Description: C7A10_610/C7A10_610 [Arabidopsis thaliana]
  misc_feature (1)..(114): Homolog of NCBI NO: 21593010 NR Description: minor allergen [Arabidopsis thaliana]
  misc_feature (1)..(114): Homolog of NCBI NO: 15234512 NR Description: quinone reductase family
MKAFFDSTGSLWKEQSLAGKPAGFFVSTGTQGGGQETTAWTAITQLVHHGMLFVPIGYTFGAGMFKMDSIRGGSPYGAGVFAGDGSREATETELALAEHQGNYMAAIVKRLAQP

SEQ ID NO: 22993 - DNA, 1183 bp, Arabidopsis thaliana
  misc_feature (1)..(1183): Ceres Seq. ID no. 12334613
  misc_feature: MA Experiment ID: 108435 Result: Down-regulated in Transcription
  misc_feature: MA Experiment 108435 PARAMETER Experiment Name: At_stm_Mutants_cDNA_P Parameter: Plant Line Value: wt Landsburg vs stm
  misc_feature: MA Experiment 108435 PARAMETER Experiment Name: At_stm_Mutants_cDNA_P Parameter: Tissue Value: Shoot Apical Meristem Region
  misc_feature: MA Experiment ID: 108461 Result: Up-regulated in Transcription
  misc_feature: MA Experiment 108461 PARAMETER Experiment Name: At_Germinating_Seeds_cDNA_P Parameter: Age (day) Value: 1 vs. 0
  misc_feature: MA Experiment 108461 PARAMETER Experiment Name: At_Germinating_Seeds_cDNA_P Parameter: Tissue Value: Germinating Seeds
  misc_feature: MA Experiment ID: 108462 Result: Up-regulated in Transcription
  misc_feature: MA Experiment 108462 PARAMETER Experiment Name: At_Germinating_Seeds_cDNA_P Parameter: Age (day) Value: 2 vs. 0
  misc_feature: MA Experiment 108462 PARAMETER Experiment Name: At_Germinating_Seeds_cDNA_P Parameter: Tissue Value: Germinating Seeds
  misc_feature: MA Experiment ID: 108463 Result: Up-regulated in Transcription
  misc_feature: MA Experiment 108463 PARAMETER Experiment Name: At_Germinating_Seeds_cDNA_P Parameter: Age (day) Value: 3 vs. 0
  misc_feature: MA Experiment 108463 PARAMETER Experiment Name: At_Germinating_Seeds_cDNA_P Parameter: Tissue Value: Germinating Seeds
  misc_feature: MA Experiment ID: 108464 Result: Up-regulated in Transcription
  misc_feature: MA Experiment 108464 PARAMETER Experiment Name: At_Germinating_Seeds_cDNA_P Parameter: Age (day) Value: 4 vs. 0
  misc_feature: MA Experiment 108464 PARAMETER Experiment Name: At_Germinating_Seeds_cDNA_P Parameter: Tissue Value: Germinating Seeds
  misc_feature: MA Experiment ID: 108585 Result: Down-regulated in Transcription
  misc_feature: MA Experiment 108585 PARAMETER Experiment Name: At_5mM_NaNP_cDNA_P Parameter: Timepoint (hr) Value: 6
  misc_feature: MA Experiment 108585 PARAMETER Experiment Name: At_5mM_NaNP_cDNA_P Parameter: Tissue Value: Aerial
  misc_feature: MA Experiment 108585 PARAMETER Experiment Name: At_5mM_NaNP_cDNA_P Parameter: Treatment Value: null
  misc_feature: MA Experiment ID: 108595 Result: Down-regulated in Transcription
  misc_feature: MA Experiment 108595 PARAMETER Experiment Name: At_Ler-pi_Ovule_cDNA_P Parameter: Plant Line Value: null
  misc_feature: MA Experiment ID: 108668 Result: Down-regulated in Transcription
  misc_feature: MA Experiment 108668 PARAMETER Experiment Name: At_2mM_SA_cDNA_P Parameter: Plant Line Value: WS
  misc_feature: MA Experiment 108668 PARAMETER Experiment Name: At_2mM_SA_cDNA_P Parameter: Timepoint (hr) Value: 6
  misc_feature: MA Experiment 108668 PARAMETER Experiment Name: At_2mM_SA_cDNA_P Parameter: Treatment Value: 2mM SA vs. No Treatment
  misc_feature: MA Experiment ID: 20000069 Result: Up-regulated in Transcription
  misc_feature: MA Experiment 20000069 PARAMETER Experiment Name: At_100uM_ABA_Mutants_cDNA_P Parameter: Plant Line Value: CS23
  misc_feature: MA Experiment 20000069 PARAMETER Experiment Name: At_100uM_ABA_Mutants_cDNA_P Parameter: Timepoint (hr) Value: 6
  misc_feature: MA Experiment 20000069 PARAMETER Experiment Name: At_100uM_ABA_Mutants_cDNA_P Parameter: Tissue Value: Aerial
  misc_feature: MA Experiment 20000069 PARAMETER Experiment Name: At_100uM_ABA_Mutants_cDNA_P Parameter: Treatment Value: 100uM ABA vs. No Treatment
  misc_feature: MA Experiment ID: 20000071 Result: Up-regulated in Transcription
  misc_feature: MA Experiment 20000071 PARAMETER Experiment Name: At_100uM_ABA_Mutants_cDNA_P Parameter: Plant Line Value: CS8104
  misc_feature: MA Experiment 20000071 PARAMETER Experiment Name: At_100uM_ABA_Mutants_cDNA_P Parameter: Timepoint (hr) Value: 6
  misc_feature: MA Experiment 20000071 PARAMETER Experiment Name: At_100uM_ABA_Mutants_cDNA_P Parameter: Tissue Value: Aerial
  misc_feature: MA Experiment 20000071 PARAMETER Experiment Name: At_100uM_ABA_Mutants_cDNA_P Parameter: Treatment Value: 100uM ABA vs. No Treatment
  misc_feature: MA Experiment ID: 20000088 Result: Up-regulated in Transcription
  misc_feature: MA Experiment 20000088 PARAMETER Experiment Name: At_100uM_ABA_Mutants_cDNA_P Parameter: Plant Line Value: Landsberg
  misc_feature: MA Experiment 20000088 PARAMETER Experiment Name: At_100uM_ABA_Mutants_cDNA_P Parameter: Timepoint (hr) Value: 6
  misc_feature: MA Experiment 20000088 PARAMETER Experiment Name: At_100uM_ABA_Mutants_cDNA_P Parameter: Tissue Value: Aerial
  misc_feature: MA Experiment 20000088 PARAMETER Experiment Name: At_100uM_ABA_Mutants_cDNA_P Parameter: Treatment Value: 100uM ABA vs. No Treatment
  misc_feature: MA Experiment ID: 20000111 Result: Down-regulated in Transcription
  misc_feature: MA Experiment 20000111 PARAMETER Experiment Name: At_42deg_Heat_cDNA_P Parameter: Temperature (deg C) Value: 42 vs. 22
  misc_feature: MA Experiment 20000111 PARAMETER Experiment Name: At_42deg_Heat_cDNA_P Parameter: Timepoint (hr) Value: 6
  misc_feature: MA Experiment 20000111 PARAMETER Experiment Name: At_42deg_Heat_cDNA_P Parameter: Tissue Value: Aerial
  misc_feature: MA Experiment ID: 20000113 Result: Down-regulated in Transcription
  misc_feature: MA Experiment 20000113 PARAMETER Experiment Name: At_42deg_Heat_cDNA_P Parameter: Temperature (deg C) Value: 42 vs. 22
  misc_feature: MA Experiment 20000113 PARAMETER Experiment Name: At_42deg_Heat_cDNA_P Parameter: Timepoint (hr) Value: 8
  misc_feature: MA Experiment 20000113 PARAMETER Experiment Name: At_42deg_Heat_cDNA_P Parameter: Tissue Value: Aerial
  misc_feature: MA Experiment ID: 20000117 Result: Up-regulated in Transcription
  misc_feature: MA Experiment 20000117 PARAMETER Experiment Name: At_100uM_ABA_Mutants_cDNA_P Parameter: Plant Line Value: Columbia
  misc_feature: MA Experiment 20000117 PARAMETER Experiment Name: At_100uM_ABA_Mutants_cDNA_P Parameter: Timepoint (hr) Value: 6
  misc_feature: MA Experiment 20000117 PARAMETER Experiment Name: At_100uM_ABA_Mutants_cDNA_P Parameter: Tissue Value: Aerial
  misc_feature: MA Experiment 20000117 PARAMETER Experiment Name: At_100uM_ABA_Mutants_cDNA_P Parameter: Treatment Value: 100uM ABA vs. No Treatment
  misc_feature: MA Experiment ID: 20000173 Result: Down-regulated in Transcription
  misc_feature: MA Experiment 20000173 PARAMETER Experiment Name: At_42deg_Heat_P Parameter: Age (day) Value: 14
  misc_feature: MA Experiment 20000173 PARAMETER Experiment Name: At_42deg_Heat_P Parameter: Organism Value: A. thaliana
  misc_feature: MA Experiment 20000173 PARAMETER Experiment Name: At_42deg_Heat_P Parameter: Plant Line Value: WS
  misc_feature: MA Experiment 20000173 PARAMETER Experiment Name: At_42deg_Heat_P Parameter: Temperature (deg C) Value: 42 vs. 22
  misc_feature: MA Experiment 20000173 PARAMETER Experiment Name: At_42deg_Heat_P Parameter: Timepoint (hr) Value: 6
  misc_feature: MA Experiment 20000173 PARAMETER Experiment Name: At_42deg_Heat_P Parameter: Tissue Value: Aerial
  misc_feature: MA Experiment ID: 20000180 Result: Up-regulated in Transcription
  misc_feature: MA Experiment 20000180 PARAMETER Experiment Name: At_Germinating_Seeds_P Parameter: Age (hr) Value: 24 vs. 0
  misc_feature: MA Experiment 20000180 PARAMETER Experiment Name: At_Germinating_Seeds_P Parameter: Tissue Value: Germinating Seeds
  misc_feature: MA Experiment ID: 20000182 Result: Down-regulated in Transcription
  misc_feature: MA Experiment 20000182 PARAMETER Experiment Name: At_2mM_SA_P Parameter: Age (day) Value: 14
  misc_feature: MA Experiment 20000182 PARAMETER Experiment Name: At_2mM_SA_P Parameter: Organism Value: A. thaliana
  misc_feature: MA Experiment 20000182 PARAMETER Experiment Name: At_2mM_SA_P Parameter: Plant Line Value: WS
  misc_feature: MA Experiment 20000182 PARAMETER Experiment Name: At_2mM_SA_P Parameter: Timepoint (hr) Value: 6
  misc_feature: MA Experiment 20000182 PARAMETER Experiment Name: At_2mM_SA_P Parameter: Tissue Value: Aerial
  misc_feature: MA Experiment 20000182 PARAMETER Experiment Name: At_2mM_SA_P Parameter: Treatment Value: 2mM SA vs. No Treatment
  misc_feature: MA Experiment ID: 20000184 Result: Down-regulated in Transcription
  misc_feature: MA Experiment 20000184 PARAMETER Experiment Name: At_Shoots__P Parameter: Age (day) Value: 7
  misc_feature: MA Experiment 20000184 PARAMETER Experiment Name: At_Shoots__P Parameter: Tissue Value: Shoots vs. Whole Plant
  misc_feature: MA Experiment ID: 20000185 Result: Down-regulated in Transcription
  misc_feature: MA Experiment 20000185 PARAMETER Experiment Name: At_Roots__P Parameter: Age (day) Value: 7 vs. 21
  misc_feature: MA Experiment 20000185 PARAMETER Experiment Name: At_Roots__P Parameter: Organism Value: A. thaliana
  misc_feature: MA Experiment 20000185 PARAMETER Experiment Name: At_Roots__P Parameter: Tissue Value: Roots vs. Whole Plant
  misc_feature: MA Experiment ID: 20000224 Result: Up-regulated in Transcription
  misc_feature: MA Experiment ID: 20000439 Result: Down-regulated in Transcription
  misc_feature: MA Experiment 20000439 PARAMETER Experiment Name: At_Roots__P Parameter: Age (day) Value: 14 vs. 21
  misc_feature: MA Experiment 20000439 PARAMETER Experiment Name: At_Roots__P Parameter: Organism Value: A. thaliana
  misc_feature: MA Experiment 20000439 PARAMETER Experiment Name: At_Roots__P Parameter: Tissue Value: Roots vs. Whole Plant
  misc_feature: MA Experiment ID: 20000495 Result: Down-regulated in Transcription
  misc_feature: MA Experiment 20000495 PARAMETER Experiment Name: At_Guard_Cells_P Parameter: Harvest Date Value: 8/2/2002
  misc_feature: MA Experiment 20000495 PARAMETER Experiment Name: At_Guard_Cells_P Parameter: Organism Value: A. thaliana
  misc_feature: MA Experiment 20000495 PARAMETER Experiment Name: At_Guard_Cells_P Parameter: Tissue Value: Guard Cells vs. Leaves
  misc_feature: MA Experiment ID: 20001450 Result: Down-regulated in Transcription
  misc_feature: MA Experiment 20001450 PARAMETER Experiment Name: At_Far-red-induction_P Parameter: Age (day) Value: 7
  misc_feature: MA Experiment 20001450 PARAMETER Experiment Name: At_Far-red-induction_P Parameter: Light Value: Far-red vs. White
  misc_feature: MA Experiment 20001450 PARAMETER Experiment Name: At_Far-red-induction_P Parameter: Organism Value: A. thaliana
  misc_feature: MA Experiment 20001450 PARAMETER Experiment Name: At_Far-red-induction_P Parameter: Plant Line Value: Columbia
  misc_feature: MA Experiment 20001450 PARAMETER Experiment Name: At_Far-red-induction_P Parameter: Timepoint (hr) Value: 8
  misc_feature: MA Experiment 20001450 PARAMETER Experiment Name: At_Far-red-induction_P Parameter: Tissue Value: Whole Plant
  misc_feature: MA Experiment ID: 20001451 Result: Down-regulated in Transcription
  misc_feature: MA Experiment 20001451 PARAMETER Experiment Name: At_Far-red-induction_P Parameter: Age (day) Value: 7
  misc_feature: MA Experiment 20001451 PARAMETER Experiment Name: At_Far-red-induction_P Parameter: Light Value: Far-red vs. White
  misc_feature: MA Experiment 20001451 PARAMETER Experiment Name: At_Far-red-induction_P Parameter: Organism Value: A. thaliana
  misc_feature: MA Experiment 20001451 PARAMETER Experiment Name: At_Far-red-induction_P Parameter: Plant Line Value: Columbia
  misc_feature: MA Experiment 20001451 PARAMETER Experiment Name: At_Far-red-induction_P Parameter: Timepoint (hr) Value: 24
  misc_feature: MA Experiment 20001451 PARAMETER Experiment Name: At_Far-red-induction_P Parameter: Tissue Value: Whole Plant
  misc_feature: MA Experiment ID: 20001557 Result: Down-regulated in Transcription
  misc_feature: MA Experiment 20001557 PARAMETER Experiment Name: At_Drought_Soil_Dry_P Parameter: Age (day) Value: 27
  misc_feature: MA Experiment 20001557 PARAMETER Experiment Name: At_Drought_Soil_Dry_P Parameter: Organism Value: A. thaliana
  misc_feature: MA Experiment 20001557 PARAMETER Experiment Name: At_Drought_Soil_Dry_P Parameter: Plant Line Value: WS
  misc_feature: MA Experiment 20001557 PARAMETER Experiment Name: At_Drought_Soil_Dry_P Parameter: Post Timepoint (hr) Value: 3
  misc_feature: MA Experiment 20001557 PARAMETER Experiment Name: At_Drought_Soil_Dry_P Parameter: Post-Treatment Value: Re-Water vs. No Drought
  misc_feature: MA Experiment 20001557 PARAMETER Experiment Name: At_Drought_Soil_Dry_P Parameter: Timepoint (day) Value: 13
  misc_feature: MA Experiment 20001557 PARAMETER Experiment Name: At_Drought_Soil_Dry_P Parameter: Treatment Value: Drought vs. No Drought
  misc_feature: MA Experiment ID: 20001558 Result: Down-regulated in Transcription
  misc_feature: MA Experiment 20001558 PARAMETER Experiment Name: At_Drought_Soil_Dry_P Parameter: Age (day) Value: 27
  misc_feature: MA Experiment 20001558 PARAMETER Experiment Name: At_Drought_Soil_Dry_P Parameter: Organism Value: A. thaliana
  misc_feature: MA Experiment 20001558 PARAMETER Experiment Name: At_Drought_Soil_Dry_P Parameter: Plant Line Value: WS
  misc_feature: MA Experiment 20001558 PARAMETER Experiment Name: At_Drought_Soil_Dry_P Parameter: Post Timepoint (hr) Value: 6
  misc_feature: MA Experiment 20001558 PARAMETER Experiment Name: At_Drought_Soil_Dry_P Parameter: Post-Treatment Value: Re-Water vs. No Drought
  misc_feature: MA Experiment 20001558 PARAMETER Experiment Name: At_Drought_Soil_Dry_P Parameter: Timepoint (day) Value: 13
  misc_feature: MA Experiment 20001558 PARAMETER Experiment Name: At_Drought_Soil_Dry_P Parameter: Treatment Value: Drought vs. No Drought
  misc_feature: MA Experiment ID: 20001560 Result: Down-regulated in Transcription
  misc_feature: MA Experiment 20001560 PARAMETER Experiment Name: At_Drought_Soil_Dry_P Parameter: Age (day) Value: 28
  misc_feature: MA Experiment 20001560 PARAMETER Experiment Name: At_Drought_Soil_Dry_P Parameter: Organism Value: A. thaliana
  misc_feature: MA Experiment 20001560 PARAMETER Experiment Name: At_Drought_Soil_Dry_P Parameter: Plant Line Value: WS
  misc_feature: MA Experiment 20001560 PARAMETER Experiment Name: At_Drought_Soil_Dry_P Parameter: Post Timepoint (hr) Value: None
  misc_feature: MA Experiment 20001560 PARAMETER Experiment Name: At_Drought_Soil_Dry_P Parameter: Post-Treatment Value: None
  misc_feature: MA Experiment 20001560 PARAMETER Experiment Name: At_Drought_Soil_Dry_P Parameter: Timepoint (day) Value: 14
  misc_feature: MA Experiment 20001560 PARAMETER Experiment Name: At_Drought_Soil_Dry_P Parameter: Treatment Value: Drought vs. No Drought
  misc_feature: MA Experiment ID: 20001905 Result: Down-regulated in Transcription
  misc_feature: MA Experiment 20001905 PARAMETER Experiment Name: At_Drought_Reproduction_P Parameter: Age (day) Value: 40
  misc_feature: MA Experiment 20001905 PARAMETER Experiment Name: At_Drought_Reproduction_P Parameter: Organism Value: A. thaliana
  misc_feature: MA Experiment 20001905 PARAMETER Experiment Name: At_Drought_Reproduction_P Parameter: Plant Line Value: WS
  misc_feature: MA Experiment 20001905 PARAMETER Experiment Name: At_Drought_Reproduction_P Parameter: Timepoint (day) Value: 10
  misc_feature: MA Experiment 20001905 PARAMETER Experiment Name: At_Drought_Reproduction_P Parameter: Tissue Value: Rosettes
  misc_feature: MA Experiment 20001905 PARAMETER Experiment Name: At_Drought_Reproduction_P Parameter: Treatment Value: Drought vs. No Drought
atcattcatcatcatcagacatcaggtgcgtcataagctccacaaaaaactcatccatggcgattcttagttacatctcagcaacatcaaccacaccaccaattcctcaagatcaatctcccaattctcgtctaccaaccaaaatcattctacccaataagaaacctgagaaatggtccaccggagttgctcccggagagtacggtggtcctccgactaccaccaagctccgaaagtactggggaggtgaaaaagaagatcccattacttccacagacttaatctggaacagagattttatggatcaaatgaagaaattgtttgatgatcctaatgattcttctctcgacccatctccttcaaaggaaaagtcttctgggtttctgagctttagcagagttatgagtcttgacagtatggatgttgatttaagtaaagagcttgcatcgtcttctaaatccgttgtgaaaaatcgtcttgacacctccaagtcagaagctaaaaagcaaatgagtaaggctattgtgtctcctaaatggaagctggcacctacacgtcgtgagcaagagaaatgggatagagcaacgaaggctgcaactggtggcagtgatgtgatgtttagggagctgagacggccacgtggtgacccagaagtacaagctgctaaagacagggaacaatattttaagctgaaaaataagattcaggttctcacactcggtattggtggtgttggtttagtctcagcttatatctcatacaccccagagatagcacttagttttggtgctggcttgttgggttcacttgcatatatgaggatgcttggtaactctgtagatgccatggcagatggagccagaggagttgccaaaggtgcagctaaccagccacggttactagtccccgttgtgttggttatgatattcaatagatggaacgcaatacttgttcctgagtatggattcatgcatttggagttgataccaatgttggttgggttctttacttacaaaattgctacgttctttcaagctatagaagaagccatctccattactactcaaaaacccgaatcaatctctccagacacacaggccagtgattaataaggtcaaggtcagtgttgtaagaaatgtaattaaacacagaagtgttaatgtaataaaaactaataactcac

SEQ ID NO: 22994 - protein, 368 aa, Arabidopsis thaliana
  peptide (1)..(368): Ceres Seq. ID no. 12334614
  misc_feature (226)..(350): Homolog of NCBI NO: 114706 NR Description: ATP synthase protein I
  misc_feature (225)..(349): Homolog of NCBI NO: 79743 NR Description: hypothetical 14K protein (atpI 5' region) -
  misc_feature (215)..(349): Homolog of NCBI NO: 33863740 NR Description: possible H+-transporting ATP synthase
  misc_feature (225)..(349): Homolog of NCBI NO: 17227507 NR Description: ATP synthase subunit 1 [Nostoc sp. PCC 7120]
  misc_feature (225)..(350): Homolog of NCBI NO: 23043223 NR Description: hypothetical protein [Trichodesmium erythraeum
  misc_feature (37)..(106): Homolog of NCBI NO: 34911056 NR Description: P0007F06.23 [Oryza sativa (japonica
  misc_feature (174)..(350): Homolog of NCBI NO: 34911056 NR Description: P0007F06.23 [Oryza sativa (japonica
  misc_feature (19)..(368): Homolog of NCBI NO: 21593011 NR Description: unknown [Arabidopsis thaliana]
  misc_feature (19)..(368): Homolog of NCBI NO: 18402535 NR Description: expressed protein
HSSSSDIRCVISSTKNSSMAILSYISATSTTPPIPQDQSPNSRLPTKIILPNKKPEKWSTGVAPGEYGGPPTTTKLRKYWGGEKEDPITSTDLIWNRDFMDQMKKLFDDPNDSSLDPSPSKEKSSGFLSFSRVMSLDSMDVDLSKELASSSKSVVKNRLDTSKSEAKKQMSKAIVSPKWKLAPTRREQEKWDRATKAATGGSDVMFRELRRPRGDPEVQAAKDREQYFKLKNKIQVLTLGIGGVGLVSAYISYTPEIALSFGAGLLGSLAYMRMLGNSVDAMADGARGVAKGAANQPRLLVPVVLVMIFNRWNAILVPEYGFMHLELIPMLVGFFTYKIATFFQAIEEAISITTQKPESISPDTQASD

SEQ ID NO: 22995 - protein, 350 aa, Arabidopsis thaliana
  peptide (1)..(350): Ceres Seq. ID no. 12334615
  misc_feature (208)..(332): Homolog of NCBI NO: 114706 NR Description: ATP synthase protein I
  misc_feature (207)..(331): Homolog of NCBI NO: 79743 NR Description: hypothetical 14K protein (atpI 5' region) -
  misc_feature (197)..(331): Homolog of NCBI NO: 33863740 NR Description: possible H+-transporting ATP synthase
  misc_feature (207)..(331): Homolog of NCBI NO: 17227507 NR Description: ATP synthase subunit 1 [Nostoc sp. PCC 7120]
  misc_feature (207)..(332): Homolog of NCBI NO: 23043223 NR Description: hypothetical protein [Trichodesmium erythraeum
  misc_feature (19)..(88): Homolog of NCBI NO: 34911056 NR Description: P0007F06.23 [Oryza sativa (japonica
  misc_feature (156)..(332): Homolog of NCBI NO: 34911056 NR Description: P0007F06.23 [Oryza sativa (japonica
  misc_feature (1)..(350): Homolog of NCBI NO: 21593011 NR Description: unknown [Arabidopsis thaliana]
  misc_feature (1)..(350): Homolog of NCBI NO: 18402535 NR Description: expressed protein
MAILSYISATSTTPPIPQDQSPNSRLPTKIILPNKKPEKWSTGVAPGEYGGPPTTTKLRKYWGGEKEDPITSTDLIWNRDFMDQMKKLFDDPNDSSLDPSPSKEKSSGFLSFSRVMSLDSMDVDLSKELASSSKSVVKNRLDTSKSEAKKQMSKAIVSPKWKLAPTRREQEKWDRATKAATGGSDVMFRELRRPRGDPEVQAAKDREQYFKLKNKIQVLTLGIGGVGLVSAYISYTPEIALSFGAGLLGSLAYMRMLGNSVDAMADGARGVAKGAANQPRLLVPVVLVMIFNRWNAILVPEYGFMHLELIPMLVGFFTYKIATFFQAIEEAISITTQKPESISPDTQASD

SEQ ID NO: 22996 - protein, 269 aa, Arabidopsis thaliana
  peptide (1)..(269): Ceres Seq. ID no. 12334616
  misc_feature (127)..(251): Homolog of NCBI NO: 114706 NR Description: ATP synthase protein I
  misc_feature (126)..(250): Homolog of NCBI NO: 79743 NR Description: hypothetical 14K protein (atpI 5' region) -
  misc_feature (116)..(250): Homolog of NCBI NO: 33863740 NR Description: possible H+-transporting ATP synthase
  misc_feature (126)..(250): Homolog of NCBI NO: 17227507 NR Description: ATP synthase subunit 1 [Nostoc sp. PCC 7120]
  misc_feature (126)..(251): Homolog of NCBI NO: 23043223 NR Description: hypothetical protein [Trichodesmium erythraeum
  misc_feature (75)..(251): Homolog of NCBI NO: 34911056 NR Description: P0007F06.23 [Oryza sativa (japonica
  misc_feature (1)..(269): Homolog of NCBI NO: 21593011 NR Description: unknown [Arabidopsis thaliana]
  misc_feature (1)..(269): Homolog of NCBI NO: 18402535 NR Description: expressed protein
MDQMKKLFDDPNDSSLDPSPSKEKSSGFLSFSRVMSLDSMDVDLSKELASSSKSVVKNRLDTSKSEAKKQMSKAIVSPKWKLAPTRREQEKWDRATKAATGGSDVMFRELRRPRGDPEVQAAKDREQYFKLKNKIQVLTLGIGGVGLVSAYISYTPEIALSFGAGLLGSLAYMRMLGNSVDAMADGARGVAKGAANQPRLLVPVVLVMIFNRWNAILVPEYGFMHLELIPMLVGFFTYKIATFFQAIEEAISITTQKPESISPDTQASD

SEQ ID NO: 22997 - DNA, 1358 bp, Arabidopsis thaliana
  misc_feature (1)..(1358): Ceres Seq. ID no. 13499728
  misc_feature: MA Experiment ID: 108573 Result: Up-regulated in Transcription
  misc_feature: MA Experiment 108573 PARAMETER Experiment Name: At_Drought_cDNA_P Parameter: Timepoint (hr) Value: 6
  misc_feature: MA Experiment 108573 PARAMETER Experiment Name: At_Drought_cDNA_P Parameter: Tissue Value: Aerial
  misc_feature: MA Experiment 108573 PARAMETER Experiment Name: At_Drought_cDNA_P Parameter: Treatment Value: Drought vs. No Drought
  misc_feature: MA Experiment ID: 108576 Result: Up-regulated in Transcription
  misc_feature: MA Experiment 108576 PARAMETER Experiment Name: At_42deg_Heat_cDNA_P Parameter: Temperature (deg C) Value: 42 vs. 22
  misc_feature: MA Experiment 108576 PARAMETER Experiment Name: At_42deg_Heat_cDNA_P Parameter: Timepoint (hr) Value: 1
  misc_feature: MA Experiment 108576 PARAMETER Experiment Name: At_42deg_Heat_cDNA_P Parameter: Tissue Value: Aerial
  misc_feature: MA Experiment ID: 108577 Result: Up-regulated in Transcription
  misc_feature: MA Experiment 108577 PARAMETER Experiment Name: At_42deg_Heat_cDNA_P Parameter: Temperature (deg C) Value: 42 vs. 22
  misc_feature: MA Experiment 108577 PARAMETER Experiment Name: At_42deg_Heat_cDNA_P Parameter: Timepoint (hr) Value: 6
  misc_feature: MA Experiment 108577 PARAMETER Experiment Name: At_42deg_Heat_cDNA_P Parameter: Tissue Value: Aerial
  misc_feature: MA Experiment ID: 108579 Result: Down-regulated in Transcription
  misc_feature: MA Experiment 108579 PARAMETER Experiment Name: At_4deg_Cold_cDNA_P Parameter: Temperature (deg C) Value: 4 vs. 22
  misc_feature: MA Experiment 108579 PARAMETER Experiment Name: At_4deg_Cold_cDNA_P Parameter: Timepoint (hr) Value: 6
  misc_feature: MA Experiment 108579 PARAMETER Experiment Name: At_4deg_Cold_cDNA_P Parameter: Tissue Value: Aerial
  misc_feature: MA Experiment ID: 20000093 Result: Up-regulated in Transcription
  misc_feature: MA Experiment 20000093 PARAMETER Experiment Name: At_42deg_Heat_cDNA_P Parameter: Temperature (deg C) Value: 42 vs. 22
  misc_feature: MA Experiment 20000093 PARAMETER Experiment Name: At_42deg_Heat_cDNA_P Parameter: Timepoint (hr) Value: 0.5
  misc_feature: MA Experiment 20000093 PARAMETER Experiment Name: At_42deg_Heat_cDNA_P Parameter: Tissue Value: Aerial
  misc_feature: MA Experiment ID: 20000112 Result: Up-regulated in Transcription
  misc_feature: MA Experiment 20000112 PARAMETER Experiment Name: At_42deg_Heat_cDNA_P Parameter: Temperature (deg C) Value: 42 vs. 22
  misc_feature: MA Experiment 20000112 PARAMETER Experiment Name: At_42deg_Heat_cDNA_P Parameter: Timepoint (hr) Value: 2
  misc_feature: MA Experiment 20000112 PARAMETER Experiment Name: At_42deg_Heat_cDNA_P Parameter: Tissue Value: Aerial
  misc_feature: MA Experiment ID: 20000171 Result: Up-regulated in Transcription
  misc_feature: MA Experiment 20000171 PARAMETER Experiment Name: At_42deg_Heat_P Parameter: Age (day) Value: 14
  misc_feature: MA Experiment 20000171 PARAMETER Experiment Name: At_42deg_Heat_P Parameter: Organism Value: A. thaliana
  misc_feature: MA Experiment 20000171 PARAMETER Experiment Name: At_42deg_Heat_P Parameter: Plant Line Value: WS
  misc_feature: MA Experiment 20000171 PARAMETER Experiment Name: At_42deg_Heat_P Parameter: Temperature (deg C) Value: 42 vs. 22
  misc_feature: MA Experiment 20000171 PARAMETER Experiment Name: At_42deg_Heat_P Parameter: Timepoint (hr) Value: 1
  misc_feature: MA Experiment 20000171 PARAMETER Experiment Name: At_42deg_Heat_P Parameter: Tissue Value: Aerial
  misc_feature: MA Experiment ID: 20000173 Result: Up-regulated in Transcription
  misc_feature: MA Experiment 20000173 PARAMETER Experiment Name: At_42deg_Heat_P Parameter: Age (day) Value: 14
  misc_feature: MA Experiment 20000173 PARAMETER Experiment Name: At_42deg_Heat_P Parameter: Organism Value: A. thaliana
  misc_feature: MA Experiment 20000173 PARAMETER Experiment Name: At_42deg_Heat_P Parameter: Plant Line Value: WS
  misc_feature: MA Experiment 20000173 PARAMETER Experiment Name: At_42deg_Heat_P Parameter: Temperature (deg C) Value: 42 vs. 22
  misc_feature: MA Experiment 20000173 PARAMETER Experiment Name: At_42deg_Heat_P Parameter: Timepoint (hr) Value: 6
  misc_feature: MA Experiment 20000173 PARAMETER Experiment Name: At_42deg_Heat_P Parameter: Tissue Value: Aerial
  misc_feature: MA Experiment ID: 20000234 Result: Down-regulated in Transcription
  misc_feature: MA Experiment 20000234 PARAMETER Experiment Name: At_Siliques_P Parameter: Age (day) Value: 21
  misc_feature: MA Experiment 20000234 PARAMETER Experiment Name: At_Siliques_P Parameter: Organism Value: A. thaliana
  misc_feature: MA Experiment 20000234 PARAMETER Experiment Name: At_Siliques_P Parameter: Plant Line Value: WS
  misc_feature: MA Experiment 20000234 PARAMETER Experiment Name: At_Siliques_P Parameter: Tissue Value: Less Than 5mm Siliques vs. Whole Plant
  misc_feature: MA Experiment ID: 20000235 Result: Down-regulated in Transcription
  misc_feature: MA Experiment 20000235 PARAMETER Experiment Name: At_Siliques_P Parameter: Age (day) Value: 21
  misc_feature: MA Experiment 20000235 PARAMETER Experiment Name: At_Siliques_P Parameter: Organism Value: A. thaliana
  misc_feature: MA Experiment 20000235 PARAMETER Experiment Name: At_Siliques_P Parameter: Plant Line Value: WS
  misc_feature: MA Experiment 20000235 PARAMETER Experiment Name: At_Siliques_P Parameter: Tissue Value: 5-10mm Siliques vs. Whole Plant
  misc_feature: MA Experiment ID: 20000264 Result: Down-regulated in Transcription
  misc_feature: MA Experiment 20000264 PARAMETER Experiment Name: At_Open_Flower_P Parameter: Age (day) Value: 21
  misc_feature: MA Experiment 20000264 PARAMETER Experiment Name: At_Open_Flower_P Parameter: Plant Line Value: WS
  misc_feature: MA Experiment 20000264 PARAMETER Experiment Name: At_Open_Flower_P Parameter: Tissue Value: Open Flower vs. Whole Plant
  misc_feature: MA Experiment ID: 20000265 Result: Down-regulated in Transcription
  misc_feature: MA Experiment 20000265 PARAMETER Experiment Name: At_Open_Flower_P Parameter: Age (day) Value: 21
  misc_feature: MA Experiment 20000265 PARAMETER Experiment Name: At_Open_Flower_P Parameter: Plant Line Value: WS
  misc_feature: MA Experiment 20000265 PARAMETER Experiment Name: At_Open_Flower_P Parameter: Tissue Value: Closed Flower vs. Whole Plant
  misc_feature: MA Experiment ID: 20000286 Result: Down-regulated in Transcription
  misc_feature: MA Experiment 20000286 PARAMETER Experiment Name: At_Open_Flower_P Parameter: Age (day) Value: 21
  misc_feature: MA Experiment 20000286 PARAMETER Experiment Name: At_Open_Flower_P Parameter: Plant Line Value: WS
  misc_feature: MA Experiment 20000286 PARAMETER Experiment Name: At_Open_Flower_P Parameter: Tissue Value: Half Open vs. Whole Plant
  misc_feature: MA Experiment ID: 20001450 Result: Up-regulated in Transcription
  misc_feature: MA Experiment 20001450 PARAMETER Experiment Name: At_Far-red-induction_P Parameter: Age (day) Value: 7
  misc_feature: MA Experiment 20001450 PARAMETER Experiment Name: At_Far-red-induction_P Parameter: Light Value: Far-red vs. White
  misc_feature: MA Experiment 20001450 PARAMETER Experiment Name: At_Far-red-induction_P Parameter: Organism Value: A. thaliana
  misc_feature: MA Experiment 20001450 PARAMETER Experiment Name: At_Far-red-induction_P Parameter: Plant Line Value: Columbia
  misc_feature: MA Experiment 20001450 PARAMETER Experiment Name: At_Far-red-induction_P Parameter: Timepoint (hr) Value: 8
  misc_feature: MA Experiment 20001450 PARAMETER Experiment Name: At_Far-red-induction_P Parameter: Tissue Value: Whole Plant
  misc_feature: MA Experiment ID: 20001557 Result: Down-regulated in Transcription
  misc_feature: MA Experiment 20001557 PARAMETER Experiment Name: At_Drought_Soil_Dry_P Parameter: Age (day) Value: 27
  misc_feature: MA Experiment 20001557 PARAMETER Experiment Name: At_Drought_Soil_Dry_P Parameter: Organism Value: A. thaliana
  misc_feature: MA Experiment 20001557 PARAMETER Experiment Name: At_Drought_Soil_Dry_P Parameter: Plant Line Value: WS
  misc_feature: MA Experiment 20001557 PARAMETER Experiment Name: At_Drought_Soil_Dry_P Parameter: Post Timepoint (hr) Value: 3
  misc_feature: MA Experiment 20001557 PARAMETER Experiment Name: At_Drought_Soil_Dry_P Parameter: Post-Treatment Value: Re-Water vs. No Drought
  misc_feature: MA Experiment 20001557 PARAMETER Experiment Name: At_Drought_Soil_Dry_P Parameter: Timepoint (day) Value: 13
  misc_feature: MA Experiment 20001557 PARAMETER Experiment Name: At_Drought_Soil_Dry_P Parameter: Treatment Value: Drought vs. No Drought
  misc_feature: MA Experiment ID: 20001558 Result: Down-regulated in Transcription
  misc_feature: MA Experiment 20001558 PARAMETER Experiment Name: At_Drought_Soil_Dry_P Parameter: Age (day) Value: 27
  misc_feature: MA Experiment 20001558 PARAMETER Experiment Name: At_Drought_Soil_Dry_P Parameter: Organism Value: A. thaliana
  misc_feature: MA Experiment 20001558 PARAMETER Experiment Name: At_Drought_Soil_Dry_P Parameter: Plant Line Value: WS
  misc_feature: MA Experiment 20001558 PARAMETER Experiment Name: At_Drought_Soil_Dry_P Parameter: Post Timepoint (hr) Value: 6
  misc_feature: MA Experiment 20001558 PARAMETER Experiment Name: At_Drought_Soil_Dry_P Parameter: Post-Treatment Value: Re-Water vs. No Drought
  misc_feature: MA Experiment 20001558 PARAMETER Experiment Name: At_Drought_Soil_Dry_P Parameter: Timepoint (day) Value: 13
  misc_feature: MA Experiment 20001558 PARAMETER Experiment Name: At_Drought_Soil_Dry_P Parameter: Treatment Value: Drought vs. No Drought
  misc_feature: MA Experiment ID: 20001560 Result: Down-regulated in Transcription
  misc_feature: MA Experiment 20001560 PARAMETER Experiment Name: At_Drought_Soil_Dry_P Parameter: Age (day) Value: 28
  misc_feature: MA Experiment 20001560 PARAMETER Experiment Name: At_Drought_Soil_Dry_P Parameter: Organism Value: A. thaliana
  misc_feature: MA Experiment 20001560 PARAMETER Experiment Name: At_Drought_Soil_Dry_P Parameter: Plant Line Value: WS
  misc_feature: MA Experiment 20001560 PARAMETER Experiment Name: At_Drought_Soil_Dry_P Parameter: Post Timepoint (hr) Value: None
  misc_feature: MA Experiment 20001560 PARAMETER Experiment Name: At_Drought_Soil_Dry_P Parameter: Post-Treatment Value: None
  misc_feature: MA Experiment 20001560 PARAMETER Experiment Name: At_Drought_Soil_Dry_P Parameter: Timepoint (day) Value: 14
  misc_feature: MA Experiment 20001560 PARAMETER Experiment Name: At_Drought_Soil_Dry_P Parameter: Treatment Value: Drought vs. No Drought
  misc_feature: MA Experiment ID: 20001911 Result: Up-regulated in Transcription
  misc_feature: MA Experiment 20001911 PARAMETER Experiment Name: At_Drought_Reproduction_P Parameter: Age (day) Value: 40
  misc_feature: MA Experiment 20001911 PARAMETER Experiment Name: At_Drought_Reproduction_P Parameter: Organism Value: A. thaliana
  misc_feature: MA Experiment 20001911 PARAMETER Experiment Name: At_Drought_Reproduction_P Parameter: Plant Line Value: WS
  misc_feature: MA Experiment 20001911 PARAMETER Experiment Name: At_Drought_Reproduction_P Parameter: Timepoint (day) Value: 10
  misc_feature: MA Experiment 20001911 PARAMETER Experiment Name: At_Drought_Reproduction_P Parameter: Tissue Value: Flowers
  misc_feature: MA Experiment 20001911 PARAMETER Experiment Name: At_Drought_Reproduction_P Parameter: Treatment Value: Drought vs. No Drought
cattattacaccaccgttggcctccgacgacggctcaagcctatcttcgtcgccggcttctccgatggttaccaatcgcgtagacgtcttctggcacgaaggaatgctccgacacgacgccgtagaaggcgtcttcgacactggatacgaccctggattcctcgacgtattggagaagcacccggagaacgccgatcgcgtcaggaacatgctttcgattctccgacgcggtcccatcgctcctcatgtcaattggtttaccggtcttccagcaatcgtttcggagcttctaatgtttcacacttcagagtacattgagaagctagtggaggcagataaatcaggagaaaggtgtgaaattgccgcaggtactttcatgagcccaggctcgtgggaagctgctcttcttgcagctggaacaactctttcagcaatgcaacatattcttgattgccatgggaaaattgcatatgctctggtacgcccaccaggtcaccactcacagcctactcaggctgatgggtattgcttcctcaacaacgctgctcttgctgtcaagctggcattgaattcgggttcttgttcccgagttgcggttattgacatcgatgtacattatggaaatggcacagctgaagggttttatacatctgataaggttcttacggtgtcactccatatgaaccatggatcatggggatcgtcccacccgcagaaagggtcgattgatgaacttggtgaagacgtgggattgggttacaatctgaatgtccctttaccgaatggcacgggtgaccggggatatgaatatgccatgaatgagctggtggttcctgcagttagaaggtttggacccgatatggttgttctcgttgttggtcaagactctagcgcttttgatccaaacgggagacaaagcctgacaatgaatggatacagaaggattgggcagataatgaggggagttgcagaggagcacagccatggaaggttgcttatggtgcaagaaggcgggtatcatgtaacatatgcagcttactgcctccacgccatgctcgaaggggtgctgaagattccagaaccgcatctatctgatccgatcgcttattatcccgaagaagaagctaatgctgttgctgctgtggagtcaatcaaaacatatcacaccgaatttgttccatttctcagaggaacttgaaaatgggacgtatgaatgagtttatgttattcctcgttgtcttgtgaccttttggaacacagatccaaatcaatcaggtcaaaccgtatatatcaaaatacttgttgatcaaactatcttttgtatgaaaacttattcacacgatccgactttgtttttc

SEQ ID NO: 22998 - protein, 398 aa, Arabidopsis thaliana
  peptide (1)..(398): Ceres Seq. ID no. 13499729
  misc_feature (30)..(367): Homolog of NCBI NO: 37526255 NR Description: hypothetical protein
  misc_feature (4)..(367): Homolog of NCBI NO: 22959308 NR Description: hypothetical protein [Rhodobacter sphaeroides]
  misc_feature (60)..(377): Homolog of NCBI NO: 15598969 NR Description: probable acetylpolyamine aminohydrolase
  misc_feature (70)..(398): Homolog of NCBI NO: 16226923 NR Description: At1g08460/T27G7_7 [Arabidopsis thaliana]
  misc_feature (299)..(398): Homolog of NCBI NO: 25407044 NR Description: protein T27G7.14 [imported] - Arabidopsis
  misc_feature (22)..(298): Homolog of NCBI NO: 25407044 NR Description: protein T27G7.14 [imported] - Arabidopsis
  misc_feature (22)..(398): Homolog of NCBI NO: 18390898 NR Description: HDA8 protein [Arabidopsis thaliana]
  misc_feature (58)..(398): Homolog of NCBI NO: 26451468 NR Description: putative histone deacetylase [Arabidopsis
  misc_feature (58)..(398): Homolog of NCBI NO: 18401915 NR Description: histone deacetylase -related [Arabidopsis
  misc_feature (60)..(391): Homolog of NCBI NO: 11497747 NR Description: acetylpolyamine aminohydrolase (aphA)
IITPPLASDDGSSLSSSPASPMVTNRVDVFWHEGMLRHDAVEGVFDTGYDPGFLDVLEKHPENADRVRNMLSILRRGPIAPHVNWFTGLPAIVSELLMFHTSEYIEKLVEADKSGERCEIAAGTFMSPGSWEAALLAAGTTLSAMQHILDCHGKIAYALVRPPGHHSQPTQADGYCFLNNAALAVKLALNSGSCSRVAVIDIDVHYGNGTAEGFYTSDKVLTVSLHMNHGSWGSSHPQKGSIDELGEDVGLGYNLNVPLPNGTGDRGYEYAMNELVVPAVRRFGPDMVVLVVGQDSSAFDPNGRQSLTMNGYRRIGQIMRGVAEEHSHGRLLMVQEGGYHVTYAAYCLHAMLEGVLKIPEPHLSDPIAYYPEEEANAVAAVESIKTYHTEFVPFLRGT

SEQ ID NO: 22999 - protein, 377 aa, Arabidopsis thaliana
  peptide (1)..(377): Ceres Seq. ID no. 13499730
  misc_feature (37)..(377): Homolog of NCBI NO: 26451468 NR Description: putative histone deacetylase [Arabidopsis
  misc_feature (37)..(377): Homolog of NCBI NO: 18401915 NR Description: histone deacetylase -related [Arabidopsis
  misc_feature (39)..(370): Homolog of NCBI NO: 11497747 NR Description: acetylpolyamine aminohydrolase (aphA)
  misc_feature (9)..(346): Homolog of NCBI NO: 37526255 NR Description: hypothetical protein
  misc_feature (1)..(346): Homolog of NCBI NO: 22959308 NR Description: hypothetical protein [Rhodobacter sphaeroides]
  misc_feature (39)..(356): Homolog of NCBI NO: 15598969 NR Description: probable acetylpolyamine aminohydrolase
  misc_feature (49)..(377): Homolog of NCBI NO: 16226923 NR Description: At1g08460/T27G7_7 [Arabidopsis thaliana]
  misc_feature (278)..(377): Homolog of NCBI NO: 25407044 NR Description: protein T27G7.14 [imported] - Arabidopsis
  misc_feature (1)..(277): Homolog of NCBI NO: 25407044 NR Description: protein T27G7.14 [imported] - Arabidopsis
  misc_feature (1)..(377): Homolog of NCBI NO: 18390898 NR Description: HDA8 protein [Arabidopsis thaliana]
MVTNRVDVFWHEGMLRHDAVEGVFDTGYDPGFLDVLEKHPENADRVRNMLSILRRGPIAPHVNWFTGLPAIVSELLMFHTSEYIEKLVEADKSGERCEIAAGTFMSPGSWEAALLAAGTTLSAMQHILDCHGKIAYALVRPPGHHSQPTQADGYCFLNNAALAVKLALNSGSCSRVAVIDIDVHYGNGTAEGFYTSDKVLTVSLHMNHGSWGSSHPQKGSIDELGEDVGLGYNLNVPLPNGTGDRGYEYAMNELVVPAVRRFGPDMVVLVVGQDSSAFDPNGRQSLTMNGYRRIGQIMRGVAEEHSHGRLLMVQEGGYHVTYAAYCLHAMLEGVLKIPEPHLSDPIAYYPEEEANAVAAVESIKTYHTEFVPFLRGT

SEQ ID NO: 23000 - protein, 364 aa, Arabidopsis thaliana
  peptide (1)..(364): Ceres Seq. ID no. 13499731
  misc_feature (24)..(364): Homolog of NCBI NO: 26451468 NR Description: putative histone deacetylase [Arabidopsis
  misc_feature (24)..(364): Homolog of NCBI NO: 18401915 NR Description: histone deacetylase -related [Arabidopsis
  misc_feature (26)..(357): Homolog of NCBI NO: 11497747 NR Description: acetylpolyamine aminohydrolase (aphA)
  misc_feature (1)..(333): Homolog of NCBI NO: 37526255 NR Description: hypothetical protein
  misc_feature (1)..(333): Homolog of NCBI NO: 22959308 NR Description: hypothetical protein [Rhodobacter sphaeroides]
  misc_feature (26)..(343): Homolog of NCBI NO: 15598969 NR Description: probable acetylpolyamine aminohydrolase
  misc_feature (36)..(364): Homolog of NCBI NO: 16226923 NR Description: At1g08460/T27G7_7 [Arabidopsis thaliana]
  misc_feature (265)..(364): Homolog of NCBI NO: 25407044 NR Description: protein T27G7.14 [imported] - Arabidopsis
  misc_feature (1)..(264): Homolog of NCBI NO: 25407044 NR Description: protein T27G7.14 [imported] - Arabidopsis
  misc_feature (1)..(364): Homolog of NCBI NO: 18390898 NR Description: HDA8 protein [Arabidopsis thaliana]
MLRHDAVEGVFDTGYDPGFLDVLEKHPENADRVRNMLSILRRGPIAPHVNWFTGLPAIVSELLMFHTSEYIEKLVEADKSGERCEIAAGTFMSPGSWEAALLAAGTTLSAMQHILDCHGKIAYALVRPPGHHSQPTQADGYCFLNNAALAVKLALNSGSCSRVAVIDIDVHYGNGTAEGFYTSDKVLTVSLHMNHGSWGSSHPQKGSIDELGEDVGLGYNLNVPLPNGTGDRGYEYAMNELVVPAVRRFGPDMVVLVVGQDSSAFDPNGRQSLTMNGYRRIGQIMRGVAEEHSHGRLLMVQEGGYHVTYAAYCLHAMLEGVLKIPEPHLSDPIAYYPEEEANAVAAVESIKTYHTEFVPFLRGT

SEQ ID NO: 23001 - DNA, 1237 bp, Arabidopsis thaliana
  misc_feature (1)..(1237): Ceres Seq. ID no. 13487767
  misc_feature: MA Experiment ID: 108434 Result: Up-regulated in Transcription
  misc_feature: MA Experiment 108434 PARAMETER Experiment Name: At_Root_Tips_cDNA_P Parameter: Tissue Value: Root Tips
  misc_feature: MA Experiment ID: 20000264 Result: Up-regulated in Transcription
  misc_feature: MA Experiment 20000264 PARAMETER Experiment Name: At_Open_Flower_P Parameter: Age (day) Value: 21
  misc_feature: MA Experiment 20000264 PARAMETER Experiment Name: At_Open_Flower_P Parameter: Plant Line Value: WS
  misc_feature: MA Experiment 20000264 PARAMETER Experiment Name: At_Open_Flower_P Parameter: Tissue Value: Open Flower vs. Whole Plant
  misc_feature: MA Experiment ID: 20000794 Result: Up-regulated in Transcription
  misc_feature: MA Experiment 20000794 PARAMETER Experiment Name: At_Petals_P Parameter: Age (day) Value: 23-25 days
  misc_feature: MA Experiment 20000794 PARAMETER Experiment Name: At_Petals_P Parameter: Plant Line Value: WS
  misc_feature: MA Experiment 20000794 PARAMETER Experiment Name: At_Petals_P Parameter: Tissue Value: Petals vs. Whole plant
aaagaaataaagtaatgaagaaaactagaaatgttgcttcttctcctattgaatgtgtccacctccagaccaaacccaccaccactcttgttcggtctttcttcttcttcctcttcaactctcaaacaatctcttcctttatcatcttctatctcttcctctgttccttcttctggttttgccaatcaccaaacctgactaacccttctcctcctcctctctccgtcgctccccttcgcggggatgccaattctccaccgccggaatcttcttcttctccggcgacgaaatcttctttaatgatttcttctagagatcccaatgccctctttagcggcggtggaatcagctttttagcaggagttagaactgtgaagtttagttatggttattctagtcttaaaggtaaaagagcaacaatggaggattacttcgaaactagaatctctgatgttaatggacaaatggttgctttctttggtgtctttgatggtcatggtggagcaagaactgcagaatatcttaaaaacaatcttttcaagaatttagttagtcatgatgattttatctcagacactaagaaagctattgttgaagtttttaagcagacagatgaagagtatcttattgaagaggcaggacaaccgaagaatgctggctcgactgctgcgactgcttttcttataggtgataagttgattgttgctaacgttggtgattctagagttgtagcgtcaagaaatggttcagctgttccactctctgatgatcataaacctgatagatcagatgagcgacaacggattgaagatgctggtggctttattatttgggctggaacatggcgagttggtggaattcttgcggtctctcgggcttttggagataagcaacttaagccatatgtgattgcggagccagaaattcaggaggaggatataagcacattggagtttattgttgttgctagtgatggactgtggaatgtgttgtcaaacaaggatgccgtggcaatagtacgagacatttcagatgcggaaacagcagcaagaaagcttgtgcaagaaggttacgcacggggtagctgcgacaatatcacttgcattgttgtacgattcgaggtttcttgagcaagaaccaaattcatattgttcttgttctatgaatgtaccatcttcagctgttgaatacactaacatatttgggttatacaattttataaaagaaagatatattt

SEQ ID NO: 23002 - protein, 375 aa, Arabidopsis thaliana
  peptide (1)..(375): Ceres Seq. ID no. 13487768
  misc_feature (126)..(365): Pfam Name: Protein phosphatase 2C Pfam Description: Protein phosphatase 2C
  misc_feature (298)..(372): Homolog of NCBI NO: 7486331 NR Description: hypothetical protein F28M20.60 - Arabidopsis
  misc_feature (125)..(309): Homolog of NCBI NO: 7486331 NR Description: hypothetical protein F28M20.60 - Arabidopsis
  misc_feature (111)..(372): Homolog of NCBI NO: 18416366 NR Description: protein phosphatase 2C (PP2C) -related
  misc_feature (97)..(372): Homolog of NCBI NO: 30689144 NR Description: protein phosphatase 2C (PP2C), putative
  misc_feature (111)..(372): Homolog of NCBI NO: 20146110 NR Description: protein phosphatase 2C [Mesembryanthemum
  misc_feature (197)..(278): Homolog of NCBI NO: 7523669 NR Description: Unknown protein [Arabidopsis thaliana]
  misc_feature (5)..(196): Homolog of NCBI NO: 7523669 NR Description: Unknown protein [Arabidopsis thaliana]
  misc_feature (197)..(375): Homolog of NCBI NO: 8778653 NR Description: F9C16.6 [Arabidopsis thaliana]
  misc_feature (5)..(196): Homolog of NCBI NO: 8778653 NR Description: F9C16.6 [Arabidopsis thaliana]
  misc_feature (5)..(375): Homolog of NCBI NO: 30693757 NR Description: protein phosphatase 2C (PP2C), putative
RNKVMKKTRNVASSPIECVHLQTKPTTTLVRSFFFFLFNSQTISSFIIFYLFLCSFFWFCQSPNLTNPSPPPLSVAPLRGDANSPPPESSSSPATKSSLMISSRDPNALFSGGGISFLAGVRTVKFSYGYSSLKGKRATMEDYFETRISDVNGQMVAFFGVFDGHGGARTAEYLKNNLFKNLVSHDDFISDTKKAIVEVFKQTDEEYLIEEAGQPKNAGSTAATAFLIGDKLIVANVGDSRVVASRNGSAVPLSDDHKPDRSDERQRIEDAGGFIIWAGTWRVGGILAVSRAFGDKQLKPYVIAEPEIQEEDISTLEFIVVASDGLWNVLSNKDAVAIVRDISDAETAARKLVQEGYARGSCDNITCIVVRFEVS

SEQ ID NO: 23003 - protein, 371 aa, Arabidopsis thaliana
  peptide (1)..(371): Ceres Seq. ID no. 13487769
  misc_feature (122)..(361): Pfam Name: Protein phosphatase 2C Pfam Description: Protein phosphatase 2C
  misc_feature (294)..(368): Homolog of NCBI NO: 7486331 NR Description: hypothetical protein F28M20.60 - Arabidopsis
  misc_feature (121)..(305): Homolog of NCBI NO: 7486331 NR Description: hypothetical protein F28M20.60 - Arabidopsis
  misc_feature (107)..(368): Homolog of NCBI NO: 18416366 NR Description: protein phosphatase 2C (PP2C) -related
  misc_feature (93)..(368): Homolog of NCBI NO: 30689144 NR Description: protein phosphatase 2C (PP2C), putative
  misc_feature (107)..(368): Homolog of NCBI NO: 20146110 NR Description: protein phosphatase 2C [Mesembryanthemum
  misc_feature (193)..(274): Homolog of NCBI NO: 7523669 NR Description: Unknown protein [Arabidopsis thaliana]
  misc_feature (1)..(192): Homolog of NCBI NO: 7523669 NR Description: Unknown protein [Arabidopsis thaliana]
  misc_feature (193)..(371): Homolog of NCBI NO: 8778653 NR Description: F9C16.6 [Arabidopsis thaliana]
  misc_feature (1)..(192): Homolog of NCBI NO: 8778653 NR Description: F9C16.6 [Arabidopsis thaliana]
  misc_feature (1)..(371): Homolog of NCBI NO: 30693757 NR Description: protein phosphatase 2C (PP2C), putative
MKKTRNVASSPIECVHLQTKPTTTLVRSFFFFLFNSQTISSFIIFYLFLCSFFWFCQSPNLTNPSPPPLSVAPLRGDANSPPPESSSSPATKSSLMISSRDPNALFSGGGISFLAGVRTVKFSYGYSSLKGKRATMEDYFETRISDVNGQMVAFFGVFDGHGGARTAEYLKNNLFKNLVSHDDFISDTKKAIVEVFKQTDEEYLIEEAGQPKNAGSTAATAFLIGDKLIVANVGDSRVVASRNGSAVPLSDDHKPDRSDERQRIEDAGGFIIWAGTWRVGGILAVSRAFGDKQLKPYVIAEPEIQEEDISTLEFIVVASDGLWNVLSNKDAVAIVRDISDAETAARKLVQEGYARGSCDNITCIVVRFEVS

SEQ ID NO: 23004 - protein, 276 aa, Arabidopsis thaliana
  peptide (1)..(276): Ceres Seq. ID no. 13487770
  misc_feature (27)..(266): Pfam Name: Protein phosphatase 2C Pfam Description: Protein phosphatase 2C
  misc_feature (199)..(273): Homolog of NCBI NO: 7486331 NR Description: hypothetical protein F28M20.60 - Arabidopsis
  misc_feature (26)..(210): Homolog of NCBI NO: 7486331 NR Description: hypothetical protein F28M20.60 - Arabidopsis
  misc_feature (12)..(273): Homolog of NCBI NO: 18416366 NR Description: protein phosphatase 2C (PP2C) -related
  misc_feature (1)..(273): Homolog of NCBI NO: 30689144 NR Description: protein phosphatase 2C (PP2C), putative
  misc_feature (12)..(273): Homolog of NCBI NO: 20146110 NR Description: protein phosphatase 2C [Mesembryanthemum
  misc_feature (98)..(179): Homolog of NCBI NO: 7523669 NR Description: Unknown protein [Arabidopsis thaliana]
  misc_feature (1)..(97): Homolog of NCBI NO: 7523669 NR Description: Unknown protein [Arabidopsis thaliana]
  misc_feature (98)..(276): Homolog of NCBI NO: 8778653 NR Description: F9C16.6 [Arabidopsis thaliana]
  misc_feature (1)..(97): Homolog of NCBI NO: 8778653 NR Description: F9C16.6 [Arabidopsis thaliana]
  misc_feature (1)..(276): Homolog of NCBI NO: 30693757 NR Description: protein phosphatase 2C (PP2C), putative
MISSRDPNALFSGGGISFLAGVRTVKFSYGYSSLKGKRATMEDYFETRISDVNGQMVAFFGVFDGHGGARTAEYLKNNLFKNLVSHDDFISDTKKAIVEVFKQTDEEYLIEEAGQPKNAGSTAATAFLIGDKLIVANVGDSRVVASRNGSAVPLSDDHKPDRSDERQRIEDAGGFIIWAGTWRVGGILAVSRAFGDKQLKPYVIAEPEIQEEDISTLEFIVVASDGLWNVLSNKDAVAIVRDISDAETAARKLVQEGYARGSCDNITCIVVRFEVS

SEQ ID NO: 23005 - DNA, 883 bp, Arabidopsis thaliana
  misc_feature (1)..(883): Ceres Seq. ID no. 12385048
  misc_feature: MA Experiment ID: 108434 Result: Up-regulated in Transcription
  misc_feature: MA Experiment 108434 PARAMETER Experiment Name: At_Root_Tips_cDNA_P Parameter: Tissue Value: Root Tips
  misc_feature: MA Experiment ID: 108463 Result: Down-regulated in Transcription
  misc_feature: MA Experiment 108463 PARAMETER Experiment Name: At_Germinating_Seeds_cDNA_P Parameter: Age (day) Value: 3 vs. 0
  misc_feature: MA Experiment 108463 PARAMETER Experiment Name: At_Germinating_Seeds_cDNA_P Parameter: Tissue Value: Germinating Seeds
  misc_feature: MA Experiment ID: 108464 Result: Down-regulated in Transcription
  misc_feature: MA Experiment 108464 PARAMETER Experiment Name: At_Germinating_Seeds_cDNA_P Parameter: Age (day) Value: 4 vs. 0
  misc_feature: MA Experiment 108464 PARAMETER Experiment Name: At_Germinating_Seeds_cDNA_P Parameter: Tissue Value: Germinating Seeds
  misc_feature: MA Experiment ID: 108488 Result: Up-regulated in Transcription
  misc_feature: MA Experiment ID: 20000093 Result: Up-regulated in Transcription
  misc_feature: MA Experiment 20000093 PARAMETER Experiment Name: At_42deg_Heat_cDNA_P Parameter: Temperature (deg C) Value: 42 vs. 22
  misc_feature: MA Experiment 20000093 PARAMETER Experiment Name: At_42deg_Heat_cDNA_P Parameter: Timepoint (hr) Value: 0.5
  misc_feature: MA Experiment 20000093 PARAMETER Experiment Name: At_42deg_Heat_cDNA_P Parameter: Tissue Value: Aerial
  misc_feature: MA Experiment ID: 20000113 Result: Up-regulated in Transcription
  misc_feature: MA Experiment 20000113 PARAMETER Experiment Name: At_42deg_Heat_cDNA_P Parameter: Temperature (deg C) Value: 42 vs. 22
  misc_feature: MA Experiment 20000113 PARAMETER Experiment Name: At_42deg_Heat_cDNA_P Parameter: Timepoint (hr) Value: 8
  misc_feature: MA Experiment 20000113 PARAMETER Experiment Name: At_42deg_Heat_cDNA_P Parameter: Tissue Value: Aerial
  misc_feature: MA Experiment ID: 20000794 Result: Down-regulated in Transcription
  misc_feature: MA Experiment 20000794 PARAMETER Experiment Name: At_Petals_P Parameter: Age (day) Value: 23-25 days
  misc_feature: MA Experiment 20000794 PARAMETER Experiment Name: At_Petals_P Parameter: Plant Line Value: WS
  misc_feature: MA Experiment 20000794 PARAMETER Experiment Name: At_Petals_P Parameter: Tissue Value: Petals vs. Whole plant
  misc_feature: MA Experiment ID: 20001557 Result: Up-regulated in Transcription
  misc_feature: MA Experiment 20001557 PARAMETER Experiment Name: At_Drought_Soil_Dry_P Parameter: Age (day) Value: 27
  misc_feature: MA Experiment 20001557 PARAMETER Experiment Name: At_Drought_Soil_Dry_P Parameter: Organism Value: A. thaliana
  misc_feature: MA Experiment 20001557 PARAMETER Experiment Name: At_Drought_Soil_Dry_P Parameter: Plant Line Value: WS
  misc_feature: MA Experiment 20001557 PARAMETER Experiment Name: At_Drought_Soil_Dry_P Parameter: Post Timepoint (hr) Value: 3
  misc_feature: MA Experiment 20001557 PARAMETER Experiment Name: At_Drought_Soil_Dry_P Parameter: Post-Treatment Value: Re-Water vs. No Drought
  misc_feature: MA Experiment 20001557 PARAMETER Experiment Name: At_Drought_Soil_Dry_P Parameter: Timepoint (day) Value: 13
  misc_feature: MA Experiment 20001557 PARAMETER Experiment Name: At_Drought_Soil_Dry_P Parameter: Treatment Value: Drought vs. No Drought
  misc_feature: MA Experiment ID: 20001558 Result: Up-regulated in Transcription
  misc_feature: MA Experiment 20001558 PARAMETER Experiment Name: At_Drought_Soil_Dry_P Parameter: Age (day) Value: 27
  misc_feature: MA Experiment 20001558 PARAMETER Experiment Name: At_Drought_Soil_Dry_P Parameter: Organism Value: A. thaliana
  misc_feature: MA Experiment 20001558 PARAMETER Experiment Name: At_Drought_Soil_Dry_P Parameter: Plant Line Value: WS
  misc_feature: MA Experiment 20001558 PARAMETER Experiment Name: At_Drought_Soil_Dry_P Parameter: Post Timepoint (hr) Value: 6
  misc_feature: MA Experiment 20001558 PARAMETER Experiment Name: At_Drought_Soil_Dry_P Parameter: Post-Treatment Value: Re-Water vs. No Drought
  misc_feature: MA Experiment 20001558 PARAMETER Experiment Name: At_Drought_Soil_Dry_P Parameter: Timepoint (day) Value: 13
  misc_feature: MA Experiment 20001558 PARAMETER Experiment Name: At_Drought_Soil_Dry_P Parameter: Treatment Value: Drought vs. No Drought
  misc_feature: MA Experiment ID: 20001757 Result: Up-regulated in Transcription
  misc_feature: MA Experiment 20001757 PARAMETER Experiment Name: At_50mM_NH4NO3_L-to-H_P Parameter: Timepoint (hr) Value: 6
  misc_feature: MA Experiment 20001757 PARAMETER Experiment Name: At_50mM_NH4NO3_L-to-H_P Parameter: Tissue Value: Leaf
  misc_feature: MA Experiment 20001757 PARAMETER Experiment Name: At_50mM_NH4NO3_L-to-H_P Parameter: Treatment Value: 50mM NH4NO3 vs 100mM Mannitol
gaaaatactcttttaggtttcaacagcagcttagtctctctgatctctctacctccctcacaccctaaaactcagcaacaatggccgttaccttttcagatctacacacagaggagggtgtcaaatccgtggaggagcacctcgccggaaaaacctacatctccggagatcaattgtctgtggatgatgtcaaggtttacgctgccgttccagtgaaacccagcgatgccttccccaatgctagcaagtggtacgagtccgtggcttcccaacttgctaaaagtttccctggaaaggccgttggagtacaattcggtggctctgctgctgctgctccagctgttgaagctgaggcacctgcagctgcagctgatgatgatgatgacatggatctctttggtgacgagaccgaagaagaaaagaaagctgcagaggagagggaggctgctaagaaggacaccaagaagcctaaagagagtggaaagtcttgctgtgctcatggatgttaagccatgggatgatgaaaccgacntgaagaaactggaagaggctgttcgtggtgttgagatgcctggtcttttctggggagcctcaaaacttgtaccagttggttatgggatcaagaaactcacaattatgttcacgattgttgatgacctcgtgtccccggacaacctcattgaagacttcctcacctcagagcctaacaacgagtacatccagagttgtgacattgtcgctttcaacaagatttagagacttcaaatttctccttaccgaaacatatcagaatttcaagttttgttttcgtttgtgttgtttaccgaaatgtttctttcctagttgcaagaccgctttcatgttacaataacactaaattttc

SEQ ID NO: 23006 - protein, 176 aa, Arabidopsis thaliana
  peptide (1)..(176): Ceres Seq. ID no. 12385049
  misc_feature (89)..(176): Pfam Name: EF-1 guanine nucleotide exchange domain Pfam Description: EF-1 guanine nucleotide exchange domain
  misc_feature (60)..(176): Homolog of NCBI NO: 27754711 NR Description: putative elongation factor 1B alpha-subunit
  misc_feature (60)..(176): Homolog of NCBI NO: 15239877 NR Description: elongation factor 1B alpha-subunit
  misc_feature (89)..(176): Homolog of NCBI NO: 232030 NR Description: ELONGATION FACTOR 1-BETA'
  misc_feature (89)..(176): Homolog of NCBI NO: 28317131 NR Description: LD24492p [Drosophila melanogaster]
  misc_feature (89)..(176): Homolog of NCBI NO: 28277965 NR Description: Similar to eukaryotic translation elongation
  misc_feature (60)..(176): Homolog of NCBI NO: 30687350 NR Description: elongation factor 1B alpha-subunit [Arabidopsis
  misc_feature (81)..(176): Homolog of NCBI NO: 34899162 NR Description: putative translation elongation factor eEF-1
  misc_feature (76)..(176): Homolog of NCBI NO: 232033 NR Description: ELONGATION FACTOR 1-BETA' (EF-1-BETA')
  misc_feature (81)..(176): Homolog of NCBI NO: 232031 NR Description: ELONGATION FACTOR 1-BETA' (EF-1-BETA')
  misc_feature (81)..(176): Homolog of NCBI NO: 38175744 NR Description: putative translation elongation factor eEF-1
  misc_feature (103)..(103): Xaa is any aa, unknown or other
MPSPMLASGTSPWLPNLLKVSLERPLEYNSVALLLLLQLLKLRHLQLQLMMMMTWISLVTRPKKKRKLQRRGRLLRRTPRSLKRVESLAVLMDVKPWDDETDXKKLEEAVRGVEMPGLFWGASKLVPVGYGIKKLTIMFTIVDDLVSPDNLIEDFLTSEPNNEYIQSCDIVAFNKI

SEQ ID NO: 23007 - protein, 172 aa, Arabidopsis thaliana
  peptide (1)..(172): Ceres Seq. ID no. 12385050
  misc_feature (85)..(172): Pfam Name: EF-1 guanine nucleotide exchange domain Pfam Description: EF-1 guanine nucleotide exchange domain
  misc_feature (56)..(172): Homolog of NCBI NO: 27754711 NR Description: putative elongation factor 1B alpha-subunit
  misc_feature (56)..(172): Homolog of NCBI NO: 15239877 NR Description: elongation factor 1B alpha-subunit
  misc_feature (85)..(172): Homolog of NCBI NO: 232030 NR Description: ELONGATION FACTOR 1-BETA'
  misc_feature (85)..(172): Homolog of NCBI NO: 28317131 NR Description: LD24492p [Drosophila melanogaster]
  misc_feature (85)..(172): Homolog of NCBI NO: 28277965 NR Description: Similar to eukaryotic translation elongation
  misc_feature (56)..(172): Homolog of NCBI NO: 30687350 NR Description: elongation factor 1B alpha-subunit [Arabidopsis
  misc_feature (77)..(172): Homolog of NCBI NO: 34899162 NR Description: putative translation elongation factor eEF-1
  misc_feature (72)..(172): Homolog of NCBI NO: 232033 NR Description: ELONGATION FACTOR 1-BETA' (EF-1-BETA')
  misc_feature (77)..(172): Homolog of NCBI NO: 232031 NR Description: ELONGATION FACTOR 1-BETA' (EF-1-BETA')
  misc_feature (77)..(172): Homolog of NCBI NO: 38175744 NR Description: putative translation elongation factor eEF-1
  misc_feature (99)..(99): Xaa is any aa, unknown or other
MLASGTSPWLPNLLKVSLERPLEYNSVALLLLLQLLKLRHLQLQLMMMMTWISLVTRPKKKRKLQRRGRLLRRTPRSLKRVESLAVLMDVKPWDDETDXKKLEEAVRGVEMPGLFWGASKLVPVGYGIKKLTIMFTIVDDLVSPDNLIEDFLTSEPNNEYIQSCDIVAFNKI

SEQ ID NO: 23008 - protein, 142 aa, Arabidopsis thaliana
  peptide (1)..(142): Ceres Seq. ID no. 12385051
  misc_feature (18)..(65): Pfam Name: Glutathione S-transferase, C-terminal domain Pfam Description: Glutathione S-transferase, C-terminal domain
  misc_feature (1)..(136): Homolog of NCBI NO: 232030 NR Description: ELONGATION FACTOR 1-BETA'
  misc_feature (1)..(136): Homolog of NCBI NO: 28317131 NR Description: LD24492p [Drosophila melanogaster]
  misc_feature (19)..(136): Homolog of NCBI NO: 27754711 NR Description: putative elongation factor 1B alpha-subunit
  misc_feature (5)..(136): Homolog of NCBI NO: 28277965 NR Description: Similar to eukaryotic translation elongation
  misc_feature (1)..(136): Homolog of NCBI NO: 15239877 NR Description: elongation factor 1B alpha-subunit
  misc_feature (1)..(136): Homolog of NCBI NO: 30687350 NR Description: elongation factor 1B alpha-subunit [Arabidopsis
  misc_feature (1)..(136): Homolog of NCBI NO: 34899162 NR Description: putative translation elongation factor eEF-1
  misc_feature (1)..(136): Homolog of NCBI NO: 232033 NR Description: ELONGATION FACTOR 1-BETA' (EF-1-BETA')
  misc_feature (1)..(136): Homolog of NCBI NO: 232031 NR Description: ELONGATION FACTOR 1-BETA' (EF-1-BETA')
  misc_feature (1)..(136): Homolog of NCBI NO: 38175744 NR Description: putative translation elongation factor eEF-1
MAVTFSDLHTEEGVKSVEEHLAGKTYISGDQLSVDDVKVYAAVPVKPSDAFPNASKWYESVASQLAKSFPGKAVGVQFGGSAAAAPAVEAEAPAAAADDDDDMDLFGDETEEEKKAAEEREAAKKDTKKPKESGKSCCAHGC

SEQ ID NO: 23009 - DNA, 1438 bp, Arabidopsis thaliana
  misc_feature (1)..(1438): Ceres Seq. ID no. 12385386
  misc_feature: MA Experiment ID: 108434 Result: Up-regulated in Transcription
  misc_feature: MA Experiment 108434 PARAMETER Experiment Name: At_Root_Tips_cDNA_P Parameter: Tissue Value: Root Tips
  misc_feature: MA Experiment ID: 108461 Result: Down-regulated in Transcription
  misc_feature: MA Experiment 108461 PARAMETER Experiment Name: At_Germinating_Seeds_cDNA_P Parameter: Age (day) Value: 1 vs. 0
  misc_feature: MA Experiment 108461 PARAMETER Experiment Name: At_Germinating_Seeds_cDNA_P Parameter: Tissue Value: Germinating Seeds
  misc_feature: MA Experiment ID: 108462 Result: Down-regulated in Transcription
  misc_feature: MA Experiment 108462 PARAMETER Experiment Name: At_Germinating_Seeds_cDNA_P Parameter: Age (day) Value: 2 vs. 0
  misc_feature: MA Experiment 108462 PARAMETER Experiment Name: At_Germinating_Seeds_cDNA_P Parameter: Tissue Value: Germinating Seeds
  misc_feature: MA Experiment ID: 108463 Result: Down-regulated in Transcription
  misc_feature: MA Experiment 108463 PARAMETER Experiment Name: At_Germinating_Seeds_cDNA_P Parameter: Age (day) Value: 3 vs. 0
  misc_feature: MA Experiment 108463 PARAMETER Experiment Name: At_Germinating_Seeds_cDNA_P Parameter: Tissue Value: Germinating Seeds
  misc_feature: MA Experiment ID: 108464 Result: Down-regulated in Transcription
  misc_feature: MA Experiment 108464 PARAMETER Experiment Name: At_Germinating_Seeds_cDNA_P Parameter: Age (day) Value: 4 vs. 0
  misc_feature: MA Experiment 108464 PARAMETER Experiment Name: At_Germinating_Seeds_cDNA_P Parameter: Tissue Value: Germinating Seeds
  misc_feature: MA Experiment ID: 108573 Result: Down-regulated in Transcription
  misc_feature: MA Experiment 108573 PARAMETER Experiment Name: At_Drought_cDNA_P Parameter: Timepoint (hr) Value: 6
  misc_feature: MA Experiment 108573 PARAMETER Experiment Name: At_Drought_cDNA_P Parameter: Tissue Value: Aerial
  misc_feature: MA Experiment 108573 PARAMETER Experiment Name: At_Drought_cDNA_P Parameter: Treatment Value: Drought vs. No Drought
  misc_feature: MA Experiment ID: 108577 Result: Down-regulated in Transcription
  misc_feature: MA Experiment 108577 PARAMETER Experiment Name: At_42deg_Heat_cDNA_P Parameter: Temperature (deg C) Value: 42 vs. 22
  misc_feature: MA Experiment 108577 PARAMETER Experiment Name: At_42deg_Heat_cDNA_P Parameter: Timepoint (hr) Value: 6
  misc_feature: MA Experiment 108577 PARAMETER Experiment Name: At_42deg_Heat_cDNA_P Parameter: Tissue Value: Aerial
  misc_feature: MA Experiment ID: 20000111 Result: Down-regulated in Transcription
  misc_feature: MA Experiment 20000111 PARAMETER Experiment Name: At_42deg_Heat_cDNA_P Parameter: Temperature (deg C) Value: 42 vs. 22
  misc_feature: MA Experiment 20000111 PARAMETER Experiment Name: At_42deg_Heat_cDNA_P Parameter: Timepoint (hr) Value: 6
  misc_feature: MA Experiment 20000111 PARAMETER Experiment Name: At_42deg_Heat_cDNA_P Parameter: Tissue Value: Aerial
  misc_feature: MA Experiment ID: 20000112 Result: Down-regulated in Transcription
  misc_feature: MA Experiment 20000112 PARAMETER Experiment Name: At_42deg_Heat_cDNA_P Parameter: Temperature (deg C) Value: 42 vs. 22
  misc_feature: MA Experiment 20000112 PARAMETER Experiment Name: At_42deg_Heat_cDNA_P Parameter: Timepoint (hr) Value: 2
  misc_feature: MA Experiment 20000112 PARAMETER Experiment Name: At_42deg_Heat_cDNA_P Parameter: Tissue Value: Aerial
  misc_feature: MA Experiment ID: 20000113 Result: Down-regulated in Transcription
  misc_feature: MA Experiment 20000113 PARAMETER Experiment Name: At_42deg_Heat_cDNA_P Parameter: Temperature (deg C) Value: 42 vs. 22
  misc_feature: MA Experiment 20000113 PARAMETER Experiment Name: At_42deg_Heat_cDNA_P Parameter: Timepoint (hr) Value: 8
  misc_feature: MA Experiment 20000113 PARAMETER Experiment Name: At_42deg_Heat_cDNA_P Parameter: Tissue Value: Aerial
  misc_feature: MA Experiment ID: 20000173 Result: Down-regulated in Transcription
  misc_feature: MA Experiment 20000173 PARAMETER Experiment Name: At_42deg_Heat_P Parameter: Age (day) Value: 14
  misc_feature: MA Experiment 20000173 PARAMETER Experiment Name: At_42deg_Heat_P Parameter: Organism Value: A. thaliana
  misc_feature: MA Experiment 20000173 PARAMETER Experiment Name: At_42deg_Heat_P Parameter: Plant Line Value: WS
  misc_feature: MA Experiment 20000173 PARAMETER Experiment Name: At_42deg_Heat_P Parameter: Temperature (deg C) Value: 42 vs. 22
  misc_feature: MA Experiment 20000173 PARAMETER Experiment Name: At_42deg_Heat_P Parameter: Timepoint (hr) Value: 6
  misc_feature: MA Experiment 20000173 PARAMETER Experiment Name: At_42deg_Heat_P Parameter: Tissue Value: Aerial
  misc_feature: MA Experiment ID: 20000224 Result: Up-regulated in Transcription
  misc_feature: MA Experiment ID: 20000227 Result: Up-regulated in Transcription
  misc_feature: MA Experiment 20000227 PARAMETER Experiment Name: At_Root-Tips-vs-Tops_P Parameter: Tissue Value: Root Tips vs. Root Tops
  misc_feature: MA Experiment ID: 20000234 Result: Up-regulated in Transcription
  misc_feature: MA Experiment 20000234 PARAMETER Experiment Name: At_Siliques_P Parameter: Age (day) Value: 21
  misc_feature: MA Experiment 20000234 PARAMETER Experiment Name: At_Siliques_P Parameter: Organism Value: A. thaliana
  misc_feature: MA Experiment 20000234 PARAMETER Experiment Name: At_Siliques_P Parameter: Plant Line Value: WS
  misc_feature: MA Experiment 20000234 PARAMETER Experiment Name: At_Siliques_P Parameter: Tissue Value: Less Than 5mm Siliques vs. Whole Plant
  misc_feature: MA Experiment ID: 20000437 Result: Down-regulated in Transcription
  misc_feature: MA Experiment 20000437 PARAMETER Experiment Name: At_Drought_P Parameter: Age (day) Value: 8
  misc_feature: MA Experiment 20000437 PARAMETER Experiment Name: At_Drought_P Parameter: Organism Value: A. thaliana
  misc_feature: MA Experiment 20000437 PARAMETER Experiment Name: At_Drought_P Parameter: Plant Line Value: WS
  misc_feature: MA Experiment 20000437 PARAMETER Experiment Name: At_Drought_P Parameter: Timepoint (hr) Value: 24
  misc_feature: MA Experiment 20000437 PARAMETER Experiment Name: At_Drought_P Parameter: Tissue Value: Whole Plant
  misc_feature: MA Experiment 20000437 PARAMETER Experiment Name: At_Drought_P Parameter: Treatment Value: Drought vs. No Drought
  misc_feature: MA Experiment ID: 20001557 Result: Up-regulated in Transcription
  misc_feature: MA Experiment 20001557 PARAMETER Experiment Name: At_Drought_Soil_Dry_P Parameter: Age (day) Value: 27
  misc_feature: MA Experiment 20001557 PARAMETER Experiment Name: At_Drought_Soil_Dry_P Parameter: Organism Value: A. thaliana
  misc_feature: MA Experiment 20001557 PARAMETER Experiment Name: At_Drought_Soil_Dry_P Parameter: Plant Line Value: WS
  misc_feature: MA Experiment 20001557 PARAMETER Experiment Name: At_Drought_Soil_Dry_P Parameter: Post Timepoint (hr) Value: 3
  misc_feature: MA Experiment 20001557 PARAMETER Experiment Name: At_Drought_Soil_Dry_P Parameter: Post-Treatment Value: Re-Water vs. No Drought
  misc_feature: MA Experiment 20001557 PARAMETER Experiment Name: At_Drought_Soil_Dry_P Parameter: Timepoint (day) Value: 13
  misc_feature: MA Experiment 20001557 PARAMETER Experiment Name: At_Drought_Soil_Dry_P Parameter: Treatment Value: Drought vs. No Drought
  misc_feature: MA Experiment ID: 20001558 Result: Up-regulated in Transcription
  misc_feature: MA Experiment 20001558 PARAMETER Experiment Name: At_Drought_Soil_Dry_P Parameter: Age (day) Value: 27
  misc_feature: MA Experiment 20001558 PARAMETER Experiment Name: At_Drought_Soil_Dry_P Parameter: Organism Value: A. thaliana
  misc_feature: MA Experiment 20001558 PARAMETER Experiment Name: At_Drought_Soil_Dry_P Parameter: Plant Line Value: WS
  misc_feature: MA Experiment 20001558 PARAMETER Experiment Name: At_Drought_Soil_Dry_P Parameter: Post Timepoint (hr) Value: 6
  misc_feature: MA Experiment 20001558 PARAMETER Experiment Name: At_Drought_Soil_Dry_P Parameter: Post-Treatment Value: Re-Water vs. No Drought
  misc_feature: MA Experiment 20001558 PARAMETER Experiment Name: At_Drought_Soil_Dry_P Parameter: Timepoint (day) Value: 13
  misc_feature: MA Experiment 20001558 PARAMETER Experiment Name: At_Drought_Soil_Dry_P Parameter: Treatment Value: Drought vs. No Drought
  misc_feature: MA Experiment ID: 20001560 Result: Up-regulated in Transcription
  misc_feature: MA Experiment 20001560 PARAMETER Experiment Name: At_Drought_Soil_Dry_P Parameter: Age (day) Value: 28
  misc_feature: MA Experiment 20001560 PARAMETER Experiment Name: At_Drought_Soil_Dry_P Parameter: Organism Value: A. thaliana
  misc_feature: MA Experiment 20001560 PARAMETER Experiment Name: At_Drought_Soil_Dry_P Parameter: Plant Line Value: WS
  misc_feature: MA Experiment 20001560 PARAMETER Experiment Name: At_Drought_Soil_Dry_P Parameter: Post Timepoint (hr) Value: None
  misc_feature: MA Experiment 20001560 PARAMETER Experiment Name: At_Drought_Soil_Dry_P Parameter: Post-Treatment Value: None
  misc_feature: MA Experiment 20001560 PARAMETER Experiment Name: At_Drought_Soil_Dry_P Parameter: Timepoint (day) Value: 14
  misc_feature: MA Experiment 20001560 PARAMETER Experiment Name: At_Drought_Soil_Dry_P Parameter: Treatment Value: Drought vs. No Drought
  misc_feature: MA Experiment ID: 20001757 Result: Up-regulated in Transcription
  misc_feature: MA Experiment 20001757 PARAMETER Experiment Name: At_50mM_NH4NO3_L-to-H_P Parameter: Timepoint (hr) Value: 6
  misc_feature: MA Experiment 20001757 PARAMETER Experiment Name: At_50mM_NH4NO3_L-to-H_P Parameter: Tissue Value: Leaf
  misc_feature: MA Experiment 20001757 PARAMETER Experiment Name: At_50mM_NH4NO3_L-to-H_P Parameter: Treatment Value: 50mM NH4NO3 vs 100mM Mannitol
gttaagtacttggcttctaacaaacgctgtctgaatcatatttcgattctgatttttcttcatggattcgtatagccaataagttttttcaatattcaaaacaaaaaccccatcaaaataatctccggaccagtttctctttcgattcagtcggaccggaaaaacaatggcgtctgtgaaccctttcgatctcttggacgatgacgcagaggatcccagccagattgttgcgtctaagccattgaaggttgtggctccggttcagactgctaagtctggtaagatgccgactaagccgcctcctccttctcaagctgtgagggaggcaaggaacgctcctggtggaggtcgtggtgctggacgtggagggagttatggtcgtggtggacgtggtggaaacaatagggattcaaggaacaatgatggtcctgccaatgaaaacggatatggtggaggctacagacgctcagaagaaggagatggagctagacgtggtgggcctgttggtggataccgtggtgatcgccgtggaagctacagcaatggtggtgattcaggtgactctgaaagaccacgcaagaactatgaccgtcacagtagaacagcgtacgggaatgaggataaacgtgatggagctggccgtgcgaattggggaaccactcaggatgatattactccggtgactgaagaatccacagctgttgtggacaagaatttgactgttgagaagcaagatggtgaaggtgaagcaactgatgcaaagaatgaaacacctgctgagaaagcagaggaaaagcctgaggacaaggagatgactttggaagagtatgagaaggttttggaggagaagaagaaagctctgcaggcgaccaaggttgaggaaaggaaggttgacactaaagcatttgaggccatgcaacagctctcaagcaaaaagagcaacaacgatgaagtcttcatcaaactgggaacagagaaggacaagcgcattactgagagagaagagaagacaaggaagtcattgagcatcaatgagtttctgaaacctgcggatggaaagagttactacagaccaagaggtggttaccaaggtggaagggaaggacgtggaccaagagaaggaaaccagagggacggtggaagaaacctgagggaaggagggagaaaccagagggacggaggagctgcagcacaggcaccaacaccggccattggggacagtgcacagttccctactttgggtaagtaaggcaatctctccggtttggtccttcagcttctgtctggactcgtttctctgtaatatctcactcggtttggattttgttcttctgattctatttttattgttatactcttccctttagagagctgaaggttttttgttttgcgaacccaattttgggagttttaagttaaatgaggccaaaaaatcaac

SEQ ID NO: 23010 - protein, 360 aa, Arabidopsis thaliana
  peptide (1)..(360): Ceres Seq. ID no. 12385387
  misc_feature (119)..(289): Pfam Name: Hyaluronan / mRNA binding family Pfam Description: Hyaluronan / mRNA binding family
  misc_feature (33)..(359): Homolog of NCBI NO: 7488863 NR Description: probable transcription factor - fava bean
  misc_feature (1)..(359): Homolog of NCBI NO: 39725276 NR Description: salt tolerance protein 1 [Beta vulgaris]
  misc_feature (1)..(359): Homolog of NCBI NO: 21537052 NR Description: nuclear antigen homolog [Arabidopsis thaliana]
  misc_feature (1)..(359): Homolog of NCBI NO: 15235894 NR Description: nuclear antigen homolog
  misc_feature (1)..(359): Homolog of NCBI NO: 6492266 NR Description: nuclear RNA binding protein A [Spinacia oleracea]
  misc_feature (1)..(315): Homolog of NCBI NO: 39725278 NR Description: salt tolerance protein 2 [Beta vulgaris]
  misc_feature (1)..(322): Homolog of NCBI NO: 21553991 NR Description: nuclear RNA binding protein A-like protein
  misc_feature (1)..(322): Homolog of NCBI NO: 15238039 NR Description: putative protein
  misc_feature (1)..(360): Homolog of NCBI NO: 21593013 NR Description: nuclear RNA binding protein A-like protein
  misc_feature (1)..(360): Homolog of NCBI NO: 15236552 NR Description: nuclear RNA binding protein A-like protein
MASVNPFDLLDDDAEDPSQIVASKPLKVVAPVQTAKSGKMPTKPPPPSQAVREARNAPGGGRGAGRGGSYGRGGRGGNNRDSRNNDGPANENGYGGGYRRSEEGDGARRGGPVGGYRGDRRGSYSNGGDSGDSERPRKNYDRHSRTAYGNEDKRDGAGRANWGTTQDDITPVTEESTAVVDKNLTVEKQDGEGEATDAKNETPAEKAEEKPEDKEMTLEEYEKVLEEKKKALQATKVEERKVDTKAFEAMQQLSSKKSNNDEVFIKLGTEKDKRITEREEKTRKSLSINEFLKPADGKSYYRPRGGYQGGREGRGPREGNQRDGGRNLREGGRNQRDGGAAAQAPTPAIGDSAQFPTLGK

SEQ ID NO: 23011 - protein, 321 aa, Arabidopsis thaliana
  peptide (1)..(321): Ceres Seq. ID no. 12385388
  misc_feature (80)..(250): Pfam Name: Hyaluronan / mRNA binding family Pfam Description: Hyaluronan / mRNA binding family
  misc_feature (1)..(320): Homolog of NCBI NO: 7488863 NR Description: probable transcription factor - fava bean
  misc_feature (1)..(320): Homolog of NCBI NO: 39725276 NR Description: salt tolerance protein 1 [Beta vulgaris]
  misc_feature (1)..(320): Homolog of NCBI NO: 21537052 NR Description: nuclear antigen homolog [Arabidopsis thaliana]
  misc_feature (1)..(320): Homolog of NCBI NO: 15235894 NR Description: nuclear antigen homolog
  misc_feature (1)..(320): Homolog of NCBI NO: 6492266 NR Description: nuclear RNA binding protein A [Spinacia oleracea]
  misc_feature (1)..(276): Homolog of NCBI NO: 39725278 NR Description: salt tolerance protein 2 [Beta vulgaris]
  misc_feature (1)..(283): Homolog of NCBI NO: 21553991 NR Description: nuclear RNA binding protein A-like protein
  misc_feature (1)..(283): Homolog of NCBI NO: 15238039 NR Description: putative protein
  misc_feature (1)..(321): Homolog of NCBI NO: 21593013 NR Description: nuclear RNA binding protein A-like protein
  misc_feature (1)..(321): Homolog of NCBI NO: 15236552 NR Description: nuclear RNA binding protein A-like protein
MPTKPPPPSQAVREARNAPGGGRGAGRGGSYGRGGRGGNNRDSRNNDGPANENGYGGGYRRSEEGDGARRGGPVGGYRGDRRGSYSNGGDSGDSERPRKNYDRHSRTAYGNEDKRDGAGRANWGTTQDDITPVTEESTAVVDKNLTVEKQDGEGEATDAKNETPAEKAEEKPEDKEMTLEEYEKVLEEKKKALQATKVEERKVDTKAFEAMQQLSSKKSNNDEVFIKLGTEKDKRITEREEKTRKSLSINEFLKPADGKSYYRPRGGYQGGREGRGPREGNQRDGGRNLREGGRNQRDGGAAAQAPTPAIGDSAQFPTLGK

SEQ ID NO: 23012 - DNA, 1470 bp, Arabidopsis thaliana
  misc_feature (1)..(1470): Ceres Seq. ID no. 12371593
  misc_feature: MA Experiment ID: 108434 Result: Up-regulated in Transcription
  misc_feature: MA Experiment 108434 PARAMETER Experiment Name: At_Root_Tips_cDNA_P Parameter: Tissue Value: Root Tips
  misc_feature: MA Experiment ID: 108461 Result: Down-regulated in Transcription
  misc_feature: MA Experiment 108461 PARAMETER Experiment Name: At_Germinating_Seeds_cDNA_P Parameter: Age (day) Value: 1 vs. 0
  misc_feature: MA Experiment 108461 PARAMETER Experiment Name: At_Germinating_Seeds_cDNA_P Parameter: Tissue Value: Germinating Seeds
  misc_feature: MA Experiment ID: 108462 Result: Down-regulated in Transcription
  misc_feature: MA Experiment 108462 PARAMETER Experiment Name: At_Germinating_Seeds_cDNA_P Parameter: Age (day) Value: 2 vs. 0
  misc_feature: MA Experiment 108462 PARAMETER Experiment Name: At_Germinating_Seeds_cDNA_P Parameter: Tissue Value: Germinating Seeds
  misc_feature: MA Experiment ID: 108463 Result: Down-regulated in Transcription
  misc_feature: MA Experiment 108463 PARAMETER Experiment Name: At_Germinating_Seeds_cDNA_P Parameter: Age (day) Value: 3 vs. 0
  misc_feature: MA Experiment 108463 PARAMETER Experiment Name: At_Germinating_Seeds_cDNA_P Parameter: Tissue Value: Germinating Seeds
  misc_feature: MA Experiment ID: 108464 Result: Down-regulated in Transcription
  misc_feature: MA Experiment 108464 PARAMETER Experiment Name: At_Germinating_Seeds_cDNA_P Parameter: Age (day) Value: 4 vs. 0
  misc_feature: MA Experiment 108464 PARAMETER Experiment Name: At_Germinating_Seeds_cDNA_P Parameter: Tissue Value: Germinating Seeds
  misc_feature: MA Experiment ID: 20000180 Result: Down-regulated in Transcription
  misc_feature: MA Experiment 20000180 PARAMETER Experiment Name: At_Germinating_Seeds_P Parameter: Age (hr) Value: 24 vs. 0
  misc_feature: MA Experiment 20000180 PARAMETER Experiment Name: At_Germinating_Seeds_P Parameter: Tissue Value: Germinating Seeds
  misc_feature: MA Experiment ID: 20000184 Result: Down-regulated in Transcription
  misc_feature: MA Experiment 20000184 PARAMETER Experiment Name: At_Shoots__P Parameter: Age (day) Value: 7
  misc_feature: MA Experiment 20000184 PARAMETER Experiment Name: At_Shoots__P Parameter: Tissue Value: Shoots vs. Whole Plant
  misc_feature: MA Experiment ID: 20000227 Result: Up-regulated in Transcription
  misc_feature: MA Experiment 20000227 PARAMETER Experiment Name: At_Root-Tips-vs-Tops_P Parameter: Tissue Value: Root Tips vs. Root Tops
  misc_feature: MA Experiment ID: 20000495 Result: Up-regulated in Transcription
  misc_feature: MA Experiment 20000495 PARAMETER Experiment Name: At_Guard_Cells_P Parameter: Harvest Date Value: 8/2/2002
  misc_feature: MA Experiment 20000495 PARAMETER Experiment Name: At_Guard_Cells_P Parameter: Organism Value: A. thaliana
  misc_feature: MA Experiment 20000495 PARAMETER Experiment Name: At_Guard_Cells_P Parameter: Tissue Value: Guard Cells vs. Leaves
  misc_feature: MA Experiment ID: 20001451 Result: Up-regulated in Transcription
  misc_feature: MA Experiment 20001451 PARAMETER Experiment Name: At_Far-red-induction_P Parameter: Age (day) Value: 7
  misc_feature: MA Experiment 20001451 PARAMETER Experiment Name: At_Far-red-induction_P Parameter: Light Value: Far-red vs. White
  misc_feature: MA Experiment 20001451 PARAMETER Experiment Name: At_Far-red-induction_P Parameter: Organism Value: A. thaliana
  misc_feature: MA Experiment 20001451 PARAMETER Experiment Name: At_Far-red-induction_P Parameter: Plant Line Value: Columbia
  misc_feature: MA Experiment 20001451 PARAMETER Experiment Name: At_Far-red-induction_P Parameter: Timepoint (hr) Value: 24
  misc_feature: MA Experiment 20001451 PARAMETER Experiment Name: At_Far-red-induction_P Parameter: Tissue Value: Whole Plant
agattcttcaaagacctagagtgtcttcgtcttcgacgacggcaaattcgtggaagctgtttcatcgattccggcttcactgaagcggcgtcgctcgacgtttattattccgacgactaggcctttgaggcagtttctgattaacttcaggcgataatggcaaacagaacagatccgttggcaaagaatataagaggaacgaatccgcagaatctggtagagaagattgtgcgaacgaagatttatcagcacaccttttggaaggagcagtgctttggtctcacggcggagacattggtggacaaagctatggagctcgaccatctaggtggtacctttggtggtagccgcaagcctactccgttcctttgcctcatattgaagatgcttcaaatccagcctgagaaggaaattgtcgtggagttcataaaaaatgatgactacaaatatgttcgtattcttggtgcgttctatctgcgtctcactgggactgatgttgatgtctatcgctacctcgaacctctctacaatgactaccggaaagtgagacaaaagttatctgatgggaagttttcgctgacacatgtggacgaagtcattgaggaacttctaaccaaggattattcttgtgatattgcaatgccacgtttgaagaaaaggtggacgcttgaacagaatggtttattagagccaaggaaaagtgttttggaagacgactttgaagaagaggaagaaaaggaggagaatgaagggattgctgatggatctgaagatgagatggatcagcgccgtaagagtcctgaaagagaaagagaaagagacagagacaggagacgcgacagtcatagacacagggatcgtgattatgacagagactatgatatggatcgagatcatgacagagactatgaaagagaacgtgggcatggtcgagaccgggatagggagagagacagggatcactatagagagcgagatagggacagggaaagaggcagagatagagaacgagacagaagagacagggcaaggcgcagaagtagaagcaggagtagggatcgtaagagacatgaaactgatgatgtgcgggatcgggaagaacctaagaaaaagaaagaaaagaaggagaagatgaaggaagatggaaccgatcatccaaatcctgaaattgcagagatgaatagactgagagcatcactgggaatgaaacccctcagggactgaactgtgaaatgaggacatctttatcaaaccgaaacttggttcatttgcccagctaaaccggttactacactgtgatcctactcactatagttttggtttttttgagtttacctgatccctctttaatgtagaacaaaatggagaatctgtaatggcattgtactgtatgttctctaaaccgtaaacgaattgtggtcgagaaattctgaatgtaacccggttcttgatattagttgtttttaaggt

SEQ ID NO: 23013 - protein, 355 aa, Arabidopsis thaliana
  peptide (1)..(355): Ceres Seq. ID no. 12371594
  misc_feature (1)..(177): Pfam Name: PRP38 family Pfam Description: PRP38 family
  misc_feature (1)..(323): Homolog of NCBI NO: 23508527 NR Description: hypothetical protein, conserved [Plasmodium
  misc_feature (10)..(345): Homolog of NCBI NO: 28829361 NR Description: similar to Arabidopsis thaliana (Mouse-ear
  misc_feature (1)..(311): Homolog of NCBI NO: 39593428 NR Description: Hypothetical protein CBG09713 [Caenorhabditis
  misc_feature (1)..(322): Homolog of NCBI NO: 17559118 NR Description: PRP38 family (38.2 kD) [Caenorhabditis elegans]
  misc_feature (1)..(324): Homolog of NCBI NO: 27370014 NR Description: RIKEN cDNA 2410002M20 [Mus musculus]
  misc_feature (1)..(324): Homolog of NCBI NO: 24762236 NR Description: hypothetical protein FLJ14936 [Homo sapiens]
  misc_feature (1)..(313): Homolog of NCBI NO: 22024089 NR Description: CG30342-PA [Drosophila melanogaster]
  misc_feature (1)..(333): Homolog of NCBI NO: 31248148 NR Description: ENSANGP00000012048 [Anopheles gambiae]
  misc_feature (1)..(355): Homolog of NCBI NO: 25408716 NR Description: hypothetical protein At2g40650 [imported] -
  misc_feature (1)..(355): Homolog of NCBI NO: 18405463 NR Description: expressed protein
MANRTDPLAKNIRGTNPQNLVEKIVRTKIYQHTFWKEQCFGLTAETLVDKAMELDHLGGTFGGSRKPTPFLCLILKMLQIQPEKEIVVEFIKNDDYKYVRILGAFYLRLTGTDVDVYRYLEPLYNDYRKVRQKLSDGKFSLTHVDEVIEELLTKDYSCDIAMPRLKKRWTLEQNGLLEPRKSVLEDDFEEEEEKEENEGIADGSEDEMDQRRKSPERERERDRDRRRDSHRHRDRDYDRDYDMDRDHDRDYERERGHGRDRDRERDRDHYRERDRDRERGRDRERDRRDRARRRSRSRSRDRKRHETDDVRDREEPKKKKEKKEKMKEDGTDHPNPEIAEMNRLRASLGMKPLRD

SEQ ID NO: 23014 - protein, 304 aa, Arabidopsis thaliana
  peptide (1)..(304): Ceres Seq. ID no. 12371595
  misc_feature (1)..(126): Pfam Name: PRP38 family Pfam Description: PRP38 family
  misc_feature (1)..(272): Homolog of NCBI NO: 23508527 NR Description: hypothetical protein, conserved [Plasmodium
  misc_feature (1)..(294): Homolog of NCBI NO: 28829361 NR Description: similar to Arabidopsis thaliana (Mouse-ear
  misc_feature (1)..(260): Homolog of NCBI NO: 39593428 NR Description: Hypothetical protein CBG09713 [Caenorhabditis
  misc_feature (1)..(271): Homolog of NCBI NO: 17559118 NR Description: PRP38 family (38.2 kD) [Caenorhabditis elegans]
  misc_feature (1)..(273): Homolog of NCBI NO: 27370014 NR Description: RIKEN cDNA 2410002M20 [Mus musculus]
  misc_feature (1)..(273): Homolog of NCBI NO: 24762236 NR Description: hypothetical protein FLJ14936 [Homo sapiens]
  misc_feature (1)..(262): Homolog of NCBI NO: 22024089 NR Description: CG30342-PA [Drosophila melanogaster]
  misc_feature (1)..(282): Homolog of NCBI NO: 31248148 NR Description: ENSANGP00000012048 [Anopheles gambiae]
  misc_feature (1)..(304): Homolog of NCBI NO: 25408716 NR Description: hypothetical protein At2g40650 [imported] -
  misc_feature (1)..(304): Homolog of NCBI NO: 18405463 NR Description: expressed protein
MELDHLGGTFGGSRKPTPFLCLILKMLQIQPEKEIVVEFIKNDDYKYVRILGAFYLRLTGTDVDVYRYLEPLYNDYRKVRQKLSDGKFSLTHVDEVIEELLTKDYSCDIAMPRLKKRWTLEQNGLLEPRKSVLEDDFEEEEEKEENEGIADGSEDEMDQRRKSPERERERDRDRRRDSHRHRDRDYDRDYDMDRDHDRDYERERGHGRDRDRERDRDHYRERDRDRERGRDRERDRRDRARRRSRSRSRDRKRHETDDVRDREEPKKKKEKKEKMKEDGTDHPNPEIAEMNRLRASLGMKPLRD

SEQ ID NO: 23015 - protein, 279 aa, Arabidopsis thaliana
  peptide (1)..(279): Ceres Seq. ID no. 12371596
  misc_feature (1)..(101): Pfam Name: PRP38 family Pfam Description: PRP38 family
  misc_feature (1)..(247): Homolog of NCBI NO: 23508527 NR Description: hypothetical protein, conserved [Plasmodium
  misc_feature (1)..(269): Homolog of NCBI NO: 28829361 NR Description: similar to Arabidopsis thaliana (Mouse-ear
  misc_feature (1)..(235): Homolog of NCBI NO: 39593428 NR Description: Hypothetical protein CBG09713 [Caenorhabditis
  misc_feature (1)..(246): Homolog of NCBI NO: 17559118 NR Description: PRP38 family (38.2 kD) [Caenorhabditis elegans]
  misc_feature (1)..(248): Homolog of NCBI NO: 27370014 NR Description: RIKEN cDNA 2410002M20 [Mus musculus]
  misc_feature (1)..(248): Homolog of NCBI NO: 24762236 NR Description: hypothetical protein FLJ14936 [Homo sapiens]
  misc_feature (1)..(237): Homolog of NCBI NO: 22024089 NR Description: CG30342-PA [Drosophila melanogaster]
  misc_feature (1)..(257): Homolog of NCBI NO: 31248148 NR Description: ENSANGP00000012048 [Anopheles gambiae]
  misc_feature (1)..(279): Homolog of NCBI NO: 25408716 NR Description: hypothetical protein At2g40650 [imported] -
  misc_feature (1)..(279): Homolog of NCBI NO: 18405463 NR Description: expressed protein
MLQIQPEKEIVVEFIKNDDYKYVRILGAFYLRLTGTDVDVYRYLEPLYNDYRKVRQKLSDGKFSLTHVDEVIEELLTKDYSCDIAMPRLKKRWTLEQNGLLEPRKSVLEDDFEEEEEKEENEGIADGSEDEMDQRRKSPERERERDRDRRRDSHRHRDRDYDRDYDMDRDHDRDYERERGHGRDRDRERDRDHYRERDRDRERGRDRERDRRDRARRRSRSRSRDRKRHETDDVRDREEPKKKKEKKEKMKEDGTDHPNPEIAEMNRLRASLGMKPLRD

SEQ ID NO: 23016 - DNA, 1428 bp, Arabidopsis thaliana
  misc_feature (1)..(1428): Ceres Seq. ID no. 12340445
  misc_feature: MA Experiment ID: 108434 Result: Up-regulated in Transcription
  misc_feature: MA Experiment 108434 PARAMETER Experiment Name: At_Root_Tips_cDNA_P Parameter: Tissue Value: Root Tips
  misc_feature: MA Experiment ID: 108461 Result: Down-regulated in Transcription
  misc_feature: MA Experiment 108461 PARAMETER Experiment Name: At_Germinating_Seeds_cDNA_P Parameter: Age (day) Value: 1 vs. 0
  misc_feature: MA Experiment 108461 PARAMETER Experiment Name: At_Germinating_Seeds_cDNA_P Parameter: Tissue Value: Germinating Seeds
  misc_feature: MA Experiment ID: 108462 Result: Down-regulated in Transcription
  misc_feature: MA Experiment 108462 PARAMETER Experiment Name: At_Germinating_Seeds_cDNA_P Parameter: Age (day) Value: 2 vs. 0
  misc_feature: MA Experiment 108462 PARAMETER Experiment Name: At_Germinating_Seeds_cDNA_P Parameter: Tissue Value: Germinating Seeds
  misc_feature: MA Experiment ID: 108463 Result: Down-regulated in Transcription
  misc_feature: MA Experiment 108463 PARAMETER Experiment Name: At_Germinating_Seeds_cDNA_P Parameter: Age (day) Value: 3 vs. 0
  misc_feature: MA Experiment 108463 PARAMETER Experiment Name: At_Germinating_Seeds_cDNA_P Parameter: Tissue Value: Germinating Seeds
  misc_feature: MA Experiment ID: 108464 Result: Down-regulated in Transcription
  misc_feature: MA Experiment 108464 PARAMETER Experiment Name: At_Germinating_Seeds_cDNA_P Parameter: Age (day) Value: 4 vs. 0
  misc_feature: MA Experiment 108464 PARAMETER Experiment Name: At_Germinating_Seeds_cDNA_P Parameter: Tissue Value: Germinating Seeds
  misc_feature: MA Experiment ID: 108573 Result: Down-regulated in Transcription
  misc_feature: MA Experiment 108573 PARAMETER Experiment Name: At_Drought_cDNA_P Parameter: Timepoint (hr) Value: 6
  misc_feature: MA Experiment 108573 PARAMETER Experiment Name: At_Drought_cDNA_P Parameter: Tissue Value: Aerial
  misc_feature: MA Experiment 108573 PARAMETER Experiment Name: At_Drought_cDNA_P Parameter: Treatment Value: Drought vs. No Drought
  misc_feature: MA Experiment ID: 20000224 Result: Up-regulated in Transcription
aaaaaaaaatctagggttttaaggtttcttatccttcctcttcctccgccagattcttttcttgcgaagatgagcaacgacaaggacagcatgaacatgtccgatctctccaccgctcttaacgaggaggatcgtgccgggcttgttaatgctcttaagaacaagttgcagaatttggctggacaacactctgatgtccttgaaaacttgactccaccagtcaggaagcgtgtcgagtttctaagagagattcagaaccaatatgatgagatggaagcaaaattctttgaggagagagcagctcttgaagctaagtatcaaaagttatatcagcctttatataccaagcgatatgagattgtgaatggtgtggtcgaagttgaaggtgcagctgaagaagtaaaatccgaacaaggagaagataaatcagctgaagagaaaggagtaccagatttctggcttattgcattgaagaacaatgaaattactgcggaagagataactgagcgagatgaaggggctctcaagtatctcaaagatatcaagtggagtagggttgaagaaccaaaagggttcaagcttgagtttttctttgatcagaatccttacttcaagaacactgtcttgaccaagacatatcacatgattgatgaagatgagcctatccttgagaaggccctcgggacggagattgagtggtatcctggaaagtgtttgacacagaagattctaaaaaagaagccaaagaaaggatccaaaaacacaaagccgatcactaagactgaggactgtgagagtttcttcaactttttcagtccacctcaagttcctgacgatgatgaggatcttgatgatgacatggctgatgaactccaaggacaaatggagcatgattatgatatcggttcaacaatcaaagagaaaatcatctcgcatgctgtgtcatggttcactggtgaagctgttaggcagatgaccttgatattgaggacgacgatgatgagattgatgaagatgatgatgaagaggacgaggaagatgatgaggatgacgaggaggatgatgatgaggatgatgacgaggaggaagaagcagatcaaggaaagaagagcaaaaagaagaaggctggaagaagtcaacttgcggaaggtcaagcaggtgagaggccaccagaatgtaagcagcagtgaagaagtgaagaatcttggcttagttatgatgaagaagaagagtgaagagtgtctttgagccgaggttgtgtttctttaatttgcagagtcatggtccggtttattatatatcagttttgggtgattggtttgctatttaaaaaaaaaaaatgggttctttggtttggtttgtgtctcttgatttttccttttgtaatgatcttatgaatttgtttcgagttaatgtcgttctctggtc

SEQ ID NO: 23017 - protein, 415 aa, Arabidopsis thaliana
  peptide (1)..(415): Ceres Seq. ID no. 12340446
  misc_feature (75)..(322): Pfam Name: Nucleosome assembly protein (NAP) Pfam Description: Nucleosome assembly protein (NAP)
  misc_feature (40)..(323): Homolog of NCBI NO: 34910504 NR Description: putative nucleosome assembly protein 1
  misc_feature (24)..(323): Homolog of NCBI NO: 21898560 NR Description: nucleosome/chromatin assembly factor group A [Zea
  misc_feature (24)..(323): Homolog of NCBI NO: 29569109 NR Description: nucleosome/chromatin assembly factor group A [Zea
  misc_feature (24)..(323): Homolog of NCBI NO: 2129840 NR Description: nucleosome assembly protein 1 - soybean
  misc_feature (24)..(323): Homolog of NCBI NO: 7488816 NR Description: nucleosome assembly protein 1 - garden pea
  misc_feature (24)..(322): Homolog of NCBI NO: 15236115 NR Description: nucleosome assembly protein I-like protein
  misc_feature (23)..(322): Homolog of NCBI NO: 549975 NR Description: nucleosome assembly protein I-like protein
  misc_feature (24)..(322): Homolog of NCBI NO: 8777435 NR Description: nucleosome assembly protein [Arabidopsis thaliana]
  misc_feature (24)..(322): Homolog of NCBI NO: 18423918 NR Description: nucleosome assembly protein
  misc_feature (24)..(322): Homolog of NCBI NO: 15224782 NR Description: putative nucleosome assembly protein
KKKSRVLRFLILPLPPPDSFLAKMSNDKDSMNMSDLSTALNEEDRAGLVNALKNKLQNLAGQHSDVLENLTPPVRKRVEFLREIQNQYDEMEAKFFEERAALEAKYQKLYQPLYTKRYEIVNGVVEVEGAAEEVKSEQGEDKSAEEKGVPDFWLIALKNNEITAEEITERDEGALKYLKDIKWSRVEEPKGFKLEFFFDQNPYFKNTVLTKTYHMIDEDEPILEKALGTEIEWYPGKCLTQKILKKKPKKGSKNTKPITKTEDCESFFNFFSPPQVPDDDEDLDDDMADELQGQMEHDYDIGSTIKEKIISHAVSWFTGEAVRQMTLILRTTMMRLMKMMMKRTRKMMRMTRRMMMRMMTRRKKQIKERRAKRRRLEEVNLRKVKQVRGHQNVSSSEEVKNLGLVMMKKKSEECL

SEQ ID NO: 23018 - protein, 392 aa, Arabidopsis thaliana
  peptide (1)..(392): Ceres Seq. ID no. 12340447
  misc_feature (52)..(299): Pfam Name: Nucleosome assembly protein (NAP) Pfam Description: Nucleosome assembly protein (NAP)
  misc_feature (17)..(300): Homolog of NCBI NO: 34910504 NR Description: putative nucleosome assembly protein 1
  misc_feature (1)..(300): Homolog of NCBI NO: 21898560 NR Description: nucleosome/chromatin assembly factor group A [Zea
  misc_feature (1)..(300): Homolog of NCBI NO: 29569109 NR Description: nucleosome/chromatin assembly factor group A [Zea
  misc_feature (1)..(300): Homolog of NCBI NO: 2129840 NR Description: nucleosome assembly protein 1 - soybean
  misc_feature (1)..(300): Homolog of NCBI NO: 7488816 NR Description: nucleosome assembly protein 1 - garden pea
  misc_feature (1)..(299): Homolog of NCBI NO: 15236115 NR Description: nucleosome assembly protein I-like protein
  misc_feature (1)..(299): Homolog of NCBI NO: 549975 NR Description: nucleosome assembly protein I-like protein
  misc_feature (1)..(299): Homolog of NCBI NO: 8777435 NR Description: nucleosome assembly protein [Arabidopsis thaliana]
  misc_feature (1)..(299): Homolog of NCBI NO: 18423918 NR Description: nucleosome assembly protein
  misc_feature (1)..(299): Homolog of NCBI NO: 15224782 NR Description: putative nucleosome assembly protein
MSNDKDSMNMSDLSTALNEEDRAGLVNALKNKLQNLAGQHSDVLENLTPPVRKRVEFLREIQNQYDEMEAKFFEERAALEAKYQKLYQPLYTKRYEIVNGVVEVEGAAEEVKSEQGEDKSAEEKGVPDFWLIALKNNEITAEEITERDEGALKYLKDIKWSRVEEPKGFKLEFFFDQNPYFKNTVLTKTYHMIDEDEPILEKALGTEIEWYPGKCLTQKILKKKPKKGSKNTKPITKTEDCESFFNFFSPPQVPDDDEDLDDDMADELQGQMEHDYDIGSTIKEKIISHAVSWFTGEAVRQMTLILRTTMMRLMKMMMKRTRKMMRMTRRMMMRMMTRRKKQIKERRAKRRRLEEVNLRKVKQVRGHQNVSSSEEVKNLGLVMMKKKSEECL

SEQ ID NO: 23019 - protein, 385 aa, Arabidopsis thaliana
  peptide (1)..(385): Ceres Seq. ID no. 12340448
  misc_feature (45)..(292): Pfam Name: Nucleosome assembly protein (NAP) Pfam Description: Nucleosome assembly protein (NAP)
  misc_feature (10)..(293): Homolog of NCBI NO: 34910504 NR Description: putative nucleosome assembly protein 1
  misc_feature (1)..(293): Homolog of NCBI NO: 21898560 NR Description: nucleosome/chromatin assembly factor group A [Zea
  misc_feature (1)..(293): Homolog of NCBI NO: 29569109 NR Description: nucleosome/chromatin assembly factor group A [Zea
  misc_feature (1)..(293): Homolog of NCBI NO: 2129840 NR Description: nucleosome assembly protein 1 - soybean
  misc_feature (1)..(293): Homolog of NCBI NO: 7488816 NR Description: nucleosome assembly protein 1 - garden pea
  misc_feature (1)..(292): Homolog of NCBI NO: 15236115 NR Description: nucleosome assembly protein I-like protein
  misc_feature (1)..(292): Homolog of NCBI NO: 549975 NR Description: nucleosome assembly protein I-like protein
  misc_feature (1)..(292): Homolog of NCBI NO: 8777435 NR Description: nucleosome assembly protein [Arabidopsis thaliana]
  misc_feature (1)..(292): Homolog of NCBI NO: 18423918 NR Description: nucleosome assembly protein
  misc_feature (1)..(292): Homolog of NCBI NO: 15224782 NR Description: putative nucleosome assembly protein
MNMSDLSTALNEEDRAGLVNALKNKLQNLAGQHSDVLENLTPPVRKRVEFLREIQNQYDEMEAKFFEERAALEAKYQKLYQPLYTKRYEIVNGVVEVEGAAEEVKSEQGEDKSAEEKGVPDFWLIALKNNEITAEEITERDEGALKYLKDIKWSRVEEPKGFKLEFFFDQNPYFKNTVLTKTYHMIDEDEPILEKALGTEIEWYPGKCLTQKILKKKPKKGSKNTKPITKTEDCESFFNFFSPPQVPDDDEDLDDDMADELQGQMEHDYDIGSTIKEKIISHAVSWFTGEAVRQMTLILRTTMMRLMKMMMKRTRKMMRMTRRMMMRMMTRRKKQIKERRAKRRRLEEVNLRKVKQVRGHQNVSSSEEVKNLGLVMMKKKSEECL

SEQ ID NO: 23020 - DNA, 1161 bp, Arabidopsis thaliana
  misc_feature (1)..(1161): Ceres Seq. ID no. 12339842
  misc_feature: MA Experiment ID: 108461 Result: Up-regulated in Transcription
  misc_feature: MA Experiment 108461 PARAMETER Experiment Name: At_Germinating_Seeds_cDNA_P Parameter: Age (day) Value: 1 vs. 0
  misc_feature: MA Experiment 108461 PARAMETER Experiment Name: At_Germinating_Seeds_cDNA_P Parameter: Tissue Value: Germinating Seeds
  misc_feature: MA Experiment ID: 108462 Result: Up-regulated in Transcription
  misc_feature: MA Experiment 108462 PARAMETER Experiment Name: At_Germinating_Seeds_cDNA_P Parameter: Age (day) Value: 2 vs. 0
  misc_feature: MA Experiment 108462 PARAMETER Experiment Name: At_Germinating_Seeds_cDNA_P Parameter: Tissue Value: Germinating Seeds
  misc_feature: MA Experiment ID: 108463 Result: Up-regulated in Transcription
  misc_feature: MA Experiment 108463 PARAMETER Experiment Name: At_Germinating_Seeds_cDNA_P Parameter: Age (day) Value: 3 vs. 0
  misc_feature: MA Experiment 108463 PARAMETER Experiment Name: At_Germinating_Seeds_cDNA_P Parameter: Tissue Value: Germinating Seeds
  misc_feature: MA Experiment ID: 108464 Result: Up-regulated in Transcription
  misc_feature: MA Experiment 108464 PARAMETER Experiment Name: At_Germinating_Seeds_cDNA_P Parameter: Age (day) Value: 4 vs. 0
  misc_feature: MA Experiment 108464 PARAMETER Experiment Name: At_Germinating_Seeds_cDNA_P Parameter: Tissue Value: Germinating Seeds
  misc_feature: MA Experiment ID: 108595 Result: Down-regulated in Transcription
  misc_feature: MA Experiment 108595 PARAMETER Experiment Name: At_Ler-pi_Ovule_cDNA_P Parameter: Plant Line Value: null
  misc_feature: MA Experiment ID: 20000087 Result: Down-regulated in Transcription
  misc_feature: MA Experiment 20000087 PARAMETER Experiment Name: At_100uM_ABA_Mutants_cDNA_P Parameter: Plant Line Value: WS
  misc_feature: MA Experiment 20000087 PARAMETER Experiment Name: At_100uM_ABA_Mutants_cDNA_P Parameter: Timepoint (hr) Value: 6
  misc_feature: MA Experiment 20000087 PARAMETER Experiment Name: At_100uM_ABA_Mutants_cDNA_P Parameter: Tissue Value: Aerial
  misc_feature: MA Experiment 20000087 PARAMETER Experiment Name: At_100uM_ABA_Mutants_cDNA_P Parameter: Treatment Value: 100uM ABA vs. No Treatment
  misc_feature: MA Experiment ID: 20000090 Result: Down-regulated in Transcription
  misc_feature: MA Experiment ID: 20000224 Result: Down-regulated in Transcription
  misc_feature: MA Experiment ID: 20000794 Result: Up-regulated in Transcription
  misc_feature: MA Experiment 20000794 PARAMETER Experiment Name: At_Petals_P Parameter: Age (day) Value: 23-25 days
  misc_feature: MA Experiment 20000794 PARAMETER Experiment Name: At_Petals_P Parameter: Plant Line Value: WS
  misc_feature: MA Experiment 20000794 PARAMETER Experiment Name: At_Petals_P Parameter: Tissue Value: Petals vs. Whole plant
gagatcttggtgtcctgtcttggagatgaagaggggaatgctaaggggaatgggtttcttcttcttgattctgattttaacatcaagaataggtgggagaaaccaggacatagtcctttgtatgggtatgatttttggtaccaacctcggcacaagaccatgatcagtacatcttggggagcacctaaagccttttcgaaaggtttcaatcttcagcatgttgctgatggcttgtatggaagtcatctacatgtttatagttggccaggaggtgaaatgaaacaattaattgaccttggaccgactggtctcttacctttggagattagattcttgcatgatccgtctaaagatacagggtttgttgggagtgccatgtcaagtaatatgataagatttttcaagaacagtgatgaaacatggagccatgaggtggttatatcagttaaacctctgaaagtagaaaactggatacttccagaaatgccggggcttatcaccgacttcttgatctccctcgatgaccgattcatttactttgtgaactggctccatggagacattcgtcagtacaacatagaggaccctaaaacccctgtcttaacaggacaaatttgggttggaggattactacaaaagggcagtcctgttaaggcggttggagaagacggcaacactttccaattcgaggttcctcagatcaaggggaactctctacgaggtggacctcaaatgattcagctgagcctcgatgggaaaagattgtatgcaacaaactcgctgtttagcgcatgggatcgtcagttttatcctgaaatcatggagaaaggctcacacataattcagattgatgttgatacagaaaaaggtggtctcaccataaaccctgatttctttgtggactttggtgatgaaccagacggtccttcactagcccacgagatgagatatccaggtggagactgcacttccgatatctggatttgaatttggctttgtttagtgtgtgttttgtgttaagtttaaattgagttttattatttgttgtgtgtttagtagagttgaataaaaagggagtaagatgacccagacaattaacacttgtttgtacattttgactcctatgtgtcttatgtaataaaactttctacaattccactt

SEQ ID NO: 23021 - protein, 328 aa, Arabidopsis thaliana
  peptide (1)..(328): Ceres Seq. ID no. 12339843
  misc_feature (1)..(328): Pfam Name: 56kDa selenium binding protein (SBP56) Pfam Description: 56kDa selenium binding protein (SBP56)
  misc_feature (1)..(328): Homolog of NCBI NO: 13605825 NR Description: AT4g14040/dl3061c [Arabidopsis thaliana]
  misc_feature (1)..(328): Homolog of NCBI NO: 15485232 NR Description: selenium binding protein [Arabidopsis thaliana]
  misc_feature (1)..(328): Homolog of NCBI NO: 15485716 NR Description: selenium binding protein [Lotus japonicus]
  misc_feature (1)..(328): Homolog of NCBI NO: 15485720 NR Description: selenium binding protein [Medicago sativa]
  misc_feature (1)..(328): Homolog of NCBI NO: 22530900 NR Description: selenium-binding protein-like protein
  misc_feature (1)..(328): Homolog of NCBI NO: 15236386 NR Description: selenium-binding protein like
  misc_feature (1)..(328): Homolog of NCBI NO: 25348077 NR Description: selenium-binding protein like [imported] -
  misc_feature (1)..(328): Homolog of NCBI NO: 15229520 NR Description: selenium binding protein, putative; protein id:
  misc_feature (1)..(328): Homolog of NCBI NO: 20340239 NR Description: putative selenium-binding protein [Thellungiella
  misc_feature (1)..(328): Homolog of NCBI NO: 15236385 NR Description: selenium-binding protein like
EILVSCLGDEEGNAKGNGFLLLDSDFNIKNRWEKPGHSPLYGYDFWYQPRHKTMISTSWGAPKAFSKGFNLQHVADGLYGSHLHVYSWPGGEMKQLIDLGPTGLLPLEIRFLHDPSKDTGFVGSAMSSNMIRFFKNSDETWSHEVVISVKPLKVENWILPEMPGLITDFLISLDDRFIYFVNWLHGDIRQYNIEDPKTPVLTGQIWVGGLLQKGSPVKAVGEDGNTFQFEVPQIKGNSLRGGPQMIQLSLDGKRLYATNSLFSAWDRQFYPEIMEKGSHIIQIDVDTEKGGLTINPDFFVDFGDEPDGPSLAHEMRYPGGDCTSDIWI

SEQ ID NO: 23022 - protein, 275 aa, Arabidopsis thaliana
  peptide (1)..(275): Ceres Seq. ID no. 12339844
  misc_feature (1)..(275): Pfam Name: 56kDa selenium binding protein (SBP56) Pfam Description: 56kDa selenium binding protein (SBP56)
  misc_feature (1)..(275): Homolog of NCBI NO: 15485716 NR Description: selenium binding protein [Lotus japonicus]
  misc_feature (1)..(275): Homolog of NCBI NO: 15229520 NR Description: selenium binding protein, putative; protein id:
  misc_feature (1)..(275): Homolog of NCBI NO: 15485720 NR Description: selenium binding protein [Medicago sativa]
  misc_feature (1)..(275): Homolog of NCBI NO: 25348077 NR Description: selenium-binding protein like [imported] -
  misc_feature (1)..(275): Homolog of NCBI NO: 22530900 NR Description: selenium-binding protein-like protein
  misc_feature (1)..(275): Homolog of NCBI NO: 15236386 NR Description: selenium-binding protein like
  misc_feature (1)..(275): Homolog of NCBI NO: 13605825 NR Description: AT4g14040/dl3061c [Arabidopsis thaliana]
  misc_feature (1)..(275): Homolog of NCBI NO: 15485232 NR Description: selenium binding protein [Arabidopsis thaliana]
  misc_feature (1)..(275): Homolog of NCBI NO: 20340239 NR Description: putative selenium-binding protein [Thellungiella
  misc_feature (1)..(275): Homolog of NCBI NO: 15236385 NR Description: selenium-binding protein like
MISTSWGAPKAFSKGFNLQHVADGLYGSHLHVYSWPGGEMKQLIDLGPTGLLPLEIRFLHDPSKDTGFVGSAMSSNMIRFFKNSDETWSHEVVISVKPLKVENWILPEMPGLITDFLISLDDRFIYFVNWLHGDIRQYNIEDPKTPVLTGQIWVGGLLQKGSPVKAVGEDGNTFQFEVPQIKGNSLRGGPQMIQLSLDGKRLYATNSLFSAWDRQFYPEIMEKGSHIIQIDVDTEKGGLTINPDFFVDFGDEPDGPSLAHEMRYPGGDCTSDIWI

SEQ ID NO: 23023 - protein, 236 aa, Arabidopsis thaliana
  peptide (1)..(236): Ceres Seq. ID no. 12339845
  misc_feature (1)..(236): Pfam Name: 56kDa selenium binding protein (SBP56) Pfam Description: 56kDa selenium binding protein (SBP56)
  misc_feature (1)..(236): Homolog of NCBI NO: 15485716 NR Description: selenium binding protein [Lotus japonicus]
  misc_feature (1)..(236): Homolog of NCBI NO: 15229520 NR Description: selenium binding protein, putative; protein id:
  misc_feature (1)..(236): Homolog of NCBI NO: 15485720 NR Description: selenium binding protein [Medicago sativa]
  misc_feature (1)..(236): Homolog of NCBI NO: 25348077 NR Description: selenium-binding protein like [imported] -
  misc_feature (1)..(236): Homolog of NCBI NO: 22530900 NR Description: selenium-binding protein-like protein
  misc_feature (1)..(236): Homolog of NCBI NO: 15236386 NR Description: selenium-binding protein like
  misc_feature (1)..(236): Homolog of NCBI NO: 13605825 NR Description: AT4g14040/dl3061c [Arabidopsis thaliana]
  misc_feature (1)..(236): Homolog of NCBI NO: 15485232 NR Description: selenium binding protein [Arabidopsis thaliana]
  misc_feature (1)..(236): Homolog of NCBI NO: 20340239 NR Description: putative selenium-binding protein [Thellungiella
  misc_feature (1)..(236): Homolog of NCBI NO: 15236385 NR Description: selenium-binding protein like
MKQLIDLGPTGLLPLEIRFLHDPSKDTGFVGSAMSSNMIRFFKNSDETWSHEVVISVKPLKVENWILPEMPGLITDFLISLDDRFIYFVNWLHGDIRQYNIEDPKTPVLTGQIWVGGLLQKGSPVKAVGEDGNTFQFEVPQIKGNSLRGGPQMIQLSLDGKRLYATNSLFSAWDRQFYPEIMEKGSHIIQIDVDTEKGGLTINPDFFVDFGDEPDGPSLAHEMRYPGGDCTSDIWI

SEQ ID NO: 23024 - DNA, 1968 bp, Arabidopsis thaliana
  misc_feature (1)..(1968): Ceres Seq. ID no. 12357610
  misc_feature: MA Experiment ID: 108461 Result: Down-regulated in Transcription
  misc_feature: MA Experiment 108461 PARAMETER Experiment Name: At_Germinating_Seeds_cDNA_P Parameter: Age (day) Value: 1 vs. 0
  misc_feature: MA Experiment 108461 PARAMETER Experiment Name: At_Germinating_Seeds_cDNA_P Parameter: Tissue Value: Germinating Seeds
  misc_feature: MA Experiment ID: 108463 Result: Up-regulated in Transcription
  misc_feature: MA Experiment 108463 PARAMETER Experiment Name: At_Germinating_Seeds_cDNA_P Parameter: Age (day) Value: 3 vs. 0
  misc_feature: MA Experiment 108463 PARAMETER Experiment Name: At_Germinating_Seeds_cDNA_P Parameter: Tissue Value: Germinating Seeds
  misc_feature: MA Experiment ID: 108501 Result: Down-regulated in Transcription
  misc_feature: MA Experiment 108501 PARAMETER Experiment Name: At_ap2_floral_buds_cDNA_P Parameter: Plant Line Value: ap2 (Ler.)
  misc_feature: MA Experiment 108501 PARAMETER Experiment Name: At_ap2_floral_buds_cDNA_P Parameter: Tissue Value: Closed Flower
  misc_feature: MA Experiment ID: 108573 Result: Up-regulated in Transcription
  misc_feature: MA Experiment 108573 PARAMETER Experiment Name: At_Drought_cDNA_P Parameter: Timepoint (hr) Value: 6
  misc_feature: MA Experiment 108573 PARAMETER Experiment Name: At_Drought_cDNA_P Parameter: Tissue Value: Aerial
  misc_feature: MA Experiment 108573 PARAMETER Experiment Name: At_Drought_cDNA_P Parameter: Treatment Value: Drought vs. No Drought
  misc_feature: MA Experiment ID: 108577 Result: Down-regulated in Transcription
  misc_feature: MA Experiment 108577 PARAMETER Experiment Name: At_42deg_Heat_cDNA_P Parameter: Temperature (deg C) Value: 42 vs. 22
  misc_feature: MA Experiment 108577 PARAMETER Experiment Name: At_42deg_Heat_cDNA_P Parameter: Timepoint (hr) Value: 6
  misc_feature: MA Experiment 108577 PARAMETER Experiment Name: At_42deg_Heat_cDNA_P Parameter: Tissue Value: Aerial
  misc_feature: MA Experiment ID: 108585 Result: Up-regulated in Transcription
  misc_feature: MA Experiment 108585 PARAMETER Experiment Name: At_5mM_NaNP_cDNA_P Parameter: Timepoint (hr) Value: 6
  misc_feature: MA Experiment 108585 PARAMETER Experiment Name: At_5mM_NaNP_cDNA_P Parameter: Tissue Value: Aerial
  misc_feature: MA Experiment 108585 PARAMETER Experiment Name: At_5mM_NaNP_cDNA_P Parameter: Treatment Value: null
  misc_feature: MA Experiment ID: 20000089 Result: Down-regulated in Transcription
  misc_feature: MA Experiment ID: 20000179 Result: Down-regulated in Transcription
  misc_feature: MA Experiment 20000179 PARAMETER Experiment Name: At_Germinating_Seeds_P Parameter: Age (hr) Value: 6 vs. 0
  misc_feature: MA Experiment 20000179 PARAMETER Experiment Name: At_Germinating_Seeds_P Parameter: Tissue Value: Germinating Seeds
  misc_feature: MA Experiment ID: 20000180 Result: Down-regulated in Transcription
  misc_feature: MA Experiment 20000180 PARAMETER Experiment Name: At_Germinating_Seeds_P Parameter: Age (hr) Value: 24 vs. 0
  misc_feature: MA Experiment 20000180 PARAMETER Experiment Name: At_Germinating_Seeds_P Parameter: Tissue Value: Germinating Seeds
  misc_feature: MA Experiment ID: 20000185 Result: Down-regulated in Transcription
  misc_feature: MA Experiment 20000185 PARAMETER Experiment Name: At_Roots__P Parameter: Age (day) Value: 7 vs. 21
  misc_feature: MA Experiment 20000185 PARAMETER Experiment Name: At_Roots__P Parameter: Organism Value: A. thaliana
  misc_feature: MA Experiment 20000185 PARAMETER Experiment Name: At_Roots__P Parameter: Tissue Value: Roots vs. Whole Plant
  misc_feature: MA Experiment ID: 20000234 Result: Down-regulated in Transcription
  misc_feature: MA Experiment 20000234 PARAMETER Experiment Name: At_Siliques_P Parameter: Age (day) Value: 21
  misc_feature: MA Experiment 20000234 PARAMETER Experiment Name: At_Siliques_P Parameter: Organism Value: A. thaliana
  misc_feature: MA Experiment 20000234 PARAMETER Experiment Name: At_Siliques_P Parameter: Plant Line Value: WS
  misc_feature: MA Experiment 20000234 PARAMETER Experiment Name: At_Siliques_P Parameter: Tissue Value: Less Than 5mm Siliques vs. Whole Plant
  misc_feature: MA Experiment ID: 20000235 Result: Down-regulated in Transcription
  misc_feature: MA Experiment 20000235 PARAMETER Experiment Name: At_Siliques_P Parameter: Age (day) Value: 21
  misc_feature: MA Experiment 20000235 PARAMETER Experiment Name: At_Siliques_P Parameter: Organism Value: A. thaliana
  misc_feature: MA Experiment 20000235 PARAMETER Experiment Name: At_Siliques_P Parameter: Plant Line Value: WS
  misc_feature: MA Experiment 20000235 PARAMETER Experiment Name: At_Siliques_P Parameter: Tissue Value: 5-10mm Siliques vs. Whole Plant
  misc_feature: MA Experiment ID: 20000264 Result: Down-regulated in Transcription
  misc_feature: MA Experiment 20000264 PARAMETER Experiment Name: At_Open_Flower_P Parameter: Age (day) Value: 21
  misc_feature: MA Experiment 20000264 PARAMETER Experiment Name: At_Open_Flower_P Parameter: Plant Line Value: WS
  misc_feature: MA Experiment 20000264 PARAMETER Experiment Name: At_Open_Flower_P Parameter: Tissue Value: Open Flower vs. Whole Plant
  misc_feature: MA Experiment ID: 20000268 Result: Down-regulated in Transcription
  misc_feature: MA Experiment 20000268 PARAMETER Experiment Name: At_100mM_NaCl__P Parameter: Age (day) Value: 14
  misc_feature: MA Experiment 20000268 PARAMETER Experiment Name: At_100mM_NaCl__P Parameter: Organism Value: A. thaliana
  misc_feature: MA Experiment 20000268 PARAMETER Experiment Name: At_100mM_NaCl__P Parameter: Plant Line Value: WS
  misc_feature: MA Experiment 20000268 PARAMETER Experiment Name: At_100mM_NaCl__P Parameter: Timepoint (hr) Value: 6
  misc_feature: MA Experiment 20000268 PARAMETER Experiment Name: At_100mM_NaCl__P Parameter: Tissue Value: Whole Plant
  misc_feature: MA Experiment 20000268 PARAMETER Experiment Name: At_100mM_NaCl__P Parameter: Treatment Value: 100mM NaCl vs. No Treatment
  misc_feature: MA Experiment ID: 20000286 Result: Down-regulated in Transcription
  misc_feature: MA Experiment 20000286 PARAMETER Experiment Name: At_Open_Flower_P Parameter: Age (day) Value: 21
  misc_feature: MA Experiment 20000286 PARAMETER Experiment Name: At_Open_Flower_P Parameter: Plant Line Value: WS
  misc_feature: MA Experiment 20000286 PARAMETER Experiment Name: At_Open_Flower_P Parameter: Tissue Value: Half Open vs. Whole Plant
  misc_feature: MA Experiment ID: 20000437 Result: Down-regulated in Transcription
  misc_feature: MA Experiment 20000437 PARAMETER Experiment Name: At_Drought_P Parameter: Age (day) Value: 8
  misc_feature: MA Experiment 20000437 PARAMETER Experiment Name: At_Drought_P Parameter: Organism Value: A. thaliana
  misc_feature: MA Experiment 20000437 PARAMETER Experiment Name: At_Drought_P Parameter: Plant Line Value: WS
  misc_feature: MA Experiment 20000437 PARAMETER Experiment Name: At_Drought_P Parameter: Timepoint (hr) Value: 24
  misc_feature: MA Experiment 20000437 PARAMETER Experiment Name: At_Drought_P Parameter: Tissue Value: Whole Plant
  misc_feature: MA Experiment 20000437 PARAMETER Experiment Name: At_Drought_P Parameter: Treatment Value: Drought vs. No Drought
  misc_feature: MA Experiment ID: 20000438 Result: Down-regulated in Transcription
  misc_feature: MA Experiment 20000438 PARAMETER Experiment Name: At_Shoots__P Parameter: Age (day) Value: 14
  misc_feature: MA Experiment 20000438 PARAMETER Experiment Name: At_Shoots__P Parameter: Tissue Value: Shoots vs. Whole Plant
  misc_feature: MA Experiment ID: 20000441 Result: Up-regulated in Transcription
  misc_feature: MA Experiment 20000441 PARAMETER Experiment Name: At_1uM_BR-BRZ__P Parameter: Tissue Value: Shoot Apices
  misc_feature: MA Experiment 20000441 PARAMETER Experiment Name: At_1uM_BR-BRZ__P Parameter: Treatment Value: 1uM BR vs. No Treatment
  misc_feature: MA Experiment ID: 20000443 Result: Up-regulated in Transcription
  misc_feature: MA Experiment 20000443 PARAMETER Experiment Name: At_1uM_BR-BRZ__P Parameter: Tissue Value: Shoot Apices
  misc_feature: MA Experiment 20000443 PARAMETER Experiment Name: At_1uM_BR-BRZ__P Parameter: Treatment Value: 1uM BRZ vs. No Treatment
  misc_feature: MA Experiment ID: 20000452 Result: Up-regulated in Transcription
  misc_feature: MA Experiment 20000452 PARAMETER Experiment Name: At_CS6879_Shoots-Roots_P Parameter: Age (day) Value: 14
  misc_feature: MA Experiment 20000452 PARAMETER Experiment Name: At_CS6879_Shoots-Roots_P Parameter: Organism Value: A. thaliana
  misc_feature: MA Experiment 20000452 PARAMETER Experiment Name: At_CS6879_Shoots-Roots_P Parameter: Plant Line Value: CS6879 vs. WS
  misc_feature: MA Experiment 20000452 PARAMETER Experiment Name: At_CS6879_Shoots-Roots_P Parameter: Tissue Value: Shoots
  misc_feature: MA Experiment ID: 20000460 Result: Up-regulated in Transcription
  misc_feature: MA Experiment 20000460 PARAMETER Experiment Name: At_10percent_PEG_P Parameter: Age (day) Value: 12
  misc_feature: MA Experiment 20000460 PARAMETER Experiment Name: At_10percent_PEG_P Parameter: Organism Value: A. thaliana
  misc_feature: MA Experiment 20000460 PARAMETER Experiment Name: At_10percent_PEG_P Parameter: Plant Line Value: WS
  misc_feature: MA Experiment 20000460 PARAMETER Experiment Name: At_10percent_PEG_P Parameter: Timepoint (day) Value: 12
  misc_feature: MA Experiment 20000460 PARAMETER Experiment Name: At_10percent_PEG_P Parameter: Tissue Value: Whole Plant
  misc_feature: MA Experiment 20000460 PARAMETER Experiment Name: At_10percent_PEG_P Parameter: Treatment Value: 10percent PEG vs. No Treatment
  misc_feature: MA Experiment ID: 20000573 Result: Down-regulated in Transcription
  misc_feature: MA Experiment 20000573 PARAMETER Experiment Name: At_100uM_ABA_Mutants__P Parameter: Organism Value: A. thaliana
  misc_feature: MA Experiment 20000573 PARAMETER Experiment Name: At_100uM_ABA_Mutants__P Parameter: Plant Line Value: CS22 vs. Ler wt
  misc_feature: MA Experiment 20000573 PARAMETER Experiment Name: At_100uM_ABA_Mutants__P Parameter: Timepoint (hr) Value: N/A
  misc_feature: MA Experiment 20000573 PARAMETER Experiment Name: At_100uM_ABA_Mutants__P Parameter: Tissue Value: Whole Plant
  misc_feature: MA Experiment 20000573 PARAMETER Experiment Name: At_100uM_ABA_Mutants__P Parameter: Treatment Value: None
  misc_feature: MA Experiment ID: 20000574 Result: Down-regulated in Transcription
  misc_feature: MA Experiment 20000574 PARAMETER Experiment Name: At_100uM_ABA_Mutants__P Parameter: Organism Value: A. thaliana
  misc_feature: MA Experiment 20000574 PARAMETER Experiment Name: At_100uM_ABA_Mutants__P Parameter: Plant Line Value: CS23 vs. Ler wt
  misc_feature: MA Experiment 20000574 PARAMETER Experiment Name: At_100uM_ABA_Mutants__P Parameter: Timepoint (hr) Value: N/A
  misc_feature: MA Experiment 20000574 PARAMETER Experiment Name: At_100uM_ABA_Mutants__P Parameter: Tissue Value: Whole Plant
  misc_feature: MA Experiment 20000574 PARAMETER Experiment Name: At_100uM_ABA_Mutants__P Parameter: Treatment Value: None
  misc_feature: MA Experiment ID: 20000794 Result: Down-regulated in Transcription
  misc_feature: MA Experiment 20000794 PARAMETER Experiment Name: At_Petals_P Parameter: Age (day) Value: 23-25 days
  misc_feature: MA Experiment 20000794 PARAMETER Experiment Name: At_Petals_P Parameter: Plant Line Value: WS
  misc_feature: MA Experiment 20000794 PARAMETER Experiment Name: At_Petals_P Parameter: Tissue Value: Petals vs. Whole plant
  misc_feature: MA Experiment ID: 20001248 Result: Up-regulated in Transcription
  misc_feature: MA Experiment 20001248 PARAMETER Experiment Name: At_Far-red-induction_P Parameter: Age (day) Value: 7
  misc_feature: MA Experiment 20001248 PARAMETER Experiment Name: At_Far-red-induction_P Parameter: Light Value: Far-red vs. White
  misc_feature: MA Experiment 20001248 PARAMETER Experiment Name: At_Far-red-induction_P Parameter: Organism Value: A. thaliana
  misc_feature: MA Experiment 20001248 PARAMETER Experiment Name: At_Far-red-induction_P Parameter: Plant Line Value: Columbia
  misc_feature: MA Experiment 20001248 PARAMETER Experiment Name: At_Far-red-induction_P Parameter: Timepoint (hr) Value: 4
  misc_feature: MA Experiment 20001248 PARAMETER Experiment Name: At_Far-red-induction_P Parameter: Tissue Value: Whole Plant
  misc_feature: MA Experiment ID: 20001451 Result: Up-regulated in Transcription
  misc_feature: MA Experiment 20001451 PARAMETER Experiment Name: At_Far-red-induction_P Parameter: Age (day) Value: 7
  misc_feature: MA Experiment 20001451 PARAMETER Experiment Name: At_Far-red-induction_P Parameter: Light Value: Far-red vs. White
  misc_feature: MA Experiment 20001451 PARAMETER Experiment Name: At_Far-red-induction_P Parameter: Organism Value: A. thaliana
  misc_feature: MA Experiment 20001451 PARAMETER Experiment Name: At_Far-red-induction_P Parameter: Plant Line Value: Columbia
  misc_feature: MA Experiment 20001451 PARAMETER Experiment Name: At_Far-red-induction_P Parameter: Timepoint (hr) Value: 24
  misc_feature: MA Experiment 20001451 PARAMETER Experiment Name: At_Far-red-induction_P Parameter: Tissue Value: Whole Plant
atgaaacttctcactactctctttcatttcctcttttcgttgacttactaaagtactcttgtttcaatcttcattctagagagattctgtttcatggatgctattttgccagtacccgttgatgggttcagattcgacaccggttctggatcttgttgcaaaccgaggaacaatcttgaatctgggacgaccaatcgtttcacttgtttcaacgaatctgaatctcagagcaacccttctccgaccgagtctaaggtatgttcagattaccttcctgtctttaagtacatcaatgacatgttgatggaagaagatcttgaaggtcagtcttgtatgttggaagacagtttggctttacaagccgcagagagatctttcttcgaagtgcttcaagatcaaactccaatctcgggtgatctagaggatggttctcttggaaacttcagttctataacgagtttgcatcaacctgaagtttcagaggagtcaaccagaaggtatcgacatagggatgatgatgaagatgatgatcttgagagtggaaggaaatcgaagctccctgcgatttctacggtggatgagttagcagagaagtttgaggaagtgttgttggtatgtcaaaagaatgatcagggagaagcaacagagaagaaaacaagacacgtaaaaggctcatcgaatcgatacaagcagcaaaagtcagatcagccagtagatatgaggaatcttttgatgcaatgcgcgcaagctgtggcgagttttgaccagagaagagcttttgagaaactgaaggagataagagaacactcttctcgccacggtgatgcgactcaaagacttggttatcactttgctgaggcgcttgaagctcgtattacaggaaccatgactacaccaatatctgctacttctagcagaacatcaatggtggacattttgaaggcgtacaagggatttgttcaggcttgccccaccttaataatgtgttatttcactgcaaacagaacaatcaatgagcttgcttccaaagcaaccacacttcacatcattgattttgggattctctatggatttcaatggccttgtctgatacaagctttgtcaaaacgtgacatcggaccaccactgctccgtgtgactggtatcgagcttcctcagtcaggtttccgtccatcagagcgggtagaagagaccgggcgaagactaaagaggttctgtgacaagttcaatgtcccgtttgagtacagtttcatagccaagaattgggagaacataactcttgatgatctggtgatcaatagtggcgagacaacagttgtcaactgcatcctccggctacaatatacacctgatgaaaccgtgtccctcaactcaccgagagacacggctctgaaactattcagagacatcaaccctgacctctttgtgtttgcagagattaacgggacttacaattcacccttcttcctaacaaggttcagagaagctctcttccattgctcgtcactctttgacatgtatgagaccacattatcagaagacgacaattgcaggacactggtggagagggaactaatcataagagatgcaatgagtgtgatagcctgtgaagggtctgagcggtttgcaaggccagagacctacaagcaatggcaggttaggattctaagagcaggatttagaccagcgaaactaagcaaacagatagtaaaggacgggaaagagatagtgaaagaacgttaccacaaagattttgtgatcgacaatgataaccactggatgtttcagggctggaaaggaagagtcctttatgctgtttcttgctggaaacctgctaagaagtaataaaacagttctgtaatcatttgcataattttgctagctttccatttctttgtttttggtttcaaagtgttgtagaaactgtttgctctcatatatattgaatgagtctctctctttctctct

SEQ ID NO: 23025 - protein, 583 aa, Arabidopsis thaliana
  peptide (1)..(583): Ceres Seq. ID no. 12357611
  misc_feature (183)..(488): Pfam Name: GRAS family transcription factor Pfam Description: GRAS family transcription factor
  misc_feature (49)..(134): Homolog of NCBI NO: 15222432 NR Description: transcription factor scarecrow-like 14, putative
  misc_feature (133)..(581): Homolog of NCBI NO: 15222432 NR Description: transcription factor scarecrow-like 14, putative
  misc_feature (187)..(577): Homolog of NCBI NO: 8778540 NR Description: F22G5.9 [Arabidopsis thaliana]
  misc_feature (10)..(106): Homolog of NCBI NO: 8778540 NR Description: F22G5.9 [Arabidopsis thaliana]
  misc_feature (133)..(581): Homolog of NCBI NO: 8778540 NR Description: F22G5.9 [Arabidopsis thaliana]
  misc_feature (10)..(106): Homolog of NCBI NO: 15222433 NR Description: transcription factor scarecrow-like 14, putative
  misc_feature (187)..(581): Homolog of NCBI NO: 15222433 NR Description: transcription factor scarecrow-like 14, putative
  misc_feature (6)..(153): Homolog of NCBI NO: 15227022 NR Description: putative SCARECROW gene regulator; protein id:
  misc_feature (128)..(580): Homolog of NCBI NO: 15227022 NR Description: putative SCARECROW gene regulator; protein id:
  misc_feature (101)..(583): Homolog of NCBI NO: 15238422 NR Description: scarecrow-like 11 - like
MDAILPVPVDGFRFDTGSGSCCKPRNNLESGTTNRFTCFNESESQSNPSPTESKVCSDYLPVFKYINDMLMEEDLEGQSCMLEDSLALQAAERSFFEVLQDQTPISGDLEDGSLGNFSSITSLHQPEVSEESTRRYRHRDDDEDDDLESGRKSKLPAISTVDELAEKFEEVLLVCQKNDQGEATEKKTRHVKGSSNRYKQQKSDQPVDMRNLLMQCAQAVASFDQRRAFEKLKEIREHSSRHGDATQRLGYHFAEALEARITGTMTTPISATSSRTSMVDILKAYKGFVQACPTLIMCYFTANRTINELASKATTLHIIDFGILYGFQWPCLIQALSKRDIGPPLLRVTGIELPQSGFRPSERVEETGRRLKRFCDKFNVPFEYSFIAKNWENITLDDLVINSGETTVVNCILRLQYTPDETVSLNSPRDTALKLFRDINPDLFVFAEINGTYNSPFFLTRFREALFHCSSLFDMYETTLSEDDNCRTLVERELIIRDAMSVIACEGSERFARPETYKQWQVRILRAGFRPAKLSKQIVKDGKEIVKERYHKDFVIDNDNHWMFQGWKGRVLYAVSCWKPAKK

SEQ ID NO: 23026 - protein, 515 aa, Arabidopsis thaliana
  peptide (1)..(515): Ceres Seq. ID no. 12357612
  misc_feature (115)..(420): Pfam Name: GRAS family transcription factor Pfam Description: GRAS family transcription factor
  misc_feature (1)..(66): Homolog of NCBI NO: 15222432 NR Description: transcription factor scarecrow-like 14, putative
  misc_feature (65)..(513): Homolog of NCBI NO: 15222432 NR Description: transcription factor scarecrow-like 14, putative
  misc_feature (119)..(509): Homolog of NCBI NO: 8778540 NR Description: F22G5.9 [Arabidopsis thaliana]
  misc_feature (1)..(38): Homolog of NCBI NO: 8778540 NR Description: F22G5.9 [Arabidopsis thaliana]
  misc_feature (65)..(513): Homolog of NCBI NO: 8778540 NR Description: F22G5.9 [Arabidopsis thaliana]
  misc_feature (1)..(38): Homolog of NCBI NO: 15222433 NR Description: transcription factor scarecrow-like 14, putative
  misc_feature (119)..(513): Homolog of NCBI NO: 15222433 NR Description: transcription factor scarecrow-like 14, putative
  misc_feature (1)..(85): Homolog of NCBI NO: 15227022 NR Description: putative SCARECROW gene regulator; protein id:
  misc_feature (60)..(512): Homolog of NCBI NO: 15227022 NR Description: putative SCARECROW gene regulator; protein id:
  misc_feature (33)..(515): Homolog of NCBI NO: 15238422 NR Description: scarecrow-like 11 - like
MLMEEDLEGQSCMLEDSLALQAAERSFFEVLQDQTPISGDLEDGSLGNFSSITSLHQPEVSEESTRRYRHRDDDEDDDLESGRKSKLPAISTVDELAEKFEEVLLVCQKNDQGEATEKKTRHVKGSSNRYKQQKSDQPVDMRNLLMQCAQAVASFDQRRAFEKLKEIREHSSRHGDATQRLGYHFAEALEARITGTMTTPISATSSRTSMVDILKAYKGFVQACPTLIMCYFTANRTINELASKATTLHIIDFGILYGFQWPCLIQALSKRDIGPPLLRVTGIELPQSGFRPSERVEETGRRLKRFCDKFNVPFEYSFIAKNWENITLDDLVINSGETTVVNCILRLQYTPDETVSLNSPRDTALKLFRDINPDLFVFAEINGTYNSPFFLTRFREALFHCSSLFDMYETTLSEDDNCRTLVERELIIRDAMSVIACEGSERFARPETYKQWQVRILRAGFRPAKLSKQIVKDGKEIVKERYHKDFVIDNDNHWMFQGWKGRVLYAVSCWKPAKK

SEQ ID NO: 23027 - protein, 513 aa, Arabidopsis thaliana
  peptide (1)..(513): Ceres Seq. ID no. 12357613
  misc_feature (113)..(418): Pfam Name: GRAS family transcription factor Pfam Description: GRAS family transcription factor
  misc_feature (1)..(64): Homolog of NCBI NO: 15222432 NR Description: transcription factor scarecrow-like 14, putative
  misc_feature (63)..(511): Homolog of NCBI NO: 15222432 NR Description: transcription factor scarecrow-like 14, putative
  misc_feature (117)..(507): Homolog of NCBI NO: 8778540 NR Description: F22G5.9 [Arabidopsis thaliana]
  misc_feature (1)..(36): Homolog of NCBI NO: 8778540 NR Description: F22G5.9 [Arabidopsis thaliana]
  misc_feature (63)..(511): Homolog of NCBI NO: 8778540 NR Description: F22G5.9 [Arabidopsis thaliana]
  misc_feature (1)..(36): Homolog of NCBI NO: 15222433 NR Description: transcription factor scarecrow-like 14, putative
  misc_feature (117)..(511): Homolog of NCBI NO: 15222433 NR Description: transcription factor scarecrow-like 14, putative
  misc_feature (1)..(83): Homolog of NCBI NO: 15227022 NR Description: putative SCARECROW gene regulator; protein id:
  misc_feature (58)..(510): Homolog of NCBI NO: 15227022 NR Description: putative SCARECROW gene regulator; protein id:
  misc_feature (31)..(513): Homolog of NCBI NO: 15238422 NR Description: scarecrow-like 11 - like
MEEDLEGQSCMLEDSLALQAAERSFFEVLQDQTPISGDLEDGSLGNFSSITSLHQPEVSEESTRRYRHRDDDEDDDLESGRKSKLPAISTVDELAEKFEEVLLVCQKNDQGEATEKKTRHVKGSSNRYKQQKSDQPVDMRNLLMQCAQAVASFDQRRAFEKLKEIREHSSRHGDATQRLGYHFAEALEARITGTMTTPISATSSRTSMVDILKAYKGFVQACPTLIMCYFTANRTINELASKATTLHIIDFGILYGFQWPCLIQALSKRDIGPPLLRVTGIELPQSGFRPSERVEETGRRLKRFCDKFNVPFEYSFIAKNWENITLDDLVINSGETTVVNCILRLQYTPDETVSLNSPRDTALKLFRDINPDLFVFAEINGTYNSPFFLTRFREALFHCSSLFDMYETTLSEDDNCRTLVERELIIRDAMSVIACEGSERFARPETYKQWQVRILRAGFRPAKLSKQIVKDGKEIVKERYHKDFVIDNDNHWMFQGWKGRVLYAVSCWKPAKK

SEQ ID NO: 23028 - DNA, 1134 bp, Arabidopsis thaliana
  misc_feature (1)..(1134): Ceres Seq. ID no. 13493869
  misc_feature: MA Experiment ID: 108434 Result: Down-regulated in Transcription
  misc_feature: MA Experiment 108434 PARAMETER Experiment Name: At_Root_Tips_cDNA_P Parameter: Tissue Value: Root Tips
  misc_feature: MA Experiment ID: 108462 Result: Down-regulated in Transcription
  misc_feature: MA Experiment 108462 PARAMETER Experiment Name: At_Germinating_Seeds_cDNA_P Parameter: Age (day) Value: 2 vs. 0
  misc_feature: MA Experiment 108462 PARAMETER Experiment Name: At_Germinating_Seeds_cDNA_P Parameter: Tissue Value: Germinating Seeds
  misc_feature: MA Experiment ID: 108473 Result: Up-regulated in Transcription
  misc_feature: MA Experiment 108473 PARAMETER Experiment Name: At_Drought_Flowers_cDNA_P Parameter: Timepoint (hr) Value: 7 d
  misc_feature: MA Experiment 108473 PARAMETER Experiment Name: At_Drought_Flowers_cDNA_P Parameter: Tissue Value: Flower
  misc_feature: MA Experiment 108473 PARAMETER Experiment Name: At_Drought_Flowers_cDNA_P Parameter: Treatment Value: Drought vs. No Drought
  misc_feature: MA Experiment ID: 108501 Result: Down-regulated in Transcription
  misc_feature: MA Experiment 108501 PARAMETER Experiment Name: At_ap2_floral_buds_cDNA_P Parameter: Plant Line Value: ap2 (Ler.)
  misc_feature: MA Experiment 108501 PARAMETER Experiment Name: At_ap2_floral_buds_cDNA_P Parameter: Tissue Value: Closed Flower
  misc_feature: MA Experiment ID: 108572 Result: Up-regulated in Transcription
  misc_feature: MA Experiment 108572 PARAMETER Experiment Name: At_Drought_cDNA_P Parameter: Timepoint (hr) Value: 1
  misc_feature: MA Experiment 108572 PARAMETER Experiment Name: At_Drought_cDNA_P Parameter: Tissue Value: Aerial
  misc_feature: MA Experiment 108572 PARAMETER Experiment Name: At_Drought_cDNA_P Parameter: Treatment Value: Drought vs. No Drought
  misc_feature: MA Experiment ID: 108573 Result: Up-regulated in Transcription
  misc_feature: MA Experiment 108573 PARAMETER Experiment Name: At_Drought_cDNA_P Parameter: Timepoint (hr) Value: 6
  misc_feature: MA Experiment 108573 PARAMETER Experiment Name: At_Drought_cDNA_P Parameter: Tissue Value: Aerial
  misc_feature: MA Experiment 108573 PARAMETER Experiment Name: At_Drought_cDNA_P Parameter: Treatment Value: Drought vs. No Drought
  misc_feature: MA Experiment ID: 108574 Result: Down-regulated in Transcription
  misc_feature: MA Experiment 108574 PARAMETER Experiment Name: At_Wounding__cDNA_P Parameter: Timepoint (hr) Value: 1
  misc_feature: MA Experiment 108574 PARAMETER Experiment Name: At_Wounding__cDNA_P Parameter: Tissue Value: Aerial
  misc_feature: MA Experiment 108574 PARAMETER Experiment Name: At_Wounding__cDNA_P Parameter: Treatment Value: Wounding vs. No Wounding
  misc_feature: MA Experiment ID: 108576 Result: Up-regulated in Transcription
  misc_feature: MA Experiment 108576 PARAMETER Experiment Name: At_42deg_Heat_cDNA_P Parameter: Temperature (deg C) Value: 42 vs. 22
  misc_feature: MA Experiment 108576 PARAMETER Experiment Name: At_42deg_Heat_cDNA_P Parameter: Timepoint (hr) Value: 1
  misc_feature: MA Experiment 108576 PARAMETER Experiment Name: At_42deg_Heat_cDNA_P Parameter: Tissue Value: Aerial
  misc_feature: MA Experiment ID: 108579 Result: Down-regulated in Transcription
  misc_feature: MA Experiment 108579 PARAMETER Experiment Name: At_4deg_Cold_cDNA_P Parameter: Temperature (deg C) Value: 4 vs. 22
  misc_feature: MA Experiment 108579 PARAMETER Experiment Name: At_4deg_Cold_cDNA_P Parameter: Timepoint (hr) Value: 6
  misc_feature: MA Experiment 108579 PARAMETER Experiment Name: At_4deg_Cold_cDNA_P Parameter: Tissue Value: Aerial
  misc_feature: MA Experiment ID: 108594 Result: Up-regulated in Transcription
  misc_feature: MA Experiment 108594 PARAMETER Experiment Name: At_Ler-rhl_Root_cDNA_P Parameter: Plant Line Value: null
  misc_feature: MA Experiment ID: 108595 Result: Down-regulated in Transcription
  misc_feature: MA Experiment 108595 PARAMETER Experiment Name: At_Ler-pi_Ovule_cDNA_P Parameter: Plant Line Value: null
  misc_feature: MA Experiment ID: 20000072 Result: Down-regulated in Transcription
  misc_feature: MA Experiment 20000072 PARAMETER Experiment Name: At_100uM_ABA_Mutants_cDNA_P Parameter: Plant Line Value: CS8105
  misc_feature: MA Experiment 20000072 PARAMETER Experiment Name: At_100uM_ABA_Mutants_cDNA_P Parameter: Timepoint (hr) Value: 6
  misc_feature: MA Experiment 20000072 PARAMETER Experiment Name: At_100uM_ABA_Mutants_cDNA_P Parameter: Tissue Value: Aerial
  misc_feature: MA Experiment 20000072 PARAMETER Experiment Name: At_100uM_ABA_Mutants_cDNA_P Parameter: Treatment Value: 100uM ABA vs. No Treatment
  misc_feature: MA Experiment ID: 20000088 Result: Down-regulated in Transcription
  misc_feature: MA Experiment 20000088 PARAMETER Experiment Name: At_100uM_ABA_Mutants_cDNA_P Parameter: Plant Line Value: Landsberg
  misc_feature: MA Experiment 20000088 PARAMETER Experiment Name: At_100uM_ABA_Mutants_cDNA_P Parameter: Timepoint (hr) Value: 6
  misc_feature: MA Experiment 20000088 PARAMETER Experiment Name: At_100uM_ABA_Mutants_cDNA_P Parameter: Tissue Value: Aerial
  misc_feature: MA Experiment 20000088 PARAMETER Experiment Name: At_100uM_ABA_Mutants_cDNA_P Parameter: Treatment Value: 100uM ABA vs. No Treatment
  misc_feature: MA Experiment ID: 20000090 Result: Down-regulated in Transcription
  misc_feature: MA Experiment ID: 20000093 Result: Up-regulated in Transcription
  misc_feature: MA Experiment 20000093 PARAMETER Experiment Name: At_42deg_Heat_cDNA_P Parameter: Temperature (deg C) Value: 42 vs. 22
  misc_feature: MA Experiment 20000093 PARAMETER Experiment Name: At_42deg_Heat_cDNA_P Parameter: Timepoint (hr) Value: 0.5
  misc_feature: MA Experiment 20000093 PARAMETER Experiment Name: At_42deg_Heat_cDNA_P Parameter: Tissue Value: Aerial
  misc_feature: MA Experiment ID: 20000111 Result: Up-regulated in Transcription
  misc_feature: MA Experiment 20000111 PARAMETER Experiment Name: At_42deg_Heat_cDNA_P Parameter: Temperature (deg C) Value: 42 vs. 22
  misc_feature: MA Experiment 20000111 PARAMETER Experiment Name: At_42deg_Heat_cDNA_P Parameter: Timepoint (hr) Value: 6
  misc_feature: MA Experiment 20000111 PARAMETER Experiment Name: At_42deg_Heat_cDNA_P Parameter: Tissue Value: Aerial
  misc_feature: MA Experiment ID: 20000112 Result: Up-regulated in Transcription
  misc_feature: MA Experiment 20000112 PARAMETER Experiment Name: At_42deg_Heat_cDNA_P Parameter: Temperature (deg C) Value: 42 vs. 22
  misc_feature: MA Experiment 20000112 PARAMETER Experiment Name: At_42deg_Heat_cDNA_P Parameter: Timepoint (hr) Value: 2
  misc_feature: MA Experiment 20000112 PARAMETER Experiment Name: At_42deg_Heat_cDNA_P Parameter: Tissue Value: Aerial
  misc_feature: MA Experiment ID: 20000113 Result: Up-regulated in Transcription
  misc_feature: MA Experiment 20000113 PARAMETER Experiment Name: At_42deg_Heat_cDNA_P Parameter: Temperature (deg C) Value: 42 vs. 22
  misc_feature: MA Experiment 20000113 PARAMETER Experiment Name: At_42deg_Heat_cDNA_P Parameter: Timepoint (hr) Value: 8
  misc_feature: MA Experiment 20000113 PARAMETER Experiment Name: At_42deg_Heat_cDNA_P Parameter: Tissue Value: Aerial
  misc_feature: MA Experiment ID: 20000144 Result: Up-regulated in Transcription
  misc_feature: MA Experiment 20000144 PARAMETER Experiment Name: At_42deg_Heat_cDNA_P Parameter: Temperature (deg C) Value: 42 vs. 22
  misc_feature: MA Experiment 20000144 PARAMETER Experiment Name: At_42deg_Heat_cDNA_P Parameter: Timepoint (hr) Value: 1
  misc_feature: MA Experiment 20000144 PARAMETER Experiment Name: At_42deg_Heat_cDNA_P Parameter: Tissue Value: Aerial
  misc_feature: MA Experiment ID: 20000173 Result: Up-regulated in Transcription
  misc_feature: MA Experiment 20000173 PARAMETER Experiment Name: At_42deg_Heat_P Parameter: Age (day) Value: 14
  misc_feature: MA Experiment 20000173 PARAMETER Experiment Name: At_42deg_Heat_P Parameter: Organism Value: A. thaliana
  misc_feature: MA Experiment 20000173 PARAMETER Experiment Name: At_42deg_Heat_P Parameter: Plant Line Value: WS
  misc_feature: MA Experiment 20000173 PARAMETER Experiment Name: At_42deg_Heat_P Parameter: Temperature (deg C) Value: 42 vs. 22
  misc_feature: MA Experiment 20000173 PARAMETER Experiment Name: At_42deg_Heat_P Parameter: Timepoint (hr) Value: 6
  misc_feature: MA Experiment 20000173 PARAMETER Experiment Name: At_42deg_Heat_P Parameter: Tissue Value: Aerial
  misc_feature: MA Experiment ID: 20000179 Result: Up-regulated in Transcription
  misc_feature: MA Experiment 20000179 PARAMETER Experiment Name: At_Germinating_Seeds_P Parameter: Age (hr) Value: 6 vs. 0
  misc_feature: MA Experiment 20000179 PARAMETER Experiment Name: At_Germinating_Seeds_P Parameter: Tissue Value: Germinating Seeds
  misc_feature: MA Experiment ID: 20000185 Result: Down-regulated in Transcription
  misc_feature: MA Experiment 20000185 PARAMETER Experiment Name: At_Roots__P Parameter: Age (day) Value: 7 vs. 21
  misc_feature: MA Experiment 20000185 PARAMETER Experiment Name: At_Roots__P Parameter: Organism Value: A. thaliana
  misc_feature: MA Experiment 20000185 PARAMETER Experiment Name: At_Roots__P Parameter: Tissue Value: Roots vs. Whole Plant
  misc_feature: MA Experiment ID: 20000213 Result: Down-regulated in Transcription
  misc_feature: MA Experiment 20000213 PARAMETER Experiment Name: At_4deg_Cold_P Parameter: Timepoint (hr) Value: 2
  misc_feature: MA Experiment ID: 20000224 Result: Down-regulated in Transcription
  misc_feature: MA Experiment ID: 20000227 Result: Down-regulated in Transcription
  misc_feature: MA Experiment 20000227 PARAMETER Experiment Name: At_Root-Tips-vs-Tops_P Parameter: Tissue Value: Root Tips vs. Root Tops
  misc_feature: MA Experiment ID: 20000234 Result: Down-regulated in Transcription
  misc_feature: MA Experiment 20000234 PARAMETER Experiment Name: At_Siliques_P Parameter: Age (day) Value: 21
  misc_feature: MA Experiment 20000234 PARAMETER Experiment Name: At_Siliques_P Parameter: Organism Value: A. thaliana
  misc_feature: MA Experiment 20000234 PARAMETER Experiment Name: At_Siliques_P Parameter: Plant Line Value: WS
  misc_feature: MA Experiment 20000234 PARAMETER Experiment Name: At_Siliques_P Parameter: Tissue Value: Less Than 5mm Siliques vs. Whole Plant
  misc_feature: MA Experiment ID: 20000264 Result: Down-regulated in Transcription
  misc_feature: MA Experiment 20000264 PARAMETER Experiment Name: At_Open_Flower_P Parameter: Age (day) Value: 21
  misc_feature: MA Experiment 20000264 PARAMETER Experiment Name: At_Open_Flower_P Parameter: Plant Line Value: WS
  misc_feature: MA Experiment 20000264 PARAMETER Experiment Name: At_Open_Flower_P Parameter: Tissue Value: Open Flower vs. Whole Plant
  misc_feature: MA Experiment ID: 20000265 Result: Down-regulated in Transcription
  misc_feature: MA Experiment 20000265 PARAMETER Experiment Name: At_Open_Flower_P Parameter: Age (day) Value: 21
  misc_feature: MA Experiment 20000265 PARAMETER Experiment Name: At_Open_Flower_P Parameter: Plant Line Value: WS
  misc_feature: MA Experiment 20000265 PARAMETER Experiment Name: At_Open_Flower_P Parameter: Tissue Value: Closed Flower vs. Whole Plant
  misc_feature: MA Experiment ID: 20000268 Result: Down-regulated in Transcription
  misc_feature: MA Experiment 20000268 PARAMETER Experiment Name: At_100mM_NaCl__P Parameter: Age (day) Value: 14
  misc_feature: MA Experiment 20000268 PARAMETER Experiment Name: At_100mM_NaCl__P Parameter: Organism Value: A. thaliana
  misc_feature: MA Experiment 20000268 PARAMETER Experiment Name: At_100mM_NaCl__P Parameter: Plant Line Value: WS
  misc_feature: MA Experiment 20000268 PARAMETER Experiment Name: At_100mM_NaCl__P Parameter: Timepoint (hr) Value: 6
  misc_feature: MA Experiment 20000268 PARAMETER Experiment Name: At_100mM_NaCl__P Parameter: Tissue Value: Whole Plant
  misc_feature: MA Experiment 20000268 PARAMETER Experiment Name: At_100mM_NaCl__P Parameter: Treatment Value: 100mM NaCl vs. No Treatment
  misc_feature: MA Experiment ID: 20000269 Result: Down-regulated in Transcription
  misc_feature: MA Experiment 20000269 PARAMETER Experiment Name: At_1mM_KNO3_L-vs-H_Roots_P Parameter: Age (day) Value: 7,10,12
  misc_feature: MA Experiment 20000269 PARAMETER Experiment Name: At_1mM_KNO3_L-vs-H_Roots_P Parameter: Organism Value: A. thaliana
  misc_feature: MA Experiment 20000269 PARAMETER Experiment Name: At_1mM_KNO3_L-vs-H_Roots_P Parameter: Plant Line Value: WS
  misc_feature: MA Experiment 20000269 PARAMETER Experiment Name: At_1mM_KNO3_L-vs-H_Roots_P Parameter: Timepoint (day) Value: 7,10,12
  misc_feature: MA Experiment 20000269 PARAMETER Experiment Name: At_1mM_KNO3_L-vs-H_Roots_P Parameter: Tissue Value: Roots
  misc_feature: MA Experiment 20000269 PARAMETER Experiment Name: At_1mM_KNO3_L-vs-H_Roots_P Parameter: Treatment Value: 1mM KNO3 vs. 50mM KNO3
  misc_feature: MA Experiment ID: 20000286 Result: Down-regulated in Transcription
  misc_feature: MA Experiment 20000286 PARAMETER Experiment Name: At_Open_Flower_P Parameter: Age (day) Value: 21
  misc_feature: MA Experiment 20000286 PARAMETER Experiment Name: At_Open_Flower_P Parameter: Plant Line Value: WS
  misc_feature: MA Experiment 20000286 PARAMETER Experiment Name: At_Open_Flower_P Parameter: Tissue Value: Half Open vs. Whole Plant
  misc_feature: MA Experiment ID: 20000308 Result: Down-regulated in Transcription
  misc_feature: MA Experiment 20000308 PARAMETER Experiment Name: At_100mM_NaCl__P Parameter: Age (day) Value: 17
  misc_feature: MA Experiment 20000308 PARAMETER Experiment Name: At_100mM_NaCl__P Parameter: Organism Value: A. thaliana
  misc_feature: MA Experiment 20000308 PARAMETER Experiment Name: At_100mM_NaCl__P Parameter: Plant Line Value: WS
  misc_feature: MA Experiment 20000308 PARAMETER Experiment Name: At_100mM_NaCl__P Parameter: Timepoint (hr) Value: 72
  misc_feature: MA Experiment 20000308 PARAMETER Experiment Name: At_100mM_NaCl__P Parameter: Tissue Value: Whole Plant
  misc_feature: MA Experiment 20000308 PARAMETER Experiment Name: At_100mM_NaCl__P Parameter: Treatment Value: 100mM NaCl vs. No Treatment
  misc_feature: MA Experiment ID: 20000439 Result: Down-regulated in Transcription
  misc_feature: MA Experiment 20000439 PARAMETER Experiment Name: At_Roots__P Parameter: Age (day) Value: 14 vs. 21
  misc_feature: MA Experiment 20000439 PARAMETER Experiment Name: At_Roots__P Parameter: Organism Value: A. thaliana
  misc_feature: MA Experiment 20000439 PARAMETER Experiment Name: At_Roots__P Parameter: Tissue Value: Roots vs. Whole Plant
  misc_feature: MA Experiment ID: 20000441 Result: Up-regulated in Transcription
  misc_feature: MA Experiment 20000441 PARAMETER Experiment Name: At_1uM_BR-BRZ__P Parameter: Tissue Value: Shoot Apices
  misc_feature: MA Experiment 20000441 PARAMETER Experiment Name: At_1uM_BR-BRZ__P Parameter: Treatment Value: 1uM BR vs. No Treatment
  misc_feature: MA Experiment ID: 20000443 Result: Up-regulated in Transcription
  misc_feature: MA Experiment 20000443 PARAMETER Experiment Name: At_1uM_BR-BRZ__P Parameter: Tissue Value: Shoot Apices
  misc_feature: MA Experiment 20000443 PARAMETER Experiment Name: At_1uM_BR-BRZ__P Parameter: Treatment Value: 1uM BRZ vs. No Treatment
  misc_feature: MA Experiment ID: 20000451 Result: Down-regulated in Transcription
  misc_feature: MA Experiment 20000451 PARAMETER Experiment Name: At_CS6879_Shoots-Roots_P Parameter: Age (day) Value: 14
  misc_feature: MA Experiment 20000451 PARAMETER Experiment Name: At_CS6879_Shoots-Roots_P Parameter: Organism Value: A. thaliana
  misc_feature: MA Experiment 20000451 PARAMETER Experiment Name: At_CS6879_Shoots-Roots_P Parameter: Plant Line Value: CS6879 vs. WS
  misc_feature: MA Experiment 20000451 PARAMETER Experiment Name: At_CS6879_Shoots-Roots_P Parameter: Tissue Value: Roots
  misc_feature: MA Experiment ID: 20000452 Result: Down-regulated in Transcription
  misc_feature: MA Experiment 20000452 PARAMETER Experiment Name: At_CS6879_Shoots-Roots_P Parameter: Age (day) Value: 14
  misc_feature: MA Experiment 20000452 PARAMETER Experiment Name: At_CS6879_Shoots-Roots_P Parameter: Organism Value: A. thaliana
  misc_feature: MA Experiment 20000452 PARAMETER Experiment Name: At_CS6879_Shoots-Roots_P Parameter: Plant Line Value: CS6879 vs. WS
  misc_feature: MA Experiment 20000452 PARAMETER Experiment Name: At_CS6879_Shoots-Roots_P Parameter: Tissue Value: Shoots
  misc_feature: MA Experiment ID: 20000456 Result: Down-regulated in Transcription
  misc_feature: MA Experiment 20000456 PARAMETER Experiment Name: At_100uM_BA_P Parameter: Age (day) Value: 14
  misc_feature: MA Experiment 20000456 PARAMETER Experiment Name: At_100uM_BA_P Parameter: Organism Value: A. thaliana
  misc_feature: MA Experiment 20000456 PARAMETER Experiment Name: At_100uM_BA_P Parameter: Plant Line Value: WS
  misc_feature: MA Experiment 20000456 PARAMETER Experiment Name: At_100uM_BA_P Parameter: Timepoint (hr) Value: 6
  misc_feature: MA Experiment 20000456 PARAMETER Experiment Name: At_100uM_BA_P Parameter: Tissue Value: Aerial
  misc_feature: MA Experiment 20000456 PARAMETER Experiment Name: At_100uM_BA_P Parameter: Treatment Value: 100uM BA vs. No Treatment
  misc_feature: MA Experiment ID: 20000573 Result: Up-regulated in Transcription
  misc_feature: MA Experiment 20000573 PARAMETER Experiment Name: At_100uM_ABA_Mutants__P Parameter: Organism Value: A. thaliana
  misc_feature: MA Experiment 20000573 PARAMETER Experiment Name: At_100uM_ABA_Mutants__P Parameter: Plant Line Value: CS22 vs. Ler wt
  misc_feature: MA Experiment 20000573 PARAMETER Experiment Name: At_100uM_ABA_Mutants__P Parameter: Timepoint (hr) Value: N/A
  misc_feature: MA Experiment 20000573 PARAMETER Experiment Name: At_100uM_ABA_Mutants__P Parameter: Tissue Value: Whole Plant
  misc_feature: MA Experiment 20000573 PARAMETER Experiment Name: At_100uM_ABA_Mutants__P Parameter: Treatment Value: None
  misc_feature: MA Experiment ID: 20001248 Result: Up-regulated in Transcription
  misc_feature: MA Experiment 20001248 PARAMETER Experiment Name: At_Far-red-induction_P Parameter: Age (day) Value: 7
  misc_feature: MA Experiment 20001248 PARAMETER Experiment Name: At_Far-red-induction_P Parameter: Light Value: Far-red vs. White
  misc_feature: MA Experiment 20001248 PARAMETER Experiment Name: At_Far-red-induction_P Parameter: Organism Value: A. thaliana
  misc_feature: MA Experiment 20001248 PARAMETER Experiment Name: At_Far-red-induction_P Parameter: Plant Line Value: Columbia
  misc_feature: MA Experiment 20001248 PARAMETER Experiment Name: At_Far-red-induction_P Parameter: Timepoint (hr) Value: 4
  misc_feature: MA Experiment 20001248 PARAMETER Experiment Name: At_Far-red-induction_P Parameter: Tissue Value: Whole Plant
  misc_feature: MA Experiment ID: 20001450 Result: Up-regulated in Transcription
  misc_feature: MA Experiment 20001450 PARAMETER Experiment Name: At_Far-red-induction_P Parameter: Age (day) Value: 7
  misc_feature: MA Experiment 20001450 PARAMETER Experiment Name: At_Far-red-induction_P Parameter: Light Value: Far-red vs. White
  misc_feature: MA Experiment 20001450 PARAMETER Experiment Name: At_Far-red-induction_P Parameter: Organism Value: A. thaliana
  misc_feature: MA Experiment 20001450 PARAMETER Experiment Name: At_Far-red-induction_P Parameter: Plant Line Value: Columbia
  misc_feature: MA Experiment 20001450 PARAMETER Experiment Name: At_Far-red-induction_P Parameter: Timepoint (hr) Value: 8
  misc_feature: MA Experiment 20001450 PARAMETER Experiment Name: At_Far-red-induction_P Parameter: Tissue Value: Whole Plant
  misc_feature: MA Experiment ID: 20001451 Result: Up-regulated in Transcription
  misc_feature: MA Experiment 20001451 PARAMETER Experiment Name: At_Far-red-induction_P Parameter: Age (day) Value: 7
  misc_feature: MA Experiment 20001451 PARAMETER Experiment Name: At_Far-red-induction_P Parameter: Light Value: Far-red vs. White
  misc_feature: MA Experiment 20001451 PARAMETER Experiment Name: At_Far-red-induction_P Parameter: Organism Value: A. thaliana
  misc_feature: MA Experiment 20001451 PARAMETER Experiment Name: At_Far-red-induction_P Parameter: Plant Line Value: Columbia
  misc_feature: MA Experiment 20001451 PARAMETER Experiment Name: At_Far-red-induction_P Parameter: Timepoint (hr) Value: 24
  misc_feature: MA Experiment 20001451 PARAMETER Experiment Name: At_Far-red-induction_P Parameter: Tissue Value: Whole Plant
  misc_feature: MA Experiment ID: 20001555 Result: Down-regulated in Transcription
  misc_feature: MA Experiment 20001555 PARAMETER Experiment Name: At_Drought_Soil_Dry_P Parameter: Age (day) Value: 24
  misc_feature: MA Experiment 20001555 PARAMETER Experiment Name: At_Drought_Soil_Dry_P Parameter: Organism Value: A. thaliana
  misc_feature: MA Experiment 20001555 PARAMETER Experiment Name: At_Drought_Soil_Dry_P Parameter: Plant Line Value: WS
  misc_feature: MA Experiment 20001555 PARAMETER Experiment Name: At_Drought_Soil_Dry_P Parameter: Post Timepoint (hr) Value: None
  misc_feature: MA Experiment 20001555 PARAMETER Experiment Name: At_Drought_Soil_Dry_P Parameter: Post-Treatment Value: None
  misc_feature: MA Experiment 20001555 PARAMETER Experiment Name: At_Drought_Soil_Dry_P Parameter: Timepoint (day) Value: 10
  misc_feature: MA Experiment 20001555 PARAMETER Experiment Name: At_Drought_Soil_Dry_P Parameter: Treatment Value: Drought vs. No Drought
  misc_feature: MA Experiment ID: 20001556 Result: Down-regulated in Transcription
  misc_feature: MA Experiment 20001556 PARAMETER Experiment Name: At_Drought_Soil_Dry_P Parameter: Age (day) Value: 26
  misc_feature: MA Experiment 20001556 PARAMETER Experiment Name: At_Drought_Soil_Dry_P Parameter: Organism Value: A. thaliana
  misc_feature: MA Experiment 20001556 PARAMETER Experiment Name: At_Drought_Soil_Dry_P Parameter: Plant Line Value: WS
  misc_feature: MA Experiment 20001556 PARAMETER Experiment Name: At_Drought_Soil_Dry_P Parameter: Post Timepoint (hr) Value: None
  misc_feature: MA Experiment 20001556 PARAMETER Experiment Name: At_Drought_Soil_Dry_P Parameter: Post-Treatment Value: None
  misc_feature: MA Experiment 20001556 PARAMETER Experiment Name: At_Drought_Soil_Dry_P Parameter: Timepoint (day) Value: 12
  misc_feature: MA Experiment 20001556 PARAMETER Experiment Name: At_Drought_Soil_Dry_P Parameter: Treatment Value: Drought vs. No Drought
  misc_feature: MA Experiment ID: 20001557 Result: Down-regulated in Transcription
  misc_feature: MA Experiment 20001557 PARAMETER Experiment Name: At_Drought_Soil_Dry_P Parameter: Age (day) Value: 27
  misc_feature: MA Experiment 20001557 PARAMETER Experiment Name: At_Drought_Soil_Dry_P Parameter: Organism Value: A. thaliana
  misc_feature: MA Experiment 20001557 PARAMETER Experiment Name: At_Drought_Soil_Dry_P Parameter: Plant Line Value: WS
  misc_feature: MA Experiment 20001557 PARAMETER Experiment Name: At_Drought_Soil_Dry_P Parameter: Post Timepoint (hr) Value: 3
  misc_feature: MA Experiment 20001557 PARAMETER Experiment Name: At_Drought_Soil_Dry_P Parameter: Post-Treatment Value: Re-Water vs. No Drought
  misc_feature: MA Experiment 20001557 PARAMETER Experiment Name: At_Drought_Soil_Dry_P Parameter: Timepoint (day) Value: 13
  misc_feature: MA Experiment 20001557 PARAMETER Experiment Name: At_Drought_Soil_Dry_P Parameter: Treatment Value: Drought vs. No Drought
  misc_feature: MA Experiment ID: 20001558 Result: Down-regulated in Transcription
  misc_feature: MA Experiment 20001558 PARAMETER Experiment Name: At_Drought_Soil_Dry_P Parameter: Age (day) Value: 27
  misc_feature: MA Experiment 20001558 PARAMETER Experiment Name: At_Drought_Soil_Dry_P Parameter: Organism Value: A. thaliana
  misc_feature: MA Experiment 20001558 PARAMETER Experiment Name: At_Drought_Soil_Dry_P Parameter: Plant Line Value: WS
  misc_feature: MA Experiment 20001558 PARAMETER Experiment Name: At_Drought_Soil_Dry_P Parameter: Post Timepoint (hr) Value: 6
  misc_feature: MA Experiment 20001558 PARAMETER Experiment Name: At_Drought_Soil_Dry_P Parameter: Post-Treatment Value: Re-Water vs. No Drought
  misc_feature: MA Experiment 20001558 PARAMETER Experiment Name: At_Drought_Soil_Dry_P Parameter: Timepoint (day) Value: 13
  misc_feature: MA Experiment 20001558 PARAMETER Experiment Name: At_Drought_Soil_Dry_P Parameter: Treatment Value: Drought vs. No Drought
  misc_feature: MA Experiment ID: 20001560 Result: Down-regulated in Transcription
  misc_feature: MA Experiment 20001560 PARAMETER Experiment Name: At_Drought_Soil_Dry_P Parameter: Age (day) Value: 28
  misc_feature: MA Experiment 20001560 PARAMETER Experiment Name: At_Drought_Soil_Dry_P Parameter: Organism Value: A. thaliana
  misc_feature: MA Experiment 20001560 PARAMETER Experiment Name: At_Drought_Soil_Dry_P Parameter: Plant Line Value: WS
  misc_feature: MA Experiment 20001560 PARAMETER Experiment Name: At_Drought_Soil_Dry_P Parameter: Post Timepoint (hr) Value: None
  misc_feature: MA Experiment 20001560 PARAMETER Experiment Name: At_Drought_Soil_Dry_P Parameter: Post-Treatment Value: None
  misc_feature: MA Experiment 20001560 PARAMETER Experiment Name: At_Drought_Soil_Dry_P Parameter: Timepoint (day) Value: 14
  misc_feature: MA Experiment 20001560 PARAMETER Experiment Name: At_Drought_Soil_Dry_P Parameter: Treatment Value: Drought vs. No Drought
  misc_feature: MA Experiment ID: 20001757 Result: Up-regulated in Transcription
  misc_feature: MA Experiment 20001757 PARAMETER Experiment Name: At_50mM_NH4NO3_L-to-H_P Parameter: Timepoint (hr) Value: 6
  misc_feature: MA Experiment 20001757 PARAMETER Experiment Name: At_50mM_NH4NO3_L-to-H_P Parameter: Tissue Value: Leaf
  misc_feature: MA Experiment 20001757 PARAMETER Experiment Name: At_50mM_NH4NO3_L-to-H_P Parameter: Treatment Value: 50mM NH4NO3 vs 100mM Mannitol
  misc_feature: MA Experiment ID: 20001904 Result: Down-regulated in Transcription
  misc_feature: MA Experiment 20001904 PARAMETER Experiment Name: At_Drought_Reproduction_P Parameter: Age (day) Value: 37
  misc_feature: MA Experiment 20001904 PARAMETER Experiment Name: At_Drought_Reproduction_P Parameter: Organism Value: A. thaliana
  misc_feature: MA Experiment 20001904 PARAMETER Experiment Name: At_Drought_Reproduction_P Parameter: Plant Line Value: WS
  misc_feature: MA Experiment 20001904 PARAMETER Experiment Name: At_Drought_Reproduction_P Parameter: Timepoint (day) Value: 7
  misc_feature: MA Experiment 20001904 PARAMETER Experiment Name: At_Drought_Reproduction_P Parameter: Tissue Value: Rosettes
  misc_feature: MA Experiment 20001904 PARAMETER Experiment Name: At_Drought_Reproduction_P Parameter: Treatment Value: Drought vs. No Drought
  misc_feature: MA Experiment ID: 20001905 Result: Down-regulated in Transcription
  misc_feature: MA Experiment 20001905 PARAMETER Experiment Name: At_Drought_Reproduction_P Parameter: Age (day) Value: 40
  misc_feature: MA Experiment 20001905 PARAMETER Experiment Name: At_Drought_Reproduction_P Parameter: Organism Value: A. thaliana
  misc_feature: MA Experiment 20001905 PARAMETER Experiment Name: At_Drought_Reproduction_P Parameter: Plant Line Value: WS
  misc_feature: MA Experiment 20001905 PARAMETER Experiment Name: At_Drought_Reproduction_P Parameter: Timepoint (day) Value: 10
  misc_feature: MA Experiment 20001905 PARAMETER Experiment Name: At_Drought_Reproduction_P Parameter: Tissue Value: Rosettes
  misc_feature: MA Experiment 20001905 PARAMETER Experiment Name: At_Drought_Reproduction_P Parameter: Treatment Value: Drought vs. No Drought
  misc_feature: MA Experiment ID: 20001906 Result: Up-regulated in Transcription
  misc_feature: MA Experiment 20001906 PARAMETER Experiment Name: At_Drought_Reproduction_P Parameter: Age (day) Value: 35
  misc_feature: MA Experiment 20001906 PARAMETER Experiment Name: At_Drought_Reproduction_P Parameter: Organism Value: A. thaliana
  misc_feature: MA Experiment 20001906 PARAMETER Experiment Name: At_Drought_Reproduction_P Parameter: Plant Line Value: WS
  misc_feature: MA Experiment 20001906 PARAMETER Experiment Name: At_Drought_Reproduction_P Parameter: Timepoint (day) Value: 5
  misc_feature: MA Experiment 20001906 PARAMETER Experiment Name: At_Drought_Reproduction_P Parameter: Tissue Value: Siliques
  misc_feature: MA Experiment 20001906 PARAMETER Experiment Name: At_Drought_Reproduction_P Parameter: Treatment Value: Drought vs. No Drought
  misc_feature: MA Experiment ID: 20001908 Result: Up-regulated in Transcription
  misc_feature: MA Experiment 20001908 PARAMETER Experiment Name: At_Drought_Reproduction_P Parameter: Age (day) Value: 40
  misc_feature: MA Experiment 20001908 PARAMETER Experiment Name: At_Drought_Reproduction_P Parameter: Organism Value: A. thaliana
  misc_feature: MA Experiment 20001908 PARAMETER Experiment Name: At_Drought_Reproduction_P Parameter: Plant Line Value: WS
  misc_feature: MA Experiment 20001908 PARAMETER Experiment Name: At_Drought_Reproduction_P Parameter: Timepoint (day) Value: 10
  misc_feature: MA Experiment 20001908 PARAMETER Experiment Name: At_Drought_Reproduction_P Parameter: Tissue Value: Siliques
  misc_feature: MA Experiment 20001908 PARAMETER Experiment Name: At_Drought_Reproduction_P Parameter: Treatment Value: Drought vs. No Drought
  misc_feature: MA Experiment ID: 20001911 Result: Up-regulated in Transcription
  misc_feature: MA Experiment 20001911 PARAMETER Experiment Name: At_Drought_Reproduction_P Parameter: Age (day) Value: 40
  misc_feature: MA Experiment 20001911 PARAMETER Experiment Name: At_Drought_Reproduction_P Parameter: Organism Value: A. thaliana
  misc_feature: MA Experiment 20001911 PARAMETER Experiment Name: At_Drought_Reproduction_P Parameter: Plant Line Value: WS
  misc_feature: MA Experiment 20001911 PARAMETER Experiment Name: At_Drought_Reproduction_P Parameter: Timepoint (day) Value: 10
  misc_feature: MA Experiment 20001911 PARAMETER Experiment Name: At_Drought_Reproduction_P Parameter: Tissue Value: Flowers
  misc_feature: MA Experiment 20001911 PARAMETER Experiment Name: At_Drought_Reproduction_P Parameter: Treatment Value: Drought vs. No Drought
atccaaaacgtttttccttcccacaggaaaagaagaaaaacagacagcggaggactaaaacaactagccacaacacaacgcttcaaatatatattactctgccactttcttcaatcttccttcaaagattcttattacagcgacacacaactcttttccatttagatttttgattttttttggttctctaaaggaggagagaaatgttggctatcttccacgaggcgtttgctcatccgccggaggaactcaacagtccggcatctgagaaatgctctaaacaaccaaaacttccagaagaaaccctaaatgatttcttattacgttaccctctcaacactttctccatgtctttcggacaagctgctgttcttgcttacgttcgtccctctgcttccttctccatccaccagaggttgttttgtggatttgatgacatctactgtctcttctttgggagcttgaacaatctgtgtcagctaaacaaacagtatggtctcaccaagacaacaaacgaggccatgtttgtgatcgaagcttataggactcttagagacagaggtccttatccagctgatcaggtcgtcaaagacttagacggtagcttttcctttgtggtttatgatagcaaagccggctctgtcttcactgctctgggatctgatggaggggtgaagctatactggggcatagctgctgatggatctgttgttatatcagatgatttggatgttatcaaagagggttgtgctaaatcttttgctccatttcctacagggtgtatgttccatagtgaaggagggttaatgagctttgagcatccaatgaacaagatcaaggcgatgccgagggtagacagtgaaggagttctatgcggtgccaacttcaaggtggatgtgtacaatcgtgttaacagtatccctcgtcgaggaagtgaagccaattggtctctctgaatacttttaataacactttcaatttggtttctttttcgcacttgtgcttcttctccgctttcatcttagttatggactgttcctaagcttgccatgaataaaactgtgaataataaagcttttaatgttctgtttcttactttaagtcagacaataaacttttaacacttgtgatcat

SEQ ID NO: 23029 - protein, 250 aa, Arabidopsis thaliana
  peptide (1)..(250): Ceres Seq. ID no. 13493870
  misc_feature (1)..(250): Homolog of NCBI NO: 7486256 NR Description: hypothetical protein F27G19.50 - Arabidopsis
  misc_feature (1)..(250): Homolog of NCBI NO: 18416995 NR Description: expressed protein [Arabidopsis thaliana]
MLAIFHEAFAHPPEELNSPASEKCSKQPKLPEETLNDFLLRYPLNTFSMSFGQAAVLAYVRPSASFSIHQRLFCGFDDIYCLFFGSLNNLCQLNKQYGLTKTTNEAMFVIEAYRTLRDRGPYPADQVVKDLDGSFSFVVYDSKAGSVFTALGSDGGVKLYWGIAADGSVVISDDLDVIKEGCAKSFAPFPTGCMFHSEGGLMSFEHPMNKIKAMPRVDSEGVLCGANFKVDVYNRVNSIPRRGSEANWSL

SEQ ID NO: 23030 - protein, 202 aa, Arabidopsis thaliana
  peptide (1)..(202): Ceres Seq. ID no. 13493871
  misc_feature (1)..(202): Homolog of NCBI NO: 7486256 NR Description: hypothetical protein F27G19.50 - Arabidopsis
  misc_feature (1)..(202): Homolog of NCBI NO: 18416995 NR Description: expressed protein [Arabidopsis thaliana]
MSFGQAAVLAYVRPSASFSIHQRLFCGFDDIYCLFFGSLNNLCQLNKQYGLTKTTNEAMFVIEAYRTLRDRGPYPADQVVKDLDGSFSFVVYDSKAGSVFTALGSDGGVKLYWGIAADGSVVISDDLDVIKEGCAKSFAPFPTGCMFHSEGGLMSFEHPMNKIKAMPRVDSEGVLCGANFKVDVYNRVNSIPRRGSEANWSL

SEQ ID NO: 23031 - protein, 144 aa, Arabidopsis thaliana
  peptide (1)..(144): Ceres Seq. ID no. 13493872
  misc_feature (1)..(144): Homolog of NCBI NO: 7486256 NR Description: hypothetical protein F27G19.50 - Arabidopsis
  misc_feature (1)..(144): Homolog of NCBI NO: 18416995 NR Description: expressed protein [Arabidopsis thaliana]
MFVIEAYRTLRDRGPYPADQVVKDLDGSFSFVVYDSKAGSVFTALGSDGGVKLYWGIAADGSVVISDDLDVIKEGCAKSFAPFPTGCMFHSEGGLMSFEHPMNKIKAMPRVDSEGVLCGANFKVDVYNRVNSIPRRGSEANWSL

SEQ ID NO: 23032 - DNA, 1354 bp, Arabidopsis thaliana
  misc_feature (1)..(1354): Ceres Seq. ID no. 12334734
  misc_feature: MA Experiment ID: 108434 Result: Down-regulated in Transcription
  misc_feature: MA Experiment 108434 PARAMETER Experiment Name: At_Root_Tips_cDNA_P Parameter: Tissue Value: Root Tips
  misc_feature: MA Experiment ID: 108463 Result: Up-regulated in Transcription
  misc_feature: MA Experiment 108463 PARAMETER Experiment Name: At_Germinating_Seeds_cDNA_P Parameter: Age (day) Value: 3 vs. 0
  misc_feature: MA Experiment 108463 PARAMETER Experiment Name: At_Germinating_Seeds_cDNA_P Parameter: Tissue Value: Germinating Seeds
  misc_feature: MA Experiment ID: 108464 Result: Up-regulated in Transcription
  misc_feature: MA Experiment 108464 PARAMETER Experiment Name: At_Germinating_Seeds_cDNA_P Parameter: Age (day) Value: 4 vs. 0
  misc_feature: MA Experiment 108464 PARAMETER Experiment Name: At_Germinating_Seeds_cDNA_P Parameter: Tissue Value: Germinating Seeds
  misc_feature: MA Experiment ID: 108488 Result: Down-regulated in Transcription
  misc_feature: MA Experiment ID: 108574 Result: Up-regulated in Transcription
  misc_feature: MA Experiment 108574 PARAMETER Experiment Name: At_Wounding__cDNA_P Parameter: Timepoint (hr) Value: 1
  misc_feature: MA Experiment 108574 PARAMETER Experiment Name: At_Wounding__cDNA_P Parameter: Tissue Value: Aerial
  misc_feature: MA Experiment 108574 PARAMETER Experiment Name: At_Wounding__cDNA_P Parameter: Treatment Value: Wounding vs. No Wounding
  misc_feature: MA Experiment ID: 108579 Result: Up-regulated in Transcription
  misc_feature: MA Experiment 108579 PARAMETER Experiment Name: At_4deg_Cold_cDNA_P Parameter: Temperature (deg C) Value: 4 vs. 22
  misc_feature: MA Experiment 108579 PARAMETER Experiment Name: At_4deg_Cold_cDNA_P Parameter: Timepoint (hr) Value: 6
  misc_feature: MA Experiment 108579 PARAMETER Experiment Name: At_4deg_Cold_cDNA_P Parameter: Tissue Value: Aerial
  misc_feature: MA Experiment ID: 108585 Result: Up-regulated in Transcription
  misc_feature: MA Experiment 108585 PARAMETER Experiment Name: At_5mM_NaNP_cDNA_P Parameter: Timepoint (hr) Value: 6
  misc_feature: MA Experiment 108585 PARAMETER Experiment Name: At_5mM_NaNP_cDNA_P Parameter: Tissue Value: Aerial
  misc_feature: MA Experiment 108585 PARAMETER Experiment Name: At_5mM_NaNP_cDNA_P Parameter: Treatment Value: null
  misc_feature: MA Experiment ID: 20000185 Result: Down-regulated in Transcription
  misc_feature: MA Experiment 20000185 PARAMETER Experiment Name: At_Roots__P Parameter: Age (day) Value: 7 vs. 21
  misc_feature: MA Experiment 20000185 PARAMETER Experiment Name: At_Roots__P Parameter: Organism Value: A. thaliana
  misc_feature: MA Experiment 20000185 PARAMETER Experiment Name: At_Roots__P Parameter: Tissue Value: Roots vs. Whole Plant
  misc_feature: MA Experiment ID: 20000234 Result: Down-regulated in Transcription
  misc_feature: MA Experiment 20000234 PARAMETER Experiment Name: At_Siliques_P Parameter: Age (day) Value: 21
  misc_feature: MA Experiment 20000234 PARAMETER Experiment Name: At_Siliques_P Parameter: Organism Value: A. thaliana
  misc_feature: MA Experiment 20000234 PARAMETER Experiment Name: At_Siliques_P Parameter: Plant Line Value: WS
  misc_feature: MA Experiment 20000234 PARAMETER Experiment Name: At_Siliques_P Parameter: Tissue Value: Less Than 5mm Siliques vs. Whole Plant
  misc_feature: MA Experiment ID: 20000235 Result: Down-regulated in Transcription
  misc_feature: MA Experiment 20000235 PARAMETER Experiment Name: At_Siliques_P Parameter: Age (day) Value: 21
  misc_feature: MA Experiment 20000235 PARAMETER Experiment Name: At_Siliques_P Parameter: Organism Value: A. thaliana
  misc_feature: MA Experiment 20000235 PARAMETER Experiment Name: At_Siliques_P Parameter: Plant Line Value: WS
  misc_feature: MA Experiment 20000235 PARAMETER Experiment Name: At_Siliques_P Parameter: Tissue Value: 5-10mm Siliques vs. Whole Plant
  misc_feature: MA Experiment ID: 20000264 Result: Down-regulated in Transcription
  misc_feature: MA Experiment 20000264 PARAMETER Experiment Name: At_Open_Flower_P Parameter: Age (day) Value: 21
  misc_feature: MA Experiment 20000264 PARAMETER Experiment Name: At_Open_Flower_P Parameter: Plant Line Value: WS
  misc_feature: MA Experiment 20000264 PARAMETER Experiment Name: At_Open_Flower_P Parameter: Tissue Value: Open Flower vs. Whole Plant
  misc_feature: MA Experiment ID: 20000265 Result: Down-regulated in Transcription
  misc_feature: MA Experiment 20000265 PARAMETER Experiment Name: At_Open_Flower_P Parameter: Age (day) Value: 21
  misc_feature: MA Experiment 20000265 PARAMETER Experiment Name: At_Open_Flower_P Parameter: Plant Line Value: WS
  misc_feature: MA Experiment 20000265 PARAMETER Experiment Name: At_Open_Flower_P Parameter: Tissue Value: Closed Flower vs. Whole Plant
  misc_feature: MA Experiment ID: 20000268 Result: Down-regulated in Transcription
  misc_feature: MA Experiment 20000268 PARAMETER Experiment Name: At_100mM_NaCl__P Parameter: Age (day) Value: 14
  misc_feature: MA Experiment 20000268 PARAMETER Experiment Name: At_100mM_NaCl__P Parameter: Organism Value: A. thaliana
  misc_feature: MA Experiment 20000268 PARAMETER Experiment Name: At_100mM_NaCl__P Parameter: Plant Line Value: WS
  misc_feature: MA Experiment 20000268 PARAMETER Experiment Name: At_100mM_NaCl__P Parameter: Timepoint (hr) Value: 6
  misc_feature: MA Experiment 20000268 PARAMETER Experiment Name: At_100mM_NaCl__P Parameter: Tissue Value: Whole Plant
  misc_feature: MA Experiment 20000268 PARAMETER Experiment Name: At_100mM_NaCl__P Parameter: Treatment Value: 100mM NaCl vs. No Treatment
  misc_feature: MA Experiment ID: 20000286 Result: Down-regulated in Transcription
  misc_feature: MA Experiment 20000286 PARAMETER Experiment Name: At_Open_Flower_P Parameter: Age (day) Value: 21
  misc_feature: MA Experiment 20000286 PARAMETER Experiment Name: At_Open_Flower_P Parameter: Plant Line Value: WS
  misc_feature: MA Experiment 20000286 PARAMETER Experiment Name: At_Open_Flower_P Parameter: Tissue Value: Half Open vs. Whole Plant
  misc_feature: MA Experiment ID: 20000438 Result: Down-regulated in Transcription
  misc_feature: MA Experiment 20000438 PARAMETER Experiment Name: At_Shoots__P Parameter: Age (day) Value: 14
  misc_feature: MA Experiment 20000438 PARAMETER Experiment Name: At_Shoots__P Parameter: Tissue Value: Shoots vs. Whole Plant
  misc_feature: MA Experiment ID: 20000439 Result: Down-regulated in Transcription
  misc_feature: MA Experiment 20000439 PARAMETER Experiment Name: At_Roots__P Parameter: Age (day) Value: 14 vs. 21
  misc_feature: MA Experiment 20000439 PARAMETER Experiment Name: At_Roots__P Parameter: Organism Value: A. thaliana
  misc_feature: MA Experiment 20000439 PARAMETER Experiment Name: At_Roots__P Parameter: Tissue Value: Roots vs. Whole Plant
  misc_feature: MA Experiment ID: 20000441 Result: Up-regulated in Transcription
  misc_feature: MA Experiment 20000441 PARAMETER Experiment Name: At_1uM_BR-BRZ__P Parameter: Tissue Value: Shoot Apices
  misc_feature: MA Experiment 20000441 PARAMETER Experiment Name: At_1uM_BR-BRZ__P Parameter: Treatment Value: 1uM BR vs. No Treatment
  misc_feature: MA Experiment ID: 20000443 Result: Up-regulated in Transcription
  misc_feature: MA Experiment 20000443 PARAMETER Experiment Name: At_1uM_BR-BRZ__P Parameter: Tissue Value: Shoot Apices
  misc_feature: MA Experiment 20000443 PARAMETER Experiment Name: At_1uM_BR-BRZ__P Parameter: Treatment Value: 1uM BRZ vs. No Treatment
  misc_feature: MA Experiment ID: 20000460 Result: Up-regulated in Transcription
  misc_feature: MA Experiment 20000460 PARAMETER Experiment Name: At_10percent_PEG_P Parameter: Age (day) Value: 12
  misc_feature: MA Experiment 20000460 PARAMETER Experiment Name: At_10percent_PEG_P Parameter: Organism Value: A. thaliana
  misc_feature: MA Experiment 20000460 PARAMETER Experiment Name: At_10percent_PEG_P Parameter: Plant Line Value: WS
  misc_feature: MA Experiment 20000460 PARAMETER Experiment Name: At_10percent_PEG_P Parameter: Timepoint (day) Value: 12
  misc_feature: MA Experiment 20000460 PARAMETER Experiment Name: At_10percent_PEG_P Parameter: Tissue Value: Whole Plant
  misc_feature: MA Experiment 20000460 PARAMETER Experiment Name: At_10percent_PEG_P Parameter: Treatment Value: 10percent PEG vs. No Treatment
  misc_feature: MA Experiment ID: 20000495 Result: Down-regulated in Transcription
  misc_feature: MA Experiment 20000495 PARAMETER Experiment Name: At_Guard_Cells_P Parameter: Harvest Date Value: 8/2/2002
  misc_feature: MA Experiment 20000495 PARAMETER Experiment Name: At_Guard_Cells_P Parameter: Organism Value: A. thaliana
  misc_feature: MA Experiment 20000495 PARAMETER Experiment Name: At_Guard_Cells_P Parameter: Tissue Value: Guard Cells vs. Leaves
  misc_feature: MA Experiment ID: 20000527 Result: Up-regulated in Transcription
  misc_feature: MA Experiment 20000527 PARAMETER Experiment Name: At_10percent_PEG_P Parameter: Age (day) Value: 20
  misc_feature: MA Experiment 20000527 PARAMETER Experiment Name: At_10percent_PEG_P Parameter: Organism Value: A. thaliana
  misc_feature: MA Experiment 20000527 PARAMETER Experiment Name: At_10percent_PEG_P Parameter: Plant Line Value: WS
  misc_feature: MA Experiment 20000527 PARAMETER Experiment Name: At_10percent_PEG_P Parameter: Timepoint (day) Value: 20
  misc_feature: MA Experiment 20000527 PARAMETER Experiment Name: At_10percent_PEG_P Parameter: Tissue Value: Whole Plant
  misc_feature: MA Experiment 20000527 PARAMETER Experiment Name: At_10percent_PEG_P Parameter: Treatment Value: 10percent PEG vs. No Treatment
  misc_feature: MA Experiment ID: 20000794 Result: Down-regulated in Transcription
  misc_feature: MA Experiment 20000794 PARAMETER Experiment Name: At_Petals_P Parameter: Age (day) Value: 23-25 days
  misc_feature: MA Experiment 20000794 PARAMETER Experiment Name: At_Petals_P Parameter: Plant Line Value: WS
  misc_feature: MA Experiment 20000794 PARAMETER Experiment Name: At_Petals_P Parameter: Tissue Value: Petals vs. Whole plant
  misc_feature: MA Experiment ID: 20001247 Result: Up-regulated in Transcription
  misc_feature: MA Experiment 20001247 PARAMETER Experiment Name: At_Far-red-induction_P Parameter: Age (day) Value: 7
  misc_feature: MA Experiment 20001247 PARAMETER Experiment Name: At_Far-red-induction_P Parameter: Light Value: Far-red vs. White
  misc_feature: MA Experiment 20001247 PARAMETER Experiment Name: At_Far-red-induction_P Parameter: Organism Value: A. thaliana
  misc_feature: MA Experiment 20001247 PARAMETER Experiment Name: At_Far-red-induction_P Parameter: Plant Line Value: Columbia
  misc_feature: MA Experiment 20001247 PARAMETER Experiment Name: At_Far-red-induction_P Parameter: Timepoint (hr) Value: 1
  misc_feature: MA Experiment 20001247 PARAMETER Experiment Name: At_Far-red-induction_P Parameter: Tissue Value: Whole Plant
  misc_feature: MA Experiment ID: 20001554 Result: Down-regulated in Transcription
  misc_feature: MA Experiment 20001554 PARAMETER Experiment Name: At_Drought_Soil_Dry_P Parameter: Age (day) Value: 21
  misc_feature: MA Experiment 20001554 PARAMETER Experiment Name: At_Drought_Soil_Dry_P Parameter: Organism Value: A. thaliana
  misc_feature: MA Experiment 20001554 PARAMETER Experiment Name: At_Drought_Soil_Dry_P Parameter: Plant Line Value: WS
  misc_feature: MA Experiment 20001554 PARAMETER Experiment Name: At_Drought_Soil_Dry_P Parameter: Post Timepoint (hr) Value: None
  misc_feature: MA Experiment 20001554 PARAMETER Experiment Name: At_Drought_Soil_Dry_P Parameter: Post-Treatment Value: None
  misc_feature: MA Experiment 20001554 PARAMETER Experiment Name: At_Drought_Soil_Dry_P Parameter: Timepoint (day) Value: 7
  misc_feature: MA Experiment 20001554 PARAMETER Experiment Name: At_Drought_Soil_Dry_P Parameter: Treatment Value: Drought vs. No Drought
  misc_feature: MA Experiment ID: 20001555 Result: Down-regulated in Transcription
  misc_feature: MA Experiment 20001555 PARAMETER Experiment Name: At_Drought_Soil_Dry_P Parameter: Age (day) Value: 24
  misc_feature: MA Experiment 20001555 PARAMETER Experiment Name: At_Drought_Soil_Dry_P Parameter: Organism Value: A. thaliana
  misc_feature: MA Experiment 20001555 PARAMETER Experiment Name: At_Drought_Soil_Dry_P Parameter: Plant Line Value: WS
  misc_feature: MA Experiment 20001555 PARAMETER Experiment Name: At_Drought_Soil_Dry_P Parameter: Post Timepoint (hr) Value: None
  misc_feature: MA Experiment 20001555 PARAMETER Experiment Name: At_Drought_Soil_Dry_P Parameter: Post-Treatment Value: None
  misc_feature: MA Experiment 20001555 PARAMETER Experiment Name: At_Drought_Soil_Dry_P Parameter: Timepoint (day) Value: 10
  misc_feature: MA Experiment 20001555 PARAMETER Experiment Name: At_Drought_Soil_Dry_P Parameter: Treatment Value: Drought vs. No Drought
  misc_feature: MA Experiment ID: 20001556 Result: Down-regulated in Transcription
  misc_feature: MA Experiment 20001556 PARAMETER Experiment Name: At_Drought_Soil_Dry_P Parameter: Age (day) Value: 26
  misc_feature: MA Experiment 20001556 PARAMETER Experiment Name: At_Drought_Soil_Dry_P Parameter: Organism Value: A. thaliana
  misc_feature: MA Experiment 20001556 PARAMETER Experiment Name: At_Drought_Soil_Dry_P Parameter: Plant Line Value: WS
  misc_feature: MA Experiment 20001556 PARAMETER Experiment Name: At_Drought_Soil_Dry_P Parameter: Post Timepoint (hr) Value: None
  misc_feature: MA Experiment 20001556 PARAMETER Experiment Name: At_Drought_Soil_Dry_P Parameter: Post-Treatment Value: None
  misc_feature: MA Experiment 20001556 PARAMETER Experiment Name: At_Drought_Soil_Dry_P Parameter: Timepoint (day) Value: 12
  misc_feature: MA Experiment 20001556 PARAMETER Experiment Name: At_Drought_Soil_Dry_P Parameter: Treatment Value: Drought vs. No Drought
  misc_feature: MA Experiment ID: 20001557 Result: Up-regulated in Transcription
  misc_feature: MA Experiment 20001557 PARAMETER Experiment Name: At_Drought_Soil_Dry_P Parameter: Age (day) Value: 27
  misc_feature: MA Experiment 20001557 PARAMETER Experiment Name: At_Drought_Soil_Dry_P Parameter: Organism Value: A. thaliana
  misc_feature: MA Experiment 20001557 PARAMETER Experiment Name: At_Drought_Soil_Dry_P Parameter: Plant Line Value: WS
  misc_feature: MA Experiment 20001557 PARAMETER Experiment Name: At_Drought_Soil_Dry_P Parameter: Post Timepoint (hr) Value: 3
  misc_feature: MA Experiment 20001557 PARAMETER Experiment Name: At_Drought_Soil_Dry_P Parameter: Post-Treatment Value: Re-Water vs. No Drought
  misc_feature: MA Experiment 20001557 PARAMETER Experiment Name: At_Drought_Soil_Dry_P Parameter: Timepoint (day) Value: 13
  misc_feature: MA Experiment 20001557 PARAMETER Experiment Name: At_Drought_Soil_Dry_P Parameter: Treatment Value: Drought vs. No Drought
  misc_feature: MA Experiment ID: 20001558 Result: Up-regulated in Transcription
  misc_feature: MA Experiment 20001558 PARAMETER Experiment Name: At_Drought_Soil_Dry_P Parameter: Age (day) Value: 27
  misc_feature: MA Experiment 20001558 PARAMETER Experiment Name: At_Drought_Soil_Dry_P Parameter: Organism Value: A. thaliana
  misc_feature: MA Experiment 20001558 PARAMETER Experiment Name: At_Drought_Soil_Dry_P Parameter: Plant Line Value: WS
  misc_feature: MA Experiment 20001558 PARAMETER Experiment Name: At_Drought_Soil_Dry_P Parameter: Post Timepoint (hr) Value: 6
  misc_feature: MA Experiment 20001558 PARAMETER Experiment Name: At_Drought_Soil_Dry_P Parameter: Post-Treatment Value: Re-Water vs. No Drought
  misc_feature: MA Experiment 20001558 PARAMETER Experiment Name: At_Drought_Soil_Dry_P Parameter: Timepoint (day) Value: 13
  misc_feature: MA Experiment 20001558 PARAMETER Experiment Name: At_Drought_Soil_Dry_P Parameter: Treatment Value: Drought vs. No Drought
  misc_feature: MA Experiment ID: 20001773 Result: Down-regulated in Transcription
  misc_feature: MA Experiment 20001773 PARAMETER Experiment Name: At_Far-red-enriched-adult_P Parameter: Age (day) Value: 30
  misc_feature: MA Experiment 20001773 PARAMETER Experiment Name: At_Far-red-enriched-adult_P Parameter: Light Value: Far-red enriched vs. White
  misc_feature: MA Experiment 20001773 PARAMETER Experiment Name: At_Far-red-enriched-adult_P Parameter: Organism Value: A. thaliana
  misc_feature: MA Experiment 20001773 PARAMETER Experiment Name: At_Far-red-enriched-adult_P Parameter: Plant Line Value: Columbia
  misc_feature: MA Experiment 20001773 PARAMETER Experiment Name: At_Far-red-enriched-adult_P Parameter: Timepoint (hr) Value: 48
  misc_feature: MA Experiment 20001773 PARAMETER Experiment Name: At_Far-red-enriched-adult_P Parameter: Tissue Value: Aerial
attagtaataaacggtcaaagaatgggactttcattgagagtgagacgtcgtggaggaagtgttagcaagaaagagatcattccggtgacaagttgctcggaggaagtggagataaccataccatcgcagtttcaatgtccgatatcttacgagctaatgaaggatccggtgattattgcctcggggatcacttacgatcgcgaaaacatcgagaagtggttcgagtccgggtaccaaacttgtcccgttacaaacacggttttgacaagtttggaacagattccgaaccatacgattcggaggatgattcaaggttggtgcgggtcgtcactaggcggcgggattgaacgaatcccgacgcctcgtgtacccgtgaccagtcatcaagtctccgagatttgtgagaggttatccgctgctacgcggcgtggagactacgccgcgtgcatggagatggttacgaagatgacgagactaggaaaagagagcgagaggaatcgaaaatgcgttaaggaaaacggcgcgggattggttctttgcgtttgcttcgacgcgttttccgaaaacgcaaatgcgtcattattattggaggagactgtgtctgtgctgacgtggatgcttcccattggtttagaaggtcaatccaaactcaccacgacgtcgtcgtttaatcgtttagtggaactgttgagaaatggtgatcaaaacgctgcgtttttgataaaagagcttcttgagcttaacgtaactcacgttcacgcgttaacaaagatcaatggcgtccaagaagcgttcatgaaatcgattaatcgcgattctacatgcgtcaactcgttaatatcaatccaccatatgatcttgacaaatcaagaaaccgtatcaaggtttcttgaattggatcttgtgaatataacagtggagatgctagtggattcagaaaacagcgtttgcgagaaagcgttaacggtattaaacgtgatttgtgaaactaaagaaggaagagagaaagtgagaagaaacaagctggtgataccgattttggtgaagaagattttgaagatttctgagaagaaagatttggtttctgtgatgtggaaggtttgtaaaagtggtgatgggtctgaagttgaagaagcgttgagattaggtgcgtttaagaagcttgttgtcatgttacaagttggatgtggtgaaggaactaaggagaaagttacagagttgttgaagatgatgaataaagttatgaagatgaatggttttgttgatcgttcttattcttcttcaattgagtttaaacatgttaagaaaccattttaatacattttgtatagaggaaacaccacaatttttttc

SEQ ID NO: 23033 - protein, 438 aa, Arabidopsis thaliana
  peptide (1)..(438): Ceres Seq. ID no. 12334735
  misc_feature (39)..(113): Pfam Name: U-box domain Pfam Description: U-box domain
  misc_feature (22)..(438): Homolog of NCBI NO: 15240259 NR Description: putative protein; protein id: At5g37490.1
  misc_feature (8)..(438): Homolog of NCBI NO: 30697306 NR Description: expressed protein [Arabidopsis thaliana]
  misc_feature (8)..(438): Homolog of NCBI NO: 21593020 NR Description: unknown [Arabidopsis thaliana]
  misc_feature (8)..(438): Homolog of NCBI NO: 18408447 NR Description: expressed protein
LVINGQRMGLSLRVRRRGGSVSKKEIIPVTSCSEEVEITIPSQFQCPISYELMKDPVIIASGITYDRENIEKWFESGYQTCPVTNTVLTSLEQIPNHTIRRMIQGWCGSSLGGGIERIPTPRVPVTSHQVSEICERLSAATRRGDYAACMEMVTKMTRLGKESERNRKCVKENGAGLVLCVCFDAFSENANASLLLEETVSVLTWMLPIGLEGQSKLTTTSSFNRLVELLRNGDQNAAFLIKELLELNVTHVHALTKINGVQEAFMKSINRDSTCVNSLISIHHMILTNQETVSRFLELDLVNITVEMLVDSENSVCEKALTVLNVICETKEGREKVRRNKLVIPILVKKILKISEKKDLVSVMWKVCKSGDGSEVEEALRLGAFKKLVVMLQVGCGEGTKEKVTELLKMMNKVMKMNGFVDRSYSSSIEFKHVKKPF

SEQ ID NO: 23034 - protein, 431 aa, Arabidopsis thaliana
  peptide (1)..(431): Ceres Seq. ID no. 12334736
  misc_feature (32)..(106): Pfam Name: U-box domain Pfam Description: U-box domain
  misc_feature (15)..(431): Homolog of NCBI NO: 15240259 NR Description: putative protein; protein id: At5g37490.1
  misc_feature (1)..(431): Homolog of NCBI NO: 30697306 NR Description: expressed protein [Arabidopsis thaliana]
  misc_feature (1)..(431): Homolog of NCBI NO: 21593020 NR Description: unknown [Arabidopsis thaliana]
  misc_feature (1)..(431): Homolog of NCBI NO: 18408447 NR Description: expressed protein
MGLSLRVRRRGGSVSKKEIIPVTSCSEEVEITIPSQFQCPISYELMKDPVIIASGITYDRENIEKWFESGYQTCPVTNTVLTSLEQIPNHTIRRMIQGWCGSSLGGGIERIPTPRVPVTSHQVSEICERLSAATRRGDYAACMEMVTKMTRLGKESERNRKCVKENGAGLVLCVCFDAFSENANASLLLEETVSVLTWMLPIGLEGQSKLTTTSSFNRLVELLRNGDQNAAFLIKELLELNVTHVHALTKINGVQEAFMKSINRDSTCVNSLISIHHMILTNQETVSRFLELDLVNITVEMLVDSENSVCEKALTVLNVICETKEGREKVRRNKLVIPILVKKILKISEKKDLVSVMWKVCKSGDGSEVEEALRLGAFKKLVVMLQVGCGEGTKEKVTELLKMMNKVMKMNGFVDRSYSSSIEFKHVKKPF

SEQ ID NO: 23035 - protein, 386 aa, Arabidopsis thaliana
  peptide (1)..(386): Ceres Seq. ID no. 12334737
  misc_feature (1)..(61): Pfam Name: U-box domain Pfam Description: U-box domain
  misc_feature (1)..(386): Homolog of NCBI NO: 15240259 NR Description: putative protein; protein id: At5g37490.1
  misc_feature (1)..(386): Homolog of NCBI NO: 30697306 NR Description: expressed protein [Arabidopsis thaliana]
  misc_feature (1)..(386): Homolog of NCBI NO: 21593020 NR Description: unknown [Arabidopsis thaliana]
  misc_feature (1)..(386): Homolog of NCBI NO: 18408447 NR Description: expressed protein
MKDPVIIASGITYDRENIEKWFESGYQTCPVTNTVLTSLEQIPNHTIRRMIQGWCGSSLGGGIERIPTPRVPVTSHQVSEICERLSAATRRGDYAACMEMVTKMTRLGKESERNRKCVKENGAGLVLCVCFDAFSENANASLLLEETVSVLTWMLPIGLEGQSKLTTTSSFNRLVELLRNGDQNAAFLIKELLELNVTHVHALTKINGVQEAFMKSINRDSTCVNSLISIHHMILTNQETVSRFLELDLVNITVEMLVDSENSVCEKALTVLNVICETKEGREKVRRNKLVIPILVKKILKISEKKDLVSVMWKVCKSGDGSEVEEALRLGAFKKLVVMLQVGCGEGTKEKVTELLKMMNKVMKMNGFVDRSYSSSIEFKHVKKPF

SEQ ID NO: 23036 - DNA, 1173 bp, Arabidopsis thaliana
  misc_feature (1)..(1173): Ceres Seq. ID no. 12421556
  misc_feature: MA Experiment ID: 108433 Result: Up-regulated in Transcription
  misc_feature: MA Experiment 108433 PARAMETER Experiment Name: At_rhl_Mutant2_cDNA_P Parameter: Age (day) Value: 7
  misc_feature: MA Experiment 108433 PARAMETER Experiment Name: At_rhl_Mutant2_cDNA_P Parameter: Organism Value: A. thaliana
  misc_feature: MA Experiment 108433 PARAMETER Experiment Name: At_rhl_Mutant2_cDNA_P Parameter: Plant Line Value: rhl Mutant vs. wt landsburg
  misc_feature: MA Experiment 108433 PARAMETER Experiment Name: At_rhl_Mutant2_cDNA_P Parameter: Tissue Value: Roots
  misc_feature: MA Experiment ID: 108434 Result: Down-regulated in Transcription
  misc_feature: MA Experiment 108434 PARAMETER Experiment Name: At_Root_Tips_cDNA_P Parameter: Tissue Value: Root Tips
  misc_feature: MA Experiment ID: 108461 Result: Up-regulated in Transcription
  misc_feature: MA Experiment 108461 PARAMETER Experiment Name: At_Germinating_Seeds_cDNA_P Parameter: Age (day) Value: 1 vs. 0
  misc_feature: MA Experiment 108461 PARAMETER Experiment Name: At_Germinating_Seeds_cDNA_P Parameter: Tissue Value: Germinating Seeds
  misc_feature: MA Experiment ID: 108462 Result: Up-regulated in Transcription
  misc_feature: MA Experiment 108462 PARAMETER Experiment Name: At_Germinating_Seeds_cDNA_P Parameter: Age (day) Value: 2 vs. 0
  misc_feature: MA Experiment 108462 PARAMETER Experiment Name: At_Germinating_Seeds_cDNA_P Parameter: Tissue Value: Germinating Seeds
  misc_feature: MA Experiment ID: 108463 Result: Up-regulated in Transcription
  misc_feature: MA Experiment 108463 PARAMETER Experiment Name: At_Germinating_Seeds_cDNA_P Parameter: Age (day) Value: 3 vs. 0
  misc_feature: MA Experiment 108463 PARAMETER Experiment Name: At_Germinating_Seeds_cDNA_P Parameter: Tissue Value: Germinating Seeds
  misc_feature: MA Experiment ID: 108464 Result: Up-regulated in Transcription
  misc_feature: MA Experiment 108464 PARAMETER Experiment Name: At_Germinating_Seeds_cDNA_P Parameter: Age (day) Value: 4 vs. 0
  misc_feature: MA Experiment 108464 PARAMETER Experiment Name: At_Germinating_Seeds_cDNA_P Parameter: Tissue Value: Germinating Seeds
  misc_feature: MA Experiment ID: 108585 Result: Down-regulated in Transcription
  misc_feature: MA Experiment 108585 PARAMETER Experiment Name: At_5mM_NaNP_cDNA_P Parameter: Timepoint (hr) Value: 6
  misc_feature: MA Experiment 108585 PARAMETER Experiment Name: At_5mM_NaNP_cDNA_P Parameter: Tissue Value: Aerial
  misc_feature: MA Experiment 108585 PARAMETER Experiment Name: At_5mM_NaNP_cDNA_P Parameter: Treatment Value: null
  misc_feature: MA Experiment ID: 108595 Result: Down-regulated in Transcription
  misc_feature: MA Experiment 108595 PARAMETER Experiment Name: At_Ler-pi_Ovule_cDNA_P Parameter: Plant Line Value: null
  misc_feature: MA Experiment ID: 20000180 Result: Up-regulated in Transcription
  misc_feature: MA Experiment 20000180 PARAMETER Experiment Name: At_Germinating_Seeds_P Parameter: Age (hr) Value: 24 vs. 0
  misc_feature: MA Experiment 20000180 PARAMETER Experiment Name: At_Germinating_Seeds_P Parameter: Tissue Value: Germinating Seeds
  misc_feature: MA Experiment ID: 20000185 Result: Down-regulated in Transcription
  misc_feature: MA Experiment 20000185 PARAMETER Experiment Name: At_Roots__P Parameter: Age (day) Value: 7 vs. 21
  misc_feature: MA Experiment 20000185 PARAMETER Experiment Name: At_Roots__P Parameter: Organism Value: A. thaliana
  misc_feature: MA Experiment 20000185 PARAMETER Experiment Name: At_Roots__P Parameter: Tissue Value: Roots vs. Whole Plant
  misc_feature: MA Experiment ID: 20000234 Result: Down-regulated in Transcription
  misc_feature: MA Experiment 20000234 PARAMETER Experiment Name: At_Siliques_P Parameter: Age (day) Value: 21
  misc_feature: MA Experiment 20000234 PARAMETER Experiment Name: At_Siliques_P Parameter: Organism Value: A. thaliana
  misc_feature: MA Experiment 20000234 PARAMETER Experiment Name: At_Siliques_P Parameter: Plant Line Value: WS
  misc_feature: MA Experiment 20000234 PARAMETER Experiment Name: At_Siliques_P Parameter: Tissue Value: Less Than 5mm Siliques vs. Whole Plant
  misc_feature: MA Experiment ID: 20000235 Result: Down-regulated in Transcription
  misc_feature: MA Experiment 20000235 PARAMETER Experiment Name: At_Siliques_P Parameter: Age (day) Value: 21
  misc_feature: MA Experiment 20000235 PARAMETER Experiment Name: At_Siliques_P Parameter: Organism Value: A. thaliana
  misc_feature: MA Experiment 20000235 PARAMETER Experiment Name: At_Siliques_P Parameter: Plant Line Value: WS
  misc_feature: MA Experiment 20000235 PARAMETER Experiment Name: At_Siliques_P Parameter: Tissue Value: 5-10mm Siliques vs. Whole Plant
  misc_feature: MA Experiment ID: 20000265 Result: Down-regulated in Transcription
  misc_feature: MA Experiment 20000265 PARAMETER Experiment Name: At_Open_Flower_P Parameter: Age (day) Value: 21
  misc_feature: MA Experiment 20000265 PARAMETER Experiment Name: At_Open_Flower_P Parameter: Plant Line Value: WS
  misc_feature: MA Experiment 20000265 PARAMETER Experiment Name: At_Open_Flower_P Parameter: Tissue Value: Closed Flower vs. Whole Plant
  misc_feature: MA Experiment ID: 20000286 Result: Down-regulated in Transcription
  misc_feature: MA Experiment 20000286 PARAMETER Experiment Name: At_Open_Flower_P Parameter: Age (day) Value: 21
  misc_feature: MA Experiment 20000286 PARAMETER Experiment Name: At_Open_Flower_P Parameter: Plant Line Value: WS
  misc_feature: MA Experiment 20000286 PARAMETER Experiment Name: At_Open_Flower_P Parameter: Tissue Value: Half Open vs. Whole Plant
  misc_feature: MA Experiment ID: 20000439 Result: Down-regulated in Transcription
  misc_feature: MA Experiment 20000439 PARAMETER Experiment Name: At_Roots__P Parameter: Age (day) Value: 14 vs. 21
  misc_feature: MA Experiment 20000439 PARAMETER Experiment Name: At_Roots__P Parameter: Organism Value: A. thaliana
  misc_feature: MA Experiment 20000439 PARAMETER Experiment Name: At_Roots__P Parameter: Tissue Value: Roots vs. Whole Plant
  misc_feature: MA Experiment ID: 20001555 Result: Down-regulated in Transcription
  misc_feature: MA Experiment 20001555 PARAMETER Experiment Name: At_Drought_Soil_Dry_P Parameter: Age (day) Value: 24
  misc_feature: MA Experiment 20001555 PARAMETER Experiment Name: At_Drought_Soil_Dry_P Parameter: Organism Value: A. thaliana
  misc_feature: MA Experiment 20001555 PARAMETER Experiment Name: At_Drought_Soil_Dry_P Parameter: Plant Line Value: WS
  misc_feature: MA Experiment 20001555 PARAMETER Experiment Name: At_Drought_Soil_Dry_P Parameter: Post Timepoint (hr) Value: None
  misc_feature: MA Experiment 20001555 PARAMETER Experiment Name: At_Drought_Soil_Dry_P Parameter: Post-Treatment Value: None
  misc_feature: MA Experiment 20001555 PARAMETER Experiment Name: At_Drought_Soil_Dry_P Parameter: Timepoint (day) Value: 10
  misc_feature: MA Experiment 20001555 PARAMETER Experiment Name: At_Drought_Soil_Dry_P Parameter: Treatment Value: Drought vs. No Drought
  misc_feature: MA Experiment ID: 20001556 Result: Down-regulated in Transcription
  misc_feature: MA Experiment 20001556 PARAMETER Experiment Name: At_Drought_Soil_Dry_P Parameter: Age (day) Value: 26
  misc_feature: MA Experiment 20001556 PARAMETER Experiment Name: At_Drought_Soil_Dry_P Parameter: Organism Value: A. thaliana
  misc_feature: MA Experiment 20001556 PARAMETER Experiment Name: At_Drought_Soil_Dry_P Parameter: Plant Line Value: WS
  misc_feature: MA Experiment 20001556 PARAMETER Experiment Name: At_Drought_Soil_Dry_P Parameter: Post Timepoint (hr) Value: None
  misc_feature: MA Experiment 20001556 PARAMETER Experiment Name: At_Drought_Soil_Dry_P Parameter: Post-Treatment Value: None
  misc_feature: MA Experiment 20001556 PARAMETER Experiment Name: At_Drought_Soil_Dry_P Parameter: Timepoint (day) Value: 12
  misc_feature: MA Experiment 20001556 PARAMETER Experiment Name: At_Drought_Soil_Dry_P Parameter: Treatment Value: Drought vs. No Drought
  misc_feature: MA Experiment ID: 20001557 Result: Down-regulated in Transcription
  misc_feature: MA Experiment 20001557 PARAMETER Experiment Name: At_Drought_Soil_Dry_P Parameter: Age (day) Value: 27
  misc_feature: MA Experiment 20001557 PARAMETER Experiment Name: At_Drought_Soil_Dry_P Parameter: Organism Value: A. thaliana
  misc_feature: MA Experiment 20001557 PARAMETER Experiment Name: At_Drought_Soil_Dry_P Parameter: Plant Line Value: WS
  misc_feature: MA Experiment 20001557 PARAMETER Experiment Name: At_Drought_Soil_Dry_P Parameter: Post Timepoint (hr) Value: 3
  misc_feature: MA Experiment 20001557 PARAMETER Experiment Name: At_Drought_Soil_Dry_P Parameter: Post-Treatment Value: Re-Water vs. No Drought
  misc_feature: MA Experiment 20001557 PARAMETER Experiment Name: At_Drought_Soil_Dry_P Parameter: Timepoint (day) Value: 13
  misc_feature: MA Experiment 20001557 PARAMETER Experiment Name: At_Drought_Soil_Dry_P Parameter: Treatment Value: Drought vs. No Drought
  misc_feature: MA Experiment ID: 20001558 Result: Down-regulated in Transcription
  misc_feature: MA Experiment 20001558 PARAMETER Experiment Name: At_Drought_Soil_Dry_P Parameter: Age (day) Value: 27
  misc_feature: MA Experiment 20001558 PARAMETER Experiment Name: At_Drought_Soil_Dry_P Parameter: Organism Value: A. thaliana
  misc_feature: MA Experiment 20001558 PARAMETER Experiment Name: At_Drought_Soil_Dry_P Parameter: Plant Line Value: WS
  misc_feature: MA Experiment 20001558 PARAMETER Experiment Name: At_Drought_Soil_Dry_P Parameter: Post Timepoint (hr) Value: 6
  misc_feature: MA Experiment 20001558 PARAMETER Experiment Name: At_Drought_Soil_Dry_P Parameter: Post-Treatment Value: Re-Water vs. No Drought
  misc_feature: MA Experiment 20001558 PARAMETER Experiment Name: At_Drought_Soil_Dry_P Parameter: Timepoint (day) Value: 13
  misc_feature: MA Experiment 20001558 PARAMETER Experiment Name: At_Drought_Soil_Dry_P Parameter: Treatment Value: Drought vs. No Drought
  misc_feature: MA Experiment ID: 20001560 Result: Down-regulated in Transcription
  misc_feature: MA Experiment 20001560 PARAMETER Experiment Name: At_Drought_Soil_Dry_P Parameter: Age (day) Value: 28
  misc_feature: MA Experiment 20001560 PARAMETER Experiment Name: At_Drought_Soil_Dry_P Parameter: Organism Value: A. thaliana
  misc_feature: MA Experiment 20001560 PARAMETER Experiment Name: At_Drought_Soil_Dry_P Parameter: Plant Line Value: WS
  misc_feature: MA Experiment 20001560 PARAMETER Experiment Name: At_Drought_Soil_Dry_P Parameter: Post Timepoint (hr) Value: None
  misc_feature: MA Experiment 20001560 PARAMETER Experiment Name: At_Drought_Soil_Dry_P Parameter: Post-Treatment Value: None
  misc_feature: MA Experiment 20001560 PARAMETER Experiment Name: At_Drought_Soil_Dry_P Parameter: Timepoint (day) Value: 14
  misc_feature: MA Experiment 20001560 PARAMETER Experiment Name: At_Drought_Soil_Dry_P Parameter: Treatment Value: Drought vs. No Drought
  misc_feature: MA Experiment ID: 20001905 Result: Down-regulated in Transcription
  misc_feature: MA Experiment 20001905 PARAMETER Experiment Name: At_Drought_Reproduction_P Parameter: Age (day) Value: 40
  misc_feature: MA Experiment 20001905 PARAMETER Experiment Name: At_Drought_Reproduction_P Parameter: Organism Value: A. thaliana
  misc_feature: MA Experiment 20001905 PARAMETER Experiment Name: At_Drought_Reproduction_P Parameter: Plant Line Value: WS
  misc_feature: MA Experiment 20001905 PARAMETER Experiment Name: At_Drought_Reproduction_P Parameter: Timepoint (day) Value: 10
  misc_feature: MA Experiment 20001905 PARAMETER Experiment Name: At_Drought_Reproduction_P Parameter: Tissue Value: Rosettes
  misc_feature: MA Experiment 20001905 PARAMETER Experiment Name: At_Drought_Reproduction_P Parameter: Treatment Value: Drought vs. No Drought
  misc_feature: MA Experiment ID: 20001906 Result: Down-regulated in Transcription
  misc_feature: MA Experiment 20001906 PARAMETER Experiment Name: At_Drought_Reproduction_P Parameter: Age (day) Value: 35
  misc_feature: MA Experiment 20001906 PARAMETER Experiment Name: At_Drought_Reproduction_P Parameter: Organism Value: A. thaliana
  misc_feature: MA Experiment 20001906 PARAMETER Experiment Name: At_Drought_Reproduction_P Parameter: Plant Line Value: WS
  misc_feature: MA Experiment 20001906 PARAMETER Experiment Name: At_Drought_Reproduction_P Parameter: Timepoint (day) Value: 5
  misc_feature: MA Experiment 20001906 PARAMETER Experiment Name: At_Drought_Reproduction_P Parameter: Tissue Value: Siliques
  misc_feature: MA Experiment 20001906 PARAMETER Experiment Name: At_Drought_Reproduction_P Parameter: Treatment Value: Drought vs. No Drought
  misc_feature: MA Experiment ID: 20001908 Result: Down-regulated in Transcription
  misc_feature: MA Experiment 20001908 PARAMETER Experiment Name: At_Drought_Reproduction_P Parameter: Age (day) Value: 40
  misc_feature: MA Experiment 20001908 PARAMETER Experiment Name: At_Drought_Reproduction_P Parameter: Organism Value: A. thaliana
  misc_feature: MA Experiment 20001908 PARAMETER Experiment Name: At_Drought_Reproduction_P Parameter: Plant Line Value: WS
  misc_feature: MA Experiment 20001908 PARAMETER Experiment Name: At_Drought_Reproduction_P Parameter: Timepoint (day) Value: 10
  misc_feature: MA Experiment 20001908 PARAMETER Experiment Name: At_Drought_Reproduction_P Parameter: Tissue Value: Siliques
  misc_feature: MA Experiment 20001908 PARAMETER Experiment Name: At_Drought_Reproduction_P Parameter: Treatment Value: Drought vs. No Drought
ttttgtctcgtcttccatgtccgatatatcgttaccagagaaagagagctcagagatttagttagcttaatttttcttttcgttttgaaattaaggaagtgattgttatcaccggaggagagagagaaaatgttgggaattttcagtggagctatagtatcgccgccggaagagttagtggctgccggaagcagaactccgtcgccgaaaacaaccggatcaactttagtaaaccggttcgtcgagaaaaatccatccgctgtttctgtacaagtcggcgactatgttcagcttgcttacagccatcacaacgagagtcctctccggcctagatcatttggagctaaggatgaaatattctgcttgttccaaggctcacttgacaacctaggaagcttgaaacagcagtacgggcttgcaaaaaacgcaaacgaggttctcttggtcatcgaggcttataagactctccgtgacagagctccttacccggctaaccacgttgttgctcacctaagtggcgatttcgcctttgtggtctttgataaatcaacctccactctgtttgtagcctctgaccaagttggcaaggttccattgtattggggaataacagctgatggctatgtggcatttgctgatgatgttgacttactaaaaggtgcttgtggcaagtctcttgcgtctttccctcaaggctgttattactcgacggcattaggtgggcttaggagcttcgagaaccctaagaacaagatcactgcagttcctgctaatgagggagaaatttggggagctaccttcaaggtggaaggagcaacagttcttgcagattgaaaatgaaagagaaacacaaaagaagtttcatgtctcttaaagctctcgaactgtaacagcacaaacaaaaaaaaatatgtaggaaaaacaaaaagctgttctatgagtacttgaagctatcaatggttggtgataatgtgtgtagtgttgtatctctcttatgtcttatgcttctttgtacagcacgtgtgtgtcttctggtgttattagtgtcttcttcctaataagttaatgtctctgaaacaaaaatctaccttctcttgatccttttgcctctgtttctatagtaaatctcacaatggtaatgaggaagaacaggcgatatctctgtttctatcg

SEQ ID NO: 23037 - protein, 234 aa, Arabidopsis thaliana
  peptide (1)..(234): Ceres Seq. ID no. 12421557
  misc_feature (1)..(230): Homolog of NCBI NO: 15239993 NR Description: aluminum-induced protein-like
  misc_feature (1)..(227): Homolog of NCBI NO: 30017570 NR Description: unknown protein [Oryza sativa (japonica
  misc_feature (1)..(230): Homolog of NCBI NO: 20340249 NR Description: aluminum-induced protein-like protein
  misc_feature (2)..(222): Homolog of NCBI NO: 7489671 NR Description: hypothetical protein wali7 - wheat (fragment)
  misc_feature (1)..(233): Homolog of NCBI NO: 13958130 NR Description: aluminium induced protein [Avicennia marina]
  misc_feature (1)..(233): Homolog of NCBI NO: 34541994 NR Description: Al-induced protein [Gossypium hirsutum]
  misc_feature (1)..(233): Homolog of NCBI NO: 7488881 NR Description: hypothetical protein ARG10 - mung bean
  misc_feature (1)..(227): Homolog of NCBI NO: 7488440 NR Description: aluminum-induced protein - rape
  misc_feature (1)..(234): Homolog of NCBI NO: 15239658 NR Description: aluminium-induced protein - like
  misc_feature (1)..(227): Homolog of NCBI NO: 15228883 NR Description: unknown protein
MLGIFSGAIVSPPEELVAAGSRTPSPKTTGSTLVNRFVEKNPSAVSVQVGDYVQLAYSHHNESPLRPRSFGAKDEIFCLFQGSLDNLGSLKQQYGLAKNANEVLLVIEAYKTLRDRAPYPANHVVAHLSGDFAFVVFDKSTSTLFVASDQVGKVPLYWGITADGYVAFADDVDLLKGACGKSLASFPQGCYYSTALGGLRSFENPKNKITAVPANEGEIWGATFKVEGATVLAD

SEQ ID NO: 23038 - DNA, 1145 bp, Arabidopsis thaliana
  misc_feature (1)..(1145): Ceres Seq. ID no. 12394841
  misc_feature: MA Experiment ID: 108585 Result: Up-regulated in Transcription
  misc_feature: MA Experiment 108585 PARAMETER Experiment Name: At_5mM_NaNP_cDNA_P Parameter: Timepoint (hr) Value: 6
  misc_feature: MA Experiment 108585 PARAMETER Experiment Name: At_5mM_NaNP_cDNA_P Parameter: Tissue Value: Aerial
  misc_feature: MA Experiment 108585 PARAMETER Experiment Name: At_5mM_NaNP_cDNA_P Parameter: Treatment Value: null
  misc_feature: MA Experiment ID: 20000182 Result: Up-regulated in Transcription
  misc_feature: MA Experiment 20000182 PARAMETER Experiment Name: At_2mM_SA_P Parameter: Age (day) Value: 14
  misc_feature: MA Experiment 20000182 PARAMETER Experiment Name: At_2mM_SA_P Parameter: Organism Value: A. thaliana
  misc_feature: MA Experiment 20000182 PARAMETER Experiment Name: At_2mM_SA_P Parameter: Plant Line Value: WS
  misc_feature: MA Experiment 20000182 PARAMETER Experiment Name: At_2mM_SA_P Parameter: Timepoint (hr) Value: 6
  misc_feature: MA Experiment 20000182 PARAMETER Experiment Name: At_2mM_SA_P Parameter: Tissue Value: Aerial
  misc_feature: MA Experiment 20000182 PARAMETER Experiment Name: At_2mM_SA_P Parameter: Treatment Value: 2mM SA vs. No Treatment
  misc_feature: MA Experiment ID: 20000224 Result: Down-regulated in Transcription
  misc_feature: MA Experiment ID: 20001451 Result: Up-regulated in Transcription
  misc_feature: MA Experiment 20001451 PARAMETER Experiment Name: At_Far-red-induction_P Parameter: Age (day) Value: 7
  misc_feature: MA Experiment 20001451 PARAMETER Experiment Name: At_Far-red-induction_P Parameter: Light Value: Far-red vs. White
  misc_feature: MA Experiment 20001451 PARAMETER Experiment Name: At_Far-red-induction_P Parameter: Organism Value: A. thaliana
  misc_feature: MA Experiment 20001451 PARAMETER Experiment Name: At_Far-red-induction_P Parameter: Plant Line Value: Columbia
  misc_feature: MA Experiment 20001451 PARAMETER Experiment Name: At_Far-red-induction_P Parameter: Timepoint (hr) Value: 24
  misc_feature: MA Experiment 20001451 PARAMETER Experiment Name: At_Far-red-induction_P Parameter: Tissue Value: Whole Plant
  misc_feature: MA Experiment ID: 20001911 Result: Up-regulated in Transcription
  misc_feature: MA Experiment 20001911 PARAMETER Experiment Name: At_Drought_Reproduction_P Parameter: Age (day) Value: 40
  misc_feature: MA Experiment 20001911 PARAMETER Experiment Name: At_Drought_Reproduction_P Parameter: Organism Value: A. thaliana
  misc_feature: MA Experiment 20001911 PARAMETER Experiment Name: At_Drought_Reproduction_P Parameter: Plant Line Value: WS
  misc_feature: MA Experiment 20001911 PARAMETER Experiment Name: At_Drought_Reproduction_P Parameter: Timepoint (day) Value: 10
  misc_feature: MA Experiment 20001911 PARAMETER Experiment Name: At_Drought_Reproduction_P Parameter: Tissue Value: Flowers
  misc_feature: MA Experiment 20001911 PARAMETER Experiment Name: At_Drought_Reproduction_P Parameter: Treatment Value: Drought vs. No Drought
ctctgctaaattctgtctgatctaaaaaatcaacgaacacaaaactcatcaaagctcctcaaaaccctaaacacagtctctccatcttcttcaatctctctctcgttcggattctcatctcttcttctggtttcagattgagtcttgttactgtgtttcataagactattgaagttaagatgtctggagcattgaatatgactcttgatgagattgttaagaggggtaaaactgcaaggtctgggggaagagggatttctcgtgggcgtggtcgtggacgtggtggtggtggaagaggagctggacctgctagaagaggtcctcttgctgtgaatgctcgtccatcatctttcaccattaacaagcctgtccgtagggtcaggagcttgccatggcaaagcggtttgtttgaagatggcctaagagctgccggggcatcaggagttgaagttggaaccaggctccatgttacaaatctggaccagggtgtgacaaatgaagatataagggaactcttctctgagattggggaggtagagcgttatgcgattcattatgacaaaaatgggcgtccaagtggcacagctgaagtggtgtatccaagaagaagtgatgcatttcaagctctgaagaaatataacaatgtgctattggatggaaggccaatgagacttgagattttgggtggcaacaattcttccgaggctcctttatctggtcgtgtgaatgtgaatgtcactggactcaatggaaggctgaagaggacggttgttatccaacaaggaggaggagggagaggaggaagaggtccagctcctactgtcagtcgccgccttccaattcataaccagcagggaggagggatgagaggaggaagaggcgggtttcgtgctagagggcgtggtaatggtggccgtggtcgtggtggtggaagaggaaatggaaagaagccagtggagaagtcagctgctgatcttgacaaagatcttgagagctatcacgctgatgccatgaacacctcttaaatcgtgttgtgttgttcttactaaactagtttcagatgaaatcatgcttctctttttttcatgctcttcgttggttttgttggatgttgattgtaaagtaaatggaagccttttagaatc

SEQ ID NO: 23039 - protein, 281 aa, Arabidopsis thaliana
  peptide (1)..(281): Ceres Seq. ID no. 12394842
  misc_feature (95)..(165): Pfam Name: RNA recognition motif. (a.k.a. RRM, RBD, or RNP domain) Pfam Description: RNA recognition motif. (a.k.a. RRM, RBD, or RNP
  misc_feature (1)..(281): Homolog of NCBI NO: 11358209 NR Description: hypothetical protein T22P11.120 - Arabidopsis
  misc_feature (1)..(281): Homolog of NCBI NO: 30679669 NR Description: RNA and export factor binding protein, putative
  misc_feature (14)..(280): Homolog of NCBI NO: 38175495 NR Description: putative transcriptional coactivator(DIP2)
  misc_feature (1)..(281): Homolog of NCBI NO: 25404603 NR Description: hypothetical protein T6J19.1 [imported] -
  misc_feature (1)..(281): Homolog of NCBI NO: 9663023 NR Description: DIP1 protein [Arabidopsis thaliana]
  misc_feature (1)..(281): Homolog of NCBI NO: 18408471 NR Description: RNA and export factor binding protein, putative
  misc_feature (1)..(46): Homolog of NCBI NO: 9757981 NR Description: gene_id:K12B20.19~unknown protein [Arabidopsis
  misc_feature (56)..(281): Homolog of NCBI NO: 9757981 NR Description: gene_id:K12B20.19~unknown protein [Arabidopsis
  misc_feature (1)..(281): Homolog of NCBI NO: 9663025 NR Description: DIP2 protein [Arabidopsis thaliana]
  misc_feature (1)..(281): Homolog of NCBI NO: 30693141 NR Description: RNA and export factor binding protein, putative
MSGALNMTLDEIVKRGKTARSGGRGISRGRGRGRGGGGRGAGPARRGPLAVNARPSSFTINKPVRRVRSLPWQSGLFEDGLRAAGASGVEVGTRLHVTNLDQGVTNEDIRELFSEIGEVERYAIHYDKNGRPSGTAEVVYPRRSDAFQALKKYNNVLLDGRPMRLEILGGNNSSEAPLSGRVNVNVTGLNGRLKRTVVIQQGGGGRGGRGPAPTVSRRLPIHNQQGGGMRGGRGGFRARGRGNGGRGRGGGRGNGKKPVEKSAADLDKDLESYHADAMNTS

SEQ ID NO: 23040 - protein, 275 aa, Arabidopsis thaliana
  peptide (1)..(275): Ceres Seq. ID no. 12394843
  misc_feature (89)..(159): Pfam Name: RNA recognition motif. (a.k.a. RRM, RBD, or RNP domain) Pfam Description: RNA recognition motif. (a.k.a. RRM, RBD, or RNP
  misc_feature (1)..(275): Homolog of NCBI NO: 11358209 NR Description: hypothetical protein T22P11.120 - Arabidopsis
  misc_feature (1)..(275): Homolog of NCBI NO: 30679669 NR Description: RNA and export factor binding protein, putative
  misc_feature (8)..(274): Homolog of NCBI NO: 38175495 NR Description: putative transcriptional coactivator(DIP2)
  misc_feature (1)..(275): Homolog of NCBI NO: 25404603 NR Description: hypothetical protein T6J19.1 [imported] -
  misc_feature (1)..(275): Homolog of NCBI NO: 9663023 NR Description: DIP1 protein [Arabidopsis thaliana]
  misc_feature (1)..(275): Homolog of NCBI NO: 18408471 NR Description: RNA and export factor binding protein, putative
  misc_feature (1)..(40): Homolog of NCBI NO: 9757981 NR Description: gene_id:K12B20.19~unknown protein [Arabidopsis
  misc_feature (50)..(275): Homolog of NCBI NO: 9757981 NR Description: gene_id:K12B20.19~unknown protein [Arabidopsis
  misc_feature (1)..(275): Homolog of NCBI NO: 9663025 NR Description: DIP2 protein [Arabidopsis thaliana]
  misc_feature (1)..(275): Homolog of NCBI NO: 30693141 NR Description: RNA and export factor binding protein, putative
MTLDEIVKRGKTARSGGRGISRGRGRGRGGGGRGAGPARRGPLAVNARPSSFTINKPVRRVRSLPWQSGLFEDGLRAAGASGVEVGTRLHVTNLDQGVTNEDIRELFSEIGEVERYAIHYDKNGRPSGTAEVVYPRRSDAFQALKKYNNVLLDGRPMRLEILGGNNSSEAPLSGRVNVNVTGLNGRLKRTVVIQQGGGGRGGRGPAPTVSRRLPIHNQQGGGMRGGRGGFRARGRGNGGRGRGGGRGNGKKPVEKSAADLDKDLESYHADAMNTS

SEQ ID NO: 23041 - DNA, 1311 bp, Arabidopsis thaliana
  misc_feature (1)..(1311): Ceres Seq. ID no. 13580767
  misc_feature: MA Experiment ID: 108434 Result: Up-regulated in Transcription
  misc_feature: MA Experiment 108434 PARAMETER Experiment Name: At_Root_Tips_cDNA_P Parameter: Tissue Value: Root Tips
  misc_feature: MA Experiment ID: 108462 Result: Down-regulated in Transcription
  misc_feature: MA Experiment 108462 PARAMETER Experiment Name: At_Germinating_Seeds_cDNA_P Parameter: Age (day) Value: 2 vs. 0
  misc_feature: MA Experiment 108462 PARAMETER Experiment Name: At_Germinating_Seeds_cDNA_P Parameter: Tissue Value: Germinating Seeds
  misc_feature: MA Experiment ID: 108463 Result: Down-regulated in Transcription
  misc_feature: MA Experiment 108463 PARAMETER Experiment Name: At_Germinating_Seeds_cDNA_P Parameter: Age (day) Value: 3 vs. 0
  misc_feature: MA Experiment 108463 PARAMETER Experiment Name: At_Germinating_Seeds_cDNA_P Parameter: Tissue Value: Germinating Seeds
  misc_feature: MA Experiment ID: 108595 Result: Down-regulated in Transcription
  misc_feature: MA Experiment 108595 PARAMETER Experiment Name: At_Ler-pi_Ovule_cDNA_P Parameter: Plant Line Value: null
  misc_feature: MA Experiment ID: 20000224 Result: Down-regulated in Transcription
  misc_feature: MA Experiment ID: 20001911 Result: Down-regulated in Transcription
  misc_feature: MA Experiment 20001911 PARAMETER Experiment Name: At_Drought_Reproduction_P Parameter: Age (day) Value: 40
  misc_feature: MA Experiment 20001911 PARAMETER Experiment Name: At_Drought_Reproduction_P Parameter: Organism Value: A. thaliana
  misc_feature: MA Experiment 20001911 PARAMETER Experiment Name: At_Drought_Reproduction_P Parameter: Plant Line Value: WS
  misc_feature: MA Experiment 20001911 PARAMETER Experiment Name: At_Drought_Reproduction_P Parameter: Timepoint (day) Value: 10
  misc_feature: MA Experiment 20001911 PARAMETER Experiment Name: At_Drought_Reproduction_P Parameter: Tissue Value: Flowers
  misc_feature: MA Experiment 20001911 PARAMETER Experiment Name: At_Drought_Reproduction_P Parameter: Treatment Value: Drought vs. No Drought
ctctccctctttcccccttacgtaaccctaagcggacggagcaatgctctgctagatctatctttctttcaattcttcaccagagatcgtcgagactcaccattgaaatcgaagaaacagcaccaatttccacttcaccaccgaaagagagagacagagaggataataaaaggccgccatggatttagatcaatggatttccaaggttaaagacggccaacatctctctgaggacgagcttcaacttctctgcgaatacgtgaaagaaattcttattgaggaatcaaatgtacaacctgtcaacagtcctgtcaccgtctgtggtgatatccatggccagtttcatgatcttatgaagcttttccagaccggagcatgttcccgagaccaattacatatttatgggggatttcgttgatagaggttacaacagtcttgaagttttcaccattcttttgcttcttaaagcaagacatccagccaatatcactcttttgcgtggaaatcatgaaagtagacagctaactcaggtgtatggtttctatgacgaatgccaaaggaagtatggtaatgctaatgcttggagatattgcacggatgtttttgactatcttacactttcagctattatagatggcactgttctatgtgttcatggtggcctttcacctgatgtacggacaattgaccagataagattgattgagcggaattgcgaaataccgcatgaaggacccttctgtgatcttatgtggagtgatcctgaagatattgaaacatgggctgtcagtccacgtggagctggttggcttttcgggtccagggttaccactgagtttaaccatattaacaatcttgatctagtatgtcgcgctcaccagcttgtacaagaaggtctcaagtacatgttccaagataaaggtcttgtaactgtgtggtctgcgcctaattactgctaccgttgtgggaatgtggcttctatattgagtttcaatgacaacatggaaagggaagtgaagttcttcacggagacagaagagaacaatcaaatgagagggccaaggacaggtgttccttatttcctgtgattcatgatgatgatcctacatcattattagtctcgtattgctcttatcaatttagccattatcatgattgccattggcttatgttctttcaaggtatatcttctgatgttgtttacacttccattgttttttttttcctttttccattttggaaacattttcttgtgaaagtgaatgtcactttggtaattttagtggttttgatgcactttaacctgaaccc

SEQ ID NO: 23042 - protein, 228 aa, Arabidopsis thaliana
  peptide (1)..(228): Ceres Seq. ID no. 13580768
  misc_feature (1)..(163): Pfam Name: Calcineurin-like phosphoesterase Pfam Description: Calcineurin-like phosphoesterase
  misc_feature (1)..(228): Homolog of NCBI NO: 19424288 NR Description: protein phosphatase V [Rattus norvegicus]
  misc_feature (1)..(228): Homolog of NCBI NO: 6537210 NR Description: serine/threonine protein phosphatase catalytic
  misc_feature (1)..(228): Homolog of NCBI NO: 1071868 NR Description: phosphoprotein phosphatase (EC 3.1.3.16) PPV - rat
  misc_feature (1)..(228): Homolog of NCBI NO: 4506029 NR Description: protein phosphatase 6, catalytic subunit
  misc_feature (1)..(228): Homolog of NCBI NO: 21312758 NR Description: protein phosphatase 6, catalytic subunit [Mus
  misc_feature (1)..(228): Homolog of NCBI NO: 34911376 NR Description: putative Ser/Thr protein phosphatase
  misc_feature (1)..(228): Homolog of NCBI NO: 20385063 NR Description: serine/threonine protein phosphatase 2A [Pisum
  misc_feature (1)..(228): Homolog of NCBI NO: 7488629 NR Description: phosphoprotein phosphatase (EC 3.1.3.16) - apple
  misc_feature (1)..(228): Homolog of NCBI NO: 15231006 NR Description: protein phosphatase [Arabidopsis thaliana]
  misc_feature (1)..(228): Homolog of NCBI NO: 15222945 NR Description: serine/threonine protein phosphatase [Arabidopsis
MGDFVDRGYNSLEVFTILLLLKARHPANITLLRGNHESRQLTQVYGFYDECQRKYGNANAWRYCTDVFDYLTLSAIIDGTVLCVHGGLSPDVRTIDQIRLIERNCEIPHEGPFCDLMWSDPEDIETWAVSPRGAGWLFGSRVTTEFNHINNLDLVCRAHQLVQEGLKYMFQDKGLVTVWSAPNYCYRCGNVASILSFNDNMEREVKFFTETEENNQMRGPRTGVPYFL

SEQ ID NO: 23043 - DNA, 1591 bp, Arabidopsis thaliana
  misc_feature (1)..(1591): Ceres Seq. ID no. 13611683
  misc_feature: MA Experiment ID: 108434 Result: Up-regulated in Transcription
  misc_feature: MA Experiment 108434 PARAMETER Experiment Name: At_Root_Tips_cDNA_P Parameter: Tissue Value: Root Tips
  misc_feature: MA Experiment ID: 20000179 Result: Up-regulated in Transcription
  misc_feature: MA Experiment 20000179 PARAMETER Experiment Name: At_Germinating_Seeds_P Parameter: Age (hr) Value: 6 vs. 0
  misc_feature: MA Experiment 20000179 PARAMETER Experiment Name: At_Germinating_Seeds_P Parameter: Tissue Value: Germinating Seeds
  misc_feature: MA Experiment ID: 20000180 Result: Up-regulated in Transcription
  misc_feature: MA Experiment 20000180 PARAMETER Experiment Name: At_Germinating_Seeds_P Parameter: Age (hr) Value: 24 vs. 0
  misc_feature: MA Experiment 20000180 PARAMETER Experiment Name: At_Germinating_Seeds_P Parameter: Tissue Value: Germinating Seeds
  misc_feature: MA Experiment ID: 20000185 Result: Up-regulated in Transcription
  misc_feature: MA Experiment 20000185 PARAMETER Experiment Name: At_Roots__P Parameter: Age (day) Value: 7 vs. 21
  misc_feature: MA Experiment 20000185 PARAMETER Experiment Name: At_Roots__P Parameter: Organism Value: A. thaliana
  misc_feature: MA Experiment 20000185 PARAMETER Experiment Name: At_Roots__P Parameter: Tissue Value: Roots vs. Whole Plant
  misc_feature: MA Experiment ID: 20000227 Result: Up-regulated in Transcription
  misc_feature: MA Experiment 20000227 PARAMETER Experiment Name: At_Root-Tips-vs-Tops_P Parameter: Tissue Value: Root Tips vs. Root Tops
  misc_feature: MA Experiment ID: 20001451 Result: Down-regulated in Transcription
  misc_feature: MA Experiment 20001451 PARAMETER Experiment Name: At_Far-red-induction_P Parameter: Age (day) Value: 7
  misc_feature: MA Experiment 20001451 PARAMETER Experiment Name: At_Far-red-induction_P Parameter: Light Value: Far-red vs. White
  misc_feature: MA Experiment 20001451 PARAMETER Experiment Name: At_Far-red-induction_P Parameter: Organism Value: A. thaliana
  misc_feature: MA Experiment 20001451 PARAMETER Experiment Name: At_Far-red-induction_P Parameter: Plant Line Value: Columbia
  misc_feature: MA Experiment 20001451 PARAMETER Experiment Name: At_Far-red-induction_P Parameter: Timepoint (hr) Value: 24
  misc_feature: MA Experiment 20001451 PARAMETER Experiment Name: At_Far-red-induction_P Parameter: Tissue Value: Whole Plant
atcgccgagtctgcttcttcttctctctctctctctctagtggtcacactcacttcacacccgtgaaaaaaccctaggaaccaaatatggtgaacctctcgagatccgtcgcgttgatctctgtattcctccttcctttacttagcttctctttctccgtcgataatccgacggatcggcgtgttcttgttcttctcgatgatttatcactcaaatcctctcattctatcttcttcaacactctcaagtctcgtggattcgatctcgatttcaagttagctgaagattcgaagcttgcgcttcaacgatacggccagtacttgtacgatgggttgatcatcttcgccccatcaacagaacggtttggaggatccttggattcgaaatccattgctgattttgttgattccggtcgtgacttgatcttatcggcggatactgctgcatctgatttgattaggggtattgccacagagtgtggggttgatttcgatgaggattcttcagctatggttattgatcatactagcttctccgtctctgatgttgacggcgaccacaccttgattgctgccgacgatttagtgaaatccgatgtcattttgggaaaaaccaagattgaggctcccgtgctcttcagaggagttgcacattcgttgaaccctactaacaatctggttttgaaagttctttcagcctctccatcagcttattctgctaacccaagctcgaagttgtctagtcccccccagctcactgggtcttcaatttcgctagtctcggtcatgcaggccaggaacaatgctagggttgtgatctcaggctcagtgcagttgtttagcgataggttaatcagatctggtgtccagaaagcagggagtccgaaccaatacgaaaaatctggcaacgaacagtttgtgactgaactaagcaaatgggtcttccacgaaaggggccatctgaaggctggtaatcttgtacaccatagggttggagaaacagatgagccagctatatataggataaaggatgacctggaattttctgtagagatatatgagtggtcaggaaagagctgggagccgtatgttgctaacgatgtgcaggttcagttttacatgatgagcccgtatgtgttgaaaaccctgtcaacagacaagaagggtctgtttcatacatctttcaaggttcctgatgtctacggtgtattccagtttaaggttgaatatgaaaagctaggctacactacattatctctttcgaagcagattccggtgcggccttacagacacaatgagtatgagagatttatcccaactgcgtatccttattatggagcctgctttacgacgatggctggtttcttcgtcttcagcttcgtctacctctaccataagtagaatcccttaaatggtggccaagtcccataaagtaagccaaacctccatatttagatgagaaaaaacaactttcgaactagagaccaatatttttgggcagcaaggttttcatatgtttctagttttagccaaacagttgcaaccttctttttgtttcccagatatttctatgttaacgtaactttacaccc

SEQ ID NO: 23044 - protein, 437 aa, Arabidopsis thaliana
  peptide (1)..(437): Ceres Seq. ID no. 13611684
  misc_feature (8)..(437): Pfam Name: Dolichyl-diphosphooligosaccharide-protein Pfam Description: Dolichyl-diphosphooligosaccharide-protein
  misc_feature (1)..(437): Homolog of NCBI NO: 730241 NR Description: Dolichyl-diphosphooligosaccharide--protein
  misc_feature (1)..(437): Homolog of NCBI NO: 2662375 NR Description: oligosaccharyltransferase [Homo sapiens]
  misc_feature (1)..(437): Homolog of NCBI NO: 30584753 NR Description: Homo sapiens
  misc_feature (1)..(437): Homolog of NCBI NO: 21104416 NR Description: dolichyl-diphosphooligosaccharide-protein
  misc_feature (1)..(437): Homolog of NCBI NO: 20070197 NR Description: dolichyl-diphosphooligosaccharide-protein
  misc_feature (1)..(437): Homolog of NCBI NO: 38175467 NR Description: putative dolichyl-di-phosphooligosaccharide-
  misc_feature (1)..(437): Homolog of NCBI NO: 8843726 NR Description: dolichyl-di-phosphooligosaccharide-protein
  misc_feature (1)..(437): Homolog of NCBI NO: 14334506 NR Description: putative
  misc_feature (1)..(437): Homolog of NCBI NO: 21553942 NR Description: dolichyl-di-phosphooligosaccharide-protein
  misc_feature (1)..(437): Homolog of NCBI NO: 18425101 NR Description: dolichyl-di-phosphooligosaccharide-protein
MVNLSRSVALISVFLLPLLSFSFSVDNPTDRRVLVLLDDLSLKSSHSIFFNTLKSRGFDLDFKLAEDSKLALQRYGQYLYDGLIIFAPSTERFGGSLDSKSIADFVDSGRDLILSADTAASDLIRGIATECGVDFDEDSSAMVIDHTSFSVSDVDGDHTLIAADDLVKSDVILGKTKIEAPVLFRGVAHSLNPTNNLVLKVLSASPSAYSANPSSKLSSPPQLTGSSISLVSVMQARNNARVVISGSVQLFSDRLIRSGVQKAGSPNQYEKSGNEQFVTELSKWVFHERGHLKAGNLVHHRVGETDEPAIYRIKDDLEFSVEIYEWSGKSWEPYVANDVQVQFYMMSPYVLKTLSTDKKGLFHTSFKVPDVYGVFQFKVEYEKLGYTTLSLSKQIPVRPYRHNEYERFIPTAYPYYGACFTTMAGFFVFSFVYLYHK

SEQ ID NO: 23045 - protein, 296 aa, Arabidopsis thaliana
  peptide (1)..(296): Ceres Seq. ID no. 13611685
  misc_feature (1)..(296): Pfam Name: Dolichyl-diphosphooligosaccharide-protein Pfam Description: Dolichyl-diphosphooligosaccharide-protein
  misc_feature (1)..(296): Homolog of NCBI NO: 730241 NR Description: Dolichyl-diphosphooligosaccharide--protein
  misc_feature (1)..(296): Homolog of NCBI NO: 2662375 NR Description: oligosaccharyltransferase [Homo sapiens]
  misc_feature (1)..(296): Homolog of NCBI NO: 30584753 NR Description: Homo sapiens
  misc_feature (1)..(296): Homolog of NCBI NO: 21104416 NR Description: dolichyl-diphosphooligosaccharide-protein
  misc_feature (1)..(296): Homolog of NCBI NO: 20070197 NR Description: dolichyl-diphosphooligosaccharide-protein
  misc_feature (1)..(296): Homolog of NCBI NO: 38175467 NR Description: putative dolichyl-di-phosphooligosaccharide-
  misc_feature (1)..(296): Homolog of NCBI NO: 8843726 NR Description: dolichyl-di-phosphooligosaccharide-protein
  misc_feature (1)..(296): Homolog of NCBI NO: 14334506 NR Description: putative
  misc_feature (1)..(296): Homolog of NCBI NO: 21553942 NR Description: dolichyl-di-phosphooligosaccharide-protein
  misc_feature (1)..(296): Homolog of NCBI NO: 18425101 NR Description: dolichyl-di-phosphooligosaccharide-protein
MVIDHTSFSVSDVDGDHTLIAADDLVKSDVILGKTKIEAPVLFRGVAHSLNPTNNLVLKVLSASPSAYSANPSSKLSSPPQLTGSSISLVSVMQARNNARVVISGSVQLFSDRLIRSGVQKAGSPNQYEKSGNEQFVTELSKWVFHERGHLKAGNLVHHRVGETDEPAIYRIKDDLEFSVEIYEWSGKSWEPYVANDVQVQFYMMSPYVLKTLSTDKKGLFHTSFKVPDVYGVFQFKVEYEKLGYTTLSLSKQIPVRPYRHNEYERFIPTAYPYYGACFTTMAGFFVFSFVYLYHK

SEQ ID NO: 23046 - DNA, 1405 bp, Arabidopsis thaliana
  misc_feature (1)..(1405): Ceres Seq. ID no. 13493877
  misc_feature: MA Experiment ID: 108461 Result: Up-regulated in Transcription
  misc_feature: MA Experiment 108461 PARAMETER Experiment Name: At_Germinating_Seeds_cDNA_P Parameter: Age (day) Value: 1 vs. 0
  misc_feature: MA Experiment 108461 PARAMETER Experiment Name: At_Germinating_Seeds_cDNA_P Parameter: Tissue Value: Germinating Seeds
  misc_feature: MA Experiment ID: 108462 Result: Up-regulated in Transcription
  misc_feature: MA Experiment 108462 PARAMETER Experiment Name: At_Germinating_Seeds_cDNA_P Parameter: Age (day) Value: 2 vs. 0
  misc_feature: MA Experiment 108462 PARAMETER Experiment Name: At_Germinating_Seeds_cDNA_P Parameter: Tissue Value: Germinating Seeds
  misc_feature: MA Experiment ID: 108463 Result: Up-regulated in Transcription
  misc_feature: MA Experiment 108463 PARAMETER Experiment Name: At_Germinating_Seeds_cDNA_P Parameter: Age (day) Value: 3 vs. 0
  misc_feature: MA Experiment 108463 PARAMETER Experiment Name: At_Germinating_Seeds_cDNA_P Parameter: Tissue Value: Germinating Seeds
  misc_feature: MA Experiment ID: 108464 Result: Up-regulated in Transcription
  misc_feature: MA Experiment 108464 PARAMETER Experiment Name: At_Germinating_Seeds_cDNA_P Parameter: Age (day) Value: 4 vs. 0
  misc_feature: MA Experiment 108464 PARAMETER Experiment Name: At_Germinating_Seeds_cDNA_P Parameter: Tissue Value: Germinating Seeds
  misc_feature: MA Experiment ID: 108473 Result: Up-regulated in Transcription
  misc_feature: MA Experiment 108473 PARAMETER Experiment Name: At_Drought_Flowers_cDNA_P Parameter: Timepoint (hr) Value: 7 d
  misc_feature: MA Experiment 108473 PARAMETER Experiment Name: At_Drought_Flowers_cDNA_P Parameter: Tissue Value: Flower
  misc_feature: MA Experiment 108473 PARAMETER Experiment Name: At_Drought_Flowers_cDNA_P Parameter: Treatment Value: Drought vs. No Drought
  misc_feature: MA Experiment ID: 108561 Result: Up-regulated in Transcription
  misc_feature: MA Experiment 108561 PARAMETER Experiment Name: At_100uM_ABA_cDNA_P Parameter: Timepoint (hr) Value: 6
  misc_feature: MA Experiment 108561 PARAMETER Experiment Name: At_100uM_ABA_cDNA_P Parameter: Tissue Value: Aerial
  misc_feature: MA Experiment 108561 PARAMETER Experiment Name: At_100uM_ABA_cDNA_P Parameter: Treatment Value: 100uM ABA vs. No Treatment
  misc_feature: MA Experiment ID: 108573 Result: Up-regulated in Transcription
  misc_feature: MA Experiment 108573 PARAMETER Experiment Name: At_Drought_cDNA_P Parameter: Timepoint (hr) Value: 6
  misc_feature: MA Experiment 108573 PARAMETER Experiment Name: At_Drought_cDNA_P Parameter: Tissue Value: Aerial
  misc_feature: MA Experiment 108573 PARAMETER Experiment Name: At_Drought_cDNA_P Parameter: Treatment Value: Drought vs. No Drought
  misc_feature: MA Experiment ID: 108594 Result: Down-regulated in Transcription
  misc_feature: MA Experiment 108594 PARAMETER Experiment Name: At_Ler-rhl_Root_cDNA_P Parameter: Plant Line Value: null
  misc_feature: MA Experiment ID: 108595 Result: Up-regulated in Transcription
  misc_feature: MA Experiment 108595 PARAMETER Experiment Name: At_Ler-pi_Ovule_cDNA_P Parameter: Plant Line Value: null
  misc_feature: MA Experiment ID: 108605 Result: Up-regulated in Transcription
  misc_feature: MA Experiment 108605 PARAMETER Experiment Name: At_100uM_ABA_cDNA_P Parameter: Timepoint (hr) Value: 6
  misc_feature: MA Experiment 108605 PARAMETER Experiment Name: At_100uM_ABA_cDNA_P Parameter: Tissue Value: Aerial
  misc_feature: MA Experiment 108605 PARAMETER Experiment Name: At_100uM_ABA_cDNA_P Parameter: Treatment Value: 100uM ABA vs. No Treatment
  misc_feature: MA Experiment ID: 108607 Result: Up-regulated in Transcription
  misc_feature: MA Experiment 108607 PARAMETER Experiment Name: At_100uM_ABA_cDNA_P Parameter: Timepoint (hr) Value: 4
  misc_feature: MA Experiment 108607 PARAMETER Experiment Name: At_100uM_ABA_cDNA_P Parameter: Tissue Value: Aerial
  misc_feature: MA Experiment 108607 PARAMETER Experiment Name: At_100uM_ABA_cDNA_P Parameter: Treatment Value: 100uM ABA vs. No Treatment
  misc_feature: MA Experiment ID: 20000069 Result: Up-regulated in Transcription
  misc_feature: MA Experiment 20000069 PARAMETER Experiment Name: At_100uM_ABA_Mutants_cDNA_P Parameter: Plant Line Value: CS23
  misc_feature: MA Experiment 20000069 PARAMETER Experiment Name: At_100uM_ABA_Mutants_cDNA_P Parameter: Timepoint (hr) Value: 6
  misc_feature: MA Experiment 20000069 PARAMETER Experiment Name: At_100uM_ABA_Mutants_cDNA_P Parameter: Tissue Value: Aerial
  misc_feature: MA Experiment 20000069 PARAMETER Experiment Name: At_100uM_ABA_Mutants_cDNA_P Parameter: Treatment Value: 100uM ABA vs. No Treatment
  misc_feature: MA Experiment ID: 20000070 Result: Up-regulated in Transcription
  misc_feature: MA Experiment 20000070 PARAMETER Experiment Name: At_100uM_ABA_Mutants_cDNA_P Parameter: Plant Line Value: CS24
  misc_feature: MA Experiment 20000070 PARAMETER Experiment Name: At_100uM_ABA_Mutants_cDNA_P Parameter: Timepoint (hr) Value: 6
  misc_feature: MA Experiment 20000070 PARAMETER Experiment Name: At_100uM_ABA_Mutants_cDNA_P Parameter: Tissue Value: Aerial
  misc_feature: MA Experiment 20000070 PARAMETER Experiment Name: At_100uM_ABA_Mutants_cDNA_P Parameter: Treatment Value: 100uM ABA vs. No Treatment
  misc_feature: MA Experiment ID: 20000071 Result: Up-regulated in Transcription
  misc_feature: MA Experiment 20000071 PARAMETER Experiment Name: At_100uM_ABA_Mutants_cDNA_P Parameter: Plant Line Value: CS8104
  misc_feature: MA Experiment 20000071 PARAMETER Experiment Name: At_100uM_ABA_Mutants_cDNA_P Parameter: Timepoint (hr) Value: 6
  misc_feature: MA Experiment 20000071 PARAMETER Experiment Name: At_100uM_ABA_Mutants_cDNA_P Parameter: Tissue Value: Aerial
  misc_feature: MA Experiment 20000071 PARAMETER Experiment Name: At_100uM_ABA_Mutants_cDNA_P Parameter: Treatment Value: 100uM ABA vs. No Treatment
  misc_feature: MA Experiment ID: 20000086 Result: Up-regulated in Transcription
  misc_feature: MA Experiment 20000086 PARAMETER Experiment Name: At_100uM_ABA_Mutants_cDNA_P Parameter: Plant Line Value: CS22
  misc_feature: MA Experiment 20000086 PARAMETER Experiment Name: At_100uM_ABA_Mutants_cDNA_P Parameter: Timepoint (hr) Value: 6
  misc_feature: MA Experiment 20000086 PARAMETER Experiment Name: At_100uM_ABA_Mutants_cDNA_P Parameter: Tissue Value: Aerial
  misc_feature: MA Experiment 20000086 PARAMETER Experiment Name: At_100uM_ABA_Mutants_cDNA_P Parameter: Treatment Value: 100uM ABA vs. No Treatment
  misc_feature: MA Experiment ID: 20000087 Result: Up-regulated in Transcription
  misc_feature: MA Experiment 20000087 PARAMETER Experiment Name: At_100uM_ABA_Mutants_cDNA_P Parameter: Plant Line Value: WS
  misc_feature: MA Experiment 20000087 PARAMETER Experiment Name: At_100uM_ABA_Mutants_cDNA_P Parameter: Timepoint (hr) Value: 6
  misc_feature: MA Experiment 20000087 PARAMETER Experiment Name: At_100uM_ABA_Mutants_cDNA_P Parameter: Tissue Value: Aerial
  misc_feature: MA Experiment 20000087 PARAMETER Experiment Name: At_100uM_ABA_Mutants_cDNA_P Parameter: Treatment Value: 100uM ABA vs. No Treatment
  misc_feature: MA Experiment ID: 20000169 Result: Up-regulated in Transcription
  misc_feature: MA Experiment 20000169 PARAMETER Experiment Name: At_100uM_ABA_P Parameter: Age (day) Value: 14
  misc_feature: MA Experiment 20000169 PARAMETER Experiment Name: At_100uM_ABA_P Parameter: Organism Value: A. thaliana
  misc_feature: MA Experiment 20000169 PARAMETER Experiment Name: At_100uM_ABA_P Parameter: Plant Line Value: WS
  misc_feature: MA Experiment 20000169 PARAMETER Experiment Name: At_100uM_ABA_P Parameter: Timepoint (hr) Value: 6
  misc_feature: MA Experiment 20000169 PARAMETER Experiment Name: At_100uM_ABA_P Parameter: Tissue Value: Aerial
  misc_feature: MA Experiment 20000169 PARAMETER Experiment Name: At_100uM_ABA_P Parameter: Treatment Value: 100uM ABA vs. No Treatment
  misc_feature: MA Experiment ID: 20000180 Result: Up-regulated in Transcription
  misc_feature: MA Experiment 20000180 PARAMETER Experiment Name: At_Germinating_Seeds_P Parameter: Age (hr) Value: 24 vs. 0
  misc_feature: MA Experiment 20000180 PARAMETER Experiment Name: At_Germinating_Seeds_P Parameter: Tissue Value: Germinating Seeds
  misc_feature: MA Experiment ID: 20000184 Result: Up-regulated in Transcription
  misc_feature: MA Experiment 20000184 PARAMETER Experiment Name: At_Shoots__P Parameter: Age (day) Value: 7
  misc_feature: MA Experiment 20000184 PARAMETER Experiment Name: At_Shoots__P Parameter: Tissue Value: Shoots vs. Whole Plant
  misc_feature: MA Experiment ID: 20000185 Result: Up-regulated in Transcription
  misc_feature: MA Experiment 20000185 PARAMETER Experiment Name: At_Roots__P Parameter: Age (day) Value: 7 vs. 21
  misc_feature: MA Experiment 20000185 PARAMETER Experiment Name: At_Roots__P Parameter: Organism Value: A. thaliana
  misc_feature: MA Experiment 20000185 PARAMETER Experiment Name: At_Roots__P Parameter: Tissue Value: Roots vs. Whole Plant
  misc_feature: MA Experiment ID: 20000234 Result: Up-regulated in Transcription
  misc_feature: MA Experiment 20000234 PARAMETER Experiment Name: At_Siliques_P Parameter: Age (day) Value: 21
  misc_feature: MA Experiment 20000234 PARAMETER Experiment Name: At_Siliques_P Parameter: Organism Value: A. thaliana
  misc_feature: MA Experiment 20000234 PARAMETER Experiment Name: At_Siliques_P Parameter: Plant Line Value: WS
  misc_feature: MA Experiment 20000234 PARAMETER Experiment Name: At_Siliques_P Parameter: Tissue Value: Less Than 5mm Siliques vs. Whole Plant
  misc_feature: MA Experiment ID: 20000267 Result: Up-regulated in Transcription
  misc_feature: MA Experiment 20000267 PARAMETER Experiment Name: At_Drought_P Parameter: Age (day) Value: 7
  misc_feature: MA Experiment 20000267 PARAMETER Experiment Name: At_Drought_P Parameter: Organism Value: A. thaliana
  misc_feature: MA Experiment 20000267 PARAMETER Experiment Name: At_Drought_P Parameter: Plant Line Value: WS
  misc_feature: MA Experiment 20000267 PARAMETER Experiment Name: At_Drought_P Parameter: Timepoint (hr) Value: 6
  misc_feature: MA Experiment 20000267 PARAMETER Experiment Name: At_Drought_P Parameter: Tissue Value: Whole Plant
  misc_feature: MA Experiment 20000267 PARAMETER Experiment Name: At_Drought_P Parameter: Treatment Value: Drought vs. No Drought
  misc_feature: MA Experiment ID: 20000436 Result: Up-regulated in Transcription
  misc_feature: MA Experiment 20000436 PARAMETER Experiment Name: At_Drought_P Parameter: Age (day) Value: 7
  misc_feature: MA Experiment 20000436 PARAMETER Experiment Name: At_Drought_P Parameter: Organism Value: A. thaliana
  misc_feature: MA Experiment 20000436 PARAMETER Experiment Name: At_Drought_P Parameter: Plant Line Value: WS
  misc_feature: MA Experiment 20000436 PARAMETER Experiment Name: At_Drought_P Parameter: Timepoint (hr) Value: 12
  misc_feature: MA Experiment 20000436 PARAMETER Experiment Name: At_Drought_P Parameter: Tissue Value: Whole Plant
  misc_feature: MA Experiment 20000436 PARAMETER Experiment Name: At_Drought_P Parameter: Treatment Value: Drought vs. No Drought
  misc_feature: MA Experiment ID: 20000437 Result: Up-regulated in Transcription
  misc_feature: MA Experiment 20000437 PARAMETER Experiment Name: At_Drought_P Parameter: Age (day) Value: 8
  misc_feature: MA Experiment 20000437 PARAMETER Experiment Name: At_Drought_P Parameter: Organism Value: A. thaliana
  misc_feature: MA Experiment 20000437 PARAMETER Experiment Name: At_Drought_P Parameter: Plant Line Value: WS
  misc_feature: MA Experiment 20000437 PARAMETER Experiment Name: At_Drought_P Parameter: Timepoint (hr) Value: 24
  misc_feature: MA Experiment 20000437 PARAMETER Experiment Name: At_Drought_P Parameter: Tissue Value: Whole Plant
  misc_feature: MA Experiment 20000437 PARAMETER Experiment Name: At_Drought_P Parameter: Treatment Value: Drought vs. No Drought
  misc_feature: MA Experiment ID: 20000439 Result: Up-regulated in Transcription
  misc_feature: MA Experiment 20000439 PARAMETER Experiment Name: At_Roots__P Parameter: Age (day) Value: 14 vs. 21
  misc_feature: MA Experiment 20000439 PARAMETER Experiment Name: At_Roots__P Parameter: Organism Value: A. thaliana
  misc_feature: MA Experiment 20000439 PARAMETER Experiment Name: At_Roots__P Parameter: Tissue Value: Roots vs. Whole Plant
  misc_feature: MA Experiment ID: 20000441 Result: Down-regulated in Transcription
  misc_feature: MA Experiment 20000441 PARAMETER Experiment Name: At_1uM_BR-BRZ__P Parameter: Tissue Value: Shoot Apices
  misc_feature: MA Experiment 20000441 PARAMETER Experiment Name: At_1uM_BR-BRZ__P Parameter: Treatment Value: 1uM BR vs. No Treatment
  misc_feature: MA Experiment ID: 20000443 Result: Down-regulated in Transcription
  misc_feature: MA Experiment 20000443 PARAMETER Experiment Name: At_1uM_BR-BRZ__P Parameter: Tissue Value: Shoot Apices
  misc_feature: MA Experiment 20000443 PARAMETER Experiment Name: At_1uM_BR-BRZ__P Parameter: Treatment Value: 1uM BRZ vs. No Treatment
  misc_feature: MA Experiment ID: 20000453 Result: Up-regulated in Transcription
  misc_feature: MA Experiment 20000453 PARAMETER Experiment Name: At_100uM_ABA_P Parameter: Age (day) Value: 15
  misc_feature: MA Experiment 20000453 PARAMETER Experiment Name: At_100uM_ABA_P Parameter: Organism Value: A. thaliana
  misc_feature: MA Experiment 20000453 PARAMETER Experiment Name: At_100uM_ABA_P Parameter: Plant Line Value: WS
  misc_feature: MA Experiment 20000453 PARAMETER Experiment Name: At_100uM_ABA_P Parameter: Timepoint (hr) Value: 24
  misc_feature: MA Experiment 20000453 PARAMETER Experiment Name: At_100uM_ABA_P Parameter: Tissue Value: Aerial
  misc_feature: MA Experiment 20000453 PARAMETER Experiment Name: At_100uM_ABA_P Parameter: Treatment Value: 100uM ABA vs. No Treatment
  misc_feature: MA Experiment ID: 20000527 Result: Down-regulated in Transcription
  misc_feature: MA Experiment 20000527 PARAMETER Experiment Name: At_10percent_PEG_P Parameter: Age (day) Value: 20
  misc_feature: MA Experiment 20000527 PARAMETER Experiment Name: At_10percent_PEG_P Parameter: Organism Value: A. thaliana
  misc_feature: MA Experiment 20000527 PARAMETER Experiment Name: At_10percent_PEG_P Parameter: Plant Line Value: WS
  misc_feature: MA Experiment 20000527 PARAMETER Experiment Name: At_10percent_PEG_P Parameter: Timepoint (day) Value: 20
  misc_feature: MA Experiment 20000527 PARAMETER Experiment Name: At_10percent_PEG_P Parameter: Tissue Value: Whole Plant
  misc_feature: MA Experiment 20000527 PARAMETER Experiment Name: At_10percent_PEG_P Parameter: Treatment Value: 10percent PEG vs. No Treatment
  misc_feature: MA Experiment ID: 20001554 Result: Up-regulated in Transcription
  misc_feature: MA Experiment 20001554 PARAMETER Experiment Name: At_Drought_Soil_Dry_P Parameter: Age (day) Value: 21
  misc_feature: MA Experiment 20001554 PARAMETER Experiment Name: At_Drought_Soil_Dry_P Parameter: Organism Value: A. thaliana
  misc_feature: MA Experiment 20001554 PARAMETER Experiment Name: At_Drought_Soil_Dry_P Parameter: Plant Line Value: WS
  misc_feature: MA Experiment 20001554 PARAMETER Experiment Name: At_Drought_Soil_Dry_P Parameter: Post Timepoint (hr) Value: None
  misc_feature: MA Experiment 20001554 PARAMETER Experiment Name: At_Drought_Soil_Dry_P Parameter: Post-Treatment Value: None
  misc_feature: MA Experiment 20001554 PARAMETER Experiment Name: At_Drought_Soil_Dry_P Parameter: Timepoint (day) Value: 7
  misc_feature: MA Experiment 20001554 PARAMETER Experiment Name: At_Drought_Soil_Dry_P Parameter: Treatment Value: Drought vs. No Drought
  misc_feature: MA Experiment ID: 20001904 Result: Up-regulated in Transcription
  misc_feature: MA Experiment 20001904 PARAMETER Experiment Name: At_Drought_Reproduction_P Parameter: Age (day) Value: 37
  misc_feature: MA Experiment 20001904 PARAMETER Experiment Name: At_Drought_Reproduction_P Parameter: Organism Value: A. thaliana
  misc_feature: MA Experiment 20001904 PARAMETER Experiment Name: At_Drought_Reproduction_P Parameter: Plant Line Value: WS
  misc_feature: MA Experiment 20001904 PARAMETER Experiment Name: At_Drought_Reproduction_P Parameter: Timepoint (day) Value: 7
  misc_feature: MA Experiment 20001904 PARAMETER Experiment Name: At_Drought_Reproduction_P Parameter: Tissue Value: Rosettes
  misc_feature: MA Experiment 20001904 PARAMETER Experiment Name: At_Drought_Reproduction_P Parameter: Treatment Value: Drought vs. No Drought
  misc_feature: MA Experiment ID: 20001906 Result: Up-regulated in Transcription
  misc_feature: MA Experiment 20001906 PARAMETER Experiment Name: At_Drought_Reproduction_P Parameter: Age (day) Value: 35
  misc_feature: MA Experiment 20001906 PARAMETER Experiment Name: At_Drought_Reproduction_P Parameter: Organism Value: A. thaliana
  misc_feature: MA Experiment 20001906 PARAMETER Experiment Name: At_Drought_Reproduction_P Parameter: Plant Line Value: WS
  misc_feature: MA Experiment 20001906 PARAMETER Experiment Name: At_Drought_Reproduction_P Parameter: Timepoint (day) Value: 5
  misc_feature: MA Experiment 20001906 PARAMETER Experiment Name: At_Drought_Reproduction_P Parameter: Tissue Value: Siliques
  misc_feature: MA Experiment 20001906 PARAMETER Experiment Name: At_Drought_Reproduction_P Parameter: Treatment Value: Drought vs. No Drought
aacaaatatctcctgctcttacatctgagtctttttctttctaaccttctgattcatgagtaatcatatgtccattatgaagttcttgaatcaaatcctctgtctctctcttatcctctccatatccatgactactctttcctttgctcagacatgttctaaatacaagttctccagcaacaatgtctttgactcttgcaacgatcttccttttcttgattccttcctccattacacttacgagtcttccaccgggagcctccacattgcttatcgccacactaagctcacctctggtaaatgggttgcttgggctgtgaacccaacgtctacgggaatggtgggagctcaagccatcgttgcttatccacaatcagatggtactgtcagggtttacacttctcccatcagaagctaccagacgagtctactagagggtgatctgagtttcaatgtctctggtttgtctgcaacttaccagaacaatgagatcgttgtgttggcaagtctgaagcttgcacaggatcttgggaatggtggaaccattaacacagtgtggcaagatgggtcaatgtctgggaacagtcttctgcctcatccaacttctggcaacaatgttcgatcagtgtcaactctcaatctggtatccggtgtttcagcagctgcaggaggagctggaggaagttccaagcttcgcaaacgcaatattcatggaatattgaatggagtgagctggggaatcatgatgccactaggggcaatcattgctcgatacttgagagtagccaaatcagcagaccctgcttggttctacattcacgttttctgccaggcttctgcttacatcatcggtgttgccggatgggccactggtctcaaactcggtggcgactcaccagggattcagtacagcacccaccgtgccatcgggatcgctctcttctctctagcgacagttcaggtgtttgcgatgtttctgaggccaaaaccagagcacaagcataggctctactggaacatttaccaccacacgatcggctacacgataatcatcctaggggtggtgaacgttttcaaagggctaggcatattgagtcccaagaagcagtggaaaaatgcctacatcggtatcattgttgttctcgccattgtggccaccctactcgaagccttcacctggtatgtagtcattaaaagaaggaaactggaggctaaaacggctcagcatggagcatctaacggcactcggtctcagtatgcttaagattagcaacagacttgcttccttttctctttgtgcatagagacacagttatttatctgcttatctatctgttcccatatgcaatgatgattttttacattcatgatttaggatttataatgccatttttatttgatcagc

SEQ ID NO: 23047 - protein, 402 aa, Arabidopsis thaliana
  peptide (1)..(402): Ceres Seq. ID no. 13493878
  misc_feature (95)..(226): Pfam Name: Protein of unknown function (DUF568) Pfam Description: Protein of unknown function (DUF568)
  misc_feature (18)..(388): Homolog of NCBI NO: 21592781 NR Description: putative membrane protein [Arabidopsis thaliana]
  misc_feature (18)..(388): Homolog of NCBI NO: 18421491 NR Description: auxin-induced protein family [Arabidopsis
  misc_feature (9)..(401): Homolog of NCBI NO: 13785211 NR Description: putative membrane protein [Solanum tuberosum]
  misc_feature (8)..(401): Homolog of NCBI NO: 13785213 NR Description: putative membrane protein [Solanum tuberosum]
  misc_feature (9)..(401): Homolog of NCBI NO: 13785207 NR Description: putative membrane protein [Solanum tuberosum]
  misc_feature (9)..(402): Homolog of NCBI NO: 13785209 NR Description: putative membrane protein [Solanum tuberosum]
  misc_feature (25)..(256): Homolog of NCBI NO: 7485214 NR Description: hypothetical protein - Arabidopsis thaliana
  misc_feature (1)..(256): Homolog of NCBI NO: 22328744 NR Description: auxin-induced protein family [Arabidopsis
  misc_feature (12)..(401): Homolog of NCBI NO: 15238124 NR Description: auxin-induced protein, putative [Arabidopsis
  misc_feature (1)..(402): Homolog of NCBI NO: 18086563 NR Description: AT4g17280/dl4675c [Arabidopsis thaliana]
MSNHMSIMKFLNQILCLSLILSISMTTLSFAQTCSKYKFSSNNVFDSCNDLPFLDSFLHYTYESSTGSLHIAYRHTKLTSGKWVAWAVNPTSTGMVGAQAIVAYPQSDGTVRVYTSPIRSYQTSLLEGDLSFNVSGLSATYQNNEIVVLASLKLAQDLGNGGTINTVWQDGSMSGNSLLPHPTSGNNVRSVSTLNLVSGVSAAAGGAGGSSKLRKRNIHGILNGVSWGIMMPLGAIIARYLRVAKSADPAWFYIHVFCQASAYIIGVAGWATGLKLGGDSPGIQYSTHRAIGIALFSLATVQVFAMFLRPKPEHKHRLYWNIYHHTIGYTIIILGVVNVFKGLGILSPKKQWKNAYIGIIVVLAIVATLLEAFTWYVVIKRRKLEAKTAQHGASNGTRSQYA

SEQ ID NO: 23048 - protein, 398 aa, Arabidopsis thaliana
  peptide (1)..(398): Ceres Seq. ID no. 13493879
  misc_feature (91)..(222): Pfam Name: Protein of unknown function (DUF568) Pfam Description: Protein of unknown function (DUF568)
  misc_feature (14)..(384): Homolog of NCBI NO: 21592781 NR Description: putative membrane protein [Arabidopsis thaliana]
  misc_feature (14)..(384): Homolog of NCBI NO: 18421491 NR Description: auxin-induced protein family [Arabidopsis
  misc_feature (5)..(397): Homolog of NCBI NO: 13785211 NR Description: putative membrane protein [Solanum tuberosum]
  misc_feature (4)..(397): Homolog of NCBI NO: 13785213 NR Description: putative membrane protein [Solanum tuberosum]
  misc_feature (5)..(397): Homolog of NCBI NO: 13785207 NR Description: putative membrane protein [Solanum tuberosum]
  misc_feature (5)..(398): Homolog of NCBI NO: 13785209 NR Description: putative membrane protein [Solanum tuberosum]
  misc_feature (21)..(252): Homolog of NCBI NO: 7485214 NR Description: hypothetical protein - Arabidopsis thaliana
  misc_feature (1)..(252): Homolog of NCBI NO: 22328744 NR Description: auxin-induced protein family [Arabidopsis
  misc_feature (8)..(397): Homolog of NCBI NO: 15238124 NR Description: auxin-induced protein, putative [Arabidopsis
  misc_feature (1)..(398): Homolog of NCBI NO: 18086563 NR Description: AT4g17280/dl4675c [Arabidopsis thaliana]
MSIMKFLNQILCLSLILSISMTTLSFAQTCSKYKFSSNNVFDSCNDLPFLDSFLHYTYESSTGSLHIAYRHTKLTSGKWVAWAVNPTSTGMVGAQAIVAYPQSDGTVRVYTSPIRSYQTSLLEGDLSFNVSGLSATYQNNEIVVLASLKLAQDLGNGGTINTVWQDGSMSGNSLLPHPTSGNNVRSVSTLNLVSGVSAAAGGAGGSSKLRKRNIHGILNGVSWGIMMPLGAIIARYLRVAKSADPAWFYIHVFCQASAYIIGVAGWATGLKLGGDSPGIQYSTHRAIGIALFSLATVQVFAMFLRPKPEHKHRLYWNIYHHTIGYTIIILGVVNVFKGLGILSPKKQWKNAYIGIIVVLAIVATLLEAFTWYVVIKRRKLEAKTAQHGASNGTRSQYA

SEQ ID NO: 23049 - protein, 395 aa, Arabidopsis thaliana
  peptide (1)..(395): Ceres Seq. ID no. 13493880
  misc_feature (88)..(219): Pfam Name: Protein of unknown function (DUF568) Pfam Description: Protein of unknown function (DUF568)
  misc_feature (11)..(381): Homolog of NCBI NO: 21592781 NR Description: putative membrane protein [Arabidopsis thaliana]
  misc_feature (11)..(381): Homolog of NCBI NO: 18421491 NR Description: auxin-induced protein family [Arabidopsis
  misc_feature (2)..(394): Homolog of NCBI NO: 13785211 NR Description: putative membrane protein [Solanum tuberosum]
  misc_feature (1)..(394): Homolog of NCBI NO: 13785213 NR Description: putative membrane protein [Solanum tuberosum]
  misc_feature (2)..(394): Homolog of NCBI NO: 13785207 NR Description: putative membrane protein [Solanum tuberosum]
  misc_feature (2)..(395): Homolog of NCBI NO: 13785209 NR Description: putative membrane protein [Solanum tuberosum]
  misc_feature (18)..(249): Homolog of NCBI NO: 7485214 NR Description: hypothetical protein - Arabidopsis thaliana
  misc_feature (1)..(249): Homolog of NCBI NO: 22328744 NR Description: auxin-induced protein family [Arabidopsis
  misc_feature (5)..(394): Homolog of NCBI NO: 15238124 NR Description: auxin-induced protein, putative [Arabidopsis
  misc_feature (1)..(395): Homolog of NCBI NO: 18086563 NR Description: AT4g17280/dl4675c [Arabidopsis thaliana]
MKFLNQILCLSLILSISMTTLSFAQTCSKYKFSSNNVFDSCNDLPFLDSFLHYTYESSTGSLHIAYRHTKLTSGKWVAWAVNPTSTGMVGAQAIVAYPQSDGTVRVYTSPIRSYQTSLLEGDLSFNVSGLSATYQNNEIVVLASLKLAQDLGNGGTINTVWQDGSMSGNSLLPHPTSGNNVRSVSTLNLVSGVSAAAGGAGGSSKLRKRNIHGILNGVSWGIMMPLGAIIARYLRVAKSADPAWFYIHVFCQASAYIIGVAGWATGLKLGGDSPGIQYSTHRAIGIALFSLATVQVFAMFLRPKPEHKHRLYWNIYHHTIGYTIIILGVVNVFKGLGILSPKKQWKNAYIGIIVVLAIVATLLEAFTWYVVIKRRKLEAKTAQHGASNGTRSQYA

SEQ ID NO: 23050 - DNA, 2343 bp, Arabidopsis thaliana
  misc_feature (1)..(2343): Ceres Seq. ID no. 12325268
  misc_feature: MA Experiment ID: 108464 Result: Down-regulated in Transcription
  misc_feature: MA Experiment 108464 PARAMETER Experiment Name: At_Germinating_Seeds_cDNA_P Parameter: Age (day) Value: 4 vs. 0
  misc_feature: MA Experiment 108464 PARAMETER Experiment Name: At_Germinating_Seeds_cDNA_P Parameter: Tissue Value: Germinating Seeds
  misc_feature: MA Experiment ID: 20000227 Result: Down-regulated in Transcription
  misc_feature: MA Experiment 20000227 PARAMETER Experiment Name: At_Root-Tips-vs-Tops_P Parameter: Tissue Value: Root Tips vs. Root Tops
  misc_feature: MA Experiment ID: 20000264 Result: Up-regulated in Transcription
  misc_feature: MA Experiment 20000264 PARAMETER Experiment Name: At_Open_Flower_P Parameter: Age (day) Value: 21
  misc_feature: MA Experiment 20000264 PARAMETER Experiment Name: At_Open_Flower_P Parameter: Plant Line Value: WS
  misc_feature: MA Experiment 20000264 PARAMETER Experiment Name: At_Open_Flower_P Parameter: Tissue Value: Open Flower vs. Whole Plant
  misc_feature: MA Experiment ID: 20000286 Result: Up-regulated in Transcription
  misc_feature: MA Experiment 20000286 PARAMETER Experiment Name: At_Open_Flower_P Parameter: Age (day) Value: 21
  misc_feature: MA Experiment 20000286 PARAMETER Experiment Name: At_Open_Flower_P Parameter: Plant Line Value: WS
  misc_feature: MA Experiment 20000286 PARAMETER Experiment Name: At_Open_Flower_P Parameter: Tissue Value: Half Open vs. Whole Plant
  misc_feature: MA Experiment ID: 20000794 Result: Up-regulated in Transcription
  misc_feature: MA Experiment 20000794 PARAMETER Experiment Name: At_Petals_P Parameter: Age (day) Value: 23-25 days
  misc_feature: MA Experiment 20000794 PARAMETER Experiment Name: At_Petals_P Parameter: Plant Line Value: WS
  misc_feature: MA Experiment 20000794 PARAMETER Experiment Name: At_Petals_P Parameter: Tissue Value: Petals vs. Whole plant
  misc_feature: MA Experiment ID: 20001557 Result: Up-regulated in Transcription
  misc_feature: MA Experiment 20001557 PARAMETER Experiment Name: At_Drought_Soil_Dry_P Parameter: Age (day) Value: 27
  misc_feature: MA Experiment 20001557 PARAMETER Experiment Name: At_Drought_Soil_Dry_P Parameter: Organism Value: A. thaliana
  misc_feature: MA Experiment 20001557 PARAMETER Experiment Name: At_Drought_Soil_Dry_P Parameter: Plant Line Value: WS
  misc_feature: MA Experiment 20001557 PARAMETER Experiment Name: At_Drought_Soil_Dry_P Parameter: Post Timepoint (hr) Value: 3
  misc_feature: MA Experiment 20001557 PARAMETER Experiment Name: At_Drought_Soil_Dry_P Parameter: Post-Treatment Value: Re-Water vs. No Drought
  misc_feature: MA Experiment 20001557 PARAMETER Experiment Name: At_Drought_Soil_Dry_P Parameter: Timepoint (day) Value: 13
  misc_feature: MA Experiment 20001557 PARAMETER Experiment Name: At_Drought_Soil_Dry_P Parameter: Treatment Value: Drought vs. No Drought
atcattttgtatcatcccttgaaaacgttaaatgatcttctcctccgatcattagtctctttaatctttctcagcctcttcttgttcgtgatctctcttcctccggaaaaagatgtcggccggtaacggaaatgctactaacggtgacggagggtttagtttccctaaaggaccggtgatgccgaagataacgaccggagcagcaaagagaggtagcggagtctgccacgacgatagtggtccgacggtgaatgccacaaccatcgatgagcttcattcgttacagaagaaacgttctgctcctaccacaccgatcaaccaaaacgccgccgctgcttttgccgccgtctccgaggaggagcgtcagaagattcagcttcaatctatcagtgcatcgttagcatcgttaacgagagagtcaggaccaaaggtggtgagaggagatccggcggagaagaagaccgatggttcaactactccggcgtacgctcacggccaacatcattctatcttttctccggctactggtgctgtcagtgatagctccttgaagtttactcacgtcctctacaatctttcgcctgcagagctttatgagcaagctattaagtatgagaaaggttcgtttatcacttctaatggagctttggcgacgctttctggtgctaagactggtcgtgctcccagagataagcgtgttgttagagatgctactactgaggatgagctttggtggggaaagggttcgccgaatatcgaaatggatgaacatactttcatggtgaacagagaaagagctgttgattacttgaattccttggaaaaggtctttgtcaatgaccaatacttaaactgggatccagagaacagaatcaaagtcaggattgtctcagctagagcttaccattcattgtttatgcacaacatgtgtatccgaccaactcaggaggagcttgagagctttggtactccggattttactatatacaatgctgggcagtttccatgtaatcgttacactcattacatgacttcgtccactagcgtagaccttaatctggctaggagggaaatggttatacttggtactcagtatgctggggaaatgaagaagggtcttttcagtgtgatgcattaccttatgcctaagcgtcgtattctctcccttcattctggatgcaatatgggaaaagatggagatgttgctctcttctttggactttcaggtaccgggaagacaacgctgtctactgatcacaacaggtatcttattggagatgatgagcattgttggactgagactggtgtttcgaacattgagggtgggtgctatgctaagtgtgttgatctttcgagggagaaggagcctgatatctggaacgctatcaagtttggaacagttttggaaaatgttgtgtttgatgagcacaccagagaagtggattactctgataaatctgttacagagaacacacgtgctgcctacccaattgagttcattccaaatgcgaaaataccttgtgttggtccacacccgacaaatgtgatacttctggcttgtgatgcctttggtgttctcccacctgtgagcaagctgaatctggcacaaaccatgtaccacttcatcagtggttacactgctctggttgctggcacagaggatggtatcaaggagccaacagcaacattctcagcttgctttggtgcagctttcataatgttgcatcccacaaagtatgcagctatgttagctgagaagatgaagtcacaaggtgctactggttggctcgtcaacactggttggtctggtggcagttatggtgttggaaacagaatcaagctggcatacactagaaagatcatcgatgcaatccattcgggcagtctcttgaaggcaaactacaagaaaaccgaaatctttggatttgaaatcccaactgagatcgaagggataccttcagagatcttggaccccgtcaactcctggtctgataagaaggcacacaaagatactctggtgaaactgggaggtctgttcaagaagaacttcgaggtttttgctaaccataagattggtgtggatggtaagcttacggaggagattctcgctgctggtcctatcttttagaaaaaccaaactctgaatgatgttgtcgaaaagaaagaaagatctactattattaagaagaataaaatgagactttgtgtttttctttgctgtgataatctctctgaataatagagagaatttaatgttccaaatgtggtgcgatatggataatgatgatgactatatgtaatttattactatccatcgtcatatatttttgttgggcctttgcc

SEQ ID NO: 23051 - protein, 671 aa, Arabidopsis thaliana
  peptide (1)..(671): Ceres Seq. ID no. 12325269
  misc_feature (147)..(618): Pfam Name: Phosphoenolpyruvate carboxykinase Pfam Description: Phosphoenolpyruvate carboxykinase
  misc_feature (27)..(671): Homolog of NCBI NO: 12230480 NR Description: Phosphoenolpyruvate carboxykinase
  misc_feature (3)..(671): Homolog of NCBI NO: 22328084 NR Description: similar to phosphoenolpyruvate carboxykinase
  misc_feature (3)..(671): Homolog of NCBI NO: 16950587 NR Description: phosphoenolpyruvate carboxykinase [Lycopersicon
  misc_feature (3)..(80): Homolog of NCBI NO: 7449803 NR Description: phosphoenolpyruvate carboxykinase (ATP) (EC
  misc_feature (12)..(669): Homolog of NCBI NO: 1172571 NR Description: Phosphoenolpyruvate carboxykinase
  misc_feature (86)..(671): Homolog of NCBI NO: 7449803 NR Description: phosphoenolpyruvate carboxykinase (ATP) (EC
  misc_feature (2)..(671): Homolog of NCBI NO: 13785467 NR Description: phosphoenolpyruvate carboxykinase [Flaveria
  misc_feature (2)..(671): Homolog of NCBI NO: 13785469 NR Description: phosphoenolpyruvate carboxykinase [Flaveria
  misc_feature (2)..(671): Homolog of NCBI NO: 13785471 NR Description: phosphoenolpyruvate carboxykinase [Flaveria
MSAGNGNATNGDGGFSFPKGPVMPKITTGAAKRGSGVCHDDSGPTVNATTIDELHSLQKKRSAPTTPINQNAAAAFAAVSEEERQKIQLQSISASLASLTRESGPKVVRGDPAEKKTDGSTTPAYAHGQHHSIFSPATGAVSDSSLKFTHVLYNLSPAELYEQAIKYEKGSFITSNGALATLSGAKTGRAPRDKRVVRDATTEDELWWGKGSPNIEMDEHTFMVNRERAVDYLNSLEKVFVNDQYLNWDPENRIKVRIVSARAYHSLFMHNMCIRPTQEELESFGTPDFTIYNAGQFPCNRYTHYMTSSTSVDLNLARREMVILGTQYAGEMKKGLFSVMHYLMPKRRILSLHSGCNMGKDGDVALFFGLSGTGKTTLSTDHNRYLIGDDEHCWTETGVSNIEGGCYAKCVDLSREKEPDIWNAIKFGTVLENVVFDEHTREVDYSDKSVTENTRAAYPIEFIPNAKIPCVGPHPTNVILLACDAFGVLPPVSKLNLAQTMYHFISGYTALVAGTEDGIKEPTATFSACFGAAFIMLHPTKYAAMLAEKMKSQGATGWLVNTGWSGGSYGVGNRIKLAYTRKIIDAIHSGSLLKANYKKTEIFGFEIPTEIEGIPSEILDPVNSWSDKKAHKDTLVKLGGLFKKNFEVFANHKIGVDGKLTEEILAAGPIF

SEQ ID NO: 23052 - protein, 649 aa, Arabidopsis thaliana
  peptide (1)..(649): Ceres Seq. ID no. 12325270
  misc_feature (125)..(596): Pfam Name: Phosphoenolpyruvate carboxykinase Pfam Description: Phosphoenolpyruvate carboxykinase
  misc_feature (1)..(58): Homolog of NCBI NO: 7449803 NR Description: phosphoenolpyruvate carboxykinase (ATP) (EC
  misc_feature (64)..(649): Homolog of NCBI NO: 7449803 NR Description: phosphoenolpyruvate carboxykinase (ATP) (EC
  misc_feature (1)..(647): Homolog of NCBI NO: 1172571 NR Description: Phosphoenolpyruvate carboxykinase
  misc_feature (5)..(649): Homolog of NCBI NO: 12230480 NR Description: Phosphoenolpyruvate carboxykinase
  misc_feature (1)..(649): Homolog of NCBI NO: 22328084 NR Description: similar to phosphoenolpyruvate carboxykinase
  misc_feature (1)..(649): Homolog of NCBI NO: 16950587 NR Description: phosphoenolpyruvate carboxykinase [Lycopersicon
  misc_feature (1)..(649): Homolog of NCBI NO: 13785467 NR Description: phosphoenolpyruvate carboxykinase [Flaveria
  misc_feature (1)..(649): Homolog of NCBI NO: 13785469 NR Description: phosphoenolpyruvate carboxykinase [Flaveria
  misc_feature (1)..(649): Homolog of NCBI NO: 13785471 NR Description: phosphoenolpyruvate carboxykinase [Flaveria
MPKITTGAAKRGSGVCHDDSGPTVNATTIDELHSLQKKRSAPTTPINQNAAAAFAAVSEEERQKIQLQSISASLASLTRESGPKVVRGDPAEKKTDGSTTPAYAHGQHHSIFSPATGAVSDSSLKFTHVLYNLSPAELYEQAIKYEKGSFITSNGALATLSGAKTGRAPRDKRVVRDATTEDELWWGKGSPNIEMDEHTFMVNRERAVDYLNSLEKVFVNDQYLNWDPENRIKVRIVSARAYHSLFMHNMCIRPTQEELESFGTPDFTIYNAGQFPCNRYTHYMTSSTSVDLNLARREMVILGTQYAGEMKKGLFSVMHYLMPKRRILSLHSGCNMGKDGDVALFFGLSGTGKTTLSTDHNRYLIGDDEHCWTETGVSNIEGGCYAKCVDLSREKEPDIWNAIKFGTVLENVVFDEHTREVDYSDKSVTENTRAAYPIEFIPNAKIPCVGPHPTNVILLACDAFGVLPPVSKLNLAQTMYHFISGYTALVAGTEDGIKEPTATFSACFGAAFIMLHPTKYAAMLAEKMKSQGATGWLVNTGWSGGSYGVGNRIKLAYTRKIIDAIHSGSLLKANYKKTEIFGFEIPTEIEGIPSEILDPVNSWSDKKAHKDTLVKLGGLFKKNFEVFANHKIGVDGKLTEEILAAGPIF

SEQ ID NO: 23053 - protein, 455 aa, Arabidopsis thaliana
  peptide (1)..(455): Ceres Seq. ID no. 12325271
  misc_feature (1)..(402): Pfam Name: Phosphoenolpyruvate carboxykinase Pfam Description: Phosphoenolpyruvate carboxykinase
  misc_feature (1)..(455): Homolog of NCBI NO: 7449803 NR Description: phosphoenolpyruvate carboxykinase (ATP) (EC
  misc_feature (1)..(453): Homolog of NCBI NO: 1172571 NR Description: Phosphoenolpyruvate carboxykinase
  misc_feature (1)..(455): Homolog of NCBI NO: 12230480 NR Description: Phosphoenolpyruvate carboxykinase
  misc_feature (1)..(455): Homolog of NCBI NO: 22328084 NR Description: similar to phosphoenolpyruvate carboxykinase
  misc_feature (1)..(455): Homolog of NCBI NO: 16950587 NR Description: phosphoenolpyruvate carboxykinase [Lycopersicon
  misc_feature (1)..(455): Homolog of NCBI NO: 13785467 NR Description: phosphoenolpyruvate carboxykinase [Flaveria
  misc_feature (1)..(455): Homolog of NCBI NO: 13785469 NR Description: phosphoenolpyruvate carboxykinase [Flaveria
  misc_feature (1)..(455): Homolog of NCBI NO: 13785471 NR Description: phosphoenolpyruvate carboxykinase [Flaveria
MDEHTFMVNRERAVDYLNSLEKVFVNDQYLNWDPENRIKVRIVSARAYHSLFMHNMCIRPTQEELESFGTPDFTIYNAGQFPCNRYTHYMTSSTSVDLNLARREMVILGTQYAGEMKKGLFSVMHYLMPKRRILSLHSGCNMGKDGDVALFFGLSGTGKTTLSTDHNRYLIGDDEHCWTETGVSNIEGGCYAKCVDLSREKEPDIWNAIKFGTVLENVVFDEHTREVDYSDKSVTENTRAAYPIEFIPNAKIPCVGPHPTNVILLACDAFGVLPPVSKLNLAQTMYHFISGYTALVAGTEDGIKEPTATFSACFGAAFIMLHPTKYAAMLAEKMKSQGATGWLVNTGWSGGSYGVGNRIKLAYTRKIIDAIHSGSLLKANYKKTEIFGFEIPTEIEGIPSEILDPVNSWSDKKAHKDTLVKLGGLFKKNFEVFANHKIGVDGKLTEEILAAGPIF

SEQ ID NO: 23054 - DNA, 1299 bp, Arabidopsis thaliana
  misc_feature (1)..(1299): Ceres Seq. ID no. 12579928
  misc_feature: MA Experiment ID: 108462 Result: Down-regulated in Transcription
  misc_feature: MA Experiment 108462 PARAMETER Experiment Name: At_Germinating_Seeds_cDNA_P Parameter: Age (day) Value: 2 vs. 0
  misc_feature: MA Experiment 108462 PARAMETER Experiment Name: At_Germinating_Seeds_cDNA_P Parameter: Tissue Value: Germinating Seeds
  misc_feature: MA Experiment ID: 108463 Result: Down-regulated in Transcription
  misc_feature: MA Experiment 108463 PARAMETER Experiment Name: At_Germinating_Seeds_cDNA_P Parameter: Age (day) Value: 3 vs. 0
  misc_feature: MA Experiment 108463 PARAMETER Experiment Name: At_Germinating_Seeds_cDNA_P Parameter: Tissue Value: Germinating Seeds
  misc_feature: MA Experiment ID: 108464 Result: Down-regulated in Transcription
  misc_feature: MA Experiment 108464 PARAMETER Experiment Name: At_Germinating_Seeds_cDNA_P Parameter: Age (day) Value: 4 vs. 0
  misc_feature: MA Experiment 108464 PARAMETER Experiment Name: At_Germinating_Seeds_cDNA_P Parameter: Tissue Value: Germinating Seeds
  misc_feature: MA Experiment ID: 108473 Result: Down-regulated in Transcription
  misc_feature: MA Experiment 108473 PARAMETER Experiment Name: At_Drought_Flowers_cDNA_P Parameter: Timepoint (hr) Value: 7 d
  misc_feature: MA Experiment 108473 PARAMETER Experiment Name: At_Drought_Flowers_cDNA_P Parameter: Tissue Value: Flower
  misc_feature: MA Experiment 108473 PARAMETER Experiment Name: At_Drought_Flowers_cDNA_P Parameter: Treatment Value: Drought vs. No Drought
  misc_feature: MA Experiment ID: 108561 Result: Down-regulated in Transcription
  misc_feature: MA Experiment 108561 PARAMETER Experiment Name: At_100uM_ABA_cDNA_P Parameter: Timepoint (hr) Value: 6
  misc_feature: MA Experiment 108561 PARAMETER Experiment Name: At_100uM_ABA_cDNA_P Parameter: Tissue Value: Aerial
  misc_feature: MA Experiment 108561 PARAMETER Experiment Name: At_100uM_ABA_cDNA_P Parameter: Treatment Value: 100uM ABA vs. No Treatment
  misc_feature: MA Experiment ID: 108572 Result: Down-regulated in Transcription
  misc_feature: MA Experiment 108572 PARAMETER Experiment Name: At_Drought_cDNA_P Parameter: Timepoint (hr) Value: 1
  misc_feature: MA Experiment 108572 PARAMETER Experiment Name: At_Drought_cDNA_P Parameter: Tissue Value: Aerial
  misc_feature: MA Experiment 108572 PARAMETER Experiment Name: At_Drought_cDNA_P Parameter: Treatment Value: Drought vs. No Drought
  misc_feature: MA Experiment ID: 108573 Result: Down-regulated in Transcription
  misc_feature: MA Experiment 108573 PARAMETER Experiment Name: At_Drought_cDNA_P Parameter: Timepoint (hr) Value: 6
  misc_feature: MA Experiment 108573 PARAMETER Experiment Name: At_Drought_cDNA_P Parameter: Tissue Value: Aerial
  misc_feature: MA Experiment 108573 PARAMETER Experiment Name: At_Drought_cDNA_P Parameter: Treatment Value: Drought vs. No Drought
  misc_feature: MA Experiment ID: 108576 Result: Down-regulated in Transcription
  misc_feature: MA Experiment 108576 PARAMETER Experiment Name: At_42deg_Heat_cDNA_P Parameter: Temperature (deg C) Value: 42 vs. 22
  misc_feature: MA Experiment 108576 PARAMETER Experiment Name: At_42deg_Heat_cDNA_P Parameter: Timepoint (hr) Value: 1
  misc_feature: MA Experiment 108576 PARAMETER Experiment Name: At_42deg_Heat_cDNA_P Parameter: Tissue Value: Aerial
  misc_feature: MA Experiment ID: 108577 Result: Down-regulated in Transcription
  misc_feature: MA Experiment 108577 PARAMETER Experiment Name: At_42deg_Heat_cDNA_P Parameter: Temperature (deg C) Value: 42 vs. 22
  misc_feature: MA Experiment 108577 PARAMETER Experiment Name: At_42deg_Heat_cDNA_P Parameter: Timepoint (hr) Value: 6
  misc_feature: MA Experiment 108577 PARAMETER Experiment Name: At_42deg_Heat_cDNA_P Parameter: Tissue Value: Aerial
  misc_feature: MA Experiment ID: 108585 Result: Down-regulated in Transcription
  misc_feature: MA Experiment 108585 PARAMETER Experiment Name: At_5mM_NaNP_cDNA_P Parameter: Timepoint (hr) Value: 6
  misc_feature: MA Experiment 108585 PARAMETER Experiment Name: At_5mM_NaNP_cDNA_P Parameter: Tissue Value: Aerial
  misc_feature: MA Experiment 108585 PARAMETER Experiment Name: At_5mM_NaNP_cDNA_P Parameter: Treatment Value: null
  misc_feature: MA Experiment ID: 108605 Result: Down-regulated in Transcription
  misc_feature: MA Experiment 108605 PARAMETER Experiment Name: At_100uM_ABA_cDNA_P Parameter: Timepoint (hr) Value: 6
  misc_feature: MA Experiment 108605 PARAMETER Experiment Name: At_100uM_ABA_cDNA_P Parameter: Tissue Value: Aerial
  misc_feature: MA Experiment 108605 PARAMETER Experiment Name: At_100uM_ABA_cDNA_P Parameter: Treatment Value: 100uM ABA vs. No Treatment
  misc_feature: MA Experiment ID: 108607 Result: Down-regulated in Transcription
  misc_feature: MA Experiment 108607 PARAMETER Experiment Name: At_100uM_ABA_cDNA_P Parameter: Timepoint (hr) Value: 4
  misc_feature: MA Experiment 108607 PARAMETER Experiment Name: At_100uM_ABA_cDNA_P Parameter: Tissue Value: Aerial
  misc_feature: MA Experiment 108607 PARAMETER Experiment Name: At_100uM_ABA_cDNA_P Parameter: Treatment Value: 100uM ABA vs. No Treatment
  misc_feature: MA Experiment ID: 108608 Result: Down-regulated in Transcription
  misc_feature: MA Experiment 108608 PARAMETER Experiment Name: At_100uM_ABA_cDNA_P Parameter: Timepoint (hr) Value: 1
  misc_feature: MA Experiment 108608 PARAMETER Experiment Name: At_100uM_ABA_cDNA_P Parameter: Tissue Value: Aerial
  misc_feature: MA Experiment 108608 PARAMETER Experiment Name: At_100uM_ABA_cDNA_P Parameter: Treatment Value: 100uM ABA vs. No Treatment
  misc_feature: MA Experiment ID: 108609 Result: Down-regulated in Transcription
  misc_feature: MA Experiment 108609 PARAMETER Experiment Name: At_100uM_ABA_cDNA_P Parameter: Timepoint (hr) Value: 24
  misc_feature: MA Experiment 108609 PARAMETER Experiment Name: At_100uM_ABA_cDNA_P Parameter: Tissue Value: Aerial
  misc_feature: MA Experiment 108609 PARAMETER Experiment Name: At_100uM_ABA_cDNA_P Parameter: Treatment Value: 100uM ABA vs. No Treatment
  misc_feature: MA Experiment ID: 20000069 Result: Down-regulated in Transcription
  misc_feature: MA Experiment 20000069 PARAMETER Experiment Name: At_100uM_ABA_Mutants_cDNA_P Parameter: Plant Line Value: CS23
  misc_feature: MA Experiment 20000069 PARAMETER Experiment Name: At_100uM_ABA_Mutants_cDNA_P Parameter: Timepoint (hr) Value: 6
  misc_feature: MA Experiment 20000069 PARAMETER Experiment Name: At_100uM_ABA_Mutants_cDNA_P Parameter: Tissue Value: Aerial
  misc_feature: MA Experiment 20000069 PARAMETER Experiment Name: At_100uM_ABA_Mutants_cDNA_P Parameter: Treatment Value: 100uM ABA vs. No Treatment
  misc_feature: MA Experiment ID: 20000070 Result: Down-regulated in Transcription
  misc_feature: MA Experiment 20000070 PARAMETER Experiment Name: At_100uM_ABA_Mutants_cDNA_P Parameter: Plant Line Value: CS24
  misc_feature: MA Experiment 20000070 PARAMETER Experiment Name: At_100uM_ABA_Mutants_cDNA_P Parameter: Timepoint (hr) Value: 6
  misc_feature: MA Experiment 20000070 PARAMETER Experiment Name: At_100uM_ABA_Mutants_cDNA_P Parameter: Tissue Value: Aerial
  misc_feature: MA Experiment 20000070 PARAMETER Experiment Name: At_100uM_ABA_Mutants_cDNA_P Parameter: Treatment Value: 100uM ABA vs. No Treatment
  misc_feature: MA Experiment ID: 20000086 Result: Down-regulated in Transcription
  misc_feature: MA Experiment 20000086 PARAMETER Experiment Name: At_100uM_ABA_Mutants_cDNA_P Parameter: Plant Line Value: CS22
  misc_feature: MA Experiment 20000086 PARAMETER Experiment Name: At_100uM_ABA_Mutants_cDNA_P Parameter: Timepoint (hr) Value: 6
  misc_feature: MA Experiment 20000086 PARAMETER Experiment Name: At_100uM_ABA_Mutants_cDNA_P Parameter: Tissue Value: Aerial
  misc_feature: MA Experiment 20000086 PARAMETER Experiment Name: At_100uM_ABA_Mutants_cDNA_P Parameter: Treatment Value: 100uM ABA vs. No Treatment
  misc_feature: MA Experiment ID: 20000087 Result: Down-regulated in Transcription
  misc_feature: MA Experiment 20000087 PARAMETER Experiment Name: At_100uM_ABA_Mutants_cDNA_P Parameter: Plant Line Value: WS
  misc_feature: MA Experiment 20000087 PARAMETER Experiment Name: At_100uM_ABA_Mutants_cDNA_P Parameter: Timepoint (hr) Value: 6
  misc_feature: MA Experiment 20000087 PARAMETER Experiment Name: At_100uM_ABA_Mutants_cDNA_P Parameter: Tissue Value: Aerial
  misc_feature: MA Experiment 20000087 PARAMETER Experiment Name: At_100uM_ABA_Mutants_cDNA_P Parameter: Treatment Value: 100uM ABA vs. No Treatment
  misc_feature: MA Experiment ID: 20000088 Result: Down-regulated in Transcription
  misc_feature: MA Experiment 20000088 PARAMETER Experiment Name: At_100uM_ABA_Mutants_cDNA_P Parameter: Plant Line Value: Landsberg
  misc_feature: MA Experiment 20000088 PARAMETER Experiment Name: At_100uM_ABA_Mutants_cDNA_P Parameter: Timepoint (hr) Value: 6
  misc_feature: MA Experiment 20000088 PARAMETER Experiment Name: At_100uM_ABA_Mutants_cDNA_P Parameter: Tissue Value: Aerial
  misc_feature: MA Experiment 20000088 PARAMETER Experiment Name: At_100uM_ABA_Mutants_cDNA_P Parameter: Treatment Value: 100uM ABA vs. No Treatment
  misc_feature: MA Experiment ID: 20000111 Result: Down-regulated in Transcription
  misc_feature: MA Experiment 20000111 PARAMETER Experiment Name: At_42deg_Heat_cDNA_P Parameter: Temperature (deg C) Value: 42 vs. 22
  misc_feature: MA Experiment 20000111 PARAMETER Experiment Name: At_42deg_Heat_cDNA_P Parameter: Timepoint (hr) Value: 6
  misc_feature: MA Experiment 20000111 PARAMETER Experiment Name: At_42deg_Heat_cDNA_P Parameter: Tissue Value: Aerial
  misc_feature: MA Experiment ID: 20000112 Result: Down-regulated in Transcription
  misc_feature: MA Experiment 20000112 PARAMETER Experiment Name: At_42deg_Heat_cDNA_P Parameter: Temperature (deg C) Value: 42 vs. 22
  misc_feature: MA Experiment 20000112 PARAMETER Experiment Name: At_42deg_Heat_cDNA_P Parameter: Timepoint (hr) Value: 2
  misc_feature: MA Experiment 20000112 PARAMETER Experiment Name: At_42deg_Heat_cDNA_P Parameter: Tissue Value: Aerial
  misc_feature: MA Experiment ID: 20000113 Result: Down-regulated in Transcription
  misc_feature: MA Experiment 20000113 PARAMETER Experiment Name: At_42deg_Heat_cDNA_P Parameter: Temperature (deg C) Value: 42 vs. 22
  misc_feature: MA Experiment 20000113 PARAMETER Experiment Name: At_42deg_Heat_cDNA_P Parameter: Timepoint (hr) Value: 8
  misc_feature: MA Experiment 20000113 PARAMETER Experiment Name: At_42deg_Heat_cDNA_P Parameter: Tissue Value: Aerial
  misc_feature: MA Experiment ID: 20000117 Result: Down-regulated in Transcription
  misc_feature: MA Experiment 20000117 PARAMETER Experiment Name: At_100uM_ABA_Mutants_cDNA_P Parameter: Plant Line Value: Columbia
  misc_feature: MA Experiment 20000117 PARAMETER Experiment Name: At_100uM_ABA_Mutants_cDNA_P Parameter: Timepoint (hr) Value: 6
  misc_feature: MA Experiment 20000117 PARAMETER Experiment Name: At_100uM_ABA_Mutants_cDNA_P Parameter: Tissue Value: Aerial
  misc_feature: MA Experiment 20000117 PARAMETER Experiment Name: At_100uM_ABA_Mutants_cDNA_P Parameter: Treatment Value: 100uM ABA vs. No Treatment
  misc_feature: MA Experiment ID: 20000182 Result: Down-regulated in Transcription
  misc_feature: MA Experiment 20000182 PARAMETER Experiment Name: At_2mM_SA_P Parameter: Age (day) Value: 14
  misc_feature: MA Experiment 20000182 PARAMETER Experiment Name: At_2mM_SA_P Parameter: Organism Value: A. thaliana
  misc_feature: MA Experiment 20000182 PARAMETER Experiment Name: At_2mM_SA_P Parameter: Plant Line Value: WS
  misc_feature: MA Experiment 20000182 PARAMETER Experiment Name: At_2mM_SA_P Parameter: Timepoint (hr) Value: 6
  misc_feature: MA Experiment 20000182 PARAMETER Experiment Name: At_2mM_SA_P Parameter: Tissue Value: Aerial
  misc_feature: MA Experiment 20000182 PARAMETER Experiment Name: At_2mM_SA_P Parameter: Treatment Value: 2mM SA vs. No Treatment
  misc_feature: MA Experiment ID: 20000224 Result: Up-regulated in Transcription
  misc_feature: MA Experiment ID: 20000436 Result: Down-regulated in Transcription
  misc_feature: MA Experiment 20000436 PARAMETER Experiment Name: At_Drought_P Parameter: Age (day) Value: 7
  misc_feature: MA Experiment 20000436 PARAMETER Experiment Name: At_Drought_P Parameter: Organism Value: A. thaliana
  misc_feature: MA Experiment 20000436 PARAMETER Experiment Name: At_Drought_P Parameter: Plant Line Value: WS
  misc_feature: MA Experiment 20000436 PARAMETER Experiment Name: At_Drought_P Parameter: Timepoint (hr) Value: 12
  misc_feature: MA Experiment 20000436 PARAMETER Experiment Name: At_Drought_P Parameter: Tissue Value: Whole Plant
  misc_feature: MA Experiment 20000436 PARAMETER Experiment Name: At_Drought_P Parameter: Treatment Value: Drought vs. No Drought
  misc_feature: MA Experiment ID: 20000453 Result: Down-regulated in Transcription
  misc_feature: MA Experiment 20000453 PARAMETER Experiment Name: At_100uM_ABA_P Parameter: Age (day) Value: 15
  misc_feature: MA Experiment 20000453 PARAMETER Experiment Name: At_100uM_ABA_P Parameter: Organism Value: A. thaliana
  misc_feature: MA Experiment 20000453 PARAMETER Experiment Name: At_100uM_ABA_P Parameter: Plant Line Value: WS
  misc_feature: MA Experiment 20000453 PARAMETER Experiment Name: At_100uM_ABA_P Parameter: Timepoint (hr) Value: 24
  misc_feature: MA Experiment 20000453 PARAMETER Experiment Name: At_100uM_ABA_P Parameter: Tissue Value: Aerial
  misc_feature: MA Experiment 20000453 PARAMETER Experiment Name: At_100uM_ABA_P Parameter: Treatment Value: 100uM ABA vs. No Treatment
  misc_feature: MA Experiment ID: 20001248 Result: Down-regulated in Transcription
  misc_feature: MA Experiment 20001248 PARAMETER Experiment Name: At_Far-red-induction_P Parameter: Age (day) Value: 7
  misc_feature: MA Experiment 20001248 PARAMETER Experiment Name: At_Far-red-induction_P Parameter: Light Value: Far-red vs. White
  misc_feature: MA Experiment 20001248 PARAMETER Experiment Name: At_Far-red-induction_P Parameter: Organism Value: A. thaliana
  misc_feature: MA Experiment 20001248 PARAMETER Experiment Name: At_Far-red-induction_P Parameter: Plant Line Value: Columbia
  misc_feature: MA Experiment 20001248 PARAMETER Experiment Name: At_Far-red-induction_P Parameter: Timepoint (hr) Value: 4
  misc_feature: MA Experiment 20001248 PARAMETER Experiment Name: At_Far-red-induction_P Parameter: Tissue Value: Whole Plant
  misc_feature: MA Experiment ID: 20001450 Result: Down-regulated in Transcription
  misc_feature: MA Experiment 20001450 PARAMETER Experiment Name: At_Far-red-induction_P Parameter: Age (day) Value: 7
  misc_feature: MA Experiment 20001450 PARAMETER Experiment Name: At_Far-red-induction_P Parameter: Light Value: Far-red vs. White
  misc_feature: MA Experiment 20001450 PARAMETER Experiment Name: At_Far-red-induction_P Parameter: Organism Value: A. thaliana
  misc_feature: MA Experiment 20001450 PARAMETER Experiment Name: At_Far-red-induction_P Parameter: Plant Line Value: Columbia
  misc_feature: MA Experiment 20001450 PARAMETER Experiment Name: At_Far-red-induction_P Parameter: Timepoint (hr) Value: 8
  misc_feature: MA Experiment 20001450 PARAMETER Experiment Name: At_Far-red-induction_P Parameter: Tissue Value: Whole Plant
  misc_feature: MA Experiment ID: 20001554 Result: Down-regulated in Transcription
  misc_feature: MA Experiment 20001554 PARAMETER Experiment Name: At_Drought_Soil_Dry_P Parameter: Age (day) Value: 21
  misc_feature: MA Experiment 20001554 PARAMETER Experiment Name: At_Drought_Soil_Dry_P Parameter: Organism Value: A. thaliana
  misc_feature: MA Experiment 20001554 PARAMETER Experiment Name: At_Drought_Soil_Dry_P Parameter: Plant Line Value: WS
  misc_feature: MA Experiment 20001554 PARAMETER Experiment Name: At_Drought_Soil_Dry_P Parameter: Post Timepoint (hr) Value: None
  misc_feature: MA Experiment 20001554 PARAMETER Experiment Name: At_Drought_Soil_Dry_P Parameter: Post-Treatment Value: None
  misc_feature: MA Experiment 20001554 PARAMETER Experiment Name: At_Drought_Soil_Dry_P Parameter: Timepoint (day) Value: 7
  misc_feature: MA Experiment 20001554 PARAMETER Experiment Name: At_Drought_Soil_Dry_P Parameter: Treatment Value: Drought vs. No Drought
  misc_feature: MA Experiment ID: 20001555 Result: Down-regulated in Transcription
  misc_feature: MA Experiment 20001555 PARAMETER Experiment Name: At_Drought_Soil_Dry_P Parameter: Age (day) Value: 24
  misc_feature: MA Experiment 20001555 PARAMETER Experiment Name: At_Drought_Soil_Dry_P Parameter: Organism Value: A. thaliana
  misc_feature: MA Experiment 20001555 PARAMETER Experiment Name: At_Drought_Soil_Dry_P Parameter: Plant Line Value: WS
  misc_feature: MA Experiment 20001555 PARAMETER Experiment Name: At_Drought_Soil_Dry_P Parameter: Post Timepoint (hr) Value: None
  misc_feature: MA Experiment 20001555 PARAMETER Experiment Name: At_Drought_Soil_Dry_P Parameter: Post-Treatment Value: None
  misc_feature: MA Experiment 20001555 PARAMETER Experiment Name: At_Drought_Soil_Dry_P Parameter: Timepoint (day) Value: 10
  misc_feature: MA Experiment 20001555 PARAMETER Experiment Name: At_Drought_Soil_Dry_P Parameter: Treatment Value: Drought vs. No Drought
  misc_feature: MA Experiment ID: 20001557 Result: Up-regulated in Transcription
  misc_feature: MA Experiment 20001557 PARAMETER Experiment Name: At_Drought_Soil_Dry_P Parameter: Age (day) Value: 27
  misc_feature: MA Experiment 20001557 PARAMETER Experiment Name: At_Drought_Soil_Dry_P Parameter: Organism Value: A. thaliana
  misc_feature: MA Experiment 20001557 PARAMETER Experiment Name: At_Drought_Soil_Dry_P Parameter: Plant Line Value: WS
  misc_feature: MA Experiment 20001557 PARAMETER Experiment Name: At_Drought_Soil_Dry_P Parameter: Post Timepoint (hr) Value: 3
  misc_feature: MA Experiment 20001557 PARAMETER Experiment Name: At_Drought_Soil_Dry_P Parameter: Post-Treatment Value: Re-Water vs. No Drought
  misc_feature: MA Experiment 20001557 PARAMETER Experiment Name: At_Drought_Soil_Dry_P Parameter: Timepoint (day) Value: 13
  misc_feature: MA Experiment 20001557 PARAMETER Experiment Name: At_Drought_Soil_Dry_P Parameter: Treatment Value: Drought vs. No Drought
  misc_feature: MA Experiment ID: 20001558 Result: Up-regulated in Transcription
  misc_feature: MA Experiment 20001558 PARAMETER Experiment Name: At_Drought_Soil_Dry_P Parameter: Age (day) Value: 27
  misc_feature: MA Experiment 20001558 PARAMETER Experiment Name: At_Drought_Soil_Dry_P Parameter: Organism Value: A. thaliana
  misc_feature: MA Experiment 20001558 PARAMETER Experiment Name: At_Drought_Soil_Dry_P Parameter: Plant Line Value: WS
  misc_feature: MA Experiment 20001558 PARAMETER Experiment Name: At_Drought_Soil_Dry_P Parameter: Post Timepoint (hr) Value: 6
  misc_feature: MA Experiment 20001558 PARAMETER Experiment Name: At_Drought_Soil_Dry_P Parameter: Post-Treatment Value: Re-Water vs. No Drought
  misc_feature: MA Experiment 20001558 PARAMETER Experiment Name: At_Drought_Soil_Dry_P Parameter: Timepoint (day) Value: 13
  misc_feature: MA Experiment 20001558 PARAMETER Experiment Name: At_Drought_Soil_Dry_P Parameter: Treatment Value: Drought vs. No Drought
  misc_feature: MA Experiment ID: 20001560 Result: Up-regulated in Transcription
  misc_feature: MA Experiment 20001560 PARAMETER Experiment Name: At_Drought_Soil_Dry_P Parameter: Age (day) Value: 28
  misc_feature: MA Experiment 20001560 PARAMETER Experiment Name: At_Drought_Soil_Dry_P Parameter: Organism Value: A. thaliana
  misc_feature: MA Experiment 20001560 PARAMETER Experiment Name: At_Drought_Soil_Dry_P Parameter: Plant Line Value: WS
  misc_feature: MA Experiment 20001560 PARAMETER Experiment Name: At_Drought_Soil_Dry_P Parameter: Post Timepoint (hr) Value: None
  misc_feature: MA Experiment 20001560 PARAMETER Experiment Name: At_Drought_Soil_Dry_P Parameter: Post-Treatment Value: None
  misc_feature: MA Experiment 20001560 PARAMETER Experiment Name: At_Drought_Soil_Dry_P Parameter: Timepoint (day) Value: 14
  misc_feature: MA Experiment 20001560 PARAMETER Experiment Name: At_Drought_Soil_Dry_P Parameter: Treatment Value: Drought vs. No Drought
  misc_feature: MA Experiment ID: 20001911 Result: Down-regulated in Transcription
  misc_feature: MA Experiment 20001911 PARAMETER Experiment Name: At_Drought_Reproduction_P Parameter: Age (day) Value: 40
  misc_feature: MA Experiment 20001911 PARAMETER Experiment Name: At_Drought_Reproduction_P Parameter: Organism Value: A. thaliana
  misc_feature: MA Experiment 20001911 PARAMETER Experiment Name: At_Drought_Reproduction_P Parameter: Plant Line Value: WS
  misc_feature: MA Experiment 20001911 PARAMETER Experiment Name: At_Drought_Reproduction_P Parameter: Timepoint (day) Value: 10
  misc_feature: MA Experiment 20001911 PARAMETER Experiment Name: At_Drought_Reproduction_P Parameter: Tissue Value: Flowers
  misc_feature: MA Experiment 20001911 PARAMETER Experiment Name: At_Drought_Reproduction_P Parameter: Treatment Value: Drought vs. No Drought
caaaattcccacaaaaatctttcctccaataacataacaaaacaactcttcttctacaacaaactatgttttgattttttagtttcttcttccacacaatacaaaagaaatggggttttattcactgaagcagctcttgttactttacatcatcatcatggctgttctcagatctcaagctagcaaaatcttcttcaccagagtacacgaacctaatctacaaaggttgtgcaagacagagattatcagatccatctggtttatactcacaagctctctctgcaatgtatggcttattggttactcaatcaacgaaaacaagattctacaaaaccacaactggaacaacaagccaaacaagcgtcactggtcttttccagtgtagaggagatttaagtaacaacgactgttacaactgtgttagtcgtcttcctgttctctctggtaagctctgtggcaaaaccattgctgctagagttcagctctccggctgttatcttctctatgaaatctctggctttgcccaaatttcaggaatggagttgttattcaagacatgtgggaagaacaacgtcgccgggacaggattcgaacagagaagagacacagctttcggggtgatgcaaaacggcgtcgttcaaggtcacggcttctacgcaacgacatacgaatcggtttacgttttaggacaatgcgaaggcgatataggcgattcagattgtagcggttgcataaaaaacgcgttacagagagctcaagtcgaatgtggaagctcaatatctggtcagatatatcttcataagtgttttgtcggttatagtttctacccaaatggtgttcccaagagatcttctccttatcctagctctggctcttcgggttcttcttcttcttcatcttcttcaggaacaacaggcaaaacggtggcaataatagtaggaggaacagctggtgttggatttcttgtcatttgcttacttttcgtcaaaaacttgatgaagaagaaatatgacgattattgaaaataattaggatgaagacaacaaaatgagtcccaaccccgaaatggaggcaagcgttaatgtgaattccgaggtgcatgcaattaattgtgtcccgatatttatatttttcgaattgttagtttattgaatacagtatttttgagaggtggaaattgtggtgggatggatgaagaagagctgggaccattttaaaatgttagaagatggagaaagtactttcaatttatttttaaaaatgtaaatgaattatctcatttgaagttccttaagtact

SEQ ID NO: 23055 - protein, 245 aa, Arabidopsis thaliana
  peptide (1)..(245): Ceres Seq. ID no. 12579929
  misc_feature (27)..(81): Pfam Name: Domain of unknown function DUF26 Pfam Description: Domain of unknown function DUF26
  misc_feature (1)..(244): Homolog of NCBI NO: 21593606 NR Description: unknown [Arabidopsis thaliana]
  misc_feature (1)..(236): Homolog of NCBI NO: 6721149 NR Description: hypothetical protein, 3' partial [Arabidopsis
  misc_feature (1)..(240): Homolog of NCBI NO: 15229281 NR Description: hypothetical protein; protein id: At3g04370.1
  misc_feature (1)..(186): Homolog of NCBI NO: 9758557 NR Description: gb|AAB80651.1~gene_id:MRH10.9~similar to unknown
  misc_feature (1)..(232): Homolog of NCBI NO: 26451089 NR Description: unknown protein [Arabidopsis thaliana]
  misc_feature (1)..(245): Homolog of NCBI NO: 30694417 NR Description: expressed protein [Arabidopsis thaliana]
  misc_feature (1)..(210): Homolog of NCBI NO: 15219740 NR Description: unknown protein; protein id: At1g04520.1
  misc_feature (1)..(245): Homolog of NCBI NO: 38566686 NR Description: At1g04520 [Arabidopsis thaliana]
  misc_feature (1)..(208): Homolog of NCBI NO: 25408259 NR Description: hypothetical protein At2g33330 [imported] -
  misc_feature (1)..(245): Homolog of NCBI NO: 18403243 NR Description: expressed protein
MYGLLVTQSTKTRFYKTTTGTTSQTSVTGLFQCRGDLSNNDCYNCVSRLPVLSGKLCGKTIAARVQLSGCYLLYEISGFAQISGMELLFKTCGKNNVAGTGFEQRRDTAFGVMQNGVVQGHGFYATTYESVYVLGQCEGDIGDSDCSGCIKNALQRAQVECGSSISGQIYLHKCFVGYSFYPNGVPKRSSPYPSSGSSGSSSSSSSSGTTGKTVAIIVGGTAGVGFLVICLLFVKNLMKKKYDDY

SEQ ID NO: 23056 - protein, 161 aa, Arabidopsis thaliana
  peptide (1)..(161): Ceres Seq. ID no. 12579930
  misc_feature (1)..(160): Homolog of NCBI NO: 21593606 NR Description: unknown [Arabidopsis thaliana]
  misc_feature (1)..(152): Homolog of NCBI NO: 6721149 NR Description: hypothetical protein, 3' partial [Arabidopsis
  misc_feature (1)..(156): Homolog of NCBI NO: 15229281 NR Description: hypothetical protein; protein id: At3g04370.1
  misc_feature (1)..(102): Homolog of NCBI NO: 9758557 NR Description: gb|AAB80651.1~gene_id:MRH10.9~similar to unknown
  misc_feature (1)..(148): Homolog of NCBI NO: 26451089 NR Description: unknown protein [Arabidopsis thaliana]
  misc_feature (1)..(161): Homolog of NCBI NO: 30694417 NR Description: expressed protein [Arabidopsis thaliana]
  misc_feature (1)..(126): Homolog of NCBI NO: 15219740 NR Description: unknown protein; protein id: At1g04520.1
  misc_feature (1)..(161): Homolog of NCBI NO: 38566686 NR Description: At1g04520 [Arabidopsis thaliana]
  misc_feature (1)..(124): Homolog of NCBI NO: 25408259 NR Description: hypothetical protein At2g33330 [imported] -
  misc_feature (1)..(161): Homolog of NCBI NO: 18403243 NR Description: expressed protein
MELLFKTCGKNNVAGTGFEQRRDTAFGVMQNGVVQGHGFYATTYESVYVLGQCEGDIGDSDCSGCIKNALQRAQVECGSSISGQIYLHKCFVGYSFYPNGVPKRSSPYPSSGSSGSSSSSSSSGTTGKTVAIIVGGTAGVGFLVICLLFVKNLMKKKYDDY

SEQ ID NO: 23057 - protein, 133 aa, Arabidopsis thaliana
  peptide (1)..(133): Ceres Seq. ID no. 12579931
  misc_feature (1)..(132): Homolog of NCBI NO: 21593606 NR Description: unknown [Arabidopsis thaliana]
  misc_feature (1)..(124): Homolog of NCBI NO: 6721149 NR Description: hypothetical protein, 3' partial [Arabidopsis
  misc_feature (1)..(128): Homolog of NCBI NO: 15229281 NR Description: hypothetical protein; protein id: At3g04370.1
  misc_feature (1)..(74): Homolog of NCBI NO: 9758557 NR Description: gb|AAB80651.1~gene_id:MRH10.9~similar to unknown
  misc_feature (1)..(120): Homolog of NCBI NO: 26451089 NR Description: unknown protein [Arabidopsis thaliana]
  misc_feature (1)..(133): Homolog of NCBI NO: 30694417 NR Description: expressed protein [Arabidopsis thaliana]
  misc_feature (1)..(98): Homolog of NCBI NO: 15219740 NR Description: unknown protein; protein id: At1g04520.1
  misc_feature (1)..(133): Homolog of NCBI NO: 38566686 NR Description: At1g04520 [Arabidopsis thaliana]
  misc_feature (1)..(96): Homolog of NCBI NO: 25408259 NR Description: hypothetical protein At2g33330 [imported] -
  misc_feature (1)..(133): Homolog of NCBI NO: 18403243 NR Description: expressed protein
MQNGVVQGHGFYATTYESVYVLGQCEGDIGDSDCSGCIKNALQRAQVECGSSISGQIYLHKCFVGYSFYPNGVPKRSSPYPSSGSSGSSSSSSSSGTTGKTVAIIVGGTAGVGFLVICLLFVKNLMKKKYDDY

SEQ ID NO: 23058 - DNA, 1349 bp, Arabidopsis thaliana
  misc_feature (1)..(1349): Ceres Seq. ID no. 13488256
  misc_feature: MA Experiment ID: 108434 Result: Up-regulated in Transcription
  misc_feature: MA Experiment 108434 PARAMETER Experiment Name: At_Root_Tips_cDNA_P Parameter: Tissue Value: Root Tips
  misc_feature: MA Experiment ID: 108462 Result: Down-regulated in Transcription
  misc_feature: MA Experiment 108462 PARAMETER Experiment Name: At_Germinating_Seeds_cDNA_P Parameter: Age (day) Value: 2 vs. 0
  misc_feature: MA Experiment 108462 PARAMETER Experiment Name: At_Germinating_Seeds_cDNA_P Parameter: Tissue Value: Germinating Seeds
  misc_feature: MA Experiment ID: 108463 Result: Down-regulated in Transcription
  misc_feature: MA Experiment 108463 PARAMETER Experiment Name: At_Germinating_Seeds_cDNA_P Parameter: Age (day) Value: 3 vs. 0
  misc_feature: MA Experiment 108463 PARAMETER Experiment Name: At_Germinating_Seeds_cDNA_P Parameter: Tissue Value: Germinating Seeds
  misc_feature: MA Experiment ID: 108464 Result: Down-regulated in Transcription
  misc_feature: MA Experiment 108464 PARAMETER Experiment Name: At_Germinating_Seeds_cDNA_P Parameter: Age (day) Value: 4 vs. 0
  misc_feature: MA Experiment 108464 PARAMETER Experiment Name: At_Germinating_Seeds_cDNA_P Parameter: Tissue Value: Germinating Seeds
  misc_feature: MA Experiment ID: 108572 Result: Down-regulated in Transcription
  misc_feature: MA Experiment 108572 PARAMETER Experiment Name: At_Drought_cDNA_P Parameter: Timepoint (hr) Value: 1
  misc_feature: MA Experiment 108572 PARAMETER Experiment Name: At_Drought_cDNA_P Parameter: Tissue Value: Aerial
  misc_feature: MA Experiment 108572 PARAMETER Experiment Name: At_Drought_cDNA_P Parameter: Treatment Value: Drought vs. No Drought
  misc_feature: MA Experiment ID: 108573 Result: Down-regulated in Transcription
  misc_feature: MA Experiment 108573 PARAMETER Experiment Name: At_Drought_cDNA_P Parameter: Timepoint (hr) Value: 6
  misc_feature: MA Experiment 108573 PARAMETER Experiment Name: At_Drought_cDNA_P Parameter: Tissue Value: Aerial
  misc_feature: MA Experiment 108573 PARAMETER Experiment Name: At_Drought_cDNA_P Parameter: Treatment Value: Drought vs. No Drought
  misc_feature: MA Experiment ID: 108576 Result: Up-regulated in Transcription
  misc_feature: MA Experiment 108576 PARAMETER Experiment Name: At_42deg_Heat_cDNA_P Parameter: Temperature (deg C) Value: 42 vs. 22
  misc_feature: MA Experiment 108576 PARAMETER Experiment Name: At_42deg_Heat_cDNA_P Parameter: Timepoint (hr) Value: 1
  misc_feature: MA Experiment 108576 PARAMETER Experiment Name: At_42deg_Heat_cDNA_P Parameter: Tissue Value: Aerial
  misc_feature: MA Experiment ID: 108577 Result: Up-regulated in Transcription
  misc_feature: MA Experiment 108577 PARAMETER Experiment Name: At_42deg_Heat_cDNA_P Parameter: Temperature (deg C) Value: 42 vs. 22
  misc_feature: MA Experiment 108577 PARAMETER Experiment Name: At_42deg_Heat_cDNA_P Parameter: Timepoint (hr) Value: 6
  misc_feature: MA Experiment 108577 PARAMETER Experiment Name: At_42deg_Heat_cDNA_P Parameter: Tissue Value: Aerial
  misc_feature: MA Experiment ID: 108579 Result: Up-regulated in Transcription
  misc_feature: MA Experiment 108579 PARAMETER Experiment Name: At_4deg_Cold_cDNA_P Parameter: Temperature (deg C) Value: 4 vs. 22
  misc_feature: MA Experiment 108579 PARAMETER Experiment Name: At_4deg_Cold_cDNA_P Parameter: Timepoint (hr) Value: 6
  misc_feature: MA Experiment 108579 PARAMETER Experiment Name: At_4deg_Cold_cDNA_P Parameter: Tissue Value: Aerial
  misc_feature: MA Experiment ID: 108595 Result: Down-regulated in Transcription
  misc_feature: MA Experiment 108595 PARAMETER Experiment Name: At_Ler-pi_Ovule_cDNA_P Parameter: Plant Line Value: null
  misc_feature: MA Experiment ID: 20000113 Result: Up-regulated in Transcription
  misc_feature: MA Experiment 20000113 PARAMETER Experiment Name: At_42deg_Heat_cDNA_P Parameter: Temperature (deg C) Value: 42 vs. 22
  misc_feature: MA Experiment 20000113 PARAMETER Experiment Name: At_42deg_Heat_cDNA_P Parameter: Timepoint (hr) Value: 8
  misc_feature: MA Experiment 20000113 PARAMETER Experiment Name: At_42deg_Heat_cDNA_P Parameter: Tissue Value: Aerial
  misc_feature: MA Experiment ID: 20000144 Result: Up-regulated in Transcription
  misc_feature: MA Experiment 20000144 PARAMETER Experiment Name: At_42deg_Heat_cDNA_P Parameter: Temperature (deg C) Value: 42 vs. 22
  misc_feature: MA Experiment 20000144 PARAMETER Experiment Name: At_42deg_Heat_cDNA_P Parameter: Timepoint (hr) Value: 1
  misc_feature: MA Experiment 20000144 PARAMETER Experiment Name: At_42deg_Heat_cDNA_P Parameter: Tissue Value: Aerial
  misc_feature: MA Experiment ID: 20000171 Result: Up-regulated in Transcription
  misc_feature: MA Experiment 20000171 PARAMETER Experiment Name: At_42deg_Heat_P Parameter: Age (day) Value: 14
  misc_feature: MA Experiment 20000171 PARAMETER Experiment Name: At_42deg_Heat_P Parameter: Organism Value: A. thaliana
  misc_feature: MA Experiment 20000171 PARAMETER Experiment Name: At_42deg_Heat_P Parameter: Plant Line Value: WS
  misc_feature: MA Experiment 20000171 PARAMETER Experiment Name: At_42deg_Heat_P Parameter: Temperature (deg C) Value: 42 vs. 22
  misc_feature: MA Experiment 20000171 PARAMETER Experiment Name: At_42deg_Heat_P Parameter: Timepoint (hr) Value: 1
  misc_feature: MA Experiment 20000171 PARAMETER Experiment Name: At_42deg_Heat_P Parameter: Tissue Value: Aerial
  misc_feature: MA Experiment ID: 20000173 Result: Up-regulated in Transcription
  misc_feature: MA Experiment 20000173 PARAMETER Experiment Name: At_42deg_Heat_P Parameter: Age (day) Value: 14
  misc_feature: MA Experiment 20000173 PARAMETER Experiment Name: At_42deg_Heat_P Parameter: Organism Value: A. thaliana
  misc_feature: MA Experiment 20000173 PARAMETER Experiment Name: At_42deg_Heat_P Parameter: Plant Line Value: WS
  misc_feature: MA Experiment 20000173 PARAMETER Experiment Name: At_42deg_Heat_P Parameter: Temperature (deg C) Value: 42 vs. 22
  misc_feature: MA Experiment 20000173 PARAMETER Experiment Name: At_42deg_Heat_P Parameter: Timepoint (hr) Value: 6
  misc_feature: MA Experiment 20000173 PARAMETER Experiment Name: At_42deg_Heat_P Parameter: Tissue Value: Aerial
  misc_feature: MA Experiment ID: 20000180 Result: Down-regulated in Transcription
  misc_feature: MA Experiment 20000180 PARAMETER Experiment Name: At_Germinating_Seeds_P Parameter: Age (hr) Value: 24 vs. 0
  misc_feature: MA Experiment 20000180 PARAMETER Experiment Name: At_Germinating_Seeds_P Parameter: Tissue Value: Germinating Seeds
  misc_feature: MA Experiment ID: 20000437 Result: Down-regulated in Transcription
  misc_feature: MA Experiment 20000437 PARAMETER Experiment Name: At_Drought_P Parameter: Age (day) Value: 8
  misc_feature: MA Experiment 20000437 PARAMETER Experiment Name: At_Drought_P Parameter: Organism Value: A. thaliana
  misc_feature: MA Experiment 20000437 PARAMETER Experiment Name: At_Drought_P Parameter: Plant Line Value: WS
  misc_feature: MA Experiment 20000437 PARAMETER Experiment Name: At_Drought_P Parameter: Timepoint (hr) Value: 24
  misc_feature: MA Experiment 20000437 PARAMETER Experiment Name: At_Drought_P Parameter: Tissue Value: Whole Plant
  misc_feature: MA Experiment 20000437 PARAMETER Experiment Name: At_Drought_P Parameter: Treatment Value: Drought vs. No Drought
  misc_feature: MA Experiment ID: 20001450 Result: Down-regulated in Transcription
  misc_feature: MA Experiment 20001450 PARAMETER Experiment Name: At_Far-red-induction_P Parameter: Age (day) Value: 7
  misc_feature: MA Experiment 20001450 PARAMETER Experiment Name: At_Far-red-induction_P Parameter: Light Value: Far-red vs. White
  misc_feature: MA Experiment 20001450 PARAMETER Experiment Name: At_Far-red-induction_P Parameter: Organism Value: A. thaliana
  misc_feature: MA Experiment 20001450 PARAMETER Experiment Name: At_Far-red-induction_P Parameter: Plant Line Value: Columbia
  misc_feature: MA Experiment 20001450 PARAMETER Experiment Name: At_Far-red-induction_P Parameter: Timepoint (hr) Value: 8
  misc_feature: MA Experiment 20001450 PARAMETER Experiment Name: At_Far-red-induction_P Parameter: Tissue Value: Whole Plant
  misc_feature: MA Experiment ID: 20001451 Result: Down-regulated in Transcription
  misc_feature: MA Experiment 20001451 PARAMETER Experiment Name: At_Far-red-induction_P Parameter: Age (day) Value: 7
  misc_feature: MA Experiment 20001451 PARAMETER Experiment Name: At_Far-red-induction_P Parameter: Light Value: Far-red vs. White
  misc_feature: MA Experiment 20001451 PARAMETER Experiment Name: At_Far-red-induction_P Parameter: Organism Value: A. thaliana
  misc_feature: MA Experiment 20001451 PARAMETER Experiment Name: At_Far-red-induction_P Parameter: Plant Line Value: Columbia
  misc_feature: MA Experiment 20001451 PARAMETER Experiment Name: At_Far-red-induction_P Parameter: Timepoint (hr) Value: 24
  misc_feature: MA Experiment 20001451 PARAMETER Experiment Name: At_Far-red-induction_P Parameter: Tissue Value: Whole Plant
  misc_feature: MA Experiment ID: 20001558 Result: Up-regulated in Transcription
  misc_feature: MA Experiment 20001558 PARAMETER Experiment Name: At_Drought_Soil_Dry_P Parameter: Age (day) Value: 27
  misc_feature: MA Experiment 20001558 PARAMETER Experiment Name: At_Drought_Soil_Dry_P Parameter: Organism Value: A. thaliana
  misc_feature: MA Experiment 20001558 PARAMETER Experiment Name: At_Drought_Soil_Dry_P Parameter: Plant Line Value: WS
  misc_feature: MA Experiment 20001558 PARAMETER Experiment Name: At_Drought_Soil_Dry_P Parameter: Post Timepoint (hr) Value: 6
  misc_feature: MA Experiment 20001558 PARAMETER Experiment Name: At_Drought_Soil_Dry_P Parameter: Post-Treatment Value: Re-Water vs. No Drought
  misc_feature: MA Experiment 20001558 PARAMETER Experiment Name: At_Drought_Soil_Dry_P Parameter: Timepoint (day) Value: 13
  misc_feature: MA Experiment 20001558 PARAMETER Experiment Name: At_Drought_Soil_Dry_P Parameter: Treatment Value: Drought vs. No Drought
gtgaattctactatccatccaccaagcactctgtgtgcctctgcaaattaacaatttcctcagaacaattacatttcgattcgattcgattctcttatcttcttgatctctgtttgttcatctgtggtggatctccagatgttggttttgagaattttgtcgcgagtaacccgcaacgcgggcatacgctcatctctatccgccgtcactcttccggcgaggaatcagactcctgttttctcgagccggtttcactccctagctcacgatttctcgcataagcttgttccagctcagatgtctatgatggattcgtttgcactgcaaaggttcaatttttcttcctctacctcgcctgaatcagatgagaagaagacccacactgaggcctcaaagacaagtgaagagaaacctacagctgaggcaaaccaaccaggtcttgactctgaatctaaagattctgtgacagattctgcaaaaagaaagcggaaaggtgctaaaggagctgcatcttcatcttctgaatcagattctgagagtgatgatgatgaattgtcagccgatgatttggtgaagctcgtagctgagaaggaagagctactgtctgagaaggaagaagagattaagcagttgaaagacaaagttcttcgcacttatgctgagatggagaatgtcatggacagaacaagacgtgatgctgaaaacaccaaaaagtatgccgtacagaattttgcaaagagcctattggatgtggcggataatcttggaagagcttcttcggttgtcaaagaaagcttctcaaagcttgacacctcagaagattctgctggagcagctccactattaaagacccttttagaaggagtggagatgactgagaaacagcttgctgaggtatttaagaaatttggtatggagaagtatgatcctataaacgagccatttgatccaaacagacataacgcagtgttccaagtccctgatgcttctaagccagaaggcacagttgctcatgtcttgaagtctggatacacgctgtatgaccgagttataagaccagctgaggttggtgttacccagggaggagagaaccaagaagaaaagaaagagtctgatgcttaagaagaagtcagctggttttcataaattttgttacggttctatgtttccattaacatcttctcgagtcttcgagtcatagttttcttttgtggtttggttattcattagatgaacaagatctcccataagttgctggacatggcatttgcaggggaaatcctgcttctgtgtctgttttctctatctccatgctataattgaacgaggaaaatatcattttacatccc

SEQ ID NO: 23059 - protein, 327 aa, Arabidopsis thaliana
  peptide (1)..(327): Ceres Seq. ID no. 13488257
  misc_feature (116)..(314): Pfam Name: GrpE Pfam Description: GrpE
  misc_feature (72)..(314): Homolog of NCBI NO: 23482781 NR Description: co-chaperone GrpE, putative [Plasmodium yoelii
  misc_feature (76)..(306): Homolog of NCBI NO: 23508449 NR Description: co-chaperone GrpE, putative [Plasmodium
  misc_feature (98)..(322): Homolog of NCBI NO: 3851638 NR Description: chaperone GrpE type 1 [Nicotiana tabacum]
  misc_feature (85)..(326): Homolog of NCBI NO: 38636943 NR Description: putative chaperone GrpE [Oryza sativa (japonica
  misc_feature (98)..(327): Homolog of NCBI NO: 3851640 NR Description: chaperone GrpE type 2 [Nicotiana tabacum]
  misc_feature (130)..(327): Homolog of NCBI NO: 21554173 NR Description: chaperone GrpE-like protein [Arabidopsis thaliana]
  misc_feature (130)..(327): Homolog of NCBI NO: 15240475 NR Description: chaperone GrpE-related protein [Arabidopsis
  misc_feature (54)..(327): Homolog of NCBI NO: 1669597 NR Description: AR192 [Arabidopsis thaliana]
  misc_feature (1)..(327): Homolog of NCBI NO: 7485329 NR Description: hypothetical protein F10M23.120 - Arabidopsis
  misc_feature (1)..(327): Homolog of NCBI NO: 18416821 NR Description: grpE like protein [Arabidopsis thaliana]
MLVLRILSRVTRNAGIRSSLSAVTLPARNQTPVFSSRFHSLAHDFSHKLVPAQMSMMDSFALQRFNFSSSTSPESDEKKTHTEASKTSEEKPTAEANQPGLDSESKDSVTDSAKRKRKGAKGAASSSSESDSESDDDELSADDLVKLVAEKEELLSEKEEEIKQLKDKVLRTYAEMENVMDRTRRDAENTKKYAVQNFAKSLLDVADNLGRASSVVKESFSKLDTSEDSAGAAPLLKTLLEGVEMTEKQLAEVFKKFGMEKYDPINEPFDPNRHNAVFQVPDASKPEGTVAHVLKSGYTLYDRVIRPAEVGVTQGGENQEEKKESDA

SEQ ID NO: 23060 - protein, 274 aa, Arabidopsis thaliana
  peptide (1)..(274): Ceres Seq. ID no. 13488258
  misc_feature (63)..(261): Pfam Name: GrpE Pfam Description: GrpE
  misc_feature (19)..(261): Homolog of NCBI NO: 23482781 NR Description: co-chaperone GrpE, putative [Plasmodium yoelii
  misc_feature (23)..(253): Homolog of NCBI NO: 23508449 NR Description: co-chaperone GrpE, putative [Plasmodium
  misc_feature (45)..(269): Homolog of NCBI NO: 3851638 NR Description: chaperone GrpE type 1 [Nicotiana tabacum]
  misc_feature (32)..(273): Homolog of NCBI NO: 38636943 NR Description: putative chaperone GrpE [Oryza sativa (japonica
  misc_feature (45)..(274): Homolog of NCBI NO: 3851640 NR Description: chaperone GrpE type 2 [Nicotiana tabacum]
  misc_feature (77)..(274): Homolog of NCBI NO: 21554173 NR Description: chaperone GrpE-like protein [Arabidopsis thaliana]
  misc_feature (77)..(274): Homolog of NCBI NO: 15240475 NR Description: chaperone GrpE-related protein [Arabidopsis
  misc_feature (1)..(274): Homolog of NCBI NO: 1669597 NR Description: AR192 [Arabidopsis thaliana]
  misc_feature (1)..(274): Homolog of NCBI NO: 7485329 NR Description: hypothetical protein F10M23.120 - Arabidopsis
  misc_feature (1)..(274): Homolog of NCBI NO: 18416821 NR Description: grpE like protein [Arabidopsis thaliana]
MSMMDSFALQRFNFSSSTSPESDEKKTHTEASKTSEEKPTAEANQPGLDSESKDSVTDSAKRKRKGAKGAASSSSESDSESDDDELSADDLVKLVAEKEELLSEKEEEIKQLKDKVLRTYAEMENVMDRTRRDAENTKKYAVQNFAKSLLDVADNLGRASSVVKESFSKLDTSEDSAGAAPLLKTLLEGVEMTEKQLAEVFKKFGMEKYDPINEPFDPNRHNAVFQVPDASKPEGTVAHVLKSGYTLYDRVIRPAEVGVTQGGENQEEKKESDA

SEQ ID NO: 23061 - protein, 272 aa, Arabidopsis thaliana
  peptide (1)..(272): Ceres Seq. ID no. 13488259
  misc_feature (61)..(259): Pfam Name: GrpE Pfam Description: GrpE
  misc_feature (17)..(259): Homolog of NCBI NO: 23482781 NR Description: co-chaperone GrpE, putative [Plasmodium yoelii
  misc_feature (21)..(251): Homolog of NCBI NO: 23508449 NR Description: co-chaperone GrpE, putative [Plasmodium
  misc_feature (43)..(267): Homolog of NCBI NO: 3851638 NR Description: chaperone GrpE type 1 [Nicotiana tabacum]
  misc_feature (30)..(271): Homolog of NCBI NO: 38636943 NR Description: putative chaperone GrpE [Oryza sativa (japonica
  misc_feature (43)..(272): Homolog of NCBI NO: 3851640 NR Description: chaperone GrpE type 2 [Nicotiana tabacum]
  misc_feature (75)..(272): Homolog of NCBI NO: 21554173 NR Description: chaperone GrpE-like protein [Arabidopsis thaliana]
  misc_feature (75)..(272): Homolog of NCBI NO: 15240475 NR Description: chaperone GrpE-related protein [Arabidopsis
  misc_feature (1)..(272): Homolog of NCBI NO: 1669597 NR Description: AR192 [Arabidopsis thaliana]
  misc_feature (1)..(272): Homolog of NCBI NO: 7485329 NR Description: hypothetical protein F10M23.120 - Arabidopsis
  misc_feature (1)..(272): Homolog of NCBI NO: 18416821 NR Description: grpE like protein [Arabidopsis thaliana]
MMDSFALQRFNFSSSTSPESDEKKTHTEASKTSEEKPTAEANQPGLDSESKDSVTDSAKRKRKGAKGAASSSSESDSESDDDELSADDLVKLVAEKEELLSEKEEEIKQLKDKVLRTYAEMENVMDRTRRDAENTKKYAVQNFAKSLLDVADNLGRASSVVKESFSKLDTSEDSAGAAPLLKTLLEGVEMTEKQLAEVFKKFGMEKYDPINEPFDPNRHNAVFQVPDASKPEGTVAHVLKSGYTLYDRVIRPAEVGVTQGGENQEEKKESDA

SEQ ID NO: 23062 - DNA, 1116 bp, Arabidopsis thaliana
  misc_feature (1)..(1116): Ceres Seq. ID no. 13509194
  misc_feature: MA Experiment ID: 108434 Result: Up-regulated in Transcription
  misc_feature: MA Experiment 108434 PARAMETER Experiment Name: At_Root_Tips_cDNA_P Parameter: Tissue Value: Root Tips
  misc_feature: MA Experiment ID: 108461 Result: Up-regulated in Transcription
  misc_feature: MA Experiment 108461 PARAMETER Experiment Name: At_Germinating_Seeds_cDNA_P Parameter: Age (day) Value: 1 vs. 0
  misc_feature: MA Experiment 108461 PARAMETER Experiment Name: At_Germinating_Seeds_cDNA_P Parameter: Tissue Value: Germinating Seeds
  misc_feature: MA Experiment ID: 108501 Result: Down-regulated in Transcription
  misc_feature: MA Experiment 108501 PARAMETER Experiment Name: At_ap2_floral_buds_cDNA_P Parameter: Plant Line Value: ap2 (Ler.)
  misc_feature: MA Experiment 108501 PARAMETER Experiment Name: At_ap2_floral_buds_cDNA_P Parameter: Tissue Value: Closed Flower
  misc_feature: MA Experiment ID: 108561 Result: Down-regulated in Transcription
  misc_feature: MA Experiment 108561 PARAMETER Experiment Name: At_100uM_ABA_cDNA_P Parameter: Timepoint (hr) Value: 6
  misc_feature: MA Experiment 108561 PARAMETER Experiment Name: At_100uM_ABA_cDNA_P Parameter: Tissue Value: Aerial
  misc_feature: MA Experiment 108561 PARAMETER Experiment Name: At_100uM_ABA_cDNA_P Parameter: Treatment Value: 100uM ABA vs. No Treatment
  misc_feature: MA Experiment ID: 108577 Result: Down-regulated in Transcription
  misc_feature: MA Experiment 108577 PARAMETER Experiment Name: At_42deg_Heat_cDNA_P Parameter: Temperature (deg C) Value: 42 vs. 22
  misc_feature: MA Experiment 108577 PARAMETER Experiment Name: At_42deg_Heat_cDNA_P Parameter: Timepoint (hr) Value: 6
  misc_feature: MA Experiment 108577 PARAMETER Experiment Name: At_42deg_Heat_cDNA_P Parameter: Tissue Value: Aerial
  misc_feature: MA Experiment ID: 108585 Result: Down-regulated in Transcription
  misc_feature: MA Experiment 108585 PARAMETER Experiment Name: At_5mM_NaNP_cDNA_P Parameter: Timepoint (hr) Value: 6
  misc_feature: MA Experiment 108585 PARAMETER Experiment Name: At_5mM_NaNP_cDNA_P Parameter: Tissue Value: Aerial
  misc_feature: MA Experiment 108585 PARAMETER Experiment Name: At_5mM_NaNP_cDNA_P Parameter: Treatment Value: null
  misc_feature: MA Experiment ID: 108595 Result: Down-regulated in Transcription
  misc_feature: MA Experiment 108595 PARAMETER Experiment Name: At_Ler-pi_Ovule_cDNA_P Parameter: Plant Line Value: null
  misc_feature: MA Experiment ID: 108609 Result: Down-regulated in Transcription
  misc_feature: MA Experiment 108609 PARAMETER Experiment Name: At_100uM_ABA_cDNA_P Parameter: Timepoint (hr) Value: 24
  misc_feature: MA Experiment 108609 PARAMETER Experiment Name: At_100uM_ABA_cDNA_P Parameter: Tissue Value: Aerial
  misc_feature: MA Experiment 108609 PARAMETER Experiment Name: At_100uM_ABA_cDNA_P Parameter: Treatment Value: 100uM ABA vs. No Treatment
  misc_feature: MA Experiment ID: 20000111 Result: Down-regulated in Transcription
  misc_feature: MA Experiment 20000111 PARAMETER Experiment Name: At_42deg_Heat_cDNA_P Parameter: Temperature (deg C) Value: 42 vs. 22
  misc_feature: MA Experiment 20000111 PARAMETER Experiment Name: At_42deg_Heat_cDNA_P Parameter: Timepoint (hr) Value: 6
  misc_feature: MA Experiment 20000111 PARAMETER Experiment Name: At_42deg_Heat_cDNA_P Parameter: Tissue Value: Aerial
  misc_feature: MA Experiment ID: 20000113 Result: Down-regulated in Transcription
  misc_feature: MA Experiment 20000113 PARAMETER Experiment Name: At_42deg_Heat_cDNA_P Parameter: Temperature (deg C) Value: 42 vs. 22
  misc_feature: MA Experiment 20000113 PARAMETER Experiment Name: At_42deg_Heat_cDNA_P Parameter: Timepoint (hr) Value: 8
  misc_feature: MA Experiment 20000113 PARAMETER Experiment Name: At_42deg_Heat_cDNA_P Parameter: Tissue Value: Aerial
  misc_feature: MA Experiment ID: 20000173 Result: Down-regulated in Transcription
  misc_feature: MA Experiment 20000173 PARAMETER Experiment Name: At_42deg_Heat_P Parameter: Age (day) Value: 14
  misc_feature: MA Experiment 20000173 PARAMETER Experiment Name: At_42deg_Heat_P Parameter: Organism Value: A. thaliana
  misc_feature: MA Experiment 20000173 PARAMETER Experiment Name: At_42deg_Heat_P Parameter: Plant Line Value: WS
  misc_feature: MA Experiment 20000173 PARAMETER Experiment Name: At_42deg_Heat_P Parameter: Temperature (deg C) Value: 42 vs. 22
  misc_feature: MA Experiment 20000173 PARAMETER Experiment Name: At_42deg_Heat_P Parameter: Timepoint (hr) Value: 6
  misc_feature: MA Experiment 20000173 PARAMETER Experiment Name: At_42deg_Heat_P Parameter: Tissue Value: Aerial
  misc_feature: MA Experiment ID: 20000185 Result: Down-regulated in Transcription
  misc_feature: MA Experiment 20000185 PARAMETER Experiment Name: At_Roots__P Parameter: Age (day) Value: 7 vs. 21
  misc_feature: MA Experiment 20000185 PARAMETER Experiment Name: At_Roots__P Parameter: Organism Value: A. thaliana
  misc_feature: MA Experiment 20000185 PARAMETER Experiment Name: At_Roots__P Parameter: Tissue Value: Roots vs. Whole Plant
  misc_feature: MA Experiment ID: 20000437 Result: Down-regulated in Transcription
  misc_feature: MA Experiment 20000437 PARAMETER Experiment Name: At_Drought_P Parameter: Age (day) Value: 8
  misc_feature: MA Experiment 20000437 PARAMETER Experiment Name: At_Drought_P Parameter: Organism Value: A. thaliana
  misc_feature: MA Experiment 20000437 PARAMETER Experiment Name: At_Drought_P Parameter: Plant Line Value: WS
  misc_feature: MA Experiment 20000437 PARAMETER Experiment Name: At_Drought_P Parameter: Timepoint (hr) Value: 24
  misc_feature: MA Experiment 20000437 PARAMETER Experiment Name: At_Drought_P Parameter: Tissue Value: Whole Plant
  misc_feature: MA Experiment 20000437 PARAMETER Experiment Name: At_Drought_P Parameter: Treatment Value: Drought vs. No Drought
  misc_feature: MA Experiment ID: 20000453 Result: Down-regulated in Transcription
  misc_feature: MA Experiment 20000453 PARAMETER Experiment Name: At_100uM_ABA_P Parameter: Age (day) Value: 15
  misc_feature: MA Experiment 20000453 PARAMETER Experiment Name: At_100uM_ABA_P Parameter: Organism Value: A. thaliana
  misc_feature: MA Experiment 20000453 PARAMETER Experiment Name: At_100uM_ABA_P Parameter: Plant Line Value: WS
  misc_feature: MA Experiment 20000453 PARAMETER Experiment Name: At_100uM_ABA_P Parameter: Timepoint (hr) Value: 24
  misc_feature: MA Experiment 20000453 PARAMETER Experiment Name: At_100uM_ABA_P Parameter: Tissue Value: Aerial
  misc_feature: MA Experiment 20000453 PARAMETER Experiment Name: At_100uM_ABA_P Parameter: Treatment Value: 100uM ABA vs. No Treatment
  misc_feature: MA Experiment ID: 20000794 Result: Down-regulated in Transcription
  misc_feature: MA Experiment 20000794 PARAMETER Experiment Name: At_Petals_P Parameter: Age (day) Value: 23-25 days
  misc_feature: MA Experiment 20000794 PARAMETER Experiment Name: At_Petals_P Parameter: Plant Line Value: WS
  misc_feature: MA Experiment 20000794 PARAMETER Experiment Name: At_Petals_P Parameter: Tissue Value: Petals vs. Whole plant
  misc_feature: MA Experiment ID: 20001247 Result: Down-regulated in Transcription
  misc_feature: MA Experiment 20001247 PARAMETER Experiment Name: At_Far-red-induction_P Parameter: Age (day) Value: 7
  misc_feature: MA Experiment 20001247 PARAMETER Experiment Name: At_Far-red-induction_P Parameter: Light Value: Far-red vs. White
  misc_feature: MA Experiment 20001247 PARAMETER Experiment Name: At_Far-red-induction_P Parameter: Organism Value: A. thaliana
  misc_feature: MA Experiment 20001247 PARAMETER Experiment Name: At_Far-red-induction_P Parameter: Plant Line Value: Columbia
  misc_feature: MA Experiment 20001247 PARAMETER Experiment Name: At_Far-red-induction_P Parameter: Timepoint (hr) Value: 1
  misc_feature: MA Experiment 20001247 PARAMETER Experiment Name: At_Far-red-induction_P Parameter: Tissue Value: Whole Plant
  misc_feature: MA Experiment ID: 20001451 Result: Down-regulated in Transcription
  misc_feature: MA Experiment 20001451 PARAMETER Experiment Name: At_Far-red-induction_P Parameter: Age (day) Value: 7
  misc_feature: MA Experiment 20001451 PARAMETER Experiment Name: At_Far-red-induction_P Parameter: Light Value: Far-red vs. White
  misc_feature: MA Experiment 20001451 PARAMETER Experiment Name: At_Far-red-induction_P Parameter: Organism Value: A. thaliana
  misc_feature: MA Experiment 20001451 PARAMETER Experiment Name: At_Far-red-induction_P Parameter: Plant Line Value: Columbia
  misc_feature: MA Experiment 20001451 PARAMETER Experiment Name: At_Far-red-induction_P Parameter: Timepoint (hr) Value: 24
  misc_feature: MA Experiment 20001451 PARAMETER Experiment Name: At_Far-red-induction_P Parameter: Tissue Value: Whole Plant
  misc_feature: MA Experiment ID: 20001458 Result: Up-regulated in Transcription
  misc_feature: MA Experiment 20001458 PARAMETER Experiment Name: At_50mM_NH4NO3_L-to-H_P Parameter: Age (day) Value: Undefined
  misc_feature: MA Experiment 20001458 PARAMETER Experiment Name: At_50mM_NH4NO3_L-to-H_P Parameter: Organism Value: Undefined
  misc_feature: MA Experiment 20001458 PARAMETER Experiment Name: At_50mM_NH4NO3_L-to-H_P Parameter: Plant Line Value: Undefined
  misc_feature: MA Experiment 20001458 PARAMETER Experiment Name: At_50mM_NH4NO3_L-to-H_P Parameter: Timepoint (hr) Value: 2
  misc_feature: MA Experiment 20001458 PARAMETER Experiment Name: At_50mM_NH4NO3_L-to-H_P Parameter: Tissue Value: Siliques
  misc_feature: MA Experiment 20001458 PARAMETER Experiment Name: At_50mM_NH4NO3_L-to-H_P Parameter: Treatment Value: 50mM NH4NO3 vs. 100mM Manitol
  misc_feature: MA Experiment ID: 20001557 Result: Down-regulated in Transcription
  misc_feature: MA Experiment 20001557 PARAMETER Experiment Name: At_Drought_Soil_Dry_P Parameter: Age (day) Value: 27
  misc_feature: MA Experiment 20001557 PARAMETER Experiment Name: At_Drought_Soil_Dry_P Parameter: Organism Value: A. thaliana
  misc_feature: MA Experiment 20001557 PARAMETER Experiment Name: At_Drought_Soil_Dry_P Parameter: Plant Line Value: WS
  misc_feature: MA Experiment 20001557 PARAMETER Experiment Name: At_Drought_Soil_Dry_P Parameter: Post Timepoint (hr) Value: 3
  misc_feature: MA Experiment 20001557 PARAMETER Experiment Name: At_Drought_Soil_Dry_P Parameter: Post-Treatment Value: Re-Water vs. No Drought
  misc_feature: MA Experiment 20001557 PARAMETER Experiment Name: At_Drought_Soil_Dry_P Parameter: Timepoint (day) Value: 13
  misc_feature: MA Experiment 20001557 PARAMETER Experiment Name: At_Drought_Soil_Dry_P Parameter: Treatment Value: Drought vs. No Drought
  misc_feature: MA Experiment ID: 20001757 Result: Up-regulated in Transcription
  misc_feature: MA Experiment 20001757 PARAMETER Experiment Name: At_50mM_NH4NO3_L-to-H_P Parameter: Timepoint (hr) Value: 6
  misc_feature: MA Experiment 20001757 PARAMETER Experiment Name: At_50mM_NH4NO3_L-to-H_P Parameter: Tissue Value: Leaf
  misc_feature: MA Experiment 20001757 PARAMETER Experiment Name: At_50mM_NH4NO3_L-to-H_P Parameter: Treatment Value: 50mM NH4NO3 vs 100mM Mannitol
  misc_feature: MA Experiment ID: 20001904 Result: Down-regulated in Transcription
  misc_feature: MA Experiment 20001904 PARAMETER Experiment Name: At_Drought_Reproduction_P Parameter: Age (day) Value: 37
  misc_feature: MA Experiment 20001904 PARAMETER Experiment Name: At_Drought_Reproduction_P Parameter: Organism Value: A. thaliana
  misc_feature: MA Experiment 20001904 PARAMETER Experiment Name: At_Drought_Reproduction_P Parameter: Plant Line Value: WS
  misc_feature: MA Experiment 20001904 PARAMETER Experiment Name: At_Drought_Reproduction_P Parameter: Timepoint (day) Value: 7
  misc_feature: MA Experiment 20001904 PARAMETER Experiment Name: At_Drought_Reproduction_P Parameter: Tissue Value: Rosettes
  misc_feature: MA Experiment 20001904 PARAMETER Experiment Name: At_Drought_Reproduction_P Parameter: Treatment Value: Drought vs. No Drought
  misc_feature: MA Experiment ID: 20001906 Result: Down-regulated in Transcription
  misc_feature: MA Experiment 20001906 PARAMETER Experiment Name: At_Drought_Reproduction_P Parameter: Age (day) Value: 35
  misc_feature: MA Experiment 20001906 PARAMETER Experiment Name: At_Drought_Reproduction_P Parameter: Organism Value: A. thaliana
  misc_feature: MA Experiment 20001906 PARAMETER Experiment Name: At_Drought_Reproduction_P Parameter: Plant Line Value: WS
  misc_feature: MA Experiment 20001906 PARAMETER Experiment Name: At_Drought_Reproduction_P Parameter: Timepoint (day) Value: 5
  misc_feature: MA Experiment 20001906 PARAMETER Experiment Name: At_Drought_Reproduction_P Parameter: Tissue Value: Siliques
  misc_feature: MA Experiment 20001906 PARAMETER Experiment Name: At_Drought_Reproduction_P Parameter: Treatment Value: Drought vs. No Drought
  misc_feature: MA Experiment ID: 20001908 Result: Down-regulated in Transcription
  misc_feature: MA Experiment 20001908 PARAMETER Experiment Name: At_Drought_Reproduction_P Parameter: Age (day) Value: 40
  misc_feature: MA Experiment 20001908 PARAMETER Experiment Name: At_Drought_Reproduction_P Parameter: Organism Value: A. thaliana
  misc_feature: MA Experiment 20001908 PARAMETER Experiment Name: At_Drought_Reproduction_P Parameter: Plant Line Value: WS
  misc_feature: MA Experiment 20001908 PARAMETER Experiment Name: At_Drought_Reproduction_P Parameter: Timepoint (day) Value: 10
  misc_feature: MA Experiment 20001908 PARAMETER Experiment Name: At_Drought_Reproduction_P Parameter: Tissue Value: Siliques
  misc_feature: MA Experiment 20001908 PARAMETER Experiment Name: At_Drought_Reproduction_P Parameter: Treatment Value: Drought vs. No Drought
atagaacatcctaatcgaaaaacattagttttgctgcgtttagtattcaatttcatcgacccaaatcaaaatatataggatactagataaagagtgactgaaggagagaaaaacaaaaatggcgattgtttccgtctctaactcttttctcactttcaattctcccaatcagctccgatttagccgaagaagattctctgccatggcttcttcaactactggagtgagagtcgctgaaggagaaggcaatttgccaaaacttgtccttacttctcctcagaacagcgaggctgagatatatctcttcggaggctgcattacttcttggaaagttgcgagcggtaaagatcttctttttgtcagaccagatgctgtcttcaataagattaagcccattagcggagggattccacattgttttccacagtttggacctgggctaattcaacagcatgggtttggaaggaacatggactggtctgttgtcgattcccagaatgcagatgacaatgctgctgttactcttgagcttaaggatggtccctatagtcgagccatgtgggactttgctttccaggctctatacaaggtcattgttggcgcggactccctttccactgagctaaagattacaaacacagacgataaaccattttctttcagcactgcgttgcatacttacttccgtgcttcttctgcgggggcctccgtgagaggtctaaagggttgtaaaactctcaataaggatccagaccctaagaacccaatagagggtaaagaagacagggatgcagtcacttttcctggatttgtggataccgtctatcttgatgctcccaatgaattgcagtttgataatggcttgggtgataaaataatcatcaaaaacacaaattggtcggatgcggtcttgtggaacccgcatactcagatggaggcttgttacagagactttgtgtgcgtggaaaatgcaaagcttggggatgtcaagctagagccgggacagtcttggactgcaacacaacttctcagcatcagttgaaaacattgtactttaaacttataatgtccagtggatccattttcttaagcaataaaagttttatttcctctccc

SEQ ID NO: 23063 - protein, 307 aa, Arabidopsis thaliana
  peptide (1)..(307): Ceres Seq. ID no. 13509195
  misc_feature (46)..(305): Pfam Name: Aldose 1-epimerase Pfam Description: Aldose 1-epimerase
  misc_feature (46)..(305): Pfam Name: Aldose 1-epimerase Pfam Description: Aldose 1-epimerase
  misc_feature (40)..(306): Homolog of NCBI NO: 21593295 NR Description: possible apospory-associated like protein
  misc_feature (40)..(307): Homolog of NCBI NO: 18395868 NR Description: aldose 1-epimerase family [Arabidopsis thaliana]
  misc_feature (40)..(307): Homolog of NCBI NO: 16612258 NR Description: AT3g01590/F4P13_13 [Arabidopsis thaliana]
  misc_feature (36)..(287): Homolog of NCBI NO: 19387263 NR Description: putative apospory-associated protein C
  misc_feature (38)..(279): Homolog of NCBI NO: 40253263 NR Description: putative Aldose 1-epimerase
  misc_feature (40)..(306): Homolog of NCBI NO: 21593295 NR Description: possible apospory-associated like protein
  misc_feature (40)..(307): Homolog of NCBI NO: 16612258 NR Description: AT3g01590/F4P13_13 [Arabidopsis thaliana]
  misc_feature (38)..(279): Homolog of NCBI NO: 40253263 NR Description: putative Aldose 1-epimerase
  misc_feature (1)..(307): Homolog of NCBI NO: 15240009 NR Description: aldose 1-epimerase family [Arabidopsis thaliana]
  misc_feature (36)..(306): Homolog of NCBI NO: 6970044 NR Description: apospory-associated protein C; APOC
  misc_feature (36)..(279): Homolog of NCBI NO: 38344152 NR Description: OSJNBa0041A02.19 [Oryza sativa (japonica
  misc_feature (29)..(287): Homolog of NCBI NO: 15242099 NR Description: aldose 1-epimerase family [Arabidopsis thaliana]
  misc_feature (45)..(279): Homolog of NCBI NO: 2501555 NR Description: POSSIBLE APOSPORY-ASSOCIATED PROTEIN C
  misc_feature (36)..(287): Homolog of NCBI NO: 19387263 NR Description: putative apospory-associated protein C
  misc_feature (40)..(307): Homolog of NCBI NO: 18395868 NR Description: aldose 1-epimerase family [Arabidopsis thaliana]
  misc_feature (45)..(279): Homolog of NCBI NO: 2501555 NR Description: POSSIBLE APOSPORY-ASSOCIATED PROTEIN C
  misc_feature (29)..(287): Homolog of NCBI NO: 15242099 NR Description: aldose 1-epimerase family [Arabidopsis thaliana]
  misc_feature (36)..(279): Homolog of NCBI NO: 38344152 NR Description: OSJNBa0041A02.19 [Oryza sativa (japonica
  misc_feature (36)..(306): Homolog of NCBI NO: 6970044 NR Description: apospory-associated protein C; APOC
  misc_feature (1)..(307): Homolog of NCBI NO: 15240009 NR Description: aldose 1-epimerase family [Arabidopsis thaliana]
MAIVSVSNSFLTFNSPNQLRFSRRRFSAMASSTTGVRVAEGEGNLPKLVLTSPQNSEAEIYLFGGCITSWKVASGKDLLFVRPDAVFNKIKPISGGIPHCFPQFGPGLIQQHGFGRNMDWSVVDSQNADDNAAVTLELKDGPYSRAMWDFAFQALYKVIVGADSLSTELKITNTDDKPFSFSTALHTYFRASSAGASVRGLKGCKTLNKDPDPKNPIEGKEDRDAVTFPGFVDTVYLDAPNELQFDNGLGDKIIIKNTNWSDAVLWNPHTQMEACYRDFVCVENAKLGDVKLEPGQSWTATQLLSIS

SEQ ID NO: 23064 - protein, 279 aa, Arabidopsis thaliana
  peptide (1)..(279): Ceres Seq. ID no. 13509196
  misc_feature (18)..(277): Pfam Name: Aldose 1-epimerase Pfam Description: Aldose 1-epimerase
  misc_feature (18)..(277): Pfam Name: Aldose 1-epimerase Pfam Description: Aldose 1-epimerase
  misc_feature (12)..(278): Homolog of NCBI NO: 21593295 NR Description: possible apospory-associated like protein
  misc_feature (12)..(279): Homolog of NCBI NO: 18395868 NR Description: aldose 1-epimerase family [Arabidopsis thaliana]
  misc_feature (12)..(279): Homolog of NCBI NO: 16612258 NR Description: AT3g01590/F4P13_13 [Arabidopsis thaliana]
  misc_feature (8)..(259): Homolog of NCBI NO: 19387263 NR Description: putative apospory-associated protein C
  misc_feature (10)..(251): Homolog of NCBI NO: 40253263 NR Description: putative Aldose 1-epimerase
  misc_feature (12)..(279): Homolog of NCBI NO: 18395868 NR Description: aldose 1-epimerase family [Arabidopsis thaliana]
  misc_feature (8)..(259): Homolog of NCBI NO: 19387263 NR Description: putative apospory-associated protein C
  misc_feature (1)..(279): Homolog of NCBI NO: 15240009 NR Description: aldose 1-epimerase family [Arabidopsis thaliana]
  misc_feature (8)..(278): Homolog of NCBI NO: 6970044 NR Description: apospory-associated protein C; APOC
  misc_feature (8)..(251): Homolog of NCBI NO: 38344152 NR Description: OSJNBa0041A02.19 [Oryza sativa (japonica
  misc_feature (1)..(259): Homolog of NCBI NO: 15242099 NR Description: aldose 1-epimerase family [Arabidopsis thaliana]
  misc_feature (17)..(251): Homolog of NCBI NO: 2501555 NR Description: POSSIBLE APOSPORY-ASSOCIATED PROTEIN C
  misc_feature (10)..(251): Homolog of NCBI NO: 40253263 NR Description: putative Aldose 1-epimerase
  misc_feature (12)..(279): Homolog of NCBI NO: 16612258 NR Description: AT3g01590/F4P13_13 [Arabidopsis thaliana]
  misc_feature (12)..(278): Homolog of NCBI NO: 21593295 NR Description: possible apospory-associated like protein
  misc_feature (17)..(251): Homolog of NCBI NO: 2501555 NR Description: POSSIBLE APOSPORY-ASSOCIATED PROTEIN C
  misc_feature (1)..(259): Homolog of NCBI NO: 15242099 NR Description: aldose 1-epimerase family [Arabidopsis thaliana]
  misc_feature (8)..(251): Homolog of NCBI NO: 38344152 NR Description: OSJNBa0041A02.19 [Oryza sativa (japonica
  misc_feature (8)..(278): Homolog of NCBI NO: 6970044 NR Description: apospory-associated protein C; APOC
  misc_feature (1)..(279): Homolog of NCBI NO: 15240009 NR Description: aldose 1-epimerase family [Arabidopsis thaliana]
MASSTTGVRVAEGEGNLPKLVLTSPQNSEAEIYLFGGCITSWKVASGKDLLFVRPDAVFNKIKPISGGIPHCFPQFGPGLIQQHGFGRNMDWSVVDSQNADDNAAVTLELKDGPYSRAMWDFAFQALYKVIVGADSLSTELKITNTDDKPFSFSTALHTYFRASSAGASVRGLKGCKTLNKDPDPKNPIEGKEDRDAVTFPGFVDTVYLDAPNELQFDNGLGDKIIIKNTNWSDAVLWNPHTQMEACYRDFVCVENAKLGDVKLEPGQSWTATQLLSIS

SEQ ID NO: 23065 - protein, 190 aa, Arabidopsis thaliana
  peptide (1)..(190): Ceres Seq. ID no. 13509197
  misc_feature (1)..(188): Pfam Name: Aldose 1-epimerase Pfam Description: Aldose 1-epimerase
  misc_feature (1)..(188): Pfam Name: Aldose 1-epimerase Pfam Description: Aldose 1-epimerase
  misc_feature (1)..(189): Homolog of NCBI NO: 21593295 NR Description: possible apospory-associated like protein
  misc_feature (1)..(190): Homolog of NCBI NO: 18395868 NR Description: aldose 1-epimerase family [Arabidopsis thaliana]
  misc_feature (1)..(190): Homolog of NCBI NO: 16612258 NR Description: AT3g01590/F4P13_13 [Arabidopsis thaliana]
  misc_feature (1)..(170): Homolog of NCBI NO: 19387263 NR Description: putative apospory-associated protein C
  misc_feature (1)..(162): Homolog of NCBI NO: 40253263 NR Description: putative Aldose 1-epimerase
  misc_feature (1)..(189): Homolog of NCBI NO: 21593295 NR Description: possible apospory-associated like protein
  misc_feature (1)..(190): Homolog of NCBI NO: 16612258 NR Description: AT3g01590/F4P13_13 [Arabidopsis thaliana]
  misc_feature (1)..(162): Homolog of NCBI NO: 40253263 NR Description: putative Aldose 1-epimerase
  misc_feature (1)..(190): Homolog of NCBI NO: 15240009 NR Description: aldose 1-epimerase family [Arabidopsis thaliana]
  misc_feature (1)..(189): Homolog of NCBI NO: 6970044 NR Description: apospory-associated protein C; APOC
  misc_feature (1)..(162): Homolog of NCBI NO: 38344152 NR Description: OSJNBa0041A02.19 [Oryza sativa (japonica
  misc_feature (1)..(170): Homolog of NCBI NO: 15242099 NR Description: aldose 1-epimerase family [Arabidopsis thaliana]
  misc_feature (1)..(162): Homolog of NCBI NO: 2501555 NR Description: POSSIBLE APOSPORY-ASSOCIATED PROTEIN C
  misc_feature (1)..(170): Homolog of NCBI NO: 19387263 NR Description: putative apospory-associated protein C
  misc_feature (1)..(190): Homolog of NCBI NO: 18395868 NR Description: aldose 1-epimerase family [Arabidopsis thaliana]
  misc_feature (1)..(162): Homolog of NCBI NO: 2501555 NR Description: POSSIBLE APOSPORY-ASSOCIATED PROTEIN C
  misc_feature (1)..(170): Homolog of NCBI NO: 15242099 NR Description: aldose 1-epimerase family [Arabidopsis thaliana]
  misc_feature (1)..(162): Homolog of NCBI NO: 38344152 NR Description: OSJNBa0041A02.19 [Oryza sativa (japonica
  misc_feature (1)..(189): Homolog of NCBI NO: 6970044 NR Description: apospory-associated protein C; APOC
  misc_feature (1)..(190): Homolog of NCBI NO: 15240009 NR Description: aldose 1-epimerase family [Arabidopsis thaliana]
MDWSVVDSQNADDNAAVTLELKDGPYSRAMWDFAFQALYKVIVGADSLSTELKITNTDDKPFSFSTALHTYFRASSAGASVRGLKGCKTLNKDPDPKNPIEGKEDRDAVTFPGFVDTVYLDAPNELQFDNGLGDKIIIKNTNWSDAVLWNPHTQMEACYRDFVCVENAKLGDVKLEPGQSWTATQLLSIS

SEQ ID NO: 23066 - DNA, 1078 bp, Arabidopsis thaliana
  misc_feature (1)..(1078): Ceres Seq. ID no. 12639248
  misc_feature: MA Experiment ID: 108585 Result: Up-regulated in Transcription
  misc_feature: MA Experiment 108585 PARAMETER Experiment Name: At_5mM_NaNP_cDNA_P Parameter: Timepoint (hr) Value: 6
  misc_feature: MA Experiment 108585 PARAMETER Experiment Name: At_5mM_NaNP_cDNA_P Parameter: Tissue Value: Aerial
  misc_feature: MA Experiment 108585 PARAMETER Experiment Name: At_5mM_NaNP_cDNA_P Parameter: Treatment Value: null
  misc_feature: MA Experiment ID: 20000112 Result: Up-regulated in Transcription
  misc_feature: MA Experiment 20000112 PARAMETER Experiment Name: At_42deg_Heat_cDNA_P Parameter: Temperature (deg C) Value: 42 vs. 22
  misc_feature: MA Experiment 20000112 PARAMETER Experiment Name: At_42deg_Heat_cDNA_P Parameter: Timepoint (hr) Value: 2
  misc_feature: MA Experiment 20000112 PARAMETER Experiment Name: At_42deg_Heat_cDNA_P Parameter: Tissue Value: Aerial
  misc_feature: MA Experiment ID: 20000113 Result: Up-regulated in Transcription
  misc_feature: MA Experiment 20000113 PARAMETER Experiment Name: At_42deg_Heat_cDNA_P Parameter: Temperature (deg C) Value: 42 vs. 22
  misc_feature: MA Experiment 20000113 PARAMETER Experiment Name: At_42deg_Heat_cDNA_P Parameter: Timepoint (hr) Value: 8
  misc_feature: MA Experiment 20000113 PARAMETER Experiment Name: At_42deg_Heat_cDNA_P Parameter: Tissue Value: Aerial
  misc_feature: MA Experiment ID: 20000173 Result: Up-regulated in Transcription
  misc_feature: MA Experiment 20000173 PARAMETER Experiment Name: At_42deg_Heat_P Parameter: Age (day) Value: 14
  misc_feature: MA Experiment 20000173 PARAMETER Experiment Name: At_42deg_Heat_P Parameter: Organism Value: A. thaliana
  misc_feature: MA Experiment 20000173 PARAMETER Experiment Name: At_42deg_Heat_P Parameter: Plant Line Value: WS
  misc_feature: MA Experiment 20000173 PARAMETER Experiment Name: At_42deg_Heat_P Parameter: Temperature (deg C) Value: 42 vs. 22
  misc_feature: MA Experiment 20000173 PARAMETER Experiment Name: At_42deg_Heat_P Parameter: Timepoint (hr) Value: 6
  misc_feature: MA Experiment 20000173 PARAMETER Experiment Name: At_42deg_Heat_P Parameter: Tissue Value: Aerial
  misc_feature: MA Experiment ID: 20000182 Result: Up-regulated in Transcription
  misc_feature: MA Experiment 20000182 PARAMETER Experiment Name: At_2mM_SA_P Parameter: Age (day) Value: 14
  misc_feature: MA Experiment 20000182 PARAMETER Experiment Name: At_2mM_SA_P Parameter: Organism Value: A. thaliana
  misc_feature: MA Experiment 20000182 PARAMETER Experiment Name: At_2mM_SA_P Parameter: Plant Line Value: WS
  misc_feature: MA Experiment 20000182 PARAMETER Experiment Name: At_2mM_SA_P Parameter: Timepoint (hr) Value: 6
  misc_feature: MA Experiment 20000182 PARAMETER Experiment Name: At_2mM_SA_P Parameter: Tissue Value: Aerial
  misc_feature: MA Experiment 20000182 PARAMETER Experiment Name: At_2mM_SA_P Parameter: Treatment Value: 2mM SA vs. No Treatment
  misc_feature: MA Experiment ID: 20000439 Result: Down-regulated in Transcription
  misc_feature: MA Experiment 20000439 PARAMETER Experiment Name: At_Roots__P Parameter: Age (day) Value: 14 vs. 21
  misc_feature: MA Experiment 20000439 PARAMETER Experiment Name: At_Roots__P Parameter: Organism Value: A. thaliana
  misc_feature: MA Experiment 20000439 PARAMETER Experiment Name: At_Roots__P Parameter: Tissue Value: Roots vs. Whole Plant
  misc_feature: MA Experiment ID: 20001247 Result: Up-regulated in Transcription
  misc_feature: MA Experiment 20001247 PARAMETER Experiment Name: At_Far-red-induction_P Parameter: Age (day) Value: 7
  misc_feature: MA Experiment 20001247 PARAMETER Experiment Name: At_Far-red-induction_P Parameter: Light Value: Far-red vs. White
  misc_feature: MA Experiment 20001247 PARAMETER Experiment Name: At_Far-red-induction_P Parameter: Organism Value: A. thaliana
  misc_feature: MA Experiment 20001247 PARAMETER Experiment Name: At_Far-red-induction_P Parameter: Plant Line Value: Columbia
  misc_feature: MA Experiment 20001247 PARAMETER Experiment Name: At_Far-red-induction_P Parameter: Timepoint (hr) Value: 1
  misc_feature: MA Experiment 20001247 PARAMETER Experiment Name: At_Far-red-induction_P Parameter: Tissue Value: Whole Plant
agaaacaaaacgttgtcttcttgtgtccttgtccgaagttgtagttcggtaacaagtctttcgcttccatttcttcttcccaccttttctctctctctctctctctctctctctctctctctctctctctctctctctctctatctctaccgtccttctagggtttctttgatcacattcaaatttgtcgcctttaatctcaatcctgtaagaatcagaggatatggattccaattggatcaattgtccctctgttttctcctcatcctcttcttcttccagacgctgtcaatcccgatcagacttgtatttaggaggagggtacgaggatcttgaaggagaagacgatttgaaggcagagtttatatgccctttttgcgctgaagattttgacattgttgggctttgttgtcacattgatgaagaacatcctgttgaagccaagaatggggtctgtcctgtatgcactaagaggaacttgtgtttattccttgatgagaggttttacgtacagcgaaggagaaggttgcgaagaggaggatatagctctacctatctcgccttgaaaaaggaactccgggaagcaaacctacagtctcttcttggtggatcttcaagtttcacttcttcaaccaatatcgattctgatccgttgctgtcatcctttatgtttaattctccttcagtgaaccagtctgcaaacaaatctgctacacctgtgactgtaggaaacgcggctacaaaagtctcgattaaggaatctctcaaaagagacattcaagaagctccactttcaggtgaagatcaggagaaggcgaaaaagagtgagtttgtgcgaggcttgttgttgtcaaccatgcttgaagacgatttctaatttctcgttataaatccattgccttgttgtggttggtgcatgagacttgaggatctcaggttggaattgttaggagtggtttcaatgtatgatgcaaaatattgtaagttataagaggatgcagagttgcatccatatataattgtcatttgtaccttggaacctttatgtgcataaccggaaacagagtactttcctttc

SEQ ID NO: 23067 - protein, 217 aa, Arabidopsis thaliana
  peptide (1)..(217): Ceres Seq. ID no. 12639249
  misc_feature (11)..(212): Pfam Name: Drought induced 19 protein (Di19) Pfam Description: Drought induced 19 protein (Di19)
  misc_feature (11)..(212): Pfam Name: Drought induced 19 protein (Di19) Pfam Description: Drought induced 19 protein (Di19)
  misc_feature (16)..(217): Homolog of NCBI NO: 15235270 NR Description: drought-induced-19-like 1
  misc_feature (23)..(215): Homolog of NCBI NO: 15028023 NR Description: unknown protein [Arabidopsis thaliana]
  misc_feature (23)..(215): Homolog of NCBI NO: 30696095 NR Description: drought-induced protein -related [Arabidopsis
  misc_feature (16)..(215): Homolog of NCBI NO: 28393233 NR Description: unknown protein [Arabidopsis thaliana]
  misc_feature (16)..(215): Homolog of NCBI NO: 15240426 NR Description: drought-induced protein - like; protein id:
  misc_feature (16)..(217): Homolog of NCBI NO: 15235270 NR Description: drought-induced-19-like 1
  misc_feature (23)..(215): Homolog of NCBI NO: 30696095 NR Description: drought-induced protein -related [Arabidopsis
  misc_feature (16)..(215): Homolog of NCBI NO: 15240426 NR Description: drought-induced protein - like; protein id:
  misc_feature (1)..(217): Homolog of NCBI NO: 15230782 NR Description: unknown protein; protein id: At3g06760.1
  misc_feature (1)..(217): Homolog of NCBI NO: 18377875 NR Description: AT3g06760/F3E22_10 [Arabidopsis thaliana]
  misc_feature (1)..(217): Homolog of NCBI NO: 15239827 NR Description: drought-induced protein Di19-like protein
  misc_feature (1)..(217): Homolog of NCBI NO: 13937216 NR Description: AT5g49230/K21P3_11 [Arabidopsis thaliana]
  misc_feature (16)..(215): Homolog of NCBI NO: 25992529 NR Description: fiber protein Fb2 [Gossypium barbadense]
  misc_feature (16)..(215): Homolog of NCBI NO: 28393233 NR Description: unknown protein [Arabidopsis thaliana]
  misc_feature (23)..(215): Homolog of NCBI NO: 15028023 NR Description: unknown protein [Arabidopsis thaliana]
  misc_feature (16)..(215): Homolog of NCBI NO: 25992529 NR Description: fiber protein Fb2 [Gossypium barbadense]
  misc_feature (1)..(217): Homolog of NCBI NO: 13937216 NR Description: AT5g49230/K21P3_11 [Arabidopsis thaliana]
  misc_feature (1)..(217): Homolog of NCBI NO: 15239827 NR Description: drought-induced protein Di19-like protein
  misc_feature (1)..(217): Homolog of NCBI NO: 18377875 NR Description: AT3g06760/F3E22_10 [Arabidopsis thaliana]
  misc_feature (1)..(217): Homolog of NCBI NO: 15230782 NR Description: unknown protein; protein id: At3g06760.1
MDSNWINCPSVFSSSSSSSRRCQSRSDLYLGGGYEDLEGEDDLKAEFICPFCAEDFDIVGLCCHIDEEHPVEAKNGVCPVCTKRNLCLFLDERFYVQRRRRLRRGGYSSTYLALKKELREANLQSLLGGSSSFTSSTNIDSDPLLSSFMFNSPSVNQSANKSATPVTVGNAATKVSIKESLKRDIQEAPLSGEDQEKAKKSEFVRGLLLSTMLEDDF

SEQ ID NO: 23068 - protein, 111 aa, Arabidopsis thaliana
  peptide (1)..(111): Ceres Seq. ID no. 12639250
RNKTLSSCVLVRSCSSVTSLSLPFLLPTFSLSLSLSLSLSLSLSLSLYLYRPSRVSLITFKFVAFNLNPVRIRGYGFQLDQLSLCFLLILFFFQTLSIPIRLVFRRRVRGS

SEQ ID NO: 23069 - DNA, 723 bp, Arabidopsis thaliana
  misc_feature (1)..(723): Ceres Seq. ID no. 13496779
  misc_feature: MA Experiment ID: 108434 Result: Down-regulated in Transcription
  misc_feature: MA Experiment 108434 PARAMETER Experiment Name: At_Root_Tips_cDNA_P Parameter: Tissue Value: Root Tips
  misc_feature: MA Experiment ID: 20000224 Result: Down-regulated in Transcription
  misc_feature: MA Experiment ID: 20000227 Result: Down-regulated in Transcription
  misc_feature: MA Experiment 20000227 PARAMETER Experiment Name: At_Root-Tips-vs-Tops_P Parameter: Tissue Value: Root Tips vs. Root Tops
  misc_feature: MA Experiment ID: 20000437 Result: Up-regulated in Transcription
  misc_feature: MA Experiment 20000437 PARAMETER Experiment Name: At_Drought_P Parameter: Age (day) Value: 8
  misc_feature: MA Experiment 20000437 PARAMETER Experiment Name: At_Drought_P Parameter: Organism Value: A. thaliana
  misc_feature: MA Experiment 20000437 PARAMETER Experiment Name: At_Drought_P Parameter: Plant Line Value: WS
  misc_feature: MA Experiment 20000437 PARAMETER Experiment Name: At_Drought_P Parameter: Timepoint (hr) Value: 24
  misc_feature: MA Experiment 20000437 PARAMETER Experiment Name: At_Drought_P Parameter: Tissue Value: Whole Plant
  misc_feature: MA Experiment 20000437 PARAMETER Experiment Name: At_Drought_P Parameter: Treatment Value: Drought vs. No Drought
  misc_feature: MA Experiment ID: 20000495 Result: Down-regulated in Transcription
  misc_feature: MA Experiment 20000495 PARAMETER Experiment Name: At_Guard_Cells_P Parameter: Harvest Date Value: 8/2/2002
  misc_feature: MA Experiment 20000495 PARAMETER Experiment Name: At_Guard_Cells_P Parameter: Organism Value: A. thaliana
  misc_feature: MA Experiment 20000495 PARAMETER Experiment Name: At_Guard_Cells_P Parameter: Tissue Value: Guard Cells vs. Leaves
acataatcatcgctattctctctctctctctctcgctctcatatttgcagttgacaattcgttctctttgggaaattagagatgcaggcatcaagagcgcgactgtttaaagaatgacaaagaggtacagcgagagaaagtagcagatcctgatattcaattggtctgtgacgataccaacatattcaaatggaccgctcttatcaaaggaccttcggagactccttacgaaggcggtgtttttcagcttgctttttctgttcctgaaccttatcctttgcaacctcctcaagttcgattcttgaccaaaatattccatcctaatgttcatttcaagacaggagaaatatgtctcgacattttgaagaatgcttggagtcctgcttggacgcttcagtctgtgtgtagagctatcatagcattgatggctcatcctgagccggacagtcctcttaactgcgactcagggaatcttctaagatctggtgatgtgagagggttcaattcaatggcacaaatgtatacacgcctcgccgctatgcctaagaaaggatgatgatgatgatgatcctcttgcttttttttgttttttttttgaaatttgtaacgataatgatttgctagagtgaatacattattaacgtgaagaagatgattcttctttattagttcacaatattacaatctgtaagttgtcatatcttcttgtttaaggaatttgtc

SEQ ID NO: 23070 - protein, 43 aa, Arabidopsis thaliana
  peptide (1)..(43): Ceres Seq. ID no. 13496780
  misc_feature (1)..(41): Homolog of NCBI NO: 23619484 NR Description: ubiquitin-conjugating enzyme, putative
  misc_feature (1)..(42): Homolog of NCBI NO: 23487093 NR Description: ubiquitin conjugating enzyme [Plasmodium yoelii
  misc_feature (1)..(33): Homolog of NCBI NO: 3915186 NR Description: Ubiquitin-conjugating enzyme E2-21 kDa
  misc_feature (1)..(41): Homolog of NCBI NO: 19111870 NR Description: putative ubiquitin conjugating enzyme, e2
  misc_feature (1)..(31): Homolog of NCBI NO: 13812330 NR Description: ubiquitin-conjugating enzyme E2-21 KD [Guillardia
  misc_feature (1)..(39): Homolog of NCBI NO: 23491070 NR Description: probable ubiquitin-conjugating enzyme e2-17 kDa
  misc_feature (1)..(39): Homolog of NCBI NO: 23612144 NR Description: ubiquitin-conjugating enzyme E2, putative
  misc_feature (1)..(36): Homolog of NCBI NO: 28829309 NR Description: similar to Arabidopsis thaliana (Mouse-ear
  misc_feature (1)..(39): Homolog of NCBI NO: 34391431 NR Description: ubiquitin-conjugating enzyme E2 [Pavlova lutheri]
  misc_feature (1)..(43): Homolog of NCBI NO: 18420949 NR Description: ubiquitin-conjugating enzyme, putative
MAHPEPDSPLNCDSGNLLRSGDVRGFNSMAQMYTRLAAMPKKG

SEQ ID NO: 23071 - protein, 35 aa, Arabidopsis thaliana
  peptide (1)..(35): Ceres Seq. ID no. 13496781
IIIAILSLSLSLSYLQLTIRSLWEIRDAGIKSATV

SEQ ID NO: 23072 - DNA, 974 bp, Arabidopsis thaliana
  misc_feature (1)..(974): Ceres Seq. ID no. 12738984
  misc_feature: MA Experiment ID: 108434 Result: Up-regulated in Transcription
  misc_feature: MA Experiment 108434 PARAMETER Experiment Name: At_Root_Tips_cDNA_P Parameter: Tissue Value: Root Tips
  misc_feature: MA Experiment ID: 108462 Result: Down-regulated in Transcription
  misc_feature: MA Experiment 108462 PARAMETER Experiment Name: At_Germinating_Seeds_cDNA_P Parameter: Age (day) Value: 2 vs. 0
  misc_feature: MA Experiment 108462 PARAMETER Experiment Name: At_Germinating_Seeds_cDNA_P Parameter: Tissue Value: Germinating Seeds
  misc_feature: MA Experiment ID: 108463 Result: Down-regulated in Transcription
  misc_feature: MA Experiment 108463 PARAMETER Experiment Name: At_Germinating_Seeds_cDNA_P Parameter: Age (day) Value: 3 vs. 0
  misc_feature: MA Experiment 108463 PARAMETER Experiment Name: At_Germinating_Seeds_cDNA_P Parameter: Tissue Value: Germinating Seeds
  misc_feature: MA Experiment ID: 108464 Result: Down-regulated in Transcription
  misc_feature: MA Experiment 108464 PARAMETER Experiment Name: At_Germinating_Seeds_cDNA_P Parameter: Age (day) Value: 4 vs. 0
  misc_feature: MA Experiment 108464 PARAMETER Experiment Name: At_Germinating_Seeds_cDNA_P Parameter: Tissue Value: Germinating Seeds
  misc_feature: MA Experiment ID: 20000111 Result: Up-regulated in Transcription
  misc_feature: MA Experiment 20000111 PARAMETER Experiment Name: At_42deg_Heat_cDNA_P Parameter: Temperature (deg C) Value: 42 vs. 22
  misc_feature: MA Experiment 20000111 PARAMETER Experiment Name: At_42deg_Heat_cDNA_P Parameter: Timepoint (hr) Value: 6
  misc_feature: MA Experiment 20000111 PARAMETER Experiment Name: At_42deg_Heat_cDNA_P Parameter: Tissue Value: Aerial
  misc_feature: MA Experiment ID: 20000113 Result: Up-regulated in Transcription
  misc_feature: MA Experiment 20000113 PARAMETER Experiment Name: At_42deg_Heat_cDNA_P Parameter: Temperature (deg C) Value: 42 vs. 22
  misc_feature: MA Experiment 20000113 PARAMETER Experiment Name: At_42deg_Heat_cDNA_P Parameter: Timepoint (hr) Value: 8
  misc_feature: MA Experiment 20000113 PARAMETER Experiment Name: At_42deg_Heat_cDNA_P Parameter: Tissue Value: Aerial
  misc_feature: MA Experiment ID: 20000224 Result: Down-regulated in Transcription
  misc_feature: MA Experiment ID: 20000794 Result: Down-regulated in Transcription
  misc_feature: MA Experiment 20000794 PARAMETER Experiment Name: At_Petals_P Parameter: Age (day) Value: 23-25 days
  misc_feature: MA Experiment 20000794 PARAMETER Experiment Name: At_Petals_P Parameter: Plant Line Value: WS
  misc_feature: MA Experiment 20000794 PARAMETER Experiment Name: At_Petals_P Parameter: Tissue Value: Petals vs. Whole plant
  misc_feature: MA Experiment ID: 20001557 Result: Up-regulated in Transcription
  misc_feature: MA Experiment 20001557 PARAMETER Experiment Name: At_Drought_Soil_Dry_P Parameter: Age (day) Value: 27
  misc_feature: MA Experiment 20001557 PARAMETER Experiment Name: At_Drought_Soil_Dry_P Parameter: Organism Value: A. thaliana
  misc_feature: MA Experiment 20001557 PARAMETER Experiment Name: At_Drought_Soil_Dry_P Parameter: Plant Line Value: WS
  misc_feature: MA Experiment 20001557 PARAMETER Experiment Name: At_Drought_Soil_Dry_P Parameter: Post Timepoint (hr) Value: 3
  misc_feature: MA Experiment 20001557 PARAMETER Experiment Name: At_Drought_Soil_Dry_P Parameter: Post-Treatment Value: Re-Water vs. No Drought
  misc_feature: MA Experiment 20001557 PARAMETER Experiment Name: At_Drought_Soil_Dry_P Parameter: Timepoint (day) Value: 13
  misc_feature: MA Experiment 20001557 PARAMETER Experiment Name: At_Drought_Soil_Dry_P Parameter: Treatment Value: Drought vs. No Drought
ccactacgtctctctctcttgctctccctcttcaagtcggctcctttattgctacagtgaaaaagtttcgagctttagaaacaatggcggctttccccaacctcaactctggctctggattgaagaagctcgatgagcatcttctcactcgcagttacatcactgggtaccaagcttcaaaggatgatatcactgtgtttacagctctttcaaagcctccaacttcagagtatgtcaatgtatctcgttggttcaaccacatcgatgccctcttgaggatctctggtgtctctgctgaaggaagtggtgtcattgttgaaggatcatcacctatcactgaagaggctattgctactccccctgcagctgattctaaggatactgctgctgaagaagaagatgatgatgatgttgaccttttcggggaggagaccgaagaggaaaagaaagctgctgaagagagagcagcttctgtgaaggcatctacaaagaagaaagaatccggaaagtcatcagttttgatggatatcaagccgtgggatgatgagacggacatgaagaagctagaggaagctgtaagatccattcagatggaaggattgttttggggagcatcaaagcttgtacccgttggttacggtatcaagaagttgcacatcatgtgcaccattgttgatgaccttgtatctatcgacaccatgatcgaagagcaactcactgttgaaccgatcaatgaatatgtccagagttgtgacattgttgccttcaacaagatatgaggatggagaatagcttgaaggaagaactgtttatgttgttgttttcttctctatatccagttttgttacctgtttttattgtactctgtgggagggcttttaccaactctgattcattttgatatatgtgaagacaattcagttttgtcttaaagtttccaccaaatctcaaatacgaaaaatcataagtttgat

SEQ ID NO: 23073 - protein, 258 aa, Arabidopsis thaliana
  peptide (1)..(258): Ceres Seq. ID no. 12738985
  misc_feature (169)..(258): Pfam Name: EF-1 guanine nucleotide exchange domain Pfam Description: EF-1 guanine nucleotide exchange domain
  misc_feature (30)..(258): Homolog of NCBI NO: 6166140 NR Description: ELONGATION FACTOR 1-BETA (EF-1-BETA)
  misc_feature (31)..(258): Homolog of NCBI NO: 6015063 NR Description: ELONGATION FACTOR 1-BETA (EF-1-BETA)
  misc_feature (31)..(258): Homolog of NCBI NO: 6015064 NR Description: ELONGATION FACTOR 1-BETA (EF-1-BETA)
  misc_feature (31)..(258): Homolog of NCBI NO: 38232568 NR Description: translational elongation factor 1 subunit Bbeta
  misc_feature (28)..(258): Homolog of NCBI NO: 480620 NR Description: translation elongation factor eEF-1 beta-A1 chain
  misc_feature (28)..(258): Homolog of NCBI NO: 30691619 NR Description: elongation factor 1-beta -related [Arabidopsis
  misc_feature (28)..(258): Homolog of NCBI NO: 25299531 NR Description: probable elongation factor 1-beta
  misc_feature (28)..(258): Homolog of NCBI NO: 2119929 NR Description: translation elongation factor eEF-1 beta chain -
  misc_feature (28)..(258): Homolog of NCBI NO: 15224107 NR Description: putative  elongation factor beta-1
  misc_feature (28)..(258): Homolog of NCBI NO: 21593028 NR Description: putative elongation factor beta-1 [Arabidopsis
TTSLSLALPLQVGSFIATVKKFRALETMAAFPNLNSGSGLKKLDEHLLTRSYITGYQASKDDITVFTALSKPPTSEYVNVSRWFNHIDALLRISGVSAEGSGVIVEGSSPITEEAIATPPAADSKDTAAEEEDDDDVDLFGEETEEEKKAAEERAASVKASTKKKESGKSSVLMDIKPWDDETDMKKLEEAVRSIQMEGLFWGASKLVPVGYGIKKLHIMCTIVDDLVSIDTMIEEQLTVEPINEYVQSCDIVAFNKI

SEQ ID NO: 23074 - protein, 231 aa, Arabidopsis thaliana
  peptide (1)..(231): Ceres Seq. ID no. 12738986
  misc_feature (142)..(231): Pfam Name: EF-1 guanine nucleotide exchange domain Pfam Description: EF-1 guanine nucleotide exchange domain
  misc_feature (3)..(231): Homolog of NCBI NO: 6166140 NR Description: ELONGATION FACTOR 1-BETA (EF-1-BETA)
  misc_feature (4)..(231): Homolog of NCBI NO: 6015063 NR Description: ELONGATION FACTOR 1-BETA (EF-1-BETA)
  misc_feature (4)..(231): Homolog of NCBI NO: 6015064 NR Description: ELONGATION FACTOR 1-BETA (EF-1-BETA)
  misc_feature (4)..(231): Homolog of NCBI NO: 38232568 NR Description: translational elongation factor 1 subunit Bbeta
  misc_feature (1)..(231): Homolog of NCBI NO: 480620 NR Description: translation elongation factor eEF-1 beta-A1 chain
  misc_feature (1)..(231): Homolog of NCBI NO: 30691619 NR Description: elongation factor 1-beta -related [Arabidopsis
  misc_feature (1)..(231): Homolog of NCBI NO: 25299531 NR Description: probable elongation factor 1-beta
  misc_feature (1)..(231): Homolog of NCBI NO: 2119929 NR Description: translation elongation factor eEF-1 beta chain -
  misc_feature (1)..(231): Homolog of NCBI NO: 15224107 NR Description: putative  elongation factor beta-1
  misc_feature (1)..(231): Homolog of NCBI NO: 21593028 NR Description: putative elongation factor beta-1 [Arabidopsis
MAAFPNLNSGSGLKKLDEHLLTRSYITGYQASKDDITVFTALSKPPTSEYVNVSRWFNHIDALLRISGVSAEGSGVIVEGSSPITEEAIATPPAADSKDTAAEEEDDDDVDLFGEETEEEKKAAEERAASVKASTKKKESGKSSVLMDIKPWDDETDMKKLEEAVRSIQMEGLFWGASKLVPVGYGIKKLHIMCTIVDDLVSIDTMIEEQLTVEPINEYVQSCDIVAFNKI

SEQ ID NO: 23075 - DNA, 1160 bp, Arabidopsis thaliana
  misc_feature (1)..(1160): Ceres Seq. ID no. 12321522
  misc_feature: MA Experiment ID: 108433 Result: Up-regulated in Transcription
  misc_feature: MA Experiment 108433 PARAMETER Experiment Name: At_rhl_Mutant2_cDNA_P Parameter: Age (day) Value: 7
  misc_feature: MA Experiment 108433 PARAMETER Experiment Name: At_rhl_Mutant2_cDNA_P Parameter: Organism Value: A. thaliana
  misc_feature: MA Experiment 108433 PARAMETER Experiment Name: At_rhl_Mutant2_cDNA_P Parameter: Plant Line Value: rhl Mutant vs. wt landsburg
  misc_feature: MA Experiment 108433 PARAMETER Experiment Name: At_rhl_Mutant2_cDNA_P Parameter: Tissue Value: Roots
  misc_feature: MA Experiment ID: 108461 Result: Up-regulated in Transcription
  misc_feature: MA Experiment 108461 PARAMETER Experiment Name: At_Germinating_Seeds_cDNA_P Parameter: Age (day) Value: 1 vs. 0
  misc_feature: MA Experiment 108461 PARAMETER Experiment Name: At_Germinating_Seeds_cDNA_P Parameter: Tissue Value: Germinating Seeds
  misc_feature: MA Experiment ID: 108462 Result: Up-regulated in Transcription
  misc_feature: MA Experiment 108462 PARAMETER Experiment Name: At_Germinating_Seeds_cDNA_P Parameter: Age (day) Value: 2 vs. 0
  misc_feature: MA Experiment 108462 PARAMETER Experiment Name: At_Germinating_Seeds_cDNA_P Parameter: Tissue Value: Germinating Seeds
  misc_feature: MA Experiment ID: 108463 Result: Up-regulated in Transcription
  misc_feature: MA Experiment 108463 PARAMETER Experiment Name: At_Germinating_Seeds_cDNA_P Parameter: Age (day) Value: 3 vs. 0
  misc_feature: MA Experiment 108463 PARAMETER Experiment Name: At_Germinating_Seeds_cDNA_P Parameter: Tissue Value: Germinating Seeds
  misc_feature: MA Experiment ID: 108464 Result: Up-regulated in Transcription
  misc_feature: MA Experiment 108464 PARAMETER Experiment Name: At_Germinating_Seeds_cDNA_P Parameter: Age (day) Value: 4 vs. 0
  misc_feature: MA Experiment 108464 PARAMETER Experiment Name: At_Germinating_Seeds_cDNA_P Parameter: Tissue Value: Germinating Seeds
  misc_feature: MA Experiment ID: 108474 Result: Down-regulated in Transcription
  misc_feature: MA Experiment 108474 PARAMETER Experiment Name: At_Drought_Flowers_cDNA_P Parameter: Timepoint (hr) Value: null
  misc_feature: MA Experiment 108474 PARAMETER Experiment Name: At_Drought_Flowers_cDNA_P Parameter: Treatment Value: Drought vs. No Drought
  misc_feature: MA Experiment ID: 108579 Result: Down-regulated in Transcription
  misc_feature: MA Experiment 108579 PARAMETER Experiment Name: At_4deg_Cold_cDNA_P Parameter: Temperature (deg C) Value: 4 vs. 22
  misc_feature: MA Experiment 108579 PARAMETER Experiment Name: At_4deg_Cold_cDNA_P Parameter: Timepoint (hr) Value: 6
  misc_feature: MA Experiment 108579 PARAMETER Experiment Name: At_4deg_Cold_cDNA_P Parameter: Tissue Value: Aerial
  misc_feature: MA Experiment ID: 108594 Result: Up-regulated in Transcription
  misc_feature: MA Experiment 108594 PARAMETER Experiment Name: At_Ler-rhl_Root_cDNA_P Parameter: Plant Line Value: null
  misc_feature: MA Experiment ID: 108595 Result: Up-regulated in Transcription
  misc_feature: MA Experiment 108595 PARAMETER Experiment Name: At_Ler-pi_Ovule_cDNA_P Parameter: Plant Line Value: null
  misc_feature: MA Experiment ID: 20000180 Result: Up-regulated in Transcription
  misc_feature: MA Experiment 20000180 PARAMETER Experiment Name: At_Germinating_Seeds_P Parameter: Age (hr) Value: 24 vs. 0
  misc_feature: MA Experiment 20000180 PARAMETER Experiment Name: At_Germinating_Seeds_P Parameter: Tissue Value: Germinating Seeds
  misc_feature: MA Experiment ID: 20000182 Result: Up-regulated in Transcription
  misc_feature: MA Experiment 20000182 PARAMETER Experiment Name: At_2mM_SA_P Parameter: Age (day) Value: 14
  misc_feature: MA Experiment 20000182 PARAMETER Experiment Name: At_2mM_SA_P Parameter: Organism Value: A. thaliana
  misc_feature: MA Experiment 20000182 PARAMETER Experiment Name: At_2mM_SA_P Parameter: Plant Line Value: WS
  misc_feature: MA Experiment 20000182 PARAMETER Experiment Name: At_2mM_SA_P Parameter: Timepoint (hr) Value: 6
  misc_feature: MA Experiment 20000182 PARAMETER Experiment Name: At_2mM_SA_P Parameter: Tissue Value: Aerial
  misc_feature: MA Experiment 20000182 PARAMETER Experiment Name: At_2mM_SA_P Parameter: Treatment Value: 2mM SA vs. No Treatment
  misc_feature: MA Experiment ID: 20000185 Result: Up-regulated in Transcription
  misc_feature: MA Experiment 20000185 PARAMETER Experiment Name: At_Roots__P Parameter: Age (day) Value: 7 vs. 21
  misc_feature: MA Experiment 20000185 PARAMETER Experiment Name: At_Roots__P Parameter: Organism Value: A. thaliana
  misc_feature: MA Experiment 20000185 PARAMETER Experiment Name: At_Roots__P Parameter: Tissue Value: Roots vs. Whole Plant
  misc_feature: MA Experiment ID: 20000224 Result: Down-regulated in Transcription
  misc_feature: MA Experiment ID: 20000227 Result: Up-regulated in Transcription
  misc_feature: MA Experiment 20000227 PARAMETER Experiment Name: At_Root-Tips-vs-Tops_P Parameter: Tissue Value: Root Tips vs. Root Tops
  misc_feature: MA Experiment ID: 20000234 Result: Down-regulated in Transcription
  misc_feature: MA Experiment 20000234 PARAMETER Experiment Name: At_Siliques_P Parameter: Age (day) Value: 21
  misc_feature: MA Experiment 20000234 PARAMETER Experiment Name: At_Siliques_P Parameter: Organism Value: A. thaliana
  misc_feature: MA Experiment 20000234 PARAMETER Experiment Name: At_Siliques_P Parameter: Plant Line Value: WS
  misc_feature: MA Experiment 20000234 PARAMETER Experiment Name: At_Siliques_P Parameter: Tissue Value: Less Than 5mm Siliques vs. Whole Plant
  misc_feature: MA Experiment ID: 20000235 Result: Down-regulated in Transcription
  misc_feature: MA Experiment 20000235 PARAMETER Experiment Name: At_Siliques_P Parameter: Age (day) Value: 21
  misc_feature: MA Experiment 20000235 PARAMETER Experiment Name: At_Siliques_P Parameter: Organism Value: A. thaliana
  misc_feature: MA Experiment 20000235 PARAMETER Experiment Name: At_Siliques_P Parameter: Plant Line Value: WS
  misc_feature: MA Experiment 20000235 PARAMETER Experiment Name: At_Siliques_P Parameter: Tissue Value: 5-10mm Siliques vs. Whole Plant
  misc_feature: MA Experiment ID: 20000265 Result: Up-regulated in Transcription
  misc_feature: MA Experiment 20000265 PARAMETER Experiment Name: At_Open_Flower_P Parameter: Age (day) Value: 21
  misc_feature: MA Experiment 20000265 PARAMETER Experiment Name: At_Open_Flower_P Parameter: Plant Line Value: WS
  misc_feature: MA Experiment 20000265 PARAMETER Experiment Name: At_Open_Flower_P Parameter: Tissue Value: Closed Flower vs. Whole Plant
  misc_feature: MA Experiment ID: 20000286 Result: Up-regulated in Transcription
  misc_feature: MA Experiment 20000286 PARAMETER Experiment Name: At_Open_Flower_P Parameter: Age (day) Value: 21
  misc_feature: MA Experiment 20000286 PARAMETER Experiment Name: At_Open_Flower_P Parameter: Plant Line Value: WS
  misc_feature: MA Experiment 20000286 PARAMETER Experiment Name: At_Open_Flower_P Parameter: Tissue Value: Half Open vs. Whole Plant
  misc_feature: MA Experiment ID: 20000438 Result: Down-regulated in Transcription
  misc_feature: MA Experiment 20000438 PARAMETER Experiment Name: At_Shoots__P Parameter: Age (day) Value: 14
  misc_feature: MA Experiment 20000438 PARAMETER Experiment Name: At_Shoots__P Parameter: Tissue Value: Shoots vs. Whole Plant
  misc_feature: MA Experiment ID: 20000439 Result: Up-regulated in Transcription
  misc_feature: MA Experiment 20000439 PARAMETER Experiment Name: At_Roots__P Parameter: Age (day) Value: 14 vs. 21
  misc_feature: MA Experiment 20000439 PARAMETER Experiment Name: At_Roots__P Parameter: Organism Value: A. thaliana
  misc_feature: MA Experiment 20000439 PARAMETER Experiment Name: At_Roots__P Parameter: Tissue Value: Roots vs. Whole Plant
  misc_feature: MA Experiment ID: 20001247 Result: Up-regulated in Transcription
  misc_feature: MA Experiment 20001247 PARAMETER Experiment Name: At_Far-red-induction_P Parameter: Age (day) Value: 7
  misc_feature: MA Experiment 20001247 PARAMETER Experiment Name: At_Far-red-induction_P Parameter: Light Value: Far-red vs. White
  misc_feature: MA Experiment 20001247 PARAMETER Experiment Name: At_Far-red-induction_P Parameter: Organism Value: A. thaliana
  misc_feature: MA Experiment 20001247 PARAMETER Experiment Name: At_Far-red-induction_P Parameter: Plant Line Value: Columbia
  misc_feature: MA Experiment 20001247 PARAMETER Experiment Name: At_Far-red-induction_P Parameter: Timepoint (hr) Value: 1
  misc_feature: MA Experiment 20001247 PARAMETER Experiment Name: At_Far-red-induction_P Parameter: Tissue Value: Whole Plant
  misc_feature: MA Experiment ID: 20001248 Result: Up-regulated in Transcription
  misc_feature: MA Experiment 20001248 PARAMETER Experiment Name: At_Far-red-induction_P Parameter: Age (day) Value: 7
  misc_feature: MA Experiment 20001248 PARAMETER Experiment Name: At_Far-red-induction_P Parameter: Light Value: Far-red vs. White
  misc_feature: MA Experiment 20001248 PARAMETER Experiment Name: At_Far-red-induction_P Parameter: Organism Value: A. thaliana
  misc_feature: MA Experiment 20001248 PARAMETER Experiment Name: At_Far-red-induction_P Parameter: Plant Line Value: Columbia
  misc_feature: MA Experiment 20001248 PARAMETER Experiment Name: At_Far-red-induction_P Parameter: Timepoint (hr) Value: 4
  misc_feature: MA Experiment 20001248 PARAMETER Experiment Name: At_Far-red-induction_P Parameter: Tissue Value: Whole Plant
  misc_feature: MA Experiment ID: 20001450 Result: Up-regulated in Transcription
  misc_feature: MA Experiment 20001450 PARAMETER Experiment Name: At_Far-red-induction_P Parameter: Age (day) Value: 7
  misc_feature: MA Experiment 20001450 PARAMETER Experiment Name: At_Far-red-induction_P Parameter: Light Value: Far-red vs. White
  misc_feature: MA Experiment 20001450 PARAMETER Experiment Name: At_Far-red-induction_P Parameter: Organism Value: A. thaliana
  misc_feature: MA Experiment 20001450 PARAMETER Experiment Name: At_Far-red-induction_P Parameter: Plant Line Value: Columbia
  misc_feature: MA Experiment 20001450 PARAMETER Experiment Name: At_Far-red-induction_P Parameter: Timepoint (hr) Value: 8
  misc_feature: MA Experiment 20001450 PARAMETER Experiment Name: At_Far-red-induction_P Parameter: Tissue Value: Whole Plant
  misc_feature: MA Experiment ID: 20001451 Result: Up-regulated in Transcription
  misc_feature: MA Experiment 20001451 PARAMETER Experiment Name: At_Far-red-induction_P Parameter: Age (day) Value: 7
  misc_feature: MA Experiment 20001451 PARAMETER Experiment Name: At_Far-red-induction_P Parameter: Light Value: Far-red vs. White
  misc_feature: MA Experiment 20001451 PARAMETER Experiment Name: At_Far-red-induction_P Parameter: Organism Value: A. thaliana
  misc_feature: MA Experiment 20001451 PARAMETER Experiment Name: At_Far-red-induction_P Parameter: Plant Line Value: Columbia
  misc_feature: MA Experiment 20001451 PARAMETER Experiment Name: At_Far-red-induction_P Parameter: Timepoint (hr) Value: 24
  misc_feature: MA Experiment 20001451 PARAMETER Experiment Name: At_Far-red-induction_P Parameter: Tissue Value: Whole Plant
  misc_feature: MA Experiment ID: 20001555 Result: Up-regulated in Transcription
  misc_feature: MA Experiment 20001555 PARAMETER Experiment Name: At_Drought_Soil_Dry_P Parameter: Age (day) Value: 24
  misc_feature: MA Experiment 20001555 PARAMETER Experiment Name: At_Drought_Soil_Dry_P Parameter: Organism Value: A. thaliana
  misc_feature: MA Experiment 20001555 PARAMETER Experiment Name: At_Drought_Soil_Dry_P Parameter: Plant Line Value: WS
  misc_feature: MA Experiment 20001555 PARAMETER Experiment Name: At_Drought_Soil_Dry_P Parameter: Post Timepoint (hr) Value: None
  misc_feature: MA Experiment 20001555 PARAMETER Experiment Name: At_Drought_Soil_Dry_P Parameter: Post-Treatment Value: None
  misc_feature: MA Experiment 20001555 PARAMETER Experiment Name: At_Drought_Soil_Dry_P Parameter: Timepoint (day) Value: 10
  misc_feature: MA Experiment 20001555 PARAMETER Experiment Name: At_Drought_Soil_Dry_P Parameter: Treatment Value: Drought vs. No Drought
  misc_feature: MA Experiment ID: 20001556 Result: Up-regulated in Transcription
  misc_feature: MA Experiment 20001556 PARAMETER Experiment Name: At_Drought_Soil_Dry_P Parameter: Age (day) Value: 26
  misc_feature: MA Experiment 20001556 PARAMETER Experiment Name: At_Drought_Soil_Dry_P Parameter: Organism Value: A. thaliana
  misc_feature: MA Experiment 20001556 PARAMETER Experiment Name: At_Drought_Soil_Dry_P Parameter: Plant Line Value: WS
  misc_feature: MA Experiment 20001556 PARAMETER Experiment Name: At_Drought_Soil_Dry_P Parameter: Post Timepoint (hr) Value: None
  misc_feature: MA Experiment 20001556 PARAMETER Experiment Name: At_Drought_Soil_Dry_P Parameter: Post-Treatment Value: None
  misc_feature: MA Experiment 20001556 PARAMETER Experiment Name: At_Drought_Soil_Dry_P Parameter: Timepoint (day) Value: 12
  misc_feature: MA Experiment 20001556 PARAMETER Experiment Name: At_Drought_Soil_Dry_P Parameter: Treatment Value: Drought vs. No Drought
  misc_feature: MA Experiment ID: 20001557 Result: Up-regulated in Transcription
  misc_feature: MA Experiment 20001557 PARAMETER Experiment Name: At_Drought_Soil_Dry_P Parameter: Age (day) Value: 27
  misc_feature: MA Experiment 20001557 PARAMETER Experiment Name: At_Drought_Soil_Dry_P Parameter: Organism Value: A. thaliana
  misc_feature: MA Experiment 20001557 PARAMETER Experiment Name: At_Drought_Soil_Dry_P Parameter: Plant Line Value: WS
  misc_feature: MA Experiment 20001557 PARAMETER Experiment Name: At_Drought_Soil_Dry_P Parameter: Post Timepoint (hr) Value: 3
  misc_feature: MA Experiment 20001557 PARAMETER Experiment Name: At_Drought_Soil_Dry_P Parameter: Post-Treatment Value: Re-Water vs. No Drought
  misc_feature: MA Experiment 20001557 PARAMETER Experiment Name: At_Drought_Soil_Dry_P Parameter: Timepoint (day) Value: 13
  misc_feature: MA Experiment 20001557 PARAMETER Experiment Name: At_Drought_Soil_Dry_P Parameter: Treatment Value: Drought vs. No Drought
  misc_feature: MA Experiment ID: 20001904 Result: Up-regulated in Transcription
  misc_feature: MA Experiment 20001904 PARAMETER Experiment Name: At_Drought_Reproduction_P Parameter: Age (day) Value: 37
  misc_feature: MA Experiment 20001904 PARAMETER Experiment Name: At_Drought_Reproduction_P Parameter: Organism Value: A. thaliana
  misc_feature: MA Experiment 20001904 PARAMETER Experiment Name: At_Drought_Reproduction_P Parameter: Plant Line Value: WS
  misc_feature: MA Experiment 20001904 PARAMETER Experiment Name: At_Drought_Reproduction_P Parameter: Timepoint (day) Value: 7
  misc_feature: MA Experiment 20001904 PARAMETER Experiment Name: At_Drought_Reproduction_P Parameter: Tissue Value: Rosettes
  misc_feature: MA Experiment 20001904 PARAMETER Experiment Name: At_Drought_Reproduction_P Parameter: Treatment Value: Drought vs. No Drought
  misc_feature: MA Experiment ID: 20001905 Result: Up-regulated in Transcription
  misc_feature: MA Experiment 20001905 PARAMETER Experiment Name: At_Drought_Reproduction_P Parameter: Age (day) Value: 40
  misc_feature: MA Experiment 20001905 PARAMETER Experiment Name: At_Drought_Reproduction_P Parameter: Organism Value: A. thaliana
  misc_feature: MA Experiment 20001905 PARAMETER Experiment Name: At_Drought_Reproduction_P Parameter: Plant Line Value: WS
  misc_feature: MA Experiment 20001905 PARAMETER Experiment Name: At_Drought_Reproduction_P Parameter: Timepoint (day) Value: 10
  misc_feature: MA Experiment 20001905 PARAMETER Experiment Name: At_Drought_Reproduction_P Parameter: Tissue Value: Rosettes
  misc_feature: MA Experiment 20001905 PARAMETER Experiment Name: At_Drought_Reproduction_P Parameter: Treatment Value: Drought vs. No Drought
tagcttacctgatgctatcgattggagagctaaaggtgctgttaatccagtcaaagatcaaggatcctgtggaagttgttgggcgttttccgcgattggagcggttgaaggtataaatcagattaagacaggagagttgatatctttgtctgagcaagaacttgttgattgtgacacaagttacaatgatggatgtggtggaggtcttatggattatgcttttaagttcattattgaaaacggtggtattgatacagaggaagattatccttatattgcaactgatgttaacgtgtgcaattctgataagaagaacactcgtgttgttaccatcgatggttatgaggatgttcctcaaaacgatgagaagtctttgaagaaggctcttgctaatcaacctattagtgttgccattgaagctggtggcagagctttccagctttacacatctggtgtgtttacaggaacatgtggaacatctttggaccatggtgttgtagctgtgggatacggatcagaaggtggtcaagactactggattgttcgtaactcatggggatcaaagtggggagaaagcggatactttaagctcgaacgtaacatcaaagagtcatcagggaaatgcggtgtggcgatgatggcttcttaccctaccaaatcatcaggctcaaacccaccaaaaccgccagcgccttcaccggttgtttgtgacaagtctaacacttgtccagctaagtccacttgttgttgcctatatgagtacaatggtaaatgctatagctggggatgttgtccgtatgagtcagccacttgttgcgatgatggttctagctgctgcccccagtcataccctgtctgcgatttaaaggccaatacttgtagaatgaagggaaacagtccgttaagcataaaagctttgacacgaggaccagcgattgcgaccacaaagtctacaaacatgctagtgggcagcgcttgaggagagataatacaaacgaagaaccgatttgttttcagcccacgttatcaagattcagtcttttgtctttagacacttccaagttggatcatagtttgattactcttgtcaaatttaatgttatcttggatttgattttacttgatgtaaatgtttaagaagtaatctgatatttgcttcc

SEQ ID NO: 23076 - protein, 325 aa, Arabidopsis thaliana
  peptide (1)..(325): Ceres Seq. ID no. 12321523
  misc_feature (2)..(218): Pfam Name: Papain family cysteine protease Pfam Description: Papain family cysteine protease
  misc_feature (2)..(308): Homolog of NCBI NO: 7435806 NR Description: cysteine proteinase mir3 (EC 3.4.22.-) - maize
  misc_feature (2)..(308): Homolog of NCBI NO: 6682829 NR Description: cysteine protease component of protease-inhibitor
  misc_feature (1)..(308): Homolog of NCBI NO: 129231 NR Description: Oryzain alpha chain precursor
  misc_feature (1)..(319): Homolog of NCBI NO: 30141019 NR Description: cysteine protease-1 [Helianthus annuus]
  misc_feature (2)..(311): Homolog of NCBI NO: 18401614 NR Description: cysteine proteinase RD21A
  misc_feature (2)..(311): Homolog of NCBI NO: 14517542 NR Description: F2G19.31/F2G19.31 [Arabidopsis thaliana]
  misc_feature (1)..(311): Homolog of NCBI NO: 18141283 NR Description: senescence-associated cysteine protease [Brassica
  misc_feature (1)..(312): Homolog of NCBI NO: 18422289 NR Description: cysteine proteinase RD21A
  misc_feature (2)..(325): Homolog of NCBI NO: 18141281 NR Description: senescence-associated cysteine protease [Brassica
  misc_feature (1)..(325): Homolog of NCBI NO: 18402225 NR Description: cysteine proteinase
SLPDAIDWRAKGAVNPVKDQGSCGSCWAFSAIGAVEGINQIKTGELISLSEQELVDCDTSYNDGCGGGLMDYAFKFIIENGGIDTEEDYPYIATDVNVCNSDKKNTRVVTIDGYEDVPQNDEKSLKKALANQPISVAIEAGGRAFQLYTSGVFTGTCGTSLDHGVVAVGYGSEGGQDYWIVRNSWGSKWGESGYFKLERNIKESSGKCGVAMMASYPTKSSGSNPPKPPAPSPVVCDKSNTCPAKSTCCCLYEYNGKCYSWGCCPYESATCCDDGSSCCPQSYPVCDLKANTCRMKGNSPLSIKALTRGPAIATTKSTNMLVGSA

SEQ ID NO: 23077 - protein, 256 aa, Arabidopsis thaliana
  peptide (1)..(256): Ceres Seq. ID no. 12321524
  misc_feature (1)..(149): Pfam Name: Papain family cysteine protease Pfam Description: Papain family cysteine protease
  misc_feature (1)..(239): Homolog of NCBI NO: 7435806 NR Description: cysteine proteinase mir3 (EC 3.4.22.-) - maize
  misc_feature (1)..(239): Homolog of NCBI NO: 6682829 NR Description: cysteine protease component of protease-inhibitor
  misc_feature (1)..(239): Homolog of NCBI NO: 129231 NR Description: Oryzain alpha chain precursor
  misc_feature (1)..(250): Homolog of NCBI NO: 30141019 NR Description: cysteine protease-1 [Helianthus annuus]
  misc_feature (1)..(242): Homolog of NCBI NO: 18401614 NR Description: cysteine proteinase RD21A
  misc_feature (1)..(242): Homolog of NCBI NO: 14517542 NR Description: F2G19.31/F2G19.31 [Arabidopsis thaliana]
  misc_feature (1)..(242): Homolog of NCBI NO: 18141283 NR Description: senescence-associated cysteine protease [Brassica
  misc_feature (1)..(243): Homolog of NCBI NO: 18422289 NR Description: cysteine proteinase RD21A
  misc_feature (1)..(256): Homolog of NCBI NO: 18141281 NR Description: senescence-associated cysteine protease [Brassica
  misc_feature (1)..(256): Homolog of NCBI NO: 18402225 NR Description: cysteine proteinase
MDYAFKFIIENGGIDTEEDYPYIATDVNVCNSDKKNTRVVTIDGYEDVPQNDEKSLKKALANQPISVAIEAGGRAFQLYTSGVFTGTCGTSLDHGVVAVGYGSEGGQDYWIVRNSWGSKWGESGYFKLERNIKESSGKCGVAMMASYPTKSSGSNPPKPPAPSPVVCDKSNTCPAKSTCCCLYEYNGKCYSWGCCPYESATCCDDGSSCCPQSYPVCDLKANTCRMKGNSPLSIKALTRGPAIATTKSTNMLVGSA

SEQ ID NO: 23078 - DNA, 1690 bp, Arabidopsis thaliana
  misc_feature (1)..(1690): Ceres Seq. ID no. 12338881
  misc_feature: MA Experiment ID: 108435 Result: Down-regulated in Transcription
  misc_feature: MA Experiment 108435 PARAMETER Experiment Name: At_stm_Mutants_cDNA_P Parameter: Plant Line Value: wt Landsburg vs stm
  misc_feature: MA Experiment 108435 PARAMETER Experiment Name: At_stm_Mutants_cDNA_P Parameter: Tissue Value: Shoot Apical Meristem Region
  misc_feature: MA Experiment ID: 108462 Result: Up-regulated in Transcription
  misc_feature: MA Experiment 108462 PARAMETER Experiment Name: At_Germinating_Seeds_cDNA_P Parameter: Age (day) Value: 2 vs. 0
  misc_feature: MA Experiment 108462 PARAMETER Experiment Name: At_Germinating_Seeds_cDNA_P Parameter: Tissue Value: Germinating Seeds
  misc_feature: MA Experiment ID: 108463 Result: Up-regulated in Transcription
  misc_feature: MA Experiment 108463 PARAMETER Experiment Name: At_Germinating_Seeds_cDNA_P Parameter: Age (day) Value: 3 vs. 0
  misc_feature: MA Experiment 108463 PARAMETER Experiment Name: At_Germinating_Seeds_cDNA_P Parameter: Tissue Value: Germinating Seeds
  misc_feature: MA Experiment ID: 108464 Result: Up-regulated in Transcription
  misc_feature: MA Experiment 108464 PARAMETER Experiment Name: At_Germinating_Seeds_cDNA_P Parameter: Age (day) Value: 4 vs. 0
  misc_feature: MA Experiment 108464 PARAMETER Experiment Name: At_Germinating_Seeds_cDNA_P Parameter: Tissue Value: Germinating Seeds
  misc_feature: MA Experiment ID: 108561 Result: Up-regulated in Transcription
  misc_feature: MA Experiment 108561 PARAMETER Experiment Name: At_100uM_ABA_cDNA_P Parameter: Timepoint (hr) Value: 6
  misc_feature: MA Experiment 108561 PARAMETER Experiment Name: At_100uM_ABA_cDNA_P Parameter: Tissue Value: Aerial
  misc_feature: MA Experiment 108561 PARAMETER Experiment Name: At_100uM_ABA_cDNA_P Parameter: Treatment Value: 100uM ABA vs. No Treatment
  misc_feature: MA Experiment ID: 108573 Result: Up-regulated in Transcription
  misc_feature: MA Experiment 108573 PARAMETER Experiment Name: At_Drought_cDNA_P Parameter: Timepoint (hr) Value: 6
  misc_feature: MA Experiment 108573 PARAMETER Experiment Name: At_Drought_cDNA_P Parameter: Tissue Value: Aerial
  misc_feature: MA Experiment 108573 PARAMETER Experiment Name: At_Drought_cDNA_P Parameter: Treatment Value: Drought vs. No Drought
  misc_feature: MA Experiment ID: 108585 Result: Up-regulated in Transcription
  misc_feature: MA Experiment 108585 PARAMETER Experiment Name: At_5mM_NaNP_cDNA_P Parameter: Timepoint (hr) Value: 6
  misc_feature: MA Experiment 108585 PARAMETER Experiment Name: At_5mM_NaNP_cDNA_P Parameter: Tissue Value: Aerial
  misc_feature: MA Experiment 108585 PARAMETER Experiment Name: At_5mM_NaNP_cDNA_P Parameter: Treatment Value: null
  misc_feature: MA Experiment ID: 108594 Result: Down-regulated in Transcription
  misc_feature: MA Experiment 108594 PARAMETER Experiment Name: At_Ler-rhl_Root_cDNA_P Parameter: Plant Line Value: null
  misc_feature: MA Experiment ID: 108605 Result: Up-regulated in Transcription
  misc_feature: MA Experiment 108605 PARAMETER Experiment Name: At_100uM_ABA_cDNA_P Parameter: Timepoint (hr) Value: 6
  misc_feature: MA Experiment 108605 PARAMETER Experiment Name: At_100uM_ABA_cDNA_P Parameter: Tissue Value: Aerial
  misc_feature: MA Experiment 108605 PARAMETER Experiment Name: At_100uM_ABA_cDNA_P Parameter: Treatment Value: 100uM ABA vs. No Treatment
  misc_feature: MA Experiment ID: 108607 Result: Up-regulated in Transcription
  misc_feature: MA Experiment 108607 PARAMETER Experiment Name: At_100uM_ABA_cDNA_P Parameter: Timepoint (hr) Value: 4
  misc_feature: MA Experiment 108607 PARAMETER Experiment Name: At_100uM_ABA_cDNA_P Parameter: Tissue Value: Aerial
  misc_feature: MA Experiment 108607 PARAMETER Experiment Name: At_100uM_ABA_cDNA_P Parameter: Treatment Value: 100uM ABA vs. No Treatment
  misc_feature: MA Experiment ID: 20000069 Result: Up-regulated in Transcription
  misc_feature: MA Experiment 20000069 PARAMETER Experiment Name: At_100uM_ABA_Mutants_cDNA_P Parameter: Plant Line Value: CS23
  misc_feature: MA Experiment 20000069 PARAMETER Experiment Name: At_100uM_ABA_Mutants_cDNA_P Parameter: Timepoint (hr) Value: 6
  misc_feature: MA Experiment 20000069 PARAMETER Experiment Name: At_100uM_ABA_Mutants_cDNA_P Parameter: Tissue Value: Aerial
  misc_feature: MA Experiment 20000069 PARAMETER Experiment Name: At_100uM_ABA_Mutants_cDNA_P Parameter: Treatment Value: 100uM ABA vs. No Treatment
  misc_feature: MA Experiment ID: 20000070 Result: Up-regulated in Transcription
  misc_feature: MA Experiment 20000070 PARAMETER Experiment Name: At_100uM_ABA_Mutants_cDNA_P Parameter: Plant Line Value: CS24
  misc_feature: MA Experiment 20000070 PARAMETER Experiment Name: At_100uM_ABA_Mutants_cDNA_P Parameter: Timepoint (hr) Value: 6
  misc_feature: MA Experiment 20000070 PARAMETER Experiment Name: At_100uM_ABA_Mutants_cDNA_P Parameter: Tissue Value: Aerial
  misc_feature: MA Experiment 20000070 PARAMETER Experiment Name: At_100uM_ABA_Mutants_cDNA_P Parameter: Treatment Value: 100uM ABA vs. No Treatment
  misc_feature: MA Experiment ID: 20000071 Result: Up-regulated in Transcription
  misc_feature: MA Experiment 20000071 PARAMETER Experiment Name: At_100uM_ABA_Mutants_cDNA_P Parameter: Plant Line Value: CS8104
  misc_feature: MA Experiment 20000071 PARAMETER Experiment Name: At_100uM_ABA_Mutants_cDNA_P Parameter: Timepoint (hr) Value: 6
  misc_feature: MA Experiment 20000071 PARAMETER Experiment Name: At_100uM_ABA_Mutants_cDNA_P Parameter: Tissue Value: Aerial
  misc_feature: MA Experiment 20000071 PARAMETER Experiment Name: At_100uM_ABA_Mutants_cDNA_P Parameter: Treatment Value: 100uM ABA vs. No Treatment
  misc_feature: MA Experiment ID: 20000072 Result: Up-regulated in Transcription
  misc_feature: MA Experiment 20000072 PARAMETER Experiment Name: At_100uM_ABA_Mutants_cDNA_P Parameter: Plant Line Value: CS8105
  misc_feature: MA Experiment 20000072 PARAMETER Experiment Name: At_100uM_ABA_Mutants_cDNA_P Parameter: Timepoint (hr) Value: 6
  misc_feature: MA Experiment 20000072 PARAMETER Experiment Name: At_100uM_ABA_Mutants_cDNA_P Parameter: Tissue Value: Aerial
  misc_feature: MA Experiment 20000072 PARAMETER Experiment Name: At_100uM_ABA_Mutants_cDNA_P Parameter: Treatment Value: 100uM ABA vs. No Treatment
  misc_feature: MA Experiment ID: 20000086 Result: Up-regulated in Transcription
  misc_feature: MA Experiment 20000086 PARAMETER Experiment Name: At_100uM_ABA_Mutants_cDNA_P Parameter: Plant Line Value: CS22
  misc_feature: MA Experiment 20000086 PARAMETER Experiment Name: At_100uM_ABA_Mutants_cDNA_P Parameter: Timepoint (hr) Value: 6
  misc_feature: MA Experiment 20000086 PARAMETER Experiment Name: At_100uM_ABA_Mutants_cDNA_P Parameter: Tissue Value: Aerial
  misc_feature: MA Experiment 20000086 PARAMETER Experiment Name: At_100uM_ABA_Mutants_cDNA_P Parameter: Treatment Value: 100uM ABA vs. No Treatment
  misc_feature: MA Experiment ID: 20000087 Result: Up-regulated in Transcription
  misc_feature: MA Experiment 20000087 PARAMETER Experiment Name: At_100uM_ABA_Mutants_cDNA_P Parameter: Plant Line Value: WS
  misc_feature: MA Experiment 20000087 PARAMETER Experiment Name: At_100uM_ABA_Mutants_cDNA_P Parameter: Timepoint (hr) Value: 6
  misc_feature: MA Experiment 20000087 PARAMETER Experiment Name: At_100uM_ABA_Mutants_cDNA_P Parameter: Tissue Value: Aerial
  misc_feature: MA Experiment 20000087 PARAMETER Experiment Name: At_100uM_ABA_Mutants_cDNA_P Parameter: Treatment Value: 100uM ABA vs. No Treatment
  misc_feature: MA Experiment ID: 20000089 Result: Up-regulated in Transcription
  misc_feature: MA Experiment ID: 20000117 Result: Up-regulated in Transcription
  misc_feature: MA Experiment 20000117 PARAMETER Experiment Name: At_100uM_ABA_Mutants_cDNA_P Parameter: Plant Line Value: Columbia
  misc_feature: MA Experiment 20000117 PARAMETER Experiment Name: At_100uM_ABA_Mutants_cDNA_P Parameter: Timepoint (hr) Value: 6
  misc_feature: MA Experiment 20000117 PARAMETER Experiment Name: At_100uM_ABA_Mutants_cDNA_P Parameter: Tissue Value: Aerial
  misc_feature: MA Experiment 20000117 PARAMETER Experiment Name: At_100uM_ABA_Mutants_cDNA_P Parameter: Treatment Value: 100uM ABA vs. No Treatment
  misc_feature: MA Experiment ID: 20000179 Result: Down-regulated in Transcription
  misc_feature: MA Experiment 20000179 PARAMETER Experiment Name: At_Germinating_Seeds_P Parameter: Age (hr) Value: 6 vs. 0
  misc_feature: MA Experiment 20000179 PARAMETER Experiment Name: At_Germinating_Seeds_P Parameter: Tissue Value: Germinating Seeds
  misc_feature: MA Experiment ID: 20000185 Result: Down-regulated in Transcription
  misc_feature: MA Experiment 20000185 PARAMETER Experiment Name: At_Roots__P Parameter: Age (day) Value: 7 vs. 21
  misc_feature: MA Experiment 20000185 PARAMETER Experiment Name: At_Roots__P Parameter: Organism Value: A. thaliana
  misc_feature: MA Experiment 20000185 PARAMETER Experiment Name: At_Roots__P Parameter: Tissue Value: Roots vs. Whole Plant
  misc_feature: MA Experiment ID: 20000224 Result: Down-regulated in Transcription
  misc_feature: MA Experiment ID: 20000234 Result: Down-regulated in Transcription
  misc_feature: MA Experiment 20000234 PARAMETER Experiment Name: At_Siliques_P Parameter: Age (day) Value: 21
  misc_feature: MA Experiment 20000234 PARAMETER Experiment Name: At_Siliques_P Parameter: Organism Value: A. thaliana
  misc_feature: MA Experiment 20000234 PARAMETER Experiment Name: At_Siliques_P Parameter: Plant Line Value: WS
  misc_feature: MA Experiment 20000234 PARAMETER Experiment Name: At_Siliques_P Parameter: Tissue Value: Less Than 5mm Siliques vs. Whole Plant
  misc_feature: MA Experiment ID: 20000439 Result: Down-regulated in Transcription
  misc_feature: MA Experiment 20000439 PARAMETER Experiment Name: At_Roots__P Parameter: Age (day) Value: 14 vs. 21
  misc_feature: MA Experiment 20000439 PARAMETER Experiment Name: At_Roots__P Parameter: Organism Value: A. thaliana
  misc_feature: MA Experiment 20000439 PARAMETER Experiment Name: At_Roots__P Parameter: Tissue Value: Roots vs. Whole Plant
  misc_feature: MA Experiment ID: 20000451 Result: Up-regulated in Transcription
  misc_feature: MA Experiment 20000451 PARAMETER Experiment Name: At_CS6879_Shoots-Roots_P Parameter: Age (day) Value: 14
  misc_feature: MA Experiment 20000451 PARAMETER Experiment Name: At_CS6879_Shoots-Roots_P Parameter: Organism Value: A. thaliana
  misc_feature: MA Experiment 20000451 PARAMETER Experiment Name: At_CS6879_Shoots-Roots_P Parameter: Plant Line Value: CS6879 vs. WS
  misc_feature: MA Experiment 20000451 PARAMETER Experiment Name: At_CS6879_Shoots-Roots_P Parameter: Tissue Value: Roots
  misc_feature: MA Experiment ID: 20001247 Result: Down-regulated in Transcription
  misc_feature: MA Experiment 20001247 PARAMETER Experiment Name: At_Far-red-induction_P Parameter: Age (day) Value: 7
  misc_feature: MA Experiment 20001247 PARAMETER Experiment Name: At_Far-red-induction_P Parameter: Light Value: Far-red vs. White
  misc_feature: MA Experiment 20001247 PARAMETER Experiment Name: At_Far-red-induction_P Parameter: Organism Value: A. thaliana
  misc_feature: MA Experiment 20001247 PARAMETER Experiment Name: At_Far-red-induction_P Parameter: Plant Line Value: Columbia
  misc_feature: MA Experiment 20001247 PARAMETER Experiment Name: At_Far-red-induction_P Parameter: Timepoint (hr) Value: 1
  misc_feature: MA Experiment 20001247 PARAMETER Experiment Name: At_Far-red-induction_P Parameter: Tissue Value: Whole Plant
  misc_feature: MA Experiment ID: 20001911 Result: Up-regulated in Transcription
  misc_feature: MA Experiment 20001911 PARAMETER Experiment Name: At_Drought_Reproduction_P Parameter: Age (day) Value: 40
  misc_feature: MA Experiment 20001911 PARAMETER Experiment Name: At_Drought_Reproduction_P Parameter: Organism Value: A. thaliana
  misc_feature: MA Experiment 20001911 PARAMETER Experiment Name: At_Drought_Reproduction_P Parameter: Plant Line Value: WS
  misc_feature: MA Experiment 20001911 PARAMETER Experiment Name: At_Drought_Reproduction_P Parameter: Timepoint (day) Value: 10
  misc_feature: MA Experiment 20001911 PARAMETER Experiment Name: At_Drought_Reproduction_P Parameter: Tissue Value: Flowers
  misc_feature: MA Experiment 20001911 PARAMETER Experiment Name: At_Drought_Reproduction_P Parameter: Treatment Value: Drought vs. No Drought
atattttgttttaggtgttcacataaatttgatagtgtaaagaaaacaaaaccactttctagttcttaaagaaactagaaatccatggacccgtctcgtcatactcatgtgatgctcgtatctttccccggccaaggtcacgtaaaccctctacttcgtctcggaaagctcatagcctctaaaggcttactcgtcacctttgtcaccacagagaagccatggggcaagaagatgcgtcaagccaacaagattcaagacggtgtgctcaaaccggtcggtctaggtttcatccggtttgagttcttctctgacggcttcgccgacgacgatgaaaaaagattcgacttcgatgccttccgaccacaccttgaagctgtcggaaaacaagagatcaagaatctcgttaagagatataacaaggagccggtgacgtgtctcataaacaacgcttttgtcccatgggtatgtgatgtcgccgaggagcttcacatcccttcggctgttctatgggtccagtcttgtgcttgtctcacggcttattactattaccaccaccggttagttaagttcccgaccaaaaccgagccggacatcagcgttgaaatcccttgcttgccattgttaaagcatgacgagatcccaagctttcttcacccttcgtctccgtatacagcttttggagatatcattttagaccagttaaagagattcgaaaaccacaagtctttctatcttttcatcgacacttttcgcgaactagaaaaagacatcatggaccacatgtcacaactttgtcctcaagccatcatcagtcctgtcggtccgctcttcaagatggctcaaaccttgagttctgacgttaagggagatatatccgagccagcgagtgactgcatggaatggcttgactcaagagaaccatcctcagtcgtttacatctcctttgggactatagccaacttgaagcaagagcagatggaggagatcgctcatggcgttttgagctctggcttgtcggtcttatgggtggttcggcctcccatggaagggacatttgtagaaccacatgttttgcctcgagagctcgaagaaaagggtaaaatcgtggaatggtgtccccaagagagagtcttggctcatcctgcgattgcttgtttcttaagtcactgcggatggaactcgacaatggaggctttaactgccggagtccccgttgtttgttttccgcaatggggagatcaagtgactgatgcggtgtacttggctgatgttttcaagacaggagtgagactaggccgcggagccgctgaggagatgattgtttcgagggaggttgtagcagagaagctgcttgaggccacagttggggaaaaggcggtggagctgagagaaaacgctcggaggtggaaggcggaggccgaggccgccgtggcggacggtggatcatctgatatgaactttaaagagtttgtggacaagttggttacgaaacatgtgacgagagaagacaacggagaacactagtgataatgatgtctcgaaaatatccgactatttgttgtaccgcaaaaaccttaaccactacaaccttttcttttttcttgtcaataaatcgtatcaatctcatttcatttttcgaaagtgttttttctcacttctaaaatcaataattacgtattgtcttcttatc

SEQ ID NO: 23079 - protein, 479 aa, Arabidopsis thaliana
  peptide (1)..(479): Ceres Seq. ID no. 12338883
  misc_feature (18)..(470): Pfam Name: UDP-glucoronosyl and UDP-glucosyl transferase Pfam Description: UDP-glucoronosyl and UDP-glucosyl transferase
  misc_feature (8)..(466): Homolog of NCBI NO: 13431605 NR Description: Limonoid UDP-glucosyltransferase (Limonoid
  misc_feature (8)..(477): Homolog of NCBI NO: 9794913 NR Description: UDP-glucose:sinapate glucosyltransferase
  misc_feature (8)..(477): Homolog of NCBI NO: 30683281 NR Description: UDP-glycosyltransferase family [Arabidopsis
  misc_feature (8)..(477): Homolog of NCBI NO: 7433899 NR Description: probable indole-3-acetate
  misc_feature (8)..(477): Homolog of NCBI NO: 25082972 NR Description: indole-3-acetate beta-glucosyltransferase like
  misc_feature (3)..(479): Homolog of NCBI NO: 20259348 NR Description: putative UDP-glucose:indole-3-acetate
  misc_feature (3)..(479): Homolog of NCBI NO: 15233091 NR Description: UDP-glucosyltransferase, putative
  misc_feature (8)..(476): Homolog of NCBI NO: 15234619 NR Description: indole-3-acetate beta-glucosyltransferase like
  misc_feature (1)..(479): Homolog of NCBI NO: 21593030 NR Description: indole-3-acetate beta-glucosyltransferase like
  misc_feature (1)..(479): Homolog of NCBI NO: 15234616 NR Description: UDP-glycosyltransferase, putative
MDPSRHTHVMLVSFPGQGHVNPLLRLGKLIASKGLLVTFVTTEKPWGKKMRQANKIQDGVLKPVGLGFIRFEFFSDGFADDDEKRFDFDAFRPHLEAVGKQEIKNLVKRYNKEPVTCLINNAFVPWVCDVAEELHIPSAVLWVQSCACLTAYYYYHHRLVKFPTKTEPDISVEIPCLPLLKHDEIPSFLHPSSPYTAFGDIILDQLKRFENHKSFYLFIDTFRELEKDIMDHMSQLCPQAIISPVGPLFKMAQTLSSDVKGDISEPASDCMEWLDSREPSSVVYISFGTIANLKQEQMEEIAHGVLSSGLSVLWVVRPPMEGTFVEPHVLPRELEEKGKIVEWCPQERVLAHPAIACFLSHCGWNSTMEALTAGVPVVCFPQWGDQVTDAVYLADVFKTGVRLGRGAAEEMIVSREVVAEKLLEATVGEKAVELRENARRWKAEAEAAVADGGSSDMNFKEFVDKLVTKHVTREDNGEH

SEQ ID NO: 23080 - protein, 470 aa, Arabidopsis thaliana
  peptide (1)..(470): Ceres Seq. ID no. 12338885
  misc_feature (9)..(461): Pfam Name: UDP-glucoronosyl and UDP-glucosyl transferase Pfam Description: UDP-glucoronosyl and UDP-glucosyl transferase
  misc_feature (1)..(457): Homolog of NCBI NO: 13431605 NR Description: Limonoid UDP-glucosyltransferase (Limonoid
  misc_feature (1)..(468): Homolog of NCBI NO: 9794913 NR Description: UDP-glucose:sinapate glucosyltransferase
  misc_feature (1)..(468): Homolog of NCBI NO: 30683281 NR Description: UDP-glycosyltransferase family [Arabidopsis
  misc_feature (1)..(468): Homolog of NCBI NO: 7433899 NR Description: probable indole-3-acetate
  misc_feature (1)..(468): Homolog of NCBI NO: 25082972 NR Description: indole-3-acetate beta-glucosyltransferase like
  misc_feature (1)..(470): Homolog of NCBI NO: 20259348 NR Description: putative UDP-glucose:indole-3-acetate
  misc_feature (1)..(470): Homolog of NCBI NO: 15233091 NR Description: UDP-glucosyltransferase, putative
  misc_feature (1)..(467): Homolog of NCBI NO: 15234619 NR Description: indole-3-acetate beta-glucosyltransferase like
  misc_feature (1)..(470): Homolog of NCBI NO: 21593030 NR Description: indole-3-acetate beta-glucosyltransferase like
  misc_feature (1)..(470): Homolog of NCBI NO: 15234616 NR Description: UDP-glycosyltransferase, putative
MLVSFPGQGHVNPLLRLGKLIASKGLLVTFVTTEKPWGKKMRQANKIQDGVLKPVGLGFIRFEFFSDGFADDDEKRFDFDAFRPHLEAVGKQEIKNLVKRYNKEPVTCLINNAFVPWVCDVAEELHIPSAVLWVQSCACLTAYYYYHHRLVKFPTKTEPDISVEIPCLPLLKHDEIPSFLHPSSPYTAFGDIILDQLKRFENHKSFYLFIDTFRELEKDIMDHMSQLCPQAIISPVGPLFKMAQTLSSDVKGDISEPASDCMEWLDSREPSSVVYISFGTIANLKQEQMEEIAHGVLSSGLSVLWVVRPPMEGTFVEPHVLPRELEEKGKIVEWCPQERVLAHPAIACFLSHCGWNSTMEALTAGVPVVCFPQWGDQVTDAVYLADVFKTGVRLGRGAAEEMIVSREVVAEKLLEATVGEKAVELRENARRWKAEAEAAVADGGSSDMNFKEFVDKLVTKHVTREDNGEH

SEQ ID NO: 23081 - protein, 430 aa, Arabidopsis thaliana
  peptide (1)..(430): Ceres Seq. ID no. 12338886
  misc_feature (1)..(421): Pfam Name: UDP-glucoronosyl and UDP-glucosyl transferase Pfam Description: UDP-glucoronosyl and UDP-glucosyl transferase
  misc_feature (1)..(417): Homolog of NCBI NO: 13431605 NR Description: Limonoid UDP-glucosyltransferase (Limonoid
  misc_feature (1)..(428): Homolog of NCBI NO: 9794913 NR Description: UDP-glucose:sinapate glucosyltransferase
  misc_feature (1)..(428): Homolog of NCBI NO: 30683281 NR Description: UDP-glycosyltransferase family [Arabidopsis
  misc_feature (1)..(428): Homolog of NCBI NO: 7433899 NR Description: probable indole-3-acetate
  misc_feature (1)..(428): Homolog of NCBI NO: 25082972 NR Description: indole-3-acetate beta-glucosyltransferase like
  misc_feature (1)..(430): Homolog of NCBI NO: 20259348 NR Description: putative UDP-glucose:indole-3-acetate
  misc_feature (1)..(430): Homolog of NCBI NO: 15233091 NR Description: UDP-glucosyltransferase, putative
  misc_feature (1)..(427): Homolog of NCBI NO: 15234619 NR Description: indole-3-acetate beta-glucosyltransferase like
  misc_feature (1)..(430): Homolog of NCBI NO: 21593030 NR Description: indole-3-acetate beta-glucosyltransferase like
  misc_feature (1)..(430): Homolog of NCBI NO: 15234616 NR Description: UDP-glycosyltransferase, putative
MRQANKIQDGVLKPVGLGFIRFEFFSDGFADDDEKRFDFDAFRPHLEAVGKQEIKNLVKRYNKEPVTCLINNAFVPWVCDVAEELHIPSAVLWVQSCACLTAYYYYHHRLVKFPTKTEPDISVEIPCLPLLKHDEIPSFLHPSSPYTAFGDIILDQLKRFENHKSFYLFIDTFRELEKDIMDHMSQLCPQAIISPVGPLFKMAQTLSSDVKGDISEPASDCMEWLDSREPSSVVYISFGTIANLKQEQMEEIAHGVLSSGLSVLWVVRPPMEGTFVEPHVLPRELEEKGKIVEWCPQERVLAHPAIACFLSHCGWNSTMEALTAGVPVVCFPQWGDQVTDAVYLADVFKTGVRLGRGAAEEMIVSREVVAEKLLEATVGEKAVELRENARRWKAEAEAAVADGGSSDMNFKEFVDKLVTKHVTREDNGEH

SEQ ID NO: 23082 - DNA, 1586 bp, Arabidopsis thaliana
  misc_feature (1)..(1586): Ceres Seq. ID no. 13492465
  misc_feature: MA Experiment ID: 108434 Result: Down-regulated in Transcription
  misc_feature: MA Experiment 108434 PARAMETER Experiment Name: At_Root_Tips_cDNA_P Parameter: Tissue Value: Root Tips
  misc_feature: MA Experiment ID: 108462 Result: Up-regulated in Transcription
  misc_feature: MA Experiment 108462 PARAMETER Experiment Name: At_Germinating_Seeds_cDNA_P Parameter: Age (day) Value: 2 vs. 0
  misc_feature: MA Experiment 108462 PARAMETER Experiment Name: At_Germinating_Seeds_cDNA_P Parameter: Tissue Value: Germinating Seeds
  misc_feature: MA Experiment ID: 108464 Result: Up-regulated in Transcription
  misc_feature: MA Experiment 108464 PARAMETER Experiment Name: At_Germinating_Seeds_cDNA_P Parameter: Age (day) Value: 4 vs. 0
  misc_feature: MA Experiment 108464 PARAMETER Experiment Name: At_Germinating_Seeds_cDNA_P Parameter: Tissue Value: Germinating Seeds
  misc_feature: MA Experiment ID: 108594 Result: Down-regulated in Transcription
  misc_feature: MA Experiment 108594 PARAMETER Experiment Name: At_Ler-rhl_Root_cDNA_P Parameter: Plant Line Value: null
  misc_feature: MA Experiment ID: 108595 Result: Down-regulated in Transcription
  misc_feature: MA Experiment 108595 PARAMETER Experiment Name: At_Ler-pi_Ovule_cDNA_P Parameter: Plant Line Value: null
  misc_feature: MA Experiment ID: 20000185 Result: Down-regulated in Transcription
  misc_feature: MA Experiment 20000185 PARAMETER Experiment Name: At_Roots__P Parameter: Age (day) Value: 7 vs. 21
  misc_feature: MA Experiment 20000185 PARAMETER Experiment Name: At_Roots__P Parameter: Organism Value: A. thaliana
  misc_feature: MA Experiment 20000185 PARAMETER Experiment Name: At_Roots__P Parameter: Tissue Value: Roots vs. Whole Plant
  misc_feature: MA Experiment ID: 20001248 Result: Down-regulated in Transcription
  misc_feature: MA Experiment 20001248 PARAMETER Experiment Name: At_Far-red-induction_P Parameter: Age (day) Value: 7
  misc_feature: MA Experiment 20001248 PARAMETER Experiment Name: At_Far-red-induction_P Parameter: Light Value: Far-red vs. White
  misc_feature: MA Experiment 20001248 PARAMETER Experiment Name: At_Far-red-induction_P Parameter: Organism Value: A. thaliana
  misc_feature: MA Experiment 20001248 PARAMETER Experiment Name: At_Far-red-induction_P Parameter: Plant Line Value: Columbia
  misc_feature: MA Experiment 20001248 PARAMETER Experiment Name: At_Far-red-induction_P Parameter: Timepoint (hr) Value: 4
  misc_feature: MA Experiment 20001248 PARAMETER Experiment Name: At_Far-red-induction_P Parameter: Tissue Value: Whole Plant
aaaaaagaagacggaacaaaaaacaaaaacagagccaggaataatgtcagtcttcctctgtttcctctgcctcttaccccttatcttaatcttcttgaaaaatctcaaaccatcgaaatggaagcttcctccaggcccaaagaagcttccgatcatcgggaacttacaccaacgccgggaattacatcccaggaacagtcggaatctttccgaaaagtacggaccaatcgtgtttctccgatacggattcgtccccgtggtcgtgatctcgtcaaaagaagcagcagaggaagttctcaagacccacgatcttgagtgttgtagccgaccagagacggttgggaccagagcaatctcttacaactttaaagacatcggattcgcaccgtacggtgaagattggagaacgatgcggaagctctcggtggtcgagctcttcagctcgaaaaagcttcaatctttcaggtatatcagagaggaagagaacgacttgtgtgtcaagaaactctctgatttagcttcgagacgatctttggtgaatcttgagaaaaccctttttactttagtcggaagtatagtgtgtaggatagggtttgggataaatctccgtgagtgtgagttcgttgatgaagatagcatcgatgatcttgtgcacaagtctgaagatgtcataaggaattctatcttctctgatttctttcccggattaatgggtaggctcatcgagtggatcttcagtgagaggaagagattgaatagactttactcggaagtagacactttctttcagaatattcttgatgatcatctcaagcctggaagagagagctctgatatcatcgatgtgatgattgatatgatgaagaagcaagagaaagagggagactctttcaagttcaccactgatcatctcaaagggatgatctcggacatatttctagcaggagttggaacaagctccactacattgatatgggcgatgaccgagctgatcagaaacccgagagtgatgaagaaagttcaagacgagattcggacaacacttggggacaagaaggagagaatcacagaagaagatttaaaccagcttcactacttcaagctcatggtcaaagagatattcaggttacatccagcagctccacttttgctcccaagagagacattgtctcatgtcaagatccaaggctacgatattcctgctaaaacacagatcatgatcaacgcttacgcgattgcacgtgatccaaaactatggacaaaccctgatgagtttaaccctgataggttccttgacagctccatagattacagaggactgaactttgagctattaccgtttggatctggtaggaggatatgtccagggatgacaatggggatcgccattgttgaattgggactattgaatttgctttacttcttcgactgggggctaccagagaaggaagaagccaaggagatcatcaccgggaatgaagttgctcttgaccttgttcaagtttttctccactgaatgtgttttggttatggaatgtttgtactacactaagcttgattctaaattaataacatcttacaagtac

SEQ ID NO: 23083 - protein, 504 aa, Arabidopsis thaliana
  peptide (1)..(504): Ceres Seq. ID no. 13492466
  misc_feature (43)..(472): Pfam Name: Cytochrome P450 Pfam Description: Cytochrome P450
  misc_feature (14)..(501): Homolog of NCBI NO: 15231536 NR Description: cytochrome P450 family [Arabidopsis thaliana]
  misc_feature (15)..(488): Homolog of NCBI NO: 15222174 NR Description: cytochrome P450 family [Arabidopsis thaliana]
  misc_feature (15)..(499): Homolog of NCBI NO: 15231525 NR Description: cytochrome P450 71B22 [Arabidopsis thaliana]
  misc_feature (15)..(504): Homolog of NCBI NO: 15231524 NR Description: cytochrome P450 71B21 [Arabidopsis thaliana]
  misc_feature (15)..(499): Homolog of NCBI NO: 15231526 NR Description: cytochrome P450 71B23 [Arabidopsis thaliana]
  misc_feature (15)..(504): Homolog of NCBI NO: 15222182 NR Description: cytochrome P450 71B7 [Arabidopsis thaliana]
  misc_feature (15)..(504): Homolog of NCBI NO: 15231632 NR Description: cytochrome P450 71B15 [Arabidopsis thaliana]
  misc_feature (15)..(504): Homolog of NCBI NO: 15222180 NR Description: cytochrome P450 71B29 [Arabidopsis thaliana]
  misc_feature (15)..(504): Homolog of NCBI NO: 21618278 NR Description: putative cytochrome P450 monooxygenase
  misc_feature (15)..(504): Homolog of NCBI NO: 15222177 NR Description: cytochrome P450 71B28 [Arabidopsis thaliana]
KKKTEQKTKTEPGIMSVFLCFLCLLPLILIFLKNLKPSKWKLPPGPKKLPIIGNLHQRRELHPRNSRNLSEKYGPIVFLRYGFVPVVVISSKEAAEEVLKTHDLECCSRPETVGTRAISYNFKDIGFAPYGEDWRTMRKLSVVELFSSKKLQSFRYIREEENDLCVKKLSDLASRRSLVNLEKTLFTLVGSIVCRIGFGINLRECEFVDEDSIDDLVHKSEDVIRNSIFSDFFPGLMGRLIEWIFSERKRLNRLYSEVDTFFQNILDDHLKPGRESSDIIDVMIDMMKKQEKEGDSFKFTTDHLKGMISDIFLAGVGTSSTTLIWAMTELIRNPRVMKKVQDEIRTTLGDKKERITEEDLNQLHYFKLMVKEIFRLHPAAPLLLPRETLSHVKIQGYDIPAKTQIMINAYAIARDPKLWTNPDEFNPDRFLDSSIDYRGLNFELLPFGSGRRICPGMTMGIAIVELGLLNLLYFFDWGLPEKEEAKEIITGNEVALDLVQVFLH

SEQ ID NO: 23084 - protein, 490 aa, Arabidopsis thaliana
  peptide (1)..(490): Ceres Seq. ID no. 13492467
  misc_feature (29)..(458): Pfam Name: Cytochrome P450 Pfam Description: Cytochrome P450
  misc_feature (1)..(487): Homolog of NCBI NO: 15231536 NR Description: cytochrome P450 family [Arabidopsis thaliana]
  misc_feature (1)..(474): Homolog of NCBI NO: 15222174 NR Description: cytochrome P450 family [Arabidopsis thaliana]
  misc_feature (1)..(485): Homolog of NCBI NO: 15231525 NR Description: cytochrome P450 71B22 [Arabidopsis thaliana]
  misc_feature (1)..(490): Homolog of NCBI NO: 15231524 NR Description: cytochrome P450 71B21 [Arabidopsis thaliana]
  misc_feature (1)..(485): Homolog of NCBI NO: 15231526 NR Description: cytochrome P450 71B23 [Arabidopsis thaliana]
  misc_feature (1)..(490): Homolog of NCBI NO: 15222182 NR Description: cytochrome P450 71B7 [Arabidopsis thaliana]
  misc_feature (1)..(490): Homolog of NCBI NO: 15231632 NR Description: cytochrome P450 71B15 [Arabidopsis thaliana]
  misc_feature (1)..(490): Homolog of NCBI NO: 15222180 NR Description: cytochrome P450 71B29 [Arabidopsis thaliana]
  misc_feature (1)..(490): Homolog of NCBI NO: 21618278 NR Description: putative cytochrome P450 monooxygenase
  misc_feature (1)..(490): Homolog of NCBI NO: 15222177 NR Description: cytochrome P450 71B28 [Arabidopsis thaliana]
MSVFLCFLCLLPLILIFLKNLKPSKWKLPPGPKKLPIIGNLHQRRELHPRNSRNLSEKYGPIVFLRYGFVPVVVISSKEAAEEVLKTHDLECCSRPETVGTRAISYNFKDIGFAPYGEDWRTMRKLSVVELFSSKKLQSFRYIREEENDLCVKKLSDLASRRSLVNLEKTLFTLVGSIVCRIGFGINLRECEFVDEDSIDDLVHKSEDVIRNSIFSDFFPGLMGRLIEWIFSERKRLNRLYSEVDTFFQNILDDHLKPGRESSDIIDVMIDMMKKQEKEGDSFKFTTDHLKGMISDIFLAGVGTSSTTLIWAMTELIRNPRVMKKVQDEIRTTLGDKKERITEEDLNQLHYFKLMVKEIFRLHPAAPLLLPRETLSHVKIQGYDIPAKTQIMINAYAIARDPKLWTNPDEFNPDRFLDSSIDYRGLNFELLPFGSGRRICPGMTMGIAIVELGLLNLLYFFDWGLPEKEEAKEIITGNEVALDLVQVFLH

SEQ ID NO: 23085 - protein, 368 aa, Arabidopsis thaliana
  peptide (1)..(368): Ceres Seq. ID no. 13492468
  misc_feature (1)..(336): Pfam Name: Cytochrome P450 Pfam Description: Cytochrome P450
  misc_feature (1)..(365): Homolog of NCBI NO: 15231536 NR Description: cytochrome P450 family [Arabidopsis thaliana]
  misc_feature (1)..(352): Homolog of NCBI NO: 15222174 NR Description: cytochrome P450 family [Arabidopsis thaliana]
  misc_feature (1)..(363): Homolog of NCBI NO: 15231525 NR Description: cytochrome P450 71B22 [Arabidopsis thaliana]
  misc_feature (1)..(368): Homolog of NCBI NO: 15231524 NR Description: cytochrome P450 71B21 [Arabidopsis thaliana]
  misc_feature (1)..(363): Homolog of NCBI NO: 15231526 NR Description: cytochrome P450 71B23 [Arabidopsis thaliana]
  misc_feature (1)..(368): Homolog of NCBI NO: 15222182 NR Description: cytochrome P450 71B7 [Arabidopsis thaliana]
  misc_feature (1)..(368): Homolog of NCBI NO: 15231632 NR Description: cytochrome P450 71B15 [Arabidopsis thaliana]
  misc_feature (1)..(368): Homolog of NCBI NO: 15222180 NR Description: cytochrome P450 71B29 [Arabidopsis thaliana]
  misc_feature (1)..(368): Homolog of NCBI NO: 21618278 NR Description: putative cytochrome P450 monooxygenase
  misc_feature (1)..(368): Homolog of NCBI NO: 15222177 NR Description: cytochrome P450 71B28 [Arabidopsis thaliana]
MRKLSVVELFSSKKLQSFRYIREEENDLCVKKLSDLASRRSLVNLEKTLFTLVGSIVCRIGFGINLRECEFVDEDSIDDLVHKSEDVIRNSIFSDFFPGLMGRLIEWIFSERKRLNRLYSEVDTFFQNILDDHLKPGRESSDIIDVMIDMMKKQEKEGDSFKFTTDHLKGMISDIFLAGVGTSSTTLIWAMTELIRNPRVMKKVQDEIRTTLGDKKERITEEDLNQLHYFKLMVKEIFRLHPAAPLLLPRETLSHVKIQGYDIPAKTQIMINAYAIARDPKLWTNPDEFNPDRFLDSSIDYRGLNFELLPFGSGRRICPGMTMGIAIVELGLLNLLYFFDWGLPEKEEAKEIITGNEVALDLVQVFLH

SEQ ID NO: 23086 - DNA, 1345 bp, Arabidopsis thaliana
  misc_feature (1)..(1345): Ceres Seq. ID no. 12396483
  misc_feature: MA Experiment ID: 108576 Result: Up-regulated in Transcription
  misc_feature: MA Experiment 108576 PARAMETER Experiment Name: At_42deg_Heat_cDNA_P Parameter: Temperature (deg C) Value: 42 vs. 22
  misc_feature: MA Experiment 108576 PARAMETER Experiment Name: At_42deg_Heat_cDNA_P Parameter: Timepoint (hr) Value: 1
  misc_feature: MA Experiment 108576 PARAMETER Experiment Name: At_42deg_Heat_cDNA_P Parameter: Tissue Value: Aerial
  misc_feature: MA Experiment ID: 108595 Result: Down-regulated in Transcription
  misc_feature: MA Experiment 108595 PARAMETER Experiment Name: At_Ler-pi_Ovule_cDNA_P Parameter: Plant Line Value: null
  misc_feature: MA Experiment ID: 20000171 Result: Down-regulated in Transcription
  misc_feature: MA Experiment 20000171 PARAMETER Experiment Name: At_42deg_Heat_P Parameter: Age (day) Value: 14
  misc_feature: MA Experiment 20000171 PARAMETER Experiment Name: At_42deg_Heat_P Parameter: Organism Value: A. thaliana
  misc_feature: MA Experiment 20000171 PARAMETER Experiment Name: At_42deg_Heat_P Parameter: Plant Line Value: WS
  misc_feature: MA Experiment 20000171 PARAMETER Experiment Name: At_42deg_Heat_P Parameter: Temperature (deg C) Value: 42 vs. 22
  misc_feature: MA Experiment 20000171 PARAMETER Experiment Name: At_42deg_Heat_P Parameter: Timepoint (hr) Value: 1
  misc_feature: MA Experiment 20000171 PARAMETER Experiment Name: At_42deg_Heat_P Parameter: Tissue Value: Aerial
  misc_feature: MA Experiment ID: 20000173 Result: Down-regulated in Transcription
  misc_feature: MA Experiment 20000173 PARAMETER Experiment Name: At_42deg_Heat_P Parameter: Age (day) Value: 14
  misc_feature: MA Experiment 20000173 PARAMETER Experiment Name: At_42deg_Heat_P Parameter: Organism Value: A. thaliana
  misc_feature: MA Experiment 20000173 PARAMETER Experiment Name: At_42deg_Heat_P Parameter: Plant Line Value: WS
  misc_feature: MA Experiment 20000173 PARAMETER Experiment Name: At_42deg_Heat_P Parameter: Temperature (deg C) Value: 42 vs. 22
  misc_feature: MA Experiment 20000173 PARAMETER Experiment Name: At_42deg_Heat_P Parameter: Timepoint (hr) Value: 6
  misc_feature: MA Experiment 20000173 PARAMETER Experiment Name: At_42deg_Heat_P Parameter: Tissue Value: Aerial
ggagtagaaaaaattaaagctttgagatttctttccttatcgatttttctctccgcgaattgttcgttgttttcttctggcacctgattctcatcttctttcttgtggaatctgggttttgttgcggagttttcgaggttcctcattcgttgcttctgttgaaactctctttttttttttgggtggtttactttgttttttttttgttgttgctttcaacctttaaatgccctaattttgaggttctagttgtggtttttaagattaggagccagaagccctttcgactaaagttcatgttagctgcaacttgctgaagtattcacagttttgttctgttggaagctctatgtgtttccttctgtgattgaaacacagagagaatgattttaccaaagcagtattgttgcacacactcgccgagctggccaatgcaccaaaggccatttaaacgaagacgtgttgttattagtgttccaacatttgaattggaatccgaaattagttgcaacactttcctgtgtatgcagatggtttgatgatttcgccaaacgggtactatggaaagagttttgcaggactcgtgccccaaaaatgatgcttgatttgcagtctagcggtagtcactgcattgacggtaactggcgagcccttgggaagcttctcatctactgctcaggatgtacacaaggtggtcttttcaatagctctgttcaaatcccaggccactttgtttatagaacccggttctcaagaacattaggaagaagcctccttccgcctcagtgtagaactgatgtactctatgtttgtgatccatgcgagcatcttgaccaaggagaagaaggcgacgtgggtttgttccgtgggattttcaagtcattcccaacatcgaaagttcggaaagtgatcattaacaaggcggttccttttcatccatccgaggtttgcccgtattgtaaagctaagctatggagcatgctacaagctaacataatacctcagtgcctgcattcgtttggaagcttatgaagactgcattgagtattttgtttgccttaatggacatttgctgggtatctgcactctcgcgcctttgtctgattcagaggatgcaattccaagcgaagataacaatcacacagagaagaaacaagacaatggctttcctagagagaacgtattgaaaaggagaaattctttgttgggtggaagtgaaaatggacctccgcctcaaaaacgactgaccaatcctaatcagtgaaacatctgtaaatttgtgtactactgctaaatttattgtatctgcagagattcttcaacattcatatacagtcaaattatg

SEQ ID NO: 23087 - protein, 145 aa, Arabidopsis thaliana
  peptide (1)..(145): Ceres Seq. ID no. 12396484
  misc_feature (1)..(145): Homolog of NCBI NO: 34908976 NR Description: putative circadian clock coupling factor ZGT
  misc_feature (1)..(137): Homolog of NCBI NO: 18412596 NR Description: putative protein
  misc_feature (1)..(137): Homolog of NCBI NO: 11281127 NR Description: hypothetical protein T20O10.160 - Arabidopsis
  misc_feature (1)..(145): Homolog of NCBI NO: 14210079 NR Description: circadian clock coupling factor ZGT [Nicotiana
  misc_feature (1)..(136): Homolog of NCBI NO: 34393587 NR Description: unknown protein [Oryza sativa (japonica
  misc_feature (1)..(137): Homolog of NCBI NO: 15241717 NR Description: putative protein
  misc_feature (1)..(137): Homolog of NCBI NO: 15242296 NR Description: putative protein; protein id: At5g15440.1
MMLDLQSSGSHCIDGNWRALGKLLIYCSGCTQGGLFNSSVQIPGHFVYRTRFSRTLGRSLLPPQCRTDVLYVCDPCEHLDQGEEGDVGLFRGIFKSFPTSKVRKVIINKAVPFHPSEVCPYCKAKLWSMLQANIIPQCLHSFGSL

SEQ ID NO: 23088 - protein, 144 aa, Arabidopsis thaliana
  peptide (1)..(144): Ceres Seq. ID no. 12396485
  misc_feature (1)..(144): Homolog of NCBI NO: 34908976 NR Description: putative circadian clock coupling factor ZGT
  misc_feature (1)..(136): Homolog of NCBI NO: 18412596 NR Description: putative protein
  misc_feature (1)..(136): Homolog of NCBI NO: 11281127 NR Description: hypothetical protein T20O10.160 - Arabidopsis
  misc_feature (1)..(144): Homolog of NCBI NO: 14210079 NR Description: circadian clock coupling factor ZGT [Nicotiana
  misc_feature (1)..(135): Homolog of NCBI NO: 34393587 NR Description: unknown protein [Oryza sativa (japonica
  misc_feature (1)..(136): Homolog of NCBI NO: 15241717 NR Description: putative protein
  misc_feature (1)..(136): Homolog of NCBI NO: 15242296 NR Description: putative protein; protein id: At5g15440.1
MLDLQSSGSHCIDGNWRALGKLLIYCSGCTQGGLFNSSVQIPGHFVYRTRFSRTLGRSLLPPQCRTDVLYVCDPCEHLDQGEEGDVGLFRGIFKSFPTSKVRKVIINKAVPFHPSEVCPYCKAKLWSMLQANIIPQCLHSFGSL

SEQ ID NO: 23089 - DNA, 1301 bp, Arabidopsis thaliana
  misc_feature (1)..(1301): Ceres Seq. ID no. 12384889
  misc_feature: MA Experiment ID: 108594 Result: Down-regulated in Transcription
  misc_feature: MA Experiment 108594 PARAMETER Experiment Name: At_Ler-rhl_Root_cDNA_P Parameter: Plant Line Value: null
  misc_feature: MA Experiment ID: 108595 Result: Up-regulated in Transcription
  misc_feature: MA Experiment 108595 PARAMETER Experiment Name: At_Ler-pi_Ovule_cDNA_P Parameter: Plant Line Value: null
  misc_feature: MA Experiment ID: 20000184 Result: Down-regulated in Transcription
  misc_feature: MA Experiment 20000184 PARAMETER Experiment Name: At_Shoots__P Parameter: Age (day) Value: 7
  misc_feature: MA Experiment 20000184 PARAMETER Experiment Name: At_Shoots__P Parameter: Tissue Value: Shoots vs. Whole Plant
  misc_feature: MA Experiment ID: 20000185 Result: Down-regulated in Transcription
  misc_feature: MA Experiment 20000185 PARAMETER Experiment Name: At_Roots__P Parameter: Age (day) Value: 7 vs. 21
  misc_feature: MA Experiment 20000185 PARAMETER Experiment Name: At_Roots__P Parameter: Organism Value: A. thaliana
  misc_feature: MA Experiment 20000185 PARAMETER Experiment Name: At_Roots__P Parameter: Tissue Value: Roots vs. Whole Plant
  misc_feature: MA Experiment ID: 20000234 Result: Down-regulated in Transcription
  misc_feature: MA Experiment 20000234 PARAMETER Experiment Name: At_Siliques_P Parameter: Age (day) Value: 21
  misc_feature: MA Experiment 20000234 PARAMETER Experiment Name: At_Siliques_P Parameter: Organism Value: A. thaliana
  misc_feature: MA Experiment 20000234 PARAMETER Experiment Name: At_Siliques_P Parameter: Plant Line Value: WS
  misc_feature: MA Experiment 20000234 PARAMETER Experiment Name: At_Siliques_P Parameter: Tissue Value: Less Than 5mm Siliques vs. Whole Plant
  misc_feature: MA Experiment ID: 20000264 Result: Down-regulated in Transcription
  misc_feature: MA Experiment 20000264 PARAMETER Experiment Name: At_Open_Flower_P Parameter: Age (day) Value: 21
  misc_feature: MA Experiment 20000264 PARAMETER Experiment Name: At_Open_Flower_P Parameter: Plant Line Value: WS
  misc_feature: MA Experiment 20000264 PARAMETER Experiment Name: At_Open_Flower_P Parameter: Tissue Value: Open Flower vs. Whole Plant
  misc_feature: MA Experiment ID: 20000265 Result: Down-regulated in Transcription
  misc_feature: MA Experiment 20000265 PARAMETER Experiment Name: At_Open_Flower_P Parameter: Age (day) Value: 21
  misc_feature: MA Experiment 20000265 PARAMETER Experiment Name: At_Open_Flower_P Parameter: Plant Line Value: WS
  misc_feature: MA Experiment 20000265 PARAMETER Experiment Name: At_Open_Flower_P Parameter: Tissue Value: Closed Flower vs. Whole Plant
  misc_feature: MA Experiment ID: 20000286 Result: Down-regulated in Transcription
  misc_feature: MA Experiment 20000286 PARAMETER Experiment Name: At_Open_Flower_P Parameter: Age (day) Value: 21
  misc_feature: MA Experiment 20000286 PARAMETER Experiment Name: At_Open_Flower_P Parameter: Plant Line Value: WS
  misc_feature: MA Experiment 20000286 PARAMETER Experiment Name: At_Open_Flower_P Parameter: Tissue Value: Half Open vs. Whole Plant
  misc_feature: MA Experiment ID: 20000436 Result: Up-regulated in Transcription
  misc_feature: MA Experiment 20000436 PARAMETER Experiment Name: At_Drought_P Parameter: Age (day) Value: 7
  misc_feature: MA Experiment 20000436 PARAMETER Experiment Name: At_Drought_P Parameter: Organism Value: A. thaliana
  misc_feature: MA Experiment 20000436 PARAMETER Experiment Name: At_Drought_P Parameter: Plant Line Value: WS
  misc_feature: MA Experiment 20000436 PARAMETER Experiment Name: At_Drought_P Parameter: Timepoint (hr) Value: 12
  misc_feature: MA Experiment 20000436 PARAMETER Experiment Name: At_Drought_P Parameter: Tissue Value: Whole Plant
  misc_feature: MA Experiment 20000436 PARAMETER Experiment Name: At_Drought_P Parameter: Treatment Value: Drought vs. No Drought
  misc_feature: MA Experiment ID: 20000438 Result: Down-regulated in Transcription
  misc_feature: MA Experiment 20000438 PARAMETER Experiment Name: At_Shoots__P Parameter: Age (day) Value: 14
  misc_feature: MA Experiment 20000438 PARAMETER Experiment Name: At_Shoots__P Parameter: Tissue Value: Shoots vs. Whole Plant
  misc_feature: MA Experiment ID: 20000439 Result: Down-regulated in Transcription
  misc_feature: MA Experiment 20000439 PARAMETER Experiment Name: At_Roots__P Parameter: Age (day) Value: 14 vs. 21
  misc_feature: MA Experiment 20000439 PARAMETER Experiment Name: At_Roots__P Parameter: Organism Value: A. thaliana
  misc_feature: MA Experiment 20000439 PARAMETER Experiment Name: At_Roots__P Parameter: Tissue Value: Roots vs. Whole Plant
  misc_feature: MA Experiment ID: 20001556 Result: Down-regulated in Transcription
  misc_feature: MA Experiment 20001556 PARAMETER Experiment Name: At_Drought_Soil_Dry_P Parameter: Age (day) Value: 26
  misc_feature: MA Experiment 20001556 PARAMETER Experiment Name: At_Drought_Soil_Dry_P Parameter: Organism Value: A. thaliana
  misc_feature: MA Experiment 20001556 PARAMETER Experiment Name: At_Drought_Soil_Dry_P Parameter: Plant Line Value: WS
  misc_feature: MA Experiment 20001556 PARAMETER Experiment Name: At_Drought_Soil_Dry_P Parameter: Post Timepoint (hr) Value: None
  misc_feature: MA Experiment 20001556 PARAMETER Experiment Name: At_Drought_Soil_Dry_P Parameter: Post-Treatment Value: None
  misc_feature: MA Experiment 20001556 PARAMETER Experiment Name: At_Drought_Soil_Dry_P Parameter: Timepoint (day) Value: 12
  misc_feature: MA Experiment 20001556 PARAMETER Experiment Name: At_Drought_Soil_Dry_P Parameter: Treatment Value: Drought vs. No Drought
  misc_feature: MA Experiment ID: 20001557 Result: Down-regulated in Transcription
  misc_feature: MA Experiment 20001557 PARAMETER Experiment Name: At_Drought_Soil_Dry_P Parameter: Age (day) Value: 27
  misc_feature: MA Experiment 20001557 PARAMETER Experiment Name: At_Drought_Soil_Dry_P Parameter: Organism Value: A. thaliana
  misc_feature: MA Experiment 20001557 PARAMETER Experiment Name: At_Drought_Soil_Dry_P Parameter: Plant Line Value: WS
  misc_feature: MA Experiment 20001557 PARAMETER Experiment Name: At_Drought_Soil_Dry_P Parameter: Post Timepoint (hr) Value: 3
  misc_feature: MA Experiment 20001557 PARAMETER Experiment Name: At_Drought_Soil_Dry_P Parameter: Post-Treatment Value: Re-Water vs. No Drought
  misc_feature: MA Experiment 20001557 PARAMETER Experiment Name: At_Drought_Soil_Dry_P Parameter: Timepoint (day) Value: 13
  misc_feature: MA Experiment 20001557 PARAMETER Experiment Name: At_Drought_Soil_Dry_P Parameter: Treatment Value: Drought vs. No Drought
  misc_feature: MA Experiment ID: 20001558 Result: Down-regulated in Transcription
  misc_feature: MA Experiment 20001558 PARAMETER Experiment Name: At_Drought_Soil_Dry_P Parameter: Age (day) Value: 27
  misc_feature: MA Experiment 20001558 PARAMETER Experiment Name: At_Drought_Soil_Dry_P Parameter: Organism Value: A. thaliana
  misc_feature: MA Experiment 20001558 PARAMETER Experiment Name: At_Drought_Soil_Dry_P Parameter: Plant Line Value: WS
  misc_feature: MA Experiment 20001558 PARAMETER Experiment Name: At_Drought_Soil_Dry_P Parameter: Post Timepoint (hr) Value: 6
  misc_feature: MA Experiment 20001558 PARAMETER Experiment Name: At_Drought_Soil_Dry_P Parameter: Post-Treatment Value: Re-Water vs. No Drought
  misc_feature: MA Experiment 20001558 PARAMETER Experiment Name: At_Drought_Soil_Dry_P Parameter: Timepoint (day) Value: 13
  misc_feature: MA Experiment 20001558 PARAMETER Experiment Name: At_Drought_Soil_Dry_P Parameter: Treatment Value: Drought vs. No Drought
  misc_feature: MA Experiment ID: 20001560 Result: Down-regulated in Transcription
  misc_feature: MA Experiment 20001560 PARAMETER Experiment Name: At_Drought_Soil_Dry_P Parameter: Age (day) Value: 28
  misc_feature: MA Experiment 20001560 PARAMETER Experiment Name: At_Drought_Soil_Dry_P Parameter: Organism Value: A. thaliana
  misc_feature: MA Experiment 20001560 PARAMETER Experiment Name: At_Drought_Soil_Dry_P Parameter: Plant Line Value: WS
  misc_feature: MA Experiment 20001560 PARAMETER Experiment Name: At_Drought_Soil_Dry_P Parameter: Post Timepoint (hr) Value: None
  misc_feature: MA Experiment 20001560 PARAMETER Experiment Name: At_Drought_Soil_Dry_P Parameter: Post-Treatment Value: None
  misc_feature: MA Experiment 20001560 PARAMETER Experiment Name: At_Drought_Soil_Dry_P Parameter: Timepoint (day) Value: 14
  misc_feature: MA Experiment 20001560 PARAMETER Experiment Name: At_Drought_Soil_Dry_P Parameter: Treatment Value: Drought vs. No Drought
  misc_feature: MA Experiment ID: 20001768 Result: Up-regulated in Transcription
  misc_feature: MA Experiment 20001768 PARAMETER Experiment Name: At_Far-red-enriched-adult_P Parameter: Age (day) Value: 28
  misc_feature: MA Experiment 20001768 PARAMETER Experiment Name: At_Far-red-enriched-adult_P Parameter: Light Value: Far-red enriched vs. White
  misc_feature: MA Experiment 20001768 PARAMETER Experiment Name: At_Far-red-enriched-adult_P Parameter: Organism Value: A. thaliana
  misc_feature: MA Experiment 20001768 PARAMETER Experiment Name: At_Far-red-enriched-adult_P Parameter: Plant Line Value: Columbia
  misc_feature: MA Experiment 20001768 PARAMETER Experiment Name: At_Far-red-enriched-adult_P Parameter: Timepoint (hr) Value: 1
  misc_feature: MA Experiment 20001768 PARAMETER Experiment Name: At_Far-red-enriched-adult_P Parameter: Tissue Value: Aerial
  misc_feature: MA Experiment ID: 20001773 Result: Up-regulated in Transcription
  misc_feature: MA Experiment 20001773 PARAMETER Experiment Name: At_Far-red-enriched-adult_P Parameter: Age (day) Value: 30
  misc_feature: MA Experiment 20001773 PARAMETER Experiment Name: At_Far-red-enriched-adult_P Parameter: Light Value: Far-red enriched vs. White
  misc_feature: MA Experiment 20001773 PARAMETER Experiment Name: At_Far-red-enriched-adult_P Parameter: Organism Value: A. thaliana
  misc_feature: MA Experiment 20001773 PARAMETER Experiment Name: At_Far-red-enriched-adult_P Parameter: Plant Line Value: Columbia
  misc_feature: MA Experiment 20001773 PARAMETER Experiment Name: At_Far-red-enriched-adult_P Parameter: Timepoint (hr) Value: 48
  misc_feature: MA Experiment 20001773 PARAMETER Experiment Name: At_Far-red-enriched-adult_P Parameter: Tissue Value: Aerial
atcttataatcatccttcaatctccttcttcctctaaaactcttctaaagaagaaaacagaggaacgagaagaagaagaagagtgaacaatgaagaacggatcagggaacacgaacacaaaactaatccttcttcatccttacatccaaaaacaaacgagcacgactcgtttatggcttctcgctttcgtctctttcttcaccatagtttttctcctcactcttctctacactagagacacaatcccttccaaaaacacctccgtcgccgcagccgtagctgcagtcgtcaccggaggatccacaccttcagcatcatctcccatctccaactccaacttaccaactagtgcaatcaacgctttgcttcactacgcgtcaagatccaacgatagtttccacatgtcttacggagagatgaaatcaatctctgacgtcctccgccgctgcgctccaccgtgtaaccttctcgttttcggactcacacacgagactctcctttggaagtcgttaaaccacaacggtagaacattgttcatcgaggagaatcgttactacgcggcttacttcgaagaaatccacccggagatcgacgttttcgacgttcaatacacgacaaaagctcacgaagctggagagctcgtcaccgcggctaaagaagccgcgggaaacgagtgtcgtcctgtgcaaaatcttctcttctcagattgtaaattaggtctcaatgatttgcctaatcatgtctacgatgttgattgggatgtaatctttgtggacgggccacgtggcgatgctcacgaaggaccggggaggatgtcgtcgattttcacggcggcggttcttgctcggagcaaaaagggcgggaatccgaagacgcatgtgtttgtgcatgactattatagagacgttgagaggctttgtggtgatgagttcttgtgccgtgagaatcttgttgagtctaatgatttgcttgcacactacgtgttggataagatggataaaaacagcacaaagttttgcaatggtcgtaagaaacgttcggtttcgtctttatcttagaagtgacgccagaagacttcatacgtacatttgcttattgtaagaaataaagttttttccttgaagttttgctttttgtgctggtgtaaattttcgatcttggatttattgaagactttaatttaatctatttttttttttctttctcaaaggccaaagcaatcaatttgatgaaacatctagggatatatataacccaatgtaaactgaacttttgaaccaaaataaatattttattcatcc

SEQ ID NO: 23090 - protein, 322 aa, Arabidopsis thaliana
  peptide (1)..(322): Ceres Seq. ID no. 12384890
  misc_feature (66)..(310): Pfam Name: Protein of unknown function (DUF579) Pfam Description: Protein of unknown function (DUF579)
  misc_feature (82)..(310): Homolog of NCBI NO: 15217566 NR Description: unknown protein; protein id: At1g09610.1
  misc_feature (82)..(310): Homolog of NCBI NO: 18398986 NR Description: expressed protein
  misc_feature (25)..(310): Homolog of NCBI NO: 25354648 NR Description: hypothetical protein F14O23.3 [imported] -
  misc_feature (25)..(310): Homolog of NCBI NO: 18409879 NR Description: hypothetical protein; protein id: At1g71690.1
  misc_feature (23)..(322): Homolog of NCBI NO: 10241434 NR Description: putative protein [Oryza sativa (indica
  misc_feature (23)..(322): Homolog of NCBI NO: 32488916 NR Description: OSJNBb0059K02.7 [Oryza sativa (japonica
  misc_feature (7)..(319): Homolog of NCBI NO: 18397819 NR Description: expressed protein
  misc_feature (1)..(322): Homolog of NCBI NO: 15240242 NR Description: putative protein; protein id: At5g67210.1
  misc_feature (1)..(322): Homolog of NCBI NO: 15229700 NR Description: putative protein
  misc_feature (1)..(322): Homolog of NCBI NO: 21593034 NR Description: unknown [Arabidopsis thaliana]
MKNGSGNTNTKLILLHPYIQKQTSTTRLWLLAFVSFFTIVFLLTLLYTRDTIPSKNTSVAAAVAAVVTGGSTPSASSPISNSNLPTSAINALLHYASRSNDSFHMSYGEMKSISDVLRRCAPPCNLLVFGLTHETLLWKSLNHNGRTLFIEENRYYAAYFEEIHPEIDVFDVQYTTKAHEAGELVTAAKEAAGNECRPVQNLLFSDCKLGLNDLPNHVYDVDWDVIFVDGPRGDAHEGPGRMSSIFTAAVLARSKKGGNPKTHVFVHDYYRDVERLCGDEFLCRENLVESNDLLAHYVLDKMDKNSTKFCNGRKKRSVSSLS

SEQ ID NO: 23091 - protein, 218 aa, Arabidopsis thaliana
  peptide (1)..(218): Ceres Seq. ID no. 12384891
  misc_feature (1)..(206): Pfam Name: Protein of unknown function (DUF579) Pfam Description: Protein of unknown function (DUF579)
  misc_feature (1)..(206): Homolog of NCBI NO: 15217566 NR Description: unknown protein; protein id: At1g09610.1
  misc_feature (1)..(206): Homolog of NCBI NO: 18398986 NR Description: expressed protein
  misc_feature (1)..(206): Homolog of NCBI NO: 25354648 NR Description: hypothetical protein F14O23.3 [imported] -
  misc_feature (1)..(206): Homolog of NCBI NO: 18409879 NR Description: hypothetical protein; protein id: At1g71690.1
  misc_feature (1)..(218): Homolog of NCBI NO: 10241434 NR Description: putative protein [Oryza sativa (indica
  misc_feature (1)..(218): Homolog of NCBI NO: 32488916 NR Description: OSJNBb0059K02.7 [Oryza sativa (japonica
  misc_feature (1)..(215): Homolog of NCBI NO: 18397819 NR Description: expressed protein
  misc_feature (1)..(218): Homolog of NCBI NO: 15240242 NR Description: putative protein; protein id: At5g67210.1
  misc_feature (1)..(218): Homolog of NCBI NO: 15229700 NR Description: putative protein
  misc_feature (1)..(218): Homolog of NCBI NO: 21593034 NR Description: unknown [Arabidopsis thaliana]
MSYGEMKSISDVLRRCAPPCNLLVFGLTHETLLWKSLNHNGRTLFIEENRYYAAYFEEIHPEIDVFDVQYTTKAHEAGELVTAAKEAAGNECRPVQNLLFSDCKLGLNDLPNHVYDVDWDVIFVDGPRGDAHEGPGRMSSIFTAAVLARSKKGGNPKTHVFVHDYYRDVERLCGDEFLCRENLVESNDLLAHYVLDKMDKNSTKFCNGRKKRSVSSLS

SEQ ID NO: 23092 - protein, 213 aa, Arabidopsis thaliana
  peptide (1)..(213): Ceres Seq. ID no. 12384892
  misc_feature (1)..(201): Pfam Name: Protein of unknown function (DUF579) Pfam Description: Protein of unknown function (DUF579)
  misc_feature (1)..(201): Homolog of NCBI NO: 15217566 NR Description: unknown protein; protein id: At1g09610.1
  misc_feature (1)..(201): Homolog of NCBI NO: 18398986 NR Description: expressed protein
  misc_feature (1)..(201): Homolog of NCBI NO: 25354648 NR Description: hypothetical protein F14O23.3 [imported] -
  misc_feature (1)..(201): Homolog of NCBI NO: 18409879 NR Description: hypothetical protein; protein id: At1g71690.1
  misc_feature (1)..(213): Homolog of NCBI NO: 10241434 NR Description: putative protein [Oryza sativa (indica
  misc_feature (1)..(213): Homolog of NCBI NO: 32488916 NR Description: OSJNBb0059K02.7 [Oryza sativa (japonica
  misc_feature (1)..(210): Homolog of NCBI NO: 18397819 NR Description: expressed protein
  misc_feature (1)..(213): Homolog of NCBI NO: 15240242 NR Description: putative protein; protein id: At5g67210.1
  misc_feature (1)..(213): Homolog of NCBI NO: 15229700 NR Description: putative protein
  misc_feature (1)..(213): Homolog of NCBI NO: 21593034 NR Description: unknown [Arabidopsis thaliana]
MKSISDVLRRCAPPCNLLVFGLTHETLLWKSLNHNGRTLFIEENRYYAAYFEEIHPEIDVFDVQYTTKAHEAGELVTAAKEAAGNECRPVQNLLFSDCKLGLNDLPNHVYDVDWDVIFVDGPRGDAHEGPGRMSSIFTAAVLARSKKGGNPKTHVFVHDYYRDVERLCGDEFLCRENLVESNDLLAHYVLDKMDKNSTKFCNGRKKRSVSSLS

SEQ ID NO: 23093 - DNA, 1190 bp, Arabidopsis thaliana
  misc_feature (1)..(1190): Ceres Seq. ID no. 12580099
  misc_feature: MA Experiment ID: 108434 Result: Down-regulated in Transcription
  misc_feature: MA Experiment 108434 PARAMETER Experiment Name: At_Root_Tips_cDNA_P Parameter: Tissue Value: Root Tips
  misc_feature: MA Experiment ID: 108469 Result: Up-regulated in Transcription
  misc_feature: MA Experiment ID: 108576 Result: Up-regulated in Transcription
  misc_feature: MA Experiment 108576 PARAMETER Experiment Name: At_42deg_Heat_cDNA_P Parameter: Temperature (deg C) Value: 42 vs. 22
  misc_feature: MA Experiment 108576 PARAMETER Experiment Name: At_42deg_Heat_cDNA_P Parameter: Timepoint (hr) Value: 1
  misc_feature: MA Experiment 108576 PARAMETER Experiment Name: At_42deg_Heat_cDNA_P Parameter: Tissue Value: Aerial
  misc_feature: MA Experiment ID: 108595 Result: Up-regulated in Transcription
  misc_feature: MA Experiment 108595 PARAMETER Experiment Name: At_Ler-pi_Ovule_cDNA_P Parameter: Plant Line Value: null
  misc_feature: MA Experiment ID: 20000030 Result: Down-regulated in Transcription
  misc_feature: MA Experiment 20000030 PARAMETER Experiment Name: At_CS6630_Roots_cDNA_P Parameter: Plant Line Value: CS6630 vs. WS
  misc_feature: MA Experiment 20000030 PARAMETER Experiment Name: At_CS6630_Roots_cDNA_P Parameter: Tissue Value: Roots
  misc_feature: MA Experiment ID: 20000224 Result: Down-regulated in Transcription
  misc_feature: MA Experiment ID: 20000314 Result: Down-regulated in Transcription
  misc_feature: MA Experiment 20000314 PARAMETER Experiment Name: At_14day_Shoots-Roots_Sub_P Parameter: Age (day) Value: 14
  misc_feature: MA Experiment 20000314 PARAMETER Experiment Name: At_14day_Shoots-Roots_Sub_P Parameter: Organism Value: A. thaliana
  misc_feature: MA Experiment 20000314 PARAMETER Experiment Name: At_14day_Shoots-Roots_Sub_P Parameter: Plant Line Value: WS
  misc_feature: MA Experiment 20000314 PARAMETER Experiment Name: At_14day_Shoots-Roots_Sub_P Parameter: Tissue Value: Roots vs. Whole Plant
  misc_feature: MA Experiment ID: 20000315 Result: Down-regulated in Transcription
  misc_feature: MA Experiment 20000315 PARAMETER Experiment Name: At_14day_Shoots-Roots_Sub_P Parameter: Age (day) Value: 14
  misc_feature: MA Experiment 20000315 PARAMETER Experiment Name: At_14day_Shoots-Roots_Sub_P Parameter: Organism Value: A. thaliana
  misc_feature: MA Experiment 20000315 PARAMETER Experiment Name: At_14day_Shoots-Roots_Sub_P Parameter: Plant Line Value: WS
  misc_feature: MA Experiment 20000315 PARAMETER Experiment Name: At_14day_Shoots-Roots_Sub_P Parameter: Tissue Value: Shoots vs. Whole Plant
  misc_feature: MA Experiment ID: 20000347 Result: Up-regulated in Transcription
  misc_feature: MA Experiment 20000347 PARAMETER Experiment Name: At_2mM_SA_Sub_P Parameter: Age (day) Value: 14
  misc_feature: MA Experiment 20000347 PARAMETER Experiment Name: At_2mM_SA_Sub_P Parameter: Organism Value: A. thaliana
  misc_feature: MA Experiment 20000347 PARAMETER Experiment Name: At_2mM_SA_Sub_P Parameter: Plant Line Value: WS
  misc_feature: MA Experiment 20000347 PARAMETER Experiment Name: At_2mM_SA_Sub_P Parameter: Timepoint (hr) Value: 6
  misc_feature: MA Experiment 20000347 PARAMETER Experiment Name: At_2mM_SA_Sub_P Parameter: Tissue Value: Aerial
  misc_feature: MA Experiment 20000347 PARAMETER Experiment Name: At_2mM_SA_Sub_P Parameter: Treatment Value: 2mM SA vs. No Treatment
  misc_feature: MA Experiment ID: 20000355 Result: Down-regulated in Transcription
  misc_feature: MA Experiment 20000355 PARAMETER Experiment Name: At_Siliques_Sub_P Parameter: Age (day) Value: 21
  misc_feature: MA Experiment 20000355 PARAMETER Experiment Name: At_Siliques_Sub_P Parameter: Organism Value: A. thaliana
  misc_feature: MA Experiment 20000355 PARAMETER Experiment Name: At_Siliques_Sub_P Parameter: Plant Line Value: WS
  misc_feature: MA Experiment 20000355 PARAMETER Experiment Name: At_Siliques_Sub_P Parameter: Tissue Value: Less Than 5mm Siliques vs. Whole Plant
  misc_feature: MA Experiment ID: 20000440 Result: Down-regulated in Transcription
  misc_feature: MA Experiment 20000440 PARAMETER Experiment Name: At_Closed-Flower__Sub_P Parameter: Tissue Value: Closed Flower vs. Whole Plant
acatagattattctctccaagtataaagttttgtaatttacttttcaggagaaaaaaatgggtcaagctttgggttgtattcaagttgatcagtcgaatgtagcaatcaaagagacttttgggaagtttgacgaagttcttgagccgggttgtcactgtttgccatggtgtttgggaagtcaagtcgctggtcacctttctttacgtgttcaacagctcgatgttcgctgcgagacaaagactaaggataatgtgtttgtcacggttgttgcttccattcaataccgtgccttagcggagagtgctcaagatgctttttacaagctcagcaacacaaggaatcagattcaagcttatgtctttgatgtgatccgagcaagtgtacctaagctggatctagactctacctttgagcaaaagaatgacattgcaaaaaccgttgagactgagctcgaaaaggctatgtcgcattacggatatgagattgttcagacactgattgtggatatcgagcctgatgtgcatgtcaagagggcaatgaatgagatcaatgctgcttctagaatgagagaggcagcgagtgagaaagctgaggcagagaaaattctgcagatcaagcgtgctgagggagaagctgaatcgaaatacctttcaggtatgggtatagcccgtcagagacaagccattgtggatggtctgaggaacagcgtactcgccttctctgagtctgttccaggaacatcttccaaagacgtgatggatatggttcttgtgactcagtactttgacacattgaaggaaattggtgcttcttcgaagtcaaactcggtgttcataccgcacggtccaggcgctgttagggacattgcttcacagatcagggatggtcttcttcagggtaactctgctgctgagtagagaaatgtctcaaagtacaaaaaggctttttcagggttttagagttgtgttgctacttgcttactcagtttatcttttagcggtttgctctatatgatgggttcttaaatttcttatcgtttctctcttctaggcttgtggacttgatccattgtcttgttttctggtggtttgtggatagagtttgggcttgaaaaacatccgagttattttgggttttaatgtcattattaatgtttaatacgacagtggttaaagaatttgctaacggc

SEQ ID NO: 23094 - protein, 286 aa, Arabidopsis thaliana
  peptide (1)..(286): Ceres Seq. ID no. 12580100
  misc_feature (1)..(282): Homolog of NCBI NO: 13194676 NR Description: hypersensitivity-induced response-like protein
  misc_feature (1)..(282): Homolog of NCBI NO: 7716468 NR Description: hypersensitive-induced response protein [Zea mays]
  misc_feature (1)..(282): Homolog of NCBI NO: 9998903 NR Description: putative membrane protein [Zea mays]
  misc_feature (1)..(283): Homolog of NCBI NO: 28476864 NR Description: hypersensitive-induced reaction protein 2
  misc_feature (1)..(280): Homolog of NCBI NO: 14150732 NR Description: hypersensitive-induced response protein [Oryza
  misc_feature (1)..(281): Homolog of NCBI NO: 23345042 NR Description: hypersensitive-induced reaction protein 1
  misc_feature (1)..(284): Homolog of NCBI NO: 15241939 NR Description: putative protein
  misc_feature (1)..(282): Homolog of NCBI NO: 7716466 NR Description: hypersensitive-induced response protein [Zea mays]
  misc_feature (1)..(284): Homolog of NCBI NO: 3928150 NR Description: hypothetical protein [Cicer arietinum]
  misc_feature (1)..(286): Homolog of NCBI NO: 15222481 NR Description: unknown protein
MGQALGCIQVDQSNVAIKETFGKFDEVLEPGCHCLPWCLGSQVAGHLSLRVQQLDVRCETKTKDNVFVTVVASIQYRALAESAQDAFYKLSNTRNQIQAYVFDVIRASVPKLDLDSTFEQKNDIAKTVETELEKAMSHYGYEIVQTLIVDIEPDVHVKRAMNEINAASRMREAASEKAEAEKILQIKRAEGEAESKYLSGMGIARQRQAIVDGLRNSVLAFSESVPGTSSKDVMDMVLVTQYFDTLKEIGASSKSNSVFIPHGPGAVRDIASQIRDGLLQGNSAAE

SEQ ID NO: 23095 - protein, 151 aa, Arabidopsis thaliana
  peptide (1)..(151): Ceres Seq. ID no. 12580101
  misc_feature (1)..(147): Homolog of NCBI NO: 13194676 NR Description: hypersensitivity-induced response-like protein
  misc_feature (1)..(147): Homolog of NCBI NO: 7716468 NR Description: hypersensitive-induced response protein [Zea mays]
  misc_feature (1)..(147): Homolog of NCBI NO: 9998903 NR Description: putative membrane protein [Zea mays]
  misc_feature (1)..(148): Homolog of NCBI NO: 28476864 NR Description: hypersensitive-induced reaction protein 2
  misc_feature (1)..(145): Homolog of NCBI NO: 14150732 NR Description: hypersensitive-induced response protein [Oryza
  misc_feature (1)..(146): Homolog of NCBI NO: 23345042 NR Description: hypersensitive-induced reaction protein 1
  misc_feature (1)..(149): Homolog of NCBI NO: 15241939 NR Description: putative protein
  misc_feature (1)..(147): Homolog of NCBI NO: 7716466 NR Description: hypersensitive-induced response protein [Zea mays]
  misc_feature (1)..(149): Homolog of NCBI NO: 3928150 NR Description: hypothetical protein [Cicer arietinum]
  misc_feature (1)..(151): Homolog of NCBI NO: 15222481 NR Description: unknown protein
MSHYGYEIVQTLIVDIEPDVHVKRAMNEINAASRMREAASEKAEAEKILQIKRAEGEAESKYLSGMGIARQRQAIVDGLRNSVLAFSESVPGTSSKDVMDMVLVTQYFDTLKEIGASSKSNSVFIPHGPGAVRDIASQIRDGLLQGNSAAE

SEQ ID NO: 23096 - DNA, 1246 bp, Arabidopsis thaliana
  misc_feature (1)..(1246): Ceres Seq. ID no. 12396641
  misc_feature: MA Experiment ID: 108461 Result: Up-regulated in Transcription
  misc_feature: MA Experiment 108461 PARAMETER Experiment Name: At_Germinating_Seeds_cDNA_P Parameter: Age (day) Value: 1 vs. 0
  misc_feature: MA Experiment 108461 PARAMETER Experiment Name: At_Germinating_Seeds_cDNA_P Parameter: Tissue Value: Germinating Seeds
  misc_feature: MA Experiment ID: 108462 Result: Up-regulated in Transcription
  misc_feature: MA Experiment 108462 PARAMETER Experiment Name: At_Germinating_Seeds_cDNA_P Parameter: Age (day) Value: 2 vs. 0
  misc_feature: MA Experiment 108462 PARAMETER Experiment Name: At_Germinating_Seeds_cDNA_P Parameter: Tissue Value: Germinating Seeds
  misc_feature: MA Experiment ID: 108463 Result: Up-regulated in Transcription
  misc_feature: MA Experiment 108463 PARAMETER Experiment Name: At_Germinating_Seeds_cDNA_P Parameter: Age (day) Value: 3 vs. 0
  misc_feature: MA Experiment 108463 PARAMETER Experiment Name: At_Germinating_Seeds_cDNA_P Parameter: Tissue Value: Germinating Seeds
  misc_feature: MA Experiment ID: 108469 Result: Up-regulated in Transcription
  misc_feature: MA Experiment ID: 108595 Result: Up-regulated in Transcription
  misc_feature: MA Experiment 108595 PARAMETER Experiment Name: At_Ler-pi_Ovule_cDNA_P Parameter: Plant Line Value: null
  misc_feature: MA Experiment ID: 20000173 Result: Down-regulated in Transcription
  misc_feature: MA Experiment 20000173 PARAMETER Experiment Name: At_42deg_Heat_P Parameter: Age (day) Value: 14
  misc_feature: MA Experiment 20000173 PARAMETER Experiment Name: At_42deg_Heat_P Parameter: Organism Value: A. thaliana
  misc_feature: MA Experiment 20000173 PARAMETER Experiment Name: At_42deg_Heat_P Parameter: Plant Line Value: WS
  misc_feature: MA Experiment 20000173 PARAMETER Experiment Name: At_42deg_Heat_P Parameter: Temperature (deg C) Value: 42 vs. 22
  misc_feature: MA Experiment 20000173 PARAMETER Experiment Name: At_42deg_Heat_P Parameter: Timepoint (hr) Value: 6
  misc_feature: MA Experiment 20000173 PARAMETER Experiment Name: At_42deg_Heat_P Parameter: Tissue Value: Aerial
  misc_feature: MA Experiment ID: 20000180 Result: Up-regulated in Transcription
  misc_feature: MA Experiment 20000180 PARAMETER Experiment Name: At_Germinating_Seeds_P Parameter: Age (hr) Value: 24 vs. 0
  misc_feature: MA Experiment 20000180 PARAMETER Experiment Name: At_Germinating_Seeds_P Parameter: Tissue Value: Germinating Seeds
  misc_feature: MA Experiment ID: 20000182 Result: Up-regulated in Transcription
  misc_feature: MA Experiment 20000182 PARAMETER Experiment Name: At_2mM_SA_P Parameter: Age (day) Value: 14
  misc_feature: MA Experiment 20000182 PARAMETER Experiment Name: At_2mM_SA_P Parameter: Organism Value: A. thaliana
  misc_feature: MA Experiment 20000182 PARAMETER Experiment Name: At_2mM_SA_P Parameter: Plant Line Value: WS
  misc_feature: MA Experiment 20000182 PARAMETER Experiment Name: At_2mM_SA_P Parameter: Timepoint (hr) Value: 6
  misc_feature: MA Experiment 20000182 PARAMETER Experiment Name: At_2mM_SA_P Parameter: Tissue Value: Aerial
  misc_feature: MA Experiment 20000182 PARAMETER Experiment Name: At_2mM_SA_P Parameter: Treatment Value: 2mM SA vs. No Treatment
  misc_feature: MA Experiment ID: 20000184 Result: Up-regulated in Transcription
  misc_feature: MA Experiment 20000184 PARAMETER Experiment Name: At_Shoots__P Parameter: Age (day) Value: 7
  misc_feature: MA Experiment 20000184 PARAMETER Experiment Name: At_Shoots__P Parameter: Tissue Value: Shoots vs. Whole Plant
  misc_feature: MA Experiment ID: 20000185 Result: Up-regulated in Transcription
  misc_feature: MA Experiment 20000185 PARAMETER Experiment Name: At_Roots__P Parameter: Age (day) Value: 7 vs. 21
  misc_feature: MA Experiment 20000185 PARAMETER Experiment Name: At_Roots__P Parameter: Organism Value: A. thaliana
  misc_feature: MA Experiment 20000185 PARAMETER Experiment Name: At_Roots__P Parameter: Tissue Value: Roots vs. Whole Plant
  misc_feature: MA Experiment ID: 20000265 Result: Down-regulated in Transcription
  misc_feature: MA Experiment 20000265 PARAMETER Experiment Name: At_Open_Flower_P Parameter: Age (day) Value: 21
  misc_feature: MA Experiment 20000265 PARAMETER Experiment Name: At_Open_Flower_P Parameter: Plant Line Value: WS
  misc_feature: MA Experiment 20000265 PARAMETER Experiment Name: At_Open_Flower_P Parameter: Tissue Value: Closed Flower vs. Whole Plant
  misc_feature: MA Experiment ID: 20000436 Result: Up-regulated in Transcription
  misc_feature: MA Experiment 20000436 PARAMETER Experiment Name: At_Drought_P Parameter: Age (day) Value: 7
  misc_feature: MA Experiment 20000436 PARAMETER Experiment Name: At_Drought_P Parameter: Organism Value: A. thaliana
  misc_feature: MA Experiment 20000436 PARAMETER Experiment Name: At_Drought_P Parameter: Plant Line Value: WS
  misc_feature: MA Experiment 20000436 PARAMETER Experiment Name: At_Drought_P Parameter: Timepoint (hr) Value: 12
  misc_feature: MA Experiment 20000436 PARAMETER Experiment Name: At_Drought_P Parameter: Tissue Value: Whole Plant
  misc_feature: MA Experiment 20000436 PARAMETER Experiment Name: At_Drought_P Parameter: Treatment Value: Drought vs. No Drought
  misc_feature: MA Experiment ID: 20000439 Result: Up-regulated in Transcription
  misc_feature: MA Experiment 20000439 PARAMETER Experiment Name: At_Roots__P Parameter: Age (day) Value: 14 vs. 21
  misc_feature: MA Experiment 20000439 PARAMETER Experiment Name: At_Roots__P Parameter: Organism Value: A. thaliana
  misc_feature: MA Experiment 20000439 PARAMETER Experiment Name: At_Roots__P Parameter: Tissue Value: Roots vs. Whole Plant
  misc_feature: MA Experiment ID: 20000453 Result: Up-regulated in Transcription
  misc_feature: MA Experiment 20000453 PARAMETER Experiment Name: At_100uM_ABA_P Parameter: Age (day) Value: 15
  misc_feature: MA Experiment 20000453 PARAMETER Experiment Name: At_100uM_ABA_P Parameter: Organism Value: A. thaliana
  misc_feature: MA Experiment 20000453 PARAMETER Experiment Name: At_100uM_ABA_P Parameter: Plant Line Value: WS
  misc_feature: MA Experiment 20000453 PARAMETER Experiment Name: At_100uM_ABA_P Parameter: Timepoint (hr) Value: 24
  misc_feature: MA Experiment 20000453 PARAMETER Experiment Name: At_100uM_ABA_P Parameter: Tissue Value: Aerial
  misc_feature: MA Experiment 20000453 PARAMETER Experiment Name: At_100uM_ABA_P Parameter: Treatment Value: 100uM ABA vs. No Treatment
  misc_feature: MA Experiment ID: 20000496 Result: Down-regulated in Transcription
  misc_feature: MA Experiment 20000496 PARAMETER Experiment Name: At_Guard_Cells_P Parameter: Harvest Date Value: 7/19/2002
  misc_feature: MA Experiment 20000496 PARAMETER Experiment Name: At_Guard_Cells_P Parameter: Organism Value: Canola
  misc_feature: MA Experiment 20000496 PARAMETER Experiment Name: At_Guard_Cells_P Parameter: Tissue Value: Guard Cells vs. Leaves
  misc_feature: MA Experiment ID: 20001450 Result: Down-regulated in Transcription
  misc_feature: MA Experiment 20001450 PARAMETER Experiment Name: At_Far-red-induction_P Parameter: Age (day) Value: 7
  misc_feature: MA Experiment 20001450 PARAMETER Experiment Name: At_Far-red-induction_P Parameter: Light Value: Far-red vs. White
  misc_feature: MA Experiment 20001450 PARAMETER Experiment Name: At_Far-red-induction_P Parameter: Organism Value: A. thaliana
  misc_feature: MA Experiment 20001450 PARAMETER Experiment Name: At_Far-red-induction_P Parameter: Plant Line Value: Columbia
  misc_feature: MA Experiment 20001450 PARAMETER Experiment Name: At_Far-red-induction_P Parameter: Timepoint (hr) Value: 8
  misc_feature: MA Experiment 20001450 PARAMETER Experiment Name: At_Far-red-induction_P Parameter: Tissue Value: Whole Plant
  misc_feature: MA Experiment ID: 20001560 Result: Up-regulated in Transcription
  misc_feature: MA Experiment 20001560 PARAMETER Experiment Name: At_Drought_Soil_Dry_P Parameter: Age (day) Value: 28
  misc_feature: MA Experiment 20001560 PARAMETER Experiment Name: At_Drought_Soil_Dry_P Parameter: Organism Value: A. thaliana
  misc_feature: MA Experiment 20001560 PARAMETER Experiment Name: At_Drought_Soil_Dry_P Parameter: Plant Line Value: WS
  misc_feature: MA Experiment 20001560 PARAMETER Experiment Name: At_Drought_Soil_Dry_P Parameter: Post Timepoint (hr) Value: None
  misc_feature: MA Experiment 20001560 PARAMETER Experiment Name: At_Drought_Soil_Dry_P Parameter: Post-Treatment Value: None
  misc_feature: MA Experiment 20001560 PARAMETER Experiment Name: At_Drought_Soil_Dry_P Parameter: Timepoint (day) Value: 14
  misc_feature: MA Experiment 20001560 PARAMETER Experiment Name: At_Drought_Soil_Dry_P Parameter: Treatment Value: Drought vs. No Drought
  misc_feature: MA Experiment ID: 20001904 Result: Up-regulated in Transcription
  misc_feature: MA Experiment 20001904 PARAMETER Experiment Name: At_Drought_Reproduction_P Parameter: Age (day) Value: 37
  misc_feature: MA Experiment 20001904 PARAMETER Experiment Name: At_Drought_Reproduction_P Parameter: Organism Value: A. thaliana
  misc_feature: MA Experiment 20001904 PARAMETER Experiment Name: At_Drought_Reproduction_P Parameter: Plant Line Value: WS
  misc_feature: MA Experiment 20001904 PARAMETER Experiment Name: At_Drought_Reproduction_P Parameter: Timepoint (day) Value: 7
  misc_feature: MA Experiment 20001904 PARAMETER Experiment Name: At_Drought_Reproduction_P Parameter: Tissue Value: Rosettes
  misc_feature: MA Experiment 20001904 PARAMETER Experiment Name: At_Drought_Reproduction_P Parameter: Treatment Value: Drought vs. No Drought
atcatcactttggtcggccgctttcttccttccttcctcctcaaataatctaccacatatatacatccctcttagtttctctgtggatccattgagacatatatcataagtaacaatggtgccataccaagaactcactcttcagagaagcttcagctacaactcaagaaagatcaatccagtgacttctccggcgcgtagctcacacgttcgttctccttcttcctccgccttaatcccaagcatacctgagcacgaactcttcctcgttccttgccggagatgctcctatgtccctctctcctcctcatcgtcggcctctcacaatatcgggaaatttcacttgaagttttctttgctcttgcgttctttcatcaacatcattaacatccccgcttgcaaaatgctctctcttccctctccgccgtcttcttcttccagcgtctctaaccaactgatctcactcgttaccggtggatcctcttctctcgggagaagagtcaccgggactctgtacggacacaaaagaggccacgtcacgttttcggtccagtacaaccaaagatccgacccggtcttgctcctcgacctggccatgtcaacggcaactctcgtcaaagagatgtcgtcggggctcgtcaggatcgcgttggagtgcgagaagcgtcatcgatcaggtacgaagcttttccaagagcccaaatggacgatgtactgcaacgggaggaagtgcggctacgctgtgtcacgtggcggcgcgtgtactgatacagattggcgcgtgttgaacacggtatctagggttactgttggagccggagttattccgacgccgaaaactattgatgacgtgtccggtgttggtagtggaacggagcttggtgagttgttgtatatgagaggcaaatttgaacgagtcgttgggagccgtgactcggaggcgttttacatgatgaacccggacaaaaacggaggtccagaactcagtatttttcttcttagaatataataaagaataaaatggtttttaaagagaatttgacttcttaaaagtttgaaaatgtctttaaatgacgtattattatgtatatgtaatatgattgcaatgttgtgtcatgagatatatgtaagcgatattgatatgaaagaaagagagaggggcctagagtatgataaggttttgtttttctagttgtttatttgatgtgtggtatttttgtatctttgttattgatcaataagaagt

SEQ ID NO: 23097 - protein, 297 aa, Arabidopsis thaliana
  peptide (1)..(297): Ceres Seq. ID no. 12396642
  misc_feature (128)..(297): Pfam Name: Protein of unknown function, DUF617 Pfam Description: Protein of unknown function, DUF617
  misc_feature (50)..(296): Homolog of NCBI NO: 18404579 NR Description: expressed protein
  misc_feature (28)..(297): Homolog of NCBI NO: 15227126 NR Description: hypothetical protein; protein id: At2g21990.1
  misc_feature (93)..(297): Homolog of NCBI NO: 34909066 NR Description: P0702B09.30 [Oryza sativa (japonica
  misc_feature (126)..(297): Homolog of NCBI NO: 15240220 NR Description: putative protein; protein id: At5g06990.1
  misc_feature (122)..(297): Homolog of NCBI NO: 15230862 NR Description: hypothetical protein; protein id: At3g25640.1
  misc_feature (122)..(297): Homolog of NCBI NO: 11994755 NR Description: gb|AAB84348.1~gene_id:T5M7.9~similar to unknown
  misc_feature (122)..(183): Homolog of NCBI NO: 15237221 NR Description: putative protein; protein id: At5g23100.1
  misc_feature (190)..(297): Homolog of NCBI NO: 15237221 NR Description: putative protein; protein id: At5g23100.1
  misc_feature (1)..(297): Homolog of NCBI NO: 21593037 NR Description: unknown [Arabidopsis thaliana]
  misc_feature (1)..(297): Homolog of NCBI NO: 18405770 NR Description: expressed protein
MVPYQELTLQRSFSYNSRKINPVTSPARSSHVRSPSSSALIPSIPEHELFLVPCRRCSYVPLSSSSSASHNIGKFHLKFSLLLRSFINIINIPACKMLSLPSPPSSSSSVSNQLISLVTGGSSSLGRRVTGTLYGHKRGHVTFSVQYNQRSDPVLLLDLAMSTATLVKEMSSGLVRIALECEKRHRSGTKLFQEPKWTMYCNGRKCGYAVSRGGACTDTDWRVLNTVSRVTVGAGVIPTPKTIDDVSGVGSGTELGELLYMRGKFERVVGSRDSEAFYMMNPDKNGGPELSIFLLRI

SEQ ID NO: 23098 - protein, 201 aa, Arabidopsis thaliana
  peptide (1)..(201): Ceres Seq. ID no. 12396643
  misc_feature (32)..(201): Pfam Name: Protein of unknown function, DUF617 Pfam Description: Protein of unknown function, DUF617
  misc_feature (1)..(200): Homolog of NCBI NO: 18404579 NR Description: expressed protein
  misc_feature (1)..(201): Homolog of NCBI NO: 15227126 NR Description: hypothetical protein; protein id: At2g21990.1
  misc_feature (1)..(201): Homolog of NCBI NO: 34909066 NR Description: P0702B09.30 [Oryza sativa (japonica
  misc_feature (30)..(201): Homolog of NCBI NO: 15240220 NR Description: putative protein; protein id: At5g06990.1
  misc_feature (26)..(201): Homolog of NCBI NO: 15230862 NR Description: hypothetical protein; protein id: At3g25640.1
  misc_feature (26)..(201): Homolog of NCBI NO: 11994755 NR Description: gb|AAB84348.1~gene_id:T5M7.9~similar to unknown
  misc_feature (26)..(87): Homolog of NCBI NO: 15237221 NR Description: putative protein; protein id: At5g23100.1
  misc_feature (94)..(201): Homolog of NCBI NO: 15237221 NR Description: putative protein; protein id: At5g23100.1
  misc_feature (1)..(201): Homolog of NCBI NO: 21593037 NR Description: unknown [Arabidopsis thaliana]
  misc_feature (1)..(201): Homolog of NCBI NO: 18405770 NR Description: expressed protein
MLSLPSPPSSSSSVSNQLISLVTGGSSSLGRRVTGTLYGHKRGHVTFSVQYNQRSDPVLLLDLAMSTATLVKEMSSGLVRIALECEKRHRSGTKLFQEPKWTMYCNGRKCGYAVSRGGACTDTDWRVLNTVSRVTVGAGVIPTPKTIDDVSGVGSGTELGELLYMRGKFERVVGSRDSEAFYMMNPDKNGGPELSIFLLRI

SEQ ID NO: 23099 - DNA, 1541 bp, Arabidopsis thaliana
  misc_feature (1)..(1541): Ceres Seq. ID no. 12325212
  misc_feature: MA Experiment ID: 108434 Result: Up-regulated in Transcription
  misc_feature: MA Experiment 108434 PARAMETER Experiment Name: At_Root_Tips_cDNA_P Parameter: Tissue Value: Root Tips
  misc_feature: MA Experiment ID: 108461 Result: Up-regulated in Transcription
  misc_feature: MA Experiment 108461 PARAMETER Experiment Name: At_Germinating_Seeds_cDNA_P Parameter: Age (day) Value: 1 vs. 0
  misc_feature: MA Experiment 108461 PARAMETER Experiment Name: At_Germinating_Seeds_cDNA_P Parameter: Tissue Value: Germinating Seeds
  misc_feature: MA Experiment ID: 108462 Result: Up-regulated in Transcription
  misc_feature: MA Experiment 108462 PARAMETER Experiment Name: At_Germinating_Seeds_cDNA_P Parameter: Age (day) Value: 2 vs. 0
  misc_feature: MA Experiment 108462 PARAMETER Experiment Name: At_Germinating_Seeds_cDNA_P Parameter: Tissue Value: Germinating Seeds
  misc_feature: MA Experiment ID: 108463 Result: Up-regulated in Transcription
  misc_feature: MA Experiment 108463 PARAMETER Experiment Name: At_Germinating_Seeds_cDNA_P Parameter: Age (day) Value: 3 vs. 0
  misc_feature: MA Experiment 108463 PARAMETER Experiment Name: At_Germinating_Seeds_cDNA_P Parameter: Tissue Value: Germinating Seeds
  misc_feature: MA Experiment ID: 108573 Result: Up-regulated in Transcription
  misc_feature: MA Experiment 108573 PARAMETER Experiment Name: At_Drought_cDNA_P Parameter: Timepoint (hr) Value: 6
  misc_feature: MA Experiment 108573 PARAMETER Experiment Name: At_Drought_cDNA_P Parameter: Tissue Value: Aerial
  misc_feature: MA Experiment 108573 PARAMETER Experiment Name: At_Drought_cDNA_P Parameter: Treatment Value: Drought vs. No Drought
  misc_feature: MA Experiment ID: 108579 Result: Down-regulated in Transcription
  misc_feature: MA Experiment 108579 PARAMETER Experiment Name: At_4deg_Cold_cDNA_P Parameter: Temperature (deg C) Value: 4 vs. 22
  misc_feature: MA Experiment 108579 PARAMETER Experiment Name: At_4deg_Cold_cDNA_P Parameter: Timepoint (hr) Value: 6
  misc_feature: MA Experiment 108579 PARAMETER Experiment Name: At_4deg_Cold_cDNA_P Parameter: Tissue Value: Aerial
  misc_feature: MA Experiment ID: 20000113 Result: Down-regulated in Transcription
  misc_feature: MA Experiment 20000113 PARAMETER Experiment Name: At_42deg_Heat_cDNA_P Parameter: Temperature (deg C) Value: 42 vs. 22
  misc_feature: MA Experiment 20000113 PARAMETER Experiment Name: At_42deg_Heat_cDNA_P Parameter: Timepoint (hr) Value: 8
  misc_feature: MA Experiment 20000113 PARAMETER Experiment Name: At_42deg_Heat_cDNA_P Parameter: Tissue Value: Aerial
  misc_feature: MA Experiment ID: 20000180 Result: Up-regulated in Transcription
  misc_feature: MA Experiment 20000180 PARAMETER Experiment Name: At_Germinating_Seeds_P Parameter: Age (hr) Value: 24 vs. 0
  misc_feature: MA Experiment 20000180 PARAMETER Experiment Name: At_Germinating_Seeds_P Parameter: Tissue Value: Germinating Seeds
  misc_feature: Phenotype: ROSETTE LEAVES Shape-Serrate
  misc_feature: Phenotype: WHOLE PLANT Color-Dark Green
  misc_feature: Phenotype: WHOLE PLANT Color-Dark Green
  misc_feature: Phenotype: WHOLE PLANT Color-Dark Green
  misc_feature: Phenotype: INFLORESCENCE Height-Short
  misc_feature: Phenotype: INFLORESCENCE Other
  misc_feature: Phenotype: SILIQUES Shape-Bent
  misc_feature: Phenotype: SILIQUES Other
ctctttcgaactctccgtcacttccatttcatttctatttgaatcttctcaaagctacacagatctctggaatcgaaaaagcttgagctgtgttaatggcggaggagaaatgggtggtgatggtgacggcgcagactccaacgaatatcgccgtgattaagtattggggaaagagagatgaggttcggattcttcccattaatgatagcattagcgtcacgcttgatcctgatcacctctgtactctcaccaccgtcgctgttagtccttcctttgatcgagatcgaatgtggctcaatggcaaggaaatctcgctttctggaagtaggtaccagaattgcttgagggaaattcgaagtcgtgctgatgatgtagaagataaagaaaagggtatcaagattgcgaagaaagattgggagaagctgcatctgcacattgcttctcataacaacttccctactgctgctggcttagcatcttctgctgctggttttgcttgcttagtttttgctcttgccaagttgatgaatgtaaatgaagatccaagccaactttctgctatagcaaggcaaggttcaggaagtgcttgccgtagtttatttgggggatttgtcaagtggaatatgggaaacaaagaagatggaagtgacagtgttgcagttcaactggtagatgataagcactgggatgatcttgttatcattattgctgtggttagttcacgacagaaggaaacaagcagcacctcgggaatgcgtgagagtgttgagacaagtttgcttttacagcatagagcaaaggaagttgtcccagtacggattttgcaaatggaagaagctataaagaatcgagatttcacatcttttacaaaattgacgtgttcagacagtaatcagtttcatgctgtttgtatggatacatctccacccatattctacatgaatgacacctcccacaggataatcagcttagttgaaaagtggaaccgttctgccggtacaccagagattgcttatacatttgatgctggcccaaatgcagtcatgattgcaagaaacaggaaagtagcagttgaattgctgcaggggctgctctactgcttccctcctaagcctgacacagacatgaagagttacgtactgggggatacatcgatagtaaaagaggcaggcttggaaggagagcttccacaaggaattaaagacaaaattggaagtcaggatcaaaaaggtgaagtgagttattttatatgcagcagacctggaagaggtcctgtggtgcttcaagaccaaactcaagctcttctccatcctcaaactggcctccccaaataaccatttctatgtcttgttgttacttcaactctgagatttgcaacagcttcatcttttgctttgccagctccaactcttgtcctaagagagcactcttctgaatcttttcccaattatttgtgtttacgtacaattcttctgcatcgggtgcaaaaaacaaaacaatcaatattgcaaacgaataagatcttgatgctaaatctgagt

SEQ ID NO: 23100 - protein, 412 aa, Arabidopsis thaliana
  peptide (1)..(412): Ceres Seq. ID no. 12325213
  misc_feature (1)..(412): Homolog of NCBI NO: 21593243 NR Description: diphosphomevalonate decarboxylase-like protein
  misc_feature (1)..(412): Homolog of NCBI NO: 18410026 NR Description: DIPHOSPHOMEVALONATE DECARBOXYLASE - like protein
  misc_feature (9)..(412): Homolog of NCBI NO: 21593039 NR Description: mevalonate diphosphate decarboxylase [Arabidopsis
  misc_feature (1)..(412): Homolog of NCBI NO: 15224931 NR Description: mevalonate diphosphate decarboxylase
  misc_feature (1)..(412): Homolog of NCBI NO: 26354448 NR Description: unnamed protein product [Mus musculus]
  misc_feature (1)..(412): Homolog of NCBI NO: 20149736 NR Description: mevalonate (diphospho) decarboxylase
  misc_feature (1)..(412): Homolog of NCBI NO: 30584105 NR Description: Homo sapiens mevalonate (diphospho) decarboxylase
  misc_feature (1)..(412): Homolog of NCBI NO: 4505289 NR Description: diphosphomevalonate decarboxylase
  misc_feature (4)..(412): Homolog of NCBI NO: 16417950 NR Description: mevalonate disphosphate decarboxylase [Hevea
  misc_feature (1)..(412): Homolog of NCBI NO: 11281655 NR Description: diphosphomevalonate decarboxylase (EC 4.1.1.33)
MAEEKWVVMVTAQTPTNIAVIKYWGKRDEVRILPINDSISVTLDPDHLCTLTTVAVSPSFDRDRMWLNGKEISLSGSRYQNCLREIRSRADDVEDKEKGIKIAKKDWEKLHLHIASHNNFPTAAGLASSAAGFACLVFALAKLMNVNEDPSQLSAIARQGSGSACRSLFGGFVKWNMGNKEDGSDSVAVQLVDDKHWDDLVIIIAVVSSRQKETSSTSGMRESVETSLLLQHRAKEVVPVRILQMEEAIKNRDFTSFTKLTCSDSNQFHAVCMDTSPPIFYMNDTSHRIISLVEKWNRSAGTPEIAYTFDAGPNAVMIARNRKVAVELLQGLLYCFPPKPDTDMKSYVLGDTSIVKEAGLEGELPQGIKDKIGSQDQKGEVSYFICSRPGRGPVVLQDQTQALLHPQTGLPK

SEQ ID NO: 23101 - protein, 404 aa, Arabidopsis thaliana
  peptide (1)..(404): Ceres Seq. ID no. 12325214
  misc_feature (1)..(404): Homolog of NCBI NO: 26354448 NR Description: unnamed protein product [Mus musculus]
  misc_feature (1)..(404): Homolog of NCBI NO: 20149736 NR Description: mevalonate (diphospho) decarboxylase
  misc_feature (1)..(404): Homolog of NCBI NO: 30584105 NR Description: Homo sapiens mevalonate (diphospho) decarboxylase
  misc_feature (1)..(404): Homolog of NCBI NO: 4505289 NR Description: diphosphomevalonate decarboxylase
  misc_feature (1)..(404): Homolog of NCBI NO: 16417950 NR Description: mevalonate disphosphate decarboxylase [Hevea
  misc_feature (1)..(404): Homolog of NCBI NO: 11281655 NR Description: diphosphomevalonate decarboxylase (EC 4.1.1.33)
  misc_feature (1)..(404): Homolog of NCBI NO: 21593243 NR Description: diphosphomevalonate decarboxylase-like protein
  misc_feature (1)..(404): Homolog of NCBI NO: 18410026 NR Description: DIPHOSPHOMEVALONATE DECARBOXYLASE - like protein
  misc_feature (1)..(404): Homolog of NCBI NO: 21593039 NR Description: mevalonate diphosphate decarboxylase [Arabidopsis
  misc_feature (1)..(404): Homolog of NCBI NO: 15224931 NR Description: mevalonate diphosphate decarboxylase
MVTAQTPTNIAVIKYWGKRDEVRILPINDSISVTLDPDHLCTLTTVAVSPSFDRDRMWLNGKEISLSGSRYQNCLREIRSRADDVEDKEKGIKIAKKDWEKLHLHIASHNNFPTAAGLASSAAGFACLVFALAKLMNVNEDPSQLSAIARQGSGSACRSLFGGFVKWNMGNKEDGSDSVAVQLVDDKHWDDLVIIIAVVSSRQKETSSTSGMRESVETSLLLQHRAKEVVPVRILQMEEAIKNRDFTSFTKLTCSDSNQFHAVCMDTSPPIFYMNDTSHRIISLVEKWNRSAGTPEIAYTFDAGPNAVMIARNRKVAVELLQGLLYCFPPKPDTDMKSYVLGDTSIVKEAGLEGELPQGIKDKIGSQDQKGEVSYFICSRPGRGPVVLQDQTQALLHPQTGLPK

SEQ ID NO: 23102 - protein, 348 aa, Arabidopsis thaliana
  peptide (1)..(348): Ceres Seq. ID no. 12325215
  misc_feature (1)..(348): Homolog of NCBI NO: 26354448 NR Description: unnamed protein product [Mus musculus]
  misc_feature (1)..(348): Homolog of NCBI NO: 20149736 NR Description: mevalonate (diphospho) decarboxylase
  misc_feature (1)..(348): Homolog of NCBI NO: 30584105 NR Description: Homo sapiens mevalonate (diphospho) decarboxylase
  misc_feature (1)..(348): Homolog of NCBI NO: 4505289 NR Description: diphosphomevalonate decarboxylase
  misc_feature (1)..(348): Homolog of NCBI NO: 16417950 NR Description: mevalonate disphosphate decarboxylase [Hevea
  misc_feature (1)..(348): Homolog of NCBI NO: 11281655 NR Description: diphosphomevalonate decarboxylase (EC 4.1.1.33)
  misc_feature (1)..(348): Homolog of NCBI NO: 21593243 NR Description: diphosphomevalonate decarboxylase-like protein
  misc_feature (1)..(348): Homolog of NCBI NO: 18410026 NR Description: DIPHOSPHOMEVALONATE DECARBOXYLASE - like protein
  misc_feature (1)..(348): Homolog of NCBI NO: 21593039 NR Description: mevalonate diphosphate decarboxylase [Arabidopsis
  misc_feature (1)..(348): Homolog of NCBI NO: 15224931 NR Description: mevalonate diphosphate decarboxylase
MWLNGKEISLSGSRYQNCLREIRSRADDVEDKEKGIKIAKKDWEKLHLHIASHNNFPTAAGLASSAAGFACLVFALAKLMNVNEDPSQLSAIARQGSGSACRSLFGGFVKWNMGNKEDGSDSVAVQLVDDKHWDDLVIIIAVVSSRQKETSSTSGMRESVETSLLLQHRAKEVVPVRILQMEEAIKNRDFTSFTKLTCSDSNQFHAVCMDTSPPIFYMNDTSHRIISLVEKWNRSAGTPEIAYTFDAGPNAVMIARNRKVAVELLQGLLYCFPPKPDTDMKSYVLGDTSIVKEAGLEGELPQGIKDKIGSQDQKGEVSYFICSRPGRGPVVLQDQTQALLHPQTGLPK

SEQ ID NO: 23103 - DNA, 1164 bp, Arabidopsis thaliana
  misc_feature (1)..(1164): Ceres Seq. ID no. 12327388
  misc_feature: MA Experiment ID: 108434 Result: Up-regulated in Transcription
  misc_feature: MA Experiment 108434 PARAMETER Experiment Name: At_Root_Tips_cDNA_P Parameter: Tissue Value: Root Tips
  misc_feature: MA Experiment ID: 108461 Result: Down-regulated in Transcription
  misc_feature: MA Experiment 108461 PARAMETER Experiment Name: At_Germinating_Seeds_cDNA_P Parameter: Age (day) Value: 1 vs. 0
  misc_feature: MA Experiment 108461 PARAMETER Experiment Name: At_Germinating_Seeds_cDNA_P Parameter: Tissue Value: Germinating Seeds
  misc_feature: MA Experiment ID: 108462 Result: Down-regulated in Transcription
  misc_feature: MA Experiment 108462 PARAMETER Experiment Name: At_Germinating_Seeds_cDNA_P Parameter: Age (day) Value: 2 vs. 0
  misc_feature: MA Experiment 108462 PARAMETER Experiment Name: At_Germinating_Seeds_cDNA_P Parameter: Tissue Value: Germinating Seeds
  misc_feature: MA Experiment ID: 108463 Result: Down-regulated in Transcription
  misc_feature: MA Experiment 108463 PARAMETER Experiment Name: At_Germinating_Seeds_cDNA_P Parameter: Age (day) Value: 3 vs. 0
  misc_feature: MA Experiment 108463 PARAMETER Experiment Name: At_Germinating_Seeds_cDNA_P Parameter: Tissue Value: Germinating Seeds
  misc_feature: MA Experiment ID: 108464 Result: Down-regulated in Transcription
  misc_feature: MA Experiment 108464 PARAMETER Experiment Name: At_Germinating_Seeds_cDNA_P Parameter: Age (day) Value: 4 vs. 0
  misc_feature: MA Experiment 108464 PARAMETER Experiment Name: At_Germinating_Seeds_cDNA_P Parameter: Tissue Value: Germinating Seeds
  misc_feature: MA Experiment ID: 20001451 Result: Down-regulated in Transcription
  misc_feature: MA Experiment 20001451 PARAMETER Experiment Name: At_Far-red-induction_P Parameter: Age (day) Value: 7
  misc_feature: MA Experiment 20001451 PARAMETER Experiment Name: At_Far-red-induction_P Parameter: Light Value: Far-red vs. White
  misc_feature: MA Experiment 20001451 PARAMETER Experiment Name: At_Far-red-induction_P Parameter: Organism Value: A. thaliana
  misc_feature: MA Experiment 20001451 PARAMETER Experiment Name: At_Far-red-induction_P Parameter: Plant Line Value: Columbia
  misc_feature: MA Experiment 20001451 PARAMETER Experiment Name: At_Far-red-induction_P Parameter: Timepoint (hr) Value: 24
  misc_feature: MA Experiment 20001451 PARAMETER Experiment Name: At_Far-red-induction_P Parameter: Tissue Value: Whole Plant
aagttgggaatcgtttactgtgaaataaaaacgagagagagtttttgaagaagaagaaagaacactcacaagatccagaaaaaggtaaaagatggcgagatacgatcgagcaatcactgtattctcccccgatggtcacctcttccaagtagagtatgccctagaagccgtccgaaagggtaacgccgccgtcggagtccgcggcacagatactgtcgtcctcgccgtcgaaaagaaatccacccctaagctccaggattccagatcagcaaggaagatagtgagccttgataatcacattgcattggcctgtgctggactgaaagcagatgctcgtgtcttgataaacaaggcgaggatagagtgtcaaagccacaggcttacgttggaggacccagttactgttgagtacattactcggtacatagcagggcttcaacagaagtatactcaaagtggtggtgtgaggccttttggtctttccactcttattgttgggtttgatccctacactcgtatacccgcgctttatcagaccgatccatctggtacattctctgcttggaaagctaatgcaactgggagaaactctaactcaattagggagtttctggagaaaaactacaaagaaagcgctggccaagaaactgttaagcttgctatccgtgctctgcttgaggttgttgagagtgggggaaagaacattgaggttgctgtaatgacacgagaggaaggtgttctgaagcaactagaagaagaagaaattgatatcattgtggctgagatcgaagcagagaaggctgcagctgaagcagccaagaaaggccctgcgaaggaaacatgaaccagatcttaaagtagcggtctcagattatgagttgtaatgctggttcaaagtcagggatattcaagggttgaatagaaaatctagaccgcatgaaatggtttgttggattactagcctatttgacactgttgctttaaatcttaaatgacattttagcggagtttcgatacttgtcagttggaactatggcatgttcagtattctagatgactttgcatttgcgctcaagagttgtagattttgattttggaaacgttgtttcttactaaacatgtctctcttcttattatctccattgtgtaacttaccgttttttt

SEQ ID NO: 23104 - protein, 250 aa, Arabidopsis thaliana
  peptide (1)..(250): Ceres Seq. ID no. 12327389
  misc_feature (27)..(210): Pfam Name: Proteasome A-type and B-type Pfam Description: Proteasome A-type and B-type
  misc_feature (2)..(250): Homolog of NCBI NO: 12229928 NR Description: Proteasome subunit alpha type 7 (Proteasome
  misc_feature (35)..(250): Homolog of NCBI NO: 14594917 NR Description: putative alpha4 proteasome subunit [Nicotiana
  misc_feature (1)..(250): Homolog of NCBI NO: 12644044 NR Description: Proteasome subunit alpha type 7 (20S proteasome
  misc_feature (1)..(235): Homolog of NCBI NO: 2511580 NR Description: multicatalytic endopeptidase [Arabidopsis
  misc_feature (1)..(250): Homolog of NCBI NO: 7435885 NR Description: probable C 3.4.25.1 proteasome endopeptidase
  misc_feature (1)..(244): Homolog of NCBI NO: 3334299 NR Description: Proteasome subunit alpha type 7 (20S proteasome
  misc_feature (1)..(250): Homolog of NCBI NO: 12229936 NR Description: Proteasome subunit alpha type 7 (20S proteasome
  misc_feature (1)..(250): Homolog of NCBI NO: 15239271 NR Description: 20S proteasome alpha subunit D2 (PAD2)
  misc_feature (1)..(250): Homolog of NCBI NO: 21593040 NR Description: multicatalytic endopeptidase complex  alpha chain
  misc_feature (1)..(250): Homolog of NCBI NO: 15230435 NR Description: 20S proteasome alpha subunit D (PAD1)
MARYDRAITVFSPDGHLFQVEYALEAVRKGNAAVGVRGTDTVVLAVEKKSTPKLQDSRSARKIVSLDNHIALACAGLKADARVLINKARIECQSHRLTLEDPVTVEYITRYIAGLQQKYTQSGGVRPFGLSTLIVGFDPYTRIPALYQTDPSGTFSAWKANATGRNSNSIREFLEKNYKESAGQETVKLAIRALLEVVESGGKNIEVAVMTREEGVLKQLEEEEIDIIVAEIEAEKAAAEAAKKGPAKET

SEQ ID NO: 23105 - DNA, 1245 bp, Arabidopsis thaliana
  misc_feature (1)..(1245): Ceres Seq. ID no. 12714490
  misc_feature: MA Experiment ID: 108488 Result: Down-regulated in Transcription
  misc_feature: MA Experiment ID: 108561 Result: Up-regulated in Transcription
  misc_feature: MA Experiment 108561 PARAMETER Experiment Name: At_100uM_ABA_cDNA_P Parameter: Timepoint (hr) Value: 6
  misc_feature: MA Experiment 108561 PARAMETER Experiment Name: At_100uM_ABA_cDNA_P Parameter: Tissue Value: Aerial
  misc_feature: MA Experiment 108561 PARAMETER Experiment Name: At_100uM_ABA_cDNA_P Parameter: Treatment Value: 100uM ABA vs. No Treatment
  misc_feature: MA Experiment ID: 108573 Result: Up-regulated in Transcription
  misc_feature: MA Experiment 108573 PARAMETER Experiment Name: At_Drought_cDNA_P Parameter: Timepoint (hr) Value: 6
  misc_feature: MA Experiment 108573 PARAMETER Experiment Name: At_Drought_cDNA_P Parameter: Tissue Value: Aerial
  misc_feature: MA Experiment 108573 PARAMETER Experiment Name: At_Drought_cDNA_P Parameter: Treatment Value: Drought vs. No Drought
  misc_feature: MA Experiment ID: 108607 Result: Up-regulated in Transcription
  misc_feature: MA Experiment 108607 PARAMETER Experiment Name: At_100uM_ABA_cDNA_P Parameter: Timepoint (hr) Value: 4
  misc_feature: MA Experiment 108607 PARAMETER Experiment Name: At_100uM_ABA_cDNA_P Parameter: Tissue Value: Aerial
  misc_feature: MA Experiment 108607 PARAMETER Experiment Name: At_100uM_ABA_cDNA_P Parameter: Treatment Value: 100uM ABA vs. No Treatment
  misc_feature: MA Experiment ID: 20000069 Result: Up-regulated in Transcription
  misc_feature: MA Experiment 20000069 PARAMETER Experiment Name: At_100uM_ABA_Mutants_cDNA_P Parameter: Plant Line Value: CS23
  misc_feature: MA Experiment 20000069 PARAMETER Experiment Name: At_100uM_ABA_Mutants_cDNA_P Parameter: Timepoint (hr) Value: 6
  misc_feature: MA Experiment 20000069 PARAMETER Experiment Name: At_100uM_ABA_Mutants_cDNA_P Parameter: Tissue Value: Aerial
  misc_feature: MA Experiment 20000069 PARAMETER Experiment Name: At_100uM_ABA_Mutants_cDNA_P Parameter: Treatment Value: 100uM ABA vs. No Treatment
  misc_feature: MA Experiment ID: 20000070 Result: Up-regulated in Transcription
  misc_feature: MA Experiment 20000070 PARAMETER Experiment Name: At_100uM_ABA_Mutants_cDNA_P Parameter: Plant Line Value: CS24
  misc_feature: MA Experiment 20000070 PARAMETER Experiment Name: At_100uM_ABA_Mutants_cDNA_P Parameter: Timepoint (hr) Value: 6
  misc_feature: MA Experiment 20000070 PARAMETER Experiment Name: At_100uM_ABA_Mutants_cDNA_P Parameter: Tissue Value: Aerial
  misc_feature: MA Experiment 20000070 PARAMETER Experiment Name: At_100uM_ABA_Mutants_cDNA_P Parameter: Treatment Value: 100uM ABA vs. No Treatment
  misc_feature: MA Experiment ID: 20000071 Result: Up-regulated in Transcription
  misc_feature: MA Experiment 20000071 PARAMETER Experiment Name: At_100uM_ABA_Mutants_cDNA_P Parameter: Plant Line Value: CS8104
  misc_feature: MA Experiment 20000071 PARAMETER Experiment Name: At_100uM_ABA_Mutants_cDNA_P Parameter: Timepoint (hr) Value: 6
  misc_feature: MA Experiment 20000071 PARAMETER Experiment Name: At_100uM_ABA_Mutants_cDNA_P Parameter: Tissue Value: Aerial
  misc_feature: MA Experiment 20000071 PARAMETER Experiment Name: At_100uM_ABA_Mutants_cDNA_P Parameter: Treatment Value: 100uM ABA vs. No Treatment
  misc_feature: MA Experiment ID: 20000072 Result: Up-regulated in Transcription
  misc_feature: MA Experiment 20000072 PARAMETER Experiment Name: At_100uM_ABA_Mutants_cDNA_P Parameter: Plant Line Value: CS8105
  misc_feature: MA Experiment 20000072 PARAMETER Experiment Name: At_100uM_ABA_Mutants_cDNA_P Parameter: Timepoint (hr) Value: 6
  misc_feature: MA Experiment 20000072 PARAMETER Experiment Name: At_100uM_ABA_Mutants_cDNA_P Parameter: Tissue Value: Aerial
  misc_feature: MA Experiment 20000072 PARAMETER Experiment Name: At_100uM_ABA_Mutants_cDNA_P Parameter: Treatment Value: 100uM ABA vs. No Treatment
  misc_feature: MA Experiment ID: 20000086 Result: Up-regulated in Transcription
  misc_feature: MA Experiment 20000086 PARAMETER Experiment Name: At_100uM_ABA_Mutants_cDNA_P Parameter: Plant Line Value: CS22
  misc_feature: MA Experiment 20000086 PARAMETER Experiment Name: At_100uM_ABA_Mutants_cDNA_P Parameter: Timepoint (hr) Value: 6
  misc_feature: MA Experiment 20000086 PARAMETER Experiment Name: At_100uM_ABA_Mutants_cDNA_P Parameter: Tissue Value: Aerial
  misc_feature: MA Experiment 20000086 PARAMETER Experiment Name: At_100uM_ABA_Mutants_cDNA_P Parameter: Treatment Value: 100uM ABA vs. No Treatment
  misc_feature: MA Experiment ID: 20000087 Result: Up-regulated in Transcription
  misc_feature: MA Experiment 20000087 PARAMETER Experiment Name: At_100uM_ABA_Mutants_cDNA_P Parameter: Plant Line Value: WS
  misc_feature: MA Experiment 20000087 PARAMETER Experiment Name: At_100uM_ABA_Mutants_cDNA_P Parameter: Timepoint (hr) Value: 6
  misc_feature: MA Experiment 20000087 PARAMETER Experiment Name: At_100uM_ABA_Mutants_cDNA_P Parameter: Tissue Value: Aerial
  misc_feature: MA Experiment 20000087 PARAMETER Experiment Name: At_100uM_ABA_Mutants_cDNA_P Parameter: Treatment Value: 100uM ABA vs. No Treatment
  misc_feature: MA Experiment ID: 20000088 Result: Up-regulated in Transcription
  misc_feature: MA Experiment 20000088 PARAMETER Experiment Name: At_100uM_ABA_Mutants_cDNA_P Parameter: Plant Line Value: Landsberg
  misc_feature: MA Experiment 20000088 PARAMETER Experiment Name: At_100uM_ABA_Mutants_cDNA_P Parameter: Timepoint (hr) Value: 6
  misc_feature: MA Experiment 20000088 PARAMETER Experiment Name: At_100uM_ABA_Mutants_cDNA_P Parameter: Tissue Value: Aerial
  misc_feature: MA Experiment 20000088 PARAMETER Experiment Name: At_100uM_ABA_Mutants_cDNA_P Parameter: Treatment Value: 100uM ABA vs. No Treatment
  misc_feature: MA Experiment ID: 20000117 Result: Up-regulated in Transcription
  misc_feature: MA Experiment 20000117 PARAMETER Experiment Name: At_100uM_ABA_Mutants_cDNA_P Parameter: Plant Line Value: Columbia
  misc_feature: MA Experiment 20000117 PARAMETER Experiment Name: At_100uM_ABA_Mutants_cDNA_P Parameter: Timepoint (hr) Value: 6
  misc_feature: MA Experiment 20000117 PARAMETER Experiment Name: At_100uM_ABA_Mutants_cDNA_P Parameter: Tissue Value: Aerial
  misc_feature: MA Experiment 20000117 PARAMETER Experiment Name: At_100uM_ABA_Mutants_cDNA_P Parameter: Treatment Value: 100uM ABA vs. No Treatment
  misc_feature: MA Experiment ID: 20000184 Result: Down-regulated in Transcription
  misc_feature: MA Experiment 20000184 PARAMETER Experiment Name: At_Shoots__P Parameter: Age (day) Value: 7
  misc_feature: MA Experiment 20000184 PARAMETER Experiment Name: At_Shoots__P Parameter: Tissue Value: Shoots vs. Whole Plant
  misc_feature: MA Experiment ID: 20000185 Result: Down-regulated in Transcription
  misc_feature: MA Experiment 20000185 PARAMETER Experiment Name: At_Roots__P Parameter: Age (day) Value: 7 vs. 21
  misc_feature: MA Experiment 20000185 PARAMETER Experiment Name: At_Roots__P Parameter: Organism Value: A. thaliana
  misc_feature: MA Experiment 20000185 PARAMETER Experiment Name: At_Roots__P Parameter: Tissue Value: Roots vs. Whole Plant
  misc_feature: MA Experiment ID: 20000234 Result: Down-regulated in Transcription
  misc_feature: MA Experiment 20000234 PARAMETER Experiment Name: At_Siliques_P Parameter: Age (day) Value: 21
  misc_feature: MA Experiment 20000234 PARAMETER Experiment Name: At_Siliques_P Parameter: Organism Value: A. thaliana
  misc_feature: MA Experiment 20000234 PARAMETER Experiment Name: At_Siliques_P Parameter: Plant Line Value: WS
  misc_feature: MA Experiment 20000234 PARAMETER Experiment Name: At_Siliques_P Parameter: Tissue Value: Less Than 5mm Siliques vs. Whole Plant
  misc_feature: MA Experiment ID: 20000235 Result: Down-regulated in Transcription
  misc_feature: MA Experiment 20000235 PARAMETER Experiment Name: At_Siliques_P Parameter: Age (day) Value: 21
  misc_feature: MA Experiment 20000235 PARAMETER Experiment Name: At_Siliques_P Parameter: Organism Value: A. thaliana
  misc_feature: MA Experiment 20000235 PARAMETER Experiment Name: At_Siliques_P Parameter: Plant Line Value: WS
  misc_feature: MA Experiment 20000235 PARAMETER Experiment Name: At_Siliques_P Parameter: Tissue Value: 5-10mm Siliques vs. Whole Plant
  misc_feature: MA Experiment ID: 20000264 Result: Up-regulated in Transcription
  misc_feature: MA Experiment 20000264 PARAMETER Experiment Name: At_Open_Flower_P Parameter: Age (day) Value: 21
  misc_feature: MA Experiment 20000264 PARAMETER Experiment Name: At_Open_Flower_P Parameter: Plant Line Value: WS
  misc_feature: MA Experiment 20000264 PARAMETER Experiment Name: At_Open_Flower_P Parameter: Tissue Value: Open Flower vs. Whole Plant
  misc_feature: MA Experiment ID: 20000265 Result: Down-regulated in Transcription
  misc_feature: MA Experiment 20000265 PARAMETER Experiment Name: At_Open_Flower_P Parameter: Age (day) Value: 21
  misc_feature: MA Experiment 20000265 PARAMETER Experiment Name: At_Open_Flower_P Parameter: Plant Line Value: WS
  misc_feature: MA Experiment 20000265 PARAMETER Experiment Name: At_Open_Flower_P Parameter: Tissue Value: Closed Flower vs. Whole Plant
  misc_feature: MA Experiment ID: 20000267 Result: Up-regulated in Transcription
  misc_feature: MA Experiment 20000267 PARAMETER Experiment Name: At_Drought_P Parameter: Age (day) Value: 7
  misc_feature: MA Experiment 20000267 PARAMETER Experiment Name: At_Drought_P Parameter: Organism Value: A. thaliana
  misc_feature: MA Experiment 20000267 PARAMETER Experiment Name: At_Drought_P Parameter: Plant Line Value: WS
  misc_feature: MA Experiment 20000267 PARAMETER Experiment Name: At_Drought_P Parameter: Timepoint (hr) Value: 6
  misc_feature: MA Experiment 20000267 PARAMETER Experiment Name: At_Drought_P Parameter: Tissue Value: Whole Plant
  misc_feature: MA Experiment 20000267 PARAMETER Experiment Name: At_Drought_P Parameter: Treatment Value: Drought vs. No Drought
  misc_feature: MA Experiment ID: 20000436 Result: Up-regulated in Transcription
  misc_feature: MA Experiment 20000436 PARAMETER Experiment Name: At_Drought_P Parameter: Age (day) Value: 7
  misc_feature: MA Experiment 20000436 PARAMETER Experiment Name: At_Drought_P Parameter: Organism Value: A. thaliana
  misc_feature: MA Experiment 20000436 PARAMETER Experiment Name: At_Drought_P Parameter: Plant Line Value: WS
  misc_feature: MA Experiment 20000436 PARAMETER Experiment Name: At_Drought_P Parameter: Timepoint (hr) Value: 12
  misc_feature: MA Experiment 20000436 PARAMETER Experiment Name: At_Drought_P Parameter: Tissue Value: Whole Plant
  misc_feature: MA Experiment 20000436 PARAMETER Experiment Name: At_Drought_P Parameter: Treatment Value: Drought vs. No Drought
  misc_feature: MA Experiment ID: 20000438 Result: Down-regulated in Transcription
  misc_feature: MA Experiment 20000438 PARAMETER Experiment Name: At_Shoots__P Parameter: Age (day) Value: 14
  misc_feature: MA Experiment 20000438 PARAMETER Experiment Name: At_Shoots__P Parameter: Tissue Value: Shoots vs. Whole Plant
  misc_feature: MA Experiment ID: 20000439 Result: Down-regulated in Transcription
  misc_feature: MA Experiment 20000439 PARAMETER Experiment Name: At_Roots__P Parameter: Age (day) Value: 14 vs. 21
  misc_feature: MA Experiment 20000439 PARAMETER Experiment Name: At_Roots__P Parameter: Organism Value: A. thaliana
  misc_feature: MA Experiment 20000439 PARAMETER Experiment Name: At_Roots__P Parameter: Tissue Value: Roots vs. Whole Plant
  misc_feature: MA Experiment ID: 20000527 Result: Down-regulated in Transcription
  misc_feature: MA Experiment 20000527 PARAMETER Experiment Name: At_10percent_PEG_P Parameter: Age (day) Value: 20
  misc_feature: MA Experiment 20000527 PARAMETER Experiment Name: At_10percent_PEG_P Parameter: Organism Value: A. thaliana
  misc_feature: MA Experiment 20000527 PARAMETER Experiment Name: At_10percent_PEG_P Parameter: Plant Line Value: WS
  misc_feature: MA Experiment 20000527 PARAMETER Experiment Name: At_10percent_PEG_P Parameter: Timepoint (day) Value: 20
  misc_feature: MA Experiment 20000527 PARAMETER Experiment Name: At_10percent_PEG_P Parameter: Tissue Value: Whole Plant
  misc_feature: MA Experiment 20000527 PARAMETER Experiment Name: At_10percent_PEG_P Parameter: Treatment Value: 10percent PEG vs. No Treatment
  misc_feature: MA Experiment ID: 20000794 Result: Up-regulated in Transcription
  misc_feature: MA Experiment 20000794 PARAMETER Experiment Name: At_Petals_P Parameter: Age (day) Value: 23-25 days
  misc_feature: MA Experiment 20000794 PARAMETER Experiment Name: At_Petals_P Parameter: Plant Line Value: WS
  misc_feature: MA Experiment 20000794 PARAMETER Experiment Name: At_Petals_P Parameter: Tissue Value: Petals vs. Whole plant
  misc_feature: MA Experiment ID: 20001457 Result: Down-regulated in Transcription
  misc_feature: MA Experiment 20001457 PARAMETER Experiment Name: At_50mM_NH4NO3_L-to-H_P Parameter: Age (day) Value: Undefined
  misc_feature: MA Experiment 20001457 PARAMETER Experiment Name: At_50mM_NH4NO3_L-to-H_P Parameter: Organism Value: Undefined
  misc_feature: MA Experiment 20001457 PARAMETER Experiment Name: At_50mM_NH4NO3_L-to-H_P Parameter: Plant Line Value: Undefined
  misc_feature: MA Experiment 20001457 PARAMETER Experiment Name: At_50mM_NH4NO3_L-to-H_P Parameter: Timepoint (hr) Value: 0.5
  misc_feature: MA Experiment 20001457 PARAMETER Experiment Name: At_50mM_NH4NO3_L-to-H_P Parameter: Tissue Value: Siliques
  misc_feature: MA Experiment 20001457 PARAMETER Experiment Name: At_50mM_NH4NO3_L-to-H_P Parameter: Treatment Value: 50mM NH4NO3 vs. 100mM Manitol
  misc_feature: MA Experiment ID: 20001554 Result: Up-regulated in Transcription
  misc_feature: MA Experiment 20001554 PARAMETER Experiment Name: At_Drought_Soil_Dry_P Parameter: Age (day) Value: 21
  misc_feature: MA Experiment 20001554 PARAMETER Experiment Name: At_Drought_Soil_Dry_P Parameter: Organism Value: A. thaliana
  misc_feature: MA Experiment 20001554 PARAMETER Experiment Name: At_Drought_Soil_Dry_P Parameter: Plant Line Value: WS
  misc_feature: MA Experiment 20001554 PARAMETER Experiment Name: At_Drought_Soil_Dry_P Parameter: Post Timepoint (hr) Value: None
  misc_feature: MA Experiment 20001554 PARAMETER Experiment Name: At_Drought_Soil_Dry_P Parameter: Post-Treatment Value: None
  misc_feature: MA Experiment 20001554 PARAMETER Experiment Name: At_Drought_Soil_Dry_P Parameter: Timepoint (day) Value: 7
  misc_feature: MA Experiment 20001554 PARAMETER Experiment Name: At_Drought_Soil_Dry_P Parameter: Treatment Value: Drought vs. No Drought
  misc_feature: MA Experiment ID: 20001555 Result: Up-regulated in Transcription
  misc_feature: MA Experiment 20001555 PARAMETER Experiment Name: At_Drought_Soil_Dry_P Parameter: Age (day) Value: 24
  misc_feature: MA Experiment 20001555 PARAMETER Experiment Name: At_Drought_Soil_Dry_P Parameter: Organism Value: A. thaliana
  misc_feature: MA Experiment 20001555 PARAMETER Experiment Name: At_Drought_Soil_Dry_P Parameter: Plant Line Value: WS
  misc_feature: MA Experiment 20001555 PARAMETER Experiment Name: At_Drought_Soil_Dry_P Parameter: Post Timepoint (hr) Value: None
  misc_feature: MA Experiment 20001555 PARAMETER Experiment Name: At_Drought_Soil_Dry_P Parameter: Post-Treatment Value: None
  misc_feature: MA Experiment 20001555 PARAMETER Experiment Name: At_Drought_Soil_Dry_P Parameter: Timepoint (day) Value: 10
  misc_feature: MA Experiment 20001555 PARAMETER Experiment Name: At_Drought_Soil_Dry_P Parameter: Treatment Value: Drought vs. No Drought
  misc_feature: MA Experiment ID: 20001556 Result: Up-regulated in Transcription
  misc_feature: MA Experiment 20001556 PARAMETER Experiment Name: At_Drought_Soil_Dry_P Parameter: Age (day) Value: 26
  misc_feature: MA Experiment 20001556 PARAMETER Experiment Name: At_Drought_Soil_Dry_P Parameter: Organism Value: A. thaliana
  misc_feature: MA Experiment 20001556 PARAMETER Experiment Name: At_Drought_Soil_Dry_P Parameter: Plant Line Value: WS
  misc_feature: MA Experiment 20001556 PARAMETER Experiment Name: At_Drought_Soil_Dry_P Parameter: Post Timepoint (hr) Value: None
  misc_feature: MA Experiment 20001556 PARAMETER Experiment Name: At_Drought_Soil_Dry_P Parameter: Post-Treatment Value: None
  misc_feature: MA Experiment 20001556 PARAMETER Experiment Name: At_Drought_Soil_Dry_P Parameter: Timepoint (day) Value: 12
  misc_feature: MA Experiment 20001556 PARAMETER Experiment Name: At_Drought_Soil_Dry_P Parameter: Treatment Value: Drought vs. No Drought
  misc_feature: MA Experiment ID: 20001757 Result: Down-regulated in Transcription
  misc_feature: MA Experiment 20001757 PARAMETER Experiment Name: At_50mM_NH4NO3_L-to-H_P Parameter: Timepoint (hr) Value: 6
  misc_feature: MA Experiment 20001757 PARAMETER Experiment Name: At_50mM_NH4NO3_L-to-H_P Parameter: Tissue Value: Leaf
  misc_feature: MA Experiment 20001757 PARAMETER Experiment Name: At_50mM_NH4NO3_L-to-H_P Parameter: Treatment Value: 50mM NH4NO3 vs 100mM Mannitol
  misc_feature: MA Experiment ID: 20001904 Result: Up-regulated in Transcription
  misc_feature: MA Experiment 20001904 PARAMETER Experiment Name: At_Drought_Reproduction_P Parameter: Age (day) Value: 37
  misc_feature: MA Experiment 20001904 PARAMETER Experiment Name: At_Drought_Reproduction_P Parameter: Organism Value: A. thaliana
  misc_feature: MA Experiment 20001904 PARAMETER Experiment Name: At_Drought_Reproduction_P Parameter: Plant Line Value: WS
  misc_feature: MA Experiment 20001904 PARAMETER Experiment Name: At_Drought_Reproduction_P Parameter: Timepoint (day) Value: 7
  misc_feature: MA Experiment 20001904 PARAMETER Experiment Name: At_Drought_Reproduction_P Parameter: Tissue Value: Rosettes
  misc_feature: MA Experiment 20001904 PARAMETER Experiment Name: At_Drought_Reproduction_P Parameter: Treatment Value: Drought vs. No Drought
  misc_feature: MA Experiment ID: 20001905 Result: Up-regulated in Transcription
  misc_feature: MA Experiment 20001905 PARAMETER Experiment Name: At_Drought_Reproduction_P Parameter: Age (day) Value: 40
  misc_feature: MA Experiment 20001905 PARAMETER Experiment Name: At_Drought_Reproduction_P Parameter: Organism Value: A. thaliana
  misc_feature: MA Experiment 20001905 PARAMETER Experiment Name: At_Drought_Reproduction_P Parameter: Plant Line Value: WS
  misc_feature: MA Experiment 20001905 PARAMETER Experiment Name: At_Drought_Reproduction_P Parameter: Timepoint (day) Value: 10
  misc_feature: MA Experiment 20001905 PARAMETER Experiment Name: At_Drought_Reproduction_P Parameter: Tissue Value: Rosettes
  misc_feature: MA Experiment 20001905 PARAMETER Experiment Name: At_Drought_Reproduction_P Parameter: Treatment Value: Drought vs. No Drought
  misc_feature: MA Experiment ID: 20001906 Result: Up-regulated in Transcription
  misc_feature: MA Experiment 20001906 PARAMETER Experiment Name: At_Drought_Reproduction_P Parameter: Age (day) Value: 35
  misc_feature: MA Experiment 20001906 PARAMETER Experiment Name: At_Drought_Reproduction_P Parameter: Organism Value: A. thaliana
  misc_feature: MA Experiment 20001906 PARAMETER Experiment Name: At_Drought_Reproduction_P Parameter: Plant Line Value: WS
  misc_feature: MA Experiment 20001906 PARAMETER Experiment Name: At_Drought_Reproduction_P Parameter: Timepoint (day) Value: 5
  misc_feature: MA Experiment 20001906 PARAMETER Experiment Name: At_Drought_Reproduction_P Parameter: Tissue Value: Siliques
  misc_feature: MA Experiment 20001906 PARAMETER Experiment Name: At_Drought_Reproduction_P Parameter: Treatment Value: Drought vs. No Drought
ctcataagtcattataatagtttcccccggattgttttttctttctttttgctaatcatcatcggtttcttctaatcaaaaaaaaaaacaaaaaaaaaagagggactacgttcgtacaatcccatccttggtatggatttctggccggagtttatggcgaccagctggggaagagagttcgtcgccggtggtttcggtggcgtcgccggcatcatctccggctaccccttggacaccctcagaattcgccagcaacagagctcgaaatctggatctgccttctccattctccggcggatgctcgccattgagggtccctcctctctctacagaggcatggctgcgcctttggcctccgtcacttttcagaatgctatggtattccagatatacgccatattctctcgctcttttgattcctctgttcctctggtagagcctccttcctacagaggcgttgctcttggtggtgttgccaccggtgctgtacagagcctcttgctcacccctgtcgagctcatcaagattcgtctccagcttcagcagactaagtctggtcccatcaccttggccaagagcatccttaggagacagggccttcaggggctttacagaggcctcaccatcaccgtgctccgagatgctcccgctcatggcctctacttctggacctatgagtacgtcagagaaaggcttcaccccggctgcagaaagaccggacaagaaaacctcaggaccatgctcgtggctggtggccttgctggagtggccagctgggtcgcttgttatcctcttgatgtcgtcaagaccagactccaacaaggtcatggggcttacgagggcattgccgattgttttcgcaagagcgtcaaacaggaaggctatacggttctctggcgtggcctcgggactgcagttgccagggcctttgtggtcaacggtgctatctttgctgcttatgaggtagccttgcggtgtctattcaatcaatcgccatccccagatattgtcacaggagattgagtgagtaaagggcaaagaaggttcattagttgcagtctggacctgtgaatgtagttaatattagcacatagtttgagatggatttggattgcatagcattggtcaaacaaatctgactcgctttagggatcaggcagtttactaatcacagttgatcatagagacgttccagaaatgattacaaaccccaaagaaaacagatgaaatgaaaattctgttact

SEQ ID NO: 23106 - protein, 296 aa, Arabidopsis thaliana
  peptide (1)..(296): Ceres Seq. ID no. 12714491
  misc_feature (14)..(283): Homolog of NCBI NO: 38541954 NR Description: Unknown (protein for MGC:77760) [Danio rerio]
  misc_feature (15)..(291): Homolog of NCBI NO: 28193150 NR Description: unnamed protein product [Homo sapiens]
  misc_feature (15)..(281): Homolog of NCBI NO: 23956272 NR Description: expressed sequence AW491445 [Mus musculus]
  misc_feature (15)..(281): Homolog of NCBI NO: 18381035 NR Description: Unknown (protein for IMAGE:5133804) [Mus musculus]
  misc_feature (15)..(291): Homolog of NCBI NO: 34867789 NR Description: similar to chromosome 14 open reading frame 69
  misc_feature (15)..(280): Homolog of NCBI NO: 31044469 NR Description: C030003J19Rik; similar to CG4995 gene product
  misc_feature (15)..(280): Homolog of NCBI NO: 13879465 NR Description: Similar to CG4995 gene product [Mus musculus]
  misc_feature (1)..(293): Homolog of NCBI NO: 34904170 NR Description: putative carnitine/acylcarnitine translocase
  misc_feature (1)..(296): Homolog of NCBI NO: 21593041 NR Description: putative carnitine/acylcarnitine translocase
  misc_feature (1)..(296): Homolog of NCBI NO: 15220023 NR Description: mitochondrial carrier protein family
MDFWPEFMATSWGREFVAGGFGGVAGIISGYPLDTLRIRQQQSSKSGSAFSILRRMLAIEGPSSLYRGMAAPLASVTFQNAMVFQIYAIFSRSFDSSVPLVEPPSYRGVALGGVATGAVQSLLLTPVELIKIRLQLQQTKSGPITLAKSILRRQGLQGLYRGLTITVLRDAPAHGLYFWTYEYVRERLHPGCRKTGQENLRTMLVAGGLAGVASWVACYPLDVVKTRLQQGHGAYEGIADCFRKSVKQEGYTVLWRGLGTAVARAFVVNGAIFAAYEVALRCLFNQSPSPDIVTGD

SEQ ID NO: 23107 - protein, 289 aa, Arabidopsis thaliana
  peptide (1)..(289): Ceres Seq. ID no. 12714492
  misc_feature (7)..(276): Homolog of NCBI NO: 38541954 NR Description: Unknown (protein for MGC:77760) [Danio rerio]
  misc_feature (8)..(284): Homolog of NCBI NO: 28193150 NR Description: unnamed protein product [Homo sapiens]
  misc_feature (8)..(274): Homolog of NCBI NO: 23956272 NR Description: expressed sequence AW491445 [Mus musculus]
  misc_feature (8)..(274): Homolog of NCBI NO: 18381035 NR Description: Unknown (protein for IMAGE:5133804) [Mus musculus]
  misc_feature (8)..(284): Homolog of NCBI NO: 34867789 NR Description: similar to chromosome 14 open reading frame 69
  misc_feature (8)..(273): Homolog of NCBI NO: 31044469 NR Description: C030003J19Rik; similar to CG4995 gene product
  misc_feature (8)..(273): Homolog of NCBI NO: 13879465 NR Description: Similar to CG4995 gene product [Mus musculus]
  misc_feature (1)..(286): Homolog of NCBI NO: 34904170 NR Description: putative carnitine/acylcarnitine translocase
  misc_feature (1)..(289): Homolog of NCBI NO: 21593041 NR Description: putative carnitine/acylcarnitine translocase
  misc_feature (1)..(289): Homolog of NCBI NO: 15220023 NR Description: mitochondrial carrier protein family
MATSWGREFVAGGFGGVAGIISGYPLDTLRIRQQQSSKSGSAFSILRRMLAIEGPSSLYRGMAAPLASVTFQNAMVFQIYAIFSRSFDSSVPLVEPPSYRGVALGGVATGAVQSLLLTPVELIKIRLQLQQTKSGPITLAKSILRRQGLQGLYRGLTITVLRDAPAHGLYFWTYEYVRERLHPGCRKTGQENLRTMLVAGGLAGVASWVACYPLDVVKTRLQQGHGAYEGIADCFRKSVKQEGYTVLWRGLGTAVARAFVVNGAIFAAYEVALRCLFNQSPSPDIVTGD

SEQ ID NO: 23108 - protein, 241 aa, Arabidopsis thaliana
  peptide (1)..(241): Ceres Seq. ID no. 12714493
  misc_feature (1)..(228): Homolog of NCBI NO: 38541954 NR Description: Unknown (protein for MGC:77760) [Danio rerio]
  misc_feature (1)..(236): Homolog of NCBI NO: 28193150 NR Description: unnamed protein product [Homo sapiens]
  misc_feature (1)..(226): Homolog of NCBI NO: 23956272 NR Description: expressed sequence AW491445 [Mus musculus]
  misc_feature (1)..(226): Homolog of NCBI NO: 18381035 NR Description: Unknown (protein for IMAGE:5133804) [Mus musculus]
  misc_feature (1)..(236): Homolog of NCBI NO: 34867789 NR Description: similar to chromosome 14 open reading frame 69
  misc_feature (1)..(225): Homolog of NCBI NO: 31044469 NR Description: C030003J19Rik; similar to CG4995 gene product
  misc_feature (1)..(225): Homolog of NCBI NO: 13879465 NR Description: Similar to CG4995 gene product [Mus musculus]
  misc_feature (1)..(238): Homolog of NCBI NO: 34904170 NR Description: putative carnitine/acylcarnitine translocase
  misc_feature (1)..(241): Homolog of NCBI NO: 21593041 NR Description: putative carnitine/acylcarnitine translocase
  misc_feature (1)..(241): Homolog of NCBI NO: 15220023 NR Description: mitochondrial carrier protein family
MLAIEGPSSLYRGMAAPLASVTFQNAMVFQIYAIFSRSFDSSVPLVEPPSYRGVALGGVATGAVQSLLLTPVELIKIRLQLQQTKSGPITLAKSILRRQGLQGLYRGLTITVLRDAPAHGLYFWTYEYVRERLHPGCRKTGQENLRTMLVAGGLAGVASWVACYPLDVVKTRLQQGHGAYEGIADCFRKSVKQEGYTVLWRGLGTAVARAFVVNGAIFAAYEVALRCLFNQSPSPDIVTGD

SEQ ID NO: 23109 - DNA, 849 bp, Arabidopsis thaliana
  misc_feature (1)..(849): Ceres Seq. ID no. 12394805
  misc_feature: MA Experiment ID: 108434 Result: Down-regulated in Transcription
  misc_feature: MA Experiment 108434 PARAMETER Experiment Name: At_Root_Tips_cDNA_P Parameter: Tissue Value: Root Tips
  misc_feature: MA Experiment ID: 108461 Result: Up-regulated in Transcription
  misc_feature: MA Experiment 108461 PARAMETER Experiment Name: At_Germinating_Seeds_cDNA_P Parameter: Age (day) Value: 1 vs. 0
  misc_feature: MA Experiment 108461 PARAMETER Experiment Name: At_Germinating_Seeds_cDNA_P Parameter: Tissue Value: Germinating Seeds
  misc_feature: MA Experiment ID: 108462 Result: Up-regulated in Transcription
  misc_feature: MA Experiment 108462 PARAMETER Experiment Name: At_Germinating_Seeds_cDNA_P Parameter: Age (day) Value: 2 vs. 0
  misc_feature: MA Experiment 108462 PARAMETER Experiment Name: At_Germinating_Seeds_cDNA_P Parameter: Tissue Value: Germinating Seeds
  misc_feature: MA Experiment ID: 108464 Result: Up-regulated in Transcription
  misc_feature: MA Experiment 108464 PARAMETER Experiment Name: At_Germinating_Seeds_cDNA_P Parameter: Age (day) Value: 4 vs. 0
  misc_feature: MA Experiment 108464 PARAMETER Experiment Name: At_Germinating_Seeds_cDNA_P Parameter: Tissue Value: Germinating Seeds
  misc_feature: MA Experiment ID: 108579 Result: Down-regulated in Transcription
  misc_feature: MA Experiment 108579 PARAMETER Experiment Name: At_4deg_Cold_cDNA_P Parameter: Temperature (deg C) Value: 4 vs. 22
  misc_feature: MA Experiment 108579 PARAMETER Experiment Name: At_4deg_Cold_cDNA_P Parameter: Timepoint (hr) Value: 6
  misc_feature: MA Experiment 108579 PARAMETER Experiment Name: At_4deg_Cold_cDNA_P Parameter: Tissue Value: Aerial
  misc_feature: MA Experiment ID: 20000070 Result: Down-regulated in Transcription
  misc_feature: MA Experiment 20000070 PARAMETER Experiment Name: At_100uM_ABA_Mutants_cDNA_P Parameter: Plant Line Value: CS24
  misc_feature: MA Experiment 20000070 PARAMETER Experiment Name: At_100uM_ABA_Mutants_cDNA_P Parameter: Timepoint (hr) Value: 6
  misc_feature: MA Experiment 20000070 PARAMETER Experiment Name: At_100uM_ABA_Mutants_cDNA_P Parameter: Tissue Value: Aerial
  misc_feature: MA Experiment 20000070 PARAMETER Experiment Name: At_100uM_ABA_Mutants_cDNA_P Parameter: Treatment Value: 100uM ABA vs. No Treatment
  misc_feature: MA Experiment ID: 20000180 Result: Up-regulated in Transcription
  misc_feature: MA Experiment 20000180 PARAMETER Experiment Name: At_Germinating_Seeds_P Parameter: Age (hr) Value: 24 vs. 0
  misc_feature: MA Experiment 20000180 PARAMETER Experiment Name: At_Germinating_Seeds_P Parameter: Tissue Value: Germinating Seeds
  misc_feature: MA Experiment ID: 20000185 Result: Up-regulated in Transcription
  misc_feature: MA Experiment 20000185 PARAMETER Experiment Name: At_Roots__P Parameter: Age (day) Value: 7 vs. 21
  misc_feature: MA Experiment 20000185 PARAMETER Experiment Name: At_Roots__P Parameter: Organism Value: A. thaliana
  misc_feature: MA Experiment 20000185 PARAMETER Experiment Name: At_Roots__P Parameter: Tissue Value: Roots vs. Whole Plant
  misc_feature: MA Experiment ID: 20000224 Result: Down-regulated in Transcription
  misc_feature: MA Experiment ID: 20000227 Result: Down-regulated in Transcription
  misc_feature: MA Experiment 20000227 PARAMETER Experiment Name: At_Root-Tips-vs-Tops_P Parameter: Tissue Value: Root Tips vs. Root Tops
  misc_feature: MA Experiment ID: 20000439 Result: Up-regulated in Transcription
  misc_feature: MA Experiment 20000439 PARAMETER Experiment Name: At_Roots__P Parameter: Age (day) Value: 14 vs. 21
  misc_feature: MA Experiment 20000439 PARAMETER Experiment Name: At_Roots__P Parameter: Organism Value: A. thaliana
  misc_feature: MA Experiment 20000439 PARAMETER Experiment Name: At_Roots__P Parameter: Tissue Value: Roots vs. Whole Plant
  misc_feature: MA Experiment ID: 20000452 Result: Down-regulated in Transcription
  misc_feature: MA Experiment 20000452 PARAMETER Experiment Name: At_CS6879_Shoots-Roots_P Parameter: Age (day) Value: 14
  misc_feature: MA Experiment 20000452 PARAMETER Experiment Name: At_CS6879_Shoots-Roots_P Parameter: Organism Value: A. thaliana
  misc_feature: MA Experiment 20000452 PARAMETER Experiment Name: At_CS6879_Shoots-Roots_P Parameter: Plant Line Value: CS6879 vs. WS
  misc_feature: MA Experiment 20000452 PARAMETER Experiment Name: At_CS6879_Shoots-Roots_P Parameter: Tissue Value: Shoots
acacacacacacatgttcttcgttgctgcttcgttgggttaaaaactttttttttgtttcttgctttttgtaaagtcaaagataacaaataaataagaaaaatggagaatctaccacctggttatcgtcccaatgttggtgtttgtctaatcaactcggataatctggtatttgtagcttctagattgaatgttccaggagcatggcagatgccacagggaggcattgaagatggggaggatccaaagtcagcagccatgagagagttacaagaagaaactggtgttgtttcagctgaaatcgtctcagaggtcccaaattggttgacatatgattttccaccagcagtaaaagcaaaagttaaccgtctttggggcggtgaatggcatggtcaagctcagaaatggtatttagtgagactgaggaacgatgaggacgagaaagagatcaatctagcgaacaacgaagcggattcagagtttgcggagtggaaatgggcgaagccagaagaagtggtagagcaagcagtggattacaaaaggccaacctatgaagaagtcatcaagacttttggttcgttcttaaacgacacaggaagagctgctaaatgtaaatcagccaagtggtgatataagataccaagaaccaatgtttgtctttttattttttttgttaactgttgtttttctttttttgggcggttctttttagtagaacccttttggaatgcaaaagctttctctaggggttttttactttcatttttgtaaattggttattggtacgtagaaagttttttggttttattttaacgtgggggtcattgtaataaagtcgttgtctggattc

SEQ ID NO: 23110 - protein, 175 aa, Arabidopsis thaliana
  peptide (1)..(175): Ceres Seq. ID no. 12394806
  misc_feature (8)..(156): Pfam Name: NUDIX domain Pfam Description: NUDIX domain
  misc_feature (8)..(157): Homolog of NCBI NO: 23015122 NR Description: hypothetical protein [Magnetospirillum
  misc_feature (8)..(160): Homolog of NCBI NO: 22967686 NR Description: hypothetical protein [Rhodospirillum rubrum]
  misc_feature (1)..(157): Homolog of NCBI NO: 22959957 NR Description: hypothetical protein [Rhodobacter sphaeroides]
  misc_feature (1)..(161): Homolog of NCBI NO: 8567796 NR Description: diadenosine 5',5'''-P1,P4-tetraphosphate
  misc_feature (1)..(163): Homolog of NCBI NO: 15240003 NR Description: diadenosine 5,5-P1,P4-tetraphosphate
  misc_feature (1)..(168): Homolog of NCBI NO: 7489414 NR Description: probable bis(5'-nucleosyl)-tetraphosphatase
  misc_feature (1)..(161): Homolog of NCBI NO: 14488439 NR Description: Chain A, Solution Structure Of The Nudix Enzyme
  misc_feature (1)..(161): Homolog of NCBI NO: 1888557 NR Description: diadenosine 5',5'''-P1,P4-tetraphosphate
  misc_feature (1)..(161): Homolog of NCBI NO: 15228345 NR Description: putative diadenosine 5',5'''-P1,P4-tetraphosphate
  misc_feature (1)..(175): Homolog of NCBI NO: 15220667 NR Description: diadenosine 5,5-P1,P4-tetraphosphate hydrolase,
MENLPPGYRPNVGVCLINSDNLVFVASRLNVPGAWQMPQGGIEDGEDPKSAAMRELQEETGVVSAEIVSEVPNWLTYDFPPAVKAKVNRLWGGEWHGQAQKWYLVRLRNDEDEKEINLANNEADSEFAEWKWAKPEEVVEQAVDYKRPTYEEVIKTFGSFLNDTGRAAKCKSAKW

SEQ ID NO: 23111 - protein, 139 aa, Arabidopsis thaliana
  peptide (1)..(139): Ceres Seq. ID no. 12394807
  misc_feature (1)..(120): Pfam Name: NUDIX domain Pfam Description: NUDIX domain
  misc_feature (1)..(121): Homolog of NCBI NO: 23015122 NR Description: hypothetical protein [Magnetospirillum
  misc_feature (1)..(124): Homolog of NCBI NO: 22967686 NR Description: hypothetical protein [Rhodospirillum rubrum]
  misc_feature (1)..(121): Homolog of NCBI NO: 22959957 NR Description: hypothetical protein [Rhodobacter sphaeroides]
  misc_feature (1)..(125): Homolog of NCBI NO: 8567796 NR Description: diadenosine 5',5'''-P1,P4-tetraphosphate
  misc_feature (1)..(127): Homolog of NCBI NO: 15240003 NR Description: diadenosine 5,5-P1,P4-tetraphosphate
  misc_feature (1)..(132): Homolog of NCBI NO: 7489414 NR Description: probable bis(5'-nucleosyl)-tetraphosphatase
  misc_feature (1)..(125): Homolog of NCBI NO: 14488439 NR Description: Chain A, Solution Structure Of The Nudix Enzyme
  misc_feature (1)..(125): Homolog of NCBI NO: 1888557 NR Description: diadenosine 5',5'''-P1,P4-tetraphosphate
  misc_feature (1)..(125): Homolog of NCBI NO: 15228345 NR Description: putative diadenosine 5',5'''-P1,P4-tetraphosphate
  misc_feature (1)..(139): Homolog of NCBI NO: 15220667 NR Description: diadenosine 5,5-P1,P4-tetraphosphate hydrolase,
MPQGGIEDGEDPKSAAMRELQEETGVVSAEIVSEVPNWLTYDFPPAVKAKVNRLWGGEWHGQAQKWYLVRLRNDEDEKEINLANNEADSEFAEWKWAKPEEVVEQAVDYKRPTYEEVIKTFGSFLNDTGRAAKCKSAKW

SEQ ID NO: 23112 - protein, 123 aa, Arabidopsis thaliana
  peptide (1)..(123): Ceres Seq. ID no. 12394808
  misc_feature (1)..(104): Pfam Name: NUDIX domain Pfam Description: NUDIX domain
  misc_feature (1)..(105): Homolog of NCBI NO: 23015122 NR Description: hypothetical protein [Magnetospirillum
  misc_feature (1)..(108): Homolog of NCBI NO: 22967686 NR Description: hypothetical protein [Rhodospirillum rubrum]
  misc_feature (1)..(105): Homolog of NCBI NO: 22959957 NR Description: hypothetical protein [Rhodobacter sphaeroides]
  misc_feature (1)..(109): Homolog of NCBI NO: 8567796 NR Description: diadenosine 5',5'''-P1,P4-tetraphosphate
  misc_feature (1)..(111): Homolog of NCBI NO: 15240003 NR Description: diadenosine 5,5-P1,P4-tetraphosphate
  misc_feature (1)..(116): Homolog of NCBI NO: 7489414 NR Description: probable bis(5'-nucleosyl)-tetraphosphatase
  misc_feature (1)..(109): Homolog of NCBI NO: 14488439 NR Description: Chain A, Solution Structure Of The Nudix Enzyme
  misc_feature (1)..(109): Homolog of NCBI NO: 1888557 NR Description: diadenosine 5',5'''-P1,P4-tetraphosphate
  misc_feature (1)..(109): Homolog of NCBI NO: 15228345 NR Description: putative diadenosine 5',5'''-P1,P4-tetraphosphate
  misc_feature (1)..(123): Homolog of NCBI NO: 15220667 NR Description: diadenosine 5,5-P1,P4-tetraphosphate hydrolase,
MRELQEETGVVSAEIVSEVPNWLTYDFPPAVKAKVNRLWGGEWHGQAQKWYLVRLRNDEDEKEINLANNEADSEFAEWKWAKPEEVVEQAVDYKRPTYEEVIKTFGSFLNDTGRAAKCKSAKW

SEQ ID NO: 23113 - DNA, 1890 bp, Arabidopsis thaliana
  misc_feature (1)..(1890): Ceres Seq. ID no. 12334835
  misc_feature: MA Experiment ID: 108461 Result: Up-regulated in Transcription
  misc_feature: MA Experiment 108461 PARAMETER Experiment Name: At_Germinating_Seeds_cDNA_P Parameter: Age (day) Value: 1 vs. 0
  misc_feature: MA Experiment 108461 PARAMETER Experiment Name: At_Germinating_Seeds_cDNA_P Parameter: Tissue Value: Germinating Seeds
  misc_feature: MA Experiment ID: 108462 Result: Up-regulated in Transcription
  misc_feature: MA Experiment 108462 PARAMETER Experiment Name: At_Germinating_Seeds_cDNA_P Parameter: Age (day) Value: 2 vs. 0
  misc_feature: MA Experiment 108462 PARAMETER Experiment Name: At_Germinating_Seeds_cDNA_P Parameter: Tissue Value: Germinating Seeds
  misc_feature: MA Experiment ID: 108463 Result: Up-regulated in Transcription
  misc_feature: MA Experiment 108463 PARAMETER Experiment Name: At_Germinating_Seeds_cDNA_P Parameter: Age (day) Value: 3 vs. 0
  misc_feature: MA Experiment 108463 PARAMETER Experiment Name: At_Germinating_Seeds_cDNA_P Parameter: Tissue Value: Germinating Seeds
  misc_feature: MA Experiment ID: 108464 Result: Up-regulated in Transcription
  misc_feature: MA Experiment 108464 PARAMETER Experiment Name: At_Germinating_Seeds_cDNA_P Parameter: Age (day) Value: 4 vs. 0
  misc_feature: MA Experiment 108464 PARAMETER Experiment Name: At_Germinating_Seeds_cDNA_P Parameter: Tissue Value: Germinating Seeds
  misc_feature: MA Experiment ID: 108577 Result: Down-regulated in Transcription
  misc_feature: MA Experiment 108577 PARAMETER Experiment Name: At_42deg_Heat_cDNA_P Parameter: Temperature (deg C) Value: 42 vs. 22
  misc_feature: MA Experiment 108577 PARAMETER Experiment Name: At_42deg_Heat_cDNA_P Parameter: Timepoint (hr) Value: 6
  misc_feature: MA Experiment 108577 PARAMETER Experiment Name: At_42deg_Heat_cDNA_P Parameter: Tissue Value: Aerial
  misc_feature: MA Experiment ID: 108595 Result: Down-regulated in Transcription
  misc_feature: MA Experiment 108595 PARAMETER Experiment Name: At_Ler-pi_Ovule_cDNA_P Parameter: Plant Line Value: null
  misc_feature: MA Experiment ID: 20000113 Result: Down-regulated in Transcription
  misc_feature: MA Experiment 20000113 PARAMETER Experiment Name: At_42deg_Heat_cDNA_P Parameter: Temperature (deg C) Value: 42 vs. 22
  misc_feature: MA Experiment 20000113 PARAMETER Experiment Name: At_42deg_Heat_cDNA_P Parameter: Timepoint (hr) Value: 8
  misc_feature: MA Experiment 20000113 PARAMETER Experiment Name: At_42deg_Heat_cDNA_P Parameter: Tissue Value: Aerial
  misc_feature: MA Experiment ID: 20000144 Result: Down-regulated in Transcription
  misc_feature: MA Experiment 20000144 PARAMETER Experiment Name: At_42deg_Heat_cDNA_P Parameter: Temperature (deg C) Value: 42 vs. 22
  misc_feature: MA Experiment 20000144 PARAMETER Experiment Name: At_42deg_Heat_cDNA_P Parameter: Timepoint (hr) Value: 1
  misc_feature: MA Experiment 20000144 PARAMETER Experiment Name: At_42deg_Heat_cDNA_P Parameter: Tissue Value: Aerial
  misc_feature: MA Experiment ID: 20000180 Result: Up-regulated in Transcription
  misc_feature: MA Experiment 20000180 PARAMETER Experiment Name: At_Germinating_Seeds_P Parameter: Age (hr) Value: 24 vs. 0
  misc_feature: MA Experiment 20000180 PARAMETER Experiment Name: At_Germinating_Seeds_P Parameter: Tissue Value: Germinating Seeds
  misc_feature: MA Experiment ID: 20000224 Result: Down-regulated in Transcription
acaccaaaaagcttccattgatttcgcatcagatcttgctctctcttctatctctgcgattcttctggatcttctcaaatccatgaaggaatcagatctaaccaccgaaccaatcgcacaaaatctaatcaagctaataagcaatgtctgtttctcagtcttcgttttcacagttctcatcttcacagtaatcgcagtaacttaccaaccaccagatccatggcttgaatctgctccagcactcaccaaactcctaaccgaaaccgaaaacgcaactttcaaaatcgacggttcgattctcaaaaccggcgaagatctcgcttcatctccgtcatcatcacctccgtcgaactccacagagcaagtcacggaggcgacgattgagaaatccgaagcgaaaatcggtaatatgactgtgaagaactctatagattgtgatgaggatttgaagattgtgaattgttctgatccgagagttttagttgctgttgagaggtttaatttgaaggtttttaaatctattgtgttcttagagtacgaaactccggttaacggatcgaaactagacgaatgcgatgtttcttggaggtttaggaataagaaggagaagtcatggaggagatacagagatttcaggaggtttaggtttggatttggtgagaattgtacttataaagtgtttcatactagtggttggcattctggtgttaatgctcgtaggcctaggattagtagaccaagctcgagtcgaggagctcgcggtggtgattcggagattaatgatacgattccgactcttggttcgcagacgagtttccggagagggaagtatttgtattattcgcggggtggtgattattgtaagggtatgaatcagtatatgtggagtttcttgtgtggtttaggtgaagcaatgtatttgaataggacttttgtgatggatttgagtttgtgtttgtcttcgagttatagttctaaggggaaagatgaggaaggtaaggattttcggtattattttgatttcgagcatcttaaggagacggcttcgattgttgaagagggtgagttcttgagagattggaagaaatggaatcggttgcataaacggaaagttcctgttaggaaggttaagacgcatagagtgtcgcctttgcagcttagtaaagataagagtacgattatatggaggcagtttgatactcctgagcctgaaaactattggtatagagtttgtgaagggcaagcatcgaagtatgttgagaggccgtggcatgcgttgtggaagtcgaagaggttgatgaatattgtctctgagattagtgggaaaatggactgggattttgatgctgttcatgtggttagaggcgagaaagcgaagaacaagaagctatggccacatttggatgcagacacatggcctgatgcgatattgaccaaacttaaaggattggttcaggtgtggaggaatttgtacgttgcaactaatgaaccgttttataattactttgacaagttgaggtctcagtacaaggttcacttgcttgatgactatagctacttgtggggaaataagagtgaatggtacaatgagactagtctcttgaacaatgggaaaccagttgagtttgatgggtacatgagagtagctgttgatacagaggtgttttatagaggaaagactcgcgtcgagacgttctataaccttaccacggactgcaaagacgggatcaatacatgctaaattgatcattcaggttgtgatatgttttcattgttttatttgtttgtgtatcaaattcagttatgcttgtgttgtttaccttgtgttctactagctattgaagagtgtacgtaacgtttacattttttgattcatatccttaattctgt

SEQ ID NO: 23114 - protein, 579 aa, Arabidopsis thaliana
  peptide (1)..(579): Ceres Seq. ID no. 12334836
  misc_feature (344)..(563): Homolog of NCBI NO: 34909040 NR Description: P0034E02.33 [Oryza sativa (japonica
  misc_feature (140)..(452): Homolog of NCBI NO: 34909040 NR Description: P0034E02.33 [Oryza sativa (japonica
  misc_feature (259)..(579): Homolog of NCBI NO: 37534994 NR Description: unknown protein [Oryza sativa (japonica
  misc_feature (36)..(579): Homolog of NCBI NO: 15235454 NR Description: putative protein; protein id: At4g12700.1
  misc_feature (36)..(579): Homolog of NCBI NO: 18395698 NR Description: expressed protein
  misc_feature (29)..(579): Homolog of NCBI NO: 34913308 NR Description: P0519E12.32 [Oryza sativa (japonica
  misc_feature (28)..(579): Homolog of NCBI NO: 15236611 NR Description: putative protein
HQKASIDFASDLALSSISAILLDLLKSMKESDLTTEPIAQNLIKLISNVCFSVFVFTVLIFTVIAVTYQPPDPWLESAPALTKLLTETENATFKIDGSILKTGEDLASSPSSSPPSNSTEQVTEATIEKSEAKIGNMTVKNSIDCDEDLKIVNCSDPRVLVAVERFNLKVFKSIVFLEYETPVNGSKLDECDVSWRFRNKKEKSWRRYRDFRRFRFGFGENCTYKVFHTSGWHSGVNARRPRISRPSSSRGARGGDSEINDTIPTLGSQTSFRRGKYLYYSRGGDYCKGMNQYMWSFLCGLGEAMYLNRTFVMDLSLCLSSSYSSKGKDEEGKDFRYYFDFEHLKETASIVEEGEFLRDWKKWNRLHKRKVPVRKVKTHRVSPLQLSKDKSTIIWRQFDTPEPENYWYRVCEGQASKYVERPWHALWKSKRLMNIVSEISGKMDWDFDAVHVVRGEKAKNKKLWPHLDADTWPDAILTKLKGLVQVWRNLYVATNEPFYNYFDKLRSQYKVHLLDDYSYLWGNKSEWYNETSLLNNGKPVEFDGYMRVAVDTEVFYRGKTRVETFYNLTTDCKDGINTC

SEQ ID NO: 23115 - protein, 552 aa, Arabidopsis thaliana
  peptide (1)..(552): Ceres Seq. ID no. 12334837
  misc_feature (317)..(536): Homolog of NCBI NO: 34909040 NR Description: P0034E02.33 [Oryza sativa (japonica
  misc_feature (113)..(425): Homolog of NCBI NO: 34909040 NR Description: P0034E02.33 [Oryza sativa (japonica
  misc_feature (232)..(552): Homolog of NCBI NO: 37534994 NR Description: unknown protein [Oryza sativa (japonica
  misc_feature (9)..(552): Homolog of NCBI NO: 15235454 NR Description: putative protein; protein id: At4g12700.1
  misc_feature (9)..(552): Homolog of NCBI NO: 18395698 NR Description: expressed protein
  misc_feature (2)..(552): Homolog of NCBI NO: 34913308 NR Description: P0519E12.32 [Oryza sativa (japonica
  misc_feature (1)..(552): Homolog of NCBI NO: 15236611 NR Description: putative protein
MKESDLTTEPIAQNLIKLISNVCFSVFVFTVLIFTVIAVTYQPPDPWLESAPALTKLLTETENATFKIDGSILKTGEDLASSPSSSPPSNSTEQVTEATIEKSEAKIGNMTVKNSIDCDEDLKIVNCSDPRVLVAVERFNLKVFKSIVFLEYETPVNGSKLDECDVSWRFRNKKEKSWRRYRDFRRFRFGFGENCTYKVFHTSGWHSGVNARRPRISRPSSSRGARGGDSEINDTIPTLGSQTSFRRGKYLYYSRGGDYCKGMNQYMWSFLCGLGEAMYLNRTFVMDLSLCLSSSYSSKGKDEEGKDFRYYFDFEHLKETASIVEEGEFLRDWKKWNRLHKRKVPVRKVKTHRVSPLQLSKDKSTIIWRQFDTPEPENYWYRVCEGQASKYVERPWHALWKSKRLMNIVSEISGKMDWDFDAVHVVRGEKAKNKKLWPHLDADTWPDAILTKLKGLVQVWRNLYVATNEPFYNYFDKLRSQYKVHLLDDYSYLWGNKSEWYNETSLLNNGKPVEFDGYMRVAVDTEVFYRGKTRVETFYNLTTDCKDGINTC

SEQ ID NO: 23116 - protein, 443 aa, Arabidopsis thaliana
  peptide (1)..(443): Ceres Seq. ID no. 12334838
  misc_feature (208)..(427): Homolog of NCBI NO: 34909040 NR Description: P0034E02.33 [Oryza sativa (japonica
  misc_feature (4)..(316): Homolog of NCBI NO: 34909040 NR Description: P0034E02.33 [Oryza sativa (japonica
  misc_feature (123)..(443): Homolog of NCBI NO: 37534994 NR Description: unknown protein [Oryza sativa (japonica
  misc_feature (1)..(443): Homolog of NCBI NO: 15235454 NR Description: putative protein; protein id: At4g12700.1
  misc_feature (1)..(443): Homolog of NCBI NO: 18395698 NR Description: expressed protein
  misc_feature (1)..(443): Homolog of NCBI NO: 34913308 NR Description: P0519E12.32 [Oryza sativa (japonica
  misc_feature (1)..(443): Homolog of NCBI NO: 15236611 NR Description: putative protein
MTVKNSIDCDEDLKIVNCSDPRVLVAVERFNLKVFKSIVFLEYETPVNGSKLDECDVSWRFRNKKEKSWRRYRDFRRFRFGFGENCTYKVFHTSGWHSGVNARRPRISRPSSSRGARGGDSEINDTIPTLGSQTSFRRGKYLYYSRGGDYCKGMNQYMWSFLCGLGEAMYLNRTFVMDLSLCLSSSYSSKGKDEEGKDFRYYFDFEHLKETASIVEEGEFLRDWKKWNRLHKRKVPVRKVKTHRVSPLQLSKDKSTIIWRQFDTPEPENYWYRVCEGQASKYVERPWHALWKSKRLMNIVSEISGKMDWDFDAVHVVRGEKAKNKKLWPHLDADTWPDAILTKLKGLVQVWRNLYVATNEPFYNYFDKLRSQYKVHLLDDYSYLWGNKSEWYNETSLLNNGKPVEFDGYMRVAVDTEVFYRGKTRVETFYNLTTDCKDGINTC

SEQ ID NO: 23117 - DNA, 1555 bp, Arabidopsis thaliana
  misc_feature (1)..(1555): Ceres Seq. ID no. 12562703
  misc_feature: MA Experiment ID: 108434 Result: Down-regulated in Transcription
  misc_feature: MA Experiment 108434 PARAMETER Experiment Name: At_Root_Tips_cDNA_P Parameter: Tissue Value: Root Tips
  misc_feature: MA Experiment ID: 108573 Result: Up-regulated in Transcription
  misc_feature: MA Experiment 108573 PARAMETER Experiment Name: At_Drought_cDNA_P Parameter: Timepoint (hr) Value: 6
  misc_feature: MA Experiment 108573 PARAMETER Experiment Name: At_Drought_cDNA_P Parameter: Tissue Value: Aerial
  misc_feature: MA Experiment 108573 PARAMETER Experiment Name: At_Drought_cDNA_P Parameter: Treatment Value: Drought vs. No Drought
  misc_feature: MA Experiment ID: 20000224 Result: Down-regulated in Transcription
  misc_feature: MA Experiment ID: 20000227 Result: Down-regulated in Transcription
  misc_feature: MA Experiment 20000227 PARAMETER Experiment Name: At_Root-Tips-vs-Tops_P Parameter: Tissue Value: Root Tips vs. Root Tops
  misc_feature: MA Experiment ID: 20000234 Result: Down-regulated in Transcription
  misc_feature: MA Experiment 20000234 PARAMETER Experiment Name: At_Siliques_P Parameter: Age (day) Value: 21
  misc_feature: MA Experiment 20000234 PARAMETER Experiment Name: At_Siliques_P Parameter: Organism Value: A. thaliana
  misc_feature: MA Experiment 20000234 PARAMETER Experiment Name: At_Siliques_P Parameter: Plant Line Value: WS
  misc_feature: MA Experiment 20000234 PARAMETER Experiment Name: At_Siliques_P Parameter: Tissue Value: Less Than 5mm Siliques vs. Whole Plant
  misc_feature: MA Experiment ID: 20000235 Result: Down-regulated in Transcription
  misc_feature: MA Experiment 20000235 PARAMETER Experiment Name: At_Siliques_P Parameter: Age (day) Value: 21
  misc_feature: MA Experiment 20000235 PARAMETER Experiment Name: At_Siliques_P Parameter: Organism Value: A. thaliana
  misc_feature: MA Experiment 20000235 PARAMETER Experiment Name: At_Siliques_P Parameter: Plant Line Value: WS
  misc_feature: MA Experiment 20000235 PARAMETER Experiment Name: At_Siliques_P Parameter: Tissue Value: 5-10mm Siliques vs. Whole Plant
  misc_feature: MA Experiment ID: 20000264 Result: Down-regulated in Transcription
  misc_feature: MA Experiment 20000264 PARAMETER Experiment Name: At_Open_Flower_P Parameter: Age (day) Value: 21
  misc_feature: MA Experiment 20000264 PARAMETER Experiment Name: At_Open_Flower_P Parameter: Plant Line Value: WS
  misc_feature: MA Experiment 20000264 PARAMETER Experiment Name: At_Open_Flower_P Parameter: Tissue Value: Open Flower vs. Whole Plant
  misc_feature: MA Experiment ID: 20000265 Result: Down-regulated in Transcription
  misc_feature: MA Experiment 20000265 PARAMETER Experiment Name: At_Open_Flower_P Parameter: Age (day) Value: 21
  misc_feature: MA Experiment 20000265 PARAMETER Experiment Name: At_Open_Flower_P Parameter: Plant Line Value: WS
  misc_feature: MA Experiment 20000265 PARAMETER Experiment Name: At_Open_Flower_P Parameter: Tissue Value: Closed Flower vs. Whole Plant
  misc_feature: MA Experiment ID: 20000286 Result: Down-regulated in Transcription
  misc_feature: MA Experiment 20000286 PARAMETER Experiment Name: At_Open_Flower_P Parameter: Age (day) Value: 21
  misc_feature: MA Experiment 20000286 PARAMETER Experiment Name: At_Open_Flower_P Parameter: Plant Line Value: WS
  misc_feature: MA Experiment 20000286 PARAMETER Experiment Name: At_Open_Flower_P Parameter: Tissue Value: Half Open vs. Whole Plant
  misc_feature: MA Experiment ID: 20001560 Result: Down-regulated in Transcription
  misc_feature: MA Experiment 20001560 PARAMETER Experiment Name: At_Drought_Soil_Dry_P Parameter: Age (day) Value: 28
  misc_feature: MA Experiment 20001560 PARAMETER Experiment Name: At_Drought_Soil_Dry_P Parameter: Organism Value: A. thaliana
  misc_feature: MA Experiment 20001560 PARAMETER Experiment Name: At_Drought_Soil_Dry_P Parameter: Plant Line Value: WS
  misc_feature: MA Experiment 20001560 PARAMETER Experiment Name: At_Drought_Soil_Dry_P Parameter: Post Timepoint (hr) Value: None
  misc_feature: MA Experiment 20001560 PARAMETER Experiment Name: At_Drought_Soil_Dry_P Parameter: Post-Treatment Value: None
  misc_feature: MA Experiment 20001560 PARAMETER Experiment Name: At_Drought_Soil_Dry_P Parameter: Timepoint (day) Value: 14
  misc_feature: MA Experiment 20001560 PARAMETER Experiment Name: At_Drought_Soil_Dry_P Parameter: Treatment Value: Drought vs. No Drought
aaagttctctcagcttctttctctctctctccatcgcttttgagatcatcgaacacaatcgaaacgaataatcatttggagaataagaagatcgtgagaagcttaaagggttggatcccgtgttctgggaaatcgagtgggaggaataagacaaggaggaacggtgaccacaaactcgacaggaagtcttctgattgttctgtgtctacttcagagaaatctaaggccaagtcgtccttgagtgaatccaaaagtaaaggctctgatcacattgtggcacaaacgtttacattctctgagttagctactgccactagaaacttcagaaaagaatgtcttataggagaaggaggttttggtagagtttacaaaggatacttggccagcactagccagacagcggctatcaagcaacttgatcataatggtttacaaggaaacagggagttccttgtcgaggttctcatgttgagtcttcttcatcacccgaatcttgttaacttaataggatattgtgctgatggagatcaaaggcttctagtctacgagtacatgcccctaggttcacttgaagatcatttgcatgacatttcacctggtaagcagccacttgactggaacaccagaatgaaaatagctgccggtgctgcaaaaggattggagtatctgcatgacaaaactatgcctccagtgatctatcgagatttgaaatgctcaaatattttgctcgatgatgattactttccaaagctatccgacttcgggttggctaaacttggcccagtgggtgacaagtctcatgtgtccactcgtgttatgggaacatacggatactgtgctcccgagtatgcaatgacaggccaactaacactcaaatcagacgtttacagcttcggtgttgttctgctggagattataactggtaggaaagcaatagacagttcaagatctactggagaacagaatctagtcgcatgggcaaggcctttgtttaaagacaggatgaaattctctcaaatggctgatccaatgcttcaaggtcaataccctccgcgagggttataccaagcactcgctgtagcagcgatgtgcgtacaagagcagccaaatcttagacctctcattgctgacgtcgtcactgcactttcttacctcgcctcccaaaagtttgatcctctggctcagccagtccaaggatccctcttcgctcccgggactccacctagatcaaagagggtctgaaaataatcccgagaaccgcaatgctgtgtaagttatgtagcttaaacccattccgtgctgtctttcttggagaggaaaggtggatgattttcagactaagtgtgaatgtatggcttaagagctacttgtagatatgtgtaagaagagatagattcatatagaggccggtttataatgttgttataggtgatgttgtttaatgtaatgtttattgagcgcttgctttcaaatgtgacaatttctcattattgtactgaggatgtctgcttcgattccaaagttattgtataaatattaaagtactatagttttc

SEQ ID NO: 23118 - protein, 413 aa, Arabidopsis thaliana
  peptide (1)..(413): Ceres Seq. ID no. 12562704
  misc_feature (77)..(326): Homolog of NCBI NO: 21740745 NR Description: OSJNBa0072K14.10 [Oryza sativa (japonica
  misc_feature (40)..(407): Homolog of NCBI NO: 34899302 NR Description: putative protein serine/threonine kinase
  misc_feature (14)..(411): Homolog of NCBI NO: 7573596 NR Description: protein kinase 1 [Populus nigra]
  misc_feature (40)..(407): Homolog of NCBI NO: 34395193 NR Description: putative protein serine/threonine kinase
  misc_feature (56)..(407): Homolog of NCBI NO: 34907210 NR Description: putative serine/threonine kinase PBS1 protein
  misc_feature (80)..(406): Homolog of NCBI NO: 34394036 NR Description: putative protein serine/threonine kinase BNK1
  misc_feature (35)..(407): Homolog of NCBI NO: 15238886 NR Description: protein kinase -like protein; protein id:
  misc_feature (37)..(413): Homolog of NCBI NO: 10445209 NR Description: protein serine/threonine kinase BNK1 [Brassica
  misc_feature (37)..(413): Homolog of NCBI NO: 30679773 NR Description: protein kinase family [Arabidopsis thaliana]
  misc_feature (37)..(412): Homolog of NCBI NO: 11259782 NR Description: protein kinase-like - Arabidopsis thaliana
  misc_feature (77)..(326): Homolog of NCBI NO: 21740745 NR Description: OSJNBa0072K14.10 [Oryza sativa (japonica
  misc_feature (40)..(407): Homolog of NCBI NO: 34899302 NR Description: putative protein serine/threonine kinase
  misc_feature (14)..(411): Homolog of NCBI NO: 7573596 NR Description: protein kinase 1 [Populus nigra]
  misc_feature (40)..(407): Homolog of NCBI NO: 34395193 NR Description: putative protein serine/threonine kinase
  misc_feature (56)..(407): Homolog of NCBI NO: 34907210 NR Description: putative serine/threonine kinase PBS1 protein
  misc_feature (80)..(406): Homolog of NCBI NO: 34394036 NR Description: putative protein serine/threonine kinase BNK1
  misc_feature (35)..(407): Homolog of NCBI NO: 15238886 NR Description: protein kinase -like protein; protein id:
  misc_feature (37)..(413): Homolog of NCBI NO: 10445209 NR Description: protein serine/threonine kinase BNK1 [Brassica
  misc_feature (37)..(413): Homolog of NCBI NO: 30679773 NR Description: protein kinase family [Arabidopsis thaliana]
  misc_feature (37)..(412): Homolog of NCBI NO: 11259782 NR Description: protein kinase-like - Arabidopsis thaliana
KVLSASFSLSPSLLRSSNTIETNNHLENKKIVRSLKGWIPCSGKSSGRNKTRRNGDHKLDRKSSDCSVSTSEKSKAKSSLSESKSKGSDHIVAQTFTFSELATATRNFRKECLIGEGGFGRVYKGYLASTSQTAAIKQLDHNGLQGNREFLVEVLMLSLLHHPNLVNLIGYCADGDQRLLVYEYMPLGSLEDHLHDISPGKQPLDWNTRMKIAAGAAKGLEYLHDKTMPPVIYRDLKCSNILLDDDYFPKLSDFGLAKLGPVGDKSHVSTRVMGTYGYCAPEYAMTGQLTLKSDVYSFGVVLLEIITGRKAIDSSRSTGEQNLVAWARPLFKDRMKFSQMADPMLQGQYPPRGLYQALAVAAMCVQEQPNLRPLIADVVTALSYLASQKFDPLAQPVQGSLFAPGTPPRSKRV

SEQ ID NO: 23119 - protein, 258 aa, Arabidopsis thaliana
  peptide (1)..(258): Ceres Seq. ID no. 12562705
  misc_feature (1)..(171): Homolog of NCBI NO: 21740745 NR Description: OSJNBa0072K14.10 [Oryza sativa (japonica
  misc_feature (1)..(252): Homolog of NCBI NO: 34899302 NR Description: putative protein serine/threonine kinase
  misc_feature (1)..(256): Homolog of NCBI NO: 7573596 NR Description: protein kinase 1 [Populus nigra]
  misc_feature (1)..(252): Homolog of NCBI NO: 34395193 NR Description: putative protein serine/threonine kinase
  misc_feature (1)..(252): Homolog of NCBI NO: 34907210 NR Description: putative serine/threonine kinase PBS1 protein
  misc_feature (1)..(251): Homolog of NCBI NO: 34394036 NR Description: putative protein serine/threonine kinase BNK1
  misc_feature (1)..(252): Homolog of NCBI NO: 15238886 NR Description: protein kinase -like protein; protein id:
  misc_feature (1)..(258): Homolog of NCBI NO: 10445209 NR Description: protein serine/threonine kinase BNK1 [Brassica
  misc_feature (1)..(258): Homolog of NCBI NO: 30679773 NR Description: protein kinase family [Arabidopsis thaliana]
  misc_feature (1)..(257): Homolog of NCBI NO: 11259782 NR Description: protein kinase-like - Arabidopsis thaliana
  misc_feature (1)..(171): Homolog of NCBI NO: 21740745 NR Description: OSJNBa0072K14.10 [Oryza sativa (japonica
  misc_feature (1)..(252): Homolog of NCBI NO: 34899302 NR Description: putative protein serine/threonine kinase
  misc_feature (1)..(256): Homolog of NCBI NO: 7573596 NR Description: protein kinase 1 [Populus nigra]
  misc_feature (1)..(252): Homolog of NCBI NO: 34395193 NR Description: putative protein serine/threonine kinase
  misc_feature (1)..(252): Homolog of NCBI NO: 34907210 NR Description: putative serine/threonine kinase PBS1 protein
  misc_feature (1)..(251): Homolog of NCBI NO: 34394036 NR Description: putative protein serine/threonine kinase BNK1
  misc_feature (1)..(252): Homolog of NCBI NO: 15238886 NR Description: protein kinase -like protein; protein id:
  misc_feature (1)..(258): Homolog of NCBI NO: 10445209 NR Description: protein serine/threonine kinase BNK1 [Brassica
  misc_feature (1)..(258): Homolog of NCBI NO: 30679773 NR Description: protein kinase family [Arabidopsis thaliana]
  misc_feature (1)..(257): Homolog of NCBI NO: 11259782 NR Description: protein kinase-like - Arabidopsis thaliana
MLSLLHHPNLVNLIGYCADGDQRLLVYEYMPLGSLEDHLHDISPGKQPLDWNTRMKIAAGAAKGLEYLHDKTMPPVIYRDLKCSNILLDDDYFPKLSDFGLAKLGPVGDKSHVSTRVMGTYGYCAPEYAMTGQLTLKSDVYSFGVVLLEIITGRKAIDSSRSTGEQNLVAWARPLFKDRMKFSQMADPMLQGQYPPRGLYQALAVAAMCVQEQPNLRPLIADVVTALSYLASQKFDPLAQPVQGSLFAPGTPPRSKRV

SEQ ID NO: 23120 - protein, 229 aa, Arabidopsis thaliana
  peptide (1)..(229): Ceres Seq. ID no. 12562706
  misc_feature (1)..(142): Homolog of NCBI NO: 21740745 NR Description: OSJNBa0072K14.10 [Oryza sativa (japonica
  misc_feature (1)..(223): Homolog of NCBI NO: 34899302 NR Description: putative protein serine/threonine kinase
  misc_feature (1)..(227): Homolog of NCBI NO: 7573596 NR Description: protein kinase 1 [Populus nigra]
  misc_feature (1)..(223): Homolog of NCBI NO: 34395193 NR Description: putative protein serine/threonine kinase
  misc_feature (1)..(223): Homolog of NCBI NO: 34907210 NR Description: putative serine/threonine kinase PBS1 protein
  misc_feature (1)..(222): Homolog of NCBI NO: 34394036 NR Description: putative protein serine/threonine kinase BNK1
  misc_feature (1)..(223): Homolog of NCBI NO: 15238886 NR Description: protein kinase -like protein; protein id:
  misc_feature (1)..(229): Homolog of NCBI NO: 10445209 NR Description: protein serine/threonine kinase BNK1 [Brassica
  misc_feature (1)..(229): Homolog of NCBI NO: 30679773 NR Description: protein kinase family [Arabidopsis thaliana]
  misc_feature (1)..(228): Homolog of NCBI NO: 11259782 NR Description: protein kinase-like - Arabidopsis thaliana
  misc_feature (1)..(142): Homolog of NCBI NO: 21740745 NR Description: OSJNBa0072K14.10 [Oryza sativa (japonica
  misc_feature (1)..(223): Homolog of NCBI NO: 34899302 NR Description: putative protein serine/threonine kinase
  misc_feature (1)..(227): Homolog of NCBI NO: 7573596 NR Description: protein kinase 1 [Populus nigra]
  misc_feature (1)..(223): Homolog of NCBI NO: 34395193 NR Description: putative protein serine/threonine kinase
  misc_feature (1)..(223): Homolog of NCBI NO: 34907210 NR Description: putative serine/threonine kinase PBS1 protein
  misc_feature (1)..(222): Homolog of NCBI NO: 34394036 NR Description: putative protein serine/threonine kinase BNK1
  misc_feature (1)..(223): Homolog of NCBI NO: 15238886 NR Description: protein kinase -like protein; protein id:
  misc_feature (1)..(229): Homolog of NCBI NO: 10445209 NR Description: protein serine/threonine kinase BNK1 [Brassica
  misc_feature (1)..(229): Homolog of NCBI NO: 30679773 NR Description: protein kinase family [Arabidopsis thaliana]
  misc_feature (1)..(228): Homolog of NCBI NO: 11259782 NR Description: protein kinase-like - Arabidopsis thaliana
MPLGSLEDHLHDISPGKQPLDWNTRMKIAAGAAKGLEYLHDKTMPPVIYRDLKCSNILLDDDYFPKLSDFGLAKLGPVGDKSHVSTRVMGTYGYCAPEYAMTGQLTLKSDVYSFGVVLLEIITGRKAIDSSRSTGEQNLVAWARPLFKDRMKFSQMADPMLQGQYPPRGLYQALAVAAMCVQEQPNLRPLIADVVTALSYLASQKFDPLAQPVQGSLFAPGTPPRSKRV

SEQ ID NO: 23121 - DNA, 1161 bp, Arabidopsis thaliana
  misc_feature (1)..(1161): Ceres Seq. ID no. 12334658
  misc_feature: MA Experiment ID: 108433 Result: Up-regulated in Transcription
  misc_feature: MA Experiment 108433 PARAMETER Experiment Name: At_rhl_Mutant2_cDNA_P Parameter: Age (day) Value: 7
  misc_feature: MA Experiment 108433 PARAMETER Experiment Name: At_rhl_Mutant2_cDNA_P Parameter: Organism Value: A. thaliana
  misc_feature: MA Experiment 108433 PARAMETER Experiment Name: At_rhl_Mutant2_cDNA_P Parameter: Plant Line Value: rhl Mutant vs. wt landsburg
  misc_feature: MA Experiment 108433 PARAMETER Experiment Name: At_rhl_Mutant2_cDNA_P Parameter: Tissue Value: Roots
  misc_feature: MA Experiment ID: 108434 Result: Down-regulated in Transcription
  misc_feature: MA Experiment 108434 PARAMETER Experiment Name: At_Root_Tips_cDNA_P Parameter: Tissue Value: Root Tips
  misc_feature: MA Experiment ID: 108462 Result: Up-regulated in Transcription
  misc_feature: MA Experiment 108462 PARAMETER Experiment Name: At_Germinating_Seeds_cDNA_P Parameter: Age (day) Value: 2 vs. 0
  misc_feature: MA Experiment 108462 PARAMETER Experiment Name: At_Germinating_Seeds_cDNA_P Parameter: Tissue Value: Germinating Seeds
  misc_feature: MA Experiment ID: 108463 Result: Up-regulated in Transcription
  misc_feature: MA Experiment 108463 PARAMETER Experiment Name: At_Germinating_Seeds_cDNA_P Parameter: Age (day) Value: 3 vs. 0
  misc_feature: MA Experiment 108463 PARAMETER Experiment Name: At_Germinating_Seeds_cDNA_P Parameter: Tissue Value: Germinating Seeds
  misc_feature: MA Experiment ID: 108464 Result: Up-regulated in Transcription
  misc_feature: MA Experiment 108464 PARAMETER Experiment Name: At_Germinating_Seeds_cDNA_P Parameter: Age (day) Value: 4 vs. 0
  misc_feature: MA Experiment 108464 PARAMETER Experiment Name: At_Germinating_Seeds_cDNA_P Parameter: Tissue Value: Germinating Seeds
  misc_feature: MA Experiment ID: 108569 Result: Up-regulated in Transcription
  misc_feature: MA Experiment 108569 PARAMETER Experiment Name: At_0.001%_MeJA__cDNA_P Parameter: Timepoint (hr) Value: 6
  misc_feature: MA Experiment 108569 PARAMETER Experiment Name: At_0.001%_MeJA__cDNA_P Parameter: Tissue Value: Aerial
  misc_feature: MA Experiment 108569 PARAMETER Experiment Name: At_0.001%_MeJA__cDNA_P Parameter: Treatment Value: 0.001% MeJA vs. No Treatment
  misc_feature: MA Experiment ID: 108574 Result: Up-regulated in Transcription
  misc_feature: MA Experiment 108574 PARAMETER Experiment Name: At_Wounding__cDNA_P Parameter: Timepoint (hr) Value: 1
  misc_feature: MA Experiment 108574 PARAMETER Experiment Name: At_Wounding__cDNA_P Parameter: Tissue Value: Aerial
  misc_feature: MA Experiment 108574 PARAMETER Experiment Name: At_Wounding__cDNA_P Parameter: Treatment Value: Wounding vs. No Wounding
  misc_feature: MA Experiment ID: 108576 Result: Down-regulated in Transcription
  misc_feature: MA Experiment 108576 PARAMETER Experiment Name: At_42deg_Heat_cDNA_P Parameter: Temperature (deg C) Value: 42 vs. 22
  misc_feature: MA Experiment 108576 PARAMETER Experiment Name: At_42deg_Heat_cDNA_P Parameter: Timepoint (hr) Value: 1
  misc_feature: MA Experiment 108576 PARAMETER Experiment Name: At_42deg_Heat_cDNA_P Parameter: Tissue Value: Aerial
  misc_feature: MA Experiment ID: 108579 Result: Down-regulated in Transcription
  misc_feature: MA Experiment 108579 PARAMETER Experiment Name: At_4deg_Cold_cDNA_P Parameter: Temperature (deg C) Value: 4 vs. 22
  misc_feature: MA Experiment 108579 PARAMETER Experiment Name: At_4deg_Cold_cDNA_P Parameter: Timepoint (hr) Value: 6
  misc_feature: MA Experiment 108579 PARAMETER Experiment Name: At_4deg_Cold_cDNA_P Parameter: Tissue Value: Aerial
  misc_feature: MA Experiment ID: 20000112 Result: Down-regulated in Transcription
  misc_feature: MA Experiment 20000112 PARAMETER Experiment Name: At_42deg_Heat_cDNA_P Parameter: Temperature (deg C) Value: 42 vs. 22
  misc_feature: MA Experiment 20000112 PARAMETER Experiment Name: At_42deg_Heat_cDNA_P Parameter: Timepoint (hr) Value: 2
  misc_feature: MA Experiment 20000112 PARAMETER Experiment Name: At_42deg_Heat_cDNA_P Parameter: Tissue Value: Aerial
  misc_feature: MA Experiment ID: 20000144 Result: Down-regulated in Transcription
  misc_feature: MA Experiment 20000144 PARAMETER Experiment Name: At_42deg_Heat_cDNA_P Parameter: Temperature (deg C) Value: 42 vs. 22
  misc_feature: MA Experiment 20000144 PARAMETER Experiment Name: At_42deg_Heat_cDNA_P Parameter: Timepoint (hr) Value: 1
  misc_feature: MA Experiment 20000144 PARAMETER Experiment Name: At_42deg_Heat_cDNA_P Parameter: Tissue Value: Aerial
  misc_feature: MA Experiment ID: 20000171 Result: Down-regulated in Transcription
  misc_feature: MA Experiment 20000171 PARAMETER Experiment Name: At_42deg_Heat_P Parameter: Age (day) Value: 14
  misc_feature: MA Experiment 20000171 PARAMETER Experiment Name: At_42deg_Heat_P Parameter: Organism Value: A. thaliana
  misc_feature: MA Experiment 20000171 PARAMETER Experiment Name: At_42deg_Heat_P Parameter: Plant Line Value: WS
  misc_feature: MA Experiment 20000171 PARAMETER Experiment Name: At_42deg_Heat_P Parameter: Temperature (deg C) Value: 42 vs. 22
  misc_feature: MA Experiment 20000171 PARAMETER Experiment Name: At_42deg_Heat_P Parameter: Timepoint (hr) Value: 1
  misc_feature: MA Experiment 20000171 PARAMETER Experiment Name: At_42deg_Heat_P Parameter: Tissue Value: Aerial
  misc_feature: MA Experiment ID: 20000211 Result: Up-regulated in Transcription
  misc_feature: MA Experiment 20000211 PARAMETER Experiment Name: At_0.001percent_MeJA__P Parameter: Age (day) Value: 14
  misc_feature: MA Experiment 20000211 PARAMETER Experiment Name: At_0.001percent_MeJA__P Parameter: Organism Value: A. thaliana
  misc_feature: MA Experiment 20000211 PARAMETER Experiment Name: At_0.001percent_MeJA__P Parameter: Plant Line Value: WS
  misc_feature: MA Experiment 20000211 PARAMETER Experiment Name: At_0.001percent_MeJA__P Parameter: Timepoint (hr) Value: 1
  misc_feature: MA Experiment 20000211 PARAMETER Experiment Name: At_0.001percent_MeJA__P Parameter: Tissue Value: Aerial
  misc_feature: MA Experiment 20000211 PARAMETER Experiment Name: At_0.001percent_MeJA__P Parameter: Treatment Value: 0.001percent MeJA vs. No Treatment
  misc_feature: MA Experiment ID: 20000268 Result: Down-regulated in Transcription
  misc_feature: MA Experiment 20000268 PARAMETER Experiment Name: At_100mM_NaCl__P Parameter: Age (day) Value: 14
  misc_feature: MA Experiment 20000268 PARAMETER Experiment Name: At_100mM_NaCl__P Parameter: Organism Value: A. thaliana
  misc_feature: MA Experiment 20000268 PARAMETER Experiment Name: At_100mM_NaCl__P Parameter: Plant Line Value: WS
  misc_feature: MA Experiment 20000268 PARAMETER Experiment Name: At_100mM_NaCl__P Parameter: Timepoint (hr) Value: 6
  misc_feature: MA Experiment 20000268 PARAMETER Experiment Name: At_100mM_NaCl__P Parameter: Tissue Value: Whole Plant
  misc_feature: MA Experiment 20000268 PARAMETER Experiment Name: At_100mM_NaCl__P Parameter: Treatment Value: 100mM NaCl vs. No Treatment
  misc_feature: MA Experiment ID: 20000437 Result: Down-regulated in Transcription
  misc_feature: MA Experiment 20000437 PARAMETER Experiment Name: At_Drought_P Parameter: Age (day) Value: 8
  misc_feature: MA Experiment 20000437 PARAMETER Experiment Name: At_Drought_P Parameter: Organism Value: A. thaliana
  misc_feature: MA Experiment 20000437 PARAMETER Experiment Name: At_Drought_P Parameter: Plant Line Value: WS
  misc_feature: MA Experiment 20000437 PARAMETER Experiment Name: At_Drought_P Parameter: Timepoint (hr) Value: 24
  misc_feature: MA Experiment 20000437 PARAMETER Experiment Name: At_Drought_P Parameter: Tissue Value: Whole Plant
  misc_feature: MA Experiment 20000437 PARAMETER Experiment Name: At_Drought_P Parameter: Treatment Value: Drought vs. No Drought
  misc_feature: MA Experiment ID: 20000441 Result: Up-regulated in Transcription
  misc_feature: MA Experiment 20000441 PARAMETER Experiment Name: At_1uM_BR-BRZ__P Parameter: Tissue Value: Shoot Apices
  misc_feature: MA Experiment 20000441 PARAMETER Experiment Name: At_1uM_BR-BRZ__P Parameter: Treatment Value: 1uM BR vs. No Treatment
  misc_feature: MA Experiment ID: 20000573 Result: Up-regulated in Transcription
  misc_feature: MA Experiment 20000573 PARAMETER Experiment Name: At_100uM_ABA_Mutants__P Parameter: Organism Value: A. thaliana
  misc_feature: MA Experiment 20000573 PARAMETER Experiment Name: At_100uM_ABA_Mutants__P Parameter: Plant Line Value: CS22 vs. Ler wt
  misc_feature: MA Experiment 20000573 PARAMETER Experiment Name: At_100uM_ABA_Mutants__P Parameter: Timepoint (hr) Value: N/A
  misc_feature: MA Experiment 20000573 PARAMETER Experiment Name: At_100uM_ABA_Mutants__P Parameter: Tissue Value: Whole Plant
  misc_feature: MA Experiment 20000573 PARAMETER Experiment Name: At_100uM_ABA_Mutants__P Parameter: Treatment Value: None
  misc_feature: MA Experiment ID: 20001247 Result: Up-regulated in Transcription
  misc_feature: MA Experiment 20001247 PARAMETER Experiment Name: At_Far-red-induction_P Parameter: Age (day) Value: 7
  misc_feature: MA Experiment 20001247 PARAMETER Experiment Name: At_Far-red-induction_P Parameter: Light Value: Far-red vs. White
  misc_feature: MA Experiment 20001247 PARAMETER Experiment Name: At_Far-red-induction_P Parameter: Organism Value: A. thaliana
  misc_feature: MA Experiment 20001247 PARAMETER Experiment Name: At_Far-red-induction_P Parameter: Plant Line Value: Columbia
  misc_feature: MA Experiment 20001247 PARAMETER Experiment Name: At_Far-red-induction_P Parameter: Timepoint (hr) Value: 1
  misc_feature: MA Experiment 20001247 PARAMETER Experiment Name: At_Far-red-induction_P Parameter: Tissue Value: Whole Plant
  misc_feature: MA Experiment ID: 20001555 Result: Down-regulated in Transcription
  misc_feature: MA Experiment 20001555 PARAMETER Experiment Name: At_Drought_Soil_Dry_P Parameter: Age (day) Value: 24
  misc_feature: MA Experiment 20001555 PARAMETER Experiment Name: At_Drought_Soil_Dry_P Parameter: Organism Value: A. thaliana
  misc_feature: MA Experiment 20001555 PARAMETER Experiment Name: At_Drought_Soil_Dry_P Parameter: Plant Line Value: WS
  misc_feature: MA Experiment 20001555 PARAMETER Experiment Name: At_Drought_Soil_Dry_P Parameter: Post Timepoint (hr) Value: None
  misc_feature: MA Experiment 20001555 PARAMETER Experiment Name: At_Drought_Soil_Dry_P Parameter: Post-Treatment Value: None
  misc_feature: MA Experiment 20001555 PARAMETER Experiment Name: At_Drought_Soil_Dry_P Parameter: Timepoint (day) Value: 10
  misc_feature: MA Experiment 20001555 PARAMETER Experiment Name: At_Drought_Soil_Dry_P Parameter: Treatment Value: Drought vs. No Drought
  misc_feature: MA Experiment ID: 20001556 Result: Down-regulated in Transcription
  misc_feature: MA Experiment 20001556 PARAMETER Experiment Name: At_Drought_Soil_Dry_P Parameter: Age (day) Value: 26
  misc_feature: MA Experiment 20001556 PARAMETER Experiment Name: At_Drought_Soil_Dry_P Parameter: Organism Value: A. thaliana
  misc_feature: MA Experiment 20001556 PARAMETER Experiment Name: At_Drought_Soil_Dry_P Parameter: Plant Line Value: WS
  misc_feature: MA Experiment 20001556 PARAMETER Experiment Name: At_Drought_Soil_Dry_P Parameter: Post Timepoint (hr) Value: None
  misc_feature: MA Experiment 20001556 PARAMETER Experiment Name: At_Drought_Soil_Dry_P Parameter: Post-Treatment Value: None
  misc_feature: MA Experiment 20001556 PARAMETER Experiment Name: At_Drought_Soil_Dry_P Parameter: Timepoint (day) Value: 12
  misc_feature: MA Experiment 20001556 PARAMETER Experiment Name: At_Drought_Soil_Dry_P Parameter: Treatment Value: Drought vs. No Drought
  misc_feature: MA Experiment ID: 20001557 Result: Down-regulated in Transcription
  misc_feature: MA Experiment 20001557 PARAMETER Experiment Name: At_Drought_Soil_Dry_P Parameter: Age (day) Value: 27
  misc_feature: MA Experiment 20001557 PARAMETER Experiment Name: At_Drought_Soil_Dry_P Parameter: Organism Value: A. thaliana
  misc_feature: MA Experiment 20001557 PARAMETER Experiment Name: At_Drought_Soil_Dry_P Parameter: Plant Line Value: WS
  misc_feature: MA Experiment 20001557 PARAMETER Experiment Name: At_Drought_Soil_Dry_P Parameter: Post Timepoint (hr) Value: 3
  misc_feature: MA Experiment 20001557 PARAMETER Experiment Name: At_Drought_Soil_Dry_P Parameter: Post-Treatment Value: Re-Water vs. No Drought
  misc_feature: MA Experiment 20001557 PARAMETER Experiment Name: At_Drought_Soil_Dry_P Parameter: Timepoint (day) Value: 13
  misc_feature: MA Experiment 20001557 PARAMETER Experiment Name: At_Drought_Soil_Dry_P Parameter: Treatment Value: Drought vs. No Drought
  misc_feature: MA Experiment ID: 20001560 Result: Up-regulated in Transcription
  misc_feature: MA Experiment 20001560 PARAMETER Experiment Name: At_Drought_Soil_Dry_P Parameter: Age (day) Value: 28
  misc_feature: MA Experiment 20001560 PARAMETER Experiment Name: At_Drought_Soil_Dry_P Parameter: Organism Value: A. thaliana
  misc_feature: MA Experiment 20001560 PARAMETER Experiment Name: At_Drought_Soil_Dry_P Parameter: Plant Line Value: WS
  misc_feature: MA Experiment 20001560 PARAMETER Experiment Name: At_Drought_Soil_Dry_P Parameter: Post Timepoint (hr) Value: None
  misc_feature: MA Experiment 20001560 PARAMETER Experiment Name: At_Drought_Soil_Dry_P Parameter: Post-Treatment Value: None
  misc_feature: MA Experiment 20001560 PARAMETER Experiment Name: At_Drought_Soil_Dry_P Parameter: Timepoint (day) Value: 14
  misc_feature: MA Experiment 20001560 PARAMETER Experiment Name: At_Drought_Soil_Dry_P Parameter: Treatment Value: Drought vs. No Drought
  misc_feature: MA Experiment ID: 20001757 Result: Up-regulated in Transcription
  misc_feature: MA Experiment 20001757 PARAMETER Experiment Name: At_50mM_NH4NO3_L-to-H_P Parameter: Timepoint (hr) Value: 6
  misc_feature: MA Experiment 20001757 PARAMETER Experiment Name: At_50mM_NH4NO3_L-to-H_P Parameter: Tissue Value: Leaf
  misc_feature: MA Experiment 20001757 PARAMETER Experiment Name: At_50mM_NH4NO3_L-to-H_P Parameter: Treatment Value: 50mM NH4NO3 vs 100mM Mannitol
  misc_feature: MA Experiment ID: 20001904 Result: Down-regulated in Transcription
  misc_feature: MA Experiment 20001904 PARAMETER Experiment Name: At_Drought_Reproduction_P Parameter: Age (day) Value: 37
  misc_feature: MA Experiment 20001904 PARAMETER Experiment Name: At_Drought_Reproduction_P Parameter: Organism Value: A. thaliana
  misc_feature: MA Experiment 20001904 PARAMETER Experiment Name: At_Drought_Reproduction_P Parameter: Plant Line Value: WS
  misc_feature: MA Experiment 20001904 PARAMETER Experiment Name: At_Drought_Reproduction_P Parameter: Timepoint (day) Value: 7
  misc_feature: MA Experiment 20001904 PARAMETER Experiment Name: At_Drought_Reproduction_P Parameter: Tissue Value: Rosettes
  misc_feature: MA Experiment 20001904 PARAMETER Experiment Name: At_Drought_Reproduction_P Parameter: Treatment Value: Drought vs. No Drought
  misc_feature: MA Experiment ID: 20001910 Result: Down-regulated in Transcription
  misc_feature: MA Experiment 20001910 PARAMETER Experiment Name: At_Drought_Reproduction_P Parameter: Age (day) Value: 37
  misc_feature: MA Experiment 20001910 PARAMETER Experiment Name: At_Drought_Reproduction_P Parameter: Organism Value: A. thaliana
  misc_feature: MA Experiment 20001910 PARAMETER Experiment Name: At_Drought_Reproduction_P Parameter: Plant Line Value: WS
  misc_feature: MA Experiment 20001910 PARAMETER Experiment Name: At_Drought_Reproduction_P Parameter: Timepoint (day) Value: 7
  misc_feature: MA Experiment 20001910 PARAMETER Experiment Name: At_Drought_Reproduction_P Parameter: Tissue Value: Flowers
  misc_feature: MA Experiment 20001910 PARAMETER Experiment Name: At_Drought_Reproduction_P Parameter: Treatment Value: Drought vs. No Drought
aaaacacaaacaccaaaaacactatggataagacaatgacactgttcttgctcttgtccactctcctcctcacgacttctttagctaaagatctctgtcataaagatgacaaaactaccctcctcaagatcaagaaatccctaaacaacccttaccacctcgcctcatgggatcccaaaaccgactgttgctcttggtactgcctcgagtgcggcgacgctactgtcaaccaccgtgtcacttccctaatcatacaagacggcgagatctccggtcagatcccccctgaagtcggtgacttaccgtatcttacatcccttatcttccgcaaactcactaacctcactggtcacatccaacccactatcgccaagctcaagaacctcacttttctcagactaagctggaccaatctcaccggtccggttcctgagtttctgagtcagctcaagaatcttgagtacattgacctttccttcaatgacctctctggttccatacctagttccctctcttcattacgtaaactcgagtatcttgaacttagtaggaacaagcttacaggtccgataccagagtcatttgggacgttttcaggaaaggtccctagtcttttcctatcacacaaccagctctctggtactataccaaagtcactaggcaatcccgacttttaccgcatcgatttatctcggaacaagcttcaaggcgatgcttcaatcttgtttggagctaaaaaaacaacatggatcgttgatatatcaagaaacatgttccagttcgatctctccaaggttaagctcgctaagacacttaataacttggacatgaatcacaatggcatcacagggagtattccggctgagtggagcaaagcttattttcagttactgaatgttagctataacagactgtgtggacgcatccccaaaggagagtatattcaaagatttgattcttattcctttttccacaacaagtgtttatgtggtgcacctcttcctagttgcaagtgaagattccagcaaaaccaagcattatctctgatataccaaataattaatcaagtctagtgacaattgtgtttttattttgaatgattaataaaagcatgaaccaatgttttagcttgatttcattgattaacggaaaaagttgagc

SEQ ID NO: 23122 - protein, 337 aa, Arabidopsis thaliana
  peptide (1)..(337): Ceres Seq. ID no. 12334659
  misc_feature (127)..(150): Pfam Name: Leucine Rich Repeat Pfam Description: Leucine Rich Repeat
  misc_feature (12)..(337): Homolog of NCBI NO: 18148376 NR Description: polygalacturonase-inhibitor protein [Citrus sp.
  misc_feature (12)..(337): Homolog of NCBI NO: 18148925 NR Description: polygalacturonase-inhibitor protein [Citrus sp.
  misc_feature (44)..(337): Homolog of NCBI NO: 22324853 NR Description: polygalacturonase inhibitory protein [Brassica
  misc_feature (8)..(337): Homolog of NCBI NO: 22256016 NR Description: polygalacturonase inhibitor protein [Brassica
  misc_feature (10)..(337): Homolog of NCBI NO: 22324851 NR Description: polygalacturonase inhibitory protein [Brassica
  misc_feature (8)..(337): Homolog of NCBI NO: 26094811 NR Description: polygalacturonase inhibitor protein [Brassica
  misc_feature (8)..(337): Homolog of NCBI NO: 21593869 NR Description: polygalacturonase inhibiting protein 1
  misc_feature (8)..(337): Homolog of NCBI NO: 15240182 NR Description: polygalacturonase inhibiting protein (PGIP1)
  misc_feature (12)..(337): Homolog of NCBI NO: 7800201 NR Description: polygalacturonase inhibiting protein 2; PGIP2
  misc_feature (8)..(337): Homolog of NCBI NO: 15240183 NR Description: polygalacturonase inhibiting protein (PGIP2)
NTNTKNTMDKTMTLFLLLSTLLLTTSLAKDLCHKDDKTTLLKIKKSLNNPYHLASWDPKTDCCSWYCLECGDATVNHRVTSLIIQDGEISGQIPPEVGDLPYLTSLIFRKLTNLTGHIQPTIAKLKNLTFLRLSWTNLTGPVPEFLSQLKNLEYIDLSFNDLSGSIPSSLSSLRKLEYLELSRNKLTGPIPESFGTFSGKVPSLFLSHNQLSGTIPKSLGNPDFYRIDLSRNKLQGDASILFGAKKTTWIVDISRNMFQFDLSKVKLAKTLNNLDMNHNGITGSIPAEWSKAYFQLLNVSYNRLCGRIPKGEYIQRFDSYSFFHNKCLCGAPLPSCK

SEQ ID NO: 23123 - protein, 330 aa, Arabidopsis thaliana
  peptide (1)..(330): Ceres Seq. ID no. 12334660
  misc_feature (120)..(143): Pfam Name: Leucine Rich Repeat Pfam Description: Leucine Rich Repeat
  misc_feature (5)..(330): Homolog of NCBI NO: 18148376 NR Description: polygalacturonase-inhibitor protein [Citrus sp.
  misc_feature (5)..(330): Homolog of NCBI NO: 18148925 NR Description: polygalacturonase-inhibitor protein [Citrus sp.
  misc_feature (37)..(330): Homolog of NCBI NO: 22324853 NR Description: polygalacturonase inhibitory protein [Brassica
  misc_feature (1)..(330): Homolog of NCBI NO: 22256016 NR Description: polygalacturonase inhibitor protein [Brassica
  misc_feature (3)..(330): Homolog of NCBI NO: 22324851 NR Description: polygalacturonase inhibitory protein [Brassica
  misc_feature (1)..(330): Homolog of NCBI NO: 26094811 NR Description: polygalacturonase inhibitor protein [Brassica
  misc_feature (1)..(330): Homolog of NCBI NO: 21593869 NR Description: polygalacturonase inhibiting protein 1
  misc_feature (1)..(330): Homolog of NCBI NO: 15240182 NR Description: polygalacturonase inhibiting protein (PGIP1)
  misc_feature (5)..(330): Homolog of NCBI NO: 7800201 NR Description: polygalacturonase inhibiting protein 2; PGIP2
  misc_feature (1)..(330): Homolog of NCBI NO: 15240183 NR Description: polygalacturonase inhibiting protein (PGIP2)
MDKTMTLFLLLSTLLLTTSLAKDLCHKDDKTTLLKIKKSLNNPYHLASWDPKTDCCSWYCLECGDATVNHRVTSLIIQDGEISGQIPPEVGDLPYLTSLIFRKLTNLTGHIQPTIAKLKNLTFLRLSWTNLTGPVPEFLSQLKNLEYIDLSFNDLSGSIPSSLSSLRKLEYLELSRNKLTGPIPESFGTFSGKVPSLFLSHNQLSGTIPKSLGNPDFYRIDLSRNKLQGDASILFGAKKTTWIVDISRNMFQFDLSKVKLAKTLNNLDMNHNGITGSIPAEWSKAYFQLLNVSYNRLCGRIPKGEYIQRFDSYSFFHNKCLCGAPLPSCK

SEQ ID NO: 23124 - protein, 326 aa, Arabidopsis thaliana
  peptide (1)..(326): Ceres Seq. ID no. 12334661
  misc_feature (116)..(139): Pfam Name: Leucine Rich Repeat Pfam Description: Leucine Rich Repeat
  misc_feature (1)..(326): Homolog of NCBI NO: 22324851 NR Description: polygalacturonase inhibitory protein [Brassica
  misc_feature (1)..(326): Homolog of NCBI NO: 26094811 NR Description: polygalacturonase inhibitor protein [Brassica
  misc_feature (1)..(326): Homolog of NCBI NO: 21593869 NR Description: polygalacturonase inhibiting protein 1
  misc_feature (1)..(326): Homolog of NCBI NO: 18148376 NR Description: polygalacturonase-inhibitor protein [Citrus sp.
  misc_feature (33)..(326): Homolog of NCBI NO: 22324853 NR Description: polygalacturonase inhibitory protein [Brassica
  misc_feature (1)..(326): Homolog of NCBI NO: 22256016 NR Description: polygalacturonase inhibitor protein [Brassica
  misc_feature (1)..(326): Homolog of NCBI NO: 18148925 NR Description: polygalacturonase-inhibitor protein [Citrus sp.
  misc_feature (1)..(326): Homolog of NCBI NO: 15240182 NR Description: polygalacturonase inhibiting protein (PGIP1)
  misc_feature (1)..(326): Homolog of NCBI NO: 7800201 NR Description: polygalacturonase inhibiting protein 2; PGIP2
  misc_feature (1)..(326): Homolog of NCBI NO: 15240183 NR Description: polygalacturonase inhibiting protein (PGIP2)
MTLFLLLSTLLLTTSLAKDLCHKDDKTTLLKIKKSLNNPYHLASWDPKTDCCSWYCLECGDATVNHRVTSLIIQDGEISGQIPPEVGDLPYLTSLIFRKLTNLTGHIQPTIAKLKNLTFLRLSWTNLTGPVPEFLSQLKNLEYIDLSFNDLSGSIPSSLSSLRKLEYLELSRNKLTGPIPESFGTFSGKVPSLFLSHNQLSGTIPKSLGNPDFYRIDLSRNKLQGDASILFGAKKTTWIVDISRNMFQFDLSKVKLAKTLNNLDMNHNGITGSIPAEWSKAYFQLLNVSYNRLCGRIPKGEYIQRFDSYSFFHNKCLCGAPLPSCK

SEQ ID NO: 23125 - DNA, 1418 bp, Arabidopsis thaliana
  misc_feature (1)..(1418): Ceres Seq. ID no. 12324465
  misc_feature: MA Experiment ID: 20000173 Result: Down-regulated in Transcription
  misc_feature: MA Experiment 20000173 PARAMETER Experiment Name: At_42deg_Heat_P Parameter: Age (day) Value: 14
  misc_feature: MA Experiment 20000173 PARAMETER Experiment Name: At_42deg_Heat_P Parameter: Organism Value: A. thaliana
  misc_feature: MA Experiment 20000173 PARAMETER Experiment Name: At_42deg_Heat_P Parameter: Plant Line Value: WS
  misc_feature: MA Experiment 20000173 PARAMETER Experiment Name: At_42deg_Heat_P Parameter: Temperature (deg C) Value: 42 vs. 22
  misc_feature: MA Experiment 20000173 PARAMETER Experiment Name: At_42deg_Heat_P Parameter: Timepoint (hr) Value: 6
  misc_feature: MA Experiment 20000173 PARAMETER Experiment Name: At_42deg_Heat_P Parameter: Tissue Value: Aerial
  misc_feature: MA Experiment ID: 20000184 Result: Down-regulated in Transcription
  misc_feature: MA Experiment 20000184 PARAMETER Experiment Name: At_Shoots__P Parameter: Age (day) Value: 7
  misc_feature: MA Experiment 20000184 PARAMETER Experiment Name: At_Shoots__P Parameter: Tissue Value: Shoots vs. Whole Plant
  misc_feature: MA Experiment ID: 20001248 Result: Up-regulated in Transcription
  misc_feature: MA Experiment 20001248 PARAMETER Experiment Name: At_Far-red-induction_P Parameter: Age (day) Value: 7
  misc_feature: MA Experiment 20001248 PARAMETER Experiment Name: At_Far-red-induction_P Parameter: Light Value: Far-red vs. White
  misc_feature: MA Experiment 20001248 PARAMETER Experiment Name: At_Far-red-induction_P Parameter: Organism Value: A. thaliana
  misc_feature: MA Experiment 20001248 PARAMETER Experiment Name: At_Far-red-induction_P Parameter: Plant Line Value: Columbia
  misc_feature: MA Experiment 20001248 PARAMETER Experiment Name: At_Far-red-induction_P Parameter: Timepoint (hr) Value: 4
  misc_feature: MA Experiment 20001248 PARAMETER Experiment Name: At_Far-red-induction_P Parameter: Tissue Value: Whole Plant
  misc_feature: MA Experiment ID: 20001450 Result: Up-regulated in Transcription
  misc_feature: MA Experiment 20001450 PARAMETER Experiment Name: At_Far-red-induction_P Parameter: Age (day) Value: 7
  misc_feature: MA Experiment 20001450 PARAMETER Experiment Name: At_Far-red-induction_P Parameter: Light Value: Far-red vs. White
  misc_feature: MA Experiment 20001450 PARAMETER Experiment Name: At_Far-red-induction_P Parameter: Organism Value: A. thaliana
  misc_feature: MA Experiment 20001450 PARAMETER Experiment Name: At_Far-red-induction_P Parameter: Plant Line Value: Columbia
  misc_feature: MA Experiment 20001450 PARAMETER Experiment Name: At_Far-red-induction_P Parameter: Timepoint (hr) Value: 8
  misc_feature: MA Experiment 20001450 PARAMETER Experiment Name: At_Far-red-induction_P Parameter: Tissue Value: Whole Plant
agaacctaaaaacttggaacttctttttatctgcggtacacagccaaatttgcaaaaataagttccaacgcgtctagactcgattcgtgcgactcgggaagactaggctcgtttaaaggttcacgcttttgatatttcgagctcctagagacctagactctagtcctgaggctgattggtagaggaaattggaaaagcttggattgaaaactatggaagcgaagaaagtgacagaagaggaagaagagacgtggaggagagagatagtaacaagcgttatgagattagtgagtacgagattgcctcagacagatctaatttctctacttctggttagcccatggctttatcgcaccctcatctcctatccttcaatctggctgaccatcaatttgcgcgagatgaccaatgcaggggatcggcttttagctgctctgtccttgccaagatatcgacaagtgaagcatatcaatcttgaatttgcccagggtgttgtggacagtcatcttaaacttgtgaaaaccgagtgcccggatgctcttttgagtctagaatggttgaatctgaacgtgtgccaaaagatatcagacaatggaatcgaagctataactagcatatgtccaaagttaaaagttttctctatctactggaacgtaagggtgaccgatgctggcattagaaatctagtgaagaattgcagacatatcactgatttgaacttaagtggctgcaagagcctaacggacaaaagtatgcaactagtagctgaaagttatccagacttagagtcactgaatatcactaggtgtgttaagattacagatgatggattacttcaagtgctacaaaaatgtttctctctccagaccttaaatctctatgctctttcaggcttcacagacaaagcctacatgaagatatcacttttagctgacctaaggttcttagatatatgtggcgctcagaatatatctgacgaggggattggtcatatagctaaatgcaacaagttagagtctctcaacttgacatggtgtgtgcgtatcacagatgcaggtgtgaataccattgctaatagttgtacctccctcgaatttctcagcttgtttgggatagttggggtgactgacagatgtctggagaccctttcgcagacatgctcgactacactcaccactcttgatgtcaatggctgcaccggcatcaagagacgaagccgtgaagagttgcttcagatgttccctcgtttgacatgcttcaaagtacacagctgaaatttgctcatataaattagaggactctcaacaaatgtctatccttcagttataaatttgctcatataaattaaagtctcaaaattttatttccatgtattttgtatgagtttccaagcctaatagaaaatttattttttgagc

SEQ ID NO: 23126 - protein, 353 aa, Arabidopsis thaliana
  peptide (1)..(353): Ceres Seq. ID no. 12324466
  misc_feature (59)..(339): Homolog of NCBI NO: 7022695 NR Description: unnamed protein product [Homo sapiens]
  misc_feature (59)..(339): Homolog of NCBI NO: 16306582 NR Description: F-box and leucine-rich repeat protein 2
  misc_feature (59)..(339): Homolog of NCBI NO: 6063090 NR Description: F-box protein FBL2 [Homo sapiens]
  misc_feature (59)..(339): Homolog of NCBI NO: 5919219 NR Description: leucine-rich repeats containing F-box protein
  misc_feature (59)..(339): Homolog of NCBI NO: 26336707 NR Description: unnamed protein product [Mus musculus]
  misc_feature (59)..(339): Homolog of NCBI NO: 30519963 NR Description: F-box and leucine-rich repeat protein 2 [Mus
  misc_feature (104)..(353): Homolog of NCBI NO: 11357437 NR Description: hypothetical protein F14P22.120 - Arabidopsis
  misc_feature (1)..(314): Homolog of NCBI NO: 11357437 NR Description: hypothetical protein F14P22.120 - Arabidopsis
  misc_feature (1)..(353): Homolog of NCBI NO: 15450960 NR Description: putative protein [Arabidopsis thaliana]
  misc_feature (1)..(353): Homolog of NCBI NO: 18410977 NR Description: putative protein
MEAKKVTEEEEETWRREIVTSVMRLVSTRLPQTDLISLLLVSPWLYRTLISYPSIWLTINLREMTNAGDRLLAALSLPRYRQVKHINLEFAQGVVDSHLKLVKTECPDALLSLEWLNLNVCQKISDNGIEAITSICPKLKVFSIYWNVRVTDAGIRNLVKNCRHITDLNLSGCKSLTDKSMQLVAESYPDLESLNITRCVKITDDGLLQVLQKCFSLQTLNLYALSGFTDKAYMKISLLADLRFLDICGAQNISDEGIGHIAKCNKLESLNLTWCVRITDAGVNTIANSCTSLEFLSLFGIVGVTDRCLETLSQTCSTTLTTLDVNGCTGIKRRSREELLQMFPRLTCFKVHS

SEQ ID NO: 23127 - protein, 331 aa, Arabidopsis thaliana
  peptide (1)..(331): Ceres Seq. ID no. 12324467
  misc_feature (37)..(317): Homolog of NCBI NO: 7022695 NR Description: unnamed protein product [Homo sapiens]
  misc_feature (37)..(317): Homolog of NCBI NO: 6063090 NR Description: F-box protein FBL2 [Homo sapiens]
  misc_feature (37)..(317): Homolog of NCBI NO: 16306582 NR Description: F-box and leucine-rich repeat protein 2
  misc_feature (37)..(317): Homolog of NCBI NO: 5919219 NR Description: leucine-rich repeats containing F-box protein
  misc_feature (37)..(317): Homolog of NCBI NO: 26336707 NR Description: unnamed protein product [Mus musculus]
  misc_feature (37)..(317): Homolog of NCBI NO: 30519963 NR Description: F-box and leucine-rich repeat protein 2 [Mus
  misc_feature (82)..(331): Homolog of NCBI NO: 11357437 NR Description: hypothetical protein F14P22.120 - Arabidopsis
  misc_feature (1)..(292): Homolog of NCBI NO: 11357437 NR Description: hypothetical protein F14P22.120 - Arabidopsis
  misc_feature (1)..(331): Homolog of NCBI NO: 15450960 NR Description: putative protein [Arabidopsis thaliana]
  misc_feature (1)..(331): Homolog of NCBI NO: 18410977 NR Description: putative protein
MRLVSTRLPQTDLISLLLVSPWLYRTLISYPSIWLTINLREMTNAGDRLLAALSLPRYRQVKHINLEFAQGVVDSHLKLVKTECPDALLSLEWLNLNVCQKISDNGIEAITSICPKLKVFSIYWNVRVTDAGIRNLVKNCRHITDLNLSGCKSLTDKSMQLVAESYPDLESLNITRCVKITDDGLLQVLQKCFSLQTLNLYALSGFTDKAYMKISLLADLRFLDICGAQNISDEGIGHIAKCNKLESLNLTWCVRITDAGVNTIANSCTSLEFLSLFGIVGVTDRCLETLSQTCSTTLTTLDVNGCTGIKRRSREELLQMFPRLTCFKVHS

SEQ ID NO: 23128 - protein, 290 aa, Arabidopsis thaliana
  peptide (1)..(290): Ceres Seq. ID no. 12324468
  misc_feature (1)..(276): Homolog of NCBI NO: 6063090 NR Description: F-box protein FBL2 [Homo sapiens]
  misc_feature (1)..(276): Homolog of NCBI NO: 7022695 NR Description: unnamed protein product [Homo sapiens]
  misc_feature (1)..(276): Homolog of NCBI NO: 16306582 NR Description: F-box and leucine-rich repeat protein 2
  misc_feature (1)..(276): Homolog of NCBI NO: 5919219 NR Description: leucine-rich repeats containing F-box protein
  misc_feature (1)..(276): Homolog of NCBI NO: 26336707 NR Description: unnamed protein product [Mus musculus]
  misc_feature (1)..(276): Homolog of NCBI NO: 30519963 NR Description: F-box and leucine-rich repeat protein 2 [Mus
  misc_feature (41)..(290): Homolog of NCBI NO: 11357437 NR Description: hypothetical protein F14P22.120 - Arabidopsis
  misc_feature (1)..(251): Homolog of NCBI NO: 11357437 NR Description: hypothetical protein F14P22.120 - Arabidopsis
  misc_feature (1)..(290): Homolog of NCBI NO: 15450960 NR Description: putative protein [Arabidopsis thaliana]
  misc_feature (1)..(290): Homolog of NCBI NO: 18410977 NR Description: putative protein
MTNAGDRLLAALSLPRYRQVKHINLEFAQGVVDSHLKLVKTECPDALLSLEWLNLNVCQKISDNGIEAITSICPKLKVFSIYWNVRVTDAGIRNLVKNCRHITDLNLSGCKSLTDKSMQLVAESYPDLESLNITRCVKITDDGLLQVLQKCFSLQTLNLYALSGFTDKAYMKISLLADLRFLDICGAQNISDEGIGHIAKCNKLESLNLTWCVRITDAGVNTIANSCTSLEFLSLFGIVGVTDRCLETLSQTCSTTLTTLDVNGCTGIKRRSREELLQMFPRLTCFKVHS

SEQ ID NO: 23129 - DNA, 1108 bp, Arabidopsis thaliana
  misc_feature (1)..(1108): Ceres Seq. ID no. 13646289
  misc_feature: MA Experiment ID: 108434 Result: Down-regulated in Transcription
  misc_feature: MA Experiment 108434 PARAMETER Experiment Name: At_Root_Tips_cDNA_P Parameter: Tissue Value: Root Tips
  misc_feature: MA Experiment ID: 108577 Result: Up-regulated in Transcription
  misc_feature: MA Experiment 108577 PARAMETER Experiment Name: At_42deg_Heat_cDNA_P Parameter: Temperature (deg C) Value: 42 vs. 22
  misc_feature: MA Experiment 108577 PARAMETER Experiment Name: At_42deg_Heat_cDNA_P Parameter: Timepoint (hr) Value: 6
  misc_feature: MA Experiment 108577 PARAMETER Experiment Name: At_42deg_Heat_cDNA_P Parameter: Tissue Value: Aerial
  misc_feature: MA Experiment ID: 108668 Result: Up-regulated in Transcription
  misc_feature: MA Experiment 108668 PARAMETER Experiment Name: At_2mM_SA_cDNA_P Parameter: Plant Line Value: WS
  misc_feature: MA Experiment 108668 PARAMETER Experiment Name: At_2mM_SA_cDNA_P Parameter: Timepoint (hr) Value: 6
  misc_feature: MA Experiment 108668 PARAMETER Experiment Name: At_2mM_SA_cDNA_P Parameter: Treatment Value: 2mM SA vs. No Treatment
  misc_feature: MA Experiment ID: 20000069 Result: Down-regulated in Transcription
  misc_feature: MA Experiment 20000069 PARAMETER Experiment Name: At_100uM_ABA_Mutants_cDNA_P Parameter: Plant Line Value: CS23
  misc_feature: MA Experiment 20000069 PARAMETER Experiment Name: At_100uM_ABA_Mutants_cDNA_P Parameter: Timepoint (hr) Value: 6
  misc_feature: MA Experiment 20000069 PARAMETER Experiment Name: At_100uM_ABA_Mutants_cDNA_P Parameter: Tissue Value: Aerial
  misc_feature: MA Experiment 20000069 PARAMETER Experiment Name: At_100uM_ABA_Mutants_cDNA_P Parameter: Treatment Value: 100uM ABA vs. No Treatment
  misc_feature: MA Experiment ID: 20000070 Result: Down-regulated in Transcription
  misc_feature: MA Experiment 20000070 PARAMETER Experiment Name: At_100uM_ABA_Mutants_cDNA_P Parameter: Plant Line Value: CS24
  misc_feature: MA Experiment 20000070 PARAMETER Experiment Name: At_100uM_ABA_Mutants_cDNA_P Parameter: Timepoint (hr) Value: 6
  misc_feature: MA Experiment 20000070 PARAMETER Experiment Name: At_100uM_ABA_Mutants_cDNA_P Parameter: Tissue Value: Aerial
  misc_feature: MA Experiment 20000070 PARAMETER Experiment Name: At_100uM_ABA_Mutants_cDNA_P Parameter: Treatment Value: 100uM ABA vs. No Treatment
  misc_feature: MA Experiment ID: 20000071 Result: Down-regulated in Transcription
  misc_feature: MA Experiment 20000071 PARAMETER Experiment Name: At_100uM_ABA_Mutants_cDNA_P Parameter: Plant Line Value: CS8104
  misc_feature: MA Experiment 20000071 PARAMETER Experiment Name: At_100uM_ABA_Mutants_cDNA_P Parameter: Timepoint (hr) Value: 6
  misc_feature: MA Experiment 20000071 PARAMETER Experiment Name: At_100uM_ABA_Mutants_cDNA_P Parameter: Tissue Value: Aerial
  misc_feature: MA Experiment 20000071 PARAMETER Experiment Name: At_100uM_ABA_Mutants_cDNA_P Parameter: Treatment Value: 100uM ABA vs. No Treatment
  misc_feature: MA Experiment ID: 20000072 Result: Down-regulated in Transcription
  misc_feature: MA Experiment 20000072 PARAMETER Experiment Name: At_100uM_ABA_Mutants_cDNA_P Parameter: Plant Line Value: CS8105
  misc_feature: MA Experiment 20000072 PARAMETER Experiment Name: At_100uM_ABA_Mutants_cDNA_P Parameter: Timepoint (hr) Value: 6
  misc_feature: MA Experiment 20000072 PARAMETER Experiment Name: At_100uM_ABA_Mutants_cDNA_P Parameter: Tissue Value: Aerial
  misc_feature: MA Experiment 20000072 PARAMETER Experiment Name: At_100uM_ABA_Mutants_cDNA_P Parameter: Treatment Value: 100uM ABA vs. No Treatment
  misc_feature: MA Experiment ID: 20000086 Result: Down-regulated in Transcription
  misc_feature: MA Experiment 20000086 PARAMETER Experiment Name: At_100uM_ABA_Mutants_cDNA_P Parameter: Plant Line Value: CS22
  misc_feature: MA Experiment 20000086 PARAMETER Experiment Name: At_100uM_ABA_Mutants_cDNA_P Parameter: Timepoint (hr) Value: 6
  misc_feature: MA Experiment 20000086 PARAMETER Experiment Name: At_100uM_ABA_Mutants_cDNA_P Parameter: Tissue Value: Aerial
  misc_feature: MA Experiment 20000086 PARAMETER Experiment Name: At_100uM_ABA_Mutants_cDNA_P Parameter: Treatment Value: 100uM ABA vs. No Treatment
  misc_feature: MA Experiment ID: 20000089 Result: Down-regulated in Transcription
  misc_feature: MA Experiment ID: 20000111 Result: Up-regulated in Transcription
  misc_feature: MA Experiment 20000111 PARAMETER Experiment Name: At_42deg_Heat_cDNA_P Parameter: Temperature (deg C) Value: 42 vs. 22
  misc_feature: MA Experiment 20000111 PARAMETER Experiment Name: At_42deg_Heat_cDNA_P Parameter: Timepoint (hr) Value: 6
  misc_feature: MA Experiment 20000111 PARAMETER Experiment Name: At_42deg_Heat_cDNA_P Parameter: Tissue Value: Aerial
  misc_feature: MA Experiment ID: 20000113 Result: Up-regulated in Transcription
  misc_feature: MA Experiment 20000113 PARAMETER Experiment Name: At_42deg_Heat_cDNA_P Parameter: Temperature (deg C) Value: 42 vs. 22
  misc_feature: MA Experiment 20000113 PARAMETER Experiment Name: At_42deg_Heat_cDNA_P Parameter: Timepoint (hr) Value: 8
  misc_feature: MA Experiment 20000113 PARAMETER Experiment Name: At_42deg_Heat_cDNA_P Parameter: Tissue Value: Aerial
attcttcgtcgtcctcctttgaaattcacaccaatttgtctctcttcctagagaagcaaaagattattcgaaactcgggaaagtatcacccggtcaccggaaaattgattatttccgatgccaataggtgaccgtcagaatccgagtgtggagaagaagaagaacctcttcaggctatgtccgttttggcagaggagcagcaccacttcttcatcttcaacacagaatccaagccaaaactaccgtagccgccatggacatcggaatacagatatttccgccgtctctaagccttccttgactatgtcttccgtcgccagatcacttcttccagctcgccgtcgtctccgactagatccttccagttatctctatttcccttatgaacctggtaaacaagttcgcagcgcaataaagcttaagaacactagcaaatctcatactgcatttaagttccaaacaacggcacctaagagttgttatatgcgtcctcccggaggtgttttggctccaggagagagtgttttcgctactgtgttcaagtttgtggaacatccagagaacaatgaaaagcagccgttgaaccagaagagcaaggttaagtttaagattatgagcctgaaagttaaaccaggagtagagtatgtgcctgagttgtttgatgagcaaaaggatcaagtagcagtggagcaggttcttcgggtcatttttattgatgcggaccgcccaagtgctgcattggagaaactgaaacgtcaattggatgaagctgaagctgcagttgaagcaagaaagaagcctcccccagagacagggcctcgagttgtcggggagggtcttgtcatagacgaatggaaggagagaagagagaagtaccttgctcggcaacaagtcgaatctgtagattctttgtcctaaacgcagagagcaatgtggatttgttatacgcttatagcagaggtaaaagaagctccttcttcttattcttcatcttctgcagatcatgtacataatttattatccctcggttatgtatttatctctagacgattactttgtggttcttgtatgtctctgtttgttgtgttattcatgccgggtttttctc

SEQ ID NO: 23130 - protein, 266 aa, Arabidopsis thaliana
  peptide (1)..(266): Ceres Seq. ID no. 13646290
  misc_feature (147)..(258): Homolog of NCBI NO: 25365874 NR Description: hypothetical protein AT4g05060 [imported] -
  misc_feature (28)..(258): Homolog of NCBI NO: 21593103 NR Description: membrane associated protein-like protein
  misc_feature (28)..(258): Homolog of NCBI NO: 18412787 NR Description: VAMP (vesicle-associated membrane
  misc_feature (27)..(265): Homolog of NCBI NO: 7485721 NR Description: hypothetical protein F18E5.70 - Arabidopsis
  misc_feature (17)..(265): Homolog of NCBI NO: 34394013 NR Description: putative 27k vesicle-associated membrane
  misc_feature (27)..(265): Homolog of NCBI NO: 18415696 NR Description: VAMP (vesicle-associated membrane
  misc_feature (1)..(266): Homolog of NCBI NO: 1800147 NR Description: membrane associated protein [Arabidopsis thaliana]
  misc_feature (247)..(266): Homolog of NCBI NO: 8809582 NR Description: membrane associated protein [Arabidopsis thaliana]
  misc_feature (1)..(246): Homolog of NCBI NO: 8809582 NR Description: membrane associated protein [Arabidopsis thaliana]
  misc_feature (1)..(266): Homolog of NCBI NO: 18423592 NR Description: VAMP (vesicle-associated membrane
  misc_feature (147)..(258): Homolog of NCBI NO: 25365874 NR Description: hypothetical protein AT4g05060 [imported] -
  misc_feature (28)..(258): Homolog of NCBI NO: 21593103 NR Description: membrane associated protein-like protein
  misc_feature (28)..(258): Homolog of NCBI NO: 18412787 NR Description: VAMP (vesicle-associated membrane
  misc_feature (27)..(265): Homolog of NCBI NO: 7485721 NR Description: hypothetical protein F18E5.70 - Arabidopsis
  misc_feature (17)..(265): Homolog of NCBI NO: 34394013 NR Description: putative 27k vesicle-associated membrane
  misc_feature (27)..(265): Homolog of NCBI NO: 18415696 NR Description: VAMP (vesicle-associated membrane
  misc_feature (1)..(266): Homolog of NCBI NO: 1800147 NR Description: membrane associated protein [Arabidopsis thaliana]
  misc_feature (247)..(266): Homolog of NCBI NO: 8809582 NR Description: membrane associated protein [Arabidopsis thaliana]
  misc_feature (1)..(246): Homolog of NCBI NO: 8809582 NR Description: membrane associated protein [Arabidopsis thaliana]
  misc_feature (1)..(266): Homolog of NCBI NO: 18423592 NR Description: VAMP (vesicle-associated membrane
MPIGDRQNPSVEKKKNLFRLCPFWQRSSTTSSSSTQNPSQNYRSRHGHRNTDISAVSKPSLTMSSVARSLLPARRRLRLDPSSYLYFPYEPGKQVRSAIKLKNTSKSHTAFKFQTTAPKSCYMRPPGGVLAPGESVFATVFKFVEHPENNEKQPLNQKSKVKFKIMSLKVKPGVEYVPELFDEQKDQVAVEQVLRVIFIDADRPSAALEKLKRQLDEAEAAVEARKKPPPETGPRVVGEGLVIDEWKERREKYLARQQVESVDSLS

SEQ ID NO: 23131 - protein, 204 aa, Arabidopsis thaliana
  peptide (1)..(204): Ceres Seq. ID no. 13646291
  misc_feature (85)..(196): Homolog of NCBI NO: 25365874 NR Description: hypothetical protein AT4g05060 [imported] -
  misc_feature (1)..(196): Homolog of NCBI NO: 21593103 NR Description: membrane associated protein-like protein
  misc_feature (1)..(196): Homolog of NCBI NO: 18412787 NR Description: VAMP (vesicle-associated membrane
  misc_feature (1)..(203): Homolog of NCBI NO: 7485721 NR Description: hypothetical protein F18E5.70 - Arabidopsis
  misc_feature (1)..(203): Homolog of NCBI NO: 34394013 NR Description: putative 27k vesicle-associated membrane
  misc_feature (1)..(203): Homolog of NCBI NO: 18415696 NR Description: VAMP (vesicle-associated membrane
  misc_feature (1)..(204): Homolog of NCBI NO: 1800147 NR Description: membrane associated protein [Arabidopsis thaliana]
  misc_feature (185)..(204): Homolog of NCBI NO: 8809582 NR Description: membrane associated protein [Arabidopsis thaliana]
  misc_feature (1)..(184): Homolog of NCBI NO: 8809582 NR Description: membrane associated protein [Arabidopsis thaliana]
  misc_feature (1)..(204): Homolog of NCBI NO: 18423592 NR Description: VAMP (vesicle-associated membrane
  misc_feature (85)..(196): Homolog of NCBI NO: 25365874 NR Description: hypothetical protein AT4g05060 [imported] -
  misc_feature (1)..(196): Homolog of NCBI NO: 21593103 NR Description: membrane associated protein-like protein
  misc_feature (1)..(196): Homolog of NCBI NO: 18412787 NR Description: VAMP (vesicle-associated membrane
  misc_feature (1)..(203): Homolog of NCBI NO: 7485721 NR Description: hypothetical protein F18E5.70 - Arabidopsis
  misc_feature (1)..(203): Homolog of NCBI NO: 34394013 NR Description: putative 27k vesicle-associated membrane
  misc_feature (1)..(203): Homolog of NCBI NO: 18415696 NR Description: VAMP (vesicle-associated membrane
  misc_feature (1)..(204): Homolog of NCBI NO: 1800147 NR Description: membrane associated protein [Arabidopsis thaliana]
  misc_feature (185)..(204): Homolog of NCBI NO: 8809582 NR Description: membrane associated protein [Arabidopsis thaliana]
  misc_feature (1)..(184): Homolog of NCBI NO: 8809582 NR Description: membrane associated protein [Arabidopsis thaliana]
  misc_feature (1)..(204): Homolog of NCBI NO: 18423592 NR Description: VAMP (vesicle-associated membrane
MSSVARSLLPARRRLRLDPSSYLYFPYEPGKQVRSAIKLKNTSKSHTAFKFQTTAPKSCYMRPPGGVLAPGESVFATVFKFVEHPENNEKQPLNQKSKVKFKIMSLKVKPGVEYVPELFDEQKDQVAVEQVLRVIFIDADRPSAALEKLKRQLDEAEAAVEARKKPPPETGPRVVGEGLVIDEWKERREKYLARQQVESVDSLS

SEQ ID NO: 23132 - protein, 144 aa, Arabidopsis thaliana
  peptide (1)..(144): Ceres Seq. ID no. 13646292
  misc_feature (25)..(136): Homolog of NCBI NO: 25365874 NR Description: hypothetical protein AT4g05060 [imported] -
  misc_feature (1)..(136): Homolog of NCBI NO: 21593103 NR Description: membrane associated protein-like protein
  misc_feature (1)..(136): Homolog of NCBI NO: 18412787 NR Description: VAMP (vesicle-associated membrane
  misc_feature (1)..(143): Homolog of NCBI NO: 7485721 NR Description: hypothetical protein F18E5.70 - Arabidopsis
  misc_feature (1)..(143): Homolog of NCBI NO: 34394013 NR Description: putative 27k vesicle-associated membrane
  misc_feature (1)..(143): Homolog of NCBI NO: 18415696 NR Description: VAMP (vesicle-associated membrane
  misc_feature (1)..(144): Homolog of NCBI NO: 1800147 NR Description: membrane associated protein [Arabidopsis thaliana]
  misc_feature (125)..(144): Homolog of NCBI NO: 8809582 NR Description: membrane associated protein [Arabidopsis thaliana]
  misc_feature (1)..(124): Homolog of NCBI NO: 8809582 NR Description: membrane associated protein [Arabidopsis thaliana]
  misc_feature (1)..(144): Homolog of NCBI NO: 18423592 NR Description: VAMP (vesicle-associated membrane
  misc_feature (25)..(136): Homolog of NCBI NO: 25365874 NR Description: hypothetical protein AT4g05060 [imported] -
  misc_feature (1)..(136): Homolog of NCBI NO: 21593103 NR Description: membrane associated protein-like protein
  misc_feature (1)..(136): Homolog of NCBI NO: 18412787 NR Description: VAMP (vesicle-associated membrane
  misc_feature (1)..(143): Homolog of NCBI NO: 7485721 NR Description: hypothetical protein F18E5.70 - Arabidopsis
  misc_feature (1)..(143): Homolog of NCBI NO: 34394013 NR Description: putative 27k vesicle-associated membrane
  misc_feature (1)..(143): Homolog of NCBI NO: 18415696 NR Description: VAMP (vesicle-associated membrane
  misc_feature (1)..(144): Homolog of NCBI NO: 1800147 NR Description: membrane associated protein [Arabidopsis thaliana]
  misc_feature (125)..(144): Homolog of NCBI NO: 8809582 NR Description: membrane associated protein [Arabidopsis thaliana]
  misc_feature (1)..(124): Homolog of NCBI NO: 8809582 NR Description: membrane associated protein [Arabidopsis thaliana]
  misc_feature (1)..(144): Homolog of NCBI NO: 18423592 NR Description: VAMP (vesicle-associated membrane
MRPPGGVLAPGESVFATVFKFVEHPENNEKQPLNQKSKVKFKIMSLKVKPGVEYVPELFDEQKDQVAVEQVLRVIFIDADRPSAALEKLKRQLDEAEAAVEARKKPPPETGPRVVGEGLVIDEWKERREKYLARQQVESVDSLS

SEQ ID NO: 23133 - DNA, 883 bp, Arabidopsis thaliana
  misc_feature (1)..(883): Ceres Seq. ID no. 12423215
  misc_feature: MA Experiment ID: 20000180 Result: Up-regulated in Transcription
  misc_feature: MA Experiment 20000180 PARAMETER Experiment Name: At_Germinating_Seeds_P Parameter: Age (hr) Value: 24 vs. 0
  misc_feature: MA Experiment 20000180 PARAMETER Experiment Name: At_Germinating_Seeds_P Parameter: Tissue Value: Germinating Seeds
  misc_feature: MA Experiment ID: 20000227 Result: Up-regulated in Transcription
  misc_feature: MA Experiment 20000227 PARAMETER Experiment Name: At_Root-Tips-vs-Tops_P Parameter: Tissue Value: Root Tips vs. Root Tops
  misc_feature: MA Experiment ID: 20000234 Result: Up-regulated in Transcription
  misc_feature: MA Experiment 20000234 PARAMETER Experiment Name: At_Siliques_P Parameter: Age (day) Value: 21
  misc_feature: MA Experiment 20000234 PARAMETER Experiment Name: At_Siliques_P Parameter: Organism Value: A. thaliana
  misc_feature: MA Experiment 20000234 PARAMETER Experiment Name: At_Siliques_P Parameter: Plant Line Value: WS
  misc_feature: MA Experiment 20000234 PARAMETER Experiment Name: At_Siliques_P Parameter: Tissue Value: Less Than 5mm Siliques vs. Whole Plant
  misc_feature: MA Experiment ID: 20000235 Result: Up-regulated in Transcription
  misc_feature: MA Experiment 20000235 PARAMETER Experiment Name: At_Siliques_P Parameter: Age (day) Value: 21
  misc_feature: MA Experiment 20000235 PARAMETER Experiment Name: At_Siliques_P Parameter: Organism Value: A. thaliana
  misc_feature: MA Experiment 20000235 PARAMETER Experiment Name: At_Siliques_P Parameter: Plant Line Value: WS
  misc_feature: MA Experiment 20000235 PARAMETER Experiment Name: At_Siliques_P Parameter: Tissue Value: 5-10mm Siliques vs. Whole Plant
aaaaaaaaatcatcgtgaaacgttcgaaggccattttctttggacgaccatcggcgttaaggagagagcttagatctcgtgccgtcgtgcgacgttgttttccggcttgatcaaaatggggttgtcattcggaaagttgttcagcaggctctttgcgaagaaagagatgcgtattctgatggttggtctcgatgctgctggtaagacgactatcctctacaagctcaaacttggagagatcgtcaccactattccaaccattgggttcaacgttgagactgttgaatacaagaacatcagcttcaccgtgtgggatgttgggggtcaagacaagatccgtccattgtggagacattacttccagaacacacagggacttatctttgttgtggacagcaatgatcgtgaccgtgttgttgaagccagggacgagcttcacaggatgctgaatgaggatgaattgagggatgcagttctgcttgtatttgctaacaagcaagatcttcccaacgcgatgaacgctgctgagataactgacaagcttgggcttcattctcttcgtcaacgacactggtacattcagagcacatgtgccacctctggagaaggactctatgagggacttgactggctctccaacaacatcgcaagcaaggcatagatggaatgttagccagattcctcttctgcttgtttggtttacaaatcaaagacagaggtctgtttctctagtactaaaagatttattattatattcttcttcgtcacttatctcaaacgcagatcattttacactttgtacttccccttcaataacttgttacttctctcgtttgcttccgaatttgagtatatcatttttacatctgcttttcatcaaagc

SEQ ID NO: 23134 - protein, 181 aa, Arabidopsis thaliana; identical to SEQ ID NO: 22739
  peptide (1)..(181): Ceres Seq. ID no. 12423216
  misc_feature (4)..(177): Pfam Name: ADP-ribosylation factor family Pfam Description: ADP-ribosylation factor family
  misc_feature (1)..(180): Homolog of NCBI NO: 17154685 NR Description: ADP-ribosylation factor [Gossypium hirsutum]
  misc_feature (1)..(181): Homolog of NCBI NO: 11131026 NR Description: ADP-ribosylation factor
  misc_feature (1)..(181): Homolog of NCBI NO: 34900342 NR Description: ADP-ribosylation factor 1
  misc_feature (1)..(181): Homolog of NCBI NO: 39653273 NR Description: ADP-ribosylation factor [Medicago sativa]
  misc_feature (1)..(180): Homolog of NCBI NO: 6573751 NR Description: F20B24.7 [Arabidopsis thaliana]
  misc_feature (1)..(181): Homolog of NCBI NO: 15223164 NR Description: putative ADP-ribosylation factor 1
  misc_feature (1)..(181): Homolog of NCBI NO: 30681825 NR Description: ADP-ribosylation factor, putative [Arabidopsis
  misc_feature (1)..(181): Homolog of NCBI NO: 15228723 NR Description: ADP-ribosylation factor-like protein
  misc_feature (1)..(181): Homolog of NCBI NO: 25294169 NR Description: ADP-ribosylation factor [imported] - pepper
  misc_feature (1)..(181): Homolog of NCBI NO: 15226521 NR Description: ADP-ribosylation factor 1

SEQ ID NO: 23135 - protein, 164 aa, Arabidopsis thaliana; identical to SEQ ID NO: 22740
  peptide (1)..(164): Ceres Seq. ID no. 12423217
  misc_feature (1)..(160): Pfam Name: ADP-ribosylation factor family Pfam Description: ADP-ribosylation factor family
  misc_feature (1)..(163): Homolog of NCBI NO: 17154685 NR Description: ADP-ribosylation factor [Gossypium hirsutum]
  misc_feature (1)..(164): Homolog of NCBI NO: 11131026 NR Description: ADP-ribosylation factor
  misc_feature (1)..(164): Homolog of NCBI NO: 34900342 NR Description: ADP-ribosylation factor 1
  misc_feature (1)..(164): Homolog of NCBI NO: 39653273 NR Description: ADP-ribosylation factor [Medicago sativa]
  misc_feature (1)..(163): Homolog of NCBI NO: 6573751 NR Description: F20B24.7 [Arabidopsis thaliana]
  misc_feature (1)..(164): Homolog of NCBI NO: 15223164 NR Description: putative ADP-ribosylation factor 1
  misc_feature (1)..(164): Homolog of NCBI NO: 30681825 NR Description: ADP-ribosylation factor, putative [Arabidopsis
  misc_feature (1)..(164): Homolog of NCBI NO: 15228723 NR Description: ADP-ribosylation factor-like protein
  misc_feature (1)..(164): Homolog of NCBI NO: 25294169 NR Description: ADP-ribosylation factor [imported] - pepper
  misc_feature (1)..(164): Homolog of NCBI NO: 15226521 NR Description: ADP-ribosylation factor 1

SEQ ID NO: 23136 - protein, 160 aa, Arabidopsis thaliana; identical to SEQ ID NO: 22741
  peptide (1)..(160): Ceres Seq. ID no. 12423218
  misc_feature (1)..(156): Pfam Name: ADP-ribosylation factor family Pfam Description: ADP-ribosylation factor family
  misc_feature (1)..(160): Homolog of NCBI NO: 25294169 NR Description: ADP-ribosylation factor [imported] - pepper
  misc_feature (1)..(159): Homolog of NCBI NO: 17154685 NR Description: ADP-ribosylation factor [Gossypium hirsutum]
  misc_feature (1)..(160): Homolog of NCBI NO: 34900342 NR Description: ADP-ribosylation factor 1
  misc_feature (1)..(159): Homolog of NCBI NO: 6573751 NR Description: F20B24.7 [Arabidopsis thaliana]
  misc_feature (1)..(160): Homolog of NCBI NO: 30681825 NR Description: ADP-ribosylation factor, putative [Arabidopsis
  misc_feature (1)..(160): Homolog of NCBI NO: 15228723 NR Description: ADP-ribosylation factor-like protein
  misc_feature (1)..(160): Homolog of NCBI NO: 15223164 NR Description: putative ADP-ribosylation factor 1
  misc_feature (1)..(160): Homolog of NCBI NO: 39653273 NR Description: ADP-ribosylation factor [Medicago sativa]
  misc_feature (1)..(160): Homolog of NCBI NO: 11131026 NR Description: ADP-ribosylation factor
  misc_feature (1)..(160): Homolog of NCBI NO: 15226521 NR Description: ADP-ribosylation factor 1

SEQ ID NO: 23137 - DNA, 1383 bp, Arabidopsis thaliana
  misc_feature (1)..(1383): Ceres Seq. ID no. 13493889
  misc_feature: MA Experiment ID: 108462 Result: Down-regulated in Transcription
  misc_feature: MA Experiment 108462 PARAMETER Experiment Name: At_Germinating_Seeds_cDNA_P Parameter: Age (day) Value: 2 vs. 0
  misc_feature: MA Experiment 108462 PARAMETER Experiment Name: At_Germinating_Seeds_cDNA_P Parameter: Tissue Value: Germinating Seeds
  misc_feature: MA Experiment ID: 20000112 Result: Up-regulated in Transcription
  misc_feature: MA Experiment 20000112 PARAMETER Experiment Name: At_42deg_Heat_cDNA_P Parameter: Temperature (deg C) Value: 42 vs. 22
  misc_feature: MA Experiment 20000112 PARAMETER Experiment Name: At_42deg_Heat_cDNA_P Parameter: Timepoint (hr) Value: 2
  misc_feature: MA Experiment 20000112 PARAMETER Experiment Name: At_42deg_Heat_cDNA_P Parameter: Tissue Value: Aerial
  misc_feature: MA Experiment ID: 20000113 Result: Up-regulated in Transcription
  misc_feature: MA Experiment 20000113 PARAMETER Experiment Name: At_42deg_Heat_cDNA_P Parameter: Temperature (deg C) Value: 42 vs. 22
  misc_feature: MA Experiment 20000113 PARAMETER Experiment Name: At_42deg_Heat_cDNA_P Parameter: Timepoint (hr) Value: 8
  misc_feature: MA Experiment 20000113 PARAMETER Experiment Name: At_42deg_Heat_cDNA_P Parameter: Tissue Value: Aerial
  misc_feature: MA Experiment ID: 20000184 Result: Down-regulated in Transcription
  misc_feature: MA Experiment 20000184 PARAMETER Experiment Name: At_Shoots__P Parameter: Age (day) Value: 7
  misc_feature: MA Experiment 20000184 PARAMETER Experiment Name: At_Shoots__P Parameter: Tissue Value: Shoots vs. Whole Plant
gaattgacggaggtccgttactctgaatccttgtattcgcattaaccctaactttttctgcttctcaagcgtctcgaaatctgaatccagagattaaacaaaaattgaacggacttgctttgacacagcagaccgtaaatcgggatgggtgctcctaagcagaaatggactcaagaagaagaatcagctttaaagtctggagttataaagcatggacctggtaaatggcgcacaattctcaaagatcctgaatttagcggagtcttgtacctgcgttccaatgttgatcttaaggataaatggagaaacatgagtgtcatggcaaatggctggggatcgcgcgaaaagtctaggttagctgttaaaaggacgttctcccttcctaaacaggaagagaactcactagccctaaccaattctttgcaaagtgatgaagaaaatgtggatgcgacctctggactccaagtttcttctaatcctcctccaaggagacctaatgtaaggttggatagccttataatggaagcaatagctaccctgaaagagcctggtggctgtaacaaaacaacaattggtgcctacattgaggatcaatatcatgctccaccagacttcaaacggttgttgtctaccaagctaaagtacttgacatcttgcgggaaacttgtgaaggttaaacgtaagtacagaattccaaactccactcccttgtcttcccacaggagaaaaggtctgggggtgtttggaggaaaacagaggacttcttctttgccttcacctaaaacagacatagatgaagtgaattttcagacaaggtcacagattgatacagagatagccagaatgaagagtatgaacgtacatgaggcggcagcagttgcagcacaggcagtagcagaggcagaagctgccatggcagaggctgaggaagctgcaaaggaagcggaggcagcagaagccgaagcagaagtagctcaagctttcgctgaggaagcttcaaagacattgaaaggaagaaacatctgcaaaatgatgatccgtgcctgaggtaatggaaagcgagagaagaaggagactaaatgtgaagagagagtagagagaagcctagtgtttgtgttgatcattctctttacttgggaagttgttttttagtagtaagcaatcaaatatgtttgtcagtatgtcgtcgctctgactcttttgattcctgcacaacttttgggaaaaaatgttttatttggctcttctcactctccaatatacatacaattatcgttagtaatgtgtataatttatagaccgatctatctatgcactatcatgcttatcgccaatgagcattttgattatgtatgtattatcaattaatagtagtactgtttt

SEQ ID NO: 23138 - protein, 300 aa, Arabidopsis thaliana
  peptide (1)..(300): Ceres Seq. ID no. 13493890
  misc_feature (123)..(185): Pfam Name: linker histone H1 and H5 family Pfam Description: linker histone H1 and H5 family
  misc_feature (1)..(291): Homolog of NCBI NO: 18481426 NR Description: telomere repeat binding factor 2 [Arabidopsis
  misc_feature (1)..(291): Homolog of NCBI NO: 15240783 NR Description: telomere repeat binding factor 2 (TRB2)
  misc_feature (1)..(297): Homolog of NCBI NO: 34105719 NR Description: Single myb histone 5 [Zea mays subsp. mays]
  misc_feature (1)..(300): Homolog of NCBI NO: 33286863 NR Description: Single myb histone 1 [Zea mays subsp. mays]
  misc_feature (1)..(292): Homolog of NCBI NO: 34912214 NR Description: putative telomere repeat binding factor
  misc_feature (1)..(297): Homolog of NCBI NO: 34105723 NR Description: Single myb histone 6 [Zea mays subsp. mays]
  misc_feature (1)..(297): Homolog of NCBI NO: 25405344 NR Description: hypothetical protein F2J10.16 [imported] -
  misc_feature (1)..(300): Homolog of NCBI NO: 21593573 NR Description: DNA-binding protein PcMYB1, putative [Arabidopsis
  misc_feature (1)..(300): Homolog of NCBI NO: 18402853 NR Description: DNA-binding protein PcMYB1 -related [Arabidopsis
  misc_feature (1)..(300): Homolog of NCBI NO: 18481420 NR Description: telomere repeat binding factor 1 [Arabidopsis
MGAPKQKWTQEEESALKSGVIKHGPGKWRTILKDPEFSGVLYLRSNVDLKDKWRNMSVMANGWGSREKSRLAVKRTFSLPKQEENSLALTNSLQSDEENVDATSGLQVSSNPPPRRPNVRLDSLIMEAIATLKEPGGCNKTTIGAYIEDQYHAPPDFKRLLSTKLKYLTSCGKLVKVKRKYRIPNSTPLSSHRRKGLGVFGGKQRTSSLPSPKTDIDEVNFQTRSQIDTEIARMKSMNVHEAAAVAAQAVAEAEAAMAEAEEAAKEAEAAEAEAEVAQAFAEEASKTLKGRNICKMMIRA

SEQ ID NO: 23139 - protein, 245 aa, Arabidopsis thaliana
  peptide (1)..(245): Ceres Seq. ID no. 13493891
  misc_feature (68)..(130): Pfam Name: linker histone H1 and H5 family Pfam Description: linker histone H1 and H5 family
  misc_feature (1)..(236): Homolog of NCBI NO: 18481426 NR Description: telomere repeat binding factor 2 [Arabidopsis
  misc_feature (1)..(236): Homolog of NCBI NO: 15240783 NR Description: telomere repeat binding factor 2 (TRB2)
  misc_feature (1)..(242): Homolog of NCBI NO: 34105719 NR Description: Single myb histone 5 [Zea mays subsp. mays]
  misc_feature (1)..(245): Homolog of NCBI NO: 33286863 NR Description: Single myb histone 1 [Zea mays subsp. mays]
  misc_feature (1)..(237): Homolog of NCBI NO: 34912214 NR Description: putative telomere repeat binding factor
  misc_feature (1)..(242): Homolog of NCBI NO: 34105723 NR Description: Single myb histone 6 [Zea mays subsp. mays]
  misc_feature (1)..(242): Homolog of NCBI NO: 25405344 NR Description: hypothetical protein F2J10.16 [imported] -
  misc_feature (1)..(245): Homolog of NCBI NO: 21593573 NR Description: DNA-binding protein PcMYB1, putative [Arabidopsis
  misc_feature (1)..(245): Homolog of NCBI NO: 18402853 NR Description: DNA-binding protein PcMYB1 -related [Arabidopsis
  misc_feature (1)..(245): Homolog of NCBI NO: 18481420 NR Description: telomere repeat binding factor 1 [Arabidopsis
MSVMANGWGSREKSRLAVKRTFSLPKQEENSLALTNSLQSDEENVDATSGLQVSSNPPPRRPNVRLDSLIMEAIATLKEPGGCNKTTIGAYIEDQYHAPPDFKRLLSTKLKYLTSCGKLVKVKRKYRIPNSTPLSSHRRKGLGVFGGKQRTSSLPSPKTDIDEVNFQTRSQIDTEIARMKSMNVHEAAAVAAQAVAEAEAAMAEAEEAAKEAEAAEAEAEVAQAFAEEASKTLKGRNICKMMIRA

SEQ ID NO: 23140 - protein, 242 aa, Arabidopsis thaliana
  peptide (1)..(242): Ceres Seq. ID no. 13493892
  misc_feature (65)..(127): Pfam Name: linker histone H1 and H5 family Pfam Description: linker histone H1 and H5 family
  misc_feature (1)..(233): Homolog of NCBI NO: 18481426 NR Description: telomere repeat binding factor 2 [Arabidopsis
  misc_feature (1)..(233): Homolog of NCBI NO: 15240783 NR Description: telomere repeat binding factor 2 (TRB2)
  misc_feature (1)..(239): Homolog of NCBI NO: 34105719 NR Description: Single myb histone 5 [Zea mays subsp. mays]
  misc_feature (1)..(242): Homolog of NCBI NO: 33286863 NR Description: Single myb histone 1 [Zea mays subsp. mays]
  misc_feature (1)..(234): Homolog of NCBI NO: 34912214 NR Description: putative telomere repeat binding factor
  misc_feature (1)..(239): Homolog of NCBI NO: 34105723 NR Description: Single myb histone 6 [Zea mays subsp. mays]
  misc_feature (1)..(239): Homolog of NCBI NO: 25405344 NR Description: hypothetical protein F2J10.16 [imported] -
  misc_feature (1)..(242): Homolog of NCBI NO: 21593573 NR Description: DNA-binding protein PcMYB1, putative [Arabidopsis
  misc_feature (1)..(242): Homolog of NCBI NO: 18402853 NR Description: DNA-binding protein PcMYB1 -related [Arabidopsis
  misc_feature (1)..(242): Homolog of NCBI NO: 18481420 NR Description: telomere repeat binding factor 1 [Arabidopsis
MANGWGSREKSRLAVKRTFSLPKQEENSLALTNSLQSDEENVDATSGLQVSSNPPPRRPNVRLDSLIMEAIATLKEPGGCNKTTIGAYIEDQYHAPPDFKRLLSTKLKYLTSCGKLVKVKRKYRIPNSTPLSSHRRKGLGVFGGKQRTSSLPSPKTDIDEVNFQTRSQIDTEIARMKSMNVHEAAAVAAQAVAEAEAAMAEAEEAAKEAEAAEAEAEVAQAFAEEASKTLKGRNICKMMIRA

SEQ ID NO: 23141 - DNA, 1200 bp, Arabidopsis thaliana
  misc_feature (1)..(1200): Ceres Seq. ID no. 13490536
  misc_feature: MA Experiment ID: 20000111 Result: Down-regulated in Transcription
  misc_feature: MA Experiment 20000111 PARAMETER Experiment Name: At_42deg_Heat_cDNA_P Parameter: Temperature (deg C) Value: 42 vs. 22
  misc_feature: MA Experiment 20000111 PARAMETER Experiment Name: At_42deg_Heat_cDNA_P Parameter: Timepoint (hr) Value: 6
  misc_feature: MA Experiment 20000111 PARAMETER Experiment Name: At_42deg_Heat_cDNA_P Parameter: Tissue Value: Aerial
  misc_feature: MA Experiment ID: 20000113 Result: Down-regulated in Transcription
  misc_feature: MA Experiment 20000113 PARAMETER Experiment Name: At_42deg_Heat_cDNA_P Parameter: Temperature (deg C) Value: 42 vs. 22
  misc_feature: MA Experiment 20000113 PARAMETER Experiment Name: At_42deg_Heat_cDNA_P Parameter: Timepoint (hr) Value: 8
  misc_feature: MA Experiment 20000113 PARAMETER Experiment Name: At_42deg_Heat_cDNA_P Parameter: Tissue Value: Aerial
  misc_feature: MA Experiment ID: 20000224 Result: Down-regulated in Transcription
  misc_feature: MA Experiment ID: 20000264 Result: Down-regulated in Transcription
  misc_feature: MA Experiment 20000264 PARAMETER Experiment Name: At_Open_Flower_P Parameter: Age (day) Value: 21
  misc_feature: MA Experiment 20000264 PARAMETER Experiment Name: At_Open_Flower_P Parameter: Plant Line Value: WS
  misc_feature: MA Experiment 20000264 PARAMETER Experiment Name: At_Open_Flower_P Parameter: Tissue Value: Open Flower vs. Whole Plant
aattgctcctctcctctttctcacgaagaagaagacgaagcccatcaaattaaacaagaaaaattccattttcctccattgattgtgagtgagaacaaacatttaaagcttcttactcaaagtttctttctttatagatctcaaaaaattcgatatttttctcgattcatccgccattaaggttttattgcgagatcgaagagagaaggagaaaatgacgcatagagtagatcaggaatatgattatttgtttaagattgtgttgattggtgattctggtgttgggaaatcgaatatcttgtcgagattcaccaggaatgagttttgcttggaatctaaatccactattggtgttgaattcgccaccagaactactcaggttgaaggaaagaccattaaggcccagatctgggacactgcaggtcaggagaggtacagggcgatcacaagcgcgtattacagaggcgcagtgggtgcacttcttgtctacgacattactaagagacagacctttgacaatgttttaaggtggctgcgcgaactgagagaccatgcagattccaacattgtgatcatgatggctgggaacaaatccgatctgaaccacttgagatccgttgctgaggaagatggtcaaagtttggctgagaaggaaggtctctctttcctggagacatctgctcttgaagcaacaaacgtcgagaaagcgtttcagaccatcttaggtgagatctaccatatcataagcaaaaaggcactggctgcacaagaagcagcagcagctaattctgcaatccctgggcaaggaactacgattaacgtcgatgacacatctggaggcgcgaaacgagcatgttgctcttcttaaactaaaggtaaactgtttatttcggttgctccttgttcagagattcaaacttttgttttcactggcttctcttcttttcaagttttggctgatgaaacgtaactatgcaagactatgtagaatactctgtttttattctcttcggtttggggtttgtgttcagtttaaagcttgttagtagtatacttagaatcttctggtgcttgcttgctttcccttcttcttcccttggtgtgtttctattgatttctggtttataaagtattttttctatctccggtttagtccggttcgtcttggctttgtttaatcaaatcattgattcctctctc

SEQ ID NO: 23142 - protein, 217 aa, Arabidopsis thaliana
  peptide (1)..(217): Ceres Seq. ID no. 13490537
  misc_feature (14)..(175): Pfam Name: Ras family Pfam Description: Ras family
  misc_feature (1)..(217): Homolog of NCBI NO: 34908298 NR Description: Ras-related GTP-binding protein
  misc_feature (1)..(217): Homolog of NCBI NO: 3024506 NR Description: RAS-RELATED PROTEIN RAB11A
  misc_feature (1)..(217): Homolog of NCBI NO: 34897394 NR Description: Ras-related GTP-binding protein
  misc_feature (1)..(56): Homolog of NCBI NO: 25294121 NR Description: protein F22G5.24 [imported] - Arabidopsis
  misc_feature (58)..(217): Homolog of NCBI NO: 25294121 NR Description: protein F22G5.24 [imported] - Arabidopsis
  misc_feature (1)..(217): Homolog of NCBI NO: 3024528 NR Description: RAS-RELATED PROTEIN RAB2BV
  misc_feature (1)..(217): Homolog of NCBI NO: 15222396 NR Description: GTP-binding protein, putative [Arabidopsis
  misc_feature (1)..(217): Homolog of NCBI NO: 3024501 NR Description: RAS-RELATED PROTEIN RAB11C
  misc_feature (1)..(217): Homolog of NCBI NO: 15237828 NR Description: GTP binding protein, putative [Arabidopsis
  misc_feature (1)..(217): Homolog of NCBI NO: 15232652 NR Description: GTP-binding protein, putative [Arabidopsis
MTHRVDQEYDYLFKIVLIGDSGVGKSNILSRFTRNEFCLESKSTIGVEFATRTTQVEGKTIKAQIWDTAGQERYRAITSAYYRGAVGALLVYDITKRQTFDNVLRWLRELRDHADSNIVIMMAGNKSDLNHLRSVAEEDGQSLAEKEGLSFLETSALEATNVEKAFQTILGEIYHIISKKALAAQEAAAANSAIPGQGTTINVDDTSGGAKRACCSS

SEQ ID NO: 23143 - DNA, 1131 bp, Arabidopsis thaliana
  misc_feature (1)..(1131): Ceres Seq. ID no. 12357640
  misc_feature: MA Experiment ID: 108561 Result: Down-regulated in Transcription
  misc_feature: MA Experiment 108561 PARAMETER Experiment Name: At_100uM_ABA_cDNA_P Parameter: Timepoint (hr) Value: 6
  misc_feature: MA Experiment 108561 PARAMETER Experiment Name: At_100uM_ABA_cDNA_P Parameter: Tissue Value: Aerial
  misc_feature: MA Experiment 108561 PARAMETER Experiment Name: At_100uM_ABA_cDNA_P Parameter: Treatment Value: 100uM ABA vs. No Treatment
  misc_feature: MA Experiment ID: 108572 Result: Down-regulated in Transcription
  misc_feature: MA Experiment 108572 PARAMETER Experiment Name: At_Drought_cDNA_P Parameter: Timepoint (hr) Value: 1
  misc_feature: MA Experiment 108572 PARAMETER Experiment Name: At_Drought_cDNA_P Parameter: Tissue Value: Aerial
  misc_feature: MA Experiment 108572 PARAMETER Experiment Name: At_Drought_cDNA_P Parameter: Treatment Value: Drought vs. No Drought
  misc_feature: MA Experiment ID: 108577 Result: Down-regulated in Transcription
  misc_feature: MA Experiment 108577 PARAMETER Experiment Name: At_42deg_Heat_cDNA_P Parameter: Temperature (deg C) Value: 42 vs. 22
  misc_feature: MA Experiment 108577 PARAMETER Experiment Name: At_42deg_Heat_cDNA_P Parameter: Timepoint (hr) Value: 6
  misc_feature: MA Experiment 108577 PARAMETER Experiment Name: At_42deg_Heat_cDNA_P Parameter: Tissue Value: Aerial
  misc_feature: MA Experiment ID: 108579 Result: Up-regulated in Transcription
  misc_feature: MA Experiment 108579 PARAMETER Experiment Name: At_4deg_Cold_cDNA_P Parameter: Temperature (deg C) Value: 4 vs. 22
  misc_feature: MA Experiment 108579 PARAMETER Experiment Name: At_4deg_Cold_cDNA_P Parameter: Timepoint (hr) Value: 6
  misc_feature: MA Experiment 108579 PARAMETER Experiment Name: At_4deg_Cold_cDNA_P Parameter: Tissue Value: Aerial
  misc_feature: MA Experiment ID: 20000087 Result: Down-regulated in Transcription
  misc_feature: MA Experiment 20000087 PARAMETER Experiment Name: At_100uM_ABA_Mutants_cDNA_P Parameter: Plant Line Value: WS
  misc_feature: MA Experiment 20000087 PARAMETER Experiment Name: At_100uM_ABA_Mutants_cDNA_P Parameter: Timepoint (hr) Value: 6
  misc_feature: MA Experiment 20000087 PARAMETER Experiment Name: At_100uM_ABA_Mutants_cDNA_P Parameter: Tissue Value: Aerial
  misc_feature: MA Experiment 20000087 PARAMETER Experiment Name: At_100uM_ABA_Mutants_cDNA_P Parameter: Treatment Value: 100uM ABA vs. No Treatment
  misc_feature: MA Experiment ID: 20000180 Result: Up-regulated in Transcription
  misc_feature: MA Experiment 20000180 PARAMETER Experiment Name: At_Germinating_Seeds_P Parameter: Age (hr) Value: 24 vs. 0
  misc_feature: MA Experiment 20000180 PARAMETER Experiment Name: At_Germinating_Seeds_P Parameter: Tissue Value: Germinating Seeds
  misc_feature: MA Experiment ID: 20000213 Result: Up-regulated in Transcription
  misc_feature: MA Experiment 20000213 PARAMETER Experiment Name: At_4deg_Cold_P Parameter: Timepoint (hr) Value: 2
  misc_feature: MA Experiment ID: 20000437 Result: Down-regulated in Transcription
  misc_feature: MA Experiment 20000437 PARAMETER Experiment Name: At_Drought_P Parameter: Age (day) Value: 8
  misc_feature: MA Experiment 20000437 PARAMETER Experiment Name: At_Drought_P Parameter: Organism Value: A. thaliana
  misc_feature: MA Experiment 20000437 PARAMETER Experiment Name: At_Drought_P Parameter: Plant Line Value: WS
  misc_feature: MA Experiment 20000437 PARAMETER Experiment Name: At_Drought_P Parameter: Timepoint (hr) Value: 24
  misc_feature: MA Experiment 20000437 PARAMETER Experiment Name: At_Drought_P Parameter: Tissue Value: Whole Plant
  misc_feature: MA Experiment 20000437 PARAMETER Experiment Name: At_Drought_P Parameter: Treatment Value: Drought vs. No Drought
  misc_feature: MA Experiment ID: 20000794 Result: Down-regulated in Transcription
  misc_feature: MA Experiment 20000794 PARAMETER Experiment Name: At_Petals_P Parameter: Age (day) Value: 23-25 days
  misc_feature: MA Experiment 20000794 PARAMETER Experiment Name: At_Petals_P Parameter: Plant Line Value: WS
  misc_feature: MA Experiment 20000794 PARAMETER Experiment Name: At_Petals_P Parameter: Tissue Value: Petals vs. Whole plant
  misc_feature: MA Experiment ID: 20001451 Result: Down-regulated in Transcription
  misc_feature: MA Experiment 20001451 PARAMETER Experiment Name: At_Far-red-induction_P Parameter: Age (day) Value: 7
  misc_feature: MA Experiment 20001451 PARAMETER Experiment Name: At_Far-red-induction_P Parameter: Light Value: Far-red vs. White
  misc_feature: MA Experiment 20001451 PARAMETER Experiment Name: At_Far-red-induction_P Parameter: Organism Value: A. thaliana
  misc_feature: MA Experiment 20001451 PARAMETER Experiment Name: At_Far-red-induction_P Parameter: Plant Line Value: Columbia
  misc_feature: MA Experiment 20001451 PARAMETER Experiment Name: At_Far-red-induction_P Parameter: Timepoint (hr) Value: 24
  misc_feature: MA Experiment 20001451 PARAMETER Experiment Name: At_Far-red-induction_P Parameter: Tissue Value: Whole Plant
  misc_feature: MA Experiment ID: 20001911 Result: Down-regulated in Transcription
  misc_feature: MA Experiment 20001911 PARAMETER Experiment Name: At_Drought_Reproduction_P Parameter: Age (day) Value: 40
  misc_feature: MA Experiment 20001911 PARAMETER Experiment Name: At_Drought_Reproduction_P Parameter: Organism Value: A. thaliana
  misc_feature: MA Experiment 20001911 PARAMETER Experiment Name: At_Drought_Reproduction_P Parameter: Plant Line Value: WS
  misc_feature: MA Experiment 20001911 PARAMETER Experiment Name: At_Drought_Reproduction_P Parameter: Timepoint (day) Value: 10
  misc_feature: MA Experiment 20001911 PARAMETER Experiment Name: At_Drought_Reproduction_P Parameter: Tissue Value: Flowers
  misc_feature: MA Experiment 20001911 PARAMETER Experiment Name: At_Drought_Reproduction_P Parameter: Treatment Value: Drought vs. No Drought
gtgatattaacacttcgaagcttcttcttcctttagtaaattcaagtgtgaggtgtgtttattgataaagtgctcattttctcggatctcagatcttagatccaaaccctcattatttcattgatccaagatctaatagcttgagcttgctgggattttagttatggcgagacggcaagtaggttcaacaagacgtgttggcgatggtggaagcttcccttttgcaggagctttacactcaaagtctcgatcttctccactactatctatttgccttgttcttgtgggggcttgtcttctcattggttatgcttacagtggtccaggtatatttaaaagtatcaaagaagttagcaaagttacaggtgactattcttgcacagcagaagtccaaagagccattcctgtacttaagaaggcttatggagatggcatgcgcaaagtcttgcatgtgggccctgacacatgctcagtggtttccagtctattgaaagaagaagagactgaagcatggggtgttgaaccatatgatattgaggatgcagattctcactgcaagagttttgtgagcaaaggtcttgtacgtgttgctgatatcaagtttcctctgccctaccgggcaaaatccttctctcttgtgattgtgtcagatgctctggattatctctcacccaagtacctgaacaagaccgttcctgaactcgcaagggtggcttcagacggtgtggttctttttgcaggtctccctggtcagcagagagctaaagttgctgaactctctaaattcggccgacccgctaaaatgcgtagcgcatcgtggtggaaccgctttttcgtccagacaaacttagaagaaaacgatgcaccaagcaagaagttcgaacaggctgtttccaaaggattatacaaaccagcctgccaagtcttccacctcaagccattacattaaccagccaccaccaaagcctactggttccacaccaaagcatatttacacgtagagccgcacgcgaaaaaaaaaaatagcgtaatcgatatttctccttgtattttgtaacaggtcagtttttatccttcaatgttgtatccgccaacacaatttttcctattcaattaaatcataattattag

SEQ ID NO: 23144 - protein, 261 aa, Arabidopsis thaliana
  peptide (1)..(261): Ceres Seq. ID no. 12357641
  misc_feature (1)..(257): Homolog of NCBI NO: 34895744 NR Description: P0019D06.30 [Oryza sativa (japonica
  misc_feature (91)..(261): Homolog of NCBI NO: 16649137 NR Description: Unknown protein [Arabidopsis thaliana]
  misc_feature (1)..(211): Homolog of NCBI NO: 9758568 NR Description: emb|CAB66910.1~gene_id:K22J17.2~similar to
  misc_feature (1)..(261): Homolog of NCBI NO: 18424995 NR Description: putative protein
  misc_feature (1)..(261): Homolog of NCBI NO: 21593192 NR Description: unknown [Arabidopsis thaliana]
  misc_feature (1)..(261): Homolog of NCBI NO: 18408931 NR Description: expressed protein
MARRQVGSTRRVGDGGSFPFAGALHSKSRSSPLLSICLVLVGACLLIGYAYSGPGIFKSIKEVSKVTGDYSCTAEVQRAIPVLKKAYGDGMRKVLHVGPDTCSVVSSLLKEEETEAWGVEPYDIEDADSHCKSFVSKGLVRVADIKFPLPYRAKSFSLVIVSDALDYLSPKYLNKTVPELARVASDGVVLFAGLPGQQRAKVAELSKFGRPAKMRSASWWNRFFVQTNLEENDAPSKKFEQAVSKGLYKPACQVFHLKPLH

SEQ ID NO: 23145 - protein, 171 aa, Arabidopsis thaliana
  peptide (1)..(171): Ceres Seq. ID no. 12357642
  misc_feature (1)..(167): Homolog of NCBI NO: 34895744 NR Description: P0019D06.30 [Oryza sativa (japonica
  misc_feature (1)..(171): Homolog of NCBI NO: 16649137 NR Description: Unknown protein [Arabidopsis thaliana]
  misc_feature (1)..(121): Homolog of NCBI NO: 9758568 NR Description: emb|CAB66910.1~gene_id:K22J17.2~similar to
  misc_feature (1)..(171): Homolog of NCBI NO: 18424995 NR Description: putative protein
  misc_feature (1)..(171): Homolog of NCBI NO: 21593192 NR Description: unknown [Arabidopsis thaliana]
  misc_feature (1)..(171): Homolog of NCBI NO: 18408931 NR Description: expressed protein
MRKVLHVGPDTCSVVSSLLKEEETEAWGVEPYDIEDADSHCKSFVSKGLVRVADIKFPLPYRAKSFSLVIVSDALDYLSPKYLNKTVPELARVASDGVVLFAGLPGQQRAKVAELSKFGRPAKMRSASWWNRFFVQTNLEENDAPSKKFEQAVSKGLYKPACQVFHLKPLH

SEQ ID NO: 23146 - DNA, 1167 bp, Arabidopsis thaliana
  misc_feature (1)..(1167): Ceres Seq. ID no. 12348604
  misc_feature: MA Experiment ID: 108462 Result: Down-regulated in Transcription
  misc_feature: MA Experiment 108462 PARAMETER Experiment Name: At_Germinating_Seeds_cDNA_P Parameter: Age (day) Value: 2 vs. 0
  misc_feature: MA Experiment 108462 PARAMETER Experiment Name: At_Germinating_Seeds_cDNA_P Parameter: Tissue Value: Germinating Seeds
  misc_feature: MA Experiment ID: 108463 Result: Down-regulated in Transcription
  misc_feature: MA Experiment 108463 PARAMETER Experiment Name: At_Germinating_Seeds_cDNA_P Parameter: Age (day) Value: 3 vs. 0
  misc_feature: MA Experiment 108463 PARAMETER Experiment Name: At_Germinating_Seeds_cDNA_P Parameter: Tissue Value: Germinating Seeds
  misc_feature: MA Experiment ID: 108585 Result: Up-regulated in Transcription
  misc_feature: MA Experiment 108585 PARAMETER Experiment Name: At_5mM_NaNP_cDNA_P Parameter: Timepoint (hr) Value: 6
  misc_feature: MA Experiment 108585 PARAMETER Experiment Name: At_5mM_NaNP_cDNA_P Parameter: Tissue Value: Aerial
  misc_feature: MA Experiment 108585 PARAMETER Experiment Name: At_5mM_NaNP_cDNA_P Parameter: Treatment Value: null
  misc_feature: MA Experiment ID: 20000235 Result: Up-regulated in Transcription
  misc_feature: MA Experiment 20000235 PARAMETER Experiment Name: At_Siliques_P Parameter: Age (day) Value: 21
  misc_feature: MA Experiment 20000235 PARAMETER Experiment Name: At_Siliques_P Parameter: Organism Value: A. thaliana
  misc_feature: MA Experiment 20000235 PARAMETER Experiment Name: At_Siliques_P Parameter: Plant Line Value: WS
  misc_feature: MA Experiment 20000235 PARAMETER Experiment Name: At_Siliques_P Parameter: Tissue Value: 5-10mm Siliques vs. Whole Plant
  misc_feature: MA Experiment ID: 20001911 Result: Up-regulated in Transcription
  misc_feature: MA Experiment 20001911 PARAMETER Experiment Name: At_Drought_Reproduction_P Parameter: Age (day) Value: 40
  misc_feature: MA Experiment 20001911 PARAMETER Experiment Name: At_Drought_Reproduction_P Parameter: Organism Value: A. thaliana
  misc_feature: MA Experiment 20001911 PARAMETER Experiment Name: At_Drought_Reproduction_P Parameter: Plant Line Value: WS
  misc_feature: MA Experiment 20001911 PARAMETER Experiment Name: At_Drought_Reproduction_P Parameter: Timepoint (day) Value: 10
  misc_feature: MA Experiment 20001911 PARAMETER Experiment Name: At_Drought_Reproduction_P Parameter: Tissue Value: Flowers
  misc_feature: MA Experiment 20001911 PARAMETER Experiment Name: At_Drought_Reproduction_P Parameter: Treatment Value: Drought vs. No Drought
ggcctttaagataaagaaaaggaaacccaatcgaaaacctaaaacccgattagattttcttagatacgaaacctctcttacgacgctccttcctcaatctctctcgatcgtcggagattctttcttcaagagtcatcttcttcttcttctccttctccctaaaccctaatttatcgcgtttggatcgaatcagctgtcaattcttgttttggttttcacggccagggccatgtctgccgtatattgcggaaccaagagatcttacttcgacgataattcttctccgccctcttctaagaggttccgatgtttttcgccttccaattctccaatctggtcctctcctccttcctcatcgctcgatcagcttcactctgcgtttcctcatattgaactcacggttctcgtcaaggcactagaagataatggaagtgattttaatgctgctatgaagagcttatactctttcgcatcttctgaggagaagaaagctgaagaattggccgcaggaggtgctgctactcaggaaactgatgccgtttgtggtggaaaccccccgaccagtggtgatgactgggttgaattgttagtcagggaagtgttacaatcgtctggtacagatgatgcaaaagtacgtgcagcaagagtccttgaggccttagagaagatgttaagtgcacgtgctcgtgaagaagctggaaacaaattccaagaggagaaagtggcagtgcagcaacaggtggagaccttggtgaaggacaacacagtcctcaaacgtgctgttgctatccagcatgagcggcagaaggcattggaggatgcgaaccatcagctaggacttttgaagcaactggttcctcagtatcaggaaaagcttagaaatctggaggtgaacaattacgcgttgagaatgcagctgcagcaagtggaacatggcaactcaatgccagcaagattcaatccggacgtcttctaaagctctccaagaagacaaggacacttgcagaggaggagaaggcaataaacgaaagtagagggagagagagagagagagcgatatcaaactacaaaacaaaagtgcttttgcattgtaatactgtgtagtcaggacaaacaaacattctgtttcctttcctttttttttttatatatttctttggtttgctg

SEQ ID NO: 23147 - protein, 248 aa, Arabidopsis thaliana
  peptide (1)..(248): Ceres Seq. ID no. 12348605
  misc_feature (95)..(211): Homolog of NCBI NO: 35215036 NR Description: hypothetical protein [Oryza sativa (japonica
  misc_feature (188)..(248): Homolog of NCBI NO: 35215036 NR Description: hypothetical protein [Oryza sativa (japonica
  misc_feature (113)..(248): Homolog of NCBI NO: 15241851 NR Description: putative protein; protein id: At5g02510.1
  misc_feature (82)..(248): Homolog of NCBI NO: 34015166 NR Description: hypothetical protein OSJNBa0017M13.20
  misc_feature (1)..(248): Homolog of NCBI NO: 18421340 NR Description: putative protein
  misc_feature (1)..(248): Homolog of NCBI NO: 13877755 NR Description: unknown protein [Arabidopsis thaliana]
  misc_feature (1)..(248): Homolog of NCBI NO: 18412607 NR Description: expressed protein
MSAVYCGTKRSYFDDNSSPPSSKRFRCFSPSNSPIWSSPPSSSLDQLHSAFPHIELTVLVKALEDNGSDFNAAMKSLYSFASSEEKKAEELAAGGAATQETDAVCGGNPPTSGDDWVELLVREVLQSSGTDDAKVRAARVLEALEKMLSARAREEAGNKFQEEKVAVQQQVETLVKDNTVLKRAVAIQHERQKALEDANHQLGLLKQLVPQYQEKLRNLEVNNYALRMQLQQVEHGNSMPARFNPDVF

SEQ ID NO: 23148 - protein, 175 aa, Arabidopsis thaliana
  peptide (1)..(175): Ceres Seq. ID no. 12348606
  misc_feature (22)..(138): Homolog of NCBI NO: 35215036 NR Description: hypothetical protein [Oryza sativa (japonica
  misc_feature (115)..(175): Homolog of NCBI NO: 35215036 NR Description: hypothetical protein [Oryza sativa (japonica
  misc_feature (40)..(175): Homolog of NCBI NO: 15241851 NR Description: putative protein; protein id: At5g02510.1
  misc_feature (9)..(175): Homolog of NCBI NO: 34015166 NR Description: hypothetical protein OSJNBa0017M13.20
  misc_feature (1)..(175): Homolog of NCBI NO: 18421340 NR Description: putative protein
  misc_feature (1)..(175): Homolog of NCBI NO: 13877755 NR Description: unknown protein [Arabidopsis thaliana]
  misc_feature (1)..(175): Homolog of NCBI NO: 18412607 NR Description: expressed protein
MKSLYSFASSEEKKAEELAAGGAATQETDAVCGGNPPTSGDDWVELLVREVLQSSGTDDAKVRAARVLEALEKMLSARAREEAGNKFQEEKVAVQQQVETLVKDNTVLKRAVAIQHERQKALEDANHQLGLLKQLVPQYQEKLRNLEVNNYALRMQLQQVEHGNSMPARFNPDVF

SEQ ID NO: 23149 - DNA, 932 bp, Arabidopsis thaliana
  misc_feature (1)..(932): Ceres Seq. ID no. 13490590
  misc_feature: MA Experiment ID: 108501 Result: Up-regulated in Transcription
  misc_feature: MA Experiment 108501 PARAMETER Experiment Name: At_ap2_floral_buds_cDNA_P Parameter: Plant Line Value: ap2 (Ler.)
  misc_feature: MA Experiment 108501 PARAMETER Experiment Name: At_ap2_floral_buds_cDNA_P Parameter: Tissue Value: Closed Flower
  misc_feature: MA Experiment ID: 20000234 Result: Up-regulated in Transcription
  misc_feature: MA Experiment 20000234 PARAMETER Experiment Name: At_Siliques_P Parameter: Age (day) Value: 21
  misc_feature: MA Experiment 20000234 PARAMETER Experiment Name: At_Siliques_P Parameter: Organism Value: A. thaliana
  misc_feature: MA Experiment 20000234 PARAMETER Experiment Name: At_Siliques_P Parameter: Plant Line Value: WS
  misc_feature: MA Experiment 20000234 PARAMETER Experiment Name: At_Siliques_P Parameter: Tissue Value: Less Than 5mm Siliques vs. Whole Plant
  misc_feature: MA Experiment ID: 20000235 Result: Up-regulated in Transcription
  misc_feature: MA Experiment 20000235 PARAMETER Experiment Name: At_Siliques_P Parameter: Age (day) Value: 21
  misc_feature: MA Experiment 20000235 PARAMETER Experiment Name: At_Siliques_P Parameter: Organism Value: A. thaliana
  misc_feature: MA Experiment 20000235 PARAMETER Experiment Name: At_Siliques_P Parameter: Plant Line Value: WS
  misc_feature: MA Experiment 20000235 PARAMETER Experiment Name: At_Siliques_P Parameter: Tissue Value: 5-10mm Siliques vs. Whole Plant
  misc_feature: MA Experiment ID: 20000264 Result: Up-regulated in Transcription
  misc_feature: MA Experiment 20000264 PARAMETER Experiment Name: At_Open_Flower_P Parameter: Age (day) Value: 21
  misc_feature: MA Experiment 20000264 PARAMETER Experiment Name: At_Open_Flower_P Parameter: Plant Line Value: WS
  misc_feature: MA Experiment 20000264 PARAMETER Experiment Name: At_Open_Flower_P Parameter: Tissue Value: Open Flower vs. Whole Plant
  misc_feature: MA Experiment ID: 20000286 Result: Up-regulated in Transcription
  misc_feature: MA Experiment 20000286 PARAMETER Experiment Name: At_Open_Flower_P Parameter: Age (day) Value: 21
  misc_feature: MA Experiment 20000286 PARAMETER Experiment Name: At_Open_Flower_P Parameter: Plant Line Value: WS
  misc_feature: MA Experiment 20000286 PARAMETER Experiment Name: At_Open_Flower_P Parameter: Tissue Value: Half Open vs. Whole Plant
atctttaggccaatgaacaaattaactctctcataattcatcttcccatcctcacttctctttctttctgatcataattaatcttgctaagccagctagggcttatagaaatggagggtggtgcgagtaatgaagtagcagagagcagcaagaagatagggagagggaagatagagataaagaggatagagaacactacgaatcgtcaagtcactttctgcaaacgacgcaatggtttactcaagaaagcttatgagctctctgtcttgtgtgacgctgaggttgctcttgtcatcttctccactcgaggccgtctctacgagtacgccaacaacagtgtgagaggaacaatagaaaggtacaagaaagcttgctccgacgccgttaaccctccgaccatcaccgaagctaatactcagtactatcagcaagaggcgtctaaactccggagacagattcgggacattcagaatttgaacagacacattcttggtgaatctcttggttccttgaactttaaggaactcaagaaccttgaaagtaggcttgagaaaggaatcagtcgtgtccgatccaagaagcacgagatgttagttgcagagattgaatacatgcaaaaaagggtaaaagaaatcgagctgcaaaacgataacatgtatctccgctccaagattactgaaagaacaggtctacagcaacaagaatcgagtgtgatacatcaagggacagtttacgagtcgggtgttacttcttctcaccagtcggggcagtataaccggaattatattgcggttaaccttcttgaaccgaatcagaattcctccaaccaagaccaaccacctctgcaacttgtttgattcagtctaacataagcttctttcctcagcctgagatcgatcttatgcatatatatattcatgttacacttactg

SEQ ID NO: 23150 - protein, 248 aa, Arabidopsis thaliana
  peptide (1)..(248): Ceres Seq. ID no. 13490591
  misc_feature (89)..(190): Pfam Name: K-box region Pfam Description: K-box region
  misc_feature (6)..(248): Homolog of NCBI NO: 16973296 NR Description: C-type MADS box protein [Malus x domestica]
  misc_feature (5)..(248): Homolog of NCBI NO: 6970411 NR Description: MADS-box protein [Rosa rugosa]
  misc_feature (16)..(248): Homolog of NCBI NO: 14279306 NR Description: MAD-box transcripion factor [Vitis vinifera]
  misc_feature (6)..(248): Homolog of NCBI NO: 5031217 NR Description: AGAMOUS homolog [Liquidambar styraciflua]
  misc_feature (68)..(248): Homolog of NCBI NO: 28392912 NR Description: putative floral homeodomain transcription factor
  misc_feature (2)..(248): Homolog of NCBI NO: 12655901 NR Description: SHATTERPROOF1 [Brassica napus]
  misc_feature (2)..(248): Homolog of NCBI NO: 15231135 NR Description: MADS-box protein [Arabidopsis thaliana]
  misc_feature (1)..(247): Homolog of NCBI NO: 25307910 NR Description: floral homeodomain transcription factor (AGL5)
  misc_feature (1)..(248): Homolog of NCBI NO: 18406070 NR Description: floral homeodomain transcription factor (AGL5)
  misc_feature (1)..(248): Homolog of NCBI NO: 30689162 NR Description: floral homeodomain transcription factor (AGL5)
MEGGASNEVAESSKKIGRGKIEIKRIENTTNRQVTFCKRRNGLLKKAYELSVLCDAEVALVIFSTRGRLYEYANNSVRGTIERYKKACSDAVNPPTITEANTQYYQQEASKLRRQIRDIQNLNRHILGESLGSLNFKELKNLESRLEKGISRVRSKKHEMLVAEIEYMQKRVKEIELQNDNMYLRSKITERTGLQQQESSVIHQGTVYESGVTSSHQSGQYNRNYIAVNLLEPNQNSSNQDQPPLQLV

SEQ ID NO: 23151 - DNA, 758 bp, Arabidopsis thaliana
  misc_feature (1)..(758): Ceres Seq. ID no. 12397013
  misc_feature: MA Experiment ID: 108462 Result: Down-regulated in Transcription
  misc_feature: MA Experiment 108462 PARAMETER Experiment Name: At_Germinating_Seeds_cDNA_P Parameter: Age (day) Value: 2 vs. 0
  misc_feature: MA Experiment 108462 PARAMETER Experiment Name: At_Germinating_Seeds_cDNA_P Parameter: Tissue Value: Germinating Seeds
  misc_feature: MA Experiment ID: 108463 Result: Down-regulated in Transcription
  misc_feature: MA Experiment 108463 PARAMETER Experiment Name: At_Germinating_Seeds_cDNA_P Parameter: Age (day) Value: 3 vs. 0
  misc_feature: MA Experiment 108463 PARAMETER Experiment Name: At_Germinating_Seeds_cDNA_P Parameter: Tissue Value: Germinating Seeds
  misc_feature: MA Experiment ID: 108464 Result: Down-regulated in Transcription
  misc_feature: MA Experiment 108464 PARAMETER Experiment Name: At_Germinating_Seeds_cDNA_P Parameter: Age (day) Value: 4 vs. 0
  misc_feature: MA Experiment 108464 PARAMETER Experiment Name: At_Germinating_Seeds_cDNA_P Parameter: Tissue Value: Germinating Seeds
  misc_feature: MA Experiment ID: 108501 Result: Down-regulated in Transcription
  misc_feature: MA Experiment 108501 PARAMETER Experiment Name: At_ap2_floral_buds_cDNA_P Parameter: Plant Line Value: ap2 (Ler.)
  misc_feature: MA Experiment 108501 PARAMETER Experiment Name: At_ap2_floral_buds_cDNA_P Parameter: Tissue Value: Closed Flower
  misc_feature: MA Experiment ID: 108576 Result: Up-regulated in Transcription
  misc_feature: MA Experiment 108576 PARAMETER Experiment Name: At_42deg_Heat_cDNA_P Parameter: Temperature (deg C) Value: 42 vs. 22
  misc_feature: MA Experiment 108576 PARAMETER Experiment Name: At_42deg_Heat_cDNA_P Parameter: Timepoint (hr) Value: 1
  misc_feature: MA Experiment 108576 PARAMETER Experiment Name: At_42deg_Heat_cDNA_P Parameter: Tissue Value: Aerial
  misc_feature: MA Experiment ID: 108579 Result: Up-regulated in Transcription
  misc_feature: MA Experiment 108579 PARAMETER Experiment Name: At_4deg_Cold_cDNA_P Parameter: Temperature (deg C) Value: 4 vs. 22
  misc_feature: MA Experiment 108579 PARAMETER Experiment Name: At_4deg_Cold_cDNA_P Parameter: Timepoint (hr) Value: 6
  misc_feature: MA Experiment 108579 PARAMETER Experiment Name: At_4deg_Cold_cDNA_P Parameter: Tissue Value: Aerial
  misc_feature: MA Experiment ID: 108595 Result: Up-regulated in Transcription
  misc_feature: MA Experiment 108595 PARAMETER Experiment Name: At_Ler-pi_Ovule_cDNA_P Parameter: Plant Line Value: null
  misc_feature: MA Experiment ID: 108608 Result: Up-regulated in Transcription
  misc_feature: MA Experiment 108608 PARAMETER Experiment Name: At_100uM_ABA_cDNA_P Parameter: Timepoint (hr) Value: 1
  misc_feature: MA Experiment 108608 PARAMETER Experiment Name: At_100uM_ABA_cDNA_P Parameter: Tissue Value: Aerial
  misc_feature: MA Experiment 108608 PARAMETER Experiment Name: At_100uM_ABA_cDNA_P Parameter: Treatment Value: 100uM ABA vs. No Treatment
  misc_feature: MA Experiment ID: 20000069 Result: Up-regulated in Transcription
  misc_feature: MA Experiment 20000069 PARAMETER Experiment Name: At_100uM_ABA_Mutants_cDNA_P Parameter: Plant Line Value: CS23
  misc_feature: MA Experiment 20000069 PARAMETER Experiment Name: At_100uM_ABA_Mutants_cDNA_P Parameter: Timepoint (hr) Value: 6
  misc_feature: MA Experiment 20000069 PARAMETER Experiment Name: At_100uM_ABA_Mutants_cDNA_P Parameter: Tissue Value: Aerial
  misc_feature: MA Experiment 20000069 PARAMETER Experiment Name: At_100uM_ABA_Mutants_cDNA_P Parameter: Treatment Value: 100uM ABA vs. No Treatment
  misc_feature: MA Experiment ID: 20000070 Result: Up-regulated in Transcription
  misc_feature: MA Experiment 20000070 PARAMETER Experiment Name: At_100uM_ABA_Mutants_cDNA_P Parameter: Plant Line Value: CS24
  misc_feature: MA Experiment 20000070 PARAMETER Experiment Name: At_100uM_ABA_Mutants_cDNA_P Parameter: Timepoint (hr) Value: 6
  misc_feature: MA Experiment 20000070 PARAMETER Experiment Name: At_100uM_ABA_Mutants_cDNA_P Parameter: Tissue Value: Aerial
  misc_feature: MA Experiment 20000070 PARAMETER Experiment Name: At_100uM_ABA_Mutants_cDNA_P Parameter: Treatment Value: 100uM ABA vs. No Treatment
  misc_feature: MA Experiment ID: 20000071 Result: Up-regulated in Transcription
  misc_feature: MA Experiment 20000071 PARAMETER Experiment Name: At_100uM_ABA_Mutants_cDNA_P Parameter: Plant Line Value: CS8104
  misc_feature: MA Experiment 20000071 PARAMETER Experiment Name: At_100uM_ABA_Mutants_cDNA_P Parameter: Timepoint (hr) Value: 6
  misc_feature: MA Experiment 20000071 PARAMETER Experiment Name: At_100uM_ABA_Mutants_cDNA_P Parameter: Tissue Value: Aerial
  misc_feature: MA Experiment 20000071 PARAMETER Experiment Name: At_100uM_ABA_Mutants_cDNA_P Parameter: Treatment Value: 100uM ABA vs. No Treatment
  misc_feature: MA Experiment ID: 20000088 Result: Up-regulated in Transcription
  misc_feature: MA Experiment 20000088 PARAMETER Experiment Name: At_100uM_ABA_Mutants_cDNA_P Parameter: Plant Line Value: Landsberg
  misc_feature: MA Experiment 20000088 PARAMETER Experiment Name: At_100uM_ABA_Mutants_cDNA_P Parameter: Timepoint (hr) Value: 6
  misc_feature: MA Experiment 20000088 PARAMETER Experiment Name: At_100uM_ABA_Mutants_cDNA_P Parameter: Tissue Value: Aerial
  misc_feature: MA Experiment 20000088 PARAMETER Experiment Name: At_100uM_ABA_Mutants_cDNA_P Parameter: Treatment Value: 100uM ABA vs. No Treatment
  misc_feature: MA Experiment ID: 20000090 Result: Up-regulated in Transcription
  misc_feature: MA Experiment ID: 20000111 Result: Up-regulated in Transcription
  misc_feature: MA Experiment 20000111 PARAMETER Experiment Name: At_42deg_Heat_cDNA_P Parameter: Temperature (deg C) Value: 42 vs. 22
  misc_feature: MA Experiment 20000111 PARAMETER Experiment Name: At_42deg_Heat_cDNA_P Parameter: Timepoint (hr) Value: 6
  misc_feature: MA Experiment 20000111 PARAMETER Experiment Name: At_42deg_Heat_cDNA_P Parameter: Tissue Value: Aerial
  misc_feature: MA Experiment ID: 20000112 Result: Up-regulated in Transcription
  misc_feature: MA Experiment 20000112 PARAMETER Experiment Name: At_42deg_Heat_cDNA_P Parameter: Temperature (deg C) Value: 42 vs. 22
  misc_feature: MA Experiment 20000112 PARAMETER Experiment Name: At_42deg_Heat_cDNA_P Parameter: Timepoint (hr) Value: 2
  misc_feature: MA Experiment 20000112 PARAMETER Experiment Name: At_42deg_Heat_cDNA_P Parameter: Tissue Value: Aerial
  misc_feature: MA Experiment ID: 20000117 Result: Up-regulated in Transcription
  misc_feature: MA Experiment 20000117 PARAMETER Experiment Name: At_100uM_ABA_Mutants_cDNA_P Parameter: Plant Line Value: Columbia
  misc_feature: MA Experiment 20000117 PARAMETER Experiment Name: At_100uM_ABA_Mutants_cDNA_P Parameter: Timepoint (hr) Value: 6
  misc_feature: MA Experiment 20000117 PARAMETER Experiment Name: At_100uM_ABA_Mutants_cDNA_P Parameter: Tissue Value: Aerial
  misc_feature: MA Experiment 20000117 PARAMETER Experiment Name: At_100uM_ABA_Mutants_cDNA_P Parameter: Treatment Value: 100uM ABA vs. No Treatment
  misc_feature: MA Experiment ID: 20000144 Result: Up-regulated in Transcription
  misc_feature: MA Experiment 20000144 PARAMETER Experiment Name: At_42deg_Heat_cDNA_P Parameter: Temperature (deg C) Value: 42 vs. 22
  misc_feature: MA Experiment 20000144 PARAMETER Experiment Name: At_42deg_Heat_cDNA_P Parameter: Timepoint (hr) Value: 1
  misc_feature: MA Experiment 20000144 PARAMETER Experiment Name: At_42deg_Heat_cDNA_P Parameter: Tissue Value: Aerial
  misc_feature: MA Experiment ID: 20000171 Result: Up-regulated in Transcription
  misc_feature: MA Experiment 20000171 PARAMETER Experiment Name: At_42deg_Heat_P Parameter: Age (day) Value: 14
  misc_feature: MA Experiment 20000171 PARAMETER Experiment Name: At_42deg_Heat_P Parameter: Organism Value: A. thaliana
  misc_feature: MA Experiment 20000171 PARAMETER Experiment Name: At_42deg_Heat_P Parameter: Plant Line Value: WS
  misc_feature: MA Experiment 20000171 PARAMETER Experiment Name: At_42deg_Heat_P Parameter: Temperature (deg C) Value: 42 vs. 22
  misc_feature: MA Experiment 20000171 PARAMETER Experiment Name: At_42deg_Heat_P Parameter: Timepoint (hr) Value: 1
  misc_feature: MA Experiment 20000171 PARAMETER Experiment Name: At_42deg_Heat_P Parameter: Tissue Value: Aerial
  misc_feature: MA Experiment ID: 20000173 Result: Up-regulated in Transcription
  misc_feature: MA Experiment 20000173 PARAMETER Experiment Name: At_42deg_Heat_P Parameter: Age (day) Value: 14
  misc_feature: MA Experiment 20000173 PARAMETER Experiment Name: At_42deg_Heat_P Parameter: Organism Value: A. thaliana
  misc_feature: MA Experiment 20000173 PARAMETER Experiment Name: At_42deg_Heat_P Parameter: Plant Line Value: WS
  misc_feature: MA Experiment 20000173 PARAMETER Experiment Name: At_42deg_Heat_P Parameter: Temperature (deg C) Value: 42 vs. 22
  misc_feature: MA Experiment 20000173 PARAMETER Experiment Name: At_42deg_Heat_P Parameter: Timepoint (hr) Value: 6
  misc_feature: MA Experiment 20000173 PARAMETER Experiment Name: At_42deg_Heat_P Parameter: Tissue Value: Aerial
  misc_feature: MA Experiment ID: 20000185 Result: Down-regulated in Transcription
  misc_feature: MA Experiment 20000185 PARAMETER Experiment Name: At_Roots__P Parameter: Age (day) Value: 7 vs. 21
  misc_feature: MA Experiment 20000185 PARAMETER Experiment Name: At_Roots__P Parameter: Organism Value: A. thaliana
  misc_feature: MA Experiment 20000185 PARAMETER Experiment Name: At_Roots__P Parameter: Tissue Value: Roots vs. Whole Plant
  misc_feature: MA Experiment ID: 20000437 Result: Up-regulated in Transcription
  misc_feature: MA Experiment 20000437 PARAMETER Experiment Name: At_Drought_P Parameter: Age (day) Value: 8
  misc_feature: MA Experiment 20000437 PARAMETER Experiment Name: At_Drought_P Parameter: Organism Value: A. thaliana
  misc_feature: MA Experiment 20000437 PARAMETER Experiment Name: At_Drought_P Parameter: Plant Line Value: WS
  misc_feature: MA Experiment 20000437 PARAMETER Experiment Name: At_Drought_P Parameter: Timepoint (hr) Value: 24
  misc_feature: MA Experiment 20000437 PARAMETER Experiment Name: At_Drought_P Parameter: Tissue Value: Whole Plant
  misc_feature: MA Experiment 20000437 PARAMETER Experiment Name: At_Drought_P Parameter: Treatment Value: Drought vs. No Drought
  misc_feature: MA Experiment ID: 20000438 Result: Down-regulated in Transcription
  misc_feature: MA Experiment 20000438 PARAMETER Experiment Name: At_Shoots__P Parameter: Age (day) Value: 14
  misc_feature: MA Experiment 20000438 PARAMETER Experiment Name: At_Shoots__P Parameter: Tissue Value: Shoots vs. Whole Plant
  misc_feature: MA Experiment ID: 20000439 Result: Down-regulated in Transcription
  misc_feature: MA Experiment 20000439 PARAMETER Experiment Name: At_Roots__P Parameter: Age (day) Value: 14 vs. 21
  misc_feature: MA Experiment 20000439 PARAMETER Experiment Name: At_Roots__P Parameter: Organism Value: A. thaliana
  misc_feature: MA Experiment 20000439 PARAMETER Experiment Name: At_Roots__P Parameter: Tissue Value: Roots vs. Whole Plant
  misc_feature: MA Experiment ID: 20000441 Result: Down-regulated in Transcription
  misc_feature: MA Experiment 20000441 PARAMETER Experiment Name: At_1uM_BR-BRZ__P Parameter: Tissue Value: Shoot Apices
  misc_feature: MA Experiment 20000441 PARAMETER Experiment Name: At_1uM_BR-BRZ__P Parameter: Treatment Value: 1uM BR vs. No Treatment
  misc_feature: MA Experiment ID: 20001248 Result: Up-regulated in Transcription
  misc_feature: MA Experiment 20001248 PARAMETER Experiment Name: At_Far-red-induction_P Parameter: Age (day) Value: 7
  misc_feature: MA Experiment 20001248 PARAMETER Experiment Name: At_Far-red-induction_P Parameter: Light Value: Far-red vs. White
  misc_feature: MA Experiment 20001248 PARAMETER Experiment Name: At_Far-red-induction_P Parameter: Organism Value: A. thaliana
  misc_feature: MA Experiment 20001248 PARAMETER Experiment Name: At_Far-red-induction_P Parameter: Plant Line Value: Columbia
  misc_feature: MA Experiment 20001248 PARAMETER Experiment Name: At_Far-red-induction_P Parameter: Timepoint (hr) Value: 4
  misc_feature: MA Experiment 20001248 PARAMETER Experiment Name: At_Far-red-induction_P Parameter: Tissue Value: Whole Plant
  misc_feature: MA Experiment ID: 20001450 Result: Down-regulated in Transcription
  misc_feature: MA Experiment 20001450 PARAMETER Experiment Name: At_Far-red-induction_P Parameter: Age (day) Value: 7
  misc_feature: MA Experiment 20001450 PARAMETER Experiment Name: At_Far-red-induction_P Parameter: Light Value: Far-red vs. White
  misc_feature: MA Experiment 20001450 PARAMETER Experiment Name: At_Far-red-induction_P Parameter: Organism Value: A. thaliana
  misc_feature: MA Experiment 20001450 PARAMETER Experiment Name: At_Far-red-induction_P Parameter: Plant Line Value: Columbia
  misc_feature: MA Experiment 20001450 PARAMETER Experiment Name: At_Far-red-induction_P Parameter: Timepoint (hr) Value: 8
  misc_feature: MA Experiment 20001450 PARAMETER Experiment Name: At_Far-red-induction_P Parameter: Tissue Value: Whole Plant
  misc_feature: MA Experiment ID: 20001451 Result: Down-regulated in Transcription
  misc_feature: MA Experiment 20001451 PARAMETER Experiment Name: At_Far-red-induction_P Parameter: Age (day) Value: 7
  misc_feature: MA Experiment 20001451 PARAMETER Experiment Name: At_Far-red-induction_P Parameter: Light Value: Far-red vs. White
  misc_feature: MA Experiment 20001451 PARAMETER Experiment Name: At_Far-red-induction_P Parameter: Organism Value: A. thaliana
  misc_feature: MA Experiment 20001451 PARAMETER Experiment Name: At_Far-red-induction_P Parameter: Plant Line Value: Columbia
  misc_feature: MA Experiment 20001451 PARAMETER Experiment Name: At_Far-red-induction_P Parameter: Timepoint (hr) Value: 24
  misc_feature: MA Experiment 20001451 PARAMETER Experiment Name: At_Far-red-induction_P Parameter: Tissue Value: Whole Plant
aaatatcttctcttcgtcctcaacaacttctccagaaaatctaggtcacacactttttaaatcctcgttcccaaaatcgaacaacaacaatggcgtcgcatcctaaagttttcttcgacatgaccatcggcggtgcaccagcggggaagatcgtgatggagctttacaccgacaagacaccaaagacggcggagaatttcagagctctatgcaccggagagaaaggcgtcggacgtagcggcaagccacttcacttcaaaggatcttcgtttcaccgcgtgatcccaaatttcatgtgccaaggaggagatttcaccaaaggtaacggaactggtggcgaatcgatctacggagccaagtttgaggatgagaatttcgagaggaagcacacaggaccagggattttgtcgatggctaacgctggtgctaacactaatggatctcagtttttcatctgtacggtgaagactgattggctcgatggtaagcatgtggtgtttggtcaggtggttgaaggcttggacgttgttaaggctattgagaagattggatcttcttctggaaagccgacgaagcctgttgtgatcgctgattgtggtgagatctcttcttagattccggttgtggtggtgacggtttcaaaatctatgtttctagaagtttcttcttagctaattatggactgtgatctttgctctgtttctgcttttgcgtattttcctaattaagcaccattaataataagaaagttttaaggc

SEQ ID NO: 23152 - protein, 174 aa, Arabidopsis thaliana
  peptide (1)..(174): Ceres Seq. ID no. 12397014
  misc_feature (1)..(174): Homolog of NCBI NO: 15226467 NR Description: cyclophilin (CYP2)
  misc_feature (3)..(173): Homolog of NCBI NO: 18376589 NR Description: putative cyclosporin A-binding protein [Picea
  misc_feature (3)..(172): Homolog of NCBI NO: 11270316 NR Description: peptidylprolyl isomerase (EC 5.2.1.8)
  misc_feature (1)..(173): Homolog of NCBI NO: 15227259 NR Description: cytosolic cyclophilin (ROC3)
  misc_feature (4)..(173): Homolog of NCBI NO: 1076510 NR Description: peptidylprolyl isomerase (EC 5.2.1.8) Cyp -
  misc_feature (4)..(173): Homolog of NCBI NO: 18146786 NR Description: CYP1 [Vigna radiata]
  misc_feature (1)..(173): Homolog of NCBI NO: 21886603 NR Description: peptidylprolyl isomerase (cyclophilin) [Betula
  misc_feature (1)..(173): Homolog of NCBI NO: 18076088 NR Description: cyclophilin [Ricinus communis]
  misc_feature (5)..(173): Homolog of NCBI NO: 15234781 NR Description: peptidylprolyl isomerase ROC1
  misc_feature (1)..(174): Homolog of NCBI NO: 11270324 NR Description: peptidylprolyl isomerase (EC 5.2.1.8) CYP2
MASHPKVFFDMTIGGAPAGKIVMELYTDKTPKTAENFRALCTGEKGVGRSGKPLHFKGSSFHRVIPNFMCQGGDFTKGNGTGGESIYGAKFEDENFERKHTGPGILSMANAGANTNGSQFFICTVKTDWLDGKHVVFGQVVEGLDVVKAIEKIGSSSGKPTKPVVIADCGEISS

SEQ ID NO: 23153 - protein, 164 aa, Arabidopsis thaliana
  peptide (1)..(164): Ceres Seq. ID no. 12397015
  misc_feature (1)..(163): Homolog of NCBI NO: 18376589 NR Description: putative cyclosporin A-binding protein [Picea
  misc_feature (1)..(162): Homolog of NCBI NO: 11270316 NR Description: peptidylprolyl isomerase (EC 5.2.1.8)
  misc_feature (1)..(163): Homolog of NCBI NO: 15227259 NR Description: cytosolic cyclophilin (ROC3)
  misc_feature (1)..(163): Homolog of NCBI NO: 1076510 NR Description: peptidylprolyl isomerase (EC 5.2.1.8) Cyp -
  misc_feature (1)..(163): Homolog of NCBI NO: 18146786 NR Description: CYP1 [Vigna radiata]
  misc_feature (1)..(163): Homolog of NCBI NO: 21886603 NR Description: peptidylprolyl isomerase (cyclophilin) [Betula
  misc_feature (1)..(163): Homolog of NCBI NO: 18076088 NR Description: cyclophilin [Ricinus communis]
  misc_feature (1)..(163): Homolog of NCBI NO: 15234781 NR Description: peptidylprolyl isomerase ROC1
  misc_feature (1)..(164): Homolog of NCBI NO: 11270324 NR Description: peptidylprolyl isomerase (EC 5.2.1.8) CYP2
  misc_feature (1)..(164): Homolog of NCBI NO: 15226467 NR Description: cyclophilin (CYP2)
MTIGGAPAGKIVMELYTDKTPKTAENFRALCTGEKGVGRSGKPLHFKGSSFHRVIPNFMCQGGDFTKGNGTGGESIYGAKFEDENFERKHTGPGILSMANAGANTNGSQFFICTVKTDWLDGKHVVFGQVVEGLDVVKAIEKIGSSSGKPTKPVVIADCGEISS

SEQ ID NO: 23154 - protein, 152 aa, Arabidopsis thaliana
  peptide (1)..(152): Ceres Seq. ID no. 12397016
  misc_feature (1)..(151): Homolog of NCBI NO: 18376589 NR Description: putative cyclosporin A-binding protein [Picea
  misc_feature (1)..(150): Homolog of NCBI NO: 11270316 NR Description: peptidylprolyl isomerase (EC 5.2.1.8)
  misc_feature (1)..(151): Homolog of NCBI NO: 15227259 NR Description: cytosolic cyclophilin (ROC3)
  misc_feature (1)..(151): Homolog of NCBI NO: 1076510 NR Description: peptidylprolyl isomerase (EC 5.2.1.8) Cyp -
  misc_feature (1)..(151): Homolog of NCBI NO: 18146786 NR Description: CYP1 [Vigna radiata]
  misc_feature (1)..(151): Homolog of NCBI NO: 21886603 NR Description: peptidylprolyl isomerase (cyclophilin) [Betula
  misc_feature (1)..(151): Homolog of NCBI NO: 18076088 NR Description: cyclophilin [Ricinus communis]
  misc_feature (1)..(151): Homolog of NCBI NO: 15234781 NR Description: peptidylprolyl isomerase ROC1
  misc_feature (1)..(152): Homolog of NCBI NO: 11270324 NR Description: peptidylprolyl isomerase (EC 5.2.1.8) CYP2
  misc_feature (1)..(152): Homolog of NCBI NO: 15226467 NR Description: cyclophilin (CYP2)
MELYTDKTPKTAENFRALCTGEKGVGRSGKPLHFKGSSFHRVIPNFMCQGGDFTKGNGTGGESIYGAKFEDENFERKHTGPGILSMANAGANTNGSQFFICTVKTDWLDGKHVVFGQVVEGLDVVKAIEKIGSSSGKPTKPVVIADCGEISS

SEQ ID NO: 23155 - DNA, 876 bp, Arabidopsis thaliana
  misc_feature (1)..(876): Ceres Seq. ID no. 13487004
  misc_feature: MA Experiment ID: 108434 Result: Up-regulated in Transcription
  misc_feature: MA Experiment 108434 PARAMETER Experiment Name: At_Root_Tips_cDNA_P Parameter: Tissue Value: Root Tips
  misc_feature: MA Experiment ID: 108462 Result: Down-regulated in Transcription
  misc_feature: MA Experiment 108462 PARAMETER Experiment Name: At_Germinating_Seeds_cDNA_P Parameter: Age (day) Value: 2 vs. 0
  misc_feature: MA Experiment 108462 PARAMETER Experiment Name: At_Germinating_Seeds_cDNA_P Parameter: Tissue Value: Germinating Seeds
  misc_feature: MA Experiment ID: 108463 Result: Down-regulated in Transcription
  misc_feature: MA Experiment 108463 PARAMETER Experiment Name: At_Germinating_Seeds_cDNA_P Parameter: Age (day) Value: 3 vs. 0
  misc_feature: MA Experiment 108463 PARAMETER Experiment Name: At_Germinating_Seeds_cDNA_P Parameter: Tissue Value: Germinating Seeds
  misc_feature: MA Experiment ID: 108595 Result: Down-regulated in Transcription
  misc_feature: MA Experiment 108595 PARAMETER Experiment Name: At_Ler-pi_Ovule_cDNA_P Parameter: Plant Line Value: null
  misc_feature: MA Experiment ID: 20000179 Result: Up-regulated in Transcription
  misc_feature: MA Experiment 20000179 PARAMETER Experiment Name: At_Germinating_Seeds_P Parameter: Age (hr) Value: 6 vs. 0
  misc_feature: MA Experiment 20000179 PARAMETER Experiment Name: At_Germinating_Seeds_P Parameter: Tissue Value: Germinating Seeds
  misc_feature: MA Experiment ID: 20000185 Result: Down-regulated in Transcription
  misc_feature: MA Experiment 20000185 PARAMETER Experiment Name: At_Roots__P Parameter: Age (day) Value: 7 vs. 21
  misc_feature: MA Experiment 20000185 PARAMETER Experiment Name: At_Roots__P Parameter: Organism Value: A. thaliana
  misc_feature: MA Experiment 20000185 PARAMETER Experiment Name: At_Roots__P Parameter: Tissue Value: Roots vs. Whole Plant
  misc_feature: MA Experiment ID: 20000224 Result: Up-regulated in Transcription
  misc_feature: MA Experiment ID: 20000495 Result: Down-regulated in Transcription
  misc_feature: MA Experiment 20000495 PARAMETER Experiment Name: At_Guard_Cells_P Parameter: Harvest Date Value: 8/2/2002
  misc_feature: MA Experiment 20000495 PARAMETER Experiment Name: At_Guard_Cells_P Parameter: Organism Value: A. thaliana
  misc_feature: MA Experiment 20000495 PARAMETER Experiment Name: At_Guard_Cells_P Parameter: Tissue Value: Guard Cells vs. Leaves
  misc_feature: MA Experiment ID: 20000794 Result: Down-regulated in Transcription
  misc_feature: MA Experiment 20000794 PARAMETER Experiment Name: At_Petals_P Parameter: Age (day) Value: 23-25 days
  misc_feature: MA Experiment 20000794 PARAMETER Experiment Name: At_Petals_P Parameter: Plant Line Value: WS
  misc_feature: MA Experiment 20000794 PARAMETER Experiment Name: At_Petals_P Parameter: Tissue Value: Petals vs. Whole plant
  misc_feature: MA Experiment ID: 20001450 Result: Down-regulated in Transcription
  misc_feature: MA Experiment 20001450 PARAMETER Experiment Name: At_Far-red-induction_P Parameter: Age (day) Value: 7
  misc_feature: MA Experiment 20001450 PARAMETER Experiment Name: At_Far-red-induction_P Parameter: Light Value: Far-red vs. White
  misc_feature: MA Experiment 20001450 PARAMETER Experiment Name: At_Far-red-induction_P Parameter: Organism Value: A. thaliana
  misc_feature: MA Experiment 20001450 PARAMETER Experiment Name: At_Far-red-induction_P Parameter: Plant Line Value: Columbia
  misc_feature: MA Experiment 20001450 PARAMETER Experiment Name: At_Far-red-induction_P Parameter: Timepoint (hr) Value: 8
  misc_feature: MA Experiment 20001450 PARAMETER Experiment Name: At_Far-red-induction_P Parameter: Tissue Value: Whole Plant
  misc_feature: MA Experiment ID: 20001451 Result: Down-regulated in Transcription
  misc_feature: MA Experiment 20001451 PARAMETER Experiment Name: At_Far-red-induction_P Parameter: Age (day) Value: 7
  misc_feature: MA Experiment 20001451 PARAMETER Experiment Name: At_Far-red-induction_P Parameter: Light Value: Far-red vs. White
  misc_feature: MA Experiment 20001451 PARAMETER Experiment Name: At_Far-red-induction_P Parameter: Organism Value: A. thaliana
  misc_feature: MA Experiment 20001451 PARAMETER Experiment Name: At_Far-red-induction_P Parameter: Plant Line Value: Columbia
  misc_feature: MA Experiment 20001451 PARAMETER Experiment Name: At_Far-red-induction_P Parameter: Timepoint (hr) Value: 24
  misc_feature: MA Experiment 20001451 PARAMETER Experiment Name: At_Far-red-induction_P Parameter: Tissue Value: Whole Plant
  misc_feature: MA Experiment ID: 20001558 Result: Up-regulated in Transcription
  misc_feature: MA Experiment 20001558 PARAMETER Experiment Name: At_Drought_Soil_Dry_P Parameter: Age (day) Value: 27
  misc_feature: MA Experiment 20001558 PARAMETER Experiment Name: At_Drought_Soil_Dry_P Parameter: Organism Value: A. thaliana
  misc_feature: MA Experiment 20001558 PARAMETER Experiment Name: At_Drought_Soil_Dry_P Parameter: Plant Line Value: WS
  misc_feature: MA Experiment 20001558 PARAMETER Experiment Name: At_Drought_Soil_Dry_P Parameter: Post Timepoint (hr) Value: 6
  misc_feature: MA Experiment 20001558 PARAMETER Experiment Name: At_Drought_Soil_Dry_P Parameter: Post-Treatment Value: Re-Water vs. No Drought
  misc_feature: MA Experiment 20001558 PARAMETER Experiment Name: At_Drought_Soil_Dry_P Parameter: Timepoint (day) Value: 13
  misc_feature: MA Experiment 20001558 PARAMETER Experiment Name: At_Drought_Soil_Dry_P Parameter: Treatment Value: Drought vs. No Drought
tctcttcgatttcagcaattgcaatggcttccttcacaacaacttcttcttcctcgcttctcctcaaaactcttctccccgtaagccacctgaatcgtttctctacactctctggtatccgcgttggcgattcatggactcctctgctccggaacatctccaccgctgggtctcggcgtcgagtggcgattgtgaaagctgcgacggtggattcggattactcgtcgaaacggagcaatagcaatgagcagagagagacgattatgcttcctggttgcgattacaatcattggctcattgtaatggagtttcctaaagatccagcgccaagtagggatcagatgattgatacttaccttaacactcttgctactgttcttggcagcatggaagaggcgaagaagaacatgtatgcattcagtaccacgacatatactggattccaatgcaccatcgacgaagaaacatctgagaagttcaagggtttgcctggagttctctgggtcttgcctgactcctacatagatgtcaagaacaaagactatggaggcgacaagtacatcaatggagagattatcccgtgcacatacccaacataccaaccaaagcagcgcaataacactaagtatcaaagtaagagatacgaaagaaaaagagacggtcctccacctcctgaacagaggaaaccaagacaagaaccagcagcctctgattcctcttaaactataataagataatggagtgtttgcaagttttgatcttttggttagcacttagcttgttgaagtcgtgtgtaaaatcgtctagtaccaaatgatgatactgtatcatcacaccttgaacaatagctattgttatgttaggatgaaattcaac

SEQ ID NO: 23156 - protein, 239 aa, Arabidopsis thaliana
  peptide (1)..(239): Ceres Seq. ID no. 13487005
  misc_feature (71)..(219): Homolog of NCBI NO: 25370552 NR Description: DAG protein homolog [imported] - Arabidopsis
  misc_feature (71)..(219): Homolog of NCBI NO: 21617909 NR Description: plastid protein [Arabidopsis thaliana]
  misc_feature (71)..(219): Homolog of NCBI NO: 15226108 NR Description: plastid protein [Arabidopsis thaliana]
  misc_feature (8)..(219): Homolog of NCBI NO: 15223247 NR Description: plastid protein -related [Arabidopsis thaliana]
  misc_feature (8)..(229): Homolog of NCBI NO: 27754695 NR Description: putative DAG protein [Arabidopsis thaliana]
  misc_feature (8)..(229): Homolog of NCBI NO: 15230785 NR Description: DAG protein -related [Arabidopsis thaliana]
  misc_feature (81)..(239): Homolog of NCBI NO: 38636775 NR Description: putative DAG protein [Oryza sativa (japonica
  misc_feature (14)..(239): Homolog of NCBI NO: 6014904 NR Description: DAG PROTEIN, CHLOROPLAST PRECURSOR
  misc_feature (8)..(239): Homolog of NCBI NO: 21593052 NR Description: DAG protein, putative [Arabidopsis thaliana]
  misc_feature (8)..(239): Homolog of NCBI NO: 15220382 NR Description: DAG protein -related [Arabidopsis thaliana]
SSISAIAMASFTTTSSSSLLLKTLLPVSHLNRFSTLSGIRVGDSWTPLLRNISTAGSRRRVAIVKAATVDSDYSSKRSNSNEQRETIMLPGCDYNHWLIVMEFPKDPAPSRDQMIDTYLNTLATVLGSMEEAKKNMYAFSTTTYTGFQCTIDEETSEKFKGLPGVLWVLPDSYIDVKNKDYGGDKYINGEIIPCTYPTYQPKQRNNTKYQSKRYERKRDGPPPPEQRKPRQEPAASDSS

SEQ ID NO: 23157 - protein, 232 aa, Arabidopsis thaliana
  peptide (1)..(232): Ceres Seq. ID no. 13487006
  misc_feature (64)..(212): Homolog of NCBI NO: 25370552 NR Description: DAG protein homolog [imported] - Arabidopsis
  misc_feature (64)..(212): Homolog of NCBI NO: 21617909 NR Description: plastid protein [Arabidopsis thaliana]
  misc_feature (64)..(212): Homolog of NCBI NO: 15226108 NR Description: plastid protein [Arabidopsis thaliana]
  misc_feature (1)..(212): Homolog of NCBI NO: 15223247 NR Description: plastid protein -related [Arabidopsis thaliana]
  misc_feature (1)..(222): Homolog of NCBI NO: 27754695 NR Description: putative DAG protein [Arabidopsis thaliana]
  misc_feature (1)..(222): Homolog of NCBI NO: 15230785 NR Description: DAG protein -related [Arabidopsis thaliana]
  misc_feature (74)..(232): Homolog of NCBI NO: 38636775 NR Description: putative DAG protein [Oryza sativa (japonica
  misc_feature (7)..(232): Homolog of NCBI NO: 6014904 NR Description: DAG PROTEIN, CHLOROPLAST PRECURSOR
  misc_feature (1)..(232): Homolog of NCBI NO: 21593052 NR Description: DAG protein, putative [Arabidopsis thaliana]
  misc_feature (1)..(232): Homolog of NCBI NO: 15220382 NR Description: DAG protein -related [Arabidopsis thaliana]
MASFTTTSSSSLLLKTLLPVSHLNRFSTLSGIRVGDSWTPLLRNISTAGSRRRVAIVKAATVDSDYSSKRSNSNEQRETIMLPGCDYNHWLIVMEFPKDPAPSRDQMIDTYLNTLATVLGSMEEAKKNMYAFSTTTYTGFQCTIDEETSEKFKGLPGVLWVLPDSYIDVKNKDYGGDKYINGEIIPCTYPTYQPKQRNNTKYQSKRYERKRDGPPPPEQRKPRQEPAASDSS

SEQ ID NO: 23158 - protein, 152 aa, Arabidopsis thaliana
  peptide (1)..(152): Ceres Seq. ID no. 13487007
  misc_feature (1)..(132): Homolog of NCBI NO: 21617909 NR Description: plastid protein [Arabidopsis thaliana]
  misc_feature (1)..(132): Homolog of NCBI NO: 25370552 NR Description: DAG protein homolog [imported] - Arabidopsis
  misc_feature (1)..(132): Homolog of NCBI NO: 15226108 NR Description: plastid protein [Arabidopsis thaliana]
  misc_feature (1)..(132): Homolog of NCBI NO: 15223247 NR Description: plastid protein -related [Arabidopsis thaliana]
  misc_feature (1)..(142): Homolog of NCBI NO: 27754695 NR Description: putative DAG protein [Arabidopsis thaliana]
  misc_feature (1)..(142): Homolog of NCBI NO: 15230785 NR Description: DAG protein -related [Arabidopsis thaliana]
  misc_feature (1)..(152): Homolog of NCBI NO: 38636775 NR Description: putative DAG protein [Oryza sativa (japonica
  misc_feature (1)..(152): Homolog of NCBI NO: 6014904 NR Description: DAG PROTEIN, CHLOROPLAST PRECURSOR
  misc_feature (1)..(152): Homolog of NCBI NO: 21593052 NR Description: DAG protein, putative [Arabidopsis thaliana]
  misc_feature (1)..(152): Homolog of NCBI NO: 15220382 NR Description: DAG protein -related [Arabidopsis thaliana]
MLPGCDYNHWLIVMEFPKDPAPSRDQMIDTYLNTLATVLGSMEEAKKNMYAFSTTTYTGFQCTIDEETSEKFKGLPGVLWVLPDSYIDVKNKDYGGDKYINGEIIPCTYPTYQPKQRNNTKYQSKRYERKRDGPPPPEQRKPRQEPAASDSS

SEQ ID NO: 23159 - DNA, 1287 bp, Arabidopsis thaliana
  misc_feature (1)..(1287): Ceres Seq. ID no. 12335118
  misc_feature: MA Experiment ID: 108462 Result: Up-regulated in Transcription
  misc_feature: MA Experiment 108462 PARAMETER Experiment Name: At_Germinating_Seeds_cDNA_P Parameter: Age (day) Value: 2 vs. 0
  misc_feature: MA Experiment 108462 PARAMETER Experiment Name: At_Germinating_Seeds_cDNA_P Parameter: Tissue Value: Germinating Seeds
  misc_feature: MA Experiment ID: 108489 Result: Down-regulated in Transcription
  misc_feature: MA Experiment ID: 108561 Result: Up-regulated in Transcription
  misc_feature: MA Experiment 108561 PARAMETER Experiment Name: At_100uM_ABA_cDNA_P Parameter: Timepoint (hr) Value: 6
  misc_feature: MA Experiment 108561 PARAMETER Experiment Name: At_100uM_ABA_cDNA_P Parameter: Tissue Value: Aerial
  misc_feature: MA Experiment 108561 PARAMETER Experiment Name: At_100uM_ABA_cDNA_P Parameter: Treatment Value: 100uM ABA vs. No Treatment
  misc_feature: MA Experiment ID: 108572 Result: Down-regulated in Transcription
  misc_feature: MA Experiment 108572 PARAMETER Experiment Name: At_Drought_cDNA_P Parameter: Timepoint (hr) Value: 1
  misc_feature: MA Experiment 108572 PARAMETER Experiment Name: At_Drought_cDNA_P Parameter: Tissue Value: Aerial
  misc_feature: MA Experiment 108572 PARAMETER Experiment Name: At_Drought_cDNA_P Parameter: Treatment Value: Drought vs. No Drought
  misc_feature: MA Experiment ID: 108573 Result: Down-regulated in Transcription
  misc_feature: MA Experiment 108573 PARAMETER Experiment Name: At_Drought_cDNA_P Parameter: Timepoint (hr) Value: 6
  misc_feature: MA Experiment 108573 PARAMETER Experiment Name: At_Drought_cDNA_P Parameter: Tissue Value: Aerial
  misc_feature: MA Experiment 108573 PARAMETER Experiment Name: At_Drought_cDNA_P Parameter: Treatment Value: Drought vs. No Drought
  misc_feature: MA Experiment ID: 108579 Result: Up-regulated in Transcription
  misc_feature: MA Experiment 108579 PARAMETER Experiment Name: At_4deg_Cold_cDNA_P Parameter: Temperature (deg C) Value: 4 vs. 22
  misc_feature: MA Experiment 108579 PARAMETER Experiment Name: At_4deg_Cold_cDNA_P Parameter: Timepoint (hr) Value: 6
  misc_feature: MA Experiment 108579 PARAMETER Experiment Name: At_4deg_Cold_cDNA_P Parameter: Tissue Value: Aerial
  misc_feature: MA Experiment ID: 108609 Result: Up-regulated in Transcription
  misc_feature: MA Experiment 108609 PARAMETER Experiment Name: At_100uM_ABA_cDNA_P Parameter: Timepoint (hr) Value: 24
  misc_feature: MA Experiment 108609 PARAMETER Experiment Name: At_100uM_ABA_cDNA_P Parameter: Tissue Value: Aerial
  misc_feature: MA Experiment 108609 PARAMETER Experiment Name: At_100uM_ABA_cDNA_P Parameter: Treatment Value: 100uM ABA vs. No Treatment
  misc_feature: MA Experiment ID: 20000070 Result: Up-regulated in Transcription
  misc_feature: MA Experiment 20000070 PARAMETER Experiment Name: At_100uM_ABA_Mutants_cDNA_P Parameter: Plant Line Value: CS24
  misc_feature: MA Experiment 20000070 PARAMETER Experiment Name: At_100uM_ABA_Mutants_cDNA_P Parameter: Timepoint (hr) Value: 6
  misc_feature: MA Experiment 20000070 PARAMETER Experiment Name: At_100uM_ABA_Mutants_cDNA_P Parameter: Tissue Value: Aerial
  misc_feature: MA Experiment 20000070 PARAMETER Experiment Name: At_100uM_ABA_Mutants_cDNA_P Parameter: Treatment Value: 100uM ABA vs. No Treatment
  misc_feature: MA Experiment ID: 20000071 Result: Up-regulated in Transcription
  misc_feature: MA Experiment 20000071 PARAMETER Experiment Name: At_100uM_ABA_Mutants_cDNA_P Parameter: Plant Line Value: CS8104
  misc_feature: MA Experiment 20000071 PARAMETER Experiment Name: At_100uM_ABA_Mutants_cDNA_P Parameter: Timepoint (hr) Value: 6
  misc_feature: MA Experiment 20000071 PARAMETER Experiment Name: At_100uM_ABA_Mutants_cDNA_P Parameter: Tissue Value: Aerial
  misc_feature: MA Experiment 20000071 PARAMETER Experiment Name: At_100uM_ABA_Mutants_cDNA_P Parameter: Treatment Value: 100uM ABA vs. No Treatment
  misc_feature: MA Experiment ID: 20000086 Result: Up-regulated in Transcription
  misc_feature: MA Experiment 20000086 PARAMETER Experiment Name: At_100uM_ABA_Mutants_cDNA_P Parameter: Plant Line Value: CS22
  misc_feature: MA Experiment 20000086 PARAMETER Experiment Name: At_100uM_ABA_Mutants_cDNA_P Parameter: Timepoint (hr) Value: 6
  misc_feature: MA Experiment 20000086 PARAMETER Experiment Name: At_100uM_ABA_Mutants_cDNA_P Parameter: Tissue Value: Aerial
  misc_feature: MA Experiment 20000086 PARAMETER Experiment Name: At_100uM_ABA_Mutants_cDNA_P Parameter: Treatment Value: 100uM ABA vs. No Treatment
  misc_feature: MA Experiment ID: 20000087 Result: Up-regulated in Transcription
  misc_feature: MA Experiment 20000087 PARAMETER Experiment Name: At_100uM_ABA_Mutants_cDNA_P Parameter: Plant Line Value: WS
  misc_feature: MA Experiment 20000087 PARAMETER Experiment Name: At_100uM_ABA_Mutants_cDNA_P Parameter: Timepoint (hr) Value: 6
  misc_feature: MA Experiment 20000087 PARAMETER Experiment Name: At_100uM_ABA_Mutants_cDNA_P Parameter: Tissue Value: Aerial
  misc_feature: MA Experiment 20000087 PARAMETER Experiment Name: At_100uM_ABA_Mutants_cDNA_P Parameter: Treatment Value: 100uM ABA vs. No Treatment
  misc_feature: MA Experiment ID: 20000088 Result: Up-regulated in Transcription
  misc_feature: MA Experiment 20000088 PARAMETER Experiment Name: At_100uM_ABA_Mutants_cDNA_P Parameter: Plant Line Value: Landsberg
  misc_feature: MA Experiment 20000088 PARAMETER Experiment Name: At_100uM_ABA_Mutants_cDNA_P Parameter: Timepoint (hr) Value: 6
  misc_feature: MA Experiment 20000088 PARAMETER Experiment Name: At_100uM_ABA_Mutants_cDNA_P Parameter: Tissue Value: Aerial
  misc_feature: MA Experiment 20000088 PARAMETER Experiment Name: At_100uM_ABA_Mutants_cDNA_P Parameter: Treatment Value: 100uM ABA vs. No Treatment
  misc_feature: MA Experiment ID: 20000117 Result: Up-regulated in Transcription
  misc_feature: MA Experiment 20000117 PARAMETER Experiment Name: At_100uM_ABA_Mutants_cDNA_P Parameter: Plant Line Value: Columbia
  misc_feature: MA Experiment 20000117 PARAMETER Experiment Name: At_100uM_ABA_Mutants_cDNA_P Parameter: Timepoint (hr) Value: 6
  misc_feature: MA Experiment 20000117 PARAMETER Experiment Name: At_100uM_ABA_Mutants_cDNA_P Parameter: Tissue Value: Aerial
  misc_feature: MA Experiment 20000117 PARAMETER Experiment Name: At_100uM_ABA_Mutants_cDNA_P Parameter: Treatment Value: 100uM ABA vs. No Treatment
  misc_feature: MA Experiment ID: 20000179 Result: Down-regulated in Transcription
  misc_feature: MA Experiment 20000179 PARAMETER Experiment Name: At_Germinating_Seeds_P Parameter: Age (hr) Value: 6 vs. 0
  misc_feature: MA Experiment 20000179 PARAMETER Experiment Name: At_Germinating_Seeds_P Parameter: Tissue Value: Germinating Seeds
  misc_feature: MA Experiment ID: 20000185 Result: Down-regulated in Transcription
  misc_feature: MA Experiment 20000185 PARAMETER Experiment Name: At_Roots__P Parameter: Age (day) Value: 7 vs. 21
  misc_feature: MA Experiment 20000185 PARAMETER Experiment Name: At_Roots__P Parameter: Organism Value: A. thaliana
  misc_feature: MA Experiment 20000185 PARAMETER Experiment Name: At_Roots__P Parameter: Tissue Value: Roots vs. Whole Plant
  misc_feature: MA Experiment ID: 20000224 Result: Up-regulated in Transcription
  misc_feature: MA Experiment ID: 20000268 Result: Up-regulated in Transcription
  misc_feature: MA Experiment 20000268 PARAMETER Experiment Name: At_100mM_NaCl__P Parameter: Age (day) Value: 14
  misc_feature: MA Experiment 20000268 PARAMETER Experiment Name: At_100mM_NaCl__P Parameter: Organism Value: A. thaliana
  misc_feature: MA Experiment 20000268 PARAMETER Experiment Name: At_100mM_NaCl__P Parameter: Plant Line Value: WS
  misc_feature: MA Experiment 20000268 PARAMETER Experiment Name: At_100mM_NaCl__P Parameter: Timepoint (hr) Value: 6
  misc_feature: MA Experiment 20000268 PARAMETER Experiment Name: At_100mM_NaCl__P Parameter: Tissue Value: Whole Plant
  misc_feature: MA Experiment 20000268 PARAMETER Experiment Name: At_100mM_NaCl__P Parameter: Treatment Value: 100mM NaCl vs. No Treatment
  misc_feature: MA Experiment ID: 20000438 Result: Up-regulated in Transcription
  misc_feature: MA Experiment 20000438 PARAMETER Experiment Name: At_Shoots__P Parameter: Age (day) Value: 14
  misc_feature: MA Experiment 20000438 PARAMETER Experiment Name: At_Shoots__P Parameter: Tissue Value: Shoots vs. Whole Plant
  misc_feature: MA Experiment ID: 20000439 Result: Down-regulated in Transcription
  misc_feature: MA Experiment 20000439 PARAMETER Experiment Name: At_Roots__P Parameter: Age (day) Value: 14 vs. 21
  misc_feature: MA Experiment 20000439 PARAMETER Experiment Name: At_Roots__P Parameter: Organism Value: A. thaliana
  misc_feature: MA Experiment 20000439 PARAMETER Experiment Name: At_Roots__P Parameter: Tissue Value: Roots vs. Whole Plant
  misc_feature: MA Experiment ID: 20000453 Result: Up-regulated in Transcription
  misc_feature: MA Experiment 20000453 PARAMETER Experiment Name: At_100uM_ABA_P Parameter: Age (day) Value: 15
  misc_feature: MA Experiment 20000453 PARAMETER Experiment Name: At_100uM_ABA_P Parameter: Organism Value: A. thaliana
  misc_feature: MA Experiment 20000453 PARAMETER Experiment Name: At_100uM_ABA_P Parameter: Plant Line Value: WS
  misc_feature: MA Experiment 20000453 PARAMETER Experiment Name: At_100uM_ABA_P Parameter: Timepoint (hr) Value: 24
  misc_feature: MA Experiment 20000453 PARAMETER Experiment Name: At_100uM_ABA_P Parameter: Tissue Value: Aerial
  misc_feature: MA Experiment 20000453 PARAMETER Experiment Name: At_100uM_ABA_P Parameter: Treatment Value: 100uM ABA vs. No Treatment
  misc_feature: MA Experiment ID: 20000455 Result: Up-regulated in Transcription
  misc_feature: MA Experiment 20000455 PARAMETER Experiment Name: At_100uM_ABA_P Parameter: Age (day) Value: 16
  misc_feature: MA Experiment 20000455 PARAMETER Experiment Name: At_100uM_ABA_P Parameter: Organism Value: A. thaliana
  misc_feature: MA Experiment 20000455 PARAMETER Experiment Name: At_100uM_ABA_P Parameter: Plant Line Value: WS
  misc_feature: MA Experiment 20000455 PARAMETER Experiment Name: At_100uM_ABA_P Parameter: Timepoint (hr) Value: 48
  misc_feature: MA Experiment 20000455 PARAMETER Experiment Name: At_100uM_ABA_P Parameter: Tissue Value: Aerial
  misc_feature: MA Experiment 20000455 PARAMETER Experiment Name: At_100uM_ABA_P Parameter: Treatment Value: 100uM ABA vs. No Treatment
  misc_feature: MA Experiment ID: 20000495 Result: Down-regulated in Transcription
  misc_feature: MA Experiment 20000495 PARAMETER Experiment Name: At_Guard_Cells_P Parameter: Harvest Date Value: 8/2/2002
  misc_feature: MA Experiment 20000495 PARAMETER Experiment Name: At_Guard_Cells_P Parameter: Organism Value: A. thaliana
  misc_feature: MA Experiment 20000495 PARAMETER Experiment Name: At_Guard_Cells_P Parameter: Tissue Value: Guard Cells vs. Leaves
  misc_feature: MA Experiment ID: 20000527 Result: Down-regulated in Transcription
  misc_feature: MA Experiment 20000527 PARAMETER Experiment Name: At_10percent_PEG_P Parameter: Age (day) Value: 20
  misc_feature: MA Experiment 20000527 PARAMETER Experiment Name: At_10percent_PEG_P Parameter: Organism Value: A. thaliana
  misc_feature: MA Experiment 20000527 PARAMETER Experiment Name: At_10percent_PEG_P Parameter: Plant Line Value: WS
  misc_feature: MA Experiment 20000527 PARAMETER Experiment Name: At_10percent_PEG_P Parameter: Timepoint (day) Value: 20
  misc_feature: MA Experiment 20000527 PARAMETER Experiment Name: At_10percent_PEG_P Parameter: Tissue Value: Whole Plant
  misc_feature: MA Experiment 20000527 PARAMETER Experiment Name: At_10percent_PEG_P Parameter: Treatment Value: 10percent PEG vs. No Treatment
  misc_feature: MA Experiment ID: 20000573 Result: Down-regulated in Transcription
  misc_feature: MA Experiment 20000573 PARAMETER Experiment Name: At_100uM_ABA_Mutants__P Parameter: Organism Value: A. thaliana
  misc_feature: MA Experiment 20000573 PARAMETER Experiment Name: At_100uM_ABA_Mutants__P Parameter: Plant Line Value: CS22 vs. Ler wt
  misc_feature: MA Experiment 20000573 PARAMETER Experiment Name: At_100uM_ABA_Mutants__P Parameter: Timepoint (hr) Value: N/A
  misc_feature: MA Experiment 20000573 PARAMETER Experiment Name: At_100uM_ABA_Mutants__P Parameter: Tissue Value: Whole Plant
  misc_feature: MA Experiment 20000573 PARAMETER Experiment Name: At_100uM_ABA_Mutants__P Parameter: Treatment Value: None
  misc_feature: MA Experiment ID: 20000576 Result: Up-regulated in Transcription
  misc_feature: MA Experiment 20000576 PARAMETER Experiment Name: At_100uM_ABA_Mutants__P Parameter: Organism Value: A. thaliana
  misc_feature: MA Experiment 20000576 PARAMETER Experiment Name: At_100uM_ABA_Mutants__P Parameter: Plant Line Value: CS23
  misc_feature: MA Experiment 20000576 PARAMETER Experiment Name: At_100uM_ABA_Mutants__P Parameter: Timepoint (hr) Value: 6
  misc_feature: MA Experiment 20000576 PARAMETER Experiment Name: At_100uM_ABA_Mutants__P Parameter: Tissue Value: Whole Plant
  misc_feature: MA Experiment 20000576 PARAMETER Experiment Name: At_100uM_ABA_Mutants__P Parameter: Treatment Value: 1uM ABA vs. No Treatment
  misc_feature: MA Experiment ID: 20000709 Result: Down-regulated in Transcription
  misc_feature: MA Experiment 20000709 PARAMETER Experiment Name: At_15mM_NH4NO3_L-to-H_P Parameter: Age (hr) Value: 14
  misc_feature: MA Experiment 20000709 PARAMETER Experiment Name: At_15mM_NH4NO3_L-to-H_P Parameter: Organism Value: A. thaliana
  misc_feature: MA Experiment 20000709 PARAMETER Experiment Name: At_15mM_NH4NO3_L-to-H_P Parameter: Plant Line Value: WS
  misc_feature: MA Experiment 20000709 PARAMETER Experiment Name: At_15mM_NH4NO3_L-to-H_P Parameter: Timepoint (hr) Value: 4
  misc_feature: MA Experiment 20000709 PARAMETER Experiment Name: At_15mM_NH4NO3_L-to-H_P Parameter: Tissue Value: Aerial
  misc_feature: MA Experiment 20000709 PARAMETER Experiment Name: At_15mM_NH4NO3_L-to-H_P Parameter: Treatment Value: 15mM NH4NO3 vs. 30mM Mannitol
  misc_feature: MA Experiment ID: 20001458 Result: Down-regulated in Transcription
  misc_feature: MA Experiment 20001458 PARAMETER Experiment Name: At_50mM_NH4NO3_L-to-H_P Parameter: Age (day) Value: Undefined
  misc_feature: MA Experiment 20001458 PARAMETER Experiment Name: At_50mM_NH4NO3_L-to-H_P Parameter: Organism Value: Undefined
  misc_feature: MA Experiment 20001458 PARAMETER Experiment Name: At_50mM_NH4NO3_L-to-H_P Parameter: Plant Line Value: Undefined
  misc_feature: MA Experiment 20001458 PARAMETER Experiment Name: At_50mM_NH4NO3_L-to-H_P Parameter: Timepoint (hr) Value: 2
  misc_feature: MA Experiment 20001458 PARAMETER Experiment Name: At_50mM_NH4NO3_L-to-H_P Parameter: Tissue Value: Siliques
  misc_feature: MA Experiment 20001458 PARAMETER Experiment Name: At_50mM_NH4NO3_L-to-H_P Parameter: Treatment Value: 50mM NH4NO3 vs. 100mM Manitol
  misc_feature: MA Experiment ID: 20001503 Result: Up-regulated in Transcription
  misc_feature: MA Experiment 20001503 PARAMETER Experiment Name: At_Far-red-enriched_P Parameter: Age (day) Value: 7
  misc_feature: MA Experiment 20001503 PARAMETER Experiment Name: At_Far-red-enriched_P Parameter: Light Value: Far-red enriched vs. White
  misc_feature: MA Experiment 20001503 PARAMETER Experiment Name: At_Far-red-enriched_P Parameter: Organism Value: A. thaliana
  misc_feature: MA Experiment 20001503 PARAMETER Experiment Name: At_Far-red-enriched_P Parameter: Plant Line Value: Columbia
  misc_feature: MA Experiment 20001503 PARAMETER Experiment Name: At_Far-red-enriched_P Parameter: Timepoint (day) Value: 3
  misc_feature: MA Experiment 20001503 PARAMETER Experiment Name: At_Far-red-enriched_P Parameter: Tissue Value: Whole Plant
  misc_feature: MA Experiment ID: 20001504 Result: Up-regulated in Transcription
  misc_feature: MA Experiment 20001504 PARAMETER Experiment Name: At_Far-red-enriched_P Parameter: Age (day) Value: 10
  misc_feature: MA Experiment 20001504 PARAMETER Experiment Name: At_Far-red-enriched_P Parameter: Light Value: Far-red enriched vs. White
  misc_feature: MA Experiment 20001504 PARAMETER Experiment Name: At_Far-red-enriched_P Parameter: Organism Value: A. thaliana
  misc_feature: MA Experiment 20001504 PARAMETER Experiment Name: At_Far-red-enriched_P Parameter: Plant Line Value: Columbia
  misc_feature: MA Experiment 20001504 PARAMETER Experiment Name: At_Far-red-enriched_P Parameter: Timepoint (day) Value: 6
  misc_feature: MA Experiment 20001504 PARAMETER Experiment Name: At_Far-red-enriched_P Parameter: Tissue Value: Whole Plant
  misc_feature: MA Experiment ID: 20001554 Result: Up-regulated in Transcription
  misc_feature: MA Experiment 20001554 PARAMETER Experiment Name: At_Drought_Soil_Dry_P Parameter: Age (day) Value: 21
  misc_feature: MA Experiment 20001554 PARAMETER Experiment Name: At_Drought_Soil_Dry_P Parameter: Organism Value: A. thaliana
  misc_feature: MA Experiment 20001554 PARAMETER Experiment Name: At_Drought_Soil_Dry_P Parameter: Plant Line Value: WS
  misc_feature: MA Experiment 20001554 PARAMETER Experiment Name: At_Drought_Soil_Dry_P Parameter: Post Timepoint (hr) Value: None
  misc_feature: MA Experiment 20001554 PARAMETER Experiment Name: At_Drought_Soil_Dry_P Parameter: Post-Treatment Value: None
  misc_feature: MA Experiment 20001554 PARAMETER Experiment Name: At_Drought_Soil_Dry_P Parameter: Timepoint (day) Value: 7
  misc_feature: MA Experiment 20001554 PARAMETER Experiment Name: At_Drought_Soil_Dry_P Parameter: Treatment Value: Drought vs. No Drought
  misc_feature: MA Experiment ID: 20001555 Result: Up-regulated in Transcription
  misc_feature: MA Experiment 20001555 PARAMETER Experiment Name: At_Drought_Soil_Dry_P Parameter: Age (day) Value: 24
  misc_feature: MA Experiment 20001555 PARAMETER Experiment Name: At_Drought_Soil_Dry_P Parameter: Organism Value: A. thaliana
  misc_feature: MA Experiment 20001555 PARAMETER Experiment Name: At_Drought_Soil_Dry_P Parameter: Plant Line Value: WS
  misc_feature: MA Experiment 20001555 PARAMETER Experiment Name: At_Drought_Soil_Dry_P Parameter: Post Timepoint (hr) Value: None
  misc_feature: MA Experiment 20001555 PARAMETER Experiment Name: At_Drought_Soil_Dry_P Parameter: Post-Treatment Value: None
  misc_feature: MA Experiment 20001555 PARAMETER Experiment Name: At_Drought_Soil_Dry_P Parameter: Timepoint (day) Value: 10
  misc_feature: MA Experiment 20001555 PARAMETER Experiment Name: At_Drought_Soil_Dry_P Parameter: Treatment Value: Drought vs. No Drought
  misc_feature: MA Experiment ID: 20001559 Result: Up-regulated in Transcription
  misc_feature: MA Experiment 20001559 PARAMETER Experiment Name: At_Drought_Soil_Dry_P Parameter: Age (day) Value: 28
  misc_feature: MA Experiment 20001559 PARAMETER Experiment Name: At_Drought_Soil_Dry_P Parameter: Organism Value: A. thaliana
  misc_feature: MA Experiment 20001559 PARAMETER Experiment Name: At_Drought_Soil_Dry_P Parameter: Plant Line Value: WS
  misc_feature: MA Experiment 20001559 PARAMETER Experiment Name: At_Drought_Soil_Dry_P Parameter: Post Timepoint (hr) Value: 29
  misc_feature: MA Experiment 20001559 PARAMETER Experiment Name: At_Drought_Soil_Dry_P Parameter: Post-Treatment Value: Re-Water vs. No Drought
  misc_feature: MA Experiment 20001559 PARAMETER Experiment Name: At_Drought_Soil_Dry_P Parameter: Timepoint (day) Value: 14
  misc_feature: MA Experiment 20001559 PARAMETER Experiment Name: At_Drought_Soil_Dry_P Parameter: Treatment Value: Drought vs. No Drought
  misc_feature: MA Experiment ID: 20001770 Result: Up-regulated in Transcription
  misc_feature: MA Experiment 20001770 PARAMETER Experiment Name: At_Far-red-enriched-adult_P Parameter: Age (day) Value: 28
  misc_feature: MA Experiment 20001770 PARAMETER Experiment Name: At_Far-red-enriched-adult_P Parameter: Light Value: Far-red enriched vs. White
  misc_feature: MA Experiment 20001770 PARAMETER Experiment Name: At_Far-red-enriched-adult_P Parameter: Organism Value: A. thaliana
  misc_feature: MA Experiment 20001770 PARAMETER Experiment Name: At_Far-red-enriched-adult_P Parameter: Plant Line Value: Columbia
  misc_feature: MA Experiment 20001770 PARAMETER Experiment Name: At_Far-red-enriched-adult_P Parameter: Timepoint (hr) Value: 8
  misc_feature: MA Experiment 20001770 PARAMETER Experiment Name: At_Far-red-enriched-adult_P Parameter: Tissue Value: Aerial
  misc_feature: MA Experiment ID: 20001771 Result: Up-regulated in Transcription
  misc_feature: MA Experiment 20001771 PARAMETER Experiment Name: At_Far-red-enriched-adult_P Parameter: Age (day) Value: 28
  misc_feature: MA Experiment 20001771 PARAMETER Experiment Name: At_Far-red-enriched-adult_P Parameter: Light Value: Far-red enriched vs. White
  misc_feature: MA Experiment 20001771 PARAMETER Experiment Name: At_Far-red-enriched-adult_P Parameter: Organism Value: A. thaliana
  misc_feature: MA Experiment 20001771 PARAMETER Experiment Name: At_Far-red-enriched-adult_P Parameter: Plant Line Value: Columbia
  misc_feature: MA Experiment 20001771 PARAMETER Experiment Name: At_Far-red-enriched-adult_P Parameter: Timepoint (hr) Value: 16
  misc_feature: MA Experiment 20001771 PARAMETER Experiment Name: At_Far-red-enriched-adult_P Parameter: Tissue Value: Aerial
  misc_feature: MA Experiment ID: 20001774 Result: Up-regulated in Transcription
  misc_feature: MA Experiment 20001774 PARAMETER Experiment Name: At_Far-red-enriched-adult_P Parameter: Age (day) Value: 31
  misc_feature: MA Experiment 20001774 PARAMETER Experiment Name: At_Far-red-enriched-adult_P Parameter: Light Value: Far-red enriched vs. White
  misc_feature: MA Experiment 20001774 PARAMETER Experiment Name: At_Far-red-enriched-adult_P Parameter: Organism Value: A. thaliana
  misc_feature: MA Experiment 20001774 PARAMETER Experiment Name: At_Far-red-enriched-adult_P Parameter: Plant Line Value: Columbia
  misc_feature: MA Experiment 20001774 PARAMETER Experiment Name: At_Far-red-enriched-adult_P Parameter: Timepoint (hr) Value: 72
  misc_feature: MA Experiment 20001774 PARAMETER Experiment Name: At_Far-red-enriched-adult_P Parameter: Tissue Value: Aerial
  misc_feature: MA Experiment ID: 20001911 Result: Up-regulated in Transcription
  misc_feature: MA Experiment 20001911 PARAMETER Experiment Name: At_Drought_Reproduction_P Parameter: Age (day) Value: 40
  misc_feature: MA Experiment 20001911 PARAMETER Experiment Name: At_Drought_Reproduction_P Parameter: Organism Value: A. thaliana
  misc_feature: MA Experiment 20001911 PARAMETER Experiment Name: At_Drought_Reproduction_P Parameter: Plant Line Value: WS
  misc_feature: MA Experiment 20001911 PARAMETER Experiment Name: At_Drought_Reproduction_P Parameter: Timepoint (day) Value: 10
  misc_feature: MA Experiment 20001911 PARAMETER Experiment Name: At_Drought_Reproduction_P Parameter: Tissue Value: Flowers
  misc_feature: MA Experiment 20001911 PARAMETER Experiment Name: At_Drought_Reproduction_P Parameter: Treatment Value: Drought vs. No Drought
atacattataaagatactgatgagtggttcttgtttaatggagttttaaatttaaaaatatttggtaaccgagtggatcatcatgttattgagaagcacatctgctccgatactgaactcgtggcttccacaacactgctcgagagaatcgtctccggaaccggagtcacagctctggcgccggtcaacatcattgtctcttttctcatcaaagtccatagatggacacactggggagcagctgcaccaagctctctctgacaacaaggagattattattcttaaatcaaaaagcaacgagcacagctacaaaactccaacatcaagcaggcaacgcaggtcatctttagatgaaacacgctacacaaaaaagactttggatcggtcatcacctttcttagtggagaggctcttctcgagctctggacagggagataaggccagtagtaatgatcgtctggagactcttgtgagtggtggtggtggcgggatgggaggcagcggcggcaatatttgtaacggcggcggtggtgtcggtggaagtggtgtggacggcggtaggagtgaggacgctaccgacacgtattaccgggagatgatcgactcgaatccaggaaactcgcttttgaccggaaactacgccaagttcttgaaagaggtgaaaggagacatgaaaaaagcagaagagtattgtgaaagagcaattttggggaacaccaacgatggaaacgttctatctctctatgctgatctcattttgcacaaccatcaagatcgtcaaagagcccactcttactataagcaagccgtcaagatgtccccggaagattgttatgtgcaagcttcatacgcaaggtttctgtgggatgtggatgaggacgaagaagatgaagcattaggagaagaagaagagaacttgagtgatgaaactggccatgtgcctccaactaccatgttccgtgattttccccaacacacttctattaccgcatcatcctaagacacatatgaacaccttcgtgaatgttcgtatttaggtaaataacatatatagaagcatatttaatacacatactcaaatgcaatatgcgtgtataatatatgttcagaatctttgtatatgttctgtagtcttcataataagggtatgtacttatatttgcagtatttatgtgtctttttgtattataaagtatgaaacttacccatgtcctatcgagatagacaaaatattaggcatttgtttgttaaaaaaaagtatgatgaaattgatgatacagatcgatc

SEQ ID NO: 23160 - protein, 305 aa, Arabidopsis thaliana
  peptide (1)..(305): Ceres Seq. ID no. 12335119
  misc_feature (168)..(282): Homolog of NCBI NO: 18390404 NR Description: expressed protein
  misc_feature (129)..(274): Homolog of NCBI NO: 37537130 NR Description: unknown protein [Oryza sativa (japonica
  misc_feature (124)..(286): Homolog of NCBI NO: 32488305 NR Description: OSJNBb0065L13.14 [Oryza sativa (japonica
  misc_feature (108)..(277): Homolog of NCBI NO: 21592868 NR Description: unknown [Arabidopsis thaliana]
  misc_feature (108)..(277): Homolog of NCBI NO: 18414994 NR Description: putative protein
  misc_feature (108)..(277): Homolog of NCBI NO: 7487766 NR Description: hypothetical protein T6K21.120 - Arabidopsis
  misc_feature (132)..(283): Homolog of NCBI NO: 15236755 NR Description: putative protein
  misc_feature (132)..(283): Homolog of NCBI NO: 14532728 NR Description: unknown protein [Arabidopsis thaliana]
  misc_feature (1)..(286): Homolog of NCBI NO: 15241290 NR Description: putative protein; protein id: At5g20190.1
  misc_feature (1)..(305): Homolog of NCBI NO: 18412668 NR Description: expressed protein
MLLRSTSAPILNSWLPQHCSRESSPEPESQLWRRSTSLSLFSSKSIDGHTGEQLHQALSDNKEIIILKSKSNEHSYKTPTSSRQRRSSLDETRYTKKTLDRSSPFLVERLFSSSGQGDKASSNDRLETLVSGGGGGMGGSGGNICNGGGGVGGSGVDGGRSEDATDTYYREMIDSNPGNSLLTGNYAKFLKEVKGDMKKAEEYCERAILGNTNDGNVLSLYADLILHNHQDRQRAHSYYKQAVKMSPEDCYVQASYARFLWDVDEDEEDEALGEEEENLSDETGHVPPTTMFRDFPQHTSITASS

SEQ ID NO: 23161 - protein, 169 aa, Arabidopsis thaliana
  peptide (1)..(169): Ceres Seq. ID no. 12335120
  misc_feature (32)..(146): Homolog of NCBI NO: 18390404 NR Description: expressed protein
  misc_feature (1)..(138): Homolog of NCBI NO: 37537130 NR Description: unknown protein [Oryza sativa (japonica
  misc_feature (1)..(150): Homolog of NCBI NO: 32488305 NR Description: OSJNBb0065L13.14 [Oryza sativa (japonica
  misc_feature (1)..(141): Homolog of NCBI NO: 21592868 NR Description: unknown [Arabidopsis thaliana]
  misc_feature (1)..(141): Homolog of NCBI NO: 18414994 NR Description: putative protein
  misc_feature (1)..(141): Homolog of NCBI NO: 7487766 NR Description: hypothetical protein T6K21.120 - Arabidopsis
  misc_feature (1)..(147): Homolog of NCBI NO: 15236755 NR Description: putative protein
  misc_feature (1)..(147): Homolog of NCBI NO: 14532728 NR Description: unknown protein [Arabidopsis thaliana]
  misc_feature (1)..(150): Homolog of NCBI NO: 15241290 NR Description: putative protein; protein id: At5g20190.1
  misc_feature (1)..(169): Homolog of NCBI NO: 18412668 NR Description: expressed protein
MGGSGGNICNGGGGVGGSGVDGGRSEDATDTYYREMIDSNPGNSLLTGNYAKFLKEVKGDMKKAEEYCERAILGNTNDGNVLSLYADLILHNHQDRQRAHSYYKQAVKMSPEDCYVQASYARFLWDVDEDEEDEALGEEEENLSDETGHVPPTTMFRDFPQHTSITASS

SEQ ID NO: 23162 - DNA, 481 bp, Arabidopsis thaliana
  misc_feature (1)..(481): Ceres Seq. ID no. 12562032
  misc_feature: MA Experiment ID: 20000265 Result: Down-regulated in Transcription
  misc_feature: MA Experiment 20000265 PARAMETER Experiment Name: At_Open_Flower_P Parameter: Age (day) Value: 21
  misc_feature: MA Experiment 20000265 PARAMETER Experiment Name: At_Open_Flower_P Parameter: Plant Line Value: WS
  misc_feature: MA Experiment 20000265 PARAMETER Experiment Name: At_Open_Flower_P Parameter: Tissue Value: Closed Flower vs. Whole Plant
  misc_feature: MA Experiment ID: 20000794 Result: Up-regulated in Transcription
  misc_feature: MA Experiment 20000794 PARAMETER Experiment Name: At_Petals_P Parameter: Age (day) Value: 23-25 days
  misc_feature: MA Experiment 20000794 PARAMETER Experiment Name: At_Petals_P Parameter: Plant Line Value: WS
  misc_feature: MA Experiment 20000794 PARAMETER Experiment Name: At_Petals_P Parameter: Tissue Value: Petals vs. Whole plant
  misc_feature: MA Experiment ID: 20001247 Result: Up-regulated in Transcription
  misc_feature: MA Experiment 20001247 PARAMETER Experiment Name: At_Far-red-induction_P Parameter: Age (day) Value: 7
  misc_feature: MA Experiment 20001247 PARAMETER Experiment Name: At_Far-red-induction_P Parameter: Light Value: Far-red vs. White
  misc_feature: MA Experiment 20001247 PARAMETER Experiment Name: At_Far-red-induction_P Parameter: Organism Value: A. thaliana
  misc_feature: MA Experiment 20001247 PARAMETER Experiment Name: At_Far-red-induction_P Parameter: Plant Line Value: Columbia
  misc_feature: MA Experiment 20001247 PARAMETER Experiment Name: At_Far-red-induction_P Parameter: Timepoint (hr) Value: 1
  misc_feature: MA Experiment 20001247 PARAMETER Experiment Name: At_Far-red-induction_P Parameter: Tissue Value: Whole Plant
  misc_feature: MA Experiment ID: 20001451 Result: Up-regulated in Transcription
  misc_feature: MA Experiment 20001451 PARAMETER Experiment Name: At_Far-red-induction_P Parameter: Age (day) Value: 7
  misc_feature: MA Experiment 20001451 PARAMETER Experiment Name: At_Far-red-induction_P Parameter: Light Value: Far-red vs. White
  misc_feature: MA Experiment 20001451 PARAMETER Experiment Name: At_Far-red-induction_P Parameter: Organism Value: A. thaliana
  misc_feature: MA Experiment 20001451 PARAMETER Experiment Name: At_Far-red-induction_P Parameter: Plant Line Value: Columbia
  misc_feature: MA Experiment 20001451 PARAMETER Experiment Name: At_Far-red-induction_P Parameter: Timepoint (hr) Value: 24
  misc_feature: MA Experiment 20001451 PARAMETER Experiment Name: At_Far-red-induction_P Parameter: Tissue Value: Whole Plant
tcggtaaacttcaaatcagaagcgaagaagagatcaaatcaatctgatcgtagatgggttgtttcagttgcttcgacggaacccaaaaggaacagcgtaaggaagaagagagacaagcctccgccgaagctcgtgccaaagccgccgaagctgcccagcgacggaaagagcagtttgataagtctgcagctggaagagctgcacaagctcaattacaacaaatggctaaacaatctgcaaatactaacaaaggagagcctgttcttaagtggcaaatgacgtagtgatgagtcctggtttcaaaaggaatcaatttgtgcgatttggttctttgtaaattgtgtgttcttcaatgtttgcaatactttggttatgtgaattgaagcttattttcttccttattcatctgattatcttttgacttttgtaaaacaaaaaagaaataacagagtacaatgttaagatcatctctctgttttac

SEQ ID NO: 23163 - protein, 92 aa, Arabidopsis thaliana
  peptide (1)..(92): Ceres Seq. ID no. 12562033
SVNFKSEAKKRSNQSDRRWVVSVASTEPKRNSVRKKRDKPPPKLVPKPPKLPSDGKSSLISLQLEELHKLNYNKWLNNLQILTKESLFLSGK

SEQ ID NO: 23164 - protein, 76 aa, Arabidopsis thaliana
  peptide (1)..(76): Ceres Seq. ID no. 12562034
  misc_feature (1)..(76): Homolog of NCBI NO: 18424765 NR Description: Expressed protein
MGCFSCFDGTQKEQRKEEERQASAEARAKAAEAAQRRKEQFDKSAAGRAAQAQLQQMAKQSANTNKGEPVLKWQMT

SEQ ID NO: 23165 - DNA, 1069 bp, Arabidopsis thaliana
  misc_feature (1)..(1069): Ceres Seq. ID no. 12370440
  misc_feature: MA Experiment ID: 108434 Result: Up-regulated in Transcription
  misc_feature: MA Experiment 108434 PARAMETER Experiment Name: At_Root_Tips_cDNA_P Parameter: Tissue Value: Root Tips
  misc_feature: MA Experiment ID: 108462 Result: Down-regulated in Transcription
  misc_feature: MA Experiment 108462 PARAMETER Experiment Name: At_Germinating_Seeds_cDNA_P Parameter: Age (day) Value: 2 vs. 0
  misc_feature: MA Experiment 108462 PARAMETER Experiment Name: At_Germinating_Seeds_cDNA_P Parameter: Tissue Value: Germinating Seeds
  misc_feature: MA Experiment ID: 108463 Result: Down-regulated in Transcription
  misc_feature: MA Experiment 108463 PARAMETER Experiment Name: At_Germinating_Seeds_cDNA_P Parameter: Age (day) Value: 3 vs. 0
  misc_feature: MA Experiment 108463 PARAMETER Experiment Name: At_Germinating_Seeds_cDNA_P Parameter: Tissue Value: Germinating Seeds
  misc_feature: MA Experiment ID: 108464 Result: Down-regulated in Transcription
  misc_feature: MA Experiment 108464 PARAMETER Experiment Name: At_Germinating_Seeds_cDNA_P Parameter: Age (day) Value: 4 vs. 0
  misc_feature: MA Experiment 108464 PARAMETER Experiment Name: At_Germinating_Seeds_cDNA_P Parameter: Tissue Value: Germinating Seeds
  misc_feature: MA Experiment ID: 108573 Result: Up-regulated in Transcription
  misc_feature: MA Experiment 108573 PARAMETER Experiment Name: At_Drought_cDNA_P Parameter: Timepoint (hr) Value: 6
  misc_feature: MA Experiment 108573 PARAMETER Experiment Name: At_Drought_cDNA_P Parameter: Tissue Value: Aerial
  misc_feature: MA Experiment 108573 PARAMETER Experiment Name: At_Drought_cDNA_P Parameter: Treatment Value: Drought vs. No Drought
gtttcaggcgagagagatgagcgcgacggagctgccgacgaaggaggcacacatacttaaaggccacgagggggcggttttagcggcgaggtttaacggtgacggaaactacgctctcacctgtggcaaggatcgaactatccgcctctggaacccgcaccgtggaatcttaatcaagacctacaaatctcatggccgcgaagtccgcgacgttcatgttacttcagacaatgccaaattttgctcatgtggtggtgatcggcaagtttactactgggatgtttcaactggacgtgtaatccgtaaattccgtggtcatgatggagaggtcaatgcagtgaagttcaatgattcgtcgtctgtggttgtatcagctgggttcgatcgttcgctacgtgtatgggactgcagatctcacagtgttgagccagtacagatcattgatacatttttggatacagtcatgtctgttgttttaacaaagactgagattattggtggtagtgtcgatggaacagttcgcacatttgacatgcgtatcggtagggagatgtcagataacctaggccaaccggttaactgtatatcgatatcaaatgatggaaactgcgttttagctggttgcttggattctactctgcgtctacttgacaggaccacaggagagctactccaagtctataaaggtcatatttccaagtcatttaaaacggattgttgcctcacgaattcggatgcacatgtgattggaggatcagaggatggattggttttcttttgggatttggtagatgcaaaagtgctatcgaaatttagagctcacgatttagtggtgacaagcgtgagttaccacccgaaggaagactgtatgttgacttcttcggtcgatggtacaattcgtgtctggaaaaaatgaagaaacaacaaatcttgacttcgattgattttgttatttacgtcgcaaactcacttttcttcttctactatagctgtttttttggagttggaaagttgaaatattttgtagagtacttgtatcattgtatgtgaaggaaaactttttttaggc

SEQ ID NO: 23166 - protein, 304 aa, Arabidopsis thaliana
  peptide (1)..(304): Ceres Seq. ID no. 12370441
  misc_feature (8)..(304): Homolog of NCBI NO: 13385884 NR Description: RIKEN cDNA 1500041N16 [Mus musculus]
  misc_feature (8)..(304): Homolog of NCBI NO: 18044039 NR Description: RIKEN cDNA 1500041N16 gene [Mus musculus]
  misc_feature (8)..(304): Homolog of NCBI NO: 34851410 NR Description: similar to RIKEN cDNA 1500041N16 [Rattus
  misc_feature (10)..(304): Homolog of NCBI NO: 14150114 NR Description: hypothetical protein MGC4238 [Homo sapiens]
  misc_feature (8)..(304): Homolog of NCBI NO: 12838548 NR Description: unnamed protein product [Mus musculus]
  misc_feature (6)..(304): Homolog of NCBI NO: 18424859 NR Description: G-protein beta-subunit (transducin) family
  misc_feature (6)..(277): Homolog of NCBI NO: 10177204 NR Description: contains similarity to unknown
  misc_feature (23)..(291): Homolog of NCBI NO: 24584567 NR Description: CG4935-PA [Drosophila melanogaster]
  misc_feature (9)..(302): Homolog of NCBI NO: 17533647 NR Description: Deoxyhypusine synthase [Caenorhabditis elegans]
  misc_feature (9)..(302): Homolog of NCBI NO: 39596796 NR Description: Hypothetical protein CBG02300 [Caenorhabditis
FQAREMSATELPTKEAHILKGHEGAVLAARFNGDGNYALTCGKDRTIRLWNPHRGILIKTYKSHGREVRDVHVTSDNAKFCSCGGDRQVYYWDVSTGRVIRKFRGHDGEVNAVKFNDSSSVVVSAGFDRSLRVWDCRSHSVEPVQIIDTFLDTVMSVVLTKTEIIGGSVDGTVRTFDMRIGREMSDNLGQPVNCISISNDGNCVLAGCLDSTLRLLDRTTGELLQVYKGHISKSFKTDCCLTNSDAHVIGGSEDGLVFFWDLVDAKVLSKFRAHDLVVTSVSYHPKEDCMLTSSVDGTIRVWKK

SEQ ID NO: 23167 - protein, 299 aa, Arabidopsis thaliana
  peptide (1)..(299): Ceres Seq. ID no. 12370442
  misc_feature (18)..(286): Homolog of NCBI NO: 24584567 NR Description: CG4935-PA [Drosophila melanogaster]
  misc_feature (4)..(297): Homolog of NCBI NO: 17533647 NR Description: Deoxyhypusine synthase [Caenorhabditis elegans]
  misc_feature (4)..(297): Homolog of NCBI NO: 39596796 NR Description: Hypothetical protein CBG02300 [Caenorhabditis
  misc_feature (3)..(299): Homolog of NCBI NO: 13385884 NR Description: RIKEN cDNA 1500041N16 [Mus musculus]
  misc_feature (3)..(299): Homolog of NCBI NO: 18044039 NR Description: RIKEN cDNA 1500041N16 gene [Mus musculus]
  misc_feature (3)..(299): Homolog of NCBI NO: 34851410 NR Description: similar to RIKEN cDNA 1500041N16 [Rattus
  misc_feature (5)..(299): Homolog of NCBI NO: 14150114 NR Description: hypothetical protein MGC4238 [Homo sapiens]
  misc_feature (3)..(299): Homolog of NCBI NO: 12838548 NR Description: unnamed protein product [Mus musculus]
  misc_feature (1)..(299): Homolog of NCBI NO: 18424859 NR Description: G-protein beta-subunit (transducin) family
  misc_feature (1)..(272): Homolog of NCBI NO: 10177204 NR Description: contains similarity to unknown
MSATELPTKEAHILKGHEGAVLAARFNGDGNYALTCGKDRTIRLWNPHRGILIKTYKSHGREVRDVHVTSDNAKFCSCGGDRQVYYWDVSTGRVIRKFRGHDGEVNAVKFNDSSSVVVSAGFDRSLRVWDCRSHSVEPVQIIDTFLDTVMSVVLTKTEIIGGSVDGTVRTFDMRIGREMSDNLGQPVNCISISNDGNCVLAGCLDSTLRLLDRTTGELLQVYKGHISKSFKTDCCLTNSDAHVIGGSEDGLVFFWDLVDAKVLSKFRAHDLVVTSVSYHPKEDCMLTSSVDGTIRVWKK

SEQ ID NO: 23168 - DNA, 2788 bp, Arabidopsis thaliana
  misc_feature (1)..(2788): Ceres Seq. ID no. 13488489
  misc_feature: MA Experiment ID: 108434 Result: Up-regulated in Transcription
  misc_feature: MA Experiment 108434 PARAMETER Experiment Name: At_Root_Tips_cDNA_P Parameter: Tissue Value: Root Tips
  misc_feature: MA Experiment ID: 108461 Result: Down-regulated in Transcription
  misc_feature: MA Experiment 108461 PARAMETER Experiment Name: At_Germinating_Seeds_cDNA_P Parameter: Age (day) Value: 1 vs. 0
  misc_feature: MA Experiment 108461 PARAMETER Experiment Name: At_Germinating_Seeds_cDNA_P Parameter: Tissue Value: Germinating Seeds
  misc_feature: MA Experiment ID: 108462 Result: Down-regulated in Transcription
  misc_feature: MA Experiment 108462 PARAMETER Experiment Name: At_Germinating_Seeds_cDNA_P Parameter: Age (day) Value: 2 vs. 0
  misc_feature: MA Experiment 108462 PARAMETER Experiment Name: At_Germinating_Seeds_cDNA_P Parameter: Tissue Value: Germinating Seeds
  misc_feature: MA Experiment ID: 108463 Result: Down-regulated in Transcription
  misc_feature: MA Experiment 108463 PARAMETER Experiment Name: At_Germinating_Seeds_cDNA_P Parameter: Age (day) Value: 3 vs. 0
  misc_feature: MA Experiment 108463 PARAMETER Experiment Name: At_Germinating_Seeds_cDNA_P Parameter: Tissue Value: Germinating Seeds
  misc_feature: MA Experiment ID: 108464 Result: Down-regulated in Transcription
  misc_feature: MA Experiment 108464 PARAMETER Experiment Name: At_Germinating_Seeds_cDNA_P Parameter: Age (day) Value: 4 vs. 0
  misc_feature: MA Experiment 108464 PARAMETER Experiment Name: At_Germinating_Seeds_cDNA_P Parameter: Tissue Value: Germinating Seeds
  misc_feature: MA Experiment ID: 108573 Result: Down-regulated in Transcription
  misc_feature: MA Experiment 108573 PARAMETER Experiment Name: At_Drought_cDNA_P Parameter: Timepoint (hr) Value: 6
  misc_feature: MA Experiment 108573 PARAMETER Experiment Name: At_Drought_cDNA_P Parameter: Tissue Value: Aerial
  misc_feature: MA Experiment 108573 PARAMETER Experiment Name: At_Drought_cDNA_P Parameter: Treatment Value: Drought vs. No Drought
  misc_feature: MA Experiment ID: 20000113 Result: Down-regulated in Transcription
  misc_feature: MA Experiment 20000113 PARAMETER Experiment Name: At_42deg_Heat_cDNA_P Parameter: Temperature (deg C) Value: 42 vs. 22
  misc_feature: MA Experiment 20000113 PARAMETER Experiment Name: At_42deg_Heat_cDNA_P Parameter: Timepoint (hr) Value: 8
  misc_feature: MA Experiment 20000113 PARAMETER Experiment Name: At_42deg_Heat_cDNA_P Parameter: Tissue Value: Aerial
  misc_feature: MA Experiment ID: 20000171 Result: Down-regulated in Transcription
  misc_feature: MA Experiment 20000171 PARAMETER Experiment Name: At_42deg_Heat_P Parameter: Age (day) Value: 14
  misc_feature: MA Experiment 20000171 PARAMETER Experiment Name: At_42deg_Heat_P Parameter: Organism Value: A. thaliana
  misc_feature: MA Experiment 20000171 PARAMETER Experiment Name: At_42deg_Heat_P Parameter: Plant Line Value: WS
  misc_feature: MA Experiment 20000171 PARAMETER Experiment Name: At_42deg_Heat_P Parameter: Temperature (deg C) Value: 42 vs. 22
  misc_feature: MA Experiment 20000171 PARAMETER Experiment Name: At_42deg_Heat_P Parameter: Timepoint (hr) Value: 1
  misc_feature: MA Experiment 20000171 PARAMETER Experiment Name: At_42deg_Heat_P Parameter: Tissue Value: Aerial
  misc_feature: MA Experiment ID: 20000173 Result: Down-regulated in Transcription
  misc_feature: MA Experiment 20000173 PARAMETER Experiment Name: At_42deg_Heat_P Parameter: Age (day) Value: 14
  misc_feature: MA Experiment 20000173 PARAMETER Experiment Name: At_42deg_Heat_P Parameter: Organism Value: A. thaliana
  misc_feature: MA Experiment 20000173 PARAMETER Experiment Name: At_42deg_Heat_P Parameter: Plant Line Value: WS
  misc_feature: MA Experiment 20000173 PARAMETER Experiment Name: At_42deg_Heat_P Parameter: Temperature (deg C) Value: 42 vs. 22
  misc_feature: MA Experiment 20000173 PARAMETER Experiment Name: At_42deg_Heat_P Parameter: Timepoint (hr) Value: 6
  misc_feature: MA Experiment 20000173 PARAMETER Experiment Name: At_42deg_Heat_P Parameter: Tissue Value: Aerial
  misc_feature: MA Experiment ID: 20000180 Result: Down-regulated in Transcription
  misc_feature: MA Experiment 20000180 PARAMETER Experiment Name: At_Germinating_Seeds_P Parameter: Age (hr) Value: 24 vs. 0
  misc_feature: MA Experiment 20000180 PARAMETER Experiment Name: At_Germinating_Seeds_P Parameter: Tissue Value: Germinating Seeds
  misc_feature: MA Experiment ID: 20000227 Result: Up-regulated in Transcription
  misc_feature: MA Experiment 20000227 PARAMETER Experiment Name: At_Root-Tips-vs-Tops_P Parameter: Tissue Value: Root Tips vs. Root Tops
  misc_feature: MA Experiment ID: 20000286 Result: Up-regulated in Transcription
  misc_feature: MA Experiment 20000286 PARAMETER Experiment Name: At_Open_Flower_P Parameter: Age (day) Value: 21
  misc_feature: MA Experiment 20000286 PARAMETER Experiment Name: At_Open_Flower_P Parameter: Plant Line Value: WS
  misc_feature: MA Experiment 20000286 PARAMETER Experiment Name: At_Open_Flower_P Parameter: Tissue Value: Half Open vs. Whole Plant
  misc_feature: MA Experiment ID: 20001247 Result: Down-regulated in Transcription
  misc_feature: MA Experiment 20001247 PARAMETER Experiment Name: At_Far-red-induction_P Parameter: Age (day) Value: 7
  misc_feature: MA Experiment 20001247 PARAMETER Experiment Name: At_Far-red-induction_P Parameter: Light Value: Far-red vs. White
  misc_feature: MA Experiment 20001247 PARAMETER Experiment Name: At_Far-red-induction_P Parameter: Organism Value: A. thaliana
  misc_feature: MA Experiment 20001247 PARAMETER Experiment Name: At_Far-red-induction_P Parameter: Plant Line Value: Columbia
  misc_feature: MA Experiment 20001247 PARAMETER Experiment Name: At_Far-red-induction_P Parameter: Timepoint (hr) Value: 1
  misc_feature: MA Experiment 20001247 PARAMETER Experiment Name: At_Far-red-induction_P Parameter: Tissue Value: Whole Plant
  misc_feature: MA Experiment ID: 20001451 Result: Down-regulated in Transcription
  misc_feature: MA Experiment 20001451 PARAMETER Experiment Name: At_Far-red-induction_P Parameter: Age (day) Value: 7
  misc_feature: MA Experiment 20001451 PARAMETER Experiment Name: At_Far-red-induction_P Parameter: Light Value: Far-red vs. White
  misc_feature: MA Experiment 20001451 PARAMETER Experiment Name: At_Far-red-induction_P Parameter: Organism Value: A. thaliana
  misc_feature: MA Experiment 20001451 PARAMETER Experiment Name: At_Far-red-induction_P Parameter: Plant Line Value: Columbia
  misc_feature: MA Experiment 20001451 PARAMETER Experiment Name: At_Far-red-induction_P Parameter: Timepoint (hr) Value: 24
  misc_feature: MA Experiment 20001451 PARAMETER Experiment Name: At_Far-red-induction_P Parameter: Tissue Value: Whole Plant
  misc_feature: MA Experiment ID: 20001557 Result: Up-regulated in Transcription
  misc_feature: MA Experiment 20001557 PARAMETER Experiment Name: At_Drought_Soil_Dry_P Parameter: Age (day) Value: 27
  misc_feature: MA Experiment 20001557 PARAMETER Experiment Name: At_Drought_Soil_Dry_P Parameter: Organism Value: A. thaliana
  misc_feature: MA Experiment 20001557 PARAMETER Experiment Name: At_Drought_Soil_Dry_P Parameter: Plant Line Value: WS
  misc_feature: MA Experiment 20001557 PARAMETER Experiment Name: At_Drought_Soil_Dry_P Parameter: Post Timepoint (hr) Value: 3
  misc_feature: MA Experiment 20001557 PARAMETER Experiment Name: At_Drought_Soil_Dry_P Parameter: Post-Treatment Value: Re-Water vs. No Drought
  misc_feature: MA Experiment 20001557 PARAMETER Experiment Name: At_Drought_Soil_Dry_P Parameter: Timepoint (day) Value: 13
  misc_feature: MA Experiment 20001557 PARAMETER Experiment Name: At_Drought_Soil_Dry_P Parameter: Treatment Value: Drought vs. No Drought
  misc_feature: MA Experiment ID: 20001558 Result: Up-regulated in Transcription
  misc_feature: MA Experiment 20001558 PARAMETER Experiment Name: At_Drought_Soil_Dry_P Parameter: Age (day) Value: 27
  misc_feature: MA Experiment 20001558 PARAMETER Experiment Name: At_Drought_Soil_Dry_P Parameter: Organism Value: A. thaliana
  misc_feature: MA Experiment 20001558 PARAMETER Experiment Name: At_Drought_Soil_Dry_P Parameter: Plant Line Value: WS
  misc_feature: MA Experiment 20001558 PARAMETER Experiment Name: At_Drought_Soil_Dry_P Parameter: Post Timepoint (hr) Value: 6
  misc_feature: MA Experiment 20001558 PARAMETER Experiment Name: At_Drought_Soil_Dry_P Parameter: Post-Treatment Value: Re-Water vs. No Drought
  misc_feature: MA Experiment 20001558 PARAMETER Experiment Name: At_Drought_Soil_Dry_P Parameter: Timepoint (day) Value: 13
  misc_feature: MA Experiment 20001558 PARAMETER Experiment Name: At_Drought_Soil_Dry_P Parameter: Treatment Value: Drought vs. No Drought
gtctacaaaaattcgtcgaccattgcatttttcagttttgaaactcgaaagagatggagggaaaattcgctatttcagaatcgactaatttgcttcaaaggatcaaagattttactcaatcggtcgttgtagatctggctgaaggaagatctccaaaaatttccatcaatcaattcaggaactattgcatgaatccagaagctgattgcttatgcagctctgataaaccaaagggtcaggaaattttcactcttaagaaggaaccacaaacctacagaatcgatatgttgctaagagtattgttgatagtccaacaacttctgcaagaaaatagacatgcttcgaaaagagatatctactacatgcatccatcagctttcaaagcacaatccattgtggaccgtgcaattggtgatatatgcattctttttcagtgtagtcggtacaacttgaatgtggtttctgttggaaacgggttggtgatgggttggttaaaatttagggaagctggaaggaaatttgattgtttaaacagcttgaacactgcatatcccgttcctgttcttgtagaggaagtcgaagatattgttagcttagctgagtacatactggttgtggaaaaagaaacagtattccagcgtttagcaaatgacatgttttgcaagacgaaccgctgcattgttatcacaggaagaggatatccagatgtctcaacaagaaggttcttgcgactcctgatggagaagttgcatctacctgtgcattgtctagtcgactgtgatccatatggctttgagatcctagccacataccgttttggctccatgcaaatggcctatgatattgaatcattacgagcaccagatatgaaatggttgggagcttttccttcagactctgaggtatatagtgttcccaaacagtgtcttttgccactgacagaagaagataagaaaagaactgaagcaatgttgcttagatgctacctgaagcgtgaaatgccacaatggaggttggaacttgaaacgatgttgaaaagaggggtcaagtttgagatcgaagcactctcagttcactcactgtcctttttgtcagaggtatatattccttctaagattcgtcgtgaagtaagctctccttgagcttcatacgagataactagtctccaactcaaggtaatgctcattgttttttttatgactctttctaagctttttagtgcaaaccaaatgcattggtagaatggacaaatgaacatagttttaatggaaaaatcataaatatacagattataaaaaataattctcagtttttaatttttaataatacaaagtacattcactaatgactaatgagtaataagtttgaaattttgaataatacaaaagtaatttagggttcatttgctttatattgttaccaaacctaatttgaagtattaaagccgttcccctgactaaaaacctttgaacactccgatccaaaaaaaagaagagaaaaacctttgcatacagctaaaaacgatgtcgtctctctctcgctttctccttcgtggcaacttcagcttcagcacccacacgaatcgccgcttcttctccgccgttaccgctgctgcagccacaccctcgccacccaaaccgtccctcatcaccctcgtaaatgacgaacgcgaccccaaattcatcacggagaagttcaagaaagcctgccaagcagagtggttccggaagaatatagccgtctatgagagaaccgttcgccgtctcgctgcagccaagaaatttgagtgggtcgaggagatcctggaggagcagaataagtatccaaacatgtcaaaggaaggattcgtagcgaggattatcaatctctatggacgagtcggtatgtttgagaatgcacagaaagtgttcgacgaaatgcctgagagaaactgcaagagaacagtgttgtctttcaacgcattactgaatgcctgtgtgaactccaagaagtttgatttggttgaaggtatcttcgaggagttgccaggtaagctctcgattgaaccagatgttgcatcttacaatactttgatcaagggattgtgtggaaagggttccttcactgaagctgttgcgttgattgatgagattgagaacaagggtttgaaacctgatcatatcaccttcaataaggagaacagatatgggctagaatggtagagaagaatgttaagcgagacatccgtagttacaatgctcggttgttaggactagccatggagaataaatcagaagagatggttagtctctttgacaaacttaagggtaatgagctcaaacctgatgttttcacattcactgccatgattaaaggatttgtcagtgaaggaaaattagatgaagccataacgtggtacaaggaaatcgagaagaatggttgtcgcccgttgaaatttgtctttaactcattgcttcctgcaatatgtaaggcgggcgatttagagtctgcttatgagctctgcaaggaaatatttgctaagcgtctgctagtcgatgaggctgtcctgcaggaggtagttgatgcattggtgaaagggtccaagcaagacgaagctgaagagattgtcgagctagcaaagacgaatgactatttgcagtgcaagcttcgtctctttcccaaagagtagttaattggcaaggcttattgactagtttttaatttagtctgtgtttccctctttttaatgtcttgttgcaaactgcgagtgcggtgattgaataattgaactatctctatctgtagtgtg

SEQ ID NO: 23169 - protein, 362 aa, Arabidopsis thaliana
  peptide (1)..(362): Ceres Seq. ID no. 13488490
  misc_feature (66)..(136): Pfam Name: Type IIB DNA topoisomerase Pfam Description: Type IIB DNA topoisomerase
  misc_feature (14)..(358): Homolog of NCBI NO: 15241959 NR Description: meiosis specific - like protein [Arabidopsis
  misc_feature (78)..(356): Homolog of NCBI NO: 5453472 NR Description: meiotic DNA transesterase/topoisomerase homolog
  misc_feature (75)..(356): Homolog of NCBI NO: 9501146 NR Description: dJ481F12.2.2 (meiotic protein covalently bound to (S.cerevisiae)-like (meiotic DNA transesterase/topoisomerase
  misc_feature (3)..(356): Homolog of NCBI NO: 6755624 NR Description: sporulation protein, meiosis-specific, SPO11
  misc_feature (10)..(356): Homolog of NCBI NO: 9501147 NR Description: dJ481F12.2.1 (meiotic protein covalently bound to (S. cerevisiae)-like (a DNA transesterase/topoisomerase homolog
  misc_feature (3)..(356): Homolog of NCBI NO: 6912680 NR Description: SPO11 meiotic protein covalently bound to
  misc_feature (9)..(357): Homolog of NCBI NO: 31712057 NR Description: putative topoisomerase 6 [Oryza sativa (japonica
  misc_feature (1)..(362): Homolog of NCBI NO: 10172604 NR Description: DNA topoisomerase VI, subunit A [Arabidopsis
  misc_feature (1)..(362): Homolog of NCBI NO: 13383478 NR Description: AtSPO11-1 [Arabidopsis thaliana]
  misc_feature (1)..(362): Homolog of NCBI NO: 15231162 NR Description: topoisomerase VIA (SPO11 gene 1) -related
MEGKFAISESTNLLQRIKDFTQSVVVDLAEGRSPKISINQFRNYCMNPEADCLCSSDKPKGQEIFTLKKEPQTYRIDMLLRVLLIVQQLLQENRHASKRDIYYMHPSAFKAQSIVDRAIGDICILFQCSRYNLNVVSVGNGLVMGWLKFREAGRKFDCLNSLNTAYPVPVLVEEVEDIVSLAEYILVVEKETVFQRLANDMFCKTNRCIVITGRGYPDVSTRRFLRLLMEKLHLPVHCLVDCDPYGFEILATYRFGSMQMAYDIESLRAPDMKWLGAFPSDSEVYSVPKQCLLPLTEEDKKRTEAMLLRCYLKREMPQWRLELETMLKRGVKFEIEALSVHSLSFLSEVYIPSKIRREVSSP

SEQ ID NO: 23170 - protein, 317 aa, Arabidopsis thaliana
  peptide (1)..(317): Ceres Seq. ID no. 13488491
  misc_feature (21)..(91): Pfam Name: Type IIB DNA topoisomerase Pfam Description: Type IIB DNA topoisomerase
  misc_feature (1)..(313): Homolog of NCBI NO: 15241959 NR Description: meiosis specific - like protein [Arabidopsis
  misc_feature (33)..(311): Homolog of NCBI NO: 5453472 NR Description: meiotic DNA transesterase/topoisomerase homolog
  misc_feature (30)..(311): Homolog of NCBI NO: 9501146 NR Description: dJ481F12.2.2 (meiotic protein covalently bound to (S.cerevisiae)-like (meiotic DNA transesterase/topoisomerase
  misc_feature (1)..(311): Homolog of NCBI NO: 6755624 NR Description: sporulation protein, meiosis-specific, SPO11
  misc_feature (1)..(311): Homolog of NCBI NO: 9501147 NR Description: dJ481F12.2.1 (meiotic protein covalently bound to (S. cerevisiae)-like (a DNA transesterase/topoisomerase homolog
  misc_feature (1)..(311): Homolog of NCBI NO: 6912680 NR Description: SPO11 meiotic protein covalently bound to
  misc_feature (1)..(312): Homolog of NCBI NO: 31712057 NR Description: putative topoisomerase 6 [Oryza sativa (japonica
  misc_feature (1)..(317): Homolog of NCBI NO: 10172604 NR Description: DNA topoisomerase VI, subunit A [Arabidopsis
  misc_feature (1)..(317): Homolog of NCBI NO: 13383478 NR Description: AtSPO11-1 [Arabidopsis thaliana]
  misc_feature (1)..(317): Homolog of NCBI NO: 15231162 NR Description: topoisomerase VIA (SPO11 gene 1) -related
MNPEADCLCSSDKPKGQEIFTLKKEPQTYRIDMLLRVLLIVQQLLQENRHASKRDIYYMHPSAFKAQSIVDRAIGDICILFQCSRYNLNVVSVGNGLVMGWLKFREAGRKFDCLNSLNTAYPVPVLVEEVEDIVSLAEYILVVEKETVFQRLANDMFCKTNRCIVITGRGYPDVSTRRFLRLLMEKLHLPVHCLVDCDPYGFEILATYRFGSMQMAYDIESLRAPDMKWLGAFPSDSEVYSVPKQCLLPLTEEDKKRTEAMLLRCYLKREMPQWRLELETMLKRGVKFEIEALSVHSLSFLSEVYIPSKIRREVSSP

SEQ ID NO: 23171 - protein, 285 aa, Arabidopsis thaliana
  peptide (1)..(285): Ceres Seq. ID no. 13488492
  misc_feature (1)..(59): Pfam Name: Type IIB DNA topoisomerase Pfam Description: Type IIB DNA topoisomerase
  misc_feature (1)..(281): Homolog of NCBI NO: 15241959 NR Description: meiosis specific - like protein [Arabidopsis
  misc_feature (1)..(279): Homolog of NCBI NO: 5453472 NR Description: meiotic DNA transesterase/topoisomerase homolog
  misc_feature (1)..(279): Homolog of NCBI NO: 9501146 NR Description: dJ481F12.2.2 (meiotic protein covalently bound to (S.cerevisiae)-like (meiotic DNA transesterase/topoisomerase
  misc_feature (1)..(279): Homolog of NCBI NO: 6755624 NR Description: sporulation protein, meiosis-specific, SPO11
  misc_feature (1)..(279): Homolog of NCBI NO: 9501147 NR Description: dJ481F12.2.1 (meiotic protein covalently bound to (S. cerevisiae)-like (a DNA transesterase/topoisomerase homolog
  misc_feature (1)..(279): Homolog of NCBI NO: 6912680 NR Description: SPO11 meiotic protein covalently bound to
  misc_feature (1)..(280): Homolog of NCBI NO: 31712057 NR Description: putative topoisomerase 6 [Oryza sativa (japonica
  misc_feature (1)..(285): Homolog of NCBI NO: 10172604 NR Description: DNA topoisomerase VI, subunit A [Arabidopsis
  misc_feature (1)..(285): Homolog of NCBI NO: 13383478 NR Description: AtSPO11-1 [Arabidopsis thaliana]
  misc_feature (1)..(285): Homolog of NCBI NO: 15231162 NR Description: topoisomerase VIA (SPO11 gene 1) -related
MLLRVLLIVQQLLQENRHASKRDIYYMHPSAFKAQSIVDRAIGDICILFQCSRYNLNVVSVGNGLVMGWLKFREAGRKFDCLNSLNTAYPVPVLVEEVEDIVSLAEYILVVEKETVFQRLANDMFCKTNRCIVITGRGYPDVSTRRFLRLLMEKLHLPVHCLVDCDPYGFEILATYRFGSMQMAYDIESLRAPDMKWLGAFPSDSEVYSVPKQCLLPLTEEDKKRTEAMLLRCYLKREMPQWRLELETMLKRGVKFEIEALSVHSLSFLSEVYIPSKIRREVSSP

SEQ ID NO: 23172 - DNA, 889 bp, Arabidopsis thaliana
  misc_feature (1)..(889): Ceres Seq. ID no. 13490513
  misc_feature: MA Experiment ID: 20000185 Result: Down-regulated in Transcription
  misc_feature: MA Experiment 20000185 PARAMETER Experiment Name: At_Roots__P Parameter: Age (day) Value: 7 vs. 21
  misc_feature: MA Experiment 20000185 PARAMETER Experiment Name: At_Roots__P Parameter: Organism Value: A. thaliana
  misc_feature: MA Experiment 20000185 PARAMETER Experiment Name: At_Roots__P Parameter: Tissue Value: Roots vs. Whole Plant
  misc_feature: MA Experiment ID: 20000227 Result: Down-regulated in Transcription
  misc_feature: MA Experiment 20000227 PARAMETER Experiment Name: At_Root-Tips-vs-Tops_P Parameter: Tissue Value: Root Tips vs. Root Tops
  misc_feature: MA Experiment ID: 20000234 Result: Down-regulated in Transcription
  misc_feature: MA Experiment 20000234 PARAMETER Experiment Name: At_Siliques_P Parameter: Age (day) Value: 21
  misc_feature: MA Experiment 20000234 PARAMETER Experiment Name: At_Siliques_P Parameter: Organism Value: A. thaliana
  misc_feature: MA Experiment 20000234 PARAMETER Experiment Name: At_Siliques_P Parameter: Plant Line Value: WS
  misc_feature: MA Experiment 20000234 PARAMETER Experiment Name: At_Siliques_P Parameter: Tissue Value: Less Than 5mm Siliques vs. Whole Plant
  misc_feature: MA Experiment ID: 20000235 Result: Down-regulated in Transcription
  misc_feature: MA Experiment 20000235 PARAMETER Experiment Name: At_Siliques_P Parameter: Age (day) Value: 21
  misc_feature: MA Experiment 20000235 PARAMETER Experiment Name: At_Siliques_P Parameter: Organism Value: A. thaliana
  misc_feature: MA Experiment 20000235 PARAMETER Experiment Name: At_Siliques_P Parameter: Plant Line Value: WS
  misc_feature: MA Experiment 20000235 PARAMETER Experiment Name: At_Siliques_P Parameter: Tissue Value: 5-10mm Siliques vs. Whole Plant
  misc_feature: MA Experiment ID: 20000264 Result: Down-regulated in Transcription
  misc_feature: MA Experiment 20000264 PARAMETER Experiment Name: At_Open_Flower_P Parameter: Age (day) Value: 21
  misc_feature: MA Experiment 20000264 PARAMETER Experiment Name: At_Open_Flower_P Parameter: Plant Line Value: WS
  misc_feature: MA Experiment 20000264 PARAMETER Experiment Name: At_Open_Flower_P Parameter: Tissue Value: Open Flower vs. Whole Plant
  misc_feature: MA Experiment ID: 20000265 Result: Down-regulated in Transcription
  misc_feature: MA Experiment 20000265 PARAMETER Experiment Name: At_Open_Flower_P Parameter: Age (day) Value: 21
  misc_feature: MA Experiment 20000265 PARAMETER Experiment Name: At_Open_Flower_P Parameter: Plant Line Value: WS
  misc_feature: MA Experiment 20000265 PARAMETER Experiment Name: At_Open_Flower_P Parameter: Tissue Value: Closed Flower vs. Whole Plant
  misc_feature: MA Experiment ID: 20000286 Result: Down-regulated in Transcription
  misc_feature: MA Experiment 20000286 PARAMETER Experiment Name: At_Open_Flower_P Parameter: Age (day) Value: 21
  misc_feature: MA Experiment 20000286 PARAMETER Experiment Name: At_Open_Flower_P Parameter: Plant Line Value: WS
  misc_feature: MA Experiment 20000286 PARAMETER Experiment Name: At_Open_Flower_P Parameter: Tissue Value: Half Open vs. Whole Plant
  misc_feature: MA Experiment ID: 20000794 Result: Down-regulated in Transcription
  misc_feature: MA Experiment 20000794 PARAMETER Experiment Name: At_Petals_P Parameter: Age (day) Value: 23-25 days
  misc_feature: MA Experiment 20000794 PARAMETER Experiment Name: At_Petals_P Parameter: Plant Line Value: WS
  misc_feature: MA Experiment 20000794 PARAMETER Experiment Name: At_Petals_P Parameter: Tissue Value: Petals vs. Whole plant
  misc_feature: MA Experiment ID: 20001450 Result: Up-regulated in Transcription
  misc_feature: MA Experiment 20001450 PARAMETER Experiment Name: At_Far-red-induction_P Parameter: Age (day) Value: 7
  misc_feature: MA Experiment 20001450 PARAMETER Experiment Name: At_Far-red-induction_P Parameter: Light Value: Far-red vs. White
  misc_feature: MA Experiment 20001450 PARAMETER Experiment Name: At_Far-red-induction_P Parameter: Organism Value: A. thaliana
  misc_feature: MA Experiment 20001450 PARAMETER Experiment Name: At_Far-red-induction_P Parameter: Plant Line Value: Columbia
  misc_feature: MA Experiment 20001450 PARAMETER Experiment Name: At_Far-red-induction_P Parameter: Timepoint (hr) Value: 8
  misc_feature: MA Experiment 20001450 PARAMETER Experiment Name: At_Far-red-induction_P Parameter: Tissue Value: Whole Plant
  misc_feature: MA Experiment ID: 20001451 Result: Up-regulated in Transcription
  misc_feature: MA Experiment 20001451 PARAMETER Experiment Name: At_Far-red-induction_P Parameter: Age (day) Value: 7
  misc_feature: MA Experiment 20001451 PARAMETER Experiment Name: At_Far-red-induction_P Parameter: Light Value: Far-red vs. White
  misc_feature: MA Experiment 20001451 PARAMETER Experiment Name: At_Far-red-induction_P Parameter: Organism Value: A. thaliana
  misc_feature: MA Experiment 20001451 PARAMETER Experiment Name: At_Far-red-induction_P Parameter: Plant Line Value: Columbia
  misc_feature: MA Experiment 20001451 PARAMETER Experiment Name: At_Far-red-induction_P Parameter: Timepoint (hr) Value: 24
  misc_feature: MA Experiment 20001451 PARAMETER Experiment Name: At_Far-red-induction_P Parameter: Tissue Value: Whole Plant
ctctctctttgtttattcgttaggtctcaaaggctctctctgtctctttctcaaaaatcatctgcaggaagtgaatcgtcaaaaccgagtttggaggatctgtcttgaggagtttttttttggttgagaaatggcttcgaaaaggatcttgaaagagctcaaggatctccagaaggatcctccaacttcctgcagtgctggcccagttgctgaagacatgtttcattggcaagctacaataatgggtccatccgatagtccttattcaggcggagtctttctcgtaaccatccacttccctccggattatcctttcaaaccaccaaaggttgcattcaggacaaaagtgttccaccctaatgtcaacagcaatggaagcatttgccttgacattttgaaagaacaatggagtcctgcactcaccatatcgaaggttttgctttcgatatgttcattgttaacggacccaaacccagatgatccattggttccagagattgctcacatgtacaaaaccgatagagcaaagtatgagtctactgcgagaagctggactcagaaatatgcaatgggatgaaagtttgtgtcctttgatccctcaaagactcggttttaatagagagagagagagagaaagagagaggacttcttcacatagggatcttccatgaaataagttagattcctatgttttatcatctctttgtttgaaacctctttaatctcaaacaaaaacattccttctcctctttacccatccctatgtttcctatctttgttttctgtgcttttacaaaaaaaaattataagaacaattatttatgtaaagctgaaaactttgagcttttacctaacaaagtatgaagatgatgaaagatgattaaatggg

SEQ ID NO: 23173 - protein, 148 aa, Arabidopsis thaliana
  peptide (1)..(148): Ceres Seq. ID no. 13490514
  misc_feature (1)..(148): Homolog of NCBI NO: 40287554 NR Description: ubiquitin-conjugating enzyme 8 [Capsicum annuum]
  misc_feature (1)..(148): Homolog of NCBI NO: 28569269 NR Description: ubiquitin-conjugating enzyme E2 [Gossypium
  misc_feature (1)..(148): Homolog of NCBI NO: 20152205 NR Description: ubiquitin-conjugating enzyme OsUBC5b
  misc_feature (1)..(148): Homolog of NCBI NO: 464981 NR Description: Ubiquitin-conjugating enzyme E2-17 kDa
  misc_feature (1)..(148): Homolog of NCBI NO: 30693863 NR Description: ubiquitin-conjugating enzyme 8 (UBC8)
  misc_feature (1)..(148): Homolog of NCBI NO: 441457 NR Description: ubiquitin conjugating enzyme E2 [Lycopersicon
  misc_feature (1)..(148): Homolog of NCBI NO: 30687803 NR Description: ubiquitin-conjugating enzyme 9 (UBC9)
  misc_feature (1)..(148): Homolog of NCBI NO: 18417097 NR Description: ubiquitin-conjugating enzyme 9 (UBC9)
  misc_feature (1)..(148): Homolog of NCBI NO: 11762186 NR Description: AT4g27960 [Arabidopsis thaliana]
  misc_feature (1)..(148): Homolog of NCBI NO: 18408001 NR Description: ubiquitin-conjugating enzyme [Arabidopsis
MASKRILKELKDLQKDPPTSCSAGPVAEDMFHWQATIMGPSDSPYSGGVFLVTIHFPPDYPFKPPKVAFRTKVFHPNVNSNGSICLDILKEQWSPALTISKVLLSICSLLTDPNPDDPLVPEIAHMYKTDRAKYESTARSWTQKYAMG

SEQ ID NO: 23174 - protein, 119 aa, Arabidopsis thaliana
  peptide (1)..(119): Ceres Seq. ID no. 13490515
  misc_feature (1)..(119): Homolog of NCBI NO: 40287554 NR Description: ubiquitin-conjugating enzyme 8 [Capsicum annuum]
  misc_feature (1)..(119): Homolog of NCBI NO: 28569269 NR Description: ubiquitin-conjugating enzyme E2 [Gossypium
  misc_feature (1)..(119): Homolog of NCBI NO: 20152205 NR Description: ubiquitin-conjugating enzyme OsUBC5b
  misc_feature (1)..(119): Homolog of NCBI NO: 464981 NR Description: Ubiquitin-conjugating enzyme E2-17 kDa
  misc_feature (1)..(119): Homolog of NCBI NO: 30693863 NR Description: ubiquitin-conjugating enzyme 8 (UBC8)
  misc_feature (1)..(119): Homolog of NCBI NO: 441457 NR Description: ubiquitin conjugating enzyme E2 [Lycopersicon
  misc_feature (1)..(119): Homolog of NCBI NO: 30687803 NR Description: ubiquitin-conjugating enzyme 9 (UBC9)
  misc_feature (1)..(119): Homolog of NCBI NO: 18417097 NR Description: ubiquitin-conjugating enzyme 9 (UBC9)
  misc_feature (1)..(119): Homolog of NCBI NO: 11762186 NR Description: AT4g27960 [Arabidopsis thaliana]
  misc_feature (1)..(119): Homolog of NCBI NO: 18408001 NR Description: ubiquitin-conjugating enzyme [Arabidopsis
MFHWQATIMGPSDSPYSGGVFLVTIHFPPDYPFKPPKVAFRTKVFHPNVNSNGSICLDILKEQWSPALTISKVLLSICSLLTDPNPDDPLVPEIAHMYKTDRAKYESTARSWTQKYAMG

SEQ ID NO: 23175 - protein, 111 aa, Arabidopsis thaliana
  peptide (1)..(111): Ceres Seq. ID no. 13490516
  misc_feature (1)..(111): Homolog of NCBI NO: 40287554 NR Description: ubiquitin-conjugating enzyme 8 [Capsicum annuum]
  misc_feature (1)..(111): Homolog of NCBI NO: 28569269 NR Description: ubiquitin-conjugating enzyme E2 [Gossypium
  misc_feature (1)..(111): Homolog of NCBI NO: 20152205 NR Description: ubiquitin-conjugating enzyme OsUBC5b
  misc_feature (1)..(111): Homolog of NCBI NO: 30693863 NR Description: ubiquitin-conjugating enzyme 8 (UBC8)
  misc_feature (1)..(111): Homolog of NCBI NO: 464981 NR Description: Ubiquitin-conjugating enzyme E2-17 kDa
  misc_feature (1)..(111): Homolog of NCBI NO: 441457 NR Description: ubiquitin conjugating enzyme E2 [Lycopersicon
  misc_feature (1)..(111): Homolog of NCBI NO: 30687803 NR Description: ubiquitin-conjugating enzyme 9 (UBC9)
  misc_feature (1)..(111): Homolog of NCBI NO: 18417097 NR Description: ubiquitin-conjugating enzyme 9 (UBC9)
  misc_feature (1)..(111): Homolog of NCBI NO: 11762186 NR Description: AT4g27960 [Arabidopsis thaliana]
  misc_feature (1)..(111): Homolog of NCBI NO: 18408001 NR Description: ubiquitin-conjugating enzyme [Arabidopsis
MGPSDSPYSGGVFLVTIHFPPDYPFKPPKVAFRTKVFHPNVNSNGSICLDILKEQWSPALTISKVLLSICSLLTDPNPDDPLVPEIAHMYKTDRAKYESTARSWTQKYAMG

SEQ ID NO: 23176 - DNA, 935 bp, Arabidopsis thaliana
  misc_feature (1)..(935): Ceres Seq. ID no. 13486993
  misc_feature: MA Experiment ID: 108585 Result: Up-regulated in Transcription
  misc_feature: MA Experiment 108585 PARAMETER Experiment Name: At_5mM_NaNP_cDNA_P Parameter: Timepoint (hr) Value: 6
  misc_feature: MA Experiment 108585 PARAMETER Experiment Name: At_5mM_NaNP_cDNA_P Parameter: Tissue Value: Aerial
  misc_feature: MA Experiment 108585 PARAMETER Experiment Name: At_5mM_NaNP_cDNA_P Parameter: Treatment Value: null
  misc_feature: MA Experiment ID: 108594 Result: Down-regulated in Transcription
  misc_feature: MA Experiment 108594 PARAMETER Experiment Name: At_Ler-rhl_Root_cDNA_P Parameter: Plant Line Value: null
  misc_feature: MA Experiment ID: 108595 Result: Up-regulated in Transcription
  misc_feature: MA Experiment 108595 PARAMETER Experiment Name: At_Ler-pi_Ovule_cDNA_P Parameter: Plant Line Value: null
  misc_feature: MA Experiment ID: 108667 Result: Up-regulated in Transcription
  misc_feature: MA Experiment 108667 PARAMETER Experiment Name: At_2mM_SA_cDNA_P Parameter: Plant Line Value: WS
  misc_feature: MA Experiment 108667 PARAMETER Experiment Name: At_2mM_SA_cDNA_P Parameter: Timepoint (hr) Value: 1
  misc_feature: MA Experiment 108667 PARAMETER Experiment Name: At_2mM_SA_cDNA_P Parameter: Treatment Value: 2mM SA vs. No Treatment
  misc_feature: MA Experiment ID: 108668 Result: Up-regulated in Transcription
  misc_feature: MA Experiment 108668 PARAMETER Experiment Name: At_2mM_SA_cDNA_P Parameter: Plant Line Value: WS
  misc_feature: MA Experiment 108668 PARAMETER Experiment Name: At_2mM_SA_cDNA_P Parameter: Timepoint (hr) Value: 6
  misc_feature: MA Experiment 108668 PARAMETER Experiment Name: At_2mM_SA_cDNA_P Parameter: Treatment Value: 2mM SA vs. No Treatment
  misc_feature: MA Experiment ID: 20000112 Result: Up-regulated in Transcription
  misc_feature: MA Experiment 20000112 PARAMETER Experiment Name: At_42deg_Heat_cDNA_P Parameter: Temperature (deg C) Value: 42 vs. 22
  misc_feature: MA Experiment 20000112 PARAMETER Experiment Name: At_42deg_Heat_cDNA_P Parameter: Timepoint (hr) Value: 2
  misc_feature: MA Experiment 20000112 PARAMETER Experiment Name: At_42deg_Heat_cDNA_P Parameter: Tissue Value: Aerial
  misc_feature: MA Experiment ID: 20000227 Result: Down-regulated in Transcription
  misc_feature: MA Experiment 20000227 PARAMETER Experiment Name: At_Root-Tips-vs-Tops_P Parameter: Tissue Value: Root Tips vs. Root Tops
  misc_feature: MA Experiment ID: 20000439 Result: Up-regulated in Transcription
  misc_feature: MA Experiment 20000439 PARAMETER Experiment Name: At_Roots__P Parameter: Age (day) Value: 14 vs. 21
  misc_feature: MA Experiment 20000439 PARAMETER Experiment Name: At_Roots__P Parameter: Organism Value: A. thaliana
  misc_feature: MA Experiment 20000439 PARAMETER Experiment Name: At_Roots__P Parameter: Tissue Value: Roots vs. Whole Plant
  misc_feature: MA Experiment ID: 20000527 Result: Down-regulated in Transcription
  misc_feature: MA Experiment 20000527 PARAMETER Experiment Name: At_10percent_PEG_P Parameter: Age (day) Value: 20
  misc_feature: MA Experiment 20000527 PARAMETER Experiment Name: At_10percent_PEG_P Parameter: Organism Value: A. thaliana
  misc_feature: MA Experiment 20000527 PARAMETER Experiment Name: At_10percent_PEG_P Parameter: Plant Line Value: WS
  misc_feature: MA Experiment 20000527 PARAMETER Experiment Name: At_10percent_PEG_P Parameter: Timepoint (day) Value: 20
  misc_feature: MA Experiment 20000527 PARAMETER Experiment Name: At_10percent_PEG_P Parameter: Tissue Value: Whole Plant
  misc_feature: MA Experiment 20000527 PARAMETER Experiment Name: At_10percent_PEG_P Parameter: Treatment Value: 10percent PEG vs. No Treatment
  misc_feature: MA Experiment ID: 20000709 Result: Up-regulated in Transcription
  misc_feature: MA Experiment 20000709 PARAMETER Experiment Name: At_15mM_NH4NO3_L-to-H_P Parameter: Age (hr) Value: 14
  misc_feature: MA Experiment 20000709 PARAMETER Experiment Name: At_15mM_NH4NO3_L-to-H_P Parameter: Organism Value: A. thaliana
  misc_feature: MA Experiment 20000709 PARAMETER Experiment Name: At_15mM_NH4NO3_L-to-H_P Parameter: Plant Line Value: WS
  misc_feature: MA Experiment 20000709 PARAMETER Experiment Name: At_15mM_NH4NO3_L-to-H_P Parameter: Timepoint (hr) Value: 4
  misc_feature: MA Experiment 20000709 PARAMETER Experiment Name: At_15mM_NH4NO3_L-to-H_P Parameter: Tissue Value: Aerial
  misc_feature: MA Experiment 20000709 PARAMETER Experiment Name: At_15mM_NH4NO3_L-to-H_P Parameter: Treatment Value: 15mM NH4NO3 vs. 30mM Mannitol
  misc_feature: MA Experiment ID: 20001247 Result: Down-regulated in Transcription
  misc_feature: MA Experiment 20001247 PARAMETER Experiment Name: At_Far-red-induction_P Parameter: Age (day) Value: 7
  misc_feature: MA Experiment 20001247 PARAMETER Experiment Name: At_Far-red-induction_P Parameter: Light Value: Far-red vs. White
  misc_feature: MA Experiment 20001247 PARAMETER Experiment Name: At_Far-red-induction_P Parameter: Organism Value: A. thaliana
  misc_feature: MA Experiment 20001247 PARAMETER Experiment Name: At_Far-red-induction_P Parameter: Plant Line Value: Columbia
  misc_feature: MA Experiment 20001247 PARAMETER Experiment Name: At_Far-red-induction_P Parameter: Timepoint (hr) Value: 1
  misc_feature: MA Experiment 20001247 PARAMETER Experiment Name: At_Far-red-induction_P Parameter: Tissue Value: Whole Plant
  misc_feature: MA Experiment ID: 20001450 Result: Down-regulated in Transcription
  misc_feature: MA Experiment 20001450 PARAMETER Experiment Name: At_Far-red-induction_P Parameter: Age (day) Value: 7
  misc_feature: MA Experiment 20001450 PARAMETER Experiment Name: At_Far-red-induction_P Parameter: Light Value: Far-red vs. White
  misc_feature: MA Experiment 20001450 PARAMETER Experiment Name: At_Far-red-induction_P Parameter: Organism Value: A. thaliana
  misc_feature: MA Experiment 20001450 PARAMETER Experiment Name: At_Far-red-induction_P Parameter: Plant Line Value: Columbia
  misc_feature: MA Experiment 20001450 PARAMETER Experiment Name: At_Far-red-induction_P Parameter: Timepoint (hr) Value: 8
  misc_feature: MA Experiment 20001450 PARAMETER Experiment Name: At_Far-red-induction_P Parameter: Tissue Value: Whole Plant
  misc_feature: MA Experiment ID: 20001560 Result: Up-regulated in Transcription
  misc_feature: MA Experiment 20001560 PARAMETER Experiment Name: At_Drought_Soil_Dry_P Parameter: Age (day) Value: 28
  misc_feature: MA Experiment 20001560 PARAMETER Experiment Name: At_Drought_Soil_Dry_P Parameter: Organism Value: A. thaliana
  misc_feature: MA Experiment 20001560 PARAMETER Experiment Name: At_Drought_Soil_Dry_P Parameter: Plant Line Value: WS
  misc_feature: MA Experiment 20001560 PARAMETER Experiment Name: At_Drought_Soil_Dry_P Parameter: Post Timepoint (hr) Value: None
  misc_feature: MA Experiment 20001560 PARAMETER Experiment Name: At_Drought_Soil_Dry_P Parameter: Post-Treatment Value: None
  misc_feature: MA Experiment 20001560 PARAMETER Experiment Name: At_Drought_Soil_Dry_P Parameter: Timepoint (day) Value: 14
  misc_feature: MA Experiment 20001560 PARAMETER Experiment Name: At_Drought_Soil_Dry_P Parameter: Treatment Value: Drought vs. No Drought
atttttatttgaaagacatttttgcctatttcattcatattttgcttttaaaacgagaattataattcttcgactccgtgggataagttttctaaaaaatcgaagaaagatcgatggctctagatatctgcgtgaaggttgccgtcggtgctcctgatgttctcggcgactgtccgtttagccaacgtgttcttctgacacttgaggagaagaagcttccctacaagacccatctgattaacgtctccgacaaaccccaatggttcttagacattagtccagaggggaaagttccggtggtgaagcttgatggcaaatgggtggctgattctgacgtaattgttggacttcttgaagagaaatatccagagccttctctcaagactcctcctgaatttgcttctgtaggatccaaaatctttggtgcttttgtgactttcttgaagagcaaagacgctaatgacggatccgagaaggctttggttgatgagttagaagcgttggagaatcacttgaagacacattctggtccttttgtagctggagagaagattactgcagtggatttgagtttagcaccaaagctttaccatcttgaggttgctcttggtcattacaagaactggtctgtccctgagagcttgaccagtgttcgtaactacgccaaggctttgttctctagggagtcgtttgagaacaccaaggctaagaaagagattgtggttgcgggttgggaatcgaaggtgaatgcgtgatgtggatccatgcttctctagttaatgttgctttagaactattcttcactgaataataagaatgcacgagtatgtgtgtgttcttgtttttgttagagttggttatcaataatgatgcgataaagcagcatatctttttttgataatatacacctcttattcaatttggtattacagacc

SEQ ID NO: 23177 - protein, 213 aa, Arabidopsis thaliana
  peptide (1)..(213): Ceres Seq. ID no. 13486994
  misc_feature (20)..(82): Pfam Name: Glutathione S-transferase, N-terminal domain Pfam Description: Glutathione S-transferase, N-terminal domain
  misc_feature (1)..(213): Homolog of NCBI NO: 6939839 NR Description: GSH-dependent dehydroascorbate reductase 1
  misc_feature (1)..(213): Homolog of NCBI NO: 28192425 NR Description: dehydroascorbate reductase [Oryza sativa]
  misc_feature (4)..(212): Homolog of NCBI NO: 28192421 NR Description: dehydroascorbate reductase [Triticum aestivum]
  misc_feature (1)..(212): Homolog of NCBI NO: 15239354 NR Description: dehydroascorbate reductase, putative [Arabidopsis
  misc_feature (1)..(210): Homolog of NCBI NO: 25402899 NR Description: protein F18O14.33 [imported] - Arabidopsis
  misc_feature (3)..(211): Homolog of NCBI NO: 10952514 NR Description: dehydroascorbate reductase [Arabidopsis thaliana]
  misc_feature (1)..(212): Homolog of NCBI NO: 28192427 NR Description: dehydroascorbate reductase [Nicotiana tabacum]
  misc_feature (1)..(212): Homolog of NCBI NO: 15223576 NR Description: dehydroascorbate reductase, putative [Arabidopsis
  misc_feature (1)..(213): Homolog of NCBI NO: 21593056 NR Description: GSH-dependent dehydroascorbate reductase 1,
  misc_feature (1)..(213): Homolog of NCBI NO: 15222163 NR Description: dehydroascorbate reductase, putative [Arabidopsis
MALDICVKVAVGAPDVLGDCPFSQRVLLTLEEKKLPYKTHLINVSDKPQWFLDISPEGKVPVVKLDGKWVADSDVIVGLLEEKYPEPSLKTPPEFASVGSKIFGAFVTFLKSKDANDGSEKALVDELEALENHLKTHSGPFVAGEKITAVDLSLAPKLYHLEVALGHYKNWSVPESLTSVRNYAKALFSRESFENTKAKKEIVVAGWESKVNA

SEQ ID NO: 23178 - DNA, 1230 bp, Arabidopsis thaliana
  misc_feature (1)..(1230): Ceres Seq. ID no. 12396193
  misc_feature: MA Experiment ID: 108462 Result: Down-regulated in Transcription
  misc_feature: MA Experiment 108462 PARAMETER Experiment Name: At_Germinating_Seeds_cDNA_P Parameter: Age (day) Value: 2 vs. 0
  misc_feature: MA Experiment 108462 PARAMETER Experiment Name: At_Germinating_Seeds_cDNA_P Parameter: Tissue Value: Germinating Seeds
  misc_feature: MA Experiment ID: 108463 Result: Down-regulated in Transcription
  misc_feature: MA Experiment 108463 PARAMETER Experiment Name: At_Germinating_Seeds_cDNA_P Parameter: Age (day) Value: 3 vs. 0
  misc_feature: MA Experiment 108463 PARAMETER Experiment Name: At_Germinating_Seeds_cDNA_P Parameter: Tissue Value: Germinating Seeds
  misc_feature: MA Experiment ID: 108464 Result: Down-regulated in Transcription
  misc_feature: MA Experiment 108464 PARAMETER Experiment Name: At_Germinating_Seeds_cDNA_P Parameter: Age (day) Value: 4 vs. 0
  misc_feature: MA Experiment 108464 PARAMETER Experiment Name: At_Germinating_Seeds_cDNA_P Parameter: Tissue Value: Germinating Seeds
  misc_feature: MA Experiment ID: 108579 Result: Down-regulated in Transcription
  misc_feature: MA Experiment 108579 PARAMETER Experiment Name: At_4deg_Cold_cDNA_P Parameter: Temperature (deg C) Value: 4 vs. 22
  misc_feature: MA Experiment 108579 PARAMETER Experiment Name: At_4deg_Cold_cDNA_P Parameter: Timepoint (hr) Value: 6
  misc_feature: MA Experiment 108579 PARAMETER Experiment Name: At_4deg_Cold_cDNA_P Parameter: Tissue Value: Aerial
  misc_feature: MA Experiment ID: 20000185 Result: Down-regulated in Transcription
  misc_feature: MA Experiment 20000185 PARAMETER Experiment Name: At_Roots__P Parameter: Age (day) Value: 7 vs. 21
  misc_feature: MA Experiment 20000185 PARAMETER Experiment Name: At_Roots__P Parameter: Organism Value: A. thaliana
  misc_feature: MA Experiment 20000185 PARAMETER Experiment Name: At_Roots__P Parameter: Tissue Value: Roots vs. Whole Plant
  misc_feature: MA Experiment ID: 20000227 Result: Down-regulated in Transcription
  misc_feature: MA Experiment 20000227 PARAMETER Experiment Name: At_Root-Tips-vs-Tops_P Parameter: Tissue Value: Root Tips vs. Root Tops
  misc_feature: MA Experiment ID: 20000439 Result: Down-regulated in Transcription
  misc_feature: MA Experiment 20000439 PARAMETER Experiment Name: At_Roots__P Parameter: Age (day) Value: 14 vs. 21
  misc_feature: MA Experiment 20000439 PARAMETER Experiment Name: At_Roots__P Parameter: Organism Value: A. thaliana
  misc_feature: MA Experiment 20000439 PARAMETER Experiment Name: At_Roots__P Parameter: Tissue Value: Roots vs. Whole Plant
  misc_feature: MA Experiment ID: 20001450 Result: Down-regulated in Transcription
  misc_feature: MA Experiment 20001450 PARAMETER Experiment Name: At_Far-red-induction_P Parameter: Age (day) Value: 7
  misc_feature: MA Experiment 20001450 PARAMETER Experiment Name: At_Far-red-induction_P Parameter: Light Value: Far-red vs. White
  misc_feature: MA Experiment 20001450 PARAMETER Experiment Name: At_Far-red-induction_P Parameter: Organism Value: A. thaliana
  misc_feature: MA Experiment 20001450 PARAMETER Experiment Name: At_Far-red-induction_P Parameter: Plant Line Value: Columbia
  misc_feature: MA Experiment 20001450 PARAMETER Experiment Name: At_Far-red-induction_P Parameter: Timepoint (hr) Value: 8
  misc_feature: MA Experiment 20001450 PARAMETER Experiment Name: At_Far-red-induction_P Parameter: Tissue Value: Whole Plant
  misc_feature: MA Experiment ID: 20001555 Result: Up-regulated in Transcription
  misc_feature: MA Experiment 20001555 PARAMETER Experiment Name: At_Drought_Soil_Dry_P Parameter: Age (day) Value: 24
  misc_feature: MA Experiment 20001555 PARAMETER Experiment Name: At_Drought_Soil_Dry_P Parameter: Organism Value: A. thaliana
  misc_feature: MA Experiment 20001555 PARAMETER Experiment Name: At_Drought_Soil_Dry_P Parameter: Plant Line Value: WS
  misc_feature: MA Experiment 20001555 PARAMETER Experiment Name: At_Drought_Soil_Dry_P Parameter: Post Timepoint (hr) Value: None
  misc_feature: MA Experiment 20001555 PARAMETER Experiment Name: At_Drought_Soil_Dry_P Parameter: Post-Treatment Value: None
  misc_feature: MA Experiment 20001555 PARAMETER Experiment Name: At_Drought_Soil_Dry_P Parameter: Timepoint (day) Value: 10
  misc_feature: MA Experiment 20001555 PARAMETER Experiment Name: At_Drought_Soil_Dry_P Parameter: Treatment Value: Drought vs. No Drought
  misc_feature: MA Experiment ID: 20001556 Result: Up-regulated in Transcription
  misc_feature: MA Experiment 20001556 PARAMETER Experiment Name: At_Drought_Soil_Dry_P Parameter: Age (day) Value: 26
  misc_feature: MA Experiment 20001556 PARAMETER Experiment Name: At_Drought_Soil_Dry_P Parameter: Organism Value: A. thaliana
  misc_feature: MA Experiment 20001556 PARAMETER Experiment Name: At_Drought_Soil_Dry_P Parameter: Plant Line Value: WS
  misc_feature: MA Experiment 20001556 PARAMETER Experiment Name: At_Drought_Soil_Dry_P Parameter: Post Timepoint (hr) Value: None
  misc_feature: MA Experiment 20001556 PARAMETER Experiment Name: At_Drought_Soil_Dry_P Parameter: Post-Treatment Value: None
  misc_feature: MA Experiment 20001556 PARAMETER Experiment Name: At_Drought_Soil_Dry_P Parameter: Timepoint (day) Value: 12
  misc_feature: MA Experiment 20001556 PARAMETER Experiment Name: At_Drought_Soil_Dry_P Parameter: Treatment Value: Drought vs. No Drought
gattagcttccaaacatcaatcaccaaccttctagtttccttttaaccctactagagctctgctctgccatggctcccgcactatctacttcttgctcctccgtcatggctttctcaacatcaaacgcgcttcgttaccatcatcctcaaatttctctcaggaactctcttcgcgctcccaaatcgccttcttttgtcaggcttcccctcggaaaggtgttacagagcaggattgtgatacgtgctgcttcgtctgcggctggtaatccacagtctgatgctgactttaatccgtatgaggttcttggtgttaaccctatagagggatttgacaagatcaagcaaacttatggaaggaaacttaaagatgctcagaggagcggtgatgaagccactgctgctctacttgagaaggcatatgataagctcatgtatgcccagttgatgaataggaaaaagggtgtgacttttggttcgtttaaggtttccaaggacattaaatatgctgataagcagcccattataccatggggtccaaggttttccaggtcctccaagaatgatatgttgatcaacctagcaatatcagttgtgtttagtgcatggattgcgataaaacgtaatgttgaatacaaaccgctgcagttcatgtcttttgtatttgtttacagaatttttgagaaattaaaatcctttgaagcaccttcatctccaatatataacgaggaaggcgaagaaagtggacggggattgagaatgggaaagaggcttcttcgttctctttccttagtttttggctctatactcttagcatctttggcatacactgggttcttaaatggcatcgagtacatgggctactccatacccatggttctttacaacaaccaggaacttatagtgacggcgtcatcggctttcatgctctatgttatagcgtcgttttacagataatgcgagagtccacaggagaattggtcagttagaagcttttggagaagttatgctgtattataggatgttgctgggagatgaaaagtttattttctacagagagatggggttatctttataacctttcttttgtgtggaaaatcaagtaaattttgcaagagagaaatcccttagaatctaagtcttgtctatttacgtttaatgctgaggatcgcatgtggaaggttttttaatttttgtattggagcaataatatgcgtgaagtgaaaaatcttg

SEQ ID NO: 23179 - protein, 294 aa, Arabidopsis thaliana
  peptide (1)..(294): Ceres Seq. ID no. 12396194
  misc_feature (74)..(135): Pfam Name: DnaJ domain Pfam Description: DnaJ domain
  misc_feature (216)..(294): Homolog of NCBI NO: 37535386 NR Description: unknown protein [Oryza sativa (japonica
  misc_feature (56)..(156): Homolog of NCBI NO: 37535386 NR Description: unknown protein [Oryza sativa (japonica
  misc_feature (1)..(294): Homolog of NCBI NO: 23397051 NR Description: unknown protein [Arabidopsis thaliana]
  misc_feature (1)..(294): Homolog of NCBI NO: 21593057 NR Description: unknown [Arabidopsis thaliana]
  misc_feature (1)..(294): Homolog of NCBI NO: 18390922 NR Description: expressed protein
  misc_feature (1)..(52): Homolog of NCBI NO: 7485979 NR Description: hypothetical protein F22O13.12 - Arabidopsis
  misc_feature (43)..(274): Homolog of NCBI NO: 7485979 NR Description: hypothetical protein F22O13.12 - Arabidopsis
  misc_feature (1)..(274): Homolog of NCBI NO: 25341936 NR Description: protein F22O13.12 [imported] - Arabidopsis
MAPALSTSCSSVMAFSTSNALRYHHPQISLRNSLRAPKSPSFVRLPLGKVLQSRIVIRAASSAAGNPQSDADFNPYEVLGVNPIEGFDKIKQTYGRKLKDAQRSGDEATAALLEKAYDKLMYAQLMNRKKGVTFGSFKVSKDIKYADKQPIIPWGPRFSRSSKNDMLINLAISVVFSAWIAIKRNVEYKPLQFMSFVFVYRIFEKLKSFEAPSSPIYNEEGEESGRGLRMGKRLLRSLSLVFGSILLASLAYTGFLNGIEYMGYSIPMVLYNNQELIVTASSAFMLYVIASFYR

SEQ ID NO: 23180 - protein, 282 aa, Arabidopsis thaliana
  peptide (1)..(282): Ceres Seq. ID no. 12396195
  misc_feature (62)..(123): Pfam Name: DnaJ domain Pfam Description: DnaJ domain
  misc_feature (204)..(282): Homolog of NCBI NO: 37535386 NR Description: unknown protein [Oryza sativa (japonica
  misc_feature (44)..(144): Homolog of NCBI NO: 37535386 NR Description: unknown protein [Oryza sativa (japonica
  misc_feature (1)..(282): Homolog of NCBI NO: 23397051 NR Description: unknown protein [Arabidopsis thaliana]
  misc_feature (1)..(282): Homolog of NCBI NO: 21593057 NR Description: unknown [Arabidopsis thaliana]
  misc_feature (1)..(282): Homolog of NCBI NO: 18390922 NR Description: expressed protein
  misc_feature (1)..(40): Homolog of NCBI NO: 7485979 NR Description: hypothetical protein F22O13.12 - Arabidopsis
  misc_feature (31)..(262): Homolog of NCBI NO: 7485979 NR Description: hypothetical protein F22O13.12 - Arabidopsis
  misc_feature (1)..(262): Homolog of NCBI NO: 25341936 NR Description: protein F22O13.12 [imported] - Arabidopsis
MAFSTSNALRYHHPQISLRNSLRAPKSPSFVRLPLGKVLQSRIVIRAASSAAGNPQSDADFNPYEVLGVNPIEGFDKIKQTYGRKLKDAQRSGDEATAALLEKAYDKLMYAQLMNRKKGVTFGSFKVSKDIKYADKQPIIPWGPRFSRSSKNDMLINLAISVVFSAWIAIKRNVEYKPLQFMSFVFVYRIFEKLKSFEAPSSPIYNEEGEESGRGLRMGKRLLRSLSLVFGSILLASLAYTGFLNGIEYMGYSIPMVLYNNQELIVTASSAFMLYVIASFYR

SEQ ID NO: 23181 - protein, 174 aa, Arabidopsis thaliana
  peptide (1)..(174): Ceres Seq. ID no. 12396196
  misc_feature (96)..(174): Homolog of NCBI NO: 37535386 NR Description: unknown protein [Oryza sativa (japonica
  misc_feature (1)..(36): Homolog of NCBI NO: 37535386 NR Description: unknown protein [Oryza sativa (japonica
  misc_feature (1)..(174): Homolog of NCBI NO: 23397051 NR Description: unknown protein [Arabidopsis thaliana]
  misc_feature (1)..(174): Homolog of NCBI NO: 21593057 NR Description: unknown [Arabidopsis thaliana]
  misc_feature (1)..(174): Homolog of NCBI NO: 18390922 NR Description: expressed protein
  misc_feature (1)..(154): Homolog of NCBI NO: 7485979 NR Description: hypothetical protein F22O13.12 - Arabidopsis
  misc_feature (1)..(154): Homolog of NCBI NO: 25341936 NR Description: protein F22O13.12 [imported] - Arabidopsis
MYAQLMNRKKGVTFGSFKVSKDIKYADKQPIIPWGPRFSRSSKNDMLINLAISVVFSAWIAIKRNVEYKPLQFMSFVFVYRIFEKLKSFEAPSSPIYNEEGEESGRGLRMGKRLLRSLSLVFGSILLASLAYTGFLNGIEYMGYSIPMVLYNNQELIVTASSAFMLYVIASFYR

SEQ ID NO: 23182 - DNA, 763 bp, Arabidopsis thaliana
  misc_feature (1)..(763): Ceres Seq. ID no. 12334610
  misc_feature: MA Experiment ID: 108462 Result: Down-regulated in Transcription
  misc_feature: MA Experiment 108462 PARAMETER Experiment Name: At_Germinating_Seeds_cDNA_P Parameter: Age (day) Value: 2 vs. 0
  misc_feature: MA Experiment 108462 PARAMETER Experiment Name: At_Germinating_Seeds_cDNA_P Parameter: Tissue Value: Germinating Seeds
  misc_feature: MA Experiment ID: 108463 Result: Down-regulated in Transcription
  misc_feature: MA Experiment 108463 PARAMETER Experiment Name: At_Germinating_Seeds_cDNA_P Parameter: Age (day) Value: 3 vs. 0
  misc_feature: MA Experiment 108463 PARAMETER Experiment Name: At_Germinating_Seeds_cDNA_P Parameter: Tissue Value: Germinating Seeds
  misc_feature: MA Experiment ID: 108464 Result: Down-regulated in Transcription
  misc_feature: MA Experiment 108464 PARAMETER Experiment Name: At_Germinating_Seeds_cDNA_P Parameter: Age (day) Value: 4 vs. 0
  misc_feature: MA Experiment 108464 PARAMETER Experiment Name: At_Germinating_Seeds_cDNA_P Parameter: Tissue Value: Germinating Seeds
  misc_feature: MA Experiment ID: 20000111 Result: Up-regulated in Transcription
  misc_feature: MA Experiment 20000111 PARAMETER Experiment Name: At_42deg_Heat_cDNA_P Parameter: Temperature (deg C) Value: 42 vs. 22
  misc_feature: MA Experiment 20000111 PARAMETER Experiment Name: At_42deg_Heat_cDNA_P Parameter: Timepoint (hr) Value: 6
  misc_feature: MA Experiment 20000111 PARAMETER Experiment Name: At_42deg_Heat_cDNA_P Parameter: Tissue Value: Aerial
  misc_feature: MA Experiment ID: 20000113 Result: Up-regulated in Transcription
  misc_feature: MA Experiment 20000113 PARAMETER Experiment Name: At_42deg_Heat_cDNA_P Parameter: Temperature (deg C) Value: 42 vs. 22
  misc_feature: MA Experiment 20000113 PARAMETER Experiment Name: At_42deg_Heat_cDNA_P Parameter: Timepoint (hr) Value: 8
  misc_feature: MA Experiment 20000113 PARAMETER Experiment Name: At_42deg_Heat_cDNA_P Parameter: Tissue Value: Aerial
  misc_feature: MA Experiment ID: 20000173 Result: Up-regulated in Transcription
  misc_feature: MA Experiment 20000173 PARAMETER Experiment Name: At_42deg_Heat_P Parameter: Age (day) Value: 14
  misc_feature: MA Experiment 20000173 PARAMETER Experiment Name: At_42deg_Heat_P Parameter: Organism Value: A. thaliana
  misc_feature: MA Experiment 20000173 PARAMETER Experiment Name: At_42deg_Heat_P Parameter: Plant Line Value: WS
  misc_feature: MA Experiment 20000173 PARAMETER Experiment Name: At_42deg_Heat_P Parameter: Temperature (deg C) Value: 42 vs. 22
  misc_feature: MA Experiment 20000173 PARAMETER Experiment Name: At_42deg_Heat_P Parameter: Timepoint (hr) Value: 6
  misc_feature: MA Experiment 20000173 PARAMETER Experiment Name: At_42deg_Heat_P Parameter: Tissue Value: Aerial
  misc_feature: MA Experiment ID: 20000328 Result: Up-regulated in Transcription
  misc_feature: MA Experiment 20000328 PARAMETER Experiment Name: At_42deg_Heat_Sub_P Parameter: Age (day) Value: 14
  misc_feature: MA Experiment 20000328 PARAMETER Experiment Name: At_42deg_Heat_Sub_P Parameter: Organism Value: A. thaliana
  misc_feature: MA Experiment 20000328 PARAMETER Experiment Name: At_42deg_Heat_Sub_P Parameter: Plant Line Value: WS
  misc_feature: MA Experiment 20000328 PARAMETER Experiment Name: At_42deg_Heat_Sub_P Parameter: Temperature (deg C) Value: 42 vs. 22
  misc_feature: MA Experiment 20000328 PARAMETER Experiment Name: At_42deg_Heat_Sub_P Parameter: Timepoint (hr) Value: 6
  misc_feature: MA Experiment 20000328 PARAMETER Experiment Name: At_42deg_Heat_Sub_P Parameter: Tissue Value: Aerial
aatctcgatctcgagaaagaaagaaaaaaagagaaggcatggccgcggaagaagcgacggagttctacctgagatactatgtcggtcacaaagggaaatttggacacgagttcctggagttcgagtttagagaggacggtaagctccgttacgccaataactctaactacaagaacgatactattatccgcaaggaggtatttctcacccccgccgtgctcaaggaatgcaagcgtatcgtctccgagagcgagattctgaaagaagacgataacaattggccggaacctgaccgtgttggaaagcaagagctcgagatcgtcttgggtaatgagcatatctcattcgctacatctaagattggatctcttgttgattgccagagcagtaatgatcctgaaggacttcgcatcttctactatcttgttcaggacttgaaatgtcttgttttttcgctcatctctctgcacttcaaaatcaagcctatctagagaagaaaatcagtttgtgacatgtcaagacgcgatgaatttgttgggaacatgaggactttgtgactgaagtttggttgtttttatgtctctggttctctgttttttttttttgttggatttgggtgaaagtgggtatgtaagatgttctacctcaacttttagtccttttttgtgtcaacatcccatgtgaagaacctttcatgaaccacaacctatcttctaaaaaccatatacttgctgttttcttatcacaaatcattcactctccc

SEQ ID NO: 23183 - protein, 162 aa, Arabidopsis thaliana
  peptide (1)..(162): Ceres Seq. ID no. 12334611
  misc_feature (20)..(162): Pfam Name: Mago nashi protein Pfam Description: Mago nashi protein
  misc_feature (19)..(162): Homolog of NCBI NO: 6016563 NR Description: Mago nashi protein homolog (Xl-mago)
  misc_feature (19)..(162): Homolog of NCBI NO: 26354182 NR Description: unnamed protein product [Mus musculus]
  misc_feature (19)..(162): Homolog of NCBI NO: 13385002 NR Description: RIKEN cDNA 2010012C16 [Mus musculus]
  misc_feature (19)..(162): Homolog of NCBI NO: 4505087 NR Description: mago-nashi homolog [Homo sapiens]
  misc_feature (18)..(162): Homolog of NCBI NO: 25990444 NR Description: MAGO protein [Gallus gallus]
  misc_feature (18)..(162): Homolog of NCBI NO: 8922331 NR Description: hypothetical protein FLJ10292 [Homo sapiens]
  misc_feature (15)..(162): Homolog of NCBI NO: 13195558 NR Description: mago nashi [Marsilea vestita]
  misc_feature (12)..(162): Homolog of NCBI NO: 12802873 NR Description: mago nashi-like protein [Oryza sativa]
  misc_feature (13)..(162): Homolog of NCBI NO: 6016561 NR Description: Mago nashi protein homolog
  misc_feature (13)..(162): Homolog of NCBI NO: 15217623 NR Description: Mago Nashi-like protein
SRSRERKKKREGMAAEEATEFYLRYYVGHKGKFGHEFLEFEFREDGKLRYANNSNYKNDTIIRKEVFLTPAVLKECKRIVSESEILKEDDNNWPEPDRVGKQELEIVLGNEHISFATSKIGSLVDCQSSNDPEGLRIFYYLVQDLKCLVFSLISLHFKIKPI

SEQ ID NO: 23184 - protein, 150 aa, Arabidopsis thaliana
  peptide (1)..(150): Ceres Seq. ID no. 12334612
  misc_feature (8)..(150): Pfam Name: Mago nashi protein Pfam Description: Mago nashi protein
  misc_feature (7)..(150): Homolog of NCBI NO: 6016563 NR Description: Mago nashi protein homolog (Xl-mago)
  misc_feature (7)..(150): Homolog of NCBI NO: 26354182 NR Description: unnamed protein product [Mus musculus]
  misc_feature (7)..(150): Homolog of NCBI NO: 13385002 NR Description: RIKEN cDNA 2010012C16 [Mus musculus]
  misc_feature (7)..(150): Homolog of NCBI NO: 4505087 NR Description: mago-nashi homolog [Homo sapiens]
  misc_feature (6)..(150): Homolog of NCBI NO: 25990444 NR Description: MAGO protein [Gallus gallus]
  misc_feature (6)..(150): Homolog of NCBI NO: 8922331 NR Description: hypothetical protein FLJ10292 [Homo sapiens]
  misc_feature (3)..(150): Homolog of NCBI NO: 13195558 NR Description: mago nashi [Marsilea vestita]
  misc_feature (1)..(150): Homolog of NCBI NO: 12802873 NR Description: mago nashi-like protein [Oryza sativa]
  misc_feature (1)..(150): Homolog of NCBI NO: 6016561 NR Description: Mago nashi protein homolog
  misc_feature (1)..(150): Homolog of NCBI NO: 15217623 NR Description: Mago Nashi-like protein
MAAEEATEFYLRYYVGHKGKFGHEFLEFEFREDGKLRYANNSNYKNDTIIRKEVFLTPAVLKECKRIVSESEILKEDDNNWPEPDRVGKQELEIVLGNEHISFATSKIGSLVDCQSSNDPEGLRIFYYLVQDLKCLVFSLISLHFKIKPI

SEQ ID NO: 23185 - DNA, 1755 bp, Arabidopsis thaliana
  misc_feature (1)..(1755): Ceres Seq. ID no. 12561836
  misc_feature: MA Experiment ID: 108461 Result: Up-regulated in Transcription
  misc_feature: MA Experiment 108461 PARAMETER Experiment Name: At_Germinating_Seeds_cDNA_P Parameter: Age (day) Value: 1 vs. 0
  misc_feature: MA Experiment 108461 PARAMETER Experiment Name: At_Germinating_Seeds_cDNA_P Parameter: Tissue Value: Germinating Seeds
  misc_feature: MA Experiment ID: 20000173 Result: Up-regulated in Transcription
  misc_feature: MA Experiment 20000173 PARAMETER Experiment Name: At_42deg_Heat_P Parameter: Age (day) Value: 14
  misc_feature: MA Experiment 20000173 PARAMETER Experiment Name: At_42deg_Heat_P Parameter: Organism Value: A. thaliana
  misc_feature: MA Experiment 20000173 PARAMETER Experiment Name: At_42deg_Heat_P Parameter: Plant Line Value: WS
  misc_feature: MA Experiment 20000173 PARAMETER Experiment Name: At_42deg_Heat_P Parameter: Temperature (deg C) Value: 42 vs. 22
  misc_feature: MA Experiment 20000173 PARAMETER Experiment Name: At_42deg_Heat_P Parameter: Timepoint (hr) Value: 6
  misc_feature: MA Experiment 20000173 PARAMETER Experiment Name: At_42deg_Heat_P Parameter: Tissue Value: Aerial
  misc_feature: Phenotype: ROSETTE LEAVES Wax-Glossy
  misc_feature: Phenotype: WHOLE PLANT Size-Small
  misc_feature: Phenotype: ROSETTE LEAVES Wax-Glossy
  misc_feature: Phenotype: WHOLE PLANT Size-Small
cgaagaaaagcgacgccgttttaaaggagatggataaacaaccggcgaccagttggagtatccatacccggccggagataatcgccaagtacgagatcttcgagcgagtcggatccggagcttacgccgacgtttacagagctcgccgtctctccgacggtctaatcgtcgcgctcaaggagattttcgattaccaatctgcgttccgggagattgacgcgctcaccatcctcaatggatctcctaatgtagttgttatgcacgaatacttctggcgtgaggaagagaacgctgtgcttgtgcttgagtttcttaggtcggatctcgctgcggtgatccgagatggtaagaggaagaagaaggtagaaggaggggatggattctcggttggggagattaagagatggatgattcagattttaaccggtgttgatgcttgtcatcggaatttgattgtacatagagatttgaagcctgggaatatgttgatttctgatgatggagttcttaagcttgctgattttggtcaggctaggatactcatggagcatgatattgtagcttcagatgaaaaccaacaagcttacaaactggaagacaaagatggagaaaccagcgaaccaccagaagttattcctgattatgagaactcacctaggcaagggtctgatggtcaggaacgggaagcgatgagtaaagacgagtacttccgacaggtggaagagctcaaggctaaacaggttgttagagatgatactgataaggactcgaatgtgcatgatggagacatatcttgccttgcaacgtgcactgttagtgaaatggatgatgatctcggtaggaactcgttttcttacgatgctgacgaagcagtggatgatacacagggtttgatgacatcttgtgtgggaacccgatggtttaggccaccagaactgctctatggatctacgatgtatgggttagaggtcgatctatggtcgcttggttgtgtgtttgcagaactcttgtctcttgagcctttgttcccaggaatttcagatattgatcagatcagcagagtgaccaatgtgctgggaaatttaaatgaagaggtctggcctggttgtgttgatcttccagactacaagtcaatctcatttgctaaagtagaatctcctcttggtattgaaggatgccttcccaaccattcaggggatgtgatatcgctgctcaagaagcttatctgttatgatccagctagtagagctactactatggagatgctgaatgacaaatatttaagtgaagagcctcttccagttccagtttcagagctctatgtgcctccgacaatgagtggaccagatgaggattctccgagaaagtggaatgattacagagaaatggattcagattcagattttgatggctttggacccatgaatgtaaagcctaccagtagtggatttacaatagaattcccctgaccttggcatttaaggtacgcagtcaaaagctctggctcgcttaaacacataaatcagtctcttctctctctctctttcttcttcaaagagaatgggtatataccaaaacctgacatgtgtttctttaggtcttgattgatgcaacactctttgttgtttgaagatcttgttacagaataccgcttagaaaattgttaacttttcgttaggacattgtttaggtatcaatggcggcaaaaacttttgaaattcgtttgctcattgatctcacaacttttttttgcgc

SEQ ID NO: 23186 - protein, 488 aa, Arabidopsis thaliana
  peptide (1)..(488): Ceres Seq. ID no. 12561837
  misc_feature (30)..(427): Pfam Name: Protein kinase domain Pfam Description: Protein kinase domain
  misc_feature (302)..(441): Homolog of NCBI NO: 4557439 NR Description: cyclin-dependent kinase 3 [Homo sapiens]
  misc_feature (30)..(178): Homolog of NCBI NO: 4557439 NR Description: cyclin-dependent kinase 3 [Homo sapiens]
  misc_feature (297)..(448): Homolog of NCBI NO: 34873735 NR Description: similar to CDK-related protein kinase PNQLARE
  misc_feature (29)..(179): Homolog of NCBI NO: 34873735 NR Description: similar to CDK-related protein kinase PNQLARE
  misc_feature (297)..(448): Homolog of NCBI NO: 16716469 NR Description: cell cycle related kinase; CDK-related protein
  misc_feature (29)..(179): Homolog of NCBI NO: 16716469 NR Description: cell cycle related kinase; CDK-related protein
  misc_feature (293)..(448): Homolog of NCBI NO: 23344742 NR Description: cell cycle related kinase [Homo sapiens]
  misc_feature (29)..(179): Homolog of NCBI NO: 23344742 NR Description: cell cycle related kinase [Homo sapiens]
  misc_feature (15)..(487): Homolog of NCBI NO: 6984233 NR Description: CDK-activating kinase [Euphorbia esula]
  misc_feature (10)..(488): Homolog of NCBI NO: 15235518 NR Description: Cyclin-dependent kinase F
KKSDAVLKEMDKQPATSWSIHTRPEIIAKYEIFERVGSGAYADVYRARRLSDGLIVALKEIFDYQSAFREIDALTILNGSPNVVVMHEYFWREEENAVLVLEFLRSDLAAVIRDGKRKKKVEGGDGFSVGEIKRWMIQILTGVDACHRNLIVHRDLKPGNMLISDDGVLKLADFGQARILMEHDIVASDENQQAYKLEDKDGETSEPPEVIPDYENSPRQGSDGQEREAMSKDEYFRQVEELKAKQVVRDDTDKDSNVHDGDISCLATCTVSEMDDDLGRNSFSYDADEAVDDTQGLMTSCVGTRWFRPPELLYGSTMYGLEVDLWSLGCVFAELLSLEPLFPGISDIDQISRVTNVLGNLNEEVWPGCVDLPDYKSISFAKVESPLGIEGCLPNHSGDVISLLKKLICYDPASRATTMEMLNDKYLSEEPLPVPVSELYVPPTMSGPDEDSPRKWNDYREMDSDSDFDGFGPMNVKPTSSGFTIEFP

SEQ ID NO: 23187 - protein, 479 aa, Arabidopsis thaliana
  peptide (1)..(479): Ceres Seq. ID no. 12561838
  misc_feature (21)..(418): Pfam Name: Protein kinase domain Pfam Description: Protein kinase domain
  misc_feature (293)..(432): Homolog of NCBI NO: 4557439 NR Description: cyclin-dependent kinase 3 [Homo sapiens]
  misc_feature (21)..(169): Homolog of NCBI NO: 4557439 NR Description: cyclin-dependent kinase 3 [Homo sapiens]
  misc_feature (288)..(439): Homolog of NCBI NO: 34873735 NR Description: similar to CDK-related protein kinase PNQLARE
  misc_feature (20)..(170): Homolog of NCBI NO: 34873735 NR Description: similar to CDK-related protein kinase PNQLARE
  misc_feature (288)..(439): Homolog of NCBI NO: 16716469 NR Description: cell cycle related kinase; CDK-related protein
  misc_feature (20)..(170): Homolog of NCBI NO: 16716469 NR Description: cell cycle related kinase; CDK-related protein
  misc_feature (284)..(439): Homolog of NCBI NO: 23344742 NR Description: cell cycle related kinase [Homo sapiens]
  misc_feature (20)..(170): Homolog of NCBI NO: 23344742 NR Description: cell cycle related kinase [Homo sapiens]
  misc_feature (6)..(478): Homolog of NCBI NO: 6984233 NR Description: CDK-activating kinase [Euphorbia esula]
  misc_feature (1)..(479): Homolog of NCBI NO: 15235518 NR Description: Cyclin-dependent kinase F
MDKQPATSWSIHTRPEIIAKYEIFERVGSGAYADVYRARRLSDGLIVALKEIFDYQSAFREIDALTILNGSPNVVVMHEYFWREEENAVLVLEFLRSDLAAVIRDGKRKKKVEGGDGFSVGEIKRWMIQILTGVDACHRNLIVHRDLKPGNMLISDDGVLKLADFGQARILMEHDIVASDENQQAYKLEDKDGETSEPPEVIPDYENSPRQGSDGQEREAMSKDEYFRQVEELKAKQVVRDDTDKDSNVHDGDISCLATCTVSEMDDDLGRNSFSYDADEAVDDTQGLMTSCVGTRWFRPPELLYGSTMYGLEVDLWSLGCVFAELLSLEPLFPGISDIDQISRVTNVLGNLNEEVWPGCVDLPDYKSISFAKVESPLGIEGCLPNHSGDVISLLKKLICYDPASRATTMEMLNDKYLSEEPLPVPVSELYVPPTMSGPDEDSPRKWNDYREMDSDSDFDGFGPMNVKPTSSGFTIEFP

SEQ ID NO: 23188 - protein, 403 aa, Arabidopsis thaliana
  peptide (1)..(403): Ceres Seq. ID no. 12561839
  misc_feature (1)..(342): Pfam Name: Protein kinase domain Pfam Description: Protein kinase domain
  misc_feature (217)..(356): Homolog of NCBI NO: 4557439 NR Description: cyclin-dependent kinase 3 [Homo sapiens]
  misc_feature (1)..(93): Homolog of NCBI NO: 4557439 NR Description: cyclin-dependent kinase 3 [Homo sapiens]
  misc_feature (212)..(363): Homolog of NCBI NO: 34873735 NR Description: similar to CDK-related protein kinase PNQLARE
  misc_feature (1)..(94): Homolog of NCBI NO: 34873735 NR Description: similar to CDK-related protein kinase PNQLARE
  misc_feature (212)..(363): Homolog of NCBI NO: 16716469 NR Description: cell cycle related kinase; CDK-related protein
  misc_feature (1)..(94): Homolog of NCBI NO: 16716469 NR Description: cell cycle related kinase; CDK-related protein
  misc_feature (208)..(363): Homolog of NCBI NO: 23344742 NR Description: cell cycle related kinase [Homo sapiens]
  misc_feature (1)..(94): Homolog of NCBI NO: 23344742 NR Description: cell cycle related kinase [Homo sapiens]
  misc_feature (1)..(402): Homolog of NCBI NO: 6984233 NR Description: CDK-activating kinase [Euphorbia esula]
  misc_feature (1)..(403): Homolog of NCBI NO: 15235518 NR Description: Cyclin-dependent kinase F
MHEYFWREEENAVLVLEFLRSDLAAVIRDGKRKKKVEGGDGFSVGEIKRWMIQILTGVDACHRNLIVHRDLKPGNMLISDDGVLKLADFGQARILMEHDIVASDENQQAYKLEDKDGETSEPPEVIPDYENSPRQGSDGQEREAMSKDEYFRQVEELKAKQVVRDDTDKDSNVHDGDISCLATCTVSEMDDDLGRNSFSYDADEAVDDTQGLMTSCVGTRWFRPPELLYGSTMYGLEVDLWSLGCVFAELLSLEPLFPGISDIDQISRVTNVLGNLNEEVWPGCVDLPDYKSISFAKVESPLGIEGCLPNHSGDVISLLKKLICYDPASRATTMEMLNDKYLSEEPLPVPVSELYVPPTMSGPDEDSPRKWNDYREMDSDSDFDGFGPMNVKPTSSGFTIEFP

SEQ ID NO: 23189 - DNA, 1171 bp, Arabidopsis thaliana
  misc_feature (1)..(1171): Ceres Seq. ID no. 12370490
  misc_feature: MA Experiment ID: 108434 Result: Down-regulated in Transcription
  misc_feature: MA Experiment 108434 PARAMETER Experiment Name: At_Root_Tips_cDNA_P Parameter: Tissue Value: Root Tips
  misc_feature: MA Experiment ID: 108572 Result: Up-regulated in Transcription
  misc_feature: MA Experiment 108572 PARAMETER Experiment Name: At_Drought_cDNA_P Parameter: Timepoint (hr) Value: 1
  misc_feature: MA Experiment 108572 PARAMETER Experiment Name: At_Drought_cDNA_P Parameter: Tissue Value: Aerial
  misc_feature: MA Experiment 108572 PARAMETER Experiment Name: At_Drought_cDNA_P Parameter: Treatment Value: Drought vs. No Drought
  misc_feature: MA Experiment ID: 108574 Result: Up-regulated in Transcription
  misc_feature: MA Experiment 108574 PARAMETER Experiment Name: At_Wounding__cDNA_P Parameter: Timepoint (hr) Value: 1
  misc_feature: MA Experiment 108574 PARAMETER Experiment Name: At_Wounding__cDNA_P Parameter: Tissue Value: Aerial
  misc_feature: MA Experiment 108574 PARAMETER Experiment Name: At_Wounding__cDNA_P Parameter: Treatment Value: Wounding vs. No Wounding
  misc_feature: MA Experiment ID: 108577 Result: Up-regulated in Transcription
  misc_feature: MA Experiment 108577 PARAMETER Experiment Name: At_42deg_Heat_cDNA_P Parameter: Temperature (deg C) Value: 42 vs. 22
  misc_feature: MA Experiment 108577 PARAMETER Experiment Name: At_42deg_Heat_cDNA_P Parameter: Timepoint (hr) Value: 6
  misc_feature: MA Experiment 108577 PARAMETER Experiment Name: At_42deg_Heat_cDNA_P Parameter: Tissue Value: Aerial
  misc_feature: MA Experiment ID: 108585 Result: Up-regulated in Transcription
  misc_feature: MA Experiment 108585 PARAMETER Experiment Name: At_5mM_NaNP_cDNA_P Parameter: Timepoint (hr) Value: 6
  misc_feature: MA Experiment 108585 PARAMETER Experiment Name: At_5mM_NaNP_cDNA_P Parameter: Tissue Value: Aerial
  misc_feature: MA Experiment 108585 PARAMETER Experiment Name: At_5mM_NaNP_cDNA_P Parameter: Treatment Value: null
  misc_feature: MA Experiment ID: 108595 Result: Up-regulated in Transcription
  misc_feature: MA Experiment 108595 PARAMETER Experiment Name: At_Ler-pi_Ovule_cDNA_P Parameter: Plant Line Value: null
  misc_feature: MA Experiment ID: 108668 Result: Up-regulated in Transcription
  misc_feature: MA Experiment 108668 PARAMETER Experiment Name: At_2mM_SA_cDNA_P Parameter: Plant Line Value: WS
  misc_feature: MA Experiment 108668 PARAMETER Experiment Name: At_2mM_SA_cDNA_P Parameter: Timepoint (hr) Value: 6
  misc_feature: MA Experiment 108668 PARAMETER Experiment Name: At_2mM_SA_cDNA_P Parameter: Treatment Value: 2mM SA vs. No Treatment
  misc_feature: MA Experiment ID: 20000112 Result: Up-regulated in Transcription
  misc_feature: MA Experiment 20000112 PARAMETER Experiment Name: At_42deg_Heat_cDNA_P Parameter: Temperature (deg C) Value: 42 vs. 22
  misc_feature: MA Experiment 20000112 PARAMETER Experiment Name: At_42deg_Heat_cDNA_P Parameter: Timepoint (hr) Value: 2
  misc_feature: MA Experiment 20000112 PARAMETER Experiment Name: At_42deg_Heat_cDNA_P Parameter: Tissue Value: Aerial
  misc_feature: MA Experiment ID: 20000113 Result: Up-regulated in Transcription
  misc_feature: MA Experiment 20000113 PARAMETER Experiment Name: At_42deg_Heat_cDNA_P Parameter: Temperature (deg C) Value: 42 vs. 22
  misc_feature: MA Experiment 20000113 PARAMETER Experiment Name: At_42deg_Heat_cDNA_P Parameter: Timepoint (hr) Value: 8
  misc_feature: MA Experiment 20000113 PARAMETER Experiment Name: At_42deg_Heat_cDNA_P Parameter: Tissue Value: Aerial
  misc_feature: MA Experiment ID: 20000144 Result: Up-regulated in Transcription
  misc_feature: MA Experiment 20000144 PARAMETER Experiment Name: At_42deg_Heat_cDNA_P Parameter: Temperature (deg C) Value: 42 vs. 22
  misc_feature: MA Experiment 20000144 PARAMETER Experiment Name: At_42deg_Heat_cDNA_P Parameter: Timepoint (hr) Value: 1
  misc_feature: MA Experiment 20000144 PARAMETER Experiment Name: At_42deg_Heat_cDNA_P Parameter: Tissue Value: Aerial
  misc_feature: MA Experiment ID: 20000171 Result: Up-regulated in Transcription
  misc_feature: MA Experiment 20000171 PARAMETER Experiment Name: At_42deg_Heat_P Parameter: Age (day) Value: 14
  misc_feature: MA Experiment 20000171 PARAMETER Experiment Name: At_42deg_Heat_P Parameter: Organism Value: A. thaliana
  misc_feature: MA Experiment 20000171 PARAMETER Experiment Name: At_42deg_Heat_P Parameter: Plant Line Value: WS
  misc_feature: MA Experiment 20000171 PARAMETER Experiment Name: At_42deg_Heat_P Parameter: Temperature (deg C) Value: 42 vs. 22
  misc_feature: MA Experiment 20000171 PARAMETER Experiment Name: At_42deg_Heat_P Parameter: Timepoint (hr) Value: 1
  misc_feature: MA Experiment 20000171 PARAMETER Experiment Name: At_42deg_Heat_P Parameter: Tissue Value: Aerial
  misc_feature: MA Experiment ID: 20000173 Result: Up-regulated in Transcription
  misc_feature: MA Experiment 20000173 PARAMETER Experiment Name: At_42deg_Heat_P Parameter: Age (day) Value: 14
  misc_feature: MA Experiment 20000173 PARAMETER Experiment Name: At_42deg_Heat_P Parameter: Organism Value: A. thaliana
  misc_feature: MA Experiment 20000173 PARAMETER Experiment Name: At_42deg_Heat_P Parameter: Plant Line Value: WS
  misc_feature: MA Experiment 20000173 PARAMETER Experiment Name: At_42deg_Heat_P Parameter: Temperature (deg C) Value: 42 vs. 22
  misc_feature: MA Experiment 20000173 PARAMETER Experiment Name: At_42deg_Heat_P Parameter: Timepoint (hr) Value: 6
  misc_feature: MA Experiment 20000173 PARAMETER Experiment Name: At_42deg_Heat_P Parameter: Tissue Value: Aerial
  misc_feature: MA Experiment ID: 20001247 Result: Up-regulated in Transcription
  misc_feature: MA Experiment 20001247 PARAMETER Experiment Name: At_Far-red-induction_P Parameter: Age (day) Value: 7
  misc_feature: MA Experiment 20001247 PARAMETER Experiment Name: At_Far-red-induction_P Parameter: Light Value: Far-red vs. White
  misc_feature: MA Experiment 20001247 PARAMETER Experiment Name: At_Far-red-induction_P Parameter: Organism Value: A. thaliana
  misc_feature: MA Experiment 20001247 PARAMETER Experiment Name: At_Far-red-induction_P Parameter: Plant Line Value: Columbia
  misc_feature: MA Experiment 20001247 PARAMETER Experiment Name: At_Far-red-induction_P Parameter: Timepoint (hr) Value: 1
  misc_feature: MA Experiment 20001247 PARAMETER Experiment Name: At_Far-red-induction_P Parameter: Tissue Value: Whole Plant
atgggtgccgctcgacgtgttaatcttcttcctcctgaagatctctctctgaaagacattctcaaattttctcgggaaaacacctttttctgattcgtttttctccagatcattccttctttcttatatccgatttcttcgggaggaggcgaagagacggtcaacaattttatccaatgtcgcgccgtcttttcgcctgtttcggcctcaagaaatcttcaactaaacctatctctggtggtaacaattccgccgccgtagccgcagaaattcccgccggagatggtcccgttctcgtccagctattctcgtctcagggatgtaaaacatcgcccgcggcggagatgttgatgtcccggctaggtcgaggtgatttcgacgctcagatccgtggcgaagatggtggatctggatctccgacgatggttttggtgtttcatgtggattattgggattacaaggggtggaaagatccgtatggatcgagccaatggacggtgaggcagaaggcgtatatagaggcgttgaatctggatacgatgtttactccgcagcttgtgatccaaggtcgttctcaattgatcggaaacgaagaggagacgctgctcaaatctatctccgaagcgcctaggtttccttctccagccttccgggcgactttccagagaccaacctcagagacactgcaagtatcactcaccggagctttgagaatgaaagtagacggagacggaatggacataatggtggcaatatacgaaaccgggcttgtgaacgactgtgcaagaggagagaacgaaggaagaatgttgtcgaatgattacgttgtaagaaagatggaaaagatgtgcactgtgaaagatgtagcaccgaagaagccagtctcggggactgctcattttacgctctgggatggattcaacagcagcaaatgtggagtcgccgtctttcttcagaactcttctcttcagatttttggtacacagagttttaaattacctgatgagatttgagttaatttccctaatatctgaaaaataaagaaaagaaaaccgatctttgtatcgtccatattttgcttgtgataatcattcgggttccactctgcttttgtacagttataaatgtgtgactacttataacttaatagggtttaaggtttcttctaatt

SEQ ID NO: 23190 - protein, 278 aa, Arabidopsis thaliana
  peptide (1)..(278): Ceres Seq. ID no. 12370491
  misc_feature (2)..(213): Homolog of NCBI NO: 13473665 NR Description: hypothetical protein, - Arabidopsis thaliana
  misc_feature (27)..(224): Homolog of NCBI NO: 13473812 NR Description: hypothetical protein [Mesorhizobium loti]
  misc_feature (30)..(263): Homolog of NCBI NO: 22962198 NR Description: hypothetical protein [Rhodopseudomonas palustris]
  misc_feature (38)..(224): Homolog of NCBI NO: 23014426 NR Description: hypothetical protein [Magnetospirillum
  misc_feature (206)..(278): Homolog of NCBI NO: 28393652 NR Description: unknown protein [Arabidopsis thaliana]
  misc_feature (1)..(278): Homolog of NCBI NO: 34394018 NR Description: membrane lipoprotein lipid attachment
  misc_feature (1)..(278): Homolog of NCBI NO: 15239579 NR Description: putative protein; protein id: At5g54240.1
  misc_feature (1)..(278): Homolog of NCBI NO: 13265463 NR Description: AT4g27350 [Arabidopsis thaliana]
  misc_feature (1)..(278): Homolog of NCBI NO: 21593063 NR Description: unknown [Arabidopsis thaliana]
  misc_feature (1)..(278): Homolog of NCBI NO: 15234089 NR Description: putative protein
MSRRLFACFGLKKSSTKPISGGNNSAAVAAEIPAGDGPVLVQLFSSQGCKTSPAAEMLMSRLGRGDFDAQIRGEDGGSGSPTMVLVFHVDYWDYKGWKDPYGSSQWTVRQKAYIEALNLDTMFTPQLVIQGRSQLIGNEEETLLKSISEAPRFPSPAFRATFQRPTSETLQVSLTGALRMKVDGDGMDIMVAIYETGLVNDCARGENEGRMLSNDYVVRKMEKMCTVKDVAPKKPVSGTAHFTLWDGFNSSKCGVAVFLQNSSLQIFGTQSFKLPDEI

SEQ ID NO: 23191 - protein, 222 aa, Arabidopsis thaliana
  peptide (1)..(222): Ceres Seq. ID no. 12370492
  misc_feature (1)..(222): Homolog of NCBI NO: 13265463 NR Description: AT4g27350 [Arabidopsis thaliana]
  misc_feature (1)..(222): Homolog of NCBI NO: 21593063 NR Description: unknown [Arabidopsis thaliana]
  misc_feature (1)..(222): Homolog of NCBI NO: 15234089 NR Description: putative protein
  misc_feature (1)..(157): Homolog of NCBI NO: 13473665 NR Description: hypothetical protein, - Arabidopsis thaliana
  misc_feature (1)..(168): Homolog of NCBI NO: 13473812 NR Description: hypothetical protein [Mesorhizobium loti]
  misc_feature (1)..(207): Homolog of NCBI NO: 22962198 NR Description: hypothetical protein [Rhodopseudomonas palustris]
  misc_feature (1)..(168): Homolog of NCBI NO: 23014426 NR Description: hypothetical protein [Magnetospirillum
  misc_feature (150)..(222): Homolog of NCBI NO: 28393652 NR Description: unknown protein [Arabidopsis thaliana]
  misc_feature (1)..(222): Homolog of NCBI NO: 34394018 NR Description: membrane lipoprotein lipid attachment
  misc_feature (1)..(222): Homolog of NCBI NO: 15239579 NR Description: putative protein; protein id: At5g54240.1
MLMSRLGRGDFDAQIRGEDGGSGSPTMVLVFHVDYWDYKGWKDPYGSSQWTVRQKAYIEALNLDTMFTPQLVIQGRSQLIGNEEETLLKSISEAPRFPSPAFRATFQRPTSETLQVSLTGALRMKVDGDGMDIMVAIYETGLVNDCARGENEGRMLSNDYVVRKMEKMCTVKDVAPKKPVSGTAHFTLWDGFNSSKCGVAVFLQNSSLQIFGTQSFKLPDEI

SEQ ID NO: 23192 - protein, 220 aa, Arabidopsis thaliana
  peptide (1)..(220): Ceres Seq. ID no. 12370493
  misc_feature (1)..(155): Homolog of NCBI NO: 13473665 NR Description: hypothetical protein, - Arabidopsis thaliana
  misc_feature (1)..(166): Homolog of NCBI NO: 13473812 NR Description: hypothetical protein [Mesorhizobium loti]
  misc_feature (1)..(205): Homolog of NCBI NO: 22962198 NR Description: hypothetical protein [Rhodopseudomonas palustris]
  misc_feature (1)..(166): Homolog of NCBI NO: 23014426 NR Description: hypothetical protein [Magnetospirillum
  misc_feature (148)..(220): Homolog of NCBI NO: 28393652 NR Description: unknown protein [Arabidopsis thaliana]
  misc_feature (1)..(220): Homolog of NCBI NO: 34394018 NR Description: membrane lipoprotein lipid attachment
  misc_feature (1)..(220): Homolog of NCBI NO: 15239579 NR Description: putative protein; protein id: At5g54240.1
  misc_feature (1)..(220): Homolog of NCBI NO: 13265463 NR Description: AT4g27350 [Arabidopsis thaliana]
  misc_feature (1)..(220): Homolog of NCBI NO: 21593063 NR Description: unknown [Arabidopsis thaliana]
  misc_feature (1)..(220): Homolog of NCBI NO: 15234089 NR Description: putative protein
MSRLGRGDFDAQIRGEDGGSGSPTMVLVFHVDYWDYKGWKDPYGSSQWTVRQKAYIEALNLDTMFTPQLVIQGRSQLIGNEEETLLKSISEAPRFPSPAFRATFQRPTSETLQVSLTGALRMKVDGDGMDIMVAIYETGLVNDCARGENEGRMLSNDYVVRKMEKMCTVKDVAPKKPVSGTAHFTLWDGFNSSKCGVAVFLQNSSLQIFGTQSFKLPDEI

SEQ ID NO: 23193 - DNA, 1449 bp, Arabidopsis thaliana
  misc_feature (1)..(1449): Ceres Seq. ID no. 13488525
  misc_feature: MA Experiment ID: 108464 Result: Up-regulated in Transcription
  misc_feature: MA Experiment 108464 PARAMETER Experiment Name: At_Germinating_Seeds_cDNA_P Parameter: Age (day) Value: 4 vs. 0
  misc_feature: MA Experiment 108464 PARAMETER Experiment Name: At_Germinating_Seeds_cDNA_P Parameter: Tissue Value: Germinating Seeds
  misc_feature: MA Experiment ID: 108489 Result: Up-regulated in Transcription
  misc_feature: MA Experiment ID: 20000171 Result: Up-regulated in Transcription
  misc_feature: MA Experiment 20000171 PARAMETER Experiment Name: At_42deg_Heat_P Parameter: Age (day) Value: 14
  misc_feature: MA Experiment 20000171 PARAMETER Experiment Name: At_42deg_Heat_P Parameter: Organism Value: A. thaliana
  misc_feature: MA Experiment 20000171 PARAMETER Experiment Name: At_42deg_Heat_P Parameter: Plant Line Value: WS
  misc_feature: MA Experiment 20000171 PARAMETER Experiment Name: At_42deg_Heat_P Parameter: Temperature (deg C) Value: 42 vs. 22
  misc_feature: MA Experiment 20000171 PARAMETER Experiment Name: At_42deg_Heat_P Parameter: Timepoint (hr) Value: 1
  misc_feature: MA Experiment 20000171 PARAMETER Experiment Name: At_42deg_Heat_P Parameter: Tissue Value: Aerial
  misc_feature: MA Experiment ID: 20000264 Result: Up-regulated in Transcription
  misc_feature: MA Experiment 20000264 PARAMETER Experiment Name: At_Open_Flower_P Parameter: Age (day) Value: 21
  misc_feature: MA Experiment 20000264 PARAMETER Experiment Name: At_Open_Flower_P Parameter: Plant Line Value: WS
  misc_feature: MA Experiment 20000264 PARAMETER Experiment Name: At_Open_Flower_P Parameter: Tissue Value: Open Flower vs. Whole Plant
  misc_feature: MA Experiment ID: 20000794 Result: Up-regulated in Transcription
  misc_feature: MA Experiment 20000794 PARAMETER Experiment Name: At_Petals_P Parameter: Age (day) Value: 23-25 days
  misc_feature: MA Experiment 20000794 PARAMETER Experiment Name: At_Petals_P Parameter: Plant Line Value: WS
  misc_feature: MA Experiment 20000794 PARAMETER Experiment Name: At_Petals_P Parameter: Tissue Value: Petals vs. Whole plant
  misc_feature: MA Experiment ID: 20001905 Result: Up-regulated in Transcription
  misc_feature: MA Experiment 20001905 PARAMETER Experiment Name: At_Drought_Reproduction_P Parameter: Age (day) Value: 40
  misc_feature: MA Experiment 20001905 PARAMETER Experiment Name: At_Drought_Reproduction_P Parameter: Organism Value: A. thaliana
  misc_feature: MA Experiment 20001905 PARAMETER Experiment Name: At_Drought_Reproduction_P Parameter: Plant Line Value: WS
  misc_feature: MA Experiment 20001905 PARAMETER Experiment Name: At_Drought_Reproduction_P Parameter: Timepoint (day) Value: 10
  misc_feature: MA Experiment 20001905 PARAMETER Experiment Name: At_Drought_Reproduction_P Parameter: Tissue Value: Rosettes
  misc_feature: MA Experiment 20001905 PARAMETER Experiment Name: At_Drought_Reproduction_P Parameter: Treatment Value: Drought vs. No Drought
tgatctacacacaccgatctccctctccctctccctctccctctttatctttctcttcctcctttgctaataaacttttctttgaaccttacacgccttgttgatattactctcttaaatatatattttcgtacattaacacagacatatataaagctaaagatttcttcacgtaatgggtttgaaagatattgggtccaaattgccaccggggtttcgatttcatccaagtgatgaagagttggtttgtcattatctttgcaacaagattagggccaaatctgatcatggtgatgttgatgatgatgatgatgatgttgatgaagctttgaagggttctactgatcttgtggagattgacttgcatatctgtgagccatgggagcttcctgatgtggcaaagttaaacgcaaaggaatggtacttcttcagtttccgtgatcgaaagtatgctactggatatcgcacgaacagagcgacagtaagcggatactggaaagcaacaggaaaagatcgaacggtgatggatccacgtacaaggcaattggtagggatgagaaaaacactagtgttctacagaaacagagcaccaaatgggatcaaaactacttggatcatgcacgagttccgtcttgagtgtcctaacatcccacctaaggaagactgggtcttgtgcagagtgttcaacaaaggcagagactcatcgctacaagacaataattattataacaatgataatcagacgcaaaggcttgaagttaatgacgctccggatcttaattacaacaatcagttgccacctttgctatcatcccctcctcataatcatcaacatgagaagatgaaaatccaagtttgtgatcagtgggagcagctaatgaagcagccttcaaggaccaccggccacccctatcatcaccattgtcatcatcaaaccatagcatgtggttgggagcagatgatgatcggttcgctgtcatcaccttcgagtcatggccctgatcacgagtccttgctaaatttgctttacgtcgacaataacaacagtgtcaacatcagtggtgatcatcatcagaattatgagaagattttgttgtcatcactagacatgacgagtttggatcacgacaagacatgtatgggatcatcatcggatggtggtatggtctctgatcttcacatggaatgtggtggattgagttttgagaccgaaaatatcctcgctttccaatgaacataattcaaggggttcgccaatttgttgattcgtgaattatacaaacattttatctatagatttatcacattatcaaacatgtaagttgtgtggcatttgggtatagggtttgtgtgattctaggtttttaggacgatgtatgttgttatatttagcgtgtttttaggatttattctcattttaaaattatatgaaaacccattactatgaat

SEQ ID NO: 23194 - protein, 352 aa, Arabidopsis thaliana
  peptide (1)..(352): Ceres Seq. ID no. 13488526
  misc_feature (10)..(154): Pfam Name: No apical meristem (NAM) protein Pfam Description: No apical meristem (NAM) protein
  misc_feature (10)..(249): Homolog of NCBI NO: 15223043 NR Description: No apical meristem (NAM) protein family
  misc_feature (6)..(216): Homolog of NCBI NO: 15222818 NR Description: NAC1 / No apical meristem (NAM) protein family
  misc_feature (6)..(213): Homolog of NCBI NO: 38636961 NR Description: putative NAC domain protein NAC1
  misc_feature (10)..(225): Homolog of NCBI NO: 15224139 NR Description: No apical meristem (NAM) protein family
  misc_feature (2)..(215): Homolog of NCBI NO: 37535380 NR Description: putative NAM (no apical meristem) protein
  misc_feature (1)..(181): Homolog of NCBI NO: 32482946 NR Description: OSJNBb0072M01.11 [Oryza sativa (japonica
  misc_feature (1)..(284): Homolog of NCBI NO: 7485899 NR Description: hypothetical protein F20O9.220 - Arabidopsis
  misc_feature (156)..(352): Homolog of NCBI NO: 7485899 NR Description: hypothetical protein F20O9.220 - Arabidopsis
  misc_feature (1)..(352): Homolog of NCBI NO: 21593065 NR Description: NAM / CUC2-like protein [Arabidopsis thaliana]
  misc_feature (1)..(352): Homolog of NCBI NO: 18417214 NR Description: No apical meristem (NAM) protein family
MGLKDIGSKLPPGFRFHPSDEELVCHYLCNKIRAKSDHGDVDDDDDDVDEALKGSTDLVEIDLHICEPWELPDVAKLNAKEWYFFSFRDRKYATGYRTNRATVSGYWKATGKDRTVMDPRTRQLVGMRKTLVFYRNRAPNGIKTTWIMHEFRLECPNIPPKEDWVLCRVFNKGRDSSLQDNNYYNNDNQTQRLEVNDAPDLNYNNQLPPLLSSPPHNHQHEKMKIQVCDQWEQLMKQPSRTTGHPYHHHCHHQTIACGWEQMMIGSLSSPSSHGPDHESLLNLLYVDNNNSVNISGDHHQNYEKILLSSLDMTSLDHDKTCMGSSSDGGMVSDLHMECGGLSFETENILAFQ

SEQ ID NO: 23195 - protein, 236 aa, Arabidopsis thaliana
  peptide (1)..(236): Ceres Seq. ID no. 13488527
  misc_feature (1)..(133): Homolog of NCBI NO: 15223043 NR Description: No apical meristem (NAM) protein family
  misc_feature (1)..(100): Homolog of NCBI NO: 15222818 NR Description: NAC1 / No apical meristem (NAM) protein family
  misc_feature (1)..(97): Homolog of NCBI NO: 38636961 NR Description: putative NAC domain protein NAC1
  misc_feature (1)..(109): Homolog of NCBI NO: 15224139 NR Description: No apical meristem (NAM) protein family
  misc_feature (1)..(99): Homolog of NCBI NO: 37535380 NR Description: putative NAM (no apical meristem) protein
  misc_feature (1)..(65): Homolog of NCBI NO: 32482946 NR Description: OSJNBb0072M01.11 [Oryza sativa (japonica
  misc_feature (1)..(168): Homolog of NCBI NO: 7485899 NR Description: hypothetical protein F20O9.220 - Arabidopsis
  misc_feature (40)..(236): Homolog of NCBI NO: 7485899 NR Description: hypothetical protein F20O9.220 - Arabidopsis
  misc_feature (1)..(236): Homolog of NCBI NO: 21593065 NR Description: NAM / CUC2-like protein [Arabidopsis thaliana]
  misc_feature (1)..(236): Homolog of NCBI NO: 18417214 NR Description: No apical meristem (NAM) protein family
MDPRTRQLVGMRKTLVFYRNRAPNGIKTTWIMHEFRLECPNIPPKEDWVLCRVFNKGRDSSLQDNNYYNNDNQTQRLEVNDAPDLNYNNQLPPLLSSPPHNHQHEKMKIQVCDQWEQLMKQPSRTTGHPYHHHCHHQTIACGWEQMMIGSLSSPSSHGPDHESLLNLLYVDNNNSVNISGDHHQNYEKILLSSLDMTSLDHDKTCMGSSSDGGMVSDLHMECGGLSFETENILAFQ

SEQ ID NO: 23196 - protein, 226 aa, Arabidopsis thaliana
  peptide (1)..(226): Ceres Seq. ID no. 13488528
  misc_feature (1)..(123): Homolog of NCBI NO: 15223043 NR Description: No apical meristem (NAM) protein family
  misc_feature (1)..(90): Homolog of NCBI NO: 15222818 NR Description: NAC1 / No apical meristem (NAM) protein family
  misc_feature (1)..(87): Homolog of NCBI NO: 38636961 NR Description: putative NAC domain protein NAC1
  misc_feature (1)..(99): Homolog of NCBI NO: 15224139 NR Description: No apical meristem (NAM) protein family
  misc_feature (1)..(89): Homolog of NCBI NO: 37535380 NR Description: putative NAM (no apical meristem) protein
  misc_feature (1)..(55): Homolog of NCBI NO: 32482946 NR Description: OSJNBb0072M01.11 [Oryza sativa (japonica
  misc_feature (1)..(158): Homolog of NCBI NO: 7485899 NR Description: hypothetical protein F20O9.220 - Arabidopsis
  misc_feature (30)..(226): Homolog of NCBI NO: 7485899 NR Description: hypothetical protein F20O9.220 - Arabidopsis
  misc_feature (1)..(226): Homolog of NCBI NO: 21593065 NR Description: NAM / CUC2-like protein [Arabidopsis thaliana]
  misc_feature (1)..(226): Homolog of NCBI NO: 18417214 NR Description: No apical meristem (NAM) protein family
MRKTLVFYRNRAPNGIKTTWIMHEFRLECPNIPPKEDWVLCRVFNKGRDSSLQDNNYYNNDNQTQRLEVNDAPDLNYNNQLPPLLSSPPHNHQHEKMKIQVCDQWEQLMKQPSRTTGHPYHHHCHHQTIACGWEQMMIGSLSSPSSHGPDHESLLNLLYVDNNNSVNISGDHHQNYEKILLSSLDMTSLDHDKTCMGSSSDGGMVSDLHMECGGLSFETENILAFQ

SEQ ID NO: 23197 - DNA, 1856 bp, Arabidopsis thaliana
  misc_feature (1)..(1856): Ceres Seq. ID no. 12327273
  misc_feature: MA Experiment ID: 108434 Result: Down-regulated in Transcription
  misc_feature: MA Experiment 108434 PARAMETER Experiment Name: At_Root_Tips_cDNA_P Parameter: Tissue Value: Root Tips
  misc_feature: MA Experiment ID: 108435 Result: Up-regulated in Transcription
  misc_feature: MA Experiment 108435 PARAMETER Experiment Name: At_stm_Mutants_cDNA_P Parameter: Plant Line Value: wt Landsburg vs stm
  misc_feature: MA Experiment 108435 PARAMETER Experiment Name: At_stm_Mutants_cDNA_P Parameter: Tissue Value: Shoot Apical Meristem Region
  misc_feature: MA Experiment ID: 108464 Result: Up-regulated in Transcription
  misc_feature: MA Experiment 108464 PARAMETER Experiment Name: At_Germinating_Seeds_cDNA_P Parameter: Age (day) Value: 4 vs. 0
  misc_feature: MA Experiment 108464 PARAMETER Experiment Name: At_Germinating_Seeds_cDNA_P Parameter: Tissue Value: Germinating Seeds
  misc_feature: MA Experiment ID: 108469 Result: Down-regulated in Transcription
  misc_feature: MA Experiment ID: 108488 Result: Up-regulated in Transcription
  misc_feature: MA Experiment ID: 108489 Result: Up-regulated in Transcription
  misc_feature: MA Experiment ID: 108501 Result: Up-regulated in Transcription
  misc_feature: MA Experiment 108501 PARAMETER Experiment Name: At_ap2_floral_buds_cDNA_P Parameter: Plant Line Value: ap2 (Ler.)
  misc_feature: MA Experiment 108501 PARAMETER Experiment Name: At_ap2_floral_buds_cDNA_P Parameter: Tissue Value: Closed Flower
  misc_feature: MA Experiment ID: 108569 Result: Up-regulated in Transcription
  misc_feature: MA Experiment 108569 PARAMETER Experiment Name: At_0.001%_MeJA__cDNA_P Parameter: Timepoint (hr) Value: 6
  misc_feature: MA Experiment 108569 PARAMETER Experiment Name: At_0.001%_MeJA__cDNA_P Parameter: Tissue Value: Aerial
  misc_feature: MA Experiment 108569 PARAMETER Experiment Name: At_0.001%_MeJA__cDNA_P Parameter: Treatment Value: 0.001% MeJA vs. No Treatment
  misc_feature: MA Experiment ID: 20000068 Result: Up-regulated in Transcription
  misc_feature: MA Experiment ID: 20000069 Result: Up-regulated in Transcription
  misc_feature: MA Experiment 20000069 PARAMETER Experiment Name: At_100uM_ABA_Mutants_cDNA_P Parameter: Plant Line Value: CS23
  misc_feature: MA Experiment 20000069 PARAMETER Experiment Name: At_100uM_ABA_Mutants_cDNA_P Parameter: Timepoint (hr) Value: 6
  misc_feature: MA Experiment 20000069 PARAMETER Experiment Name: At_100uM_ABA_Mutants_cDNA_P Parameter: Tissue Value: Aerial
  misc_feature: MA Experiment 20000069 PARAMETER Experiment Name: At_100uM_ABA_Mutants_cDNA_P Parameter: Treatment Value: 100uM ABA vs. No Treatment
  misc_feature: MA Experiment ID: 20000070 Result: Up-regulated in Transcription
  misc_feature: MA Experiment 20000070 PARAMETER Experiment Name: At_100uM_ABA_Mutants_cDNA_P Parameter: Plant Line Value: CS24
  misc_feature: MA Experiment 20000070 PARAMETER Experiment Name: At_100uM_ABA_Mutants_cDNA_P Parameter: Timepoint (hr) Value: 6
  misc_feature: MA Experiment 20000070 PARAMETER Experiment Name: At_100uM_ABA_Mutants_cDNA_P Parameter: Tissue Value: Aerial
  misc_feature: MA Experiment 20000070 PARAMETER Experiment Name: At_100uM_ABA_Mutants_cDNA_P Parameter: Treatment Value: 100uM ABA vs. No Treatment
  misc_feature: MA Experiment ID: 20000071 Result: Up-regulated in Transcription
  misc_feature: MA Experiment 20000071 PARAMETER Experiment Name: At_100uM_ABA_Mutants_cDNA_P Parameter: Plant Line Value: CS8104
  misc_feature: MA Experiment 20000071 PARAMETER Experiment Name: At_100uM_ABA_Mutants_cDNA_P Parameter: Timepoint (hr) Value: 6
  misc_feature: MA Experiment 20000071 PARAMETER Experiment Name: At_100uM_ABA_Mutants_cDNA_P Parameter: Tissue Value: Aerial
  misc_feature: MA Experiment 20000071 PARAMETER Experiment Name: At_100uM_ABA_Mutants_cDNA_P Parameter: Treatment Value: 100uM ABA vs. No Treatment
  misc_feature: MA Experiment ID: 20000086 Result: Up-regulated in Transcription
  misc_feature: MA Experiment 20000086 PARAMETER Experiment Name: At_100uM_ABA_Mutants_cDNA_P Parameter: Plant Line Value: CS22
  misc_feature: MA Experiment 20000086 PARAMETER Experiment Name: At_100uM_ABA_Mutants_cDNA_P Parameter: Timepoint (hr) Value: 6
  misc_feature: MA Experiment 20000086 PARAMETER Experiment Name: At_100uM_ABA_Mutants_cDNA_P Parameter: Tissue Value: Aerial
  misc_feature: MA Experiment 20000086 PARAMETER Experiment Name: At_100uM_ABA_Mutants_cDNA_P Parameter: Treatment Value: 100uM ABA vs. No Treatment
  misc_feature: MA Experiment ID: 20000088 Result: Up-regulated in Transcription
  misc_feature: MA Experiment 20000088 PARAMETER Experiment Name: At_100uM_ABA_Mutants_cDNA_P Parameter: Plant Line Value: Landsberg
  misc_feature: MA Experiment 20000088 PARAMETER Experiment Name: At_100uM_ABA_Mutants_cDNA_P Parameter: Timepoint (hr) Value: 6
  misc_feature: MA Experiment 20000088 PARAMETER Experiment Name: At_100uM_ABA_Mutants_cDNA_P Parameter: Tissue Value: Aerial
  misc_feature: MA Experiment 20000088 PARAMETER Experiment Name: At_100uM_ABA_Mutants_cDNA_P Parameter: Treatment Value: 100uM ABA vs. No Treatment
  misc_feature: MA Experiment ID: 20000113 Result: Down-regulated in Transcription
  misc_feature: MA Experiment 20000113 PARAMETER Experiment Name: At_42deg_Heat_cDNA_P Parameter: Temperature (deg C) Value: 42 vs. 22
  misc_feature: MA Experiment 20000113 PARAMETER Experiment Name: At_42deg_Heat_cDNA_P Parameter: Timepoint (hr) Value: 8
  misc_feature: MA Experiment 20000113 PARAMETER Experiment Name: At_42deg_Heat_cDNA_P Parameter: Tissue Value: Aerial
  misc_feature: MA Experiment ID: 20000184 Result: Down-regulated in Transcription
  misc_feature: MA Experiment 20000184 PARAMETER Experiment Name: At_Shoots__P Parameter: Age (day) Value: 7
  misc_feature: MA Experiment 20000184 PARAMETER Experiment Name: At_Shoots__P Parameter: Tissue Value: Shoots vs. Whole Plant
  misc_feature: MA Experiment ID: 20000185 Result: Down-regulated in Transcription
  misc_feature: MA Experiment 20000185 PARAMETER Experiment Name: At_Roots__P Parameter: Age (day) Value: 7 vs. 21
  misc_feature: MA Experiment 20000185 PARAMETER Experiment Name: At_Roots__P Parameter: Organism Value: A. thaliana
  misc_feature: MA Experiment 20000185 PARAMETER Experiment Name: At_Roots__P Parameter: Tissue Value: Roots vs. Whole Plant
  misc_feature: MA Experiment ID: 20000211 Result: Up-regulated in Transcription
  misc_feature: MA Experiment 20000211 PARAMETER Experiment Name: At_0.001percent_MeJA__P Parameter: Age (day) Value: 14
  misc_feature: MA Experiment 20000211 PARAMETER Experiment Name: At_0.001percent_MeJA__P Parameter: Organism Value: A. thaliana
  misc_feature: MA Experiment 20000211 PARAMETER Experiment Name: At_0.001percent_MeJA__P Parameter: Plant Line Value: WS
  misc_feature: MA Experiment 20000211 PARAMETER Experiment Name: At_0.001percent_MeJA__P Parameter: Timepoint (hr) Value: 1
  misc_feature: MA Experiment 20000211 PARAMETER Experiment Name: At_0.001percent_MeJA__P Parameter: Tissue Value: Aerial
  misc_feature: MA Experiment 20000211 PARAMETER Experiment Name: At_0.001percent_MeJA__P Parameter: Treatment Value: 0.001percent MeJA vs. No Treatment
  misc_feature: MA Experiment ID: 20000224 Result: Up-regulated in Transcription
  misc_feature: MA Experiment ID: 20000234 Result: Up-regulated in Transcription
  misc_feature: MA Experiment 20000234 PARAMETER Experiment Name: At_Siliques_P Parameter: Age (day) Value: 21
  misc_feature: MA Experiment 20000234 PARAMETER Experiment Name: At_Siliques_P Parameter: Organism Value: A. thaliana
  misc_feature: MA Experiment 20000234 PARAMETER Experiment Name: At_Siliques_P Parameter: Plant Line Value: WS
  misc_feature: MA Experiment 20000234 PARAMETER Experiment Name: At_Siliques_P Parameter: Tissue Value: Less Than 5mm Siliques vs. Whole Plant
  misc_feature: MA Experiment ID: 20000264 Result: Up-regulated in Transcription
  misc_feature: MA Experiment 20000264 PARAMETER Experiment Name: At_Open_Flower_P Parameter: Age (day) Value: 21
  misc_feature: MA Experiment 20000264 PARAMETER Experiment Name: At_Open_Flower_P Parameter: Plant Line Value: WS
  misc_feature: MA Experiment 20000264 PARAMETER Experiment Name: At_Open_Flower_P Parameter: Tissue Value: Open Flower vs. Whole Plant
  misc_feature: MA Experiment ID: 20000265 Result: Up-regulated in Transcription
  misc_feature: MA Experiment 20000265 PARAMETER Experiment Name: At_Open_Flower_P Parameter: Age (day) Value: 21
  misc_feature: MA Experiment 20000265 PARAMETER Experiment Name: At_Open_Flower_P Parameter: Plant Line Value: WS
  misc_feature: MA Experiment 20000265 PARAMETER Experiment Name: At_Open_Flower_P Parameter: Tissue Value: Closed Flower vs. Whole Plant
  misc_feature: MA Experiment ID: 20000286 Result: Up-regulated in Transcription
  misc_feature: MA Experiment 20000286 PARAMETER Experiment Name: At_Open_Flower_P Parameter: Age (day) Value: 21
  misc_feature: MA Experiment 20000286 PARAMETER Experiment Name: At_Open_Flower_P Parameter: Plant Line Value: WS
  misc_feature: MA Experiment 20000286 PARAMETER Experiment Name: At_Open_Flower_P Parameter: Tissue Value: Half Open vs. Whole Plant
  misc_feature: MA Experiment ID: 20000308 Result: Up-regulated in Transcription
  misc_feature: MA Experiment 20000308 PARAMETER Experiment Name: At_100mM_NaCl__P Parameter: Age (day) Value: 17
  misc_feature: MA Experiment 20000308 PARAMETER Experiment Name: At_100mM_NaCl__P Parameter: Organism Value: A. thaliana
  misc_feature: MA Experiment 20000308 PARAMETER Experiment Name: At_100mM_NaCl__P Parameter: Plant Line Value: WS
  misc_feature: MA Experiment 20000308 PARAMETER Experiment Name: At_100mM_NaCl__P Parameter: Timepoint (hr) Value: 72
  misc_feature: MA Experiment 20000308 PARAMETER Experiment Name: At_100mM_NaCl__P Parameter: Tissue Value: Whole Plant
  misc_feature: MA Experiment 20000308 PARAMETER Experiment Name: At_100mM_NaCl__P Parameter: Treatment Value: 100mM NaCl vs. No Treatment
  misc_feature: MA Experiment ID: 20000439 Result: Down-regulated in Transcription
  misc_feature: MA Experiment 20000439 PARAMETER Experiment Name: At_Roots__P Parameter: Age (day) Value: 14 vs. 21
  misc_feature: MA Experiment 20000439 PARAMETER Experiment Name: At_Roots__P Parameter: Organism Value: A. thaliana
  misc_feature: MA Experiment 20000439 PARAMETER Experiment Name: At_Roots__P Parameter: Tissue Value: Roots vs. Whole Plant
  misc_feature: MA Experiment ID: 20000455 Result: Up-regulated in Transcription
  misc_feature: MA Experiment 20000455 PARAMETER Experiment Name: At_100uM_ABA_P Parameter: Age (day) Value: 16
  misc_feature: MA Experiment 20000455 PARAMETER Experiment Name: At_100uM_ABA_P Parameter: Organism Value: A. thaliana
  misc_feature: MA Experiment 20000455 PARAMETER Experiment Name: At_100uM_ABA_P Parameter: Plant Line Value: WS
  misc_feature: MA Experiment 20000455 PARAMETER Experiment Name: At_100uM_ABA_P Parameter: Timepoint (hr) Value: 48
  misc_feature: MA Experiment 20000455 PARAMETER Experiment Name: At_100uM_ABA_P Parameter: Tissue Value: Aerial
  misc_feature: MA Experiment 20000455 PARAMETER Experiment Name: At_100uM_ABA_P Parameter: Treatment Value: 100uM ABA vs. No Treatment
  misc_feature: MA Experiment ID: 20000495 Result: Up-regulated in Transcription
  misc_feature: MA Experiment 20000495 PARAMETER Experiment Name: At_Guard_Cells_P Parameter: Harvest Date Value: 8/2/2002
  misc_feature: MA Experiment 20000495 PARAMETER Experiment Name: At_Guard_Cells_P Parameter: Organism Value: A. thaliana
  misc_feature: MA Experiment 20000495 PARAMETER Experiment Name: At_Guard_Cells_P Parameter: Tissue Value: Guard Cells vs. Leaves
  misc_feature: MA Experiment ID: 20000794 Result: Down-regulated in Transcription
  misc_feature: MA Experiment 20000794 PARAMETER Experiment Name: At_Petals_P Parameter: Age (day) Value: 23-25 days
  misc_feature: MA Experiment 20000794 PARAMETER Experiment Name: At_Petals_P Parameter: Plant Line Value: WS
  misc_feature: MA Experiment 20000794 PARAMETER Experiment Name: At_Petals_P Parameter: Tissue Value: Petals vs. Whole plant
  misc_feature: MA Experiment ID: 20001248 Result: Down-regulated in Transcription
  misc_feature: MA Experiment 20001248 PARAMETER Experiment Name: At_Far-red-induction_P Parameter: Age (day) Value: 7
  misc_feature: MA Experiment 20001248 PARAMETER Experiment Name: At_Far-red-induction_P Parameter: Light Value: Far-red vs. White
  misc_feature: MA Experiment 20001248 PARAMETER Experiment Name: At_Far-red-induction_P Parameter: Organism Value: A. thaliana
  misc_feature: MA Experiment 20001248 PARAMETER Experiment Name: At_Far-red-induction_P Parameter: Plant Line Value: Columbia
  misc_feature: MA Experiment 20001248 PARAMETER Experiment Name: At_Far-red-induction_P Parameter: Timepoint (hr) Value: 4
  misc_feature: MA Experiment 20001248 PARAMETER Experiment Name: At_Far-red-induction_P Parameter: Tissue Value: Whole Plant
  misc_feature: MA Experiment ID: 20001450 Result: Down-regulated in Transcription
  misc_feature: MA Experiment 20001450 PARAMETER Experiment Name: At_Far-red-induction_P Parameter: Age (day) Value: 7
  misc_feature: MA Experiment 20001450 PARAMETER Experiment Name: At_Far-red-induction_P Parameter: Light Value: Far-red vs. White
  misc_feature: MA Experiment 20001450 PARAMETER Experiment Name: At_Far-red-induction_P Parameter: Organism Value: A. thaliana
  misc_feature: MA Experiment 20001450 PARAMETER Experiment Name: At_Far-red-induction_P Parameter: Plant Line Value: Columbia
  misc_feature: MA Experiment 20001450 PARAMETER Experiment Name: At_Far-red-induction_P Parameter: Timepoint (hr) Value: 8
  misc_feature: MA Experiment 20001450 PARAMETER Experiment Name: At_Far-red-induction_P Parameter: Tissue Value: Whole Plant
  misc_feature: MA Experiment ID: 20001451 Result: Down-regulated in Transcription
  misc_feature: MA Experiment 20001451 PARAMETER Experiment Name: At_Far-red-induction_P Parameter: Age (day) Value: 7
  misc_feature: MA Experiment 20001451 PARAMETER Experiment Name: At_Far-red-induction_P Parameter: Light Value: Far-red vs. White
  misc_feature: MA Experiment 20001451 PARAMETER Experiment Name: At_Far-red-induction_P Parameter: Organism Value: A. thaliana
  misc_feature: MA Experiment 20001451 PARAMETER Experiment Name: At_Far-red-induction_P Parameter: Plant Line Value: Columbia
  misc_feature: MA Experiment 20001451 PARAMETER Experiment Name: At_Far-red-induction_P Parameter: Timepoint (hr) Value: 24
  misc_feature: MA Experiment 20001451 PARAMETER Experiment Name: At_Far-red-induction_P Parameter: Tissue Value: Whole Plant
  misc_feature: MA Experiment ID: 20001555 Result: Up-regulated in Transcription
  misc_feature: MA Experiment 20001555 PARAMETER Experiment Name: At_Drought_Soil_Dry_P Parameter: Age (day) Value: 24
  misc_feature: MA Experiment 20001555 PARAMETER Experiment Name: At_Drought_Soil_Dry_P Parameter: Organism Value: A. thaliana
  misc_feature: MA Experiment 20001555 PARAMETER Experiment Name: At_Drought_Soil_Dry_P Parameter: Plant Line Value: WS
  misc_feature: MA Experiment 20001555 PARAMETER Experiment Name: At_Drought_Soil_Dry_P Parameter: Post Timepoint (hr) Value: None
  misc_feature: MA Experiment 20001555 PARAMETER Experiment Name: At_Drought_Soil_Dry_P Parameter: Post-Treatment Value: None
  misc_feature: MA Experiment 20001555 PARAMETER Experiment Name: At_Drought_Soil_Dry_P Parameter: Timepoint (day) Value: 10
  misc_feature: MA Experiment 20001555 PARAMETER Experiment Name: At_Drought_Soil_Dry_P Parameter: Treatment Value: Drought vs. No Drought
  misc_feature: MA Experiment ID: 20001556 Result: Up-regulated in Transcription
  misc_feature: MA Experiment 20001556 PARAMETER Experiment Name: At_Drought_Soil_Dry_P Parameter: Age (day) Value: 26
  misc_feature: MA Experiment 20001556 PARAMETER Experiment Name: At_Drought_Soil_Dry_P Parameter: Organism Value: A. thaliana
  misc_feature: MA Experiment 20001556 PARAMETER Experiment Name: At_Drought_Soil_Dry_P Parameter: Plant Line Value: WS
  misc_feature: MA Experiment 20001556 PARAMETER Experiment Name: At_Drought_Soil_Dry_P Parameter: Post Timepoint (hr) Value: None
  misc_feature: MA Experiment 20001556 PARAMETER Experiment Name: At_Drought_Soil_Dry_P Parameter: Post-Treatment Value: None
  misc_feature: MA Experiment 20001556 PARAMETER Experiment Name: At_Drought_Soil_Dry_P Parameter: Timepoint (day) Value: 12
  misc_feature: MA Experiment 20001556 PARAMETER Experiment Name: At_Drought_Soil_Dry_P Parameter: Treatment Value: Drought vs. No Drought
  misc_feature: MA Experiment ID: 20001558 Result: Down-regulated in Transcription
  misc_feature: MA Experiment 20001558 PARAMETER Experiment Name: At_Drought_Soil_Dry_P Parameter: Age (day) Value: 27
  misc_feature: MA Experiment 20001558 PARAMETER Experiment Name: At_Drought_Soil_Dry_P Parameter: Organism Value: A. thaliana
  misc_feature: MA Experiment 20001558 PARAMETER Experiment Name: At_Drought_Soil_Dry_P Parameter: Plant Line Value: WS
  misc_feature: MA Experiment 20001558 PARAMETER Experiment Name: At_Drought_Soil_Dry_P Parameter: Post Timepoint (hr) Value: 6
  misc_feature: MA Experiment 20001558 PARAMETER Experiment Name: At_Drought_Soil_Dry_P Parameter: Post-Treatment Value: Re-Water vs. No Drought
  misc_feature: MA Experiment 20001558 PARAMETER Experiment Name: At_Drought_Soil_Dry_P Parameter: Timepoint (day) Value: 13
  misc_feature: MA Experiment 20001558 PARAMETER Experiment Name: At_Drought_Soil_Dry_P Parameter: Treatment Value: Drought vs. No Drought
  misc_feature: MA Experiment ID: 20001559 Result: Up-regulated in Transcription
  misc_feature: MA Experiment 20001559 PARAMETER Experiment Name: At_Drought_Soil_Dry_P Parameter: Age (day) Value: 28
  misc_feature: MA Experiment 20001559 PARAMETER Experiment Name: At_Drought_Soil_Dry_P Parameter: Organism Value: A. thaliana
  misc_feature: MA Experiment 20001559 PARAMETER Experiment Name: At_Drought_Soil_Dry_P Parameter: Plant Line Value: WS
  misc_feature: MA Experiment 20001559 PARAMETER Experiment Name: At_Drought_Soil_Dry_P Parameter: Post Timepoint (hr) Value: 29
  misc_feature: MA Experiment 20001559 PARAMETER Experiment Name: At_Drought_Soil_Dry_P Parameter: Post-Treatment Value: Re-Water vs. No Drought
  misc_feature: MA Experiment 20001559 PARAMETER Experiment Name: At_Drought_Soil_Dry_P Parameter: Timepoint (day) Value: 14
  misc_feature: MA Experiment 20001559 PARAMETER Experiment Name: At_Drought_Soil_Dry_P Parameter: Treatment Value: Drought vs. No Drought
  misc_feature: MA Experiment ID: 20001761 Result: Up-regulated in Transcription
  misc_feature: MA Experiment 20001761 PARAMETER Experiment Name: At_50mM_NH4NO3_L-to-H_P Parameter: Timepoint (hr) Value: 4
  misc_feature: MA Experiment 20001761 PARAMETER Experiment Name: At_50mM_NH4NO3_L-to-H_P Parameter: Tissue Value: Siliques
  misc_feature: MA Experiment 20001761 PARAMETER Experiment Name: At_50mM_NH4NO3_L-to-H_P Parameter: Treatment Value: 50mM NH4NO3 vs 100mM Mannitol
  misc_feature: MA Experiment ID: 20001774 Result: Up-regulated in Transcription
  misc_feature: MA Experiment 20001774 PARAMETER Experiment Name: At_Far-red-enriched-adult_P Parameter: Age (day) Value: 31
  misc_feature: MA Experiment 20001774 PARAMETER Experiment Name: At_Far-red-enriched-adult_P Parameter: Light Value: Far-red enriched vs. White
  misc_feature: MA Experiment 20001774 PARAMETER Experiment Name: At_Far-red-enriched-adult_P Parameter: Organism Value: A. thaliana
  misc_feature: MA Experiment 20001774 PARAMETER Experiment Name: At_Far-red-enriched-adult_P Parameter: Plant Line Value: Columbia
  misc_feature: MA Experiment 20001774 PARAMETER Experiment Name: At_Far-red-enriched-adult_P Parameter: Timepoint (hr) Value: 72
  misc_feature: MA Experiment 20001774 PARAMETER Experiment Name: At_Far-red-enriched-adult_P Parameter: Tissue Value: Aerial
  misc_feature: MA Experiment ID: 20001904 Result: Up-regulated in Transcription
  misc_feature: MA Experiment 20001904 PARAMETER Experiment Name: At_Drought_Reproduction_P Parameter: Age (day) Value: 37
  misc_feature: MA Experiment 20001904 PARAMETER Experiment Name: At_Drought_Reproduction_P Parameter: Organism Value: A. thaliana
  misc_feature: MA Experiment 20001904 PARAMETER Experiment Name: At_Drought_Reproduction_P Parameter: Plant Line Value: WS
  misc_feature: MA Experiment 20001904 PARAMETER Experiment Name: At_Drought_Reproduction_P Parameter: Timepoint (day) Value: 7
  misc_feature: MA Experiment 20001904 PARAMETER Experiment Name: At_Drought_Reproduction_P Parameter: Tissue Value: Rosettes
  misc_feature: MA Experiment 20001904 PARAMETER Experiment Name: At_Drought_Reproduction_P Parameter: Treatment Value: Drought vs. No Drought
  misc_feature: MA Experiment ID: 20001906 Result: Down-regulated in Transcription
  misc_feature: MA Experiment 20001906 PARAMETER Experiment Name: At_Drought_Reproduction_P Parameter: Age (day) Value: 35
  misc_feature: MA Experiment 20001906 PARAMETER Experiment Name: At_Drought_Reproduction_P Parameter: Organism Value: A. thaliana
  misc_feature: MA Experiment 20001906 PARAMETER Experiment Name: At_Drought_Reproduction_P Parameter: Plant Line Value: WS
  misc_feature: MA Experiment 20001906 PARAMETER Experiment Name: At_Drought_Reproduction_P Parameter: Timepoint (day) Value: 5
  misc_feature: MA Experiment 20001906 PARAMETER Experiment Name: At_Drought_Reproduction_P Parameter: Tissue Value: Siliques
  misc_feature: MA Experiment 20001906 PARAMETER Experiment Name: At_Drought_Reproduction_P Parameter: Treatment Value: Drought vs. No Drought
  misc_feature: MA Experiment ID: 20001908 Result: Down-regulated in Transcription
  misc_feature: MA Experiment 20001908 PARAMETER Experiment Name: At_Drought_Reproduction_P Parameter: Age (day) Value: 40
  misc_feature: MA Experiment 20001908 PARAMETER Experiment Name: At_Drought_Reproduction_P Parameter: Organism Value: A. thaliana
  misc_feature: MA Experiment 20001908 PARAMETER Experiment Name: At_Drought_Reproduction_P Parameter: Plant Line Value: WS
  misc_feature: MA Experiment 20001908 PARAMETER Experiment Name: At_Drought_Reproduction_P Parameter: Timepoint (day) Value: 10
  misc_feature: MA Experiment 20001908 PARAMETER Experiment Name: At_Drought_Reproduction_P Parameter: Tissue Value: Siliques
  misc_feature: MA Experiment 20001908 PARAMETER Experiment Name: At_Drought_Reproduction_P Parameter: Treatment Value: Drought vs. No Drought
  misc_feature: Phenotype: ROSETTE LEAVES Other
  misc_feature: Phenotype: WHOLE PLANT Color-Dark Green
  misc_feature: Phenotype: WHOLE PLANT Color-High Anthocyanin
  misc_feature: Phenotype: WHOLE PLANT Color-High Anthocyanin
  misc_feature: Phenotype: WHOLE PLANT Size-Small
  misc_feature: Phenotype: WHOLE PLANT Size-Small
  misc_feature: Phenotype: WHOLE PLANT Color-Dark Green
  misc_feature: Phenotype: WHOLE PLANT Color-High Anthocyanin
  misc_feature: Phenotype: WHOLE PLANT Color-High Anthocyanin
  misc_feature: Phenotype: WHOLE PLANT Size-Small
  misc_feature: Phenotype: WHOLE PLANT Size-Small
  misc_feature: Phenotype: WHOLE PLANT Other
  misc_feature: Phenotype: INFLORESCENCE Flowering Time-Late Flowering
  misc_feature: Phenotype: INFLORESCENCE Flowering Time-Late Flowering
  misc_feature: Phenotype: ROSETTE LEAVES Shape-Oval
  misc_feature: Phenotype: WHOLE PLANT Color-Dark Green
  misc_feature: Phenotype: WHOLE PLANT Color-High Anthocyanin
  misc_feature: Phenotype: WHOLE PLANT Color-High Anthocyanin
  misc_feature: Phenotype: WHOLE PLANT Size-Small
  misc_feature: Phenotype: WHOLE PLANT Size-Small
  misc_feature: Phenotype: WHOLE PLANT Other
  misc_feature: Phenotype: INFLORESCENCE Flowering Time-Late Flowering
  misc_feature: Phenotype: INFLORESCENCE Flowering Time-Late Flowering
  misc_feature: Phenotype: ROSETTE LEAVES Curled-Curled 3
  misc_feature: Phenotype: WHOLE PLANT Color-Dark Green
  misc_feature: Phenotype: WHOLE PLANT Color-High Anthocyanin
  misc_feature: Phenotype: WHOLE PLANT Size-Small
  misc_feature: Phenotype: WHOLE PLANT Other
  misc_feature: Phenotype: INFLORESCENCE Flowering Time-Late Flowering
aacaaattcctacaccaatatctttagctagagagaaaaaaagagtgaggaaactagagagagagaccacccaataatggtgaggttcgagaaggttcatttagtgttagggttagctctggttctaactctggtcggagctccgaccaaagcccaaggacctgtttgcggtgcaggcctgcctgacaaatttagcagattaaacttccctgaaggcttcatttggggaaccgcaacagcagcatttcaggttgaaggagctgttaatgaaggttgcagaggtccaagcatgtgggatactttcactaagaagttcccacatagatgtgaaaatcataacgctgatgttgctgtggatttctatcatcgttacaaggaagatatccagttgatgaaagaccttaacactgatgcttttagactttctattgcgtggcccagaatattcccccatggaaggatgtctaagggaataagcaaagtgggagtccaattctaccacgacctcatcgatgagcttctcaaaaacaatataataccattagttacagtctttcattgggatactccccaagacttggaagatgaatatggtggtttcttaagtggtcgcatcgtgcaagattttaccgaatatgcgaatttcactttccacgaatatggacacaaagtgaaacattggatcacattcaatgagccatgggtgtttagtcgtgccggttacgacaacggaaagaaagctccgggacgttgttcaccgtacatccccggttatggacagcattgtcaagatgggcggtctggatacgaagcttatcaagtcagtcacaacttactcttgtcgcatgcttacgccgttgacgcattcagaaaatgcaaacagtgtgctggaggtaaaataggaattgcacacagtccagcttggttcgaaccacaagaccttgagcatgttggaggttccattgaacgtgtgcttgatttcatcctaggatggcatttggctccaacaacttatggagattatccacaatcgatgaaggatcgtgtcggtcatagattgccaaaattcacagaagctgagaagaagttgctgaagggttctacagattactaggaatgaattactatacttcagtgtttgcaaaagaaattagccctgatcctaagaatccgagttggacgactgattctcttgttgattgggatagcaagagtgtggatggatacaaaattggtagcaagccgtttaatggtaaactggatgtgtattcaaaaggtttgagataccttttgaagtatattaaggataactatggcgacccagaagttatcattgccgagaatggatacggagaagaccttggagagaagcacaatgacgtaaactttgggacacaagatcacaacaggaaatattatatccaaaggcatctcttgagtatgcacgacgccatttgcaaggacaaagtgaacgttacgggatactttgtgtggtcgttgatggacaactttgagtggcaagatgggtacaaggcgaggttcggactttactacatcgatttccagaacaacttgacccgtcaccaaaaagtttcgggcaaatggtattccgaattcctcaaaccacagtttccaacctccaagctgagggaagaactctagatgatcaagaatcctatcgggacaaaataattgagtacaagagtcttgaagatgttgttgaggataatatcagtttgtgtgttctatggatcgttttcatctaccggtccttcctatgttagaaggacttgtgagttgttcaagttttaataatatcaataaatgtcttcttttttaatatatgttgagttaat

SEQ ID NO: 23198 - protein, 345 aa, Arabidopsis thaliana
  peptide (1)..(345): Ceres Seq. ID no. 12327274
  misc_feature (1)..(345): Homolog of NCBI NO: 25289457 NR Description: probable beta-glucosidase (EC 3.2.1.21) ATA27
  misc_feature (10)..(345): Homolog of NCBI NO: 1076442 NR Description: beta-glucosidase (EC 3.2.1.21) - rape
  misc_feature (1)..(345): Homolog of NCBI NO: 15222905 NR Description: glycosyl hydrolase family 1,
  misc_feature (1)..(345): Homolog of NCBI NO: 25404995 NR Description: protein T4O12.15 [imported] - Arabidopsis
  misc_feature (10)..(345): Homolog of NCBI NO: 16604493 NR Description: AT3g21370/MHC9_5 [Arabidopsis thaliana]
  misc_feature (10)..(345): Homolog of NCBI NO: 22331243 NR Description: glycosyl hydrolase family 1
  misc_feature (1)..(345): Homolog of NCBI NO: 23397037 NR Description: putative beta-glucosidase [Arabidopsis thaliana]
  misc_feature (1)..(345): Homolog of NCBI NO: 12229686 NR Description: Beta-glucosidase homolog precursor
  misc_feature (1)..(345): Homolog of NCBI NO: 15218992 NR Description: glycosyl hydrolase family 1, beta-glucosidase
  misc_feature (1)..(345): Homolog of NCBI NO: 12043529 NR Description: beta-glucosidase 1 [Arabidopsis thaliana]
MVRFEKVHLVLGLALVLTLVGAPTKAQGPVCGAGLPDKFSRLNFPEGFIWGTATAAFQVEGAVNEGCRGPSMWDTFTKKFPHRCENHNADVAVDFYHRYKEDIQLMKDLNTDAFRLSIAWPRIFPHGRMSKGISKVGVQFYHDLIDELLKNNIIPLVTVFHWDTPQDLEDEYGGFLSGRIVQDFTEYANFTFHEYGHKVKHWITFNEPWVFSRAGYDNGKKAPGRCSPYIPGYGQHCQDGRSGYEAYQVSHNLLLSHAYAVDAFRKCKQCAGGKIGIAHSPAWFEPQDLEHVGGSIERVLDFILGWHLAPTTYGDYPQSMKDRVGHRLPKFTEAEKKLLKGSTDY

SEQ ID NO: 23199 - protein, 274 aa, Arabidopsis thaliana
  peptide (1)..(274): Ceres Seq. ID no. 12327275
  misc_feature (1)..(274): Homolog of NCBI NO: 25289457 NR Description: probable beta-glucosidase (EC 3.2.1.21) ATA27
  misc_feature (1)..(274): Homolog of NCBI NO: 1076442 NR Description: beta-glucosidase (EC 3.2.1.21) - rape
  misc_feature (1)..(274): Homolog of NCBI NO: 15222905 NR Description: glycosyl hydrolase family 1,
  misc_feature (1)..(274): Homolog of NCBI NO: 25404995 NR Description: protein T4O12.15 [imported] - Arabidopsis
  misc_feature (1)..(274): Homolog of NCBI NO: 16604493 NR Description: AT3g21370/MHC9_5 [Arabidopsis thaliana]
  misc_feature (1)..(274): Homolog of NCBI NO: 22331243 NR Description: glycosyl hydrolase family 1
  misc_feature (1)..(274): Homolog of NCBI NO: 23397037 NR Description: putative beta-glucosidase [Arabidopsis thaliana]
  misc_feature (1)..(274): Homolog of NCBI NO: 12229686 NR Description: Beta-glucosidase homolog precursor
  misc_feature (1)..(274): Homolog of NCBI NO: 15218992 NR Description: glycosyl hydrolase family 1, beta-glucosidase
  misc_feature (1)..(274): Homolog of NCBI NO: 12043529 NR Description: beta-glucosidase 1 [Arabidopsis thaliana]
MWDTFTKKFPHRCENHNADVAVDFYHRYKEDIQLMKDLNTDAFRLSIAWPRIFPHGRMSKGISKVGVQFYHDLIDELLKNNIIPLVTVFHWDTPQDLEDEYGGFLSGRIVQDFTEYANFTFHEYGHKVKHWITFNEPWVFSRAGYDNGKKAPGRCSPYIPGYGQHCQDGRSGYEAYQVSHNLLLSHAYAVDAFRKCKQCAGGKIGIAHSPAWFEPQDLEHVGGSIERVLDFILGWHLAPTTYGDYPQSMKDRVGHRLPKFTEAEKKLLKGSTDY

SEQ ID NO: 23200 - protein, 240 aa, Arabidopsis thaliana
  peptide (1)..(240): Ceres Seq. ID no. 12327276
  misc_feature (1)..(240): Homolog of NCBI NO: 25289457 NR Description: probable beta-glucosidase (EC 3.2.1.21) ATA27
  misc_feature (1)..(240): Homolog of NCBI NO: 1076442 NR Description: beta-glucosidase (EC 3.2.1.21) - rape
  misc_feature (1)..(240): Homolog of NCBI NO: 15222905 NR Description: glycosyl hydrolase family 1,
  misc_feature (1)..(240): Homolog of NCBI NO: 25404995 NR Description: protein T4O12.15 [imported] - Arabidopsis
  misc_feature (1)..(240): Homolog of NCBI NO: 16604493 NR Description: AT3g21370/MHC9_5 [Arabidopsis thaliana]
  misc_feature (1)..(240): Homolog of NCBI NO: 22331243 NR Description: glycosyl hydrolase family 1
  misc_feature (1)..(240): Homolog of NCBI NO: 23397037 NR Description: putative beta-glucosidase [Arabidopsis thaliana]
  misc_feature (1)..(240): Homolog of NCBI NO: 12229686 NR Description: Beta-glucosidase homolog precursor
  misc_feature (1)..(240): Homolog of NCBI NO: 15218992 NR Description: glycosyl hydrolase family 1, beta-glucosidase
  misc_feature (1)..(240): Homolog of NCBI NO: 12043529 NR Description: beta-glucosidase 1 [Arabidopsis thaliana]
MKDLNTDAFRLSIAWPRIFPHGRMSKGISKVGVQFYHDLIDELLKNNIIPLVTVFHWDTPQDLEDEYGGFLSGRIVQDFTEYANFTFHEYGHKVKHWITFNEPWVFSRAGYDNGKKAPGRCSPYIPGYGQHCQDGRSGYEAYQVSHNLLLSHAYAVDAFRKCKQCAGGKIGIAHSPAWFEPQDLEHVGGSIERVLDFILGWHLAPTTYGDYPQSMKDRVGHRLPKFTEAEKKLLKGSTDY

SEQ ID NO: 23201 - DNA, 797 bp, Arabidopsis thaliana
  misc_feature (1)..(797): Ceres Seq. ID no. 12372104
  misc_feature: MA Experiment ID: 108462 Result: Down-regulated in Transcription
  misc_feature: MA Experiment 108462 PARAMETER Experiment Name: At_Germinating_Seeds_cDNA_P Parameter: Age (day) Value: 2 vs. 0
  misc_feature: MA Experiment 108462 PARAMETER Experiment Name: At_Germinating_Seeds_cDNA_P Parameter: Tissue Value: Germinating Seeds
  misc_feature: MA Experiment ID: 108463 Result: Down-regulated in Transcription
  misc_feature: MA Experiment 108463 PARAMETER Experiment Name: At_Germinating_Seeds_cDNA_P Parameter: Age (day) Value: 3 vs. 0
  misc_feature: MA Experiment 108463 PARAMETER Experiment Name: At_Germinating_Seeds_cDNA_P Parameter: Tissue Value: Germinating Seeds
  misc_feature: MA Experiment ID: 108576 Result: Up-regulated in Transcription
  misc_feature: MA Experiment 108576 PARAMETER Experiment Name: At_42deg_Heat_cDNA_P Parameter: Temperature (deg C) Value: 42 vs. 22
  misc_feature: MA Experiment 108576 PARAMETER Experiment Name: At_42deg_Heat_cDNA_P Parameter: Timepoint (hr) Value: 1
  misc_feature: MA Experiment 108576 PARAMETER Experiment Name: At_42deg_Heat_cDNA_P Parameter: Tissue Value: Aerial
  misc_feature: MA Experiment ID: 108577 Result: Up-regulated in Transcription
  misc_feature: MA Experiment 108577 PARAMETER Experiment Name: At_42deg_Heat_cDNA_P Parameter: Temperature (deg C) Value: 42 vs. 22
  misc_feature: MA Experiment 108577 PARAMETER Experiment Name: At_42deg_Heat_cDNA_P Parameter: Timepoint (hr) Value: 6
  misc_feature: MA Experiment 108577 PARAMETER Experiment Name: At_42deg_Heat_cDNA_P Parameter: Tissue Value: Aerial
  misc_feature: MA Experiment ID: 20000093 Result: Up-regulated in Transcription
  misc_feature: MA Experiment 20000093 PARAMETER Experiment Name: At_42deg_Heat_cDNA_P Parameter: Temperature (deg C) Value: 42 vs. 22
  misc_feature: MA Experiment 20000093 PARAMETER Experiment Name: At_42deg_Heat_cDNA_P Parameter: Timepoint (hr) Value: 0.5
  misc_feature: MA Experiment 20000093 PARAMETER Experiment Name: At_42deg_Heat_cDNA_P Parameter: Tissue Value: Aerial
  misc_feature: MA Experiment ID: 20000111 Result: Up-regulated in Transcription
  misc_feature: MA Experiment 20000111 PARAMETER Experiment Name: At_42deg_Heat_cDNA_P Parameter: Temperature (deg C) Value: 42 vs. 22
  misc_feature: MA Experiment 20000111 PARAMETER Experiment Name: At_42deg_Heat_cDNA_P Parameter: Timepoint (hr) Value: 6
  misc_feature: MA Experiment 20000111 PARAMETER Experiment Name: At_42deg_Heat_cDNA_P Parameter: Tissue Value: Aerial
  misc_feature: MA Experiment ID: 20000112 Result: Up-regulated in Transcription
  misc_feature: MA Experiment 20000112 PARAMETER Experiment Name: At_42deg_Heat_cDNA_P Parameter: Temperature (deg C) Value: 42 vs. 22
  misc_feature: MA Experiment 20000112 PARAMETER Experiment Name: At_42deg_Heat_cDNA_P Parameter: Timepoint (hr) Value: 2
  misc_feature: MA Experiment 20000112 PARAMETER Experiment Name: At_42deg_Heat_cDNA_P Parameter: Tissue Value: Aerial
  misc_feature: MA Experiment ID: 20000144 Result: Up-regulated in Transcription
  misc_feature: MA Experiment 20000144 PARAMETER Experiment Name: At_42deg_Heat_cDNA_P Parameter: Temperature (deg C) Value: 42 vs. 22
  misc_feature: MA Experiment 20000144 PARAMETER Experiment Name: At_42deg_Heat_cDNA_P Parameter: Timepoint (hr) Value: 1
  misc_feature: MA Experiment 20000144 PARAMETER Experiment Name: At_42deg_Heat_cDNA_P Parameter: Tissue Value: Aerial
  misc_feature: MA Experiment ID: 20000171 Result: Up-regulated in Transcription
  misc_feature: MA Experiment 20000171 PARAMETER Experiment Name: At_42deg_Heat_P Parameter: Age (day) Value: 14
  misc_feature: MA Experiment 20000171 PARAMETER Experiment Name: At_42deg_Heat_P Parameter: Organism Value: A. thaliana
  misc_feature: MA Experiment 20000171 PARAMETER Experiment Name: At_42deg_Heat_P Parameter: Plant Line Value: WS
  misc_feature: MA Experiment 20000171 PARAMETER Experiment Name: At_42deg_Heat_P Parameter: Temperature (deg C) Value: 42 vs. 22
  misc_feature: MA Experiment 20000171 PARAMETER Experiment Name: At_42deg_Heat_P Parameter: Timepoint (hr) Value: 1
  misc_feature: MA Experiment 20000171 PARAMETER Experiment Name: At_42deg_Heat_P Parameter: Tissue Value: Aerial
  misc_feature: MA Experiment ID: 20000173 Result: Up-regulated in Transcription
  misc_feature: MA Experiment 20000173 PARAMETER Experiment Name: At_42deg_Heat_P Parameter: Age (day) Value: 14
  misc_feature: MA Experiment 20000173 PARAMETER Experiment Name: At_42deg_Heat_P Parameter: Organism Value: A. thaliana
  misc_feature: MA Experiment 20000173 PARAMETER Experiment Name: At_42deg_Heat_P Parameter: Plant Line Value: WS
  misc_feature: MA Experiment 20000173 PARAMETER Experiment Name: At_42deg_Heat_P Parameter: Temperature (deg C) Value: 42 vs. 22
  misc_feature: MA Experiment 20000173 PARAMETER Experiment Name: At_42deg_Heat_P Parameter: Timepoint (hr) Value: 6
  misc_feature: MA Experiment 20000173 PARAMETER Experiment Name: At_42deg_Heat_P Parameter: Tissue Value: Aerial
  misc_feature: MA Experiment ID: 20000214 Result: Down-regulated in Transcription
  misc_feature: MA Experiment 20000214 PARAMETER Experiment Name: At_4deg_Cold_P Parameter: Timepoint (hr) Value: 6
  misc_feature: MA Experiment ID: 20000794 Result: Up-regulated in Transcription
  misc_feature: MA Experiment 20000794 PARAMETER Experiment Name: At_Petals_P Parameter: Age (day) Value: 23-25 days
  misc_feature: MA Experiment 20000794 PARAMETER Experiment Name: At_Petals_P Parameter: Plant Line Value: WS
  misc_feature: MA Experiment 20000794 PARAMETER Experiment Name: At_Petals_P Parameter: Tissue Value: Petals vs. Whole plant
  misc_feature: MA Experiment ID: 20001554 Result: Up-regulated in Transcription
  misc_feature: MA Experiment 20001554 PARAMETER Experiment Name: At_Drought_Soil_Dry_P Parameter: Age (day) Value: 21
  misc_feature: MA Experiment 20001554 PARAMETER Experiment Name: At_Drought_Soil_Dry_P Parameter: Organism Value: A. thaliana
  misc_feature: MA Experiment 20001554 PARAMETER Experiment Name: At_Drought_Soil_Dry_P Parameter: Plant Line Value: WS
  misc_feature: MA Experiment 20001554 PARAMETER Experiment Name: At_Drought_Soil_Dry_P Parameter: Post Timepoint (hr) Value: None
  misc_feature: MA Experiment 20001554 PARAMETER Experiment Name: At_Drought_Soil_Dry_P Parameter: Post-Treatment Value: None
  misc_feature: MA Experiment 20001554 PARAMETER Experiment Name: At_Drought_Soil_Dry_P Parameter: Timepoint (day) Value: 7
  misc_feature: MA Experiment 20001554 PARAMETER Experiment Name: At_Drought_Soil_Dry_P Parameter: Treatment Value: Drought vs. No Drought
  misc_feature: MA Experiment ID: 20001555 Result: Up-regulated in Transcription
  misc_feature: MA Experiment 20001555 PARAMETER Experiment Name: At_Drought_Soil_Dry_P Parameter: Age (day) Value: 24
  misc_feature: MA Experiment 20001555 PARAMETER Experiment Name: At_Drought_Soil_Dry_P Parameter: Organism Value: A. thaliana
  misc_feature: MA Experiment 20001555 PARAMETER Experiment Name: At_Drought_Soil_Dry_P Parameter: Plant Line Value: WS
  misc_feature: MA Experiment 20001555 PARAMETER Experiment Name: At_Drought_Soil_Dry_P Parameter: Post Timepoint (hr) Value: None
  misc_feature: MA Experiment 20001555 PARAMETER Experiment Name: At_Drought_Soil_Dry_P Parameter: Post-Treatment Value: None
  misc_feature: MA Experiment 20001555 PARAMETER Experiment Name: At_Drought_Soil_Dry_P Parameter: Timepoint (day) Value: 10
  misc_feature: MA Experiment 20001555 PARAMETER Experiment Name: At_Drought_Soil_Dry_P Parameter: Treatment Value: Drought vs. No Drought
atccttttatctcattctggaaacttcttaccataacagaaaataaacaaatctcattccggaaaacgctcataaattgtccgaaagccctaaaaatctgagtctcgcattaagtccaaacactttcatttgtctcctttcgtcaactccacagagatctcctcatggctccaattgctgtcggcgatgtcgtaccagacggaactatctccttcttcgatgagaatgatcaacttcagaccgcctccgttcactctctcgccgccgaaaaaaagtcattctctttggtgttcctggtgctttcactcccacttgcagcatgaagcatgttcctgggttcattgagaaagcagaggagctgaagtcaaagggtgttgatgagatcatttgctttagcgtgaacgatccgtttgtgatgaaagcatgggggaaaacataccaagagaacaaacatgtgaagtttgtagctgatgggtctggagaatacacacaccttctcggacttgagcttgaccttaaagacaagggtcttggtgttaggtcaaggagatttgctctgttacttgatgatctcaaagtgactgtagccaatgtcgaatctggtggcgaattcacagtttccagcgccgatgatatcctcaaggctctctaagaaatgtaccacttgtgttgtctatgtaaaccgctgtatgtgtagtagaggattctatagcttgttctcagacattaaccaaggttgtaataaagcggtttcattgtgacttgtttggcataacaaagtatttggttttgttgtt

SEQ ID NO: 23202 - protein, 110 aa, Arabidopsis thaliana
  peptide (1)..(110): Ceres Seq. ID no. 12372105
  misc_feature (1)..(108): Pfam Name: AhpC/TSA family Pfam Description: AhpC/TSA family
  misc_feature (1)..(110): Homolog of NCBI NO: 4928472 NR Description: type 2 peroxiredoxin [Brassica rapa subsp.
  misc_feature (1)..(110): Homolog of NCBI NO: 3913633 NR Description: Hypothetical protein At1g60740
  misc_feature (1)..(110): Homolog of NCBI NO: 30841938 NR Description: thioredoxin peroxidase 1 [Lycopersicon esculentum]
  misc_feature (1)..(110): Homolog of NCBI NO: 21553913 NR Description: peroxiredoxin, putative [Arabidopsis thaliana]
  misc_feature (1)..(110): Homolog of NCBI NO: 21593881 NR Description: type 2 peroxiredoxin, putative [Arabidopsis
  misc_feature (1)..(110): Homolog of NCBI NO: 18406870 NR Description: peroxiredoxin, putative
  misc_feature (1)..(110): Homolog of NCBI NO: 15218876 NR Description: type 2 peroxiredoxin, putative
  misc_feature (1)..(110): Homolog of NCBI NO: 4704732 NR Description: peroxiredoxin TPx2 [Arabidopsis thaliana]
  misc_feature (1)..(110): Homolog of NCBI NO: 18654477 NR Description: thioredoxin peroxidase [Capsicum annuum]
  misc_feature (1)..(110): Homolog of NCBI NO: 15218877 NR Description: type 2 peroxiredoxin, putative
MKHVPGFIEKAEELKSKGVDEIICFSVNDPFVMKAWGKTYQENKHVKFVADGSGEYTHLLGLELDLKDKGLGVRSRRFALLLDDLKVTVANVESGGEFTVSSADDILKAL

SEQ ID NO: 23203 - protein, 78 aa, Arabidopsis thaliana
  peptide (1)..(78): Ceres Seq. ID no. 12372106
  misc_feature (1)..(76): Pfam Name: AhpC/TSA family Pfam Description: AhpC/TSA family
  misc_feature (1)..(78): Homolog of NCBI NO: 3913633 NR Description: Hypothetical protein At1g60740
  misc_feature (1)..(78): Homolog of NCBI NO: 18654477 NR Description: thioredoxin peroxidase [Capsicum annuum]
  misc_feature (1)..(78): Homolog of NCBI NO: 30841938 NR Description: thioredoxin peroxidase 1 [Lycopersicon esculentum]
  misc_feature (1)..(78): Homolog of NCBI NO: 4704732 NR Description: peroxiredoxin TPx2 [Arabidopsis thaliana]
  misc_feature (1)..(78): Homolog of NCBI NO: 21553913 NR Description: peroxiredoxin, putative [Arabidopsis thaliana]
  misc_feature (1)..(78): Homolog of NCBI NO: 15218876 NR Description: type 2 peroxiredoxin, putative
  misc_feature (1)..(78): Homolog of NCBI NO: 21593881 NR Description: type 2 peroxiredoxin, putative [Arabidopsis
  misc_feature (1)..(78): Homolog of NCBI NO: 18406870 NR Description: peroxiredoxin, putative
  misc_feature (1)..(78): Homolog of NCBI NO: 4928472 NR Description: type 2 peroxiredoxin [Brassica rapa subsp.
  misc_feature (1)..(78): Homolog of NCBI NO: 15218877 NR Description: type 2 peroxiredoxin, putative
MKAWGKTYQENKHVKFVADGSGEYTHLLGLELDLKDKGLGVRSRRFALLLDDLKVTVANVESGGEFTVSSADDILKAL

SEQ ID NO: 23204 - protein, 56 aa, Arabidopsis thaliana
  peptide (1)..(56): Ceres Seq. ID no. 12372107
MSNLVANSQFPAPMISSRLSKKCTTCVVYVNRCMCSRGFYSLFSDINQGCNKAVSL

SEQ ID NO: 23205 - DNA, 841 bp, Arabidopsis thaliana
  misc_feature (1)..(841): Ceres Seq. ID no. 12397006
  misc_feature: MA Experiment ID: 108435 Result: Down-regulated in Transcription
  misc_feature: MA Experiment 108435 PARAMETER Experiment Name: At_stm_Mutants_cDNA_P Parameter: Plant Line Value: wt Landsburg vs stm
  misc_feature: MA Experiment 108435 PARAMETER Experiment Name: At_stm_Mutants_cDNA_P Parameter: Tissue Value: Shoot Apical Meristem Region
  misc_feature: MA Experiment ID: 108461 Result: Up-regulated in Transcription
  misc_feature: MA Experiment 108461 PARAMETER Experiment Name: At_Germinating_Seeds_cDNA_P Parameter: Age (day) Value: 1 vs. 0
  misc_feature: MA Experiment 108461 PARAMETER Experiment Name: At_Germinating_Seeds_cDNA_P Parameter: Tissue Value: Germinating Seeds
  misc_feature: MA Experiment ID: 108462 Result: Up-regulated in Transcription
  misc_feature: MA Experiment 108462 PARAMETER Experiment Name: At_Germinating_Seeds_cDNA_P Parameter: Age (day) Value: 2 vs. 0
  misc_feature: MA Experiment 108462 PARAMETER Experiment Name: At_Germinating_Seeds_cDNA_P Parameter: Tissue Value: Germinating Seeds
  misc_feature: MA Experiment ID: 108463 Result: Up-regulated in Transcription
  misc_feature: MA Experiment 108463 PARAMETER Experiment Name: At_Germinating_Seeds_cDNA_P Parameter: Age (day) Value: 3 vs. 0
  misc_feature: MA Experiment 108463 PARAMETER Experiment Name: At_Germinating_Seeds_cDNA_P Parameter: Tissue Value: Germinating Seeds
  misc_feature: MA Experiment ID: 108464 Result: Up-regulated in Transcription
  misc_feature: MA Experiment 108464 PARAMETER Experiment Name: At_Germinating_Seeds_cDNA_P Parameter: Age (day) Value: 4 vs. 0
  misc_feature: MA Experiment 108464 PARAMETER Experiment Name: At_Germinating_Seeds_cDNA_P Parameter: Tissue Value: Germinating Seeds
  misc_feature: MA Experiment ID: 108473 Result: Down-regulated in Transcription
  misc_feature: MA Experiment 108473 PARAMETER Experiment Name: At_Drought_Flowers_cDNA_P Parameter: Timepoint (hr) Value: 7 d
  misc_feature: MA Experiment 108473 PARAMETER Experiment Name: At_Drought_Flowers_cDNA_P Parameter: Tissue Value: Flower
  misc_feature: MA Experiment 108473 PARAMETER Experiment Name: At_Drought_Flowers_cDNA_P Parameter: Treatment Value: Drought vs. No Drought
  misc_feature: MA Experiment ID: 108488 Result: Up-regulated in Transcription
  misc_feature: MA Experiment ID: 108501 Result: Down-regulated in Transcription
  misc_feature: MA Experiment 108501 PARAMETER Experiment Name: At_ap2_floral_buds_cDNA_P Parameter: Plant Line Value: ap2 (Ler.)
  misc_feature: MA Experiment 108501 PARAMETER Experiment Name: At_ap2_floral_buds_cDNA_P Parameter: Tissue Value: Closed Flower
  misc_feature: MA Experiment ID: 108561 Result: Down-regulated in Transcription
  misc_feature: MA Experiment 108561 PARAMETER Experiment Name: At_100uM_ABA_cDNA_P Parameter: Timepoint (hr) Value: 6
  misc_feature: MA Experiment 108561 PARAMETER Experiment Name: At_100uM_ABA_cDNA_P Parameter: Tissue Value: Aerial
  misc_feature: MA Experiment 108561 PARAMETER Experiment Name: At_100uM_ABA_cDNA_P Parameter: Treatment Value: 100uM ABA vs. No Treatment
  misc_feature: MA Experiment ID: 108572 Result: Down-regulated in Transcription
  misc_feature: MA Experiment 108572 PARAMETER Experiment Name: At_Drought_cDNA_P Parameter: Timepoint (hr) Value: 1
  misc_feature: MA Experiment 108572 PARAMETER Experiment Name: At_Drought_cDNA_P Parameter: Tissue Value: Aerial
  misc_feature: MA Experiment 108572 PARAMETER Experiment Name: At_Drought_cDNA_P Parameter: Treatment Value: Drought vs. No Drought
  misc_feature: MA Experiment ID: 108573 Result: Down-regulated in Transcription
  misc_feature: MA Experiment 108573 PARAMETER Experiment Name: At_Drought_cDNA_P Parameter: Timepoint (hr) Value: 6
  misc_feature: MA Experiment 108573 PARAMETER Experiment Name: At_Drought_cDNA_P Parameter: Tissue Value: Aerial
  misc_feature: MA Experiment 108573 PARAMETER Experiment Name: At_Drought_cDNA_P Parameter: Treatment Value: Drought vs. No Drought
  misc_feature: MA Experiment ID: 108576 Result: Down-regulated in Transcription
  misc_feature: MA Experiment 108576 PARAMETER Experiment Name: At_42deg_Heat_cDNA_P Parameter: Temperature (deg C) Value: 42 vs. 22
  misc_feature: MA Experiment 108576 PARAMETER Experiment Name: At_42deg_Heat_cDNA_P Parameter: Timepoint (hr) Value: 1
  misc_feature: MA Experiment 108576 PARAMETER Experiment Name: At_42deg_Heat_cDNA_P Parameter: Tissue Value: Aerial
  misc_feature: MA Experiment ID: 108577 Result: Down-regulated in Transcription
  misc_feature: MA Experiment 108577 PARAMETER Experiment Name: At_42deg_Heat_cDNA_P Parameter: Temperature (deg C) Value: 42 vs. 22
  misc_feature: MA Experiment 108577 PARAMETER Experiment Name: At_42deg_Heat_cDNA_P Parameter: Timepoint (hr) Value: 6
  misc_feature: MA Experiment 108577 PARAMETER Experiment Name: At_42deg_Heat_cDNA_P Parameter: Tissue Value: Aerial
  misc_feature: MA Experiment ID: 108595 Result: Down-regulated in Transcription
  misc_feature: MA Experiment 108595 PARAMETER Experiment Name: At_Ler-pi_Ovule_cDNA_P Parameter: Plant Line Value: null
  misc_feature: MA Experiment ID: 108605 Result: Down-regulated in Transcription
  misc_feature: MA Experiment 108605 PARAMETER Experiment Name: At_100uM_ABA_cDNA_P Parameter: Timepoint (hr) Value: 6
  misc_feature: MA Experiment 108605 PARAMETER Experiment Name: At_100uM_ABA_cDNA_P Parameter: Tissue Value: Aerial
  misc_feature: MA Experiment 108605 PARAMETER Experiment Name: At_100uM_ABA_cDNA_P Parameter: Treatment Value: 100uM ABA vs. No Treatment
  misc_feature: MA Experiment ID: 20000069 Result: Down-regulated in Transcription
  misc_feature: MA Experiment 20000069 PARAMETER Experiment Name: At_100uM_ABA_Mutants_cDNA_P Parameter: Plant Line Value: CS23
  misc_feature: MA Experiment 20000069 PARAMETER Experiment Name: At_100uM_ABA_Mutants_cDNA_P Parameter: Timepoint (hr) Value: 6
  misc_feature: MA Experiment 20000069 PARAMETER Experiment Name: At_100uM_ABA_Mutants_cDNA_P Parameter: Tissue Value: Aerial
  misc_feature: MA Experiment 20000069 PARAMETER Experiment Name: At_100uM_ABA_Mutants_cDNA_P Parameter: Treatment Value: 100uM ABA vs. No Treatment
  misc_feature: MA Experiment ID: 20000070 Result: Down-regulated in Transcription
  misc_feature: MA Experiment 20000070 PARAMETER Experiment Name: At_100uM_ABA_Mutants_cDNA_P Parameter: Plant Line Value: CS24
  misc_feature: MA Experiment 20000070 PARAMETER Experiment Name: At_100uM_ABA_Mutants_cDNA_P Parameter: Timepoint (hr) Value: 6
  misc_feature: MA Experiment 20000070 PARAMETER Experiment Name: At_100uM_ABA_Mutants_cDNA_P Parameter: Tissue Value: Aerial
  misc_feature: MA Experiment 20000070 PARAMETER Experiment Name: At_100uM_ABA_Mutants_cDNA_P Parameter: Treatment Value: 100uM ABA vs. No Treatment
  misc_feature: MA Experiment ID: 20000087 Result: Down-regulated in Transcription
  misc_feature: MA Experiment 20000087 PARAMETER Experiment Name: At_100uM_ABA_Mutants_cDNA_P Parameter: Plant Line Value: WS
  misc_feature: MA Experiment 20000087 PARAMETER Experiment Name: At_100uM_ABA_Mutants_cDNA_P Parameter: Timepoint (hr) Value: 6
  misc_feature: MA Experiment 20000087 PARAMETER Experiment Name: At_100uM_ABA_Mutants_cDNA_P Parameter: Tissue Value: Aerial
  misc_feature: MA Experiment 20000087 PARAMETER Experiment Name: At_100uM_ABA_Mutants_cDNA_P Parameter: Treatment Value: 100uM ABA vs. No Treatment
  misc_feature: MA Experiment ID: 20000088 Result: Down-regulated in Transcription
  misc_feature: MA Experiment 20000088 PARAMETER Experiment Name: At_100uM_ABA_Mutants_cDNA_P Parameter: Plant Line Value: Landsberg
  misc_feature: MA Experiment 20000088 PARAMETER Experiment Name: At_100uM_ABA_Mutants_cDNA_P Parameter: Timepoint (hr) Value: 6
  misc_feature: MA Experiment 20000088 PARAMETER Experiment Name: At_100uM_ABA_Mutants_cDNA_P Parameter: Tissue Value: Aerial
  misc_feature: MA Experiment 20000088 PARAMETER Experiment Name: At_100uM_ABA_Mutants_cDNA_P Parameter: Treatment Value: 100uM ABA vs. No Treatment
  misc_feature: MA Experiment ID: 20000093 Result: Down-regulated in Transcription
  misc_feature: MA Experiment 20000093 PARAMETER Experiment Name: At_42deg_Heat_cDNA_P Parameter: Temperature (deg C) Value: 42 vs. 22
  misc_feature: MA Experiment 20000093 PARAMETER Experiment Name: At_42deg_Heat_cDNA_P Parameter: Timepoint (hr) Value: 0.5
  misc_feature: MA Experiment 20000093 PARAMETER Experiment Name: At_42deg_Heat_cDNA_P Parameter: Tissue Value: Aerial
  misc_feature: MA Experiment ID: 20000112 Result: Down-regulated in Transcription
  misc_feature: MA Experiment 20000112 PARAMETER Experiment Name: At_42deg_Heat_cDNA_P Parameter: Temperature (deg C) Value: 42 vs. 22
  misc_feature: MA Experiment 20000112 PARAMETER Experiment Name: At_42deg_Heat_cDNA_P Parameter: Timepoint (hr) Value: 2
  misc_feature: MA Experiment 20000112 PARAMETER Experiment Name: At_42deg_Heat_cDNA_P Parameter: Tissue Value: Aerial
  misc_feature: MA Experiment ID: 20000113 Result: Down-regulated in Transcription
  misc_feature: MA Experiment 20000113 PARAMETER Experiment Name: At_42deg_Heat_cDNA_P Parameter: Temperature (deg C) Value: 42 vs. 22
  misc_feature: MA Experiment 20000113 PARAMETER Experiment Name: At_42deg_Heat_cDNA_P Parameter: Timepoint (hr) Value: 8
  misc_feature: MA Experiment 20000113 PARAMETER Experiment Name: At_42deg_Heat_cDNA_P Parameter: Tissue Value: Aerial
  misc_feature: MA Experiment ID: 20000117 Result: Down-regulated in Transcription
  misc_feature: MA Experiment 20000117 PARAMETER Experiment Name: At_100uM_ABA_Mutants_cDNA_P Parameter: Plant Line Value: Columbia
  misc_feature: MA Experiment 20000117 PARAMETER Experiment Name: At_100uM_ABA_Mutants_cDNA_P Parameter: Timepoint (hr) Value: 6
  misc_feature: MA Experiment 20000117 PARAMETER Experiment Name: At_100uM_ABA_Mutants_cDNA_P Parameter: Tissue Value: Aerial
  misc_feature: MA Experiment 20000117 PARAMETER Experiment Name: At_100uM_ABA_Mutants_cDNA_P Parameter: Treatment Value: 100uM ABA vs. No Treatment
  misc_feature: MA Experiment ID: 20000173 Result: Down-regulated in Transcription
  misc_feature: MA Experiment 20000173 PARAMETER Experiment Name: At_42deg_Heat_P Parameter: Age (day) Value: 14
  misc_feature: MA Experiment 20000173 PARAMETER Experiment Name: At_42deg_Heat_P Parameter: Organism Value: A. thaliana
  misc_feature: MA Experiment 20000173 PARAMETER Experiment Name: At_42deg_Heat_P Parameter: Plant Line Value: WS
  misc_feature: MA Experiment 20000173 PARAMETER Experiment Name: At_42deg_Heat_P Parameter: Temperature (deg C) Value: 42 vs. 22
  misc_feature: MA Experiment 20000173 PARAMETER Experiment Name: At_42deg_Heat_P Parameter: Timepoint (hr) Value: 6
  misc_feature: MA Experiment 20000173 PARAMETER Experiment Name: At_42deg_Heat_P Parameter: Tissue Value: Aerial
  misc_feature: MA Experiment ID: 20000179 Result: Down-regulated in Transcription
  misc_feature: MA Experiment 20000179 PARAMETER Experiment Name: At_Germinating_Seeds_P Parameter: Age (hr) Value: 6 vs. 0
  misc_feature: MA Experiment 20000179 PARAMETER Experiment Name: At_Germinating_Seeds_P Parameter: Tissue Value: Germinating Seeds
  misc_feature: MA Experiment ID: 20000185 Result: Down-regulated in Transcription
  misc_feature: MA Experiment 20000185 PARAMETER Experiment Name: At_Roots__P Parameter: Age (day) Value: 7 vs. 21
  misc_feature: MA Experiment 20000185 PARAMETER Experiment Name: At_Roots__P Parameter: Organism Value: A. thaliana
  misc_feature: MA Experiment 20000185 PARAMETER Experiment Name: At_Roots__P Parameter: Tissue Value: Roots vs. Whole Plant
  misc_feature: MA Experiment ID: 20000264 Result: Down-regulated in Transcription
  misc_feature: MA Experiment 20000264 PARAMETER Experiment Name: At_Open_Flower_P Parameter: Age (day) Value: 21
  misc_feature: MA Experiment 20000264 PARAMETER Experiment Name: At_Open_Flower_P Parameter: Plant Line Value: WS
  misc_feature: MA Experiment 20000264 PARAMETER Experiment Name: At_Open_Flower_P Parameter: Tissue Value: Open Flower vs. Whole Plant
  misc_feature: MA Experiment ID: 20000268 Result: Down-regulated in Transcription
  misc_feature: MA Experiment 20000268 PARAMETER Experiment Name: At_100mM_NaCl__P Parameter: Age (day) Value: 14
  misc_feature: MA Experiment 20000268 PARAMETER Experiment Name: At_100mM_NaCl__P Parameter: Organism Value: A. thaliana
  misc_feature: MA Experiment 20000268 PARAMETER Experiment Name: At_100mM_NaCl__P Parameter: Plant Line Value: WS
  misc_feature: MA Experiment 20000268 PARAMETER Experiment Name: At_100mM_NaCl__P Parameter: Timepoint (hr) Value: 6
  misc_feature: MA Experiment 20000268 PARAMETER Experiment Name: At_100mM_NaCl__P Parameter: Tissue Value: Whole Plant
  misc_feature: MA Experiment 20000268 PARAMETER Experiment Name: At_100mM_NaCl__P Parameter: Treatment Value: 100mM NaCl vs. No Treatment
  misc_feature: MA Experiment ID: 20000286 Result: Down-regulated in Transcription
  misc_feature: MA Experiment 20000286 PARAMETER Experiment Name: At_Open_Flower_P Parameter: Age (day) Value: 21
  misc_feature: MA Experiment 20000286 PARAMETER Experiment Name: At_Open_Flower_P Parameter: Plant Line Value: WS
  misc_feature: MA Experiment 20000286 PARAMETER Experiment Name: At_Open_Flower_P Parameter: Tissue Value: Half Open vs. Whole Plant
  misc_feature: MA Experiment ID: 20000436 Result: Down-regulated in Transcription
  misc_feature: MA Experiment 20000436 PARAMETER Experiment Name: At_Drought_P Parameter: Age (day) Value: 7
  misc_feature: MA Experiment 20000436 PARAMETER Experiment Name: At_Drought_P Parameter: Organism Value: A. thaliana
  misc_feature: MA Experiment 20000436 PARAMETER Experiment Name: At_Drought_P Parameter: Plant Line Value: WS
  misc_feature: MA Experiment 20000436 PARAMETER Experiment Name: At_Drought_P Parameter: Timepoint (hr) Value: 12
  misc_feature: MA Experiment 20000436 PARAMETER Experiment Name: At_Drought_P Parameter: Tissue Value: Whole Plant
  misc_feature: MA Experiment 20000436 PARAMETER Experiment Name: At_Drought_P Parameter: Treatment Value: Drought vs. No Drought
  misc_feature: MA Experiment ID: 20000437 Result: Down-regulated in Transcription
  misc_feature: MA Experiment 20000437 PARAMETER Experiment Name: At_Drought_P Parameter: Age (day) Value: 8
  misc_feature: MA Experiment 20000437 PARAMETER Experiment Name: At_Drought_P Parameter: Organism Value: A. thaliana
  misc_feature: MA Experiment 20000437 PARAMETER Experiment Name: At_Drought_P Parameter: Plant Line Value: WS
  misc_feature: MA Experiment 20000437 PARAMETER Experiment Name: At_Drought_P Parameter: Timepoint (hr) Value: 24
  misc_feature: MA Experiment 20000437 PARAMETER Experiment Name: At_Drought_P Parameter: Tissue Value: Whole Plant
  misc_feature: MA Experiment 20000437 PARAMETER Experiment Name: At_Drought_P Parameter: Treatment Value: Drought vs. No Drought
  misc_feature: MA Experiment ID: 20000439 Result: Down-regulated in Transcription
  misc_feature: MA Experiment 20000439 PARAMETER Experiment Name: At_Roots__P Parameter: Age (day) Value: 14 vs. 21
  misc_feature: MA Experiment 20000439 PARAMETER Experiment Name: At_Roots__P Parameter: Organism Value: A. thaliana
  misc_feature: MA Experiment 20000439 PARAMETER Experiment Name: At_Roots__P Parameter: Tissue Value: Roots vs. Whole Plant
  misc_feature: MA Experiment ID: 20000794 Result: Down-regulated in Transcription
  misc_feature: MA Experiment 20000794 PARAMETER Experiment Name: At_Petals_P Parameter: Age (day) Value: 23-25 days
  misc_feature: MA Experiment 20000794 PARAMETER Experiment Name: At_Petals_P Parameter: Plant Line Value: WS
  misc_feature: MA Experiment 20000794 PARAMETER Experiment Name: At_Petals_P Parameter: Tissue Value: Petals vs. Whole plant
  misc_feature: MA Experiment ID: 20001554 Result: Down-regulated in Transcription
  misc_feature: MA Experiment 20001554 PARAMETER Experiment Name: At_Drought_Soil_Dry_P Parameter: Age (day) Value: 21
  misc_feature: MA Experiment 20001554 PARAMETER Experiment Name: At_Drought_Soil_Dry_P Parameter: Organism Value: A. thaliana
  misc_feature: MA Experiment 20001554 PARAMETER Experiment Name: At_Drought_Soil_Dry_P Parameter: Plant Line Value: WS
  misc_feature: MA Experiment 20001554 PARAMETER Experiment Name: At_Drought_Soil_Dry_P Parameter: Post Timepoint (hr) Value: None
  misc_feature: MA Experiment 20001554 PARAMETER Experiment Name: At_Drought_Soil_Dry_P Parameter: Post-Treatment Value: None
  misc_feature: MA Experiment 20001554 PARAMETER Experiment Name: At_Drought_Soil_Dry_P Parameter: Timepoint (day) Value: 7
  misc_feature: MA Experiment 20001554 PARAMETER Experiment Name: At_Drought_Soil_Dry_P Parameter: Treatment Value: Drought vs. No Drought
  misc_feature: MA Experiment ID: 20001555 Result: Down-regulated in Transcription
  misc_feature: MA Experiment 20001555 PARAMETER Experiment Name: At_Drought_Soil_Dry_P Parameter: Age (day) Value: 24
  misc_feature: MA Experiment 20001555 PARAMETER Experiment Name: At_Drought_Soil_Dry_P Parameter: Organism Value: A. thaliana
  misc_feature: MA Experiment 20001555 PARAMETER Experiment Name: At_Drought_Soil_Dry_P Parameter: Plant Line Value: WS
  misc_feature: MA Experiment 20001555 PARAMETER Experiment Name: At_Drought_Soil_Dry_P Parameter: Post Timepoint (hr) Value: None
  misc_feature: MA Experiment 20001555 PARAMETER Experiment Name: At_Drought_Soil_Dry_P Parameter: Post-Treatment Value: None
  misc_feature: MA Experiment 20001555 PARAMETER Experiment Name: At_Drought_Soil_Dry_P Parameter: Timepoint (day) Value: 10
  misc_feature: MA Experiment 20001555 PARAMETER Experiment Name: At_Drought_Soil_Dry_P Parameter: Treatment Value: Drought vs. No Drought
  misc_feature: MA Experiment ID: 20001556 Result: Down-regulated in Transcription
  misc_feature: MA Experiment 20001556 PARAMETER Experiment Name: At_Drought_Soil_Dry_P Parameter: Age (day) Value: 26
  misc_feature: MA Experiment 20001556 PARAMETER Experiment Name: At_Drought_Soil_Dry_P Parameter: Organism Value: A. thaliana
  misc_feature: MA Experiment 20001556 PARAMETER Experiment Name: At_Drought_Soil_Dry_P Parameter: Plant Line Value: WS
  misc_feature: MA Experiment 20001556 PARAMETER Experiment Name: At_Drought_Soil_Dry_P Parameter: Post Timepoint (hr) Value: None
  misc_feature: MA Experiment 20001556 PARAMETER Experiment Name: At_Drought_Soil_Dry_P Parameter: Post-Treatment Value: None
  misc_feature: MA Experiment 20001556 PARAMETER Experiment Name: At_Drought_Soil_Dry_P Parameter: Timepoint (day) Value: 12
  misc_feature: MA Experiment 20001556 PARAMETER Experiment Name: At_Drought_Soil_Dry_P Parameter: Treatment Value: Drought vs. No Drought
  misc_feature: MA Experiment ID: 20001557 Result: Up-regulated in Transcription
  misc_feature: MA Experiment 20001557 PARAMETER Experiment Name: At_Drought_Soil_Dry_P Parameter: Age (day) Value: 27
  misc_feature: MA Experiment 20001557 PARAMETER Experiment Name: At_Drought_Soil_Dry_P Parameter: Organism Value: A. thaliana
  misc_feature: MA Experiment 20001557 PARAMETER Experiment Name: At_Drought_Soil_Dry_P Parameter: Plant Line Value: WS
  misc_feature: MA Experiment 20001557 PARAMETER Experiment Name: At_Drought_Soil_Dry_P Parameter: Post Timepoint (hr) Value: 3
  misc_feature: MA Experiment 20001557 PARAMETER Experiment Name: At_Drought_Soil_Dry_P Parameter: Post-Treatment Value: Re-Water vs. No Drought
  misc_feature: MA Experiment 20001557 PARAMETER Experiment Name: At_Drought_Soil_Dry_P Parameter: Timepoint (day) Value: 13
  misc_feature: MA Experiment 20001557 PARAMETER Experiment Name: At_Drought_Soil_Dry_P Parameter: Treatment Value: Drought vs. No Drought
  misc_feature: MA Experiment ID: 20001756 Result: Up-regulated in Transcription
  misc_feature: MA Experiment 20001756 PARAMETER Experiment Name: At_50mM_NH4NO3_L-to-H_P Parameter: Timepoint (hr) Value: 4
  misc_feature: MA Experiment 20001756 PARAMETER Experiment Name: At_50mM_NH4NO3_L-to-H_P Parameter: Tissue Value: Leaf
  misc_feature: MA Experiment 20001756 PARAMETER Experiment Name: At_50mM_NH4NO3_L-to-H_P Parameter: Treatment Value: 50mM NH4NO3 vs 100mM Mannitol
  misc_feature: MA Experiment ID: 20001757 Result: Up-regulated in Transcription
  misc_feature: MA Experiment 20001757 PARAMETER Experiment Name: At_50mM_NH4NO3_L-to-H_P Parameter: Timepoint (hr) Value: 6
  misc_feature: MA Experiment 20001757 PARAMETER Experiment Name: At_50mM_NH4NO3_L-to-H_P Parameter: Tissue Value: Leaf
  misc_feature: MA Experiment 20001757 PARAMETER Experiment Name: At_50mM_NH4NO3_L-to-H_P Parameter: Treatment Value: 50mM NH4NO3 vs 100mM Mannitol
  misc_feature: MA Experiment ID: 20001904 Result: Down-regulated in Transcription
  misc_feature: MA Experiment 20001904 PARAMETER Experiment Name: At_Drought_Reproduction_P Parameter: Age (day) Value: 37
  misc_feature: MA Experiment 20001904 PARAMETER Experiment Name: At_Drought_Reproduction_P Parameter: Organism Value: A. thaliana
  misc_feature: MA Experiment 20001904 PARAMETER Experiment Name: At_Drought_Reproduction_P Parameter: Plant Line Value: WS
  misc_feature: MA Experiment 20001904 PARAMETER Experiment Name: At_Drought_Reproduction_P Parameter: Timepoint (day) Value: 7
  misc_feature: MA Experiment 20001904 PARAMETER Experiment Name: At_Drought_Reproduction_P Parameter: Tissue Value: Rosettes
  misc_feature: MA Experiment 20001904 PARAMETER Experiment Name: At_Drought_Reproduction_P Parameter: Treatment Value: Drought vs. No Drought
  misc_feature: MA Experiment ID: 20001906 Result: Down-regulated in Transcription
  misc_feature: MA Experiment 20001906 PARAMETER Experiment Name: At_Drought_Reproduction_P Parameter: Age (day) Value: 35
  misc_feature: MA Experiment 20001906 PARAMETER Experiment Name: At_Drought_Reproduction_P Parameter: Organism Value: A. thaliana
  misc_feature: MA Experiment 20001906 PARAMETER Experiment Name: At_Drought_Reproduction_P Parameter: Plant Line Value: WS
  misc_feature: MA Experiment 20001906 PARAMETER Experiment Name: At_Drought_Reproduction_P Parameter: Timepoint (day) Value: 5
  misc_feature: MA Experiment 20001906 PARAMETER Experiment Name: At_Drought_Reproduction_P Parameter: Tissue Value: Siliques
  misc_feature: MA Experiment 20001906 PARAMETER Experiment Name: At_Drought_Reproduction_P Parameter: Treatment Value: Drought vs. No Drought
agggaaaaagaaaagaaaagtagagtactatcttcctcttaaaatgttgcgtactatcttcctcttatctcttctctttgctctatccaatgcctctgttcaagatttctgtgtcgcaaacctgaaacgcgctgaaacccctgcgggttacccttgcattcgtcccattcatgtcaaagctacagactttgtcttctctggcttaggcactcctggaaacactacaaacatcatcaacgccgctgtcacacccgctttcgcagctcagttcccgggtctgaacggtctaggcctctctacagctagacttgacttagctcctaaaggtgtgatcccaatgcacactcaccctggtgcctctgaggttctctttgtccttactggctccattaccgctgggtttgtctcctcggcaaacgctgtctacgtgcagacactcaaaccaggacaggtcatggttttcccacagggcttgcttcatttccagatcaacgcgggaaaatcctctgcttcagccgttgtcactttcaacagcgctaatccgggtctgcagattctcgacttcgcactctttgctaacagtcttcccactgaactcgtcgtgggtactactttccttgacgccactacagtcaagaagctaaagggtgttcttggaggaactggctaaaaaaagacttaggactactccttgactaaaacaccaaaacctgtttcttcatctttttttctctttaattgattcttgtcttctctgttttgtgtgccttgtaattcttcaaaacctgtcaaaattgttacattgtatgtgagttttttcaattaagatcctgagttggtc

SEQ ID NO: 23206 - protein, 222 aa, Arabidopsis thaliana
  peptide (1)..(222): Ceres Seq. ID no. 12397007
  misc_feature (66)..(212): Pfam Name: Cupin Pfam Description: Cupin
  misc_feature (20)..(221): Homolog of NCBI NO: 18201941 NR Description: Auxin-binding protein ABP19b precursor
  misc_feature (13)..(221): Homolog of NCBI NO: 15242028 NR Description: germin-like protein
  misc_feature (20)..(221): Homolog of NCBI NO: 18203684 NR Description: Auxin-binding protein ABP19a precursor
  misc_feature (19)..(221): Homolog of NCBI NO: 18201940 NR Description: Auxin-binding protein ABP20 precursor
  misc_feature (13)..(222): Homolog of NCBI NO: 13277342 NR Description: Germin-like protein [Pisum sativum]
  misc_feature (15)..(222): Homolog of NCBI NO: 1169941 NR Description: Germin-like protein 1 precursor
  misc_feature (19)..(222): Homolog of NCBI NO: 1934726 NR Description: germin-like protein [Arabidopsis thaliana]
  misc_feature (15)..(222): Homolog of NCBI NO: 1592672 NR Description: germin1 [Arabidopsis thaliana]
  misc_feature (15)..(222): Homolog of NCBI NO: 17473703 NR Description: germin-like protein [Arabidopsis thaliana]
  misc_feature (15)..(222): Homolog of NCBI NO: 15218535 NR Description: germin-like protein
GKKKRKVEYYLPLKMLRTIFLLSLLFALSNASVQDFCVANLKRAETPAGYPCIRPIHVKATDFVFSGLGTPGNTTNIINAAVTPAFAAQFPGLNGLGLSTARLDLAPKGVIPMHTHPGASEVLFVLTGSITAGFVSSANAVYVQTLKPGQVMVFPQGLLHFQINAGKSSASAVVTFNSANPGLQILDFALFANSLPTELVVGTTFLDATTVKKLKGVLGGTG

SEQ ID NO: 23207 - protein, 208 aa, Arabidopsis thaliana
  peptide (1)..(208): Ceres Seq. ID no. 12397008
  misc_feature (52)..(198): Pfam Name: Cupin Pfam Description: Cupin
  misc_feature (6)..(207): Homolog of NCBI NO: 18201941 NR Description: Auxin-binding protein ABP19b precursor
  misc_feature (1)..(207): Homolog of NCBI NO: 15242028 NR Description: germin-like protein
  misc_feature (6)..(207): Homolog of NCBI NO: 18203684 NR Description: Auxin-binding protein ABP19a precursor
  misc_feature (5)..(207): Homolog of NCBI NO: 18201940 NR Description: Auxin-binding protein ABP20 precursor
  misc_feature (1)..(208): Homolog of NCBI NO: 13277342 NR Description: Germin-like protein [Pisum sativum]
  misc_feature (1)..(208): Homolog of NCBI NO: 1169941 NR Description: Germin-like protein 1 precursor
  misc_feature (5)..(208): Homolog of NCBI NO: 1934726 NR Description: germin-like protein [Arabidopsis thaliana]
  misc_feature (1)..(208): Homolog of NCBI NO: 1592672 NR Description: germin1 [Arabidopsis thaliana]
  misc_feature (1)..(208): Homolog of NCBI NO: 17473703 NR Description: germin-like protein [Arabidopsis thaliana]
  misc_feature (1)..(208): Homolog of NCBI NO: 15218535 NR Description: germin-like protein
MLRTIFLLSLLFALSNASVQDFCVANLKRAETPAGYPCIRPIHVKATDFVFSGLGTPGNTTNIINAAVTPAFAAQFPGLNGLGLSTARLDLAPKGVIPMHTHPGASEVLFVLTGSITAGFVSSANAVYVQTLKPGQVMVFPQGLLHFQINAGKSSASAVVTFNSANPGLQILDFALFANSLPTELVVGTTFLDATTVKKLKGVLGGTG

SEQ ID NO: 23208 - DNA, 1383 bp, Arabidopsis thaliana
  misc_feature (1)..(1383): Ceres Seq. ID no. 12324642
  misc_feature: MA Experiment ID: 108461 Result: Down-regulated in Transcription
  misc_feature: MA Experiment 108461 PARAMETER Experiment Name: At_Germinating_Seeds_cDNA_P Parameter: Age (day) Value: 1 vs. 0
  misc_feature: MA Experiment 108461 PARAMETER Experiment Name: At_Germinating_Seeds_cDNA_P Parameter: Tissue Value: Germinating Seeds
  misc_feature: MA Experiment ID: 108464 Result: Down-regulated in Transcription
  misc_feature: MA Experiment 108464 PARAMETER Experiment Name: At_Germinating_Seeds_cDNA_P Parameter: Age (day) Value: 4 vs. 0
  misc_feature: MA Experiment 108464 PARAMETER Experiment Name: At_Germinating_Seeds_cDNA_P Parameter: Tissue Value: Germinating Seeds
  misc_feature: MA Experiment ID: 20000173 Result: Up-regulated in Transcription
  misc_feature: MA Experiment 20000173 PARAMETER Experiment Name: At_42deg_Heat_P Parameter: Age (day) Value: 14
  misc_feature: MA Experiment 20000173 PARAMETER Experiment Name: At_42deg_Heat_P Parameter: Organism Value: A. thaliana
  misc_feature: MA Experiment 20000173 PARAMETER Experiment Name: At_42deg_Heat_P Parameter: Plant Line Value: WS
  misc_feature: MA Experiment 20000173 PARAMETER Experiment Name: At_42deg_Heat_P Parameter: Temperature (deg C) Value: 42 vs. 22
  misc_feature: MA Experiment 20000173 PARAMETER Experiment Name: At_42deg_Heat_P Parameter: Timepoint (hr) Value: 6
  misc_feature: MA Experiment 20000173 PARAMETER Experiment Name: At_42deg_Heat_P Parameter: Tissue Value: Aerial
  misc_feature: MA Experiment ID: 20000180 Result: Down-regulated in Transcription
  misc_feature: MA Experiment 20000180 PARAMETER Experiment Name: At_Germinating_Seeds_P Parameter: Age (hr) Value: 24 vs. 0
  misc_feature: MA Experiment 20000180 PARAMETER Experiment Name: At_Germinating_Seeds_P Parameter: Tissue Value: Germinating Seeds
aaagagttccaaaaaggtggctcctttttgtttctggagatgcgttattgtgacccttctttgaaatttagggttcattttctcagatttcgagttcgttgtgtttgaatctctattgggtttactttcttattcgatttgggggaaatggctgattggtatcagcttgcacagtctataatctttggtttgatcttcgcttaccttctcgctaagctaatctctatcctcctcgcttttaaagacgagaatctctcactcactcgtaaccacacgactcaatcggagtatgagaacttgcgaaaggtcgaaactttaactgggattagcggcgagactgattctcttatagctgagcaaggtagcttgagaggtgatgaagatgaatcagatgatgatgattgggaaggtgtcgaaagtacagaacttgatgaggcatttagtgctgctacggcttttgttgctgctgctgcatcggataggctttcgcagaaagtttctaatgagttgcaacttcagctttatggattgtataaaattgctactgaaggaccttgtactgctcctcaaccatcagctcttaaaatgactgctcgtgccaagtggcaagcatggcagaaattgggtgctatgcctcctgaggaagcgatggagaagtatatcgaccttgttactcagctttacccagcttgggttgaaggtggctcgaaacgaagaaatcggagtggtgaggctgcaggccccatgggaccggtttttagctcattggtgtacgaagaggaatctgacaatgagttgaagattgacgccatacacgcctttgctagagaaggagaagtcgagaatctattgaaatgcatagaaaatggcatacccgtaaatgcaagagatagtgaaggtcgaacaccactgcattgggctatagaccgtggccatcttaacgttgctgaagctctggttgataagaacgcagatgtgaatgctaaagacaatgaaggccaaacctctctacactatgctgttgtgtgcgaaagagaagcactcgccgagtttctggtgaagcagaaagctgatacaaccattaaagacgaagacggaaactcgcctcttgatctctgtgaatcagaatggtcttggatgcgagagaagaaggattccaattagtgttttttaagtctttaaaattgtgtgtcaaagctagatgcttgtgtttttcttacatttcctctgagcctctttgcttcctcttaagcttatgttttaacatacaacaacacaagttacatatgatatagtagctctagtttttattggttactatattgaacccagagagatcatcatcatcaatcatcataactcaataatagttttttttttgtt

SEQ ID NO: 23209 - protein, 338 aa, Arabidopsis thaliana
  peptide (1)..(338): Ceres Seq. ID no. 12324643
  misc_feature (94)..(180): Pfam Name: Acyl CoA binding protein Pfam Description: Acyl CoA binding protein
  misc_feature (67)..(327): Homolog of NCBI NO: 31204677 NR Description: ENSANGP00000017422 [Anopheles gambiae]
  misc_feature (69)..(320): Homolog of NCBI NO: 21312284 NR Description: RIKEN cDNA 2610100E10 [Mus musculus]
  misc_feature (69)..(320): Homolog of NCBI NO: 34880749 NR Description: similar to RIKEN cDNA 2610100E10 [Rattus
  misc_feature (72)..(320): Homolog of NCBI NO: 14150169 NR Description: hypothetical protein MGC2404 [Homo sapiens]
  misc_feature (3)..(331): Homolog of NCBI NO: 32488636 NR Description: OSJNBa0032F06.12 [Oryza sativa (japonica
  misc_feature (1)..(258): Homolog of NCBI NO: 12039034 NR Description: acyl-CoA binding protein 2 [Arabidopsis thaliana]
  misc_feature (1)..(333): Homolog of NCBI NO: 15234270 NR Description: putative acyl-CoA binding protein
  misc_feature (1)..(338): Homolog of NCBI NO: 21593070 NR Description: putative acyl-CoA binding protein [Arabidopsis
  misc_feature (1)..(338): Homolog of NCBI NO: 21284389 NR Description: acyl-CoA binding protein [Arabidopsis thaliana]
  misc_feature (1)..(338): Homolog of NCBI NO: 15238757 NR Description: putative protein
MADWYQLAQSIIFGLIFAYLLAKLISILLAFKDENLSLTRNHTTQSEYENLRKVETLTGISGETDSLIAEQGSLRGDEDESDDDDWEGVESTELDEAFSAATAFVAAAASDRLSQKVSNELQLQLYGLYKIATEGPCTAPQPSALKMTARAKWQAWQKLGAMPPEEAMEKYIDLVTQLYPAWVEGGSKRRNRSGEAAGPMGPVFSSLVYEEESDNELKIDAIHAFAREGEVENLLKCIENGIPVNARDSEGRTPLHWAIDRGHLNVAEALVDKNADVNAKDNEGQTSLHYAVVCEREALAEFLVKQKADTTIKDEDGNSPLDLCESEWSWMREKKDSN

SEQ ID NO: 23210 - protein, 192 aa, Arabidopsis thaliana
  peptide (1)..(192): Ceres Seq. ID no. 12324644
  misc_feature (104)..(136): Pfam Name: Ankyrin repeat Pfam Description: Ankyrin repeat
  misc_feature (1)..(181): Homolog of NCBI NO: 31204677 NR Description: ENSANGP00000017422 [Anopheles gambiae]
  misc_feature (1)..(174): Homolog of NCBI NO: 21312284 NR Description: RIKEN cDNA 2610100E10 [Mus musculus]
  misc_feature (1)..(174): Homolog of NCBI NO: 34880749 NR Description: similar to RIKEN cDNA 2610100E10 [Rattus
  misc_feature (1)..(174): Homolog of NCBI NO: 14150169 NR Description: hypothetical protein MGC2404 [Homo sapiens]
  misc_feature (1)..(185): Homolog of NCBI NO: 32488636 NR Description: OSJNBa0032F06.12 [Oryza sativa (japonica
  misc_feature (1)..(112): Homolog of NCBI NO: 12039034 NR Description: acyl-CoA binding protein 2 [Arabidopsis thaliana]
  misc_feature (1)..(187): Homolog of NCBI NO: 15234270 NR Description: putative acyl-CoA binding protein
  misc_feature (1)..(192): Homolog of NCBI NO: 21593070 NR Description: putative acyl-CoA binding protein [Arabidopsis
  misc_feature (1)..(192): Homolog of NCBI NO: 21284389 NR Description: acyl-CoA binding protein [Arabidopsis thaliana]
  misc_feature (1)..(192): Homolog of NCBI NO: 15238757 NR Description: putative protein
MTARAKWQAWQKLGAMPPEEAMEKYIDLVTQLYPAWVEGGSKRRNRSGEAAGPMGPVFSSLVYEEESDNELKIDAIHAFAREGEVENLLKCIENGIPVNARDSEGRTPLHWAIDRGHLNVAEALVDKNADVNAKDNEGQTSLHYAVVCEREALAEFLVKQKADTTIKDEDGNSPLDLCESEWSWMREKKDSN

SEQ ID NO: 23211 - protein, 177 aa, Arabidopsis thaliana
  peptide (1)..(177): Ceres Seq. ID no. 12324645
  misc_feature (89)..(121): Pfam Name: Ankyrin repeat Pfam Description: Ankyrin repeat
  misc_feature (1)..(166): Homolog of NCBI NO: 31204677 NR Description: ENSANGP00000017422 [Anopheles gambiae]
  misc_feature (1)..(159): Homolog of NCBI NO: 21312284 NR Description: RIKEN cDNA 2610100E10 [Mus musculus]
  misc_feature (1)..(159): Homolog of NCBI NO: 34880749 NR Description: similar to RIKEN cDNA 2610100E10 [Rattus
  misc_feature (1)..(159): Homolog of NCBI NO: 14150169 NR Description: hypothetical protein MGC2404 [Homo sapiens]
  misc_feature (1)..(170): Homolog of NCBI NO: 32488636 NR Description: OSJNBa0032F06.12 [Oryza sativa (japonica
  misc_feature (1)..(97): Homolog of NCBI NO: 12039034 NR Description: acyl-CoA binding protein 2 [Arabidopsis thaliana]
  misc_feature (1)..(172): Homolog of NCBI NO: 15234270 NR Description: putative acyl-CoA binding protein
  misc_feature (1)..(177): Homolog of NCBI NO: 21593070 NR Description: putative acyl-CoA binding protein [Arabidopsis
  misc_feature (1)..(177): Homolog of NCBI NO: 21284389 NR Description: acyl-CoA binding protein [Arabidopsis thaliana]
  misc_feature (1)..(177): Homolog of NCBI NO: 15238757 NR Description: putative protein
MPPEEAMEKYIDLVTQLYPAWVEGGSKRRNRSGEAAGPMGPVFSSLVYEEESDNELKIDAIHAFAREGEVENLLKCIENGIPVNARDSEGRTPLHWAIDRGHLNVAEALVDKNADVNAKDNEGQTSLHYAVVCEREALAEFLVKQKADTTIKDEDGNSPLDLCESEWSWMREKKDSN

SEQ ID NO: 23212 - DNA, 1411 bp, Arabidopsis thaliana
  misc_feature (1)..(1411): Ceres Seq. ID no. 12324653
  misc_feature: MA Experiment ID: 108434 Result: Up-regulated in Transcription
  misc_feature: MA Experiment 108434 PARAMETER Experiment Name: At_Root_Tips_cDNA_P Parameter: Tissue Value: Root Tips
  misc_feature: MA Experiment ID: 108461 Result: Up-regulated in Transcription
  misc_feature: MA Experiment 108461 PARAMETER Experiment Name: At_Germinating_Seeds_cDNA_P Parameter: Age (day) Value: 1 vs. 0
  misc_feature: MA Experiment 108461 PARAMETER Experiment Name: At_Germinating_Seeds_cDNA_P Parameter: Tissue Value: Germinating Seeds
  misc_feature: MA Experiment ID: 108462 Result: Up-regulated in Transcription
  misc_feature: MA Experiment 108462 PARAMETER Experiment Name: At_Germinating_Seeds_cDNA_P Parameter: Age (day) Value: 2 vs. 0
  misc_feature: MA Experiment 108462 PARAMETER Experiment Name: At_Germinating_Seeds_cDNA_P Parameter: Tissue Value: Germinating Seeds
  misc_feature: MA Experiment ID: 108573 Result: Up-regulated in Transcription
  misc_feature: MA Experiment 108573 PARAMETER Experiment Name: At_Drought_cDNA_P Parameter: Timepoint (hr) Value: 6
  misc_feature: MA Experiment 108573 PARAMETER Experiment Name: At_Drought_cDNA_P Parameter: Tissue Value: Aerial
  misc_feature: MA Experiment 108573 PARAMETER Experiment Name: At_Drought_cDNA_P Parameter: Treatment Value: Drought vs. No Drought
  misc_feature: MA Experiment ID: 108574 Result: Up-regulated in Transcription
  misc_feature: MA Experiment 108574 PARAMETER Experiment Name: At_Wounding__cDNA_P Parameter: Timepoint (hr) Value: 1
  misc_feature: MA Experiment 108574 PARAMETER Experiment Name: At_Wounding__cDNA_P Parameter: Tissue Value: Aerial
  misc_feature: MA Experiment 108574 PARAMETER Experiment Name: At_Wounding__cDNA_P Parameter: Treatment Value: Wounding vs. No Wounding
  misc_feature: MA Experiment ID: 108579 Result: Up-regulated in Transcription
  misc_feature: MA Experiment 108579 PARAMETER Experiment Name: At_4deg_Cold_cDNA_P Parameter: Temperature (deg C) Value: 4 vs. 22
  misc_feature: MA Experiment 108579 PARAMETER Experiment Name: At_4deg_Cold_cDNA_P Parameter: Timepoint (hr) Value: 6
  misc_feature: MA Experiment 108579 PARAMETER Experiment Name: At_4deg_Cold_cDNA_P Parameter: Tissue Value: Aerial
  misc_feature: MA Experiment ID: 108585 Result: Up-regulated in Transcription
  misc_feature: MA Experiment 108585 PARAMETER Experiment Name: At_5mM_NaNP_cDNA_P Parameter: Timepoint (hr) Value: 6
  misc_feature: MA Experiment 108585 PARAMETER Experiment Name: At_5mM_NaNP_cDNA_P Parameter: Tissue Value: Aerial
  misc_feature: MA Experiment 108585 PARAMETER Experiment Name: At_5mM_NaNP_cDNA_P Parameter: Treatment Value: null
  misc_feature: MA Experiment ID: 20000179 Result: Up-regulated in Transcription
  misc_feature: MA Experiment 20000179 PARAMETER Experiment Name: At_Germinating_Seeds_P Parameter: Age (hr) Value: 6 vs. 0
  misc_feature: MA Experiment 20000179 PARAMETER Experiment Name: At_Germinating_Seeds_P Parameter: Tissue Value: Germinating Seeds
  misc_feature: MA Experiment ID: 20000180 Result: Up-regulated in Transcription
  misc_feature: MA Experiment 20000180 PARAMETER Experiment Name: At_Germinating_Seeds_P Parameter: Age (hr) Value: 24 vs. 0
  misc_feature: MA Experiment 20000180 PARAMETER Experiment Name: At_Germinating_Seeds_P Parameter: Tissue Value: Germinating Seeds
  misc_feature: MA Experiment ID: 20000213 Result: Up-regulated in Transcription
  misc_feature: MA Experiment 20000213 PARAMETER Experiment Name: At_4deg_Cold_P Parameter: Timepoint (hr) Value: 2
  misc_feature: MA Experiment ID: 20000794 Result: Down-regulated in Transcription
  misc_feature: MA Experiment 20000794 PARAMETER Experiment Name: At_Petals_P Parameter: Age (day) Value: 23-25 days
  misc_feature: MA Experiment 20000794 PARAMETER Experiment Name: At_Petals_P Parameter: Plant Line Value: WS
  misc_feature: MA Experiment 20000794 PARAMETER Experiment Name: At_Petals_P Parameter: Tissue Value: Petals vs. Whole plant
  misc_feature: MA Experiment ID: 20001451 Result: Down-regulated in Transcription
  misc_feature: MA Experiment 20001451 PARAMETER Experiment Name: At_Far-red-induction_P Parameter: Age (day) Value: 7
  misc_feature: MA Experiment 20001451 PARAMETER Experiment Name: At_Far-red-induction_P Parameter: Light Value: Far-red vs. White
  misc_feature: MA Experiment 20001451 PARAMETER Experiment Name: At_Far-red-induction_P Parameter: Organism Value: A. thaliana
  misc_feature: MA Experiment 20001451 PARAMETER Experiment Name: At_Far-red-induction_P Parameter: Plant Line Value: Columbia
  misc_feature: MA Experiment 20001451 PARAMETER Experiment Name: At_Far-red-induction_P Parameter: Timepoint (hr) Value: 24
  misc_feature: MA Experiment 20001451 PARAMETER Experiment Name: At_Far-red-induction_P Parameter: Tissue Value: Whole Plant
  misc_feature: MA Experiment ID: 20001557 Result: Up-regulated in Transcription
  misc_feature: MA Experiment 20001557 PARAMETER Experiment Name: At_Drought_Soil_Dry_P Parameter: Age (day) Value: 27
  misc_feature: MA Experiment 20001557 PARAMETER Experiment Name: At_Drought_Soil_Dry_P Parameter: Organism Value: A. thaliana
  misc_feature: MA Experiment 20001557 PARAMETER Experiment Name: At_Drought_Soil_Dry_P Parameter: Plant Line Value: WS
  misc_feature: MA Experiment 20001557 PARAMETER Experiment Name: At_Drought_Soil_Dry_P Parameter: Post Timepoint (hr) Value: 3
  misc_feature: MA Experiment 20001557 PARAMETER Experiment Name: At_Drought_Soil_Dry_P Parameter: Post-Treatment Value: Re-Water vs. No Drought
  misc_feature: MA Experiment 20001557 PARAMETER Experiment Name: At_Drought_Soil_Dry_P Parameter: Timepoint (day) Value: 13
  misc_feature: MA Experiment 20001557 PARAMETER Experiment Name: At_Drought_Soil_Dry_P Parameter: Treatment Value: Drought vs. No Drought
  misc_feature: MA Experiment ID: 20001905 Result: Up-regulated in Transcription
  misc_feature: MA Experiment 20001905 PARAMETER Experiment Name: At_Drought_Reproduction_P Parameter: Age (day) Value: 40
  misc_feature: MA Experiment 20001905 PARAMETER Experiment Name: At_Drought_Reproduction_P Parameter: Organism Value: A. thaliana
  misc_feature: MA Experiment 20001905 PARAMETER Experiment Name: At_Drought_Reproduction_P Parameter: Plant Line Value: WS
  misc_feature: MA Experiment 20001905 PARAMETER Experiment Name: At_Drought_Reproduction_P Parameter: Timepoint (day) Value: 10
  misc_feature: MA Experiment 20001905 PARAMETER Experiment Name: At_Drought_Reproduction_P Parameter: Tissue Value: Rosettes
  misc_feature: MA Experiment 20001905 PARAMETER Experiment Name: At_Drought_Reproduction_P Parameter: Treatment Value: Drought vs. No Drought
aaaaactcaccgacgcgatccgatctcatctctctcatttcgaaaccatggttgagccggcgaatactgttggtcttccggtgaacccgactccgttgctgaaagatgagctcgatatcgtgattccgactatcagaaacctcgatttcctcgagatgtggaggccttttcttcagccttaccatctgatcatcgtccaggacggagatccatcgaagaagatccatgtccctgaaggttacgactacgagctctacaacaggaacgacattaaccgaatcctcggacctaaggcttcttgtatctcgtttaaggattctgcttgtcgatgctttgggtacatggtgtctaagaagaagtatatcttcaccattgatgacgattgcttcgttgccaaggatccatcaggcaaagcagtgaacgctcttgagcaacacatcaagaaccttctctgcccatcgtctccctttttcttcaacaccttgtatgatccttaccgtgaaggtgctgatttcgtccgtggataccctttcagtctccgtgaaggtgtttccactgctgtttcccatggtctttggctcaacatccctgactacgatgccccgacccaactcgtgaagcctaaggagaggaacaccaggtatgtggatgctgtcatgaccatcccaaagggaacacttttcccaatgtgtggtatgaacttggcttttgaccgtgatttgattggcccggctatgtactttggtctcatgggtgatggtcagcctattggtcgttacgacgatatgtgggctggttggtgcatcaaggtgatctgtgaccacttgagcttgggagtgaagaccggtttaccgtatatctaccacagcaaagcgagcaacccttttgttaacctgaagaaggaatacaagggaatcttctggcaggaggagatcattccgttcttccagaacgcaaagctatcgaaagaagcagtaactgttcagcaatgctacattgagctctcaaagatggtcaaggagaagttgagctccttagacccgtactttgacaagcttgcagatgccatggttacatggattgaagcttgggatgagcttaacccaccagcagccagtggcaaagcttgagagcagtatgagccaaaaagaaaaagccaccaaagttttggttatttttagctcaaattatcgttacttttaaatttctgattttacgaacctttcttgctttttttacacatttgagtagttttcatcatcagtactttctcattgtccggttatggtttttgcatttggtttaaatatcaccggtttatttataaacagtggtggattagtagtactattttctgagtttttttctttgtttcattaataaaaaggccttttcataggtgtttgcaact

SEQ ID NO: 23213 - protein, 375 aa, Arabidopsis thaliana
  peptide (1)..(375): Ceres Seq. ID no. 12324654
  misc_feature (28)..(371): Pfam Name: Reversibly glycosylated polypeptide Pfam Description: Reversibly glycosylated polypeptide
  misc_feature (27)..(375): Homolog of NCBI NO: 30680679 NR Description: reversibly glycosylatable polypeptide -related
  misc_feature (20)..(375): Homolog of NCBI NO: 34915190 NR Description: reversibly glycosylated polypeptide
  misc_feature (20)..(375): Homolog of NCBI NO: 4158221 NR Description: reversibly glycosylated polypeptide
  misc_feature (20)..(375): Homolog of NCBI NO: 4158232 NR Description: reversibly glycosylated polypeptide [Triticum
  misc_feature (24)..(375): Homolog of NCBI NO: 34582499 NR Description: Alpha-1,4-glucan-protein synthase
  misc_feature (16)..(369): Homolog of NCBI NO: 2317729 NR Description: reversibly glycosylated polypeptide-1
  misc_feature (16)..(369): Homolog of NCBI NO: 15232865 NR Description: reversibly glycosylated polypeptide-1
  misc_feature (16)..(375): Homolog of NCBI NO: 21593071 NR Description: reversibly glycosylated polypeptide-3
  misc_feature (16)..(375): Homolog of NCBI NO: 2317731 NR Description: reversibly glycosylated polypeptide-2
  misc_feature (16)..(375): Homolog of NCBI NO: 15242351 NR Description: reversibly glycosylated polypeptide-3
KLTDAIRSHLSHFETMVEPANTVGLPVNPTPLLKDELDIVIPTIRNLDFLEMWRPFLQPYHLIIVQDGDPSKKIHVPEGYDYELYNRNDINRILGPKASCISFKDSACRCFGYMVSKKKYIFTIDDDCFVAKDPSGKAVNALEQHIKNLLCPSSPFFFNTLYDPYREGADFVRGYPFSLREGVSTAVSHGLWLNIPDYDAPTQLVKPKERNTRYVDAVMTIPKGTLFPMCGMNLAFDRDLIGPAMYFGLMGDGQPIGRYDDMWAGWCIKVICDHLSLGVKTGLPYIYHSKASNPFVNLKKEYKGIFWQEEIIPFFQNAKLSKEAVTVQQCYIELSKMVKEKLSSLDPYFDKLADAMVTWIEAWDELNPPAASGKA

SEQ ID NO: 23214 - protein, 360 aa, Arabidopsis thaliana
  peptide (1)..(360): Ceres Seq. ID no. 12324655
  misc_feature (13)..(356): Pfam Name: Reversibly glycosylated polypeptide Pfam Description: Reversibly glycosylated polypeptide
  misc_feature (12)..(360): Homolog of NCBI NO: 30680679 NR Description: reversibly glycosylatable polypeptide -related
  misc_feature (5)..(360): Homolog of NCBI NO: 34915190 NR Description: reversibly glycosylated polypeptide
  misc_feature (5)..(360): Homolog of NCBI NO: 4158221 NR Description: reversibly glycosylated polypeptide
  misc_feature (5)..(360): Homolog of NCBI NO: 4158232 NR Description: reversibly glycosylated polypeptide [Triticum
  misc_feature (9)..(360): Homolog of NCBI NO: 34582499 NR Description: Alpha-1,4-glucan-protein synthase
  misc_feature (1)..(354): Homolog of NCBI NO: 2317729 NR Description: reversibly glycosylated polypeptide-1
  misc_feature (1)..(354): Homolog of NCBI NO: 15232865 NR Description: reversibly glycosylated polypeptide-1
  misc_feature (1)..(360): Homolog of NCBI NO: 21593071 NR Description: reversibly glycosylated polypeptide-3
  misc_feature (1)..(360): Homolog of NCBI NO: 2317731 NR Description: reversibly glycosylated polypeptide-2
  misc_feature (1)..(360): Homolog of NCBI NO: 15242351 NR Description: reversibly glycosylated polypeptide-3
MVEPANTVGLPVNPTPLLKDELDIVIPTIRNLDFLEMWRPFLQPYHLIIVQDGDPSKKIHVPEGYDYELYNRNDINRILGPKASCISFKDSACRCFGYMVSKKKYIFTIDDDCFVAKDPSGKAVNALEQHIKNLLCPSSPFFFNTLYDPYREGADFVRGYPFSLREGVSTAVSHGLWLNIPDYDAPTQLVKPKERNTRYVDAVMTIPKGTLFPMCGMNLAFDRDLIGPAMYFGLMGDGQPIGRYDDMWAGWCIKVICDHLSLGVKTGLPYIYHSKASNPFVNLKKEYKGIFWQEEIIPFFQNAKLSKEAVTVQQCYIELSKMVKEKLSSLDPYFDKLADAMVTWIEAWDELNPPAASGKA

SEQ ID NO: 23215 - protein, 324 aa, Arabidopsis thaliana
  peptide (1)..(324): Ceres Seq. ID no. 12324656
  misc_feature (1)..(320): Pfam Name: Reversibly glycosylated polypeptide Pfam Description: Reversibly glycosylated polypeptide
  misc_feature (1)..(324): Homolog of NCBI NO: 21593071 NR Description: reversibly glycosylated polypeptide-3
  misc_feature (1)..(324): Homolog of NCBI NO: 2317731 NR Description: reversibly glycosylated polypeptide-2
  misc_feature (1)..(324): Homolog of NCBI NO: 34915190 NR Description: reversibly glycosylated polypeptide
  misc_feature (1)..(324): Homolog of NCBI NO: 4158232 NR Description: reversibly glycosylated polypeptide [Triticum
  misc_feature (1)..(318): Homolog of NCBI NO: 2317729 NR Description: reversibly glycosylated polypeptide-1
  misc_feature (1)..(318): Homolog of NCBI NO: 15232865 NR Description: reversibly glycosylated polypeptide-1
  misc_feature (1)..(324): Homolog of NCBI NO: 34582499 NR Description: Alpha-1,4-glucan-protein synthase
  misc_feature (1)..(324): Homolog of NCBI NO: 4158221 NR Description: reversibly glycosylated polypeptide
  misc_feature (1)..(324): Homolog of NCBI NO: 30680679 NR Description: reversibly glycosylatable polypeptide -related
  misc_feature (1)..(324): Homolog of NCBI NO: 15242351 NR Description: reversibly glycosylated polypeptide-3
MWRPFLQPYHLIIVQDGDPSKKIHVPEGYDYELYNRNDINRILGPKASCISFKDSACRCFGYMVSKKKYIFTIDDDCFVAKDPSGKAVNALEQHIKNLLCPSSPFFFNTLYDPYREGADFVRGYPFSLREGVSTAVSHGLWLNIPDYDAPTQLVKPKERNTRYVDAVMTIPKGTLFPMCGMNLAFDRDLIGPAMYFGLMGDGQPIGRYDDMWAGWCIKVICDHLSLGVKTGLPYIYHSKASNPFVNLKKEYKGIFWQEEIIPFFQNAKLSKEAVTVQQCYIELSKMVKEKLSSLDPYFDKLADAMVTWIEAWDELNPPAASGKA

SEQ ID NO: 23216 - DNA, 1212 bp, Arabidopsis thaliana
  misc_feature (1)..(1212): Ceres Seq. ID no. 12322483
  misc_feature: MA Experiment ID: 108577 Result: Down-regulated in Transcription
  misc_feature: MA Experiment 108577 PARAMETER Experiment Name: At_42deg_Heat_cDNA_P Parameter: Temperature (deg C) Value: 42 vs. 22
  misc_feature: MA Experiment 108577 PARAMETER Experiment Name: At_42deg_Heat_cDNA_P Parameter: Timepoint (hr) Value: 6
  misc_feature: MA Experiment 108577 PARAMETER Experiment Name: At_42deg_Heat_cDNA_P Parameter: Tissue Value: Aerial
  misc_feature: MA Experiment ID: 108668 Result: Down-regulated in Transcription
  misc_feature: MA Experiment 108668 PARAMETER Experiment Name: At_2mM_SA_cDNA_P Parameter: Plant Line Value: WS
  misc_feature: MA Experiment 108668 PARAMETER Experiment Name: At_2mM_SA_cDNA_P Parameter: Timepoint (hr) Value: 6
  misc_feature: MA Experiment 108668 PARAMETER Experiment Name: At_2mM_SA_cDNA_P Parameter: Treatment Value: 2mM SA vs. No Treatment
  misc_feature: MA Experiment ID: 20000111 Result: Down-regulated in Transcription
  misc_feature: MA Experiment 20000111 PARAMETER Experiment Name: At_42deg_Heat_cDNA_P Parameter: Temperature (deg C) Value: 42 vs. 22
  misc_feature: MA Experiment 20000111 PARAMETER Experiment Name: At_42deg_Heat_cDNA_P Parameter: Timepoint (hr) Value: 6
  misc_feature: MA Experiment 20000111 PARAMETER Experiment Name: At_42deg_Heat_cDNA_P Parameter: Tissue Value: Aerial
  misc_feature: MA Experiment ID: 20000173 Result: Down-regulated in Transcription
  misc_feature: MA Experiment 20000173 PARAMETER Experiment Name: At_42deg_Heat_P Parameter: Age (day) Value: 14
  misc_feature: MA Experiment 20000173 PARAMETER Experiment Name: At_42deg_Heat_P Parameter: Organism Value: A. thaliana
  misc_feature: MA Experiment 20000173 PARAMETER Experiment Name: At_42deg_Heat_P Parameter: Plant Line Value: WS
  misc_feature: MA Experiment 20000173 PARAMETER Experiment Name: At_42deg_Heat_P Parameter: Temperature (deg C) Value: 42 vs. 22
  misc_feature: MA Experiment 20000173 PARAMETER Experiment Name: At_42deg_Heat_P Parameter: Timepoint (hr) Value: 6
  misc_feature: MA Experiment 20000173 PARAMETER Experiment Name: At_42deg_Heat_P Parameter: Tissue Value: Aerial
  misc_feature: MA Experiment ID: 20000265 Result: Up-regulated in Transcription
  misc_feature: MA Experiment 20000265 PARAMETER Experiment Name: At_Open_Flower_P Parameter: Age (day) Value: 21
  misc_feature: MA Experiment 20000265 PARAMETER Experiment Name: At_Open_Flower_P Parameter: Plant Line Value: WS
  misc_feature: MA Experiment 20000265 PARAMETER Experiment Name: At_Open_Flower_P Parameter: Tissue Value: Closed Flower vs. Whole Plant
  misc_feature: MA Experiment ID: 20000286 Result: Up-regulated in Transcription
  misc_feature: MA Experiment 20000286 PARAMETER Experiment Name: At_Open_Flower_P Parameter: Age (day) Value: 21
  misc_feature: MA Experiment 20000286 PARAMETER Experiment Name: At_Open_Flower_P Parameter: Plant Line Value: WS
  misc_feature: MA Experiment 20000286 PARAMETER Experiment Name: At_Open_Flower_P Parameter: Tissue Value: Half Open vs. Whole Plant
  misc_feature: MA Experiment ID: 20000437 Result: Down-regulated in Transcription
  misc_feature: MA Experiment 20000437 PARAMETER Experiment Name: At_Drought_P Parameter: Age (day) Value: 8
  misc_feature: MA Experiment 20000437 PARAMETER Experiment Name: At_Drought_P Parameter: Organism Value: A. thaliana
  misc_feature: MA Experiment 20000437 PARAMETER Experiment Name: At_Drought_P Parameter: Plant Line Value: WS
  misc_feature: MA Experiment 20000437 PARAMETER Experiment Name: At_Drought_P Parameter: Timepoint (hr) Value: 24
  misc_feature: MA Experiment 20000437 PARAMETER Experiment Name: At_Drought_P Parameter: Tissue Value: Whole Plant
  misc_feature: MA Experiment 20000437 PARAMETER Experiment Name: At_Drought_P Parameter: Treatment Value: Drought vs. No Drought
  misc_feature: MA Experiment ID: 20000438 Result: Up-regulated in Transcription
  misc_feature: MA Experiment 20000438 PARAMETER Experiment Name: At_Shoots__P Parameter: Age (day) Value: 14
  misc_feature: MA Experiment 20000438 PARAMETER Experiment Name: At_Shoots__P Parameter: Tissue Value: Shoots vs. Whole Plant
  misc_feature: MA Experiment ID: 20000573 Result: Down-regulated in Transcription
  misc_feature: MA Experiment 20000573 PARAMETER Experiment Name: At_100uM_ABA_Mutants__P Parameter: Organism Value: A. thaliana
  misc_feature: MA Experiment 20000573 PARAMETER Experiment Name: At_100uM_ABA_Mutants__P Parameter: Plant Line Value: CS22 vs. Ler wt
  misc_feature: MA Experiment 20000573 PARAMETER Experiment Name: At_100uM_ABA_Mutants__P Parameter: Timepoint (hr) Value: N/A
  misc_feature: MA Experiment 20000573 PARAMETER Experiment Name: At_100uM_ABA_Mutants__P Parameter: Tissue Value: Whole Plant
  misc_feature: MA Experiment 20000573 PARAMETER Experiment Name: At_100uM_ABA_Mutants__P Parameter: Treatment Value: None
  misc_feature: MA Experiment ID: 20000794 Result: Up-regulated in Transcription
  misc_feature: MA Experiment 20000794 PARAMETER Experiment Name: At_Petals_P Parameter: Age (day) Value: 23-25 days
  misc_feature: MA Experiment 20000794 PARAMETER Experiment Name: At_Petals_P Parameter: Plant Line Value: WS
  misc_feature: MA Experiment 20000794 PARAMETER Experiment Name: At_Petals_P Parameter: Tissue Value: Petals vs. Whole plant
  misc_feature: MA Experiment ID: 20001248 Result: Down-regulated in Transcription
  misc_feature: MA Experiment 20001248 PARAMETER Experiment Name: At_Far-red-induction_P Parameter: Age (day) Value: 7
  misc_feature: MA Experiment 20001248 PARAMETER Experiment Name: At_Far-red-induction_P Parameter: Light Value: Far-red vs. White
  misc_feature: MA Experiment 20001248 PARAMETER Experiment Name: At_Far-red-induction_P Parameter: Organism Value: A. thaliana
  misc_feature: MA Experiment 20001248 PARAMETER Experiment Name: At_Far-red-induction_P Parameter: Plant Line Value: Columbia
  misc_feature: MA Experiment 20001248 PARAMETER Experiment Name: At_Far-red-induction_P Parameter: Timepoint (hr) Value: 4
  misc_feature: MA Experiment 20001248 PARAMETER Experiment Name: At_Far-red-induction_P Parameter: Tissue Value: Whole Plant
  misc_feature: MA Experiment ID: 20001450 Result: Down-regulated in Transcription
  misc_feature: MA Experiment 20001450 PARAMETER Experiment Name: At_Far-red-induction_P Parameter: Age (day) Value: 7
  misc_feature: MA Experiment 20001450 PARAMETER Experiment Name: At_Far-red-induction_P Parameter: Light Value: Far-red vs. White
  misc_feature: MA Experiment 20001450 PARAMETER Experiment Name: At_Far-red-induction_P Parameter: Organism Value: A. thaliana
  misc_feature: MA Experiment 20001450 PARAMETER Experiment Name: At_Far-red-induction_P Parameter: Plant Line Value: Columbia
  misc_feature: MA Experiment 20001450 PARAMETER Experiment Name: At_Far-red-induction_P Parameter: Timepoint (hr) Value: 8
  misc_feature: MA Experiment 20001450 PARAMETER Experiment Name: At_Far-red-induction_P Parameter: Tissue Value: Whole Plant
  misc_feature: MA Experiment ID: 20001451 Result: Down-regulated in Transcription
  misc_feature: MA Experiment 20001451 PARAMETER Experiment Name: At_Far-red-induction_P Parameter: Age (day) Value: 7
  misc_feature: MA Experiment 20001451 PARAMETER Experiment Name: At_Far-red-induction_P Parameter: Light Value: Far-red vs. White
  misc_feature: MA Experiment 20001451 PARAMETER Experiment Name: At_Far-red-induction_P Parameter: Organism Value: A. thaliana
  misc_feature: MA Experiment 20001451 PARAMETER Experiment Name: At_Far-red-induction_P Parameter: Plant Line Value: Columbia
  misc_feature: MA Experiment 20001451 PARAMETER Experiment Name: At_Far-red-induction_P Parameter: Timepoint (hr) Value: 24
  misc_feature: MA Experiment 20001451 PARAMETER Experiment Name: At_Far-red-induction_P Parameter: Tissue Value: Whole Plant
aaggaataaacttcgtgaagagaaatgactctagaagctttatcatcaaacggtcttttaaactttttgctctctgaaactctttcaccaactccattcaagtctctcgtcgatctcgagccattgccggaaaatgatgtcatcatatcgaagaacacaatttcggagatatctcatcaagaaccgccaccacagcgacaaccaccagctacgaatcaagggaagaagcggcggaggaggaagcctagggtttgcaaaaacgaggaagaagctgagaatcaacgaatgactcacattgccgtcgaaagaaatcgaagaagacaaatgaatcaacatctctctgtcttgcgatctctcatgcctcaaccttttgctcacaagggtgatcaagcttcaatagttggtggagccatagatttcatcaaagaacttgaacacaaattactatctcttgaagctcaaaaacatcataatgctaaattaaaccagtcggttacttcttcaacaagtcaagactcaaatggtgaacaagagaatcctcatcaaccatcttcactatctctatcgcagttctttcttcattcatacgatccgagccaagagaataggaacggctcaacaagctcggtgaaaacccctatggaagatcttgaagtgactctaatcgaaactcatgctaacatcagaatcttgtcgagaagaagaggtttccggtggagcacgttggccaccaccaaaccgccgcagctttcgaagctggtggcttctctacaatcgctgtccctctccattcttcaccttagtgtcacaacattggacaattatgctatttactccatcagcgctaaggtggaagagagttgccagctaagttcagtagatgacattgcaggagcagttcaccacatgctaagtatcattgaagaggagcctttttgttgctcatcaatgtcagaattaccacttgacttctctttgaatcactcaaatgtcactcattctctctgagaaatctcttttttgttattgttgttccttcttttaattttatcacatagcacatctttagtttttttttttcagaatgaagaaacacataagctttcttttaaaaatcctaggttctttttctgactttggaaggctaaatggngaaatttataatggcacataacatattaggtggtttactcttaatttttatgcattttc

SEQ ID NO: 23217 - protein, 327 aa, Arabidopsis thaliana
  peptide (1)..(327): Ceres Seq. ID no. 12322484
  misc_feature (86)..(137): Pfam Name: Helix-loop-helix DNA-binding domain Pfam Description: Helix-loop-helix DNA-binding domain
  misc_feature (67)..(225): Homolog of NCBI NO: 15238424 NR Description: bHLH protein
  misc_feature (63)..(299): Homolog of NCBI NO: 30687365 NR Description: bHLH protein family [Arabidopsis thaliana]
  misc_feature (55)..(276): Homolog of NCBI NO: 28558779 NR Description: helix-loop-helix-like protein [Cucumis melo]
  misc_feature (59)..(302): Homolog of NCBI NO: 37533680 NR Description: putative helix-loop-helix DNA-binding protein
  misc_feature (36)..(302): Homolog of NCBI NO: 34902426 NR Description: Unknown protein [Oryza sativa (japonica
  misc_feature (267)..(302): Homolog of NCBI NO: 38346722 NR Description: OSJNBa0086O06.20 [Oryza sativa (japonica
  misc_feature (62)..(275): Homolog of NCBI NO: 38346722 NR Description: OSJNBa0086O06.20 [Oryza sativa (japonica
  misc_feature (1)..(276): Homolog of NCBI NO: 9758505 NR Description: contains similarity to bHLH DNA-binding
  misc_feature (1)..(327): Homolog of NCBI NO: 18422702 NR Description: bHLH protein; protein id: At5g46690.1, supported
  misc_feature (1)..(327): Homolog of NCBI NO: 21593074 NR Description: bHLH DNA-binding protein-like protein
MTLEALSSNGLLNFLLSETLSPTPFKSLVDLEPLPENDVIISKNTISEISHQEPPPQRQPPATNQGKKRRRRKPRVCKNEEEAENQRMTHIAVERNRRRQMNQHLSVLRSLMPQPFAHKGDQASIVGGAIDFIKELEHKLLSLEAQKHHNAKLNQSVTSSTSQDSNGEQENPHQPSSLSLSQFFLHSYDPSQENRNGSTSSVKTPMEDLEVTLIETHANIRILSRRRGFRWSTLATTKPPQLSKLVASLQSLSLSILHLSVTTLDNYAIYSISAKVEESCQLSSVDDIAGAVHHMLSIIEEEPFCCSSMSELPLDFSLNHSNVTHSL

SEQ ID NO: 23218 - protein, 240 aa, Arabidopsis thaliana
  peptide (1)..(240): Ceres Seq. ID no. 12322485
  misc_feature (1)..(50): Pfam Name: Helix-loop-helix DNA-binding domain Pfam Description: Helix-loop-helix DNA-binding domain
  misc_feature (1)..(138): Homolog of NCBI NO: 15238424 NR Description: bHLH protein
  misc_feature (1)..(212): Homolog of NCBI NO: 30687365 NR Description: bHLH protein family [Arabidopsis thaliana]
  misc_feature (1)..(189): Homolog of NCBI NO: 28558779 NR Description: helix-loop-helix-like protein [Cucumis melo]
  misc_feature (1)..(215): Homolog of NCBI NO: 37533680 NR Description: putative helix-loop-helix DNA-binding protein
  misc_feature (1)..(215): Homolog of NCBI NO: 34902426 NR Description: Unknown protein [Oryza sativa (japonica
  misc_feature (180)..(215): Homolog of NCBI NO: 38346722 NR Description: OSJNBa0086O06.20 [Oryza sativa (japonica
  misc_feature (1)..(188): Homolog of NCBI NO: 38346722 NR Description: OSJNBa0086O06.20 [Oryza sativa (japonica
  misc_feature (1)..(189): Homolog of NCBI NO: 9758505 NR Description: contains similarity to bHLH DNA-binding
  misc_feature (1)..(240): Homolog of NCBI NO: 18422702 NR Description: bHLH protein; protein id: At5g46690.1, supported
  misc_feature (1)..(240): Homolog of NCBI NO: 21593074 NR Description: bHLH DNA-binding protein-like protein
MTHIAVERNRRRQMNQHLSVLRSLMPQPFAHKGDQASIVGGAIDFIKELEHKLLSLEAQKHHNAKLNQSVTSSTSQDSNGEQENPHQPSSLSLSQFFLHSYDPSQENRNGSTSSVKTPMEDLEVTLIETHANIRILSRRRGFRWSTLATTKPPQLSKLVASLQSLSLSILHLSVTTLDNYAIYSISAKVEESCQLSSVDDIAGAVHHMLSIIEEEPFCCSSMSELPLDFSLNHSNVTHSL

SEQ ID NO: 23219 - protein, 227 aa, Arabidopsis thaliana
  peptide (1)..(227): Ceres Seq. ID no. 12322486
  misc_feature (1)..(37): Pfam Name: Helix-loop-helix DNA-binding domain Pfam Description: Helix-loop-helix DNA-binding domain
  misc_feature (1)..(125): Homolog of NCBI NO: 15238424 NR Description: bHLH protein
  misc_feature (1)..(199): Homolog of NCBI NO: 30687365 NR Description: bHLH protein family [Arabidopsis thaliana]
  misc_feature (1)..(176): Homolog of NCBI NO: 28558779 NR Description: helix-loop-helix-like protein [Cucumis melo]
  misc_feature (1)..(202): Homolog of NCBI NO: 37533680 NR Description: putative helix-loop-helix DNA-binding protein
  misc_feature (1)..(202): Homolog of NCBI NO: 34902426 NR Description: Unknown protein [Oryza sativa (japonica
  misc_feature (167)..(202): Homolog of NCBI NO: 38346722 NR Description: OSJNBa0086O06.20 [Oryza sativa (japonica
  misc_feature (1)..(175): Homolog of NCBI NO: 38346722 NR Description: OSJNBa0086O06.20 [Oryza sativa (japonica
  misc_feature (1)..(176): Homolog of NCBI NO: 9758505 NR Description: contains similarity to bHLH DNA-binding
  misc_feature (1)..(227): Homolog of NCBI NO: 18422702 NR Description: bHLH protein; protein id: At5g46690.1, supported
  misc_feature (1)..(227): Homolog of NCBI NO: 21593074 NR Description: bHLH DNA-binding protein-like protein
MNQHLSVLRSLMPQPFAHKGDQASIVGGAIDFIKELEHKLLSLEAQKHHNAKLNQSVTSSTSQDSNGEQENPHQPSSLSLSQFFLHSYDPSQENRNGSTSSVKTPMEDLEVTLIETHANIRILSRRRGFRWSTLATTKPPQLSKLVASLQSLSLSILHLSVTTLDNYAIYSISAKVEESCQLSSVDDIAGAVHHMLSIIEEEPFCCSSMSELPLDFSLNHSNVTHSL

SEQ ID NO: 23220 - DNA, 837 bp, Arabidopsis thaliana
  misc_feature (1)..(837): Ceres Seq. ID no. 12322574
  misc_feature: MA Experiment ID: 108434 Result: Up-regulated in Transcription
  misc_feature: MA Experiment 108434 PARAMETER Experiment Name: At_Root_Tips_cDNA_P Parameter: Tissue Value: Root Tips
  misc_feature: MA Experiment ID: 108462 Result: Down-regulated in Transcription
  misc_feature: MA Experiment 108462 PARAMETER Experiment Name: At_Germinating_Seeds_cDNA_P Parameter: Age (day) Value: 2 vs. 0
  misc_feature: MA Experiment 108462 PARAMETER Experiment Name: At_Germinating_Seeds_cDNA_P Parameter: Tissue Value: Germinating Seeds
  misc_feature: MA Experiment ID: 108463 Result: Down-regulated in Transcription
  misc_feature: MA Experiment 108463 PARAMETER Experiment Name: At_Germinating_Seeds_cDNA_P Parameter: Age (day) Value: 3 vs. 0
  misc_feature: MA Experiment 108463 PARAMETER Experiment Name: At_Germinating_Seeds_cDNA_P Parameter: Tissue Value: Germinating Seeds
  misc_feature: MA Experiment ID: 108464 Result: Down-regulated in Transcription
  misc_feature: MA Experiment 108464 PARAMETER Experiment Name: At_Germinating_Seeds_cDNA_P Parameter: Age (day) Value: 4 vs. 0
  misc_feature: MA Experiment 108464 PARAMETER Experiment Name: At_Germinating_Seeds_cDNA_P Parameter: Tissue Value: Germinating Seeds
  misc_feature: MA Experiment ID: 20000234 Result: Down-regulated in Transcription
  misc_feature: MA Experiment 20000234 PARAMETER Experiment Name: At_Siliques_P Parameter: Age (day) Value: 21
  misc_feature: MA Experiment 20000234 PARAMETER Experiment Name: At_Siliques_P Parameter: Organism Value: A. thaliana
  misc_feature: MA Experiment 20000234 PARAMETER Experiment Name: At_Siliques_P Parameter: Plant Line Value: WS
  misc_feature: MA Experiment 20000234 PARAMETER Experiment Name: At_Siliques_P Parameter: Tissue Value: Less Than 5mm Siliques vs. Whole Plant
  misc_feature: MA Experiment ID: 20000235 Result: Down-regulated in Transcription
  misc_feature: MA Experiment 20000235 PARAMETER Experiment Name: At_Siliques_P Parameter: Age (day) Value: 21
  misc_feature: MA Experiment 20000235 PARAMETER Experiment Name: At_Siliques_P Parameter: Organism Value: A. thaliana
  misc_feature: MA Experiment 20000235 PARAMETER Experiment Name: At_Siliques_P Parameter: Plant Line Value: WS
  misc_feature: MA Experiment 20000235 PARAMETER Experiment Name: At_Siliques_P Parameter: Tissue Value: 5-10mm Siliques vs. Whole Plant
  misc_feature: MA Experiment ID: 20000264 Result: Down-regulated in Transcription
  misc_feature: MA Experiment 20000264 PARAMETER Experiment Name: At_Open_Flower_P Parameter: Age (day) Value: 21
  misc_feature: MA Experiment 20000264 PARAMETER Experiment Name: At_Open_Flower_P Parameter: Plant Line Value: WS
  misc_feature: MA Experiment 20000264 PARAMETER Experiment Name: At_Open_Flower_P Parameter: Tissue Value: Open Flower vs. Whole Plant
  misc_feature: MA Experiment ID: 20000265 Result: Down-regulated in Transcription
  misc_feature: MA Experiment 20000265 PARAMETER Experiment Name: At_Open_Flower_P Parameter: Age (day) Value: 21
  misc_feature: MA Experiment 20000265 PARAMETER Experiment Name: At_Open_Flower_P Parameter: Plant Line Value: WS
  misc_feature: MA Experiment 20000265 PARAMETER Experiment Name: At_Open_Flower_P Parameter: Tissue Value: Closed Flower vs. Whole Plant
ctatagattattcaaaaagatgttctgaagacagattttcctcactttgatctcgtggttgcaaatattccttacaacatatcttcccctcttgtggccaagcttgtatacggctccaatacttttcgaagcgccacactcttgcttcaaaaggaattctcccgccggctcctggcaaatccaggagattccgatttcaatagattggcggtgaacgttaagttagtagctgatgttaaatttgtgatggatgtaagtaaaagagagtttgttccacctcctaaagttgattcatctgtaattaggattacaccaaaggagataataccggatgttaatgttcaagaatggttggcattcactcgcacgtgtttcgggaagaagaataagacgcttggttccatgtttaggcagaagaaaaaggtcatggaattgcagagtttgtctgcagggaggcatggctcgaatgttgaggttatgaatcagacaggtggtgattctgacagtgatgttgaagaagataggaaagatgatttgttgtgtttggatacagatgcaagtatgttcaaggaaagggtaattgaaattctgagaacaaatgggttcgaagagaagagaccatccaagctttcacatcgtgagttgttacatttgctttctttgtttaaccaagctggaatttttttccatgatattacatcattacaaatggatctacacgaataatgataagttttctttaatgttttatgtttttggtcgaaccctttgaatttatttttcttacaaattggaagattaaagtaaaagctacttaatgtagtaatttcggtaggg

SEQ ID NO: 23221 - protein, 159 aa, Arabidopsis thaliana
  peptide (1)..(159): Ceres Seq. ID no. 12322575
  misc_feature (1)..(55): Homolog of NCBI NO: 7657198 NR Description: putative dimethyladenosine transferase [Homo
  misc_feature (1)..(55): Homolog of NCBI NO: 39589178 NR Description: Hypothetical protein CBG00961 [Caenorhabditis
  misc_feature (1)..(55): Homolog of NCBI NO: 25146882 NR Description: Ribosomal RNA adenine dimethylase (34.6 kD)
  misc_feature (108)..(147): Homolog of NCBI NO: 7433481 NR Description: rRNA (adenine-N6,N6-)-dimethyltransferase (EC
  misc_feature (108)..(147): Homolog of NCBI NO: 2500510 NR Description: DIMETHYLADENOSINE TRANSFERASE
  misc_feature (1)..(91): Homolog of NCBI NO: 7433481 NR Description: rRNA (adenine-N6,N6-)-dimethyltransferase (EC
  misc_feature (1)..(91): Homolog of NCBI NO: 2500510 NR Description: DIMETHYLADENOSINE TRANSFERASE
  misc_feature (1)..(123): Homolog of NCBI NO: 15226591 NR Description: putative dimethyladenosine transferase
  misc_feature (1)..(147): Homolog of NCBI NO: 34394642 NR Description: Ribosomal RNA adenine dimethylase-like protein
  misc_feature (19)..(159): Homolog of NCBI NO: 30698221 NR Description: dimethyladenosine transferase-related protein
MDVSKREFVPPPKVDSSVIRITPKEIIPDVNVQEWLAFTRTCFGKKNKTLGSMFRQKKKVMELQSLSAGRHGSNVEVMNQTGGDSDSDVEEDRKDDLLCLDTDASMFKERVIEILRTNGFEEKRPSKLSHRELLHLLSLFNQAGIFFHDITSLQMDLHE

SEQ ID NO: 23222 - protein, 107 aa, Arabidopsis thaliana
  peptide (1)..(107): Ceres Seq. ID no. 12322576
  misc_feature (1)..(11): Homolog of NCBI NO: 19112914 NR Description: dimethylase [Schizosaccharomyces pombe]
  misc_feature (1)..(13): Homolog of NCBI NO: 19074123 NR Description: DIMETHYLADENOSINE TRANSFERASE [Encephalitozoon
  misc_feature (1)..(11): Homolog of NCBI NO: 21358017 NR Description: CG11837-PA [Drosophila melanogaster]
  misc_feature (56)..(95): Homolog of NCBI NO: 7433481 NR Description: rRNA (adenine-N6,N6-)-dimethyltransferase (EC
  misc_feature (56)..(95): Homolog of NCBI NO: 2500510 NR Description: DIMETHYLADENOSINE TRANSFERASE
  misc_feature (1)..(39): Homolog of NCBI NO: 7433481 NR Description: rRNA (adenine-N6,N6-)-dimethyltransferase (EC
  misc_feature (1)..(39): Homolog of NCBI NO: 2500510 NR Description: DIMETHYLADENOSINE TRANSFERASE
  misc_feature (1)..(71): Homolog of NCBI NO: 15226591 NR Description: putative dimethyladenosine transferase
  misc_feature (1)..(95): Homolog of NCBI NO: 34394642 NR Description: Ribosomal RNA adenine dimethylase-like protein
  misc_feature (1)..(107): Homolog of NCBI NO: 30698221 NR Description: dimethyladenosine transferase-related protein
MFRQKKKVMELQSLSAGRHGSNVEVMNQTGGDSDSDVEEDRKDDLLCLDTDASMFKERVIEILRTNGFEEKRPSKLSHRELLHLLSLFNQAGIFFHDITSLQMDLHE

SEQ ID NO: 23223 - protein, 99 aa, Arabidopsis thaliana
  peptide (1)..(99): Ceres Seq. ID no. 12322577
  misc_feature (1)..(16): Homolog of NCBI NO: 15828486 NR Description: DIMETHYLADENOSINE TRANSFERASE N'-ADENOSYL(RRNA) DIMETHYLTRANSFERASE)(16S RRNA DIMETHYLASE)(HIGH KASUGAMYCIN RESISTANCE PROTEIN KSGA) (KASUGAMYCIN
  misc_feature (1)..(87): Homolog of NCBI NO: 29246610 NR Description: GLP_13_6796_7746 [Giardia lamblia ATCC 50803]
  misc_feature (1)..(43): Homolog of NCBI NO: 6324989 NR Description: Dimethyladenosine transferase,
  misc_feature (48)..(87): Homolog of NCBI NO: 7433481 NR Description: rRNA (adenine-N6,N6-)-dimethyltransferase (EC
  misc_feature (48)..(87): Homolog of NCBI NO: 2500510 NR Description: DIMETHYLADENOSINE TRANSFERASE
  misc_feature (1)..(31): Homolog of NCBI NO: 7433481 NR Description: rRNA (adenine-N6,N6-)-dimethyltransferase (EC
  misc_feature (1)..(31): Homolog of NCBI NO: 2500510 NR Description: DIMETHYLADENOSINE TRANSFERASE
  misc_feature (1)..(63): Homolog of NCBI NO: 15226591 NR Description: putative dimethyladenosine transferase
  misc_feature (1)..(87): Homolog of NCBI NO: 34394642 NR Description: Ribosomal RNA adenine dimethylase-like protein
  misc_feature (1)..(99): Homolog of NCBI NO: 30698221 NR Description: dimethyladenosine transferase-related protein
MELQSLSAGRHGSNVEVMNQTGGDSDSDVEEDRKDDLLCLDTDASMFKERVIEILRTNGFEEKRPSKLSHRELLHLLSLFNQAGIFFHDITSLQMDLHE

SEQ ID NO: 23224 - DNA, 828 bp, Arabidopsis thaliana
  misc_feature (1)..(828): Ceres Seq. ID no. 12322571
  misc_feature: MA Experiment ID: 108501 Result: Up-regulated in Transcription
  misc_feature: MA Experiment 108501 PARAMETER Experiment Name: At_ap2_floral_buds_cDNA_P Parameter: Plant Line Value: ap2 (Ler.)
  misc_feature: MA Experiment 108501 PARAMETER Experiment Name: At_ap2_floral_buds_cDNA_P Parameter: Tissue Value: Closed Flower
  misc_feature: MA Experiment ID: 108579 Result: Up-regulated in Transcription
  misc_feature: MA Experiment 108579 PARAMETER Experiment Name: At_4deg_Cold_cDNA_P Parameter: Temperature (deg C) Value: 4 vs. 22
  misc_feature: MA Experiment 108579 PARAMETER Experiment Name: At_4deg_Cold_cDNA_P Parameter: Timepoint (hr) Value: 6
  misc_feature: MA Experiment 108579 PARAMETER Experiment Name: At_4deg_Cold_cDNA_P Parameter: Tissue Value: Aerial
  misc_feature: MA Experiment ID: 108595 Result: Up-regulated in Transcription
  misc_feature: MA Experiment 108595 PARAMETER Experiment Name: At_Ler-pi_Ovule_cDNA_P Parameter: Plant Line Value: null
  misc_feature: MA Experiment ID: 20000234 Result: Up-regulated in Transcription
  misc_feature: MA Experiment 20000234 PARAMETER Experiment Name: At_Siliques_P Parameter: Age (day) Value: 21
  misc_feature: MA Experiment 20000234 PARAMETER Experiment Name: At_Siliques_P Parameter: Organism Value: A. thaliana
  misc_feature: MA Experiment 20000234 PARAMETER Experiment Name: At_Siliques_P Parameter: Plant Line Value: WS
  misc_feature: MA Experiment 20000234 PARAMETER Experiment Name: At_Siliques_P Parameter: Tissue Value: Less Than 5mm Siliques vs. Whole Plant
  misc_feature: MA Experiment ID: 20000235 Result: Up-regulated in Transcription
  misc_feature: MA Experiment 20000235 PARAMETER Experiment Name: At_Siliques_P Parameter: Age (day) Value: 21
  misc_feature: MA Experiment 20000235 PARAMETER Experiment Name: At_Siliques_P Parameter: Organism Value: A. thaliana
  misc_feature: MA Experiment 20000235 PARAMETER Experiment Name: At_Siliques_P Parameter: Plant Line Value: WS
  misc_feature: MA Experiment 20000235 PARAMETER Experiment Name: At_Siliques_P Parameter: Tissue Value: 5-10mm Siliques vs. Whole Plant
  misc_feature: MA Experiment ID: 20000264 Result: Up-regulated in Transcription
  misc_feature: MA Experiment 20000264 PARAMETER Experiment Name: At_Open_Flower_P Parameter: Age (day) Value: 21
  misc_feature: MA Experiment 20000264 PARAMETER Experiment Name: At_Open_Flower_P Parameter: Plant Line Value: WS
  misc_feature: MA Experiment 20000264 PARAMETER Experiment Name: At_Open_Flower_P Parameter: Tissue Value: Open Flower vs. Whole Plant
  misc_feature: MA Experiment ID: 20000286 Result: Up-regulated in Transcription
  misc_feature: MA Experiment 20000286 PARAMETER Experiment Name: At_Open_Flower_P Parameter: Age (day) Value: 21
  misc_feature: MA Experiment 20000286 PARAMETER Experiment Name: At_Open_Flower_P Parameter: Plant Line Value: WS
  misc_feature: MA Experiment 20000286 PARAMETER Experiment Name: At_Open_Flower_P Parameter: Tissue Value: Half Open vs. Whole Plant
  misc_feature: MA Experiment ID: 20000439 Result: Down-regulated in Transcription
  misc_feature: MA Experiment 20000439 PARAMETER Experiment Name: At_Roots__P Parameter: Age (day) Value: 14 vs. 21
  misc_feature: MA Experiment 20000439 PARAMETER Experiment Name: At_Roots__P Parameter: Organism Value: A. thaliana
  misc_feature: MA Experiment 20000439 PARAMETER Experiment Name: At_Roots__P Parameter: Tissue Value: Roots vs. Whole Plant
  misc_feature: MA Experiment ID: 20001911 Result: Up-regulated in Transcription
  misc_feature: MA Experiment 20001911 PARAMETER Experiment Name: At_Drought_Reproduction_P Parameter: Age (day) Value: 40
  misc_feature: MA Experiment 20001911 PARAMETER Experiment Name: At_Drought_Reproduction_P Parameter: Organism Value: A. thaliana
  misc_feature: MA Experiment 20001911 PARAMETER Experiment Name: At_Drought_Reproduction_P Parameter: Plant Line Value: WS
  misc_feature: MA Experiment 20001911 PARAMETER Experiment Name: At_Drought_Reproduction_P Parameter: Timepoint (day) Value: 10
  misc_feature: MA Experiment 20001911 PARAMETER Experiment Name: At_Drought_Reproduction_P Parameter: Tissue Value: Flowers
  misc_feature: MA Experiment 20001911 PARAMETER Experiment Name: At_Drought_Reproduction_P Parameter: Treatment Value: Drought vs. No Drought
actcaacacaaactctttacgaatacttttaagtatggcttcttcttctgcaaccaagtttgttgatctgttcccatgtcttttcttagcttgcctcttcgtgttcacatactcaaacaacctcgtcgtggctgaaaattccaacaaagtgaagatcaatctttactatgaatcactttgtccctattgtcaaaatttcattgttgatgatctaggtaaaatctttgactccgatctcctcaaaatcaccgatctcaagctcgttccattcggtaacgctcatatctccaataatctgactattacttgccagcatggtgaagaggaatgcaaacttaacgctctcgaagcttgcggtataagaactttgcccgatccgaaattgcagtacaagttcatacgctgcgttgaaaaagatacgaatgaatgggaatcatgtgttaaaaaatctggacgtgagaaagccatcaatgattgttacaatggtgatctctctcaaaagctgatacttgggtatgcaaaactgacctcgagtttgaagccaaaacatgaatacgtaccatgggtcacactcaacggcaaaccactctatgacaattaccataatttggtcgcacaagtctgcaaagcgtacaaaggaaaggatctcccaaaactatgcagttcctcggtcttgtatgagaggaaagtgtcaaagtttcaagtctcctatgtagatgaagctatcaattaataagttaattaacaaacttcttattgaaactaagatggatctaatctttatgctataagtggaatgataaataaagacgttttatctgaactttt

SEQ ID NO: 23225 - protein, 243 aa, Arabidopsis thaliana
  peptide (1)..(243): Ceres Seq. ID no. 12322572
  misc_feature (50)..(154): Pfam Name: Gamma interferon inducible lysosomal thiol Pfam Description: Gamma interferon inducible lysosomal thiol
  misc_feature (14)..(221): Homolog of NCBI NO: 18390723 NR Description: expressed protein
  misc_feature (27)..(168): Homolog of NCBI NO: 7487271 NR Description: hypothetical protein T20K18.220 - Arabidopsis
  misc_feature (27)..(243): Homolog of NCBI NO: 22328587 NR Description: putative protein
  misc_feature (12)..(243): Homolog of NCBI NO: 15235540 NR Description: putative protein
  misc_feature (12)..(243): Homolog of NCBI NO: 21593852 NR Description: unknown [Arabidopsis thaliana]
  misc_feature (12)..(243): Homolog of NCBI NO: 15235523 NR Description: putative protein; protein id: At4g12900.1
  misc_feature (67)..(243): Homolog of NCBI NO: 18252829 NR Description: putative protein [Arabidopsis thaliana]
  misc_feature (12)..(232): Homolog of NCBI NO: 7487272 NR Description: hypothetical protein T20K18.240 - Arabidopsis
  misc_feature (12)..(243): Homolog of NCBI NO: 21593076 NR Description: unknown [Arabidopsis thaliana]
  misc_feature (12)..(243): Homolog of NCBI NO: 18413888 NR Description: putative protein
LNTNSLRILLSMASSSATKFVDLFPCLFLACLFVFTYSNNLVVAENSNKVKINLYYESLCPYCQNFIVDDLGKIFDSDLLKITDLKLVPFGNAHISNNLTITCQHGEEECKLNALEACGIRTLPDPKLQYKFIRCVEKDTNEWESCVKKSGREKAINDCYNGDLSQKLILGYAKLTSSLKPKHEYVPWVTLNGKPLYDNYHNLVAQVCKAYKGKDLPKLCSSSVLYERKVSKFQVSYVDEAIN

SEQ ID NO: 23226 - protein, 232 aa, Arabidopsis thaliana
  peptide (1)..(232): Ceres Seq. ID no. 12322573
  misc_feature (39)..(143): Pfam Name: Gamma interferon inducible lysosomal thiol Pfam Description: Gamma interferon inducible lysosomal thiol
  misc_feature (56)..(232): Homolog of NCBI NO: 18252829 NR Description: putative protein [Arabidopsis thaliana]
  misc_feature (1)..(221): Homolog of NCBI NO: 7487272 NR Description: hypothetical protein T20K18.240 - Arabidopsis
  misc_feature (3)..(210): Homolog of NCBI NO: 18390723 NR Description: expressed protein
  misc_feature (16)..(232): Homolog of NCBI NO: 22328587 NR Description: putative protein
  misc_feature (1)..(232): Homolog of NCBI NO: 21593852 NR Description: unknown [Arabidopsis thaliana]
  misc_feature (1)..(232): Homolog of NCBI NO: 15235523 NR Description: putative protein; protein id: At4g12900.1
  misc_feature (1)..(232): Homolog of NCBI NO: 15235540 NR Description: putative protein
  misc_feature (16)..(157): Homolog of NCBI NO: 7487271 NR Description: hypothetical protein T20K18.220 - Arabidopsis
  misc_feature (1)..(232): Homolog of NCBI NO: 21593076 NR Description: unknown [Arabidopsis thaliana]
  misc_feature (1)..(232): Homolog of NCBI NO: 18413888 NR Description: putative protein
MASSSATKFVDLFPCLFLACLFVFTYSNNLVVAENSNKVKINLYYESLCPYCQNFIVDDLGKIFDSDLLKITDLKLVPFGNAHISNNLTITCQHGEEECKLNALEACGIRTLPDPKLQYKFIRCVEKDTNEWESCVKKSGREKAINDCYNGDLSQKLILGYAKLTSSLKPKHEYVPWVTLNGKPLYDNYHNLVAQVCKAYKGKDLPKLCSSSVLYERKVSKFQVSYVDEAIN

SEQ ID NO: 23227 - DNA, 1843 bp, Arabidopsis thaliana
  misc_feature (1)..(1843): Ceres Seq. ID no. 13489341
  misc_feature: MA Experiment ID: 20000173 Result: Down-regulated in Transcription
  misc_feature: MA Experiment 20000173 PARAMETER Experiment Name: At_42deg_Heat_P Parameter: Age (day) Value: 14
  misc_feature: MA Experiment 20000173 PARAMETER Experiment Name: At_42deg_Heat_P Parameter: Organism Value: A. thaliana
  misc_feature: MA Experiment 20000173 PARAMETER Experiment Name: At_42deg_Heat_P Parameter: Plant Line Value: WS
  misc_feature: MA Experiment 20000173 PARAMETER Experiment Name: At_42deg_Heat_P Parameter: Temperature (deg C) Value: 42 vs. 22
  misc_feature: MA Experiment 20000173 PARAMETER Experiment Name: At_42deg_Heat_P Parameter: Timepoint (hr) Value: 6
  misc_feature: MA Experiment 20000173 PARAMETER Experiment Name: At_42deg_Heat_P Parameter: Tissue Value: Aerial
  misc_feature: MA Experiment ID: 20000227 Result: Down-regulated in Transcription
  misc_feature: MA Experiment 20000227 PARAMETER Experiment Name: At_Root-Tips-vs-Tops_P Parameter: Tissue Value: Root Tips vs. Root Tops
  misc_feature: MA Experiment ID: 20000234 Result: Down-regulated in Transcription
  misc_feature: MA Experiment 20000234 PARAMETER Experiment Name: At_Siliques_P Parameter: Age (day) Value: 21
  misc_feature: MA Experiment 20000234 PARAMETER Experiment Name: At_Siliques_P Parameter: Organism Value: A. thaliana
  misc_feature: MA Experiment 20000234 PARAMETER Experiment Name: At_Siliques_P Parameter: Plant Line Value: WS
  misc_feature: MA Experiment 20000234 PARAMETER Experiment Name: At_Siliques_P Parameter: Tissue Value: Less Than 5mm Siliques vs. Whole Plant
  misc_feature: MA Experiment ID: 20001451 Result: Down-regulated in Transcription
  misc_feature: MA Experiment 20001451 PARAMETER Experiment Name: At_Far-red-induction_P Parameter: Age (day) Value: 7
  misc_feature: MA Experiment 20001451 PARAMETER Experiment Name: At_Far-red-induction_P Parameter: Light Value: Far-red vs. White
  misc_feature: MA Experiment 20001451 PARAMETER Experiment Name: At_Far-red-induction_P Parameter: Organism Value: A. thaliana
  misc_feature: MA Experiment 20001451 PARAMETER Experiment Name: At_Far-red-induction_P Parameter: Plant Line Value: Columbia
  misc_feature: MA Experiment 20001451 PARAMETER Experiment Name: At_Far-red-induction_P Parameter: Timepoint (hr) Value: 24
  misc_feature: MA Experiment 20001451 PARAMETER Experiment Name: At_Far-red-induction_P Parameter: Tissue Value: Whole Plant
  misc_feature: MA Experiment ID: 20001557 Result: Up-regulated in Transcription
  misc_feature: MA Experiment 20001557 PARAMETER Experiment Name: At_Drought_Soil_Dry_P Parameter: Age (day) Value: 27
  misc_feature: MA Experiment 20001557 PARAMETER Experiment Name: At_Drought_Soil_Dry_P Parameter: Organism Value: A. thaliana
  misc_feature: MA Experiment 20001557 PARAMETER Experiment Name: At_Drought_Soil_Dry_P Parameter: Plant Line Value: WS
  misc_feature: MA Experiment 20001557 PARAMETER Experiment Name: At_Drought_Soil_Dry_P Parameter: Post Timepoint (hr) Value: 3
  misc_feature: MA Experiment 20001557 PARAMETER Experiment Name: At_Drought_Soil_Dry_P Parameter: Post-Treatment Value: Re-Water vs. No Drought
  misc_feature: MA Experiment 20001557 PARAMETER Experiment Name: At_Drought_Soil_Dry_P Parameter: Timepoint (day) Value: 13
  misc_feature: MA Experiment 20001557 PARAMETER Experiment Name: At_Drought_Soil_Dry_P Parameter: Treatment Value: Drought vs. No Drought
  misc_feature: MA Experiment ID: 20001911 Result: Down-regulated in Transcription
  misc_feature: MA Experiment 20001911 PARAMETER Experiment Name: At_Drought_Reproduction_P Parameter: Age (day) Value: 40
  misc_feature: MA Experiment 20001911 PARAMETER Experiment Name: At_Drought_Reproduction_P Parameter: Organism Value: A. thaliana
  misc_feature: MA Experiment 20001911 PARAMETER Experiment Name: At_Drought_Reproduction_P Parameter: Plant Line Value: WS
  misc_feature: MA Experiment 20001911 PARAMETER Experiment Name: At_Drought_Reproduction_P Parameter: Timepoint (day) Value: 10
  misc_feature: MA Experiment 20001911 PARAMETER Experiment Name: At_Drought_Reproduction_P Parameter: Tissue Value: Flowers
  misc_feature: MA Experiment 20001911 PARAMETER Experiment Name: At_Drought_Reproduction_P Parameter: Treatment Value: Drought vs. No Drought
cggcacgaggaaaggggaaaaaaaaaaaaaatcagattcctgatattttctgcttcgctttgctttggcctttgggtttgctttgctttttatctccacaataataatattcgttaacctctcctcgttctcgtcgctgtttcttcccgatcttcgctatagttctggattcaaaatctctcttccccaatagatgtttgtctcttaatttttcatttttctgcaaaatcaaaatttttaagagctatggaggaagagaatgttactagttcaccttcaacaccggtacataggcttaggcatcgaagacgttctaatgaggttgttacggatggggataaagtgaatgcaagtcctttgttggttaatgatcggaataagtacaaatctttcatggtccggacctactctacgttatggatgattggtggttttgttttggttgtctacatgggtcatctttatatcacagctatggttgttgttattcaaatatttatggctaaagagttgtttaatctgctgaggaaagctcctgaggataaatgtctcccctatattaaacagctcaattggcacttctttttcactgccatgcttttcgtttatggacggatccttagtcaacggttagccaataccatgactgcagatcagttcttctatcggctagtcagcggcttaatcaaataccatatggcaatctgttacttgttgtatattataggtttcatgtggttcattctcacattaaagaagaagatgtacaagtaccagtttggccagtatgcttggacccacatgatcttgatagtcgtgtttactcaatcgtcgttcactgttgccaacatatttgaagggatcttctggtttcttctcccagcatctttaattataatcaacgacatcttcgcctacattttcggtttcttctttggaagaacgcctttaataaagctgtctccaaagaaaacatgggagggattcatcggagcctctgtgacaactatcatctctgcatttgttctggcaaatattttgggtcgtttcccttggttgacatgcccacgacaggatttgtccactggctggctacagtgtgacgctgatccattgttcaaacctgaaccttttgctttacctgcatggattccagaatggtttccttggaaggaaatgacgatcctccctgttcagtggcatgctttatgcctcggtttgttcgcttcaatcatagcaccttttggaggatttttcgctagcggtttcaaaagagcattcaaaattaaggactttggtgatagtattccaggacatggtggaatcacagatagaatggactgccagatggttatggcagtatttgcctacatatatcttcaatcatttattgtctcccaaagcgtttcggttgacaaaatcctagaccagatattgacgaaccttacctttgaggaacaacaagcgctcttcgtgaagttaggacaaatgctgaaggacaagctctcataggctccattgccaaaagtttcttttattcagattccgattctccaagaacaggttcctctggaatatccttttatctttgtccttactagagacaataaatttaaaattggattaagatttgttgtttcctgccattgtaaatcctctcgaaatttgtcgaaaaaattagaagtttttttaaaagtcttctcattggatacaataggtttgaagaaagttgtatctactactatctacttatttagtagctttggtggtttttagctgtattttgtatattggttaaaatgaaacaacatttggtttgtttgtctcatgattcgatttgttc

SEQ ID NO: 23228 - protein, 421 aa, Arabidopsis thaliana
  peptide (1)..(421): Ceres Seq. ID no. 13489342
  misc_feature (31)..(416): Homolog of NCBI NO: 40743157 NR Description: hypothetical protein AN5166.2 [Aspergillus
  misc_feature (385)..(416): Homolog of NCBI NO: 37532798 NR Description: putative phosphatidate cytidylyltransferase
  misc_feature (277)..(367): Homolog of NCBI NO: 37532798 NR Description: putative phosphatidate cytidylyltransferase
  misc_feature (5)..(132): Homolog of NCBI NO: 37532798 NR Description: putative phosphatidate cytidylyltransferase
  misc_feature (9)..(420): Homolog of NCBI NO: 15236874 NR Description: phosphatidate cytidylyltransferase, putative
  misc_feature (5)..(416): Homolog of NCBI NO: 20303635 NR Description: putative CDP-diacylglycerol synthetase
  misc_feature (1)..(419): Homolog of NCBI NO: 3121837 NR Description: Phosphatidate cytidylyltransferase synthetase) (CDP-diglyceride pyrophosphorylase) synthase) (CDS) (CTP:phosphatidate cytidylyltransferase) (CDP-DAG
  misc_feature (1)..(420): Homolog of NCBI NO: 15235611 NR Description: phosphatidate cytidylyltransferase, putative
  misc_feature (1)..(421): Homolog of NCBI NO: 7484839 NR Description: CDP-diacylglycerol synthetase homolog F24O1.17 -
  misc_feature (1)..(421): Homolog of NCBI NO: 30696710 NR Description: phosphatidate cytidylyltransferase (CDS)
  misc_feature (31)..(416): Homolog of NCBI NO: 40743157 NR Description: hypothetical protein AN5166.2 [Aspergillus
  misc_feature (385)..(416): Homolog of NCBI NO: 37532798 NR Description: putative phosphatidate cytidylyltransferase
  misc_feature (277)..(367): Homolog of NCBI NO: 37532798 NR Description: putative phosphatidate cytidylyltransferase
  misc_feature (5)..(132): Homolog of NCBI NO: 37532798 NR Description: putative phosphatidate cytidylyltransferase
  misc_feature (9)..(420): Homolog of NCBI NO: 15236874 NR Description: phosphatidate cytidylyltransferase, putative
  misc_feature (5)..(416): Homolog of NCBI NO: 20303635 NR Description: putative CDP-diacylglycerol synthetase
  misc_feature (1)..(419): Homolog of NCBI NO: 3121837 NR Description: Phosphatidate cytidylyltransferase synthetase) (CDP-diglyceride pyrophosphorylase) synthase) (CDS) (CTP:phosphatidate cytidylyltransferase) (CDP-DAG
  misc_feature (1)..(420): Homolog of NCBI NO: 15235611 NR Description: phosphatidate cytidylyltransferase, putative
  misc_feature (1)..(421): Homolog of NCBI NO: 7484839 NR Description: CDP-diacylglycerol synthetase homolog F24O1.17 -
  misc_feature (1)..(421): Homolog of NCBI NO: 30696710 NR Description: phosphatidate cytidylyltransferase (CDS)
MEEENVTSSPSTPVHRLRHRRRSNEVVTDGDKVNASPLLVNDRNKYKSFMVRTYSTLWMIGGFVLVVYMGHLYITAMVVVIQIFMAKELFNLLRKAPEDKCLPYIKQLNWHFFFTAMLFVYGRILSQRLANTMTADQFFYRLVSGLIKYHMAICYLLYIIGFMWFILTLKKKMYKYQFGQYAWTHMILIVVFTQSSFTVANIFEGIFWFLLPASLIIINDIFAYIFGFFFGRTPLIKLSPKKTWEGFIGASVTTIISAFVLANILGRFPWLTCPRQDLSTGWLQCDADPLFKPEPFALPAWIPEWFPWKEMTILPVQWHALCLGLFASIIAPFGGFFASGFKRAFKIKDFGDSIPGHGGITDRMDCQMVMAVFAYIYLQSFIVSQSVSVDKILDQILTNLTFEEQQALFVKLGQMLKDKLS

SEQ ID NO: 23229 - protein, 372 aa, Arabidopsis thaliana
  peptide (1)..(372): Ceres Seq. ID no. 13489343
  misc_feature (1)..(367): Homolog of NCBI NO: 40743157 NR Description: hypothetical protein AN5166.2 [Aspergillus
  misc_feature (336)..(367): Homolog of NCBI NO: 37532798 NR Description: putative phosphatidate cytidylyltransferase
  misc_feature (228)..(318): Homolog of NCBI NO: 37532798 NR Description: putative phosphatidate cytidylyltransferase
  misc_feature (1)..(83): Homolog of NCBI NO: 37532798 NR Description: putative phosphatidate cytidylyltransferase
  misc_feature (1)..(371): Homolog of NCBI NO: 15236874 NR Description: phosphatidate cytidylyltransferase, putative
  misc_feature (1)..(367): Homolog of NCBI NO: 20303635 NR Description: putative CDP-diacylglycerol synthetase
  misc_feature (1)..(370): Homolog of NCBI NO: 3121837 NR Description: Phosphatidate cytidylyltransferase synthetase) (CDP-diglyceride pyrophosphorylase) synthase) (CDS) (CTP:phosphatidate cytidylyltransferase) (CDP-DAG
  misc_feature (1)..(371): Homolog of NCBI NO: 15235611 NR Description: phosphatidate cytidylyltransferase, putative
  misc_feature (1)..(372): Homolog of NCBI NO: 7484839 NR Description: CDP-diacylglycerol synthetase homolog F24O1.17 -
  misc_feature (1)..(372): Homolog of NCBI NO: 30696710 NR Description: phosphatidate cytidylyltransferase (CDS)
  misc_feature (1)..(367): Homolog of NCBI NO: 40743157 NR Description: hypothetical protein AN5166.2 [Aspergillus
  misc_feature (336)..(367): Homolog of NCBI NO: 37532798 NR Description: putative phosphatidate cytidylyltransferase
  misc_feature (228)..(318): Homolog of NCBI NO: 37532798 NR Description: putative phosphatidate cytidylyltransferase
  misc_feature (1)..(83): Homolog of NCBI NO: 37532798 NR Description: putative phosphatidate cytidylyltransferase
  misc_feature (1)..(371): Homolog of NCBI NO: 15236874 NR Description: phosphatidate cytidylyltransferase, putative
  misc_feature (1)..(367): Homolog of NCBI NO: 20303635 NR Description: putative CDP-diacylglycerol synthetase
  misc_feature (1)..(370): Homolog of NCBI NO: 3121837 NR Description: Phosphatidate cytidylyltransferase synthetase) (CDP-diglyceride pyrophosphorylase) synthase) (CDS) (CTP:phosphatidate cytidylyltransferase) (CDP-DAG
  misc_feature (1)..(371): Homolog of NCBI NO: 15235611 NR Description: phosphatidate cytidylyltransferase, putative
  misc_feature (1)..(372): Homolog of NCBI NO: 7484839 NR Description: CDP-diacylglycerol synthetase homolog F24O1.17 -
  misc_feature (1)..(372): Homolog of NCBI NO: 30696710 NR Description: phosphatidate cytidylyltransferase (CDS)
MVRTYSTLWMIGGFVLVVYMGHLYITAMVVVIQIFMAKELFNLLRKAPEDKCLPYIKQLNWHFFFTAMLFVYGRILSQRLANTMTADQFFYRLVSGLIKYHMAICYLLYIIGFMWFILTLKKKMYKYQFGQYAWTHMILIVVFTQSSFTVANIFEGIFWFLLPASLIIINDIFAYIFGFFFGRTPLIKLSPKKTWEGFIGASVTTIISAFVLANILGRFPWLTCPRQDLSTGWLQCDADPLFKPEPFALPAWIPEWFPWKEMTILPVQWHALCLGLFASIIAPFGGFFASGFKRAFKIKDFGDSIPGHGGITDRMDCQMVMAVFAYIYLQSFIVSQSVSVDKILDQILTNLTFEEQQALFVKLGQMLKDKLS

SEQ ID NO: 23230 - protein, 363 aa, Arabidopsis thaliana
  peptide (1)..(363): Ceres Seq. ID no. 13489344
  misc_feature (1)..(358): Homolog of NCBI NO: 40743157 NR Description: hypothetical protein AN5166.2 [Aspergillus
  misc_feature (327)..(358): Homolog of NCBI NO: 37532798 NR Description: putative phosphatidate cytidylyltransferase
  misc_feature (219)..(309): Homolog of NCBI NO: 37532798 NR Description: putative phosphatidate cytidylyltransferase
  misc_feature (1)..(74): Homolog of NCBI NO: 37532798 NR Description: putative phosphatidate cytidylyltransferase
  misc_feature (1)..(362): Homolog of NCBI NO: 15236874 NR Description: phosphatidate cytidylyltransferase, putative
  misc_feature (1)..(358): Homolog of NCBI NO: 20303635 NR Description: putative CDP-diacylglycerol synthetase
  misc_feature (1)..(361): Homolog of NCBI NO: 3121837 NR Description: Phosphatidate cytidylyltransferase synthetase) (CDP-diglyceride pyrophosphorylase) synthase) (CDS) (CTP:phosphatidate cytidylyltransferase) (CDP-DAG
  misc_feature (1)..(362): Homolog of NCBI NO: 15235611 NR Description: phosphatidate cytidylyltransferase, putative
  misc_feature (1)..(363): Homolog of NCBI NO: 7484839 NR Description: CDP-diacylglycerol synthetase homolog F24O1.17 -
  misc_feature (1)..(363): Homolog of NCBI NO: 30696710 NR Description: phosphatidate cytidylyltransferase (CDS)
  misc_feature (1)..(358): Homolog of NCBI NO: 40743157 NR Description: hypothetical protein AN5166.2 [Aspergillus
  misc_feature (327)..(358): Homolog of NCBI NO: 37532798 NR Description: putative phosphatidate cytidylyltransferase
  misc_feature (219)..(309): Homolog of NCBI NO: 37532798 NR Description: putative phosphatidate cytidylyltransferase
  misc_feature (1)..(74): Homolog of NCBI NO: 37532798 NR Description: putative phosphatidate cytidylyltransferase
  misc_feature (1)..(362): Homolog of NCBI NO: 15236874 NR Description: phosphatidate cytidylyltransferase, putative
  misc_feature (1)..(358): Homolog of NCBI NO: 20303635 NR Description: putative CDP-diacylglycerol synthetase
  misc_feature (1)..(361): Homolog of NCBI NO: 3121837 NR Description: Phosphatidate cytidylyltransferase synthetase) (CDP-diglyceride pyrophosphorylase) synthase) (CDS) (CTP:phosphatidate cytidylyltransferase) (CDP-DAG
  misc_feature (1)..(362): Homolog of NCBI NO: 15235611 NR Description: phosphatidate cytidylyltransferase, putative
  misc_feature (1)..(363): Homolog of NCBI NO: 7484839 NR Description: CDP-diacylglycerol synthetase homolog F24O1.17 -
  misc_feature (1)..(363): Homolog of NCBI NO: 30696710 NR Description: phosphatidate cytidylyltransferase (CDS)
MIGGFVLVVYMGHLYITAMVVVIQIFMAKELFNLLRKAPEDKCLPYIKQLNWHFFFTAMLFVYGRILSQRLANTMTADQFFYRLVSGLIKYHMAICYLLYIIGFMWFILTLKKKMYKYQFGQYAWTHMILIVVFTQSSFTVANIFEGIFWFLLPASLIIINDIFAYIFGFFFGRTPLIKLSPKKTWEGFIGASVTTIISAFVLANILGRFPWLTCPRQDLSTGWLQCDADPLFKPEPFALPAWIPEWFPWKEMTILPVQWHALCLGLFASIIAPFGGFFASGFKRAFKIKDFGDSIPGHGGITDRMDCQMVMAVFAYIYLQSFIVSQSVSVDKILDQILTNLTFEEQQALFVKLGQMLKDKLS

SEQ ID NO: 23231 - DNA, 940 bp, Arabidopsis thaliana
  misc_feature (1)..(940): Ceres Seq. ID no. 12332895
  misc_feature: MA Experiment ID: 108434 Result: Up-regulated in Transcription
  misc_feature: MA Experiment 108434 PARAMETER Experiment Name: At_Root_Tips_cDNA_P Parameter: Tissue Value: Root Tips
  misc_feature: MA Experiment ID: 108462 Result: Down-regulated in Transcription
  misc_feature: MA Experiment 108462 PARAMETER Experiment Name: At_Germinating_Seeds_cDNA_P Parameter: Age (day) Value: 2 vs. 0
  misc_feature: MA Experiment 108462 PARAMETER Experiment Name: At_Germinating_Seeds_cDNA_P Parameter: Tissue Value: Germinating Seeds
  misc_feature: MA Experiment ID: 108463 Result: Down-regulated in Transcription
  misc_feature: MA Experiment 108463 PARAMETER Experiment Name: At_Germinating_Seeds_cDNA_P Parameter: Age (day) Value: 3 vs. 0
  misc_feature: MA Experiment 108463 PARAMETER Experiment Name: At_Germinating_Seeds_cDNA_P Parameter: Tissue Value: Germinating Seeds
  misc_feature: MA Experiment ID: 108464 Result: Down-regulated in Transcription
  misc_feature: MA Experiment 108464 PARAMETER Experiment Name: At_Germinating_Seeds_cDNA_P Parameter: Age (day) Value: 4 vs. 0
  misc_feature: MA Experiment 108464 PARAMETER Experiment Name: At_Germinating_Seeds_cDNA_P Parameter: Tissue Value: Germinating Seeds
  misc_feature: MA Experiment ID: 108573 Result: Down-regulated in Transcription
  misc_feature: MA Experiment 108573 PARAMETER Experiment Name: At_Drought_cDNA_P Parameter: Timepoint (hr) Value: 6
  misc_feature: MA Experiment 108573 PARAMETER Experiment Name: At_Drought_cDNA_P Parameter: Tissue Value: Aerial
  misc_feature: MA Experiment 108573 PARAMETER Experiment Name: At_Drought_cDNA_P Parameter: Treatment Value: Drought vs. No Drought
  misc_feature: MA Experiment ID: 20000496 Result: Up-regulated in Transcription
  misc_feature: MA Experiment 20000496 PARAMETER Experiment Name: At_Guard_Cells_P Parameter: Harvest Date Value: 7/19/2002
  misc_feature: MA Experiment 20000496 PARAMETER Experiment Name: At_Guard_Cells_P Parameter: Organism Value: Canola
  misc_feature: MA Experiment 20000496 PARAMETER Experiment Name: At_Guard_Cells_P Parameter: Tissue Value: Guard Cells vs. Leaves
  misc_feature: MA Experiment ID: 20001558 Result: Up-regulated in Transcription
  misc_feature: MA Experiment 20001558 PARAMETER Experiment Name: At_Drought_Soil_Dry_P Parameter: Age (day) Value: 27
  misc_feature: MA Experiment 20001558 PARAMETER Experiment Name: At_Drought_Soil_Dry_P Parameter: Organism Value: A. thaliana
  misc_feature: MA Experiment 20001558 PARAMETER Experiment Name: At_Drought_Soil_Dry_P Parameter: Plant Line Value: WS
  misc_feature: MA Experiment 20001558 PARAMETER Experiment Name: At_Drought_Soil_Dry_P Parameter: Post Timepoint (hr) Value: 6
  misc_feature: MA Experiment 20001558 PARAMETER Experiment Name: At_Drought_Soil_Dry_P Parameter: Post-Treatment Value: Re-Water vs. No Drought
  misc_feature: MA Experiment 20001558 PARAMETER Experiment Name: At_Drought_Soil_Dry_P Parameter: Timepoint (day) Value: 13
  misc_feature: MA Experiment 20001558 PARAMETER Experiment Name: At_Drought_Soil_Dry_P Parameter: Treatment Value: Drought vs. No Drought
  misc_feature: MA Experiment ID: 20001560 Result: Up-regulated in Transcription
  misc_feature: MA Experiment 20001560 PARAMETER Experiment Name: At_Drought_Soil_Dry_P Parameter: Age (day) Value: 28
  misc_feature: MA Experiment 20001560 PARAMETER Experiment Name: At_Drought_Soil_Dry_P Parameter: Organism Value: A. thaliana
  misc_feature: MA Experiment 20001560 PARAMETER Experiment Name: At_Drought_Soil_Dry_P Parameter: Plant Line Value: WS
  misc_feature: MA Experiment 20001560 PARAMETER Experiment Name: At_Drought_Soil_Dry_P Parameter: Post Timepoint (hr) Value: None
  misc_feature: MA Experiment 20001560 PARAMETER Experiment Name: At_Drought_Soil_Dry_P Parameter: Post-Treatment Value: None
  misc_feature: MA Experiment 20001560 PARAMETER Experiment Name: At_Drought_Soil_Dry_P Parameter: Timepoint (day) Value: 14
  misc_feature: MA Experiment 20001560 PARAMETER Experiment Name: At_Drought_Soil_Dry_P Parameter: Treatment Value: Drought vs. No Drought
acgcagttcacggtaagacatagaaacaaagtagagagatttcacggcgacggtattggaatggctaaacgggagttaagtggaggagatagcagcagcgaagatgaagatcccaagtggagagctgcaatcaattcgatagccaccaccaccgtttacggcgcctccgccacgaaacccgcagctactcagtcacataacaatggagattttcgtctcaaacctaaaaaactaacacatgggcaaatcaaggtgaagaatcttttgaatgaaatggtggagaagactttagactttgttgaagatcctgtcaatattcctgaggataaacccgagaatgactgtggagttcggttatttaagcggtgtgctactggcattgtatttgatcatgtagatgagattagaggacctaaaaagaagcctaatttacgccctgacaaaggagttgaaggaagctctaaagagtttaagaaacgagtaaaatcaattgctgttgatggttcggatattttaactgctgctatggaagcggcgaagaaagcctcggctagattagatgcgaaagaagtggcagcgaaagataaagctaagaaagaggaagagagaatcgcagagttgaagaaagtaagaggagaaaaatggttaccttctattgaaagggcaatgaaaaaggaaatgaagcgtatcaaacatacggcatggaagtctgcaatgtcgtgagctttcttcttttgaacttattatcaattttggagtctcattaattgaagaagaaacacagaatcattcactcttggctacaaaacttttactgaaagaagattatgaaattgttgtgtagactagagagattatttgttcttgatgtagtgagagtgaagttcttcagagatgttgtcatcattgtcgtctttgatccaaacgaaatcttctaatc

SEQ ID NO: 23232 - protein, 240 aa, Arabidopsis thaliana
  peptide (1)..(240): Ceres Seq. ID no. 12332896
  misc_feature (21)..(240): Homolog of NCBI NO: 15229629 NR Description: putative protein
  misc_feature (21)..(240): Homolog of NCBI NO: 21593080 NR Description: unknown [Arabidopsis thaliana]
TQFTVRHRNKVERFHGDGIGMAKRELSGGDSSSEDEDPKWRAAINSIATTTVYGASATKPAATQSHNNGDFRLKPKKLTHGQIKVKNLLNEMVEKTLDFVEDPVNIPEDKPENDCGVRLFKRCATGIVFDHVDEIRGPKKKPNLRPDKGVEGSSKEFKKRVKSIAVDGSDILTAAMEAAKKASARLDAKEVAAKDKAKKEEERIAELKKVRGEKWLPSIERAMKKEMKRIKHTAWKSAMS

SEQ ID NO: 23233 - protein, 220 aa, Arabidopsis thaliana
  peptide (1)..(220): Ceres Seq. ID no. 12332897
  misc_feature (1)..(220): Homolog of NCBI NO: 15229629 NR Description: putative protein
  misc_feature (1)..(220): Homolog of NCBI NO: 21593080 NR Description: unknown [Arabidopsis thaliana]
MAKRELSGGDSSSEDEDPKWRAAINSIATTTVYGASATKPAATQSHNNGDFRLKPKKLTHGQIKVKNLLNEMVEKTLDFVEDPVNIPEDKPENDCGVRLFKRCATGIVFDHVDEIRGPKKKPNLRPDKGVEGSSKEFKKRVKSIAVDGSDILTAAMEAAKKASARLDAKEVAAKDKAKKEEERIAELKKVRGEKWLPSIERAMKKEMKRIKHTAWKSAMS

SEQ ID NO: 23234 - protein, 149 aa, Arabidopsis thaliana
  peptide (1)..(149): Ceres Seq. ID no. 12332898
  misc_feature (1)..(149): Homolog of NCBI NO: 15229629 NR Description: putative protein
  misc_feature (1)..(149): Homolog of NCBI NO: 21593080 NR Description: unknown [Arabidopsis thaliana]
MVEKTLDFVEDPVNIPEDKPENDCGVRLFKRCATGIVFDHVDEIRGPKKKPNLRPDKGVEGSSKEFKKRVKSIAVDGSDILTAAMEAAKKASARLDAKEVAAKDKAKKEEERIAELKKVRGEKWLPSIERAMKKEMKRIKHTAWKSAMS

SEQ ID NO: 23235 - DNA, 1166 bp, Arabidopsis thaliana
  misc_feature (1)..(1166): Ceres Seq. ID no. 12394741
  misc_feature: MA Experiment ID: 108579 Result: Down-regulated in Transcription
  misc_feature: MA Experiment 108579 PARAMETER Experiment Name: At_4deg_Cold_cDNA_P Parameter: Temperature (deg C) Value: 4 vs. 22
  misc_feature: MA Experiment 108579 PARAMETER Experiment Name: At_4deg_Cold_cDNA_P Parameter: Timepoint (hr) Value: 6
  misc_feature: MA Experiment 108579 PARAMETER Experiment Name: At_4deg_Cold_cDNA_P Parameter: Tissue Value: Aerial
  misc_feature: MA Experiment ID: 20000171 Result: Up-regulated in Transcription
  misc_feature: MA Experiment 20000171 PARAMETER Experiment Name: At_42deg_Heat_P Parameter: Age (day) Value: 14
  misc_feature: MA Experiment 20000171 PARAMETER Experiment Name: At_42deg_Heat_P Parameter: Organism Value: A. thaliana
  misc_feature: MA Experiment 20000171 PARAMETER Experiment Name: At_42deg_Heat_P Parameter: Plant Line Value: WS
  misc_feature: MA Experiment 20000171 PARAMETER Experiment Name: At_42deg_Heat_P Parameter: Temperature (deg C) Value: 42 vs. 22
  misc_feature: MA Experiment 20000171 PARAMETER Experiment Name: At_42deg_Heat_P Parameter: Timepoint (hr) Value: 1
  misc_feature: MA Experiment 20000171 PARAMETER Experiment Name: At_42deg_Heat_P Parameter: Tissue Value: Aerial
  misc_feature: MA Experiment ID: 20000173 Result: Up-regulated in Transcription
  misc_feature: MA Experiment 20000173 PARAMETER Experiment Name: At_42deg_Heat_P Parameter: Age (day) Value: 14
  misc_feature: MA Experiment 20000173 PARAMETER Experiment Name: At_42deg_Heat_P Parameter: Organism Value: A. thaliana
  misc_feature: MA Experiment 20000173 PARAMETER Experiment Name: At_42deg_Heat_P Parameter: Plant Line Value: WS
  misc_feature: MA Experiment 20000173 PARAMETER Experiment Name: At_42deg_Heat_P Parameter: Temperature (deg C) Value: 42 vs. 22
  misc_feature: MA Experiment 20000173 PARAMETER Experiment Name: At_42deg_Heat_P Parameter: Timepoint (hr) Value: 6
  misc_feature: MA Experiment 20000173 PARAMETER Experiment Name: At_42deg_Heat_P Parameter: Tissue Value: Aerial
  misc_feature: MA Experiment ID: 20000234 Result: Up-regulated in Transcription
  misc_feature: MA Experiment 20000234 PARAMETER Experiment Name: At_Siliques_P Parameter: Age (day) Value: 21
  misc_feature: MA Experiment 20000234 PARAMETER Experiment Name: At_Siliques_P Parameter: Organism Value: A. thaliana
  misc_feature: MA Experiment 20000234 PARAMETER Experiment Name: At_Siliques_P Parameter: Plant Line Value: WS
  misc_feature: MA Experiment 20000234 PARAMETER Experiment Name: At_Siliques_P Parameter: Tissue Value: Less Than 5mm Siliques vs. Whole Plant
  misc_feature: MA Experiment ID: 20000264 Result: Up-regulated in Transcription
  misc_feature: MA Experiment 20000264 PARAMETER Experiment Name: At_Open_Flower_P Parameter: Age (day) Value: 21
  misc_feature: MA Experiment 20000264 PARAMETER Experiment Name: At_Open_Flower_P Parameter: Plant Line Value: WS
  misc_feature: MA Experiment 20000264 PARAMETER Experiment Name: At_Open_Flower_P Parameter: Tissue Value: Open Flower vs. Whole Plant
  misc_feature: MA Experiment ID: 20000265 Result: Up-regulated in Transcription
  misc_feature: MA Experiment 20000265 PARAMETER Experiment Name: At_Open_Flower_P Parameter: Age (day) Value: 21
  misc_feature: MA Experiment 20000265 PARAMETER Experiment Name: At_Open_Flower_P Parameter: Plant Line Value: WS
  misc_feature: MA Experiment 20000265 PARAMETER Experiment Name: At_Open_Flower_P Parameter: Tissue Value: Closed Flower vs. Whole Plant
  misc_feature: MA Experiment ID: 20000286 Result: Up-regulated in Transcription
  misc_feature: MA Experiment 20000286 PARAMETER Experiment Name: At_Open_Flower_P Parameter: Age (day) Value: 21
  misc_feature: MA Experiment 20000286 PARAMETER Experiment Name: At_Open_Flower_P Parameter: Plant Line Value: WS
  misc_feature: MA Experiment 20000286 PARAMETER Experiment Name: At_Open_Flower_P Parameter: Tissue Value: Half Open vs. Whole Plant
  misc_feature: MA Experiment ID: 20000794 Result: Up-regulated in Transcription
  misc_feature: MA Experiment 20000794 PARAMETER Experiment Name: At_Petals_P Parameter: Age (day) Value: 23-25 days
  misc_feature: MA Experiment 20000794 PARAMETER Experiment Name: At_Petals_P Parameter: Plant Line Value: WS
  misc_feature: MA Experiment 20000794 PARAMETER Experiment Name: At_Petals_P Parameter: Tissue Value: Petals vs. Whole plant
acacccaaacacgcgacgcgagcgaagaagacgatgacgaacaaggagaaagctcgagagagaagggagaaaaaaatgcaggagatctctctccttcgaactattccttactctgaccaccataggtggtggtcttgtgaaaatgtagcagtagtgactggttcaaaccgcgggattggattcgagattgcaagacagcttgcggttcacggattgacggttgttcttacagctagaaacgtgaatgctggtcttgaagcagttaaatctttgaggcaccaagaagaaggtctcaaggtttattttcatcaacttgatgtcacagactcttcctcgattagagagtttggttgctggcttaagcaaacatttggaggtttagatattctcgtgaataatgcaggtgttaactacaatctcggctcagataatacggttgaatttgctgaaacagttatatctactaactaccaaggaaccaaaaacatgacaaaagctatgatacccttgatgagaccatctcctcatggcgctcgtgtagtcaatgttagttctcggctaggtagagtaaatggaagacgtaatagactggcaaatgtagagttgagagatcagctaagcagtccagatttgctgaccgaggaacttatagacagaactgtctctaaattcatcaaccaagtaaaagacggaacttgggaatcaggcgggtggcctcagacattcactgactactccatgtctaagcttgcagtcaatgcttacacgagactaatggcaaaagaacttgagagacgaggagaggaagagaagatttatgttaacagcttttgccctggttgggtgaagactgcgatgactggctacgccggaaatatgccacctgaagatgcagctgatactggagtttggcttagcctggtcctttccgaagagtcagtaaccggaaaattcttcgcagagagacgtgagatcaacttctgagggttgttgaatgtttgtaaacgttggaatagattgtgtcgtcttcgtttagtgccatagttttagtcaaaggtttacaaaatcaattgtaattggtaagtgaatggttgtagtcatgatacgcgtcagatttgccacaaaactaggagtttataatttaaatataattaatttttaattgc

SEQ ID NO: 23236 - protein, 327 aa, Arabidopsis thaliana
  peptide (1)..(327): Ceres Seq. ID no. 12394742
  misc_feature (26)..(136): Homolog of NCBI NO: 33146492 NR Description: carbonyl reductase -like protein
  misc_feature (145)..(319): Homolog of NCBI NO: 33146492 NR Description: carbonyl reductase -like protein
  misc_feature (47)..(137): Homolog of NCBI NO: 38346768 NR Description: OSJNBa0081C01.19 [Oryza sativa (japonica
  misc_feature (145)..(327): Homolog of NCBI NO: 38346768 NR Description: OSJNBa0081C01.19 [Oryza sativa (japonica
  misc_feature (37)..(319): Homolog of NCBI NO: 15231739 NR Description: putative protein; protein id: At3g59710.1
  misc_feature (38)..(319): Homolog of NCBI NO: 21740778 NR Description: OSJNBa0067K08.19 [Oryza sativa (japonica
  misc_feature (15)..(327): Homolog of NCBI NO: 34907100 NR Description: putative carbonyl reductase-like protein
  misc_feature (14)..(327): Homolog of NCBI NO: 15241346 NR Description: carbonyl reductase-like protein; protein id:
  misc_feature (26)..(327): Homolog of NCBI NO: 10176876 NR Description: carbonyl reductase-like protein [Arabidopsis
  misc_feature (12)..(327): Homolog of NCBI NO: 15240361 NR Description: carbonyl reductase - like protein; protein id:
TPKHATRAKKTMTNKEKARERREKKMQEISLLRTIPYSDHHRWWSCENVAVVTGSNRGIGFEIARQLAVHGLTVVLTARNVNAGLEAVKSLRHQEEGLKVYFHQLDVTDSSSIREFGCWLKQTFGGLDILVNNAGVNYNLGSDNTVEFAETVISTNYQGTKNMTKAMIPLMRPSPHGARVVNVSSRLGRVNGRRNRLANVELRDQLSSPDLLTEELIDRTVSKFINQVKDGTWESGGWPQTFTDYSMSKLAVNAYTRLMAKELERRGEEEKIYVNSFCPGWVKTAMTGYAGNMPPEDAADTGVWLSLVLSEESVTGKFFAERREINF

SEQ ID NO: 23237 - protein, 316 aa, Arabidopsis thaliana
  peptide (1)..(316): Ceres Seq. ID no. 12394743
  misc_feature (15)..(125): Homolog of NCBI NO: 33146492 NR Description: carbonyl reductase -like protein
  misc_feature (134)..(308): Homolog of NCBI NO: 33146492 NR Description: carbonyl reductase -like protein
  misc_feature (36)..(126): Homolog of NCBI NO: 38346768 NR Description: OSJNBa0081C01.19 [Oryza sativa (japonica
  misc_feature (134)..(316): Homolog of NCBI NO: 38346768 NR Description: OSJNBa0081C01.19 [Oryza sativa (japonica
  misc_feature (26)..(308): Homolog of NCBI NO: 15231739 NR Description: putative protein; protein id: At3g59710.1
  misc_feature (27)..(308): Homolog of NCBI NO: 21740778 NR Description: OSJNBa0067K08.19 [Oryza sativa (japonica
  misc_feature (4)..(316): Homolog of NCBI NO: 34907100 NR Description: putative carbonyl reductase-like protein
  misc_feature (3)..(316): Homolog of NCBI NO: 15241346 NR Description: carbonyl reductase-like protein; protein id:
  misc_feature (15)..(316): Homolog of NCBI NO: 10176876 NR Description: carbonyl reductase-like protein [Arabidopsis
  misc_feature (1)..(316): Homolog of NCBI NO: 15240361 NR Description: carbonyl reductase - like protein; protein id:
MTNKEKARERREKKMQEISLLRTIPYSDHHRWWSCENVAVVTGSNRGIGFEIARQLAVHGLTVVLTARNVNAGLEAVKSLRHQEEGLKVYFHQLDVTDSSSIREFGCWLKQTFGGLDILVNNAGVNYNLGSDNTVEFAETVISTNYQGTKNMTKAMIPLMRPSPHGARVVNVSSRLGRVNGRRNRLANVELRDQLSSPDLLTEELIDRTVSKFINQVKDGTWESGGWPQTFTDYSMSKLAVNAYTRLMAKELERRGEEEKIYVNSFCPGWVKTAMTGYAGNMPPEDAADTGVWLSLVLSEESVTGKFFAERREINF

SEQ ID NO: 23238 - protein, 302 aa, Arabidopsis thaliana
  peptide (1)..(302): Ceres Seq. ID no. 12394744
  misc_feature (1)..(111): Homolog of NCBI NO: 33146492 NR Description: carbonyl reductase -like protein
  misc_feature (120)..(294): Homolog of NCBI NO: 33146492 NR Description: carbonyl reductase -like protein
  misc_feature (22)..(112): Homolog of NCBI NO: 38346768 NR Description: OSJNBa0081C01.19 [Oryza sativa (japonica
  misc_feature (120)..(302): Homolog of NCBI NO: 38346768 NR Description: OSJNBa0081C01.19 [Oryza sativa (japonica
  misc_feature (12)..(294): Homolog of NCBI NO: 15231739 NR Description: putative protein; protein id: At3g59710.1
  misc_feature (13)..(294): Homolog of NCBI NO: 21740778 NR Description: OSJNBa0067K08.19 [Oryza sativa (japonica
  misc_feature (1)..(302): Homolog of NCBI NO: 34907100 NR Description: putative carbonyl reductase-like protein
  misc_feature (1)..(302): Homolog of NCBI NO: 15241346 NR Description: carbonyl reductase-like protein; protein id:
  misc_feature (1)..(302): Homolog of NCBI NO: 10176876 NR Description: carbonyl reductase-like protein [Arabidopsis
  misc_feature (1)..(302): Homolog of NCBI NO: 15240361 NR Description: carbonyl reductase - like protein; protein id:
MQEISLLRTIPYSDHHRWWSCENVAVVTGSNRGIGFEIARQLAVHGLTVVLTARNVNAGLEAVKSLRHQEEGLKVYFHQLDVTDSSSIREFGCWLKQTFGGLDILVNNAGVNYNLGSDNTVEFAETVISTNYQGTKNMTKAMIPLMRPSPHGARVVNVSSRLGRVNGRRNRLANVELRDQLSSPDLLTEELIDRTVSKFINQVKDGTWESGGWPQTFTDYSMSKLAVNAYTRLMAKELERRGEEEKIYVNSFCPGWVKTAMTGYAGNMPPEDAADTGVWLSLVLSEESVTGKFFAERREINF

SEQ ID NO: 23239 - DNA, 1051 bp, Arabidopsis thaliana
  misc_feature (1)..(1051): Ceres Seq. ID no. 13486926
  misc_feature: MA Experiment ID: 108434 Result: Up-regulated in Transcription
  misc_feature: MA Experiment 108434 PARAMETER Experiment Name: At_Root_Tips_cDNA_P Parameter: Tissue Value: Root Tips
  misc_feature: MA Experiment ID: 108569 Result: Down-regulated in Transcription
  misc_feature: MA Experiment 108569 PARAMETER Experiment Name: At_0.001%_MeJA__cDNA_P Parameter: Timepoint (hr) Value: 6
  misc_feature: MA Experiment 108569 PARAMETER Experiment Name: At_0.001%_MeJA__cDNA_P Parameter: Tissue Value: Aerial
  misc_feature: MA Experiment 108569 PARAMETER Experiment Name: At_0.001%_MeJA__cDNA_P Parameter: Treatment Value: 0.001% MeJA vs. No Treatment
aactttaattcgccggctctcttgccgtgttttcgattttgacaaacgaaaaaaaaatcttcaatgagataacaataatatcagcagcggaacaaggattgagaaaaggaacctttcccttttaataagccgatatagatccttggaggagaatttgtagcagaccgatctctgtctgttgtctctgtttctacgaatctctgtgtttgtcggaaatcgtaaattatgggtttgtgggatgctcttctcaattggcttcgcagcctcttcttcaagcaagaaatggagctttcattgataggacttcaaaatgcaggaaagacatcacttgttaacgttgttgcaaccggtggatacagtgaagacatgatccctacggttggtttcaacatgaggaaagtgacaaaaggaagtgtcacgatcaagctttgggatctcggtggtcaacctaggttccgcagcatgtgggaacgttactgccgttctgtttccgcgattgtgtatgtagttgatgctgctgatcctgataacctcagtgtctcgaagagtgaactccatgatttgttgagcaagacgtcgcttaatggtatccctctcctagtccttgggaacaaaatcgacaagcctggagctttgtccaaagaagccctaaccgatgaaatgggtctcaagtcactgacagatagagaagtctgttgcttcatgatatcttgcaagaactctaccaacatcgatcaagtcattgattggcttgtaaagcactccaaatcatcgaattaaactttaccccaaaaggagagaagtcaactctctgcagttgtcgatctttcttgtgtttttggtcatttgatgatgatgatggtgattgtggaagaagacacagcttttttcttttatcctgtgaaaaacaagatttgtctatgttctctgtctgattctttatctgtctttcttctgcgtatgtggctgtgttctctgtatattagatttgattggtgttccctcttcttaaagccatgatgagatcacttccttcggggtcagcttttcc

SEQ ID NO: 23240 - protein, 184 aa, Arabidopsis thaliana
  peptide (1)..(184): Ceres Seq. ID no. 13486927
  misc_feature (6)..(180): Pfam Name: ADP-ribosylation factor family Pfam Description: ADP-ribosylation factor family
  misc_feature (147)..(184): Homolog of NCBI NO: 11274625 NR Description: ADP-ribosylation factor-like protein T16K5.220 -
  misc_feature (20)..(146): Homolog of NCBI NO: 11274625 NR Description: ADP-ribosylation factor-like protein T16K5.220 -
  misc_feature (1)..(183): Homolog of NCBI NO: 18421676 NR Description: ADP-ribosylation factor, putative [Arabidopsis
  misc_feature (1)..(182): Homolog of NCBI NO: 20270343 NR Description: hypothetical protein BC015408 [Homo sapiens]
  misc_feature (20)..(184): Homolog of NCBI NO: 15229626 NR Description: ADP-ribosylation factor, putative [Arabidopsis
  misc_feature (20)..(183): Homolog of NCBI NO: 9757978 NR Description: ADP-ribosylation factor-like protein [Arabidopsis
  misc_feature (1)..(182): Homolog of NCBI NO: 38174393 NR Description: Unknown (protein for MGC:75773) [Silurana
  misc_feature (20)..(184): Homolog of NCBI NO: 9757877 NR Description: ADP-ribosylation factor-like protein [Arabidopsis
  misc_feature (1)..(184): Homolog of NCBI NO: 22331720 NR Description: ADP-ribosylation factor, putative [Arabidopsis
  misc_feature (1)..(184): Homolog of NCBI NO: 18425204 NR Description: ADP-ribosylation factor, putative [Arabidopsis
MGLWDALLNWLRSLFFKQEMELSLIGLQNAGKTSLVNVVATGGYSEDMIPTVGFNMRKVTKGSVTIKLWDLGGQPRFRSMWERYCRSVSAIVYVVDAADPDNLSVSKSELHDLLSKTSLNGIPLLVLGNKIDKPGALSKEALTDEMGLKSLTDREVCCFMISCKNSTNIDQVIDWLVKHSKSSN

SEQ ID NO: 23241 - protein, 165 aa, Arabidopsis thaliana
  peptide (1)..(165): Ceres Seq. ID no. 13486928
  misc_feature (1)..(161): Pfam Name: ADP-ribosylation factor family Pfam Description: ADP-ribosylation factor family
  misc_feature (1)..(163): Homolog of NCBI NO: 20270343 NR Description: hypothetical protein BC015408 [Homo sapiens]
  misc_feature (1)..(163): Homolog of NCBI NO: 38174393 NR Description: Unknown (protein for MGC:75773) [Silurana
  misc_feature (1)..(165): Homolog of NCBI NO: 15229626 NR Description: ADP-ribosylation factor, putative [Arabidopsis
  misc_feature (1)..(164): Homolog of NCBI NO: 9757978 NR Description: ADP-ribosylation factor-like protein [Arabidopsis
  misc_feature (128)..(165): Homolog of NCBI NO: 11274625 NR Description: ADP-ribosylation factor-like protein T16K5.220 -
  misc_feature (1)..(127): Homolog of NCBI NO: 11274625 NR Description: ADP-ribosylation factor-like protein T16K5.220 -
  misc_feature (1)..(164): Homolog of NCBI NO: 18421676 NR Description: ADP-ribosylation factor, putative [Arabidopsis
  misc_feature (1)..(165): Homolog of NCBI NO: 9757877 NR Description: ADP-ribosylation factor-like protein [Arabidopsis
  misc_feature (1)..(165): Homolog of NCBI NO: 22331720 NR Description: ADP-ribosylation factor, putative [Arabidopsis
  misc_feature (1)..(165): Homolog of NCBI NO: 18425204 NR Description: ADP-ribosylation factor, putative [Arabidopsis
MELSLIGLQNAGKTSLVNVVATGGYSEDMIPTVGFNMRKVTKGSVTIKLWDLGGQPRFRSMWERYCRSVSAIVYVVDAADPDNLSVSKSELHDLLSKTSLNGIPLLVLGNKIDKPGALSKEALTDEMGLKSLTDREVCCFMISCKNSTNIDQVIDWLVKHSKSSN

SEQ ID NO: 23242 - protein, 137 aa, Arabidopsis thaliana
  peptide (1)..(137): Ceres Seq. ID no. 13486929
  misc_feature (1)..(133): Pfam Name: ADP-ribosylation factor family Pfam Description: ADP-ribosylation factor family
  misc_feature (1)..(135): Homolog of NCBI NO: 20270343 NR Description: hypothetical protein BC015408 [Homo sapiens]
  misc_feature (1)..(135): Homolog of NCBI NO: 38174393 NR Description: Unknown (protein for MGC:75773) [Silurana
  misc_feature (1)..(137): Homolog of NCBI NO: 15229626 NR Description: ADP-ribosylation factor, putative [Arabidopsis
  misc_feature (1)..(136): Homolog of NCBI NO: 9757978 NR Description: ADP-ribosylation factor-like protein [Arabidopsis
  misc_feature (100)..(137): Homolog of NCBI NO: 11274625 NR Description: ADP-ribosylation factor-like protein T16K5.220 -
  misc_feature (1)..(99): Homolog of NCBI NO: 11274625 NR Description: ADP-ribosylation factor-like protein T16K5.220 -
  misc_feature (1)..(136): Homolog of NCBI NO: 18421676 NR Description: ADP-ribosylation factor, putative [Arabidopsis
  misc_feature (1)..(137): Homolog of NCBI NO: 9757877 NR Description: ADP-ribosylation factor-like protein [Arabidopsis
  misc_feature (1)..(137): Homolog of NCBI NO: 22331720 NR Description: ADP-ribosylation factor, putative [Arabidopsis
  misc_feature (1)..(137): Homolog of NCBI NO: 18425204 NR Description: ADP-ribosylation factor, putative [Arabidopsis
MIPTVGFNMRKVTKGSVTIKLWDLGGQPRFRSMWERYCRSVSAIVYVVDAADPDNLSVSKSELHDLLSKTSLNGIPLLVLGNKIDKPGALSKEALTDEMGLKSLTDREVCCFMISCKNSTNIDQVIDWLVKHSKSSN

SEQ ID NO: 23243 - DNA, 1132 bp, Arabidopsis thaliana
  misc_feature (1)..(1132): Ceres Seq. ID no. 12396005
  misc_feature: MA Experiment ID: 108434 Result: Down-regulated in Transcription
  misc_feature: MA Experiment 108434 PARAMETER Experiment Name: At_Root_Tips_cDNA_P Parameter: Tissue Value: Root Tips
  misc_feature: MA Experiment ID: 108461 Result: Up-regulated in Transcription
  misc_feature: MA Experiment 108461 PARAMETER Experiment Name: At_Germinating_Seeds_cDNA_P Parameter: Age (day) Value: 1 vs. 0
  misc_feature: MA Experiment 108461 PARAMETER Experiment Name: At_Germinating_Seeds_cDNA_P Parameter: Tissue Value: Germinating Seeds
  misc_feature: MA Experiment ID: 108462 Result: Up-regulated in Transcription
  misc_feature: MA Experiment 108462 PARAMETER Experiment Name: At_Germinating_Seeds_cDNA_P Parameter: Age (day) Value: 2 vs. 0
  misc_feature: MA Experiment 108462 PARAMETER Experiment Name: At_Germinating_Seeds_cDNA_P Parameter: Tissue Value: Germinating Seeds
  misc_feature: MA Experiment ID: 108463 Result: Up-regulated in Transcription
  misc_feature: MA Experiment 108463 PARAMETER Experiment Name: At_Germinating_Seeds_cDNA_P Parameter: Age (day) Value: 3 vs. 0
  misc_feature: MA Experiment 108463 PARAMETER Experiment Name: At_Germinating_Seeds_cDNA_P Parameter: Tissue Value: Germinating Seeds
  misc_feature: MA Experiment ID: 108464 Result: Up-regulated in Transcription
  misc_feature: MA Experiment 108464 PARAMETER Experiment Name: At_Germinating_Seeds_cDNA_P Parameter: Age (day) Value: 4 vs. 0
  misc_feature: MA Experiment 108464 PARAMETER Experiment Name: At_Germinating_Seeds_cDNA_P Parameter: Tissue Value: Germinating Seeds
  misc_feature: MA Experiment ID: 108473 Result: Down-regulated in Transcription
  misc_feature: MA Experiment 108473 PARAMETER Experiment Name: At_Drought_Flowers_cDNA_P Parameter: Timepoint (hr) Value: 7 d
  misc_feature: MA Experiment 108473 PARAMETER Experiment Name: At_Drought_Flowers_cDNA_P Parameter: Tissue Value: Flower
  misc_feature: MA Experiment 108473 PARAMETER Experiment Name: At_Drought_Flowers_cDNA_P Parameter: Treatment Value: Drought vs. No Drought
  misc_feature: MA Experiment ID: 108488 Result: Down-regulated in Transcription
  misc_feature: MA Experiment ID: 108501 Result: Down-regulated in Transcription
  misc_feature: MA Experiment 108501 PARAMETER Experiment Name: At_ap2_floral_buds_cDNA_P Parameter: Plant Line Value: ap2 (Ler.)
  misc_feature: MA Experiment 108501 PARAMETER Experiment Name: At_ap2_floral_buds_cDNA_P Parameter: Tissue Value: Closed Flower
  misc_feature: MA Experiment ID: 108572 Result: Down-regulated in Transcription
  misc_feature: MA Experiment 108572 PARAMETER Experiment Name: At_Drought_cDNA_P Parameter: Timepoint (hr) Value: 1
  misc_feature: MA Experiment 108572 PARAMETER Experiment Name: At_Drought_cDNA_P Parameter: Tissue Value: Aerial
  misc_feature: MA Experiment 108572 PARAMETER Experiment Name: At_Drought_cDNA_P Parameter: Treatment Value: Drought vs. No Drought
  misc_feature: MA Experiment ID: 108573 Result: Down-regulated in Transcription
  misc_feature: MA Experiment 108573 PARAMETER Experiment Name: At_Drought_cDNA_P Parameter: Timepoint (hr) Value: 6
  misc_feature: MA Experiment 108573 PARAMETER Experiment Name: At_Drought_cDNA_P Parameter: Tissue Value: Aerial
  misc_feature: MA Experiment 108573 PARAMETER Experiment Name: At_Drought_cDNA_P Parameter: Treatment Value: Drought vs. No Drought
  misc_feature: MA Experiment ID: 108579 Result: Up-regulated in Transcription
  misc_feature: MA Experiment 108579 PARAMETER Experiment Name: At_4deg_Cold_cDNA_P Parameter: Temperature (deg C) Value: 4 vs. 22
  misc_feature: MA Experiment 108579 PARAMETER Experiment Name: At_4deg_Cold_cDNA_P Parameter: Timepoint (hr) Value: 6
  misc_feature: MA Experiment 108579 PARAMETER Experiment Name: At_4deg_Cold_cDNA_P Parameter: Tissue Value: Aerial
  misc_feature: MA Experiment ID: 108585 Result: Up-regulated in Transcription
  misc_feature: MA Experiment 108585 PARAMETER Experiment Name: At_5mM_NaNP_cDNA_P Parameter: Timepoint (hr) Value: 6
  misc_feature: MA Experiment 108585 PARAMETER Experiment Name: At_5mM_NaNP_cDNA_P Parameter: Tissue Value: Aerial
  misc_feature: MA Experiment 108585 PARAMETER Experiment Name: At_5mM_NaNP_cDNA_P Parameter: Treatment Value: null
  misc_feature: MA Experiment ID: 108594 Result: Down-regulated in Transcription
  misc_feature: MA Experiment 108594 PARAMETER Experiment Name: At_Ler-rhl_Root_cDNA_P Parameter: Plant Line Value: null
  misc_feature: MA Experiment ID: 108605 Result: Up-regulated in Transcription
  misc_feature: MA Experiment 108605 PARAMETER Experiment Name: At_100uM_ABA_cDNA_P Parameter: Timepoint (hr) Value: 6
  misc_feature: MA Experiment 108605 PARAMETER Experiment Name: At_100uM_ABA_cDNA_P Parameter: Tissue Value: Aerial
  misc_feature: MA Experiment 108605 PARAMETER Experiment Name: At_100uM_ABA_cDNA_P Parameter: Treatment Value: 100uM ABA vs. No Treatment
  misc_feature: MA Experiment ID: 108607 Result: Up-regulated in Transcription
  misc_feature: MA Experiment 108607 PARAMETER Experiment Name: At_100uM_ABA_cDNA_P Parameter: Timepoint (hr) Value: 4
  misc_feature: MA Experiment 108607 PARAMETER Experiment Name: At_100uM_ABA_cDNA_P Parameter: Tissue Value: Aerial
  misc_feature: MA Experiment 108607 PARAMETER Experiment Name: At_100uM_ABA_cDNA_P Parameter: Treatment Value: 100uM ABA vs. No Treatment
  misc_feature: MA Experiment ID: 108609 Result: Up-regulated in Transcription
  misc_feature: MA Experiment 108609 PARAMETER Experiment Name: At_100uM_ABA_cDNA_P Parameter: Timepoint (hr) Value: 24
  misc_feature: MA Experiment 108609 PARAMETER Experiment Name: At_100uM_ABA_cDNA_P Parameter: Tissue Value: Aerial
  misc_feature: MA Experiment 108609 PARAMETER Experiment Name: At_100uM_ABA_cDNA_P Parameter: Treatment Value: 100uM ABA vs. No Treatment
  misc_feature: MA Experiment ID: 20000069 Result: Up-regulated in Transcription
  misc_feature: MA Experiment 20000069 PARAMETER Experiment Name: At_100uM_ABA_Mutants_cDNA_P Parameter: Plant Line Value: CS23
  misc_feature: MA Experiment 20000069 PARAMETER Experiment Name: At_100uM_ABA_Mutants_cDNA_P Parameter: Timepoint (hr) Value: 6
  misc_feature: MA Experiment 20000069 PARAMETER Experiment Name: At_100uM_ABA_Mutants_cDNA_P Parameter: Tissue Value: Aerial
  misc_feature: MA Experiment 20000069 PARAMETER Experiment Name: At_100uM_ABA_Mutants_cDNA_P Parameter: Treatment Value: 100uM ABA vs. No Treatment
  misc_feature: MA Experiment ID: 20000070 Result: Up-regulated in Transcription
  misc_feature: MA Experiment 20000070 PARAMETER Experiment Name: At_100uM_ABA_Mutants_cDNA_P Parameter: Plant Line Value: CS24
  misc_feature: MA Experiment 20000070 PARAMETER Experiment Name: At_100uM_ABA_Mutants_cDNA_P Parameter: Timepoint (hr) Value: 6
  misc_feature: MA Experiment 20000070 PARAMETER Experiment Name: At_100uM_ABA_Mutants_cDNA_P Parameter: Tissue Value: Aerial
  misc_feature: MA Experiment 20000070 PARAMETER Experiment Name: At_100uM_ABA_Mutants_cDNA_P Parameter: Treatment Value: 100uM ABA vs. No Treatment
  misc_feature: MA Experiment ID: 20000071 Result: Up-regulated in Transcription
  misc_feature: MA Experiment 20000071 PARAMETER Experiment Name: At_100uM_ABA_Mutants_cDNA_P Parameter: Plant Line Value: CS8104
  misc_feature: MA Experiment 20000071 PARAMETER Experiment Name: At_100uM_ABA_Mutants_cDNA_P Parameter: Timepoint (hr) Value: 6
  misc_feature: MA Experiment 20000071 PARAMETER Experiment Name: At_100uM_ABA_Mutants_cDNA_P Parameter: Tissue Value: Aerial
  misc_feature: MA Experiment 20000071 PARAMETER Experiment Name: At_100uM_ABA_Mutants_cDNA_P Parameter: Treatment Value: 100uM ABA vs. No Treatment
  misc_feature: MA Experiment ID: 20000086 Result: Up-regulated in Transcription
  misc_feature: MA Experiment 20000086 PARAMETER Experiment Name: At_100uM_ABA_Mutants_cDNA_P Parameter: Plant Line Value: CS22
  misc_feature: MA Experiment 20000086 PARAMETER Experiment Name: At_100uM_ABA_Mutants_cDNA_P Parameter: Timepoint (hr) Value: 6
  misc_feature: MA Experiment 20000086 PARAMETER Experiment Name: At_100uM_ABA_Mutants_cDNA_P Parameter: Tissue Value: Aerial
  misc_feature: MA Experiment 20000086 PARAMETER Experiment Name: At_100uM_ABA_Mutants_cDNA_P Parameter: Treatment Value: 100uM ABA vs. No Treatment
  misc_feature: MA Experiment ID: 20000088 Result: Up-regulated in Transcription
  misc_feature: MA Experiment 20000088 PARAMETER Experiment Name: At_100uM_ABA_Mutants_cDNA_P Parameter: Plant Line Value: Landsberg
  misc_feature: MA Experiment 20000088 PARAMETER Experiment Name: At_100uM_ABA_Mutants_cDNA_P Parameter: Timepoint (hr) Value: 6
  misc_feature: MA Experiment 20000088 PARAMETER Experiment Name: At_100uM_ABA_Mutants_cDNA_P Parameter: Tissue Value: Aerial
  misc_feature: MA Experiment 20000088 PARAMETER Experiment Name: At_100uM_ABA_Mutants_cDNA_P Parameter: Treatment Value: 100uM ABA vs. No Treatment
  misc_feature: MA Experiment ID: 20000117 Result: Up-regulated in Transcription
  misc_feature: MA Experiment 20000117 PARAMETER Experiment Name: At_100uM_ABA_Mutants_cDNA_P Parameter: Plant Line Value: Columbia
  misc_feature: MA Experiment 20000117 PARAMETER Experiment Name: At_100uM_ABA_Mutants_cDNA_P Parameter: Timepoint (hr) Value: 6
  misc_feature: MA Experiment 20000117 PARAMETER Experiment Name: At_100uM_ABA_Mutants_cDNA_P Parameter: Tissue Value: Aerial
  misc_feature: MA Experiment 20000117 PARAMETER Experiment Name: At_100uM_ABA_Mutants_cDNA_P Parameter: Treatment Value: 100uM ABA vs. No Treatment
  misc_feature: MA Experiment ID: 20000169 Result: Up-regulated in Transcription
  misc_feature: MA Experiment 20000169 PARAMETER Experiment Name: At_100uM_ABA_P Parameter: Age (day) Value: 14
  misc_feature: MA Experiment 20000169 PARAMETER Experiment Name: At_100uM_ABA_P Parameter: Organism Value: A. thaliana
  misc_feature: MA Experiment 20000169 PARAMETER Experiment Name: At_100uM_ABA_P Parameter: Plant Line Value: WS
  misc_feature: MA Experiment 20000169 PARAMETER Experiment Name: At_100uM_ABA_P Parameter: Timepoint (hr) Value: 6
  misc_feature: MA Experiment 20000169 PARAMETER Experiment Name: At_100uM_ABA_P Parameter: Tissue Value: Aerial
  misc_feature: MA Experiment 20000169 PARAMETER Experiment Name: At_100uM_ABA_P Parameter: Treatment Value: 100uM ABA vs. No Treatment
  misc_feature: MA Experiment ID: 20000179 Result: Up-regulated in Transcription
  misc_feature: MA Experiment 20000179 PARAMETER Experiment Name: At_Germinating_Seeds_P Parameter: Age (hr) Value: 6 vs. 0
  misc_feature: MA Experiment 20000179 PARAMETER Experiment Name: At_Germinating_Seeds_P Parameter: Tissue Value: Germinating Seeds
  misc_feature: MA Experiment ID: 20000180 Result: Up-regulated in Transcription
  misc_feature: MA Experiment 20000180 PARAMETER Experiment Name: At_Germinating_Seeds_P Parameter: Age (hr) Value: 24 vs. 0
  misc_feature: MA Experiment 20000180 PARAMETER Experiment Name: At_Germinating_Seeds_P Parameter: Tissue Value: Germinating Seeds
  misc_feature: MA Experiment ID: 20000184 Result: Down-regulated in Transcription
  misc_feature: MA Experiment 20000184 PARAMETER Experiment Name: At_Shoots__P Parameter: Age (day) Value: 7
  misc_feature: MA Experiment 20000184 PARAMETER Experiment Name: At_Shoots__P Parameter: Tissue Value: Shoots vs. Whole Plant
  misc_feature: MA Experiment ID: 20000185 Result: Down-regulated in Transcription
  misc_feature: MA Experiment 20000185 PARAMETER Experiment Name: At_Roots__P Parameter: Age (day) Value: 7 vs. 21
  misc_feature: MA Experiment 20000185 PARAMETER Experiment Name: At_Roots__P Parameter: Organism Value: A. thaliana
  misc_feature: MA Experiment 20000185 PARAMETER Experiment Name: At_Roots__P Parameter: Tissue Value: Roots vs. Whole Plant
  misc_feature: MA Experiment ID: 20000224 Result: Down-regulated in Transcription
  misc_feature: MA Experiment ID: 20000234 Result: Down-regulated in Transcription
  misc_feature: MA Experiment 20000234 PARAMETER Experiment Name: At_Siliques_P Parameter: Age (day) Value: 21
  misc_feature: MA Experiment 20000234 PARAMETER Experiment Name: At_Siliques_P Parameter: Organism Value: A. thaliana
  misc_feature: MA Experiment 20000234 PARAMETER Experiment Name: At_Siliques_P Parameter: Plant Line Value: WS
  misc_feature: MA Experiment 20000234 PARAMETER Experiment Name: At_Siliques_P Parameter: Tissue Value: Less Than 5mm Siliques vs. Whole Plant
  misc_feature: MA Experiment ID: 20000235 Result: Down-regulated in Transcription
  misc_feature: MA Experiment 20000235 PARAMETER Experiment Name: At_Siliques_P Parameter: Age (day) Value: 21
  misc_feature: MA Experiment 20000235 PARAMETER Experiment Name: At_Siliques_P Parameter: Organism Value: A. thaliana
  misc_feature: MA Experiment 20000235 PARAMETER Experiment Name: At_Siliques_P Parameter: Plant Line Value: WS
  misc_feature: MA Experiment 20000235 PARAMETER Experiment Name: At_Siliques_P Parameter: Tissue Value: 5-10mm Siliques vs. Whole Plant
  misc_feature: MA Experiment ID: 20000264 Result: Up-regulated in Transcription
  misc_feature: MA Experiment 20000264 PARAMETER Experiment Name: At_Open_Flower_P Parameter: Age (day) Value: 21
  misc_feature: MA Experiment 20000264 PARAMETER Experiment Name: At_Open_Flower_P Parameter: Plant Line Value: WS
  misc_feature: MA Experiment 20000264 PARAMETER Experiment Name: At_Open_Flower_P Parameter: Tissue Value: Open Flower vs. Whole Plant
  misc_feature: MA Experiment ID: 20000265 Result: Down-regulated in Transcription
  misc_feature: MA Experiment 20000265 PARAMETER Experiment Name: At_Open_Flower_P Parameter: Age (day) Value: 21
  misc_feature: MA Experiment 20000265 PARAMETER Experiment Name: At_Open_Flower_P Parameter: Plant Line Value: WS
  misc_feature: MA Experiment 20000265 PARAMETER Experiment Name: At_Open_Flower_P Parameter: Tissue Value: Closed Flower vs. Whole Plant
  misc_feature: MA Experiment ID: 20000268 Result: Down-regulated in Transcription
  misc_feature: MA Experiment 20000268 PARAMETER Experiment Name: At_100mM_NaCl__P Parameter: Age (day) Value: 14
  misc_feature: MA Experiment 20000268 PARAMETER Experiment Name: At_100mM_NaCl__P Parameter: Organism Value: A. thaliana
  misc_feature: MA Experiment 20000268 PARAMETER Experiment Name: At_100mM_NaCl__P Parameter: Plant Line Value: WS
  misc_feature: MA Experiment 20000268 PARAMETER Experiment Name: At_100mM_NaCl__P Parameter: Timepoint (hr) Value: 6
  misc_feature: MA Experiment 20000268 PARAMETER Experiment Name: At_100mM_NaCl__P Parameter: Tissue Value: Whole Plant
  misc_feature: MA Experiment 20000268 PARAMETER Experiment Name: At_100mM_NaCl__P Parameter: Treatment Value: 100mM NaCl vs. No Treatment
  misc_feature: MA Experiment ID: 20000286 Result: Down-regulated in Transcription
  misc_feature: MA Experiment 20000286 PARAMETER Experiment Name: At_Open_Flower_P Parameter: Age (day) Value: 21
  misc_feature: MA Experiment 20000286 PARAMETER Experiment Name: At_Open_Flower_P Parameter: Plant Line Value: WS
  misc_feature: MA Experiment 20000286 PARAMETER Experiment Name: At_Open_Flower_P Parameter: Tissue Value: Half Open vs. Whole Plant
  misc_feature: MA Experiment ID: 20000436 Result: Down-regulated in Transcription
  misc_feature: MA Experiment 20000436 PARAMETER Experiment Name: At_Drought_P Parameter: Age (day) Value: 7
  misc_feature: MA Experiment 20000436 PARAMETER Experiment Name: At_Drought_P Parameter: Organism Value: A. thaliana
  misc_feature: MA Experiment 20000436 PARAMETER Experiment Name: At_Drought_P Parameter: Plant Line Value: WS
  misc_feature: MA Experiment 20000436 PARAMETER Experiment Name: At_Drought_P Parameter: Timepoint (hr) Value: 12
  misc_feature: MA Experiment 20000436 PARAMETER Experiment Name: At_Drought_P Parameter: Tissue Value: Whole Plant
  misc_feature: MA Experiment 20000436 PARAMETER Experiment Name: At_Drought_P Parameter: Treatment Value: Drought vs. No Drought
  misc_feature: MA Experiment ID: 20000437 Result: Down-regulated in Transcription
  misc_feature: MA Experiment 20000437 PARAMETER Experiment Name: At_Drought_P Parameter: Age (day) Value: 8
  misc_feature: MA Experiment 20000437 PARAMETER Experiment Name: At_Drought_P Parameter: Organism Value: A. thaliana
  misc_feature: MA Experiment 20000437 PARAMETER Experiment Name: At_Drought_P Parameter: Plant Line Value: WS
  misc_feature: MA Experiment 20000437 PARAMETER Experiment Name: At_Drought_P Parameter: Timepoint (hr) Value: 24
  misc_feature: MA Experiment 20000437 PARAMETER Experiment Name: At_Drought_P Parameter: Tissue Value: Whole Plant
  misc_feature: MA Experiment 20000437 PARAMETER Experiment Name: At_Drought_P Parameter: Treatment Value: Drought vs. No Drought
  misc_feature: MA Experiment ID: 20000438 Result: Down-regulated in Transcription
  misc_feature: MA Experiment 20000438 PARAMETER Experiment Name: At_Shoots__P Parameter: Age (day) Value: 14
  misc_feature: MA Experiment 20000438 PARAMETER Experiment Name: At_Shoots__P Parameter: Tissue Value: Shoots vs. Whole Plant
  misc_feature: MA Experiment ID: 20000441 Result: Up-regulated in Transcription
  misc_feature: MA Experiment 20000441 PARAMETER Experiment Name: At_1uM_BR-BRZ__P Parameter: Tissue Value: Shoot Apices
  misc_feature: MA Experiment 20000441 PARAMETER Experiment Name: At_1uM_BR-BRZ__P Parameter: Treatment Value: 1uM BR vs. No Treatment
  misc_feature: MA Experiment ID: 20000443 Result: Up-regulated in Transcription
  misc_feature: MA Experiment 20000443 PARAMETER Experiment Name: At_1uM_BR-BRZ__P Parameter: Tissue Value: Shoot Apices
  misc_feature: MA Experiment 20000443 PARAMETER Experiment Name: At_1uM_BR-BRZ__P Parameter: Treatment Value: 1uM BRZ vs. No Treatment
  misc_feature: MA Experiment ID: 20000453 Result: Up-regulated in Transcription
  misc_feature: MA Experiment 20000453 PARAMETER Experiment Name: At_100uM_ABA_P Parameter: Age (day) Value: 15
  misc_feature: MA Experiment 20000453 PARAMETER Experiment Name: At_100uM_ABA_P Parameter: Organism Value: A. thaliana
  misc_feature: MA Experiment 20000453 PARAMETER Experiment Name: At_100uM_ABA_P Parameter: Plant Line Value: WS
  misc_feature: MA Experiment 20000453 PARAMETER Experiment Name: At_100uM_ABA_P Parameter: Timepoint (hr) Value: 24
  misc_feature: MA Experiment 20000453 PARAMETER Experiment Name: At_100uM_ABA_P Parameter: Tissue Value: Aerial
  misc_feature: MA Experiment 20000453 PARAMETER Experiment Name: At_100uM_ABA_P Parameter: Treatment Value: 100uM ABA vs. No Treatment
  misc_feature: MA Experiment ID: 20000495 Result: Down-regulated in Transcription
  misc_feature: MA Experiment 20000495 PARAMETER Experiment Name: At_Guard_Cells_P Parameter: Harvest Date Value: 8/2/2002
  misc_feature: MA Experiment 20000495 PARAMETER Experiment Name: At_Guard_Cells_P Parameter: Organism Value: A. thaliana
  misc_feature: MA Experiment 20000495 PARAMETER Experiment Name: At_Guard_Cells_P Parameter: Tissue Value: Guard Cells vs. Leaves
  misc_feature: MA Experiment ID: 20000573 Result: Up-regulated in Transcription
  misc_feature: MA Experiment 20000573 PARAMETER Experiment Name: At_100uM_ABA_Mutants__P Parameter: Organism Value: A. thaliana
  misc_feature: MA Experiment 20000573 PARAMETER Experiment Name: At_100uM_ABA_Mutants__P Parameter: Plant Line Value: CS22 vs. Ler wt
  misc_feature: MA Experiment 20000573 PARAMETER Experiment Name: At_100uM_ABA_Mutants__P Parameter: Timepoint (hr) Value: N/A
  misc_feature: MA Experiment 20000573 PARAMETER Experiment Name: At_100uM_ABA_Mutants__P Parameter: Tissue Value: Whole Plant
  misc_feature: MA Experiment 20000573 PARAMETER Experiment Name: At_100uM_ABA_Mutants__P Parameter: Treatment Value: None
  misc_feature: MA Experiment ID: 20000574 Result: Up-regulated in Transcription
  misc_feature: MA Experiment 20000574 PARAMETER Experiment Name: At_100uM_ABA_Mutants__P Parameter: Organism Value: A. thaliana
  misc_feature: MA Experiment 20000574 PARAMETER Experiment Name: At_100uM_ABA_Mutants__P Parameter: Plant Line Value: CS23 vs. Ler wt
  misc_feature: MA Experiment 20000574 PARAMETER Experiment Name: At_100uM_ABA_Mutants__P Parameter: Timepoint (hr) Value: N/A
  misc_feature: MA Experiment 20000574 PARAMETER Experiment Name: At_100uM_ABA_Mutants__P Parameter: Tissue Value: Whole Plant
  misc_feature: MA Experiment 20000574 PARAMETER Experiment Name: At_100uM_ABA_Mutants__P Parameter: Treatment Value: None
  misc_feature: MA Experiment ID: 20000794 Result: Up-regulated in Transcription
  misc_feature: MA Experiment 20000794 PARAMETER Experiment Name: At_Petals_P Parameter: Age (day) Value: 23-25 days
  misc_feature: MA Experiment 20000794 PARAMETER Experiment Name: At_Petals_P Parameter: Plant Line Value: WS
  misc_feature: MA Experiment 20000794 PARAMETER Experiment Name: At_Petals_P Parameter: Tissue Value: Petals vs. Whole plant
  misc_feature: MA Experiment ID: 20001248 Result: Up-regulated in Transcription
  misc_feature: MA Experiment 20001248 PARAMETER Experiment Name: At_Far-red-induction_P Parameter: Age (day) Value: 7
  misc_feature: MA Experiment 20001248 PARAMETER Experiment Name: At_Far-red-induction_P Parameter: Light Value: Far-red vs. White
  misc_feature: MA Experiment 20001248 PARAMETER Experiment Name: At_Far-red-induction_P Parameter: Organism Value: A. thaliana
  misc_feature: MA Experiment 20001248 PARAMETER Experiment Name: At_Far-red-induction_P Parameter: Plant Line Value: Columbia
  misc_feature: MA Experiment 20001248 PARAMETER Experiment Name: At_Far-red-induction_P Parameter: Timepoint (hr) Value: 4
  misc_feature: MA Experiment 20001248 PARAMETER Experiment Name: At_Far-red-induction_P Parameter: Tissue Value: Whole Plant
  misc_feature: MA Experiment ID: 20001450 Result: Up-regulated in Transcription
  misc_feature: MA Experiment 20001450 PARAMETER Experiment Name: At_Far-red-induction_P Parameter: Age (day) Value: 7
  misc_feature: MA Experiment 20001450 PARAMETER Experiment Name: At_Far-red-induction_P Parameter: Light Value: Far-red vs. White
  misc_feature: MA Experiment 20001450 PARAMETER Experiment Name: At_Far-red-induction_P Parameter: Organism Value: A. thaliana
  misc_feature: MA Experiment 20001450 PARAMETER Experiment Name: At_Far-red-induction_P Parameter: Plant Line Value: Columbia
  misc_feature: MA Experiment 20001450 PARAMETER Experiment Name: At_Far-red-induction_P Parameter: Timepoint (hr) Value: 8
  misc_feature: MA Experiment 20001450 PARAMETER Experiment Name: At_Far-red-induction_P Parameter: Tissue Value: Whole Plant
  misc_feature: MA Experiment ID: 20001451 Result: Up-regulated in Transcription
  misc_feature: MA Experiment 20001451 PARAMETER Experiment Name: At_Far-red-induction_P Parameter: Age (day) Value: 7
  misc_feature: MA Experiment 20001451 PARAMETER Experiment Name: At_Far-red-induction_P Parameter: Light Value: Far-red vs. White
  misc_feature: MA Experiment 20001451 PARAMETER Experiment Name: At_Far-red-induction_P Parameter: Organism Value: A. thaliana
  misc_feature: MA Experiment 20001451 PARAMETER Experiment Name: At_Far-red-induction_P Parameter: Plant Line Value: Columbia
  misc_feature: MA Experiment 20001451 PARAMETER Experiment Name: At_Far-red-induction_P Parameter: Timepoint (hr) Value: 24
  misc_feature: MA Experiment 20001451 PARAMETER Experiment Name: At_Far-red-induction_P Parameter: Tissue Value: Whole Plant
  misc_feature: MA Experiment ID: 20001554 Result: Down-regulated in Transcription
  misc_feature: MA Experiment 20001554 PARAMETER Experiment Name: At_Drought_Soil_Dry_P Parameter: Age (day) Value: 21
  misc_feature: MA Experiment 20001554 PARAMETER Experiment Name: At_Drought_Soil_Dry_P Parameter: Organism Value: A. thaliana
  misc_feature: MA Experiment 20001554 PARAMETER Experiment Name: At_Drought_Soil_Dry_P Parameter: Plant Line Value: WS
  misc_feature: MA Experiment 20001554 PARAMETER Experiment Name: At_Drought_Soil_Dry_P Parameter: Post Timepoint (hr) Value: None
  misc_feature: MA Experiment 20001554 PARAMETER Experiment Name: At_Drought_Soil_Dry_P Parameter: Post-Treatment Value: None
  misc_feature: MA Experiment 20001554 PARAMETER Experiment Name: At_Drought_Soil_Dry_P Parameter: Timepoint (day) Value: 7
  misc_feature: MA Experiment 20001554 PARAMETER Experiment Name: At_Drought_Soil_Dry_P Parameter: Treatment Value: Drought vs. No Drought
  misc_feature: MA Experiment ID: 20001555 Result: Down-regulated in Transcription
  misc_feature: MA Experiment 20001555 PARAMETER Experiment Name: At_Drought_Soil_Dry_P Parameter: Age (day) Value: 24
  misc_feature: MA Experiment 20001555 PARAMETER Experiment Name: At_Drought_Soil_Dry_P Parameter: Organism Value: A. thaliana
  misc_feature: MA Experiment 20001555 PARAMETER Experiment Name: At_Drought_Soil_Dry_P Parameter: Plant Line Value: WS
  misc_feature: MA Experiment 20001555 PARAMETER Experiment Name: At_Drought_Soil_Dry_P Parameter: Post Timepoint (hr) Value: None
  misc_feature: MA Experiment 20001555 PARAMETER Experiment Name: At_Drought_Soil_Dry_P Parameter: Post-Treatment Value: None
  misc_feature: MA Experiment 20001555 PARAMETER Experiment Name: At_Drought_Soil_Dry_P Parameter: Timepoint (day) Value: 10
  misc_feature: MA Experiment 20001555 PARAMETER Experiment Name: At_Drought_Soil_Dry_P Parameter: Treatment Value: Drought vs. No Drought
  misc_feature: MA Experiment ID: 20001556 Result: Down-regulated in Transcription
  misc_feature: MA Experiment 20001556 PARAMETER Experiment Name: At_Drought_Soil_Dry_P Parameter: Age (day) Value: 26
  misc_feature: MA Experiment 20001556 PARAMETER Experiment Name: At_Drought_Soil_Dry_P Parameter: Organism Value: A. thaliana
  misc_feature: MA Experiment 20001556 PARAMETER Experiment Name: At_Drought_Soil_Dry_P Parameter: Plant Line Value: WS
  misc_feature: MA Experiment 20001556 PARAMETER Experiment Name: At_Drought_Soil_Dry_P Parameter: Post Timepoint (hr) Value: None
  misc_feature: MA Experiment 20001556 PARAMETER Experiment Name: At_Drought_Soil_Dry_P Parameter: Post-Treatment Value: None
  misc_feature: MA Experiment 20001556 PARAMETER Experiment Name: At_Drought_Soil_Dry_P Parameter: Timepoint (day) Value: 12
  misc_feature: MA Experiment 20001556 PARAMETER Experiment Name: At_Drought_Soil_Dry_P Parameter: Treatment Value: Drought vs. No Drought
  misc_feature: MA Experiment ID: 20001557 Result: Down-regulated in Transcription
  misc_feature: MA Experiment 20001557 PARAMETER Experiment Name: At_Drought_Soil_Dry_P Parameter: Age (day) Value: 27
  misc_feature: MA Experiment 20001557 PARAMETER Experiment Name: At_Drought_Soil_Dry_P Parameter: Organism Value: A. thaliana
  misc_feature: MA Experiment 20001557 PARAMETER Experiment Name: At_Drought_Soil_Dry_P Parameter: Plant Line Value: WS
  misc_feature: MA Experiment 20001557 PARAMETER Experiment Name: At_Drought_Soil_Dry_P Parameter: Post Timepoint (hr) Value: 3
  misc_feature: MA Experiment 20001557 PARAMETER Experiment Name: At_Drought_Soil_Dry_P Parameter: Post-Treatment Value: Re-Water vs. No Drought
  misc_feature: MA Experiment 20001557 PARAMETER Experiment Name: At_Drought_Soil_Dry_P Parameter: Timepoint (day) Value: 13
  misc_feature: MA Experiment 20001557 PARAMETER Experiment Name: At_Drought_Soil_Dry_P Parameter: Treatment Value: Drought vs. No Drought
  misc_feature: MA Experiment ID: 20001559 Result: Down-regulated in Transcription
  misc_feature: MA Experiment 20001559 PARAMETER Experiment Name: At_Drought_Soil_Dry_P Parameter: Age (day) Value: 28
  misc_feature: MA Experiment 20001559 PARAMETER Experiment Name: At_Drought_Soil_Dry_P Parameter: Organism Value: A. thaliana
  misc_feature: MA Experiment 20001559 PARAMETER Experiment Name: At_Drought_Soil_Dry_P Parameter: Plant Line Value: WS
  misc_feature: MA Experiment 20001559 PARAMETER Experiment Name: At_Drought_Soil_Dry_P Parameter: Post Timepoint (hr) Value: 29
  misc_feature: MA Experiment 20001559 PARAMETER Experiment Name: At_Drought_Soil_Dry_P Parameter: Post-Treatment Value: Re-Water vs. No Drought
  misc_feature: MA Experiment 20001559 PARAMETER Experiment Name: At_Drought_Soil_Dry_P Parameter: Timepoint (day) Value: 14
  misc_feature: MA Experiment 20001559 PARAMETER Experiment Name: At_Drought_Soil_Dry_P Parameter: Treatment Value: Drought vs. No Drought
  misc_feature: MA Experiment ID: 20001904 Result: Down-regulated in Transcription
  misc_feature: MA Experiment 20001904 PARAMETER Experiment Name: At_Drought_Reproduction_P Parameter: Age (day) Value: 37
  misc_feature: MA Experiment 20001904 PARAMETER Experiment Name: At_Drought_Reproduction_P Parameter: Organism Value: A. thaliana
  misc_feature: MA Experiment 20001904 PARAMETER Experiment Name: At_Drought_Reproduction_P Parameter: Plant Line Value: WS
  misc_feature: MA Experiment 20001904 PARAMETER Experiment Name: At_Drought_Reproduction_P Parameter: Timepoint (day) Value: 7
  misc_feature: MA Experiment 20001904 PARAMETER Experiment Name: At_Drought_Reproduction_P Parameter: Tissue Value: Rosettes
  misc_feature: MA Experiment 20001904 PARAMETER Experiment Name: At_Drought_Reproduction_P Parameter: Treatment Value: Drought vs. No Drought
  misc_feature: MA Experiment ID: 20001905 Result: Down-regulated in Transcription
  misc_feature: MA Experiment 20001905 PARAMETER Experiment Name: At_Drought_Reproduction_P Parameter: Age (day) Value: 40
  misc_feature: MA Experiment 20001905 PARAMETER Experiment Name: At_Drought_Reproduction_P Parameter: Organism Value: A. thaliana
  misc_feature: MA Experiment 20001905 PARAMETER Experiment Name: At_Drought_Reproduction_P Parameter: Plant Line Value: WS
  misc_feature: MA Experiment 20001905 PARAMETER Experiment Name: At_Drought_Reproduction_P Parameter: Timepoint (day) Value: 10
  misc_feature: MA Experiment 20001905 PARAMETER Experiment Name: At_Drought_Reproduction_P Parameter: Tissue Value: Rosettes
  misc_feature: MA Experiment 20001905 PARAMETER Experiment Name: At_Drought_Reproduction_P Parameter: Treatment Value: Drought vs. No Drought
  misc_feature: MA Experiment ID: 20001906 Result: Down-regulated in Transcription
  misc_feature: MA Experiment 20001906 PARAMETER Experiment Name: At_Drought_Reproduction_P Parameter: Age (day) Value: 35
  misc_feature: MA Experiment 20001906 PARAMETER Experiment Name: At_Drought_Reproduction_P Parameter: Organism Value: A. thaliana
  misc_feature: MA Experiment 20001906 PARAMETER Experiment Name: At_Drought_Reproduction_P Parameter: Plant Line Value: WS
  misc_feature: MA Experiment 20001906 PARAMETER Experiment Name: At_Drought_Reproduction_P Parameter: Timepoint (day) Value: 5
  misc_feature: MA Experiment 20001906 PARAMETER Experiment Name: At_Drought_Reproduction_P Parameter: Tissue Value: Siliques
  misc_feature: MA Experiment 20001906 PARAMETER Experiment Name: At_Drought_Reproduction_P Parameter: Treatment Value: Drought vs. No Drought
  misc_feature: MA Experiment ID: 20001907 Result: Down-regulated in Transcription
  misc_feature: MA Experiment 20001907 PARAMETER Experiment Name: At_Drought_Reproduction_P Parameter: Age (day) Value: 37
  misc_feature: MA Experiment 20001907 PARAMETER Experiment Name: At_Drought_Reproduction_P Parameter: Organism Value: A. thaliana
  misc_feature: MA Experiment 20001907 PARAMETER Experiment Name: At_Drought_Reproduction_P Parameter: Plant Line Value: WS
  misc_feature: MA Experiment 20001907 PARAMETER Experiment Name: At_Drought_Reproduction_P Parameter: Timepoint (day) Value: 7
  misc_feature: MA Experiment 20001907 PARAMETER Experiment Name: At_Drought_Reproduction_P Parameter: Tissue Value: Siliques
  misc_feature: MA Experiment 20001907 PARAMETER Experiment Name: At_Drought_Reproduction_P Parameter: Treatment Value: Drought vs. No Drought
  misc_feature: MA Experiment ID: 20001908 Result: Down-regulated in Transcription
  misc_feature: MA Experiment 20001908 PARAMETER Experiment Name: At_Drought_Reproduction_P Parameter: Age (day) Value: 40
  misc_feature: MA Experiment 20001908 PARAMETER Experiment Name: At_Drought_Reproduction_P Parameter: Organism Value: A. thaliana
  misc_feature: MA Experiment 20001908 PARAMETER Experiment Name: At_Drought_Reproduction_P Parameter: Plant Line Value: WS
  misc_feature: MA Experiment 20001908 PARAMETER Experiment Name: At_Drought_Reproduction_P Parameter: Timepoint (day) Value: 10
  misc_feature: MA Experiment 20001908 PARAMETER Experiment Name: At_Drought_Reproduction_P Parameter: Tissue Value: Siliques
  misc_feature: MA Experiment 20001908 PARAMETER Experiment Name: At_Drought_Reproduction_P Parameter: Treatment Value: Drought vs. No Drought
  misc_feature: MA Experiment ID: 20001910 Result: Down-regulated in Transcription
  misc_feature: MA Experiment 20001910 PARAMETER Experiment Name: At_Drought_Reproduction_P Parameter: Age (day) Value: 37
  misc_feature: MA Experiment 20001910 PARAMETER Experiment Name: At_Drought_Reproduction_P Parameter: Organism Value: A. thaliana
  misc_feature: MA Experiment 20001910 PARAMETER Experiment Name: At_Drought_Reproduction_P Parameter: Plant Line Value: WS
  misc_feature: MA Experiment 20001910 PARAMETER Experiment Name: At_Drought_Reproduction_P Parameter: Timepoint (day) Value: 7
  misc_feature: MA Experiment 20001910 PARAMETER Experiment Name: At_Drought_Reproduction_P Parameter: Tissue Value: Flowers
  misc_feature: MA Experiment 20001910 PARAMETER Experiment Name: At_Drought_Reproduction_P Parameter: Treatment Value: Drought vs. No Drought
  misc_feature: MA Experiment ID: 20001911 Result: Down-regulated in Transcription
  misc_feature: MA Experiment 20001911 PARAMETER Experiment Name: At_Drought_Reproduction_P Parameter: Age (day) Value: 40
  misc_feature: MA Experiment 20001911 PARAMETER Experiment Name: At_Drought_Reproduction_P Parameter: Organism Value: A. thaliana
  misc_feature: MA Experiment 20001911 PARAMETER Experiment Name: At_Drought_Reproduction_P Parameter: Plant Line Value: WS
  misc_feature: MA Experiment 20001911 PARAMETER Experiment Name: At_Drought_Reproduction_P Parameter: Timepoint (day) Value: 10
  misc_feature: MA Experiment 20001911 PARAMETER Experiment Name: At_Drought_Reproduction_P Parameter: Tissue Value: Flowers
  misc_feature: MA Experiment 20001911 PARAMETER Experiment Name: At_Drought_Reproduction_P Parameter: Treatment Value: Drought vs. No Drought
acattcctcaccaaaccctctccaaaacacacccacacgtacgcacacacacaaagacaatgtctcctttcaaaatattcttcttcacgactcttctcgtggcggcgttttcagtgtcggctgctgatttcaacactgacgtcaacgtagcttggggaaatggccgtgggaagatactcaacaacggccagcttcttactctctccttagacaaatcctctggttccggttttcaatccaaaacagagtatttgtttggaaagattgatatgcagattaagcttgttcctggtaactctgcaggaacagtcacaactttttacgtgagtttatatattttctttaggagttttaagtgattttggatttggtttttatattgagacttcatcttgacatttttgtgtatttgcagctaaaatccgaaggatccacttgggatgagattgattttgagttcttgggtaatatgagtggagatccttatactttacacactaatgtttacactcaaggtaaaggtgacaaagagcaacaattccatctctggttcgacccaaccgccaatttccacacttactcaatcctctggaaccctcaaagaatcatattgaccgtcgatgacacacccattagagagtttaaaaactatgagtctctcggtgtcttgtttccaaagaacaagccgatgaggatgtacgcgagtttatggaacgcagacgattgggcaacaagaggcggtcttgttaaaactgattggtctaaagctccattcatggcttcttacagaaacattaagattgactcgaaaccaaactccaattggtacactcaagaaatggattcaacaagccaagctagactcaaatgggttcagaagaattacatgatctacaattattgtactgaccataggaggtttccacagggagctcctaaggaatgcacaacaagctcatagaatctcaaattatattctatttatttatctacacttcctctctttcttttatgtgaaaattgtgaatgctctgtttctagcttgtctattatgtccgagaatttctttttctgtttttgattcttttcgttgtatatctttgtccaataaaggaaatgatgtgtctttacc

SEQ ID NO: 23244 - protein, 163 aa, Arabidopsis thaliana
  peptide (1)..(163): Ceres Seq. ID no. 12396006
  misc_feature (1)..(99): Pfam Name: Glycosyl hydrolases family 16 Pfam Description: Glycosyl hydrolases family 16
  misc_feature (119)..(159): Homolog of NCBI NO: 29500893 NR Description: putative xyloglucan endotransglycosylase [Cucumis
  misc_feature (1)..(108): Homolog of NCBI NO: 29500893 NR Description: putative xyloglucan endotransglycosylase [Cucumis
  misc_feature (1)..(159): Homolog of NCBI NO: 29500891 NR Description: putative xyloglucan endotransglycosylase [Cucumis
  misc_feature (1)..(163): Homolog of NCBI NO: 21553999 NR Description: xyloglucan endo-1,4-beta-D-glucanase precursor
  misc_feature (1)..(163): Homolog of NCBI NO: 15234678 NR Description: xyloglucan endotransglycosylase (meri5B)
MSGDPYTLHTNVYTQGKGDKEQQFHLWFDPTANFHTYSILWNPQRIILTVDDTPIREFKNYESLGVLFPKNKPMRMYASLWNADDWATRGGLVKTDWSKAPFMASYRNIKIDSKPNSNWYTQEMDSTSQARLKWVQKNYMIYNYCTDHRRFPQGAPKECTTSS

SEQ ID NO: 23245 - protein, 118 aa, Arabidopsis thaliana
  peptide (1)..(118): Ceres Seq. ID no. 12396007
  misc_feature (43)..(108): Pfam Name: Glycosyl hydrolases family 16 Pfam Description: Glycosyl hydrolases family 16
  misc_feature (21)..(108): Homolog of NCBI NO: 29500893 NR Description: putative xyloglucan endotransglycosylase [Cucumis
  misc_feature (28)..(109): Homolog of NCBI NO: 29500891 NR Description: putative xyloglucan endotransglycosylase [Cucumis
  misc_feature (20)..(108): Homolog of NCBI NO: 21553999 NR Description: xyloglucan endo-1,4-beta-D-glucanase precursor
  misc_feature (20)..(108): Homolog of NCBI NO: 15234678 NR Description: xyloglucan endotransglycosylase (meri5B)
IPHQTLSKTHPHVRTHTKTMSPFKIFFFTTLLVAAFSVSAADFNTDVNVAWGNGRGKILNNGQLLTLSLDKSSGSGFQSKTEYLFGKIDMQIKLVPGNSAGTVTTFYVSLYIFFRSFK

SEQ ID NO: 23246 - protein, 99 aa, Arabidopsis thaliana
  peptide (1)..(99): Ceres Seq. ID no. 12396008
  misc_feature (24)..(89): Pfam Name: Glycosyl hydrolases family 16 Pfam Description: Glycosyl hydrolases family 16
  misc_feature (2)..(89): Homolog of NCBI NO: 29500893 NR Description: putative xyloglucan endotransglycosylase [Cucumis
  misc_feature (9)..(90): Homolog of NCBI NO: 29500891 NR Description: putative xyloglucan endotransglycosylase [Cucumis
  misc_feature (1)..(89): Homolog of NCBI NO: 21553999 NR Description: xyloglucan endo-1,4-beta-D-glucanase precursor
  misc_feature (1)..(89): Homolog of NCBI NO: 15234678 NR Description: xyloglucan endotransglycosylase (meri5B)
MSPFKIFFFTTLLVAAFSVSAADFNTDVNVAWGNGRGKILNNGQLLTLSLDKSSGSGFQSKTEYLFGKIDMQIKLVPGNSAGTVTTFYVSLYIFFRSFK

SEQ ID NO: 23247 - DNA, 1521 bp, Arabidopsis thaliana
  misc_feature (1)..(1521): Ceres Seq. ID no. 13487159
  misc_feature: MA Experiment ID: 108434 Result: Up-regulated in Transcription
  misc_feature: MA Experiment 108434 PARAMETER Experiment Name: At_Root_Tips_cDNA_P Parameter: Tissue Value: Root Tips
  misc_feature: MA Experiment ID: 108461 Result: Up-regulated in Transcription
  misc_feature: MA Experiment 108461 PARAMETER Experiment Name: At_Germinating_Seeds_cDNA_P Parameter: Age (day) Value: 1 vs. 0
  misc_feature: MA Experiment 108461 PARAMETER Experiment Name: At_Germinating_Seeds_cDNA_P Parameter: Tissue Value: Germinating Seeds
  misc_feature: MA Experiment ID: 108462 Result: Up-regulated in Transcription
  misc_feature: MA Experiment 108462 PARAMETER Experiment Name: At_Germinating_Seeds_cDNA_P Parameter: Age (day) Value: 2 vs. 0
  misc_feature: MA Experiment 108462 PARAMETER Experiment Name: At_Germinating_Seeds_cDNA_P Parameter: Tissue Value: Germinating Seeds
  misc_feature: MA Experiment ID: 108463 Result: Up-regulated in Transcription
  misc_feature: MA Experiment 108463 PARAMETER Experiment Name: At_Germinating_Seeds_cDNA_P Parameter: Age (day) Value: 3 vs. 0
  misc_feature: MA Experiment 108463 PARAMETER Experiment Name: At_Germinating_Seeds_cDNA_P Parameter: Tissue Value: Germinating Seeds
  misc_feature: MA Experiment ID: 108464 Result: Up-regulated in Transcription
  misc_feature: MA Experiment 108464 PARAMETER Experiment Name: At_Germinating_Seeds_cDNA_P Parameter: Age (day) Value: 4 vs. 0
  misc_feature: MA Experiment 108464 PARAMETER Experiment Name: At_Germinating_Seeds_cDNA_P Parameter: Tissue Value: Germinating Seeds
  misc_feature: MA Experiment ID: 20000089 Result: Down-regulated in Transcription
  misc_feature: MA Experiment ID: 20000090 Result: Down-regulated in Transcription
  misc_feature: MA Experiment ID: 20000113 Result: Up-regulated in Transcription
  misc_feature: MA Experiment 20000113 PARAMETER Experiment Name: At_42deg_Heat_cDNA_P Parameter: Temperature (deg C) Value: 42 vs. 22
  misc_feature: MA Experiment 20000113 PARAMETER Experiment Name: At_42deg_Heat_cDNA_P Parameter: Timepoint (hr) Value: 8
  misc_feature: MA Experiment 20000113 PARAMETER Experiment Name: At_42deg_Heat_cDNA_P Parameter: Tissue Value: Aerial
  misc_feature: MA Experiment ID: 20000173 Result: Up-regulated in Transcription
  misc_feature: MA Experiment 20000173 PARAMETER Experiment Name: At_42deg_Heat_P Parameter: Age (day) Value: 14
  misc_feature: MA Experiment 20000173 PARAMETER Experiment Name: At_42deg_Heat_P Parameter: Organism Value: A. thaliana
  misc_feature: MA Experiment 20000173 PARAMETER Experiment Name: At_42deg_Heat_P Parameter: Plant Line Value: WS
  misc_feature: MA Experiment 20000173 PARAMETER Experiment Name: At_42deg_Heat_P Parameter: Temperature (deg C) Value: 42 vs. 22
  misc_feature: MA Experiment 20000173 PARAMETER Experiment Name: At_42deg_Heat_P Parameter: Timepoint (hr) Value: 6
  misc_feature: MA Experiment 20000173 PARAMETER Experiment Name: At_42deg_Heat_P Parameter: Tissue Value: Aerial
  misc_feature: MA Experiment ID: 20000179 Result: Up-regulated in Transcription
  misc_feature: MA Experiment 20000179 PARAMETER Experiment Name: At_Germinating_Seeds_P Parameter: Age (hr) Value: 6 vs. 0
  misc_feature: MA Experiment 20000179 PARAMETER Experiment Name: At_Germinating_Seeds_P Parameter: Tissue Value: Germinating Seeds
  misc_feature: MA Experiment ID: 20000180 Result: Up-regulated in Transcription
  misc_feature: MA Experiment 20000180 PARAMETER Experiment Name: At_Germinating_Seeds_P Parameter: Age (hr) Value: 24 vs. 0
  misc_feature: MA Experiment 20000180 PARAMETER Experiment Name: At_Germinating_Seeds_P Parameter: Tissue Value: Germinating Seeds
  misc_feature: MA Experiment ID: 20000184 Result: Up-regulated in Transcription
  misc_feature: MA Experiment 20000184 PARAMETER Experiment Name: At_Shoots__P Parameter: Age (day) Value: 7
  misc_feature: MA Experiment 20000184 PARAMETER Experiment Name: At_Shoots__P Parameter: Tissue Value: Shoots vs. Whole Plant
  misc_feature: MA Experiment ID: 20000185 Result: Up-regulated in Transcription
  misc_feature: MA Experiment 20000185 PARAMETER Experiment Name: At_Roots__P Parameter: Age (day) Value: 7 vs. 21
  misc_feature: MA Experiment 20000185 PARAMETER Experiment Name: At_Roots__P Parameter: Organism Value: A. thaliana
  misc_feature: MA Experiment 20000185 PARAMETER Experiment Name: At_Roots__P Parameter: Tissue Value: Roots vs. Whole Plant
  misc_feature: MA Experiment ID: 20000224 Result: Up-regulated in Transcription
  misc_feature: MA Experiment ID: 20000234 Result: Up-regulated in Transcription
  misc_feature: MA Experiment 20000234 PARAMETER Experiment Name: At_Siliques_P Parameter: Age (day) Value: 21
  misc_feature: MA Experiment 20000234 PARAMETER Experiment Name: At_Siliques_P Parameter: Organism Value: A. thaliana
  misc_feature: MA Experiment 20000234 PARAMETER Experiment Name: At_Siliques_P Parameter: Plant Line Value: WS
  misc_feature: MA Experiment 20000234 PARAMETER Experiment Name: At_Siliques_P Parameter: Tissue Value: Less Than 5mm Siliques vs. Whole Plant
  misc_feature: MA Experiment ID: 20000235 Result: Up-regulated in Transcription
  misc_feature: MA Experiment 20000235 PARAMETER Experiment Name: At_Siliques_P Parameter: Age (day) Value: 21
  misc_feature: MA Experiment 20000235 PARAMETER Experiment Name: At_Siliques_P Parameter: Organism Value: A. thaliana
  misc_feature: MA Experiment 20000235 PARAMETER Experiment Name: At_Siliques_P Parameter: Plant Line Value: WS
  misc_feature: MA Experiment 20000235 PARAMETER Experiment Name: At_Siliques_P Parameter: Tissue Value: 5-10mm Siliques vs. Whole Plant
  misc_feature: MA Experiment ID: 20000264 Result: Up-regulated in Transcription
  misc_feature: MA Experiment 20000264 PARAMETER Experiment Name: At_Open_Flower_P Parameter: Age (day) Value: 21
  misc_feature: MA Experiment 20000264 PARAMETER Experiment Name: At_Open_Flower_P Parameter: Plant Line Value: WS
  misc_feature: MA Experiment 20000264 PARAMETER Experiment Name: At_Open_Flower_P Parameter: Tissue Value: Open Flower vs. Whole Plant
  misc_feature: MA Experiment ID: 20000265 Result: Up-regulated in Transcription
  misc_feature: MA Experiment 20000265 PARAMETER Experiment Name: At_Open_Flower_P Parameter: Age (day) Value: 21
  misc_feature: MA Experiment 20000265 PARAMETER Experiment Name: At_Open_Flower_P Parameter: Plant Line Value: WS
  misc_feature: MA Experiment 20000265 PARAMETER Experiment Name: At_Open_Flower_P Parameter: Tissue Value: Closed Flower vs. Whole Plant
  misc_feature: MA Experiment ID: 20000286 Result: Up-regulated in Transcription
  misc_feature: MA Experiment 20000286 PARAMETER Experiment Name: At_Open_Flower_P Parameter: Age (day) Value: 21
  misc_feature: MA Experiment 20000286 PARAMETER Experiment Name: At_Open_Flower_P Parameter: Plant Line Value: WS
  misc_feature: MA Experiment 20000286 PARAMETER Experiment Name: At_Open_Flower_P Parameter: Tissue Value: Half Open vs. Whole Plant
  misc_feature: MA Experiment ID: 20000438 Result: Up-regulated in Transcription
  misc_feature: MA Experiment 20000438 PARAMETER Experiment Name: At_Shoots__P Parameter: Age (day) Value: 14
  misc_feature: MA Experiment 20000438 PARAMETER Experiment Name: At_Shoots__P Parameter: Tissue Value: Shoots vs. Whole Plant
  misc_feature: MA Experiment ID: 20000439 Result: Up-regulated in Transcription
  misc_feature: MA Experiment 20000439 PARAMETER Experiment Name: At_Roots__P Parameter: Age (day) Value: 14 vs. 21
  misc_feature: MA Experiment 20000439 PARAMETER Experiment Name: At_Roots__P Parameter: Organism Value: A. thaliana
  misc_feature: MA Experiment 20000439 PARAMETER Experiment Name: At_Roots__P Parameter: Tissue Value: Roots vs. Whole Plant
  misc_feature: MA Experiment ID: 20000573 Result: Down-regulated in Transcription
  misc_feature: MA Experiment 20000573 PARAMETER Experiment Name: At_100uM_ABA_Mutants__P Parameter: Organism Value: A. thaliana
  misc_feature: MA Experiment 20000573 PARAMETER Experiment Name: At_100uM_ABA_Mutants__P Parameter: Plant Line Value: CS22 vs. Ler wt
  misc_feature: MA Experiment 20000573 PARAMETER Experiment Name: At_100uM_ABA_Mutants__P Parameter: Timepoint (hr) Value: N/A
  misc_feature: MA Experiment 20000573 PARAMETER Experiment Name: At_100uM_ABA_Mutants__P Parameter: Tissue Value: Whole Plant
  misc_feature: MA Experiment 20000573 PARAMETER Experiment Name: At_100uM_ABA_Mutants__P Parameter: Treatment Value: None
  misc_feature: MA Experiment ID: 20000794 Result: Up-regulated in Transcription
  misc_feature: MA Experiment 20000794 PARAMETER Experiment Name: At_Petals_P Parameter: Age (day) Value: 23-25 days
  misc_feature: MA Experiment 20000794 PARAMETER Experiment Name: At_Petals_P Parameter: Plant Line Value: WS
  misc_feature: MA Experiment 20000794 PARAMETER Experiment Name: At_Petals_P Parameter: Tissue Value: Petals vs. Whole plant
  misc_feature: MA Experiment ID: 20001248 Result: Down-regulated in Transcription
  misc_feature: MA Experiment 20001248 PARAMETER Experiment Name: At_Far-red-induction_P Parameter: Age (day) Value: 7
  misc_feature: MA Experiment 20001248 PARAMETER Experiment Name: At_Far-red-induction_P Parameter: Light Value: Far-red vs. White
  misc_feature: MA Experiment 20001248 PARAMETER Experiment Name: At_Far-red-induction_P Parameter: Organism Value: A. thaliana
  misc_feature: MA Experiment 20001248 PARAMETER Experiment Name: At_Far-red-induction_P Parameter: Plant Line Value: Columbia
  misc_feature: MA Experiment 20001248 PARAMETER Experiment Name: At_Far-red-induction_P Parameter: Timepoint (hr) Value: 4
  misc_feature: MA Experiment 20001248 PARAMETER Experiment Name: At_Far-red-induction_P Parameter: Tissue Value: Whole Plant
gggagcctaaacaatggggagacgaaaccagagatgcttgctctcttcctctcttcttcttcgtatccaactctctctttcctctccagatcagtaactctaaacttagccagaacaacaacactctcagctctcacaatgtcgatgaacctaaagactcatgccttcgcaggcaatcccttgaagtcgaaaactccgaaatctaccgatccattctcacccacctccgctttcgaatctctgaaaaccctaattccagtaatccctaatcactcaacaccttcccctgattttaaagtccttccctttagcaagggtcgtccactggtgttctcaagcggtggagatgctaatacgacgccgatttggcatctgggttgggtcagcttggctgattgtaaggttttgttagcaagttgtggggttgatctgaatgaggactcactcgtgtatttaggacccaagttggaagaagatttggtgtattgggctgttgatttggcagaggatggtttcgtttctgaattgggaggtaggaagttgtgttttgttgagcttcgaaccctaatggtagctgctgattgggcggatcaacgtgctatggatgagttggctattgccggcaatgccagggcgttacttgaatggcacaacgtgtcacaattttgtggatcatgtggaagtaaaacttttccaaaggaagcaggaaggagaaaacaatgctcagacgaaacatgcagaaagagggtctatccccgtgttgatccggtggttataatgttagttattgatcgagaaaatgatcgcgcacttttaagcaggcaatctagatatgtaccgagaatgtggagttgtttagctggatttattgagccaggggaaagcttagaagaggctgtgaggcgggaaacatgggaagagacaggcattgaagtaggagatgttgtataccacagctctcagccttggcctgtgggaccaagtagcatgccatgccaattgatgctcggtttctttgctttcgccaagacgctcgacataaacgtagacaaagaagagttagaagatgctcaatggcacagtagagaagaggtgaagaaagcattggcggttgcagaatacaggaaggctcaaagaacagcagctgcaaaggtagagcagatctgtaaaggtgtggagagaagccagagtctatcaactgatttcaatcttgaaagcggtgagcttgctcctatgtttatcccggggccatttgccatcgcgcaccacctgatctcagcatgggtaaatcaggctcctgacgatgttcactcaaaacaacaagcgggtgtctctctctcaagtttgtagctagaaagatgaacttagatgcttagaaaccaaacgtttgctatggcttctatgcttattttgaattgctgagtcctaagtgtgtggacttcgctcgaagttatttctttgcaacgacgatttagatcaataaaaattaatcaaagattgacctcaataaatttgagtttt

SEQ ID NO: 23248 - protein, 449 aa, Arabidopsis thaliana
  peptide (1)..(449): Ceres Seq. ID no. 13487160
  misc_feature (255)..(386): Pfam Name: NUDIX domain Pfam Description: NUDIX domain
  misc_feature (407)..(432): Homolog of NCBI NO: 16124521 NR Description: MutT/nudix family protein [Caulobacter crescentus
  misc_feature (136)..(364): Homolog of NCBI NO: 16124521 NR Description: MutT/nudix family protein [Caulobacter crescentus
  misc_feature (200)..(370): Homolog of NCBI NO: 22988758 NR Description: hypothetical protein [Burkholderia fungorum]
  misc_feature (147)..(369): Homolog of NCBI NO: 15887452 NR Description: AGR_C_150p [Agrobacterium tumefaciens]
  misc_feature (195)..(373): Homolog of NCBI NO: 23109722 NR Description: hypothetical protein [Novosphingobium
  misc_feature (134)..(369): Homolog of NCBI NO: 13899267 NR Description: nudix (nucleoside diphosphate linked moiety
  misc_feature (134)..(369): Homolog of NCBI NO: 21312664 NR Description: RIKEN cDNA 0610016O18 [Mus musculus]
  misc_feature (343)..(433): Homolog of NCBI NO: 5803245 NR Description: hypothetical protein [Oryza sativa (japonica
  misc_feature (47)..(215): Homolog of NCBI NO: 5803245 NR Description: hypothetical protein [Oryza sativa (japonica
  misc_feature (12)..(449): Homolog of NCBI NO: 15241252 NR Description: MutT/nudix family protein [Arabidopsis thaliana]
GSLNNGETKPEMLALFLSSSSYPTLSFLSRSVTLNLARTTTLSALTMSMNLKTHAFAGNPLKSKTPKSTDPFSPTSAFESLKTLIPVIPNHSTPSPDFKVLPFSKGRPLVFSSGGDANTTPIWHLGWVSLADCKVLLASCGVDLNEDSLVYLGPKLEEDLVYWAVDLAEDGFVSELGGRKLCFVELRTLMVAADWADQRAMDELAIAGNARALLEWHNVSQFCGSCGSKTFPKEAGRRKQCSDETCRKRVYPRVDPVVIMLVIDRENDRALLSRQSRYVPRMWSCLAGFIEPGESLEEAVRRETWEETGIEVGDVVYHSSQPWPVGPSSMPCQLMLGFFAFAKTLDINVDKEELEDAQWHSREEVKKALAVAEYRKAQRTAAAKVEQICKGVERSQSLSTDFNLESGELAPMFIPGPFAIAHHLISAWVNQAPDDVHSKQQAGVSLSSL

SEQ ID NO: 23249 - protein, 438 aa, Arabidopsis thaliana
  peptide (1)..(438): Ceres Seq. ID no. 13487161
  misc_feature (244)..(375): Pfam Name: NUDIX domain Pfam Description: NUDIX domain
  misc_feature (396)..(421): Homolog of NCBI NO: 16124521 NR Description: MutT/nudix family protein [Caulobacter crescentus
  misc_feature (125)..(353): Homolog of NCBI NO: 16124521 NR Description: MutT/nudix family protein [Caulobacter crescentus
  misc_feature (189)..(359): Homolog of NCBI NO: 22988758 NR Description: hypothetical protein [Burkholderia fungorum]
  misc_feature (136)..(358): Homolog of NCBI NO: 15887452 NR Description: AGR_C_150p [Agrobacterium tumefaciens]
  misc_feature (184)..(362): Homolog of NCBI NO: 23109722 NR Description: hypothetical protein [Novosphingobium
  misc_feature (123)..(358): Homolog of NCBI NO: 13899267 NR Description: nudix (nucleoside diphosphate linked moiety
  misc_feature (123)..(358): Homolog of NCBI NO: 21312664 NR Description: RIKEN cDNA 0610016O18 [Mus musculus]
  misc_feature (332)..(422): Homolog of NCBI NO: 5803245 NR Description: hypothetical protein [Oryza sativa (japonica
  misc_feature (36)..(204): Homolog of NCBI NO: 5803245 NR Description: hypothetical protein [Oryza sativa (japonica
  misc_feature (1)..(438): Homolog of NCBI NO: 15241252 NR Description: MutT/nudix family protein [Arabidopsis thaliana]
MLALFLSSSSYPTLSFLSRSVTLNLARTTTLSALTMSMNLKTHAFAGNPLKSKTPKSTDPFSPTSAFESLKTLIPVIPNHSTPSPDFKVLPFSKGRPLVFSSGGDANTTPIWHLGWVSLADCKVLLASCGVDLNEDSLVYLGPKLEEDLVYWAVDLAEDGFVSELGGRKLCFVELRTLMVAADWADQRAMDELAIAGNARALLEWHNVSQFCGSCGSKTFPKEAGRRKQCSDETCRKRVYPRVDPVVIMLVIDRENDRALLSRQSRYVPRMWSCLAGFIEPGESLEEAVRRETWEETGIEVGDVVYHSSQPWPVGPSSMPCQLMLGFFAFAKTLDINVDKEELEDAQWHSREEVKKALAVAEYRKAQRTAAAKVEQICKGVERSQSLSTDFNLESGELAPMFIPGPFAIAHHLISAWVNQAPDDVHSKQQAGVSLSSL

SEQ ID NO: 23250 - protein, 403 aa, Arabidopsis thaliana
  peptide (1)..(403): Ceres Seq. ID no. 13487162
  misc_feature (209)..(340): Pfam Name: NUDIX domain Pfam Description: NUDIX domain
  misc_feature (361)..(386): Homolog of NCBI NO: 16124521 NR Description: MutT/nudix family protein [Caulobacter crescentus
  misc_feature (90)..(318): Homolog of NCBI NO: 16124521 NR Description: MutT/nudix family protein [Caulobacter crescentus
  misc_feature (154)..(324): Homolog of NCBI NO: 22988758 NR Description: hypothetical protein [Burkholderia fungorum]
  misc_feature (101)..(323): Homolog of NCBI NO: 15887452 NR Description: AGR_C_150p [Agrobacterium tumefaciens]
  misc_feature (149)..(327): Homolog of NCBI NO: 23109722 NR Description: hypothetical protein [Novosphingobium
  misc_feature (88)..(323): Homolog of NCBI NO: 13899267 NR Description: nudix (nucleoside diphosphate linked moiety
  misc_feature (88)..(323): Homolog of NCBI NO: 21312664 NR Description: RIKEN cDNA 0610016O18 [Mus musculus]
  misc_feature (297)..(387): Homolog of NCBI NO: 5803245 NR Description: hypothetical protein [Oryza sativa (japonica
  misc_feature (1)..(169): Homolog of NCBI NO: 5803245 NR Description: hypothetical protein [Oryza sativa (japonica
  misc_feature (1)..(403): Homolog of NCBI NO: 15241252 NR Description: MutT/nudix family protein [Arabidopsis thaliana]
MSMNLKTHAFAGNPLKSKTPKSTDPFSPTSAFESLKTLIPVIPNHSTPSPDFKVLPFSKGRPLVFSSGGDANTTPIWHLGWVSLADCKVLLASCGVDLNEDSLVYLGPKLEEDLVYWAVDLAEDGFVSELGGRKLCFVELRTLMVAADWADQRAMDELAIAGNARALLEWHNVSQFCGSCGSKTFPKEAGRRKQCSDETCRKRVYPRVDPVVIMLVIDRENDRALLSRQSRYVPRMWSCLAGFIEPGESLEEAVRRETWEETGIEVGDVVYHSSQPWPVGPSSMPCQLMLGFFAFAKTLDINVDKEELEDAQWHSREEVKKALAVAEYRKAQRTAAAKVEQICKGVERSQSLSTDFNLESGELAPMFIPGPFAIAHHLISAWVNQAPDDVHSKQQAGVSLSSL

SEQ ID NO: 23251 - DNA, 752 bp, Arabidopsis thaliana
  misc_feature (1)..(752): Ceres Seq. ID no. 12330281
  misc_feature: MA Experiment ID: 108462 Result: Up-regulated in Transcription
  misc_feature: MA Experiment 108462 PARAMETER Experiment Name: At_Germinating_Seeds_cDNA_P Parameter: Age (day) Value: 2 vs. 0
  misc_feature: MA Experiment 108462 PARAMETER Experiment Name: At_Germinating_Seeds_cDNA_P Parameter: Tissue Value: Germinating Seeds
  misc_feature: MA Experiment ID: 108668 Result: Up-regulated in Transcription
  misc_feature: MA Experiment 108668 PARAMETER Experiment Name: At_2mM_SA_cDNA_P Parameter: Plant Line Value: WS
  misc_feature: MA Experiment 108668 PARAMETER Experiment Name: At_2mM_SA_cDNA_P Parameter: Timepoint (hr) Value: 6
  misc_feature: MA Experiment 108668 PARAMETER Experiment Name: At_2mM_SA_cDNA_P Parameter: Treatment Value: 2mM SA vs. No Treatment
  misc_feature: MA Experiment ID: 20000111 Result: Down-regulated in Transcription
  misc_feature: MA Experiment 20000111 PARAMETER Experiment Name: At_42deg_Heat_cDNA_P Parameter: Temperature (deg C) Value: 42 vs. 22
  misc_feature: MA Experiment 20000111 PARAMETER Experiment Name: At_42deg_Heat_cDNA_P Parameter: Timepoint (hr) Value: 6
  misc_feature: MA Experiment 20000111 PARAMETER Experiment Name: At_42deg_Heat_cDNA_P Parameter: Tissue Value: Aerial
  misc_feature: MA Experiment ID: 20000113 Result: Down-regulated in Transcription
  misc_feature: MA Experiment 20000113 PARAMETER Experiment Name: At_42deg_Heat_cDNA_P Parameter: Temperature (deg C) Value: 42 vs. 22
  misc_feature: MA Experiment 20000113 PARAMETER Experiment Name: At_42deg_Heat_cDNA_P Parameter: Timepoint (hr) Value: 8
  misc_feature: MA Experiment 20000113 PARAMETER Experiment Name: At_42deg_Heat_cDNA_P Parameter: Tissue Value: Aerial
  misc_feature: MA Experiment ID: 20000173 Result: Down-regulated in Transcription
  misc_feature: MA Experiment 20000173 PARAMETER Experiment Name: At_42deg_Heat_P Parameter: Age (day) Value: 14
  misc_feature: MA Experiment 20000173 PARAMETER Experiment Name: At_42deg_Heat_P Parameter: Organism Value: A. thaliana
  misc_feature: MA Experiment 20000173 PARAMETER Experiment Name: At_42deg_Heat_P Parameter: Plant Line Value: WS
  misc_feature: MA Experiment 20000173 PARAMETER Experiment Name: At_42deg_Heat_P Parameter: Temperature (deg C) Value: 42 vs. 22
  misc_feature: MA Experiment 20000173 PARAMETER Experiment Name: At_42deg_Heat_P Parameter: Timepoint (hr) Value: 6
  misc_feature: MA Experiment 20000173 PARAMETER Experiment Name: At_42deg_Heat_P Parameter: Tissue Value: Aerial
  misc_feature: MA Experiment ID: 20000180 Result: Up-regulated in Transcription
  misc_feature: MA Experiment 20000180 PARAMETER Experiment Name: At_Germinating_Seeds_P Parameter: Age (hr) Value: 24 vs. 0
  misc_feature: MA Experiment 20000180 PARAMETER Experiment Name: At_Germinating_Seeds_P Parameter: Tissue Value: Germinating Seeds
  misc_feature: MA Experiment ID: 20000182 Result: Up-regulated in Transcription
  misc_feature: MA Experiment 20000182 PARAMETER Experiment Name: At_2mM_SA_P Parameter: Age (day) Value: 14
  misc_feature: MA Experiment 20000182 PARAMETER Experiment Name: At_2mM_SA_P Parameter: Organism Value: A. thaliana
  misc_feature: MA Experiment 20000182 PARAMETER Experiment Name: At_2mM_SA_P Parameter: Plant Line Value: WS
  misc_feature: MA Experiment 20000182 PARAMETER Experiment Name: At_2mM_SA_P Parameter: Timepoint (hr) Value: 6
  misc_feature: MA Experiment 20000182 PARAMETER Experiment Name: At_2mM_SA_P Parameter: Tissue Value: Aerial
  misc_feature: MA Experiment 20000182 PARAMETER Experiment Name: At_2mM_SA_P Parameter: Treatment Value: 2mM SA vs. No Treatment
  misc_feature: MA Experiment ID: 20000234 Result: Up-regulated in Transcription
  misc_feature: MA Experiment 20000234 PARAMETER Experiment Name: At_Siliques_P Parameter: Age (day) Value: 21
  misc_feature: MA Experiment 20000234 PARAMETER Experiment Name: At_Siliques_P Parameter: Organism Value: A. thaliana
  misc_feature: MA Experiment 20000234 PARAMETER Experiment Name: At_Siliques_P Parameter: Plant Line Value: WS
  misc_feature: MA Experiment 20000234 PARAMETER Experiment Name: At_Siliques_P Parameter: Tissue Value: Less Than 5mm Siliques vs. Whole Plant
  misc_feature: MA Experiment ID: 20000495 Result: Up-regulated in Transcription
  misc_feature: MA Experiment 20000495 PARAMETER Experiment Name: At_Guard_Cells_P Parameter: Harvest Date Value: 8/2/2002
  misc_feature: MA Experiment 20000495 PARAMETER Experiment Name: At_Guard_Cells_P Parameter: Organism Value: A. thaliana
  misc_feature: MA Experiment 20000495 PARAMETER Experiment Name: At_Guard_Cells_P Parameter: Tissue Value: Guard Cells vs. Leaves
  misc_feature: MA Experiment ID: 20000794 Result: Down-regulated in Transcription
  misc_feature: MA Experiment 20000794 PARAMETER Experiment Name: At_Petals_P Parameter: Age (day) Value: 23-25 days
  misc_feature: MA Experiment 20000794 PARAMETER Experiment Name: At_Petals_P Parameter: Plant Line Value: WS
  misc_feature: MA Experiment 20000794 PARAMETER Experiment Name: At_Petals_P Parameter: Tissue Value: Petals vs. Whole plant
  misc_feature: MA Experiment ID: 20001557 Result: Down-regulated in Transcription
  misc_feature: MA Experiment 20001557 PARAMETER Experiment Name: At_Drought_Soil_Dry_P Parameter: Age (day) Value: 27
  misc_feature: MA Experiment 20001557 PARAMETER Experiment Name: At_Drought_Soil_Dry_P Parameter: Organism Value: A. thaliana
  misc_feature: MA Experiment 20001557 PARAMETER Experiment Name: At_Drought_Soil_Dry_P Parameter: Plant Line Value: WS
  misc_feature: MA Experiment 20001557 PARAMETER Experiment Name: At_Drought_Soil_Dry_P Parameter: Post Timepoint (hr) Value: 3
  misc_feature: MA Experiment 20001557 PARAMETER Experiment Name: At_Drought_Soil_Dry_P Parameter: Post-Treatment Value: Re-Water vs. No Drought
  misc_feature: MA Experiment 20001557 PARAMETER Experiment Name: At_Drought_Soil_Dry_P Parameter: Timepoint (day) Value: 13
  misc_feature: MA Experiment 20001557 PARAMETER Experiment Name: At_Drought_Soil_Dry_P Parameter: Treatment Value: Drought vs. No Drought
gattgttgacttgattgacataaaaatggcgacttcgatgattcagagattgttcaaacaaggcacaaagatcgtcggcgttggactcaattacgcttctcacgccaaagaacttggcaatgccctcccaaaggacccgattgtgttcttaaagccaacttcgtcgtacctggaaaacggtggaacaatagagatcccacatccactggattcacttcaccatgaggtggaacttgctgtagtaattggacagaaagcaagagatgtcccagaacggttagccatgaattacattggaggatatgcgcttgctcttgatatgactgctagggaactccaagtttctgccatggcatctggtctcccatgtacgcttgctaaaggacaggataccttcacccccatcagctccgttctaccaaaggcaatggtgctggatcccaataacctggaactctggctaaaggtagatgatgagacaagacagaaaggttggacaaaggatatgatcttcaaggtcccatatctcatcagctacataagttctgtaatgacccttttcaaaggagatgtcatattgacaggtacaccagaaggtataggacctgtaaagataggtcagaagataaccgccggaatcaccggtctttctgaagttcagttcgacgtcggtaggcggctaaagccattgttgagatagtattttgtgaatcatttgttgtataaacttcattcataagagcatttttact

SEQ ID NO: 23252 - protein, 232 aa, Arabidopsis thaliana
  peptide (1)..(232): Ceres Seq. ID no. 12330282
  misc_feature (38)..(205): Pfam Name: Fumarylacetoacetate (FAA) hydrolase family Pfam Description: Fumarylacetoacetate (FAA) hydrolase family
  misc_feature (7)..(219): Homolog of NCBI NO: 38648928 NR Description: Unknown (protein for MGC:74876) [Homo sapiens]
  misc_feature (9)..(223): Homolog of NCBI NO: 14336767 NR Description: similar to homoprotocatechuate catabolism
  misc_feature (7)..(223): Homolog of NCBI NO: 13654274 NR Description: hypothetical protein DKFZp566J2046 [Homo sapiens]
  misc_feature (14)..(223): Homolog of NCBI NO: 28829830 NR Description: similar to Arabidopsis thaliana (Mouse-ear
  misc_feature (15)..(195): Homolog of NCBI NO: 28372682 NR Description: putative isomerase [Oryza sativa (japonica
  misc_feature (15)..(226): Homolog of NCBI NO: 34897304 NR Description: putative hydroxylase [Oryza sativa]
  misc_feature (9)..(194): Homolog of NCBI NO: 7485073 NR Description: hypothetical protein - Arabidopsis thaliana
  misc_feature (9)..(230): Homolog of NCBI NO: 15234757 NR Description: isomerase like protein
  misc_feature (9)..(230): Homolog of NCBI NO: 16209656 NR Description: AT4g15940/dl4011w [Arabidopsis thaliana]
  misc_feature (9)..(232): Homolog of NCBI NO: 15228286 NR Description: putative decarboxilase
IVDLIDIKMATSMIQRLFKQGTKIVGVGLNYASHAKELGNALPKDPIVFLKPTSSYLENGGTIEIPHPLDSLHHEVELAVVIGQKARDVPERLAMNYIGGYALALDMTARELQVSAMASGLPCTLAKGQDTFTPISSVLPKAMVLDPNNLELWLKVDDETRQKGWTKDMIFKVPYLISYISSVMTLFKGDVILTGTPEGIGPVKIGQKITAGITGLSEVQFDVGRRLKPLLR

SEQ ID NO: 23253 - protein, 224 aa, Arabidopsis thaliana
  peptide (1)..(224): Ceres Seq. ID no. 12330283
  misc_feature (30)..(197): Pfam Name: Fumarylacetoacetate (FAA) hydrolase family Pfam Description: Fumarylacetoacetate (FAA) hydrolase family
  misc_feature (1)..(211): Homolog of NCBI NO: 38648928 NR Description: Unknown (protein for MGC:74876) [Homo sapiens]
  misc_feature (1)..(215): Homolog of NCBI NO: 14336767 NR Description: similar to homoprotocatechuate catabolism
  misc_feature (1)..(215): Homolog of NCBI NO: 13654274 NR Description: hypothetical protein DKFZp566J2046 [Homo sapiens]
  misc_feature (6)..(215): Homolog of NCBI NO: 28829830 NR Description: similar to Arabidopsis thaliana (Mouse-ear
  misc_feature (7)..(187): Homolog of NCBI NO: 28372682 NR Description: putative isomerase [Oryza sativa (japonica
  misc_feature (7)..(218): Homolog of NCBI NO: 34897304 NR Description: putative hydroxylase [Oryza sativa]
  misc_feature (1)..(186): Homolog of NCBI NO: 7485073 NR Description: hypothetical protein - Arabidopsis thaliana
  misc_feature (1)..(222): Homolog of NCBI NO: 15234757 NR Description: isomerase like protein
  misc_feature (1)..(222): Homolog of NCBI NO: 16209656 NR Description: AT4g15940/dl4011w [Arabidopsis thaliana]
  misc_feature (1)..(224): Homolog of NCBI NO: 15228286 NR Description: putative decarboxilase
MATSMIQRLFKQGTKIVGVGLNYASHAKELGNALPKDPIVFLKPTSSYLENGGTIEIPHPLDSLHHEVELAVVIGQKARDVPERLAMNYIGGYALALDMTARELQVSAMASGLPCTLAKGQDTFTPISSVLPKAMVLDPNNLELWLKVDDETRQKGWTKDMIFKVPYLISYISSVMTLFKGDVILTGTPEGIGPVKIGQKITAGITGLSEVQFDVGRRLKPLLR

SEQ ID NO: 23254 - protein, 220 aa, Arabidopsis thaliana
  peptide (1)..(220): Ceres Seq. ID no. 12330284
  misc_feature (26)..(193): Pfam Name: Fumarylacetoacetate (FAA) hydrolase family Pfam Description: Fumarylacetoacetate (FAA) hydrolase family
  misc_feature (1)..(207): Homolog of NCBI NO: 38648928 NR Description: Unknown (protein for MGC:74876) [Homo sapiens]
  misc_feature (1)..(211): Homolog of NCBI NO: 14336767 NR Description: similar to homoprotocatechuate catabolism
  misc_feature (1)..(211): Homolog of NCBI NO: 13654274 NR Description: hypothetical protein DKFZp566J2046 [Homo sapiens]
  misc_feature (2)..(211): Homolog of NCBI NO: 28829830 NR Description: similar to Arabidopsis thaliana (Mouse-ear
  misc_feature (3)..(183): Homolog of NCBI NO: 28372682 NR Description: putative isomerase [Oryza sativa (japonica
  misc_feature (3)..(214): Homolog of NCBI NO: 34897304 NR Description: putative hydroxylase [Oryza sativa]
  misc_feature (1)..(182): Homolog of NCBI NO: 7485073 NR Description: hypothetical protein - Arabidopsis thaliana
  misc_feature (1)..(218): Homolog of NCBI NO: 15234757 NR Description: isomerase like protein
  misc_feature (1)..(218): Homolog of NCBI NO: 16209656 NR Description: AT4g15940/dl4011w [Arabidopsis thaliana]
  misc_feature (1)..(220): Homolog of NCBI NO: 15228286 NR Description: putative decarboxilase
MIQRLFKQGTKIVGVGLNYASHAKELGNALPKDPIVFLKPTSSYLENGGTIEIPHPLDSLHHEVELAVVIGQKARDVPERLAMNYIGGYALALDMTARELQVSAMASGLPCTLAKGQDTFTPISSVLPKAMVLDPNNLELWLKVDDETRQKGWTKDMIFKVPYLISYISSVMTLFKGDVILTGTPEGIGPVKIGQKITAGITGLSEVQFDVGRRLKPLLR

SEQ ID NO: 23255 - DNA, 1755 bp, Arabidopsis thaliana
  misc_feature (1)..(1755): Ceres Seq. ID no. 12394469
  misc_feature: MA Experiment ID: 20000180 Result: Up-regulated in Transcription
  misc_feature: MA Experiment 20000180 PARAMETER Experiment Name: At_Germinating_Seeds_P Parameter: Age (hr) Value: 24 vs. 0
  misc_feature: MA Experiment 20000180 PARAMETER Experiment Name: At_Germinating_Seeds_P Parameter: Tissue Value: Germinating Seeds
  misc_feature: MA Experiment ID: 20000182 Result: Down-regulated in Transcription
  misc_feature: MA Experiment 20000182 PARAMETER Experiment Name: At_2mM_SA_P Parameter: Age (day) Value: 14
  misc_feature: MA Experiment 20000182 PARAMETER Experiment Name: At_2mM_SA_P Parameter: Organism Value: A. thaliana
  misc_feature: MA Experiment 20000182 PARAMETER Experiment Name: At_2mM_SA_P Parameter: Plant Line Value: WS
  misc_feature: MA Experiment 20000182 PARAMETER Experiment Name: At_2mM_SA_P Parameter: Timepoint (hr) Value: 6
  misc_feature: MA Experiment 20000182 PARAMETER Experiment Name: At_2mM_SA_P Parameter: Tissue Value: Aerial
  misc_feature: MA Experiment 20000182 PARAMETER Experiment Name: At_2mM_SA_P Parameter: Treatment Value: 2mM SA vs. No Treatment
  misc_feature: MA Experiment ID: 20000227 Result: Up-regulated in Transcription
  misc_feature: MA Experiment 20000227 PARAMETER Experiment Name: At_Root-Tips-vs-Tops_P Parameter: Tissue Value: Root Tips vs. Root Tops
  misc_feature: MA Experiment ID: 20000264 Result: Down-regulated in Transcription
  misc_feature: MA Experiment 20000264 PARAMETER Experiment Name: At_Open_Flower_P Parameter: Age (day) Value: 21
  misc_feature: MA Experiment 20000264 PARAMETER Experiment Name: At_Open_Flower_P Parameter: Plant Line Value: WS
  misc_feature: MA Experiment 20000264 PARAMETER Experiment Name: At_Open_Flower_P Parameter: Tissue Value: Open Flower vs. Whole Plant
  misc_feature: MA Experiment ID: 20000794 Result: Down-regulated in Transcription
  misc_feature: MA Experiment 20000794 PARAMETER Experiment Name: At_Petals_P Parameter: Age (day) Value: 23-25 days
  misc_feature: MA Experiment 20000794 PARAMETER Experiment Name: At_Petals_P Parameter: Plant Line Value: WS
  misc_feature: MA Experiment 20000794 PARAMETER Experiment Name: At_Petals_P Parameter: Tissue Value: Petals vs. Whole plant
  misc_feature: MA Experiment ID: 20001247 Result: Up-regulated in Transcription
  misc_feature: MA Experiment 20001247 PARAMETER Experiment Name: At_Far-red-induction_P Parameter: Age (day) Value: 7
  misc_feature: MA Experiment 20001247 PARAMETER Experiment Name: At_Far-red-induction_P Parameter: Light Value: Far-red vs. White
  misc_feature: MA Experiment 20001247 PARAMETER Experiment Name: At_Far-red-induction_P Parameter: Organism Value: A. thaliana
  misc_feature: MA Experiment 20001247 PARAMETER Experiment Name: At_Far-red-induction_P Parameter: Plant Line Value: Columbia
  misc_feature: MA Experiment 20001247 PARAMETER Experiment Name: At_Far-red-induction_P Parameter: Timepoint (hr) Value: 1
  misc_feature: MA Experiment 20001247 PARAMETER Experiment Name: At_Far-red-induction_P Parameter: Tissue Value: Whole Plant
aacttggactctgtttatatcaacctgatcttggaaatttatttgtaaagtttaggaaaaaaatgggaggtgacttgaaaagccagctatctagagagagtcatgtgtttggacttaaggtgtgggaagtaattggtatagctgttgcattgctcatcatagctatcctctctgttctttcgtgttgtcttacttcgaaaaagaaatcaagaagatcgaaaaccggtcttccggttatccaaactcctccggttgtctccaaagagatcagagaagtgagagttgagcatgtctcagctagtaactttgctcctggtgaaggcattcttctaacaattcaggacaaaaatagcaaagactcagaaaaagtcatggttcatttggatatgaggaagaagagaagtagtagtggccggtcaggctcatttcaccatttagagatcatagataaacattctgagtctgctgaagaagtttctgcttcctcatcattgtataacattgcaactccatcaccattatctgggttgcctgagtctcatcttggttggggacactggtttacattgagagatcttgaaacagcaacaaacagattctctaaagagaatgtgattggtgaaggcggttacggtgttgtctacagaggagagttaatgaatggaactcctgttgcagttaaaaagattcttaaccagttgggacaagctgagaaagagtttcgagtcgaggttgatgctatcggtcatgtgcggcacaagaacttggttcggcttcttggttactgcattgaaggcacacacaggatattggtttacgagtatgtgaataatggaaacttagaacaatggcttcatggagcaatgagacaacatggatatctaacttgggaagcaaggatgaaggttctgatcggtacatcaaaagctcttgcatatctgcatgaagcgattgagccaaaagtagtgcatagagacatcaagtcaagcaacattctgatcaacgacgaatttaatgcaaaggttttcagattttggccttgccaagttgcttggcgctgggaaaagccatgtgacaactagagtgatgggaacatttgggtacgttgctcctgaatatgcaaactcagggttgttaaatgaaaagagtgatgtctacagcttcggtgttgttctcttagaagcaatcacaggacgagaccctgtggattatggccgtcctgctcatgaggtgaatctagtggattggttaaagatgatggttgggacaagacgatcagaggaagtagtggatccaaacatagaagtgaagccaccaacaaggtcattgaaacgagctcttttgacggctctaagatgcgttgatccagactcggataagcggccgaaaatgagccaagttgtacgtatgcttgagtctgaagaataccccattccaagagaggaccgaaggcgttctagaacgcgagaaggaagtatggagataaactcagacactgacatgagtactccagtttcaagatcacagagcaagagacaataatttatcaatctgcgtaagctttcaacgcgtttcatgattatgagctattctttgaacttgttcttatgcattttctgttttttttttttttttttttggttttgaattgagatgagtagagaccatagaggattgtttgtacatatgaactggatttgggtttanagctcctacatcaaaataatatattggtgtgtacagtactattgcatc

SEQ ID NO: 23256 - protein, 359 aa, Arabidopsis thaliana
  peptide (1)..(359): Ceres Seq. ID no. 12394470
  misc_feature (199)..(344): Pfam Name: Protein kinase domain Pfam Description: Protein kinase domain
  misc_feature (170)..(344): Homolog of NCBI NO: 22331140 NR Description: serine/threonine protein kinase, putative
  misc_feature (37)..(344): Homolog of NCBI NO: 15231637 NR Description: receptor-like protein kinase; protein id:
  misc_feature (25)..(344): Homolog of NCBI NO: 15228043 NR Description: putative protein kinase; protein id: At2g42960.1
  misc_feature (21)..(344): Homolog of NCBI NO: 15238840 NR Description: Ser/Thr specific protein kinase - like protein
  misc_feature (22)..(344): Homolog of NCBI NO: 37535714 NR Description: putative kinase [Oryza sativa (japonica
  misc_feature (25)..(344): Homolog of NCBI NO: 34894708 NR Description: Putative protein kinase [Oryza sativa (japonica
  misc_feature (37)..(344): Homolog of NCBI NO: 15217511 NR Description: putative ser/thr protein kinase; protein id:
  misc_feature (21)..(344): Homolog of NCBI NO: 25404144 NR Description: probable protein kinase F25P12.84
  misc_feature (21)..(344): Homolog of NCBI NO: 18405946 NR Description: expressed protein
  misc_feature (21)..(344): Homolog of NCBI NO: 21593085 NR Description: Putative protein kinase [Arabidopsis thaliana]
LGLCLYQPDLGNLFVKFRKKMGGDLKSQLSRESHVFGLKVWEVIGIAVALLIIAILSVLSCCLTSKKKSRRSKTGLPVIQTPPVVSKEIREVRVEHVSASNFAPGEGILLTIQDKNSKDSEKVMVHLDMRKKRSSSGRSGSFHHLEIIDKHSESAEEVSASSSLYNIATPSPLSGLPESHLGWGHWFTLRDLETATNRFSKENVIGEGGYGVVYRGELMNGTPVAVKKILNQLGQAEKEFRVEVDAIGHVRHKNLVRLLGYCIEGTHRILVYEYVNNGNLEQWLHGAMRQHGYLTWEARMKVLIGTSKALAYLHEAIEPKVVHRDIKSSNILINDEFNAKVFRFWPCQVAWRWEKPCDN

SEQ ID NO: 23257 - protein, 339 aa, Arabidopsis thaliana
  peptide (1)..(339): Ceres Seq. ID no. 12394471
  misc_feature (179)..(324): Pfam Name: Protein kinase domain Pfam Description: Protein kinase domain
  misc_feature (150)..(324): Homolog of NCBI NO: 22331140 NR Description: serine/threonine protein kinase, putative
  misc_feature (17)..(324): Homolog of NCBI NO: 15231637 NR Description: receptor-like protein kinase; protein id:
  misc_feature (5)..(324): Homolog of NCBI NO: 15228043 NR Description: putative protein kinase; protein id: At2g42960.1
  misc_feature (1)..(324): Homolog of NCBI NO: 15238840 NR Description: Ser/Thr specific protein kinase - like protein
  misc_feature (2)..(324): Homolog of NCBI NO: 37535714 NR Description: putative kinase [Oryza sativa (japonica
  misc_feature (5)..(324): Homolog of NCBI NO: 34894708 NR Description: Putative protein kinase [Oryza sativa (japonica
  misc_feature (17)..(324): Homolog of NCBI NO: 15217511 NR Description: putative ser/thr protein kinase; protein id:
  misc_feature (1)..(324): Homolog of NCBI NO: 25404144 NR Description: probable protein kinase F25P12.84
  misc_feature (1)..(324): Homolog of NCBI NO: 18405946 NR Description: expressed protein
  misc_feature (1)..(324): Homolog of NCBI NO: 21593085 NR Description: Putative protein kinase [Arabidopsis thaliana]
MGGDLKSQLSRESHVFGLKVWEVIGIAVALLIIAILSVLSCCLTSKKKSRRSKTGLPVIQTPPVVSKEIREVRVEHVSASNFAPGEGILLTIQDKNSKDSEKVMVHLDMRKKRSSSGRSGSFHHLEIIDKHSESAEEVSASSSLYNIATPSPLSGLPESHLGWGHWFTLRDLETATNRFSKENVIGEGGYGVVYRGELMNGTPVAVKKILNQLGQAEKEFRVEVDAIGHVRHKNLVRLLGYCIEGTHRILVYEYVNNGNLEQWLHGAMRQHGYLTWEARMKVLIGTSKALAYLHEAIEPKVVHRDIKSSNILINDEFNAKVFRFWPCQVAWRWEKPCDN

SEQ ID NO: 23258 - protein, 236 aa, Arabidopsis thaliana
  peptide (1)..(236): Ceres Seq. ID no. 12394472
  misc_feature (76)..(221): Pfam Name: Protein kinase domain Pfam Description: Protein kinase domain
  misc_feature (47)..(221): Homolog of NCBI NO: 22331140 NR Description: serine/threonine protein kinase, putative
  misc_feature (1)..(221): Homolog of NCBI NO: 15231637 NR Description: receptor-like protein kinase; protein id:
  misc_feature (1)..(221): Homolog of NCBI NO: 15228043 NR Description: putative protein kinase; protein id: At2g42960.1
  misc_feature (1)..(221): Homolog of NCBI NO: 15238840 NR Description: Ser/Thr specific protein kinase - like protein
  misc_feature (1)..(221): Homolog of NCBI NO: 37535714 NR Description: putative kinase [Oryza sativa (japonica
  misc_feature (1)..(221): Homolog of NCBI NO: 34894708 NR Description: Putative protein kinase [Oryza sativa (japonica
  misc_feature (1)..(221): Homolog of NCBI NO: 15217511 NR Description: putative ser/thr protein kinase; protein id:
  misc_feature (1)..(221): Homolog of NCBI NO: 25404144 NR Description: probable protein kinase F25P12.84
  misc_feature (1)..(221): Homolog of NCBI NO: 18405946 NR Description: expressed protein
  misc_feature (1)..(221): Homolog of NCBI NO: 21593085 NR Description: Putative protein kinase [Arabidopsis thaliana]
MVHLDMRKKRSSSGRSGSFHHLEIIDKHSESAEEVSASSSLYNIATPSPLSGLPESHLGWGHWFTLRDLETATNRFSKENVIGEGGYGVVYRGELMNGTPVAVKKILNQLGQAEKEFRVEVDAIGHVRHKNLVRLLGYCIEGTHRILVYEYVNNGNLEQWLHGAMRQHGYLTWEARMKVLIGTSKALAYLHEAIEPKVVHRDIKSSNILINDEFNAKVFRFWPCQVAWRWEKPCDN

SEQ ID NO: 23259 - DNA, 1164 bp, Arabidopsis thaliana
  misc_feature (1)..(1164): Ceres Seq. ID no. 12345055
  misc_feature: MA Experiment ID: 108433 Result: Down-regulated in Transcription
  misc_feature: MA Experiment 108433 PARAMETER Experiment Name: At_rhl_Mutant2_cDNA_P Parameter: Age (day) Value: 7
  misc_feature: MA Experiment 108433 PARAMETER Experiment Name: At_rhl_Mutant2_cDNA_P Parameter: Organism Value: A. thaliana
  misc_feature: MA Experiment 108433 PARAMETER Experiment Name: At_rhl_Mutant2_cDNA_P Parameter: Plant Line Value: rhl Mutant vs. wt landsburg
  misc_feature: MA Experiment 108433 PARAMETER Experiment Name: At_rhl_Mutant2_cDNA_P Parameter: Tissue Value: Roots
  misc_feature: MA Experiment ID: 108434 Result: Up-regulated in Transcription
  misc_feature: MA Experiment 108434 PARAMETER Experiment Name: At_Root_Tips_cDNA_P Parameter: Tissue Value: Root Tips
  misc_feature: MA Experiment ID: 108435 Result: Up-regulated in Transcription
  misc_feature: MA Experiment 108435 PARAMETER Experiment Name: At_stm_Mutants_cDNA_P Parameter: Plant Line Value: wt Landsburg vs stm
  misc_feature: MA Experiment 108435 PARAMETER Experiment Name: At_stm_Mutants_cDNA_P Parameter: Tissue Value: Shoot Apical Meristem Region
  misc_feature: MA Experiment ID: 108461 Result: Down-regulated in Transcription
  misc_feature: MA Experiment 108461 PARAMETER Experiment Name: At_Germinating_Seeds_cDNA_P Parameter: Age (day) Value: 1 vs. 0
  misc_feature: MA Experiment 108461 PARAMETER Experiment Name: At_Germinating_Seeds_cDNA_P Parameter: Tissue Value: Germinating Seeds
  misc_feature: MA Experiment ID: 108462 Result: Down-regulated in Transcription
  misc_feature: MA Experiment 108462 PARAMETER Experiment Name: At_Germinating_Seeds_cDNA_P Parameter: Age (day) Value: 2 vs. 0
  misc_feature: MA Experiment 108462 PARAMETER Experiment Name: At_Germinating_Seeds_cDNA_P Parameter: Tissue Value: Germinating Seeds
  misc_feature: MA Experiment ID: 108463 Result: Down-regulated in Transcription
  misc_feature: MA Experiment 108463 PARAMETER Experiment Name: At_Germinating_Seeds_cDNA_P Parameter: Age (day) Value: 3 vs. 0
  misc_feature: MA Experiment 108463 PARAMETER Experiment Name: At_Germinating_Seeds_cDNA_P Parameter: Tissue Value: Germinating Seeds
  misc_feature: MA Experiment ID: 108464 Result: Down-regulated in Transcription
  misc_feature: MA Experiment 108464 PARAMETER Experiment Name: At_Germinating_Seeds_cDNA_P Parameter: Age (day) Value: 4 vs. 0
  misc_feature: MA Experiment 108464 PARAMETER Experiment Name: At_Germinating_Seeds_cDNA_P Parameter: Tissue Value: Germinating Seeds
  misc_feature: MA Experiment ID: 108488 Result: Up-regulated in Transcription
  misc_feature: MA Experiment ID: 108585 Result: Up-regulated in Transcription
  misc_feature: MA Experiment 108585 PARAMETER Experiment Name: At_5mM_NaNP_cDNA_P Parameter: Timepoint (hr) Value: 6
  misc_feature: MA Experiment 108585 PARAMETER Experiment Name: At_5mM_NaNP_cDNA_P Parameter: Tissue Value: Aerial
  misc_feature: MA Experiment 108585 PARAMETER Experiment Name: At_5mM_NaNP_cDNA_P Parameter: Treatment Value: null
  misc_feature: MA Experiment ID: 20000180 Result: Down-regulated in Transcription
  misc_feature: MA Experiment 20000180 PARAMETER Experiment Name: At_Germinating_Seeds_P Parameter: Age (hr) Value: 24 vs. 0
  misc_feature: MA Experiment 20000180 PARAMETER Experiment Name: At_Germinating_Seeds_P Parameter: Tissue Value: Germinating Seeds
  misc_feature: MA Experiment ID: 20000184 Result: Up-regulated in Transcription
  misc_feature: MA Experiment 20000184 PARAMETER Experiment Name: At_Shoots__P Parameter: Age (day) Value: 7
  misc_feature: MA Experiment 20000184 PARAMETER Experiment Name: At_Shoots__P Parameter: Tissue Value: Shoots vs. Whole Plant
  misc_feature: MA Experiment ID: 20001557 Result: Up-regulated in Transcription
  misc_feature: MA Experiment 20001557 PARAMETER Experiment Name: At_Drought_Soil_Dry_P Parameter: Age (day) Value: 27
  misc_feature: MA Experiment 20001557 PARAMETER Experiment Name: At_Drought_Soil_Dry_P Parameter: Organism Value: A. thaliana
  misc_feature: MA Experiment 20001557 PARAMETER Experiment Name: At_Drought_Soil_Dry_P Parameter: Plant Line Value: WS
  misc_feature: MA Experiment 20001557 PARAMETER Experiment Name: At_Drought_Soil_Dry_P Parameter: Post Timepoint (hr) Value: 3
  misc_feature: MA Experiment 20001557 PARAMETER Experiment Name: At_Drought_Soil_Dry_P Parameter: Post-Treatment Value: Re-Water vs. No Drought
  misc_feature: MA Experiment 20001557 PARAMETER Experiment Name: At_Drought_Soil_Dry_P Parameter: Timepoint (day) Value: 13
  misc_feature: MA Experiment 20001557 PARAMETER Experiment Name: At_Drought_Soil_Dry_P Parameter: Treatment Value: Drought vs. No Drought
  misc_feature: MA Experiment ID: 20001558 Result: Up-regulated in Transcription
  misc_feature: MA Experiment 20001558 PARAMETER Experiment Name: At_Drought_Soil_Dry_P Parameter: Age (day) Value: 27
  misc_feature: MA Experiment 20001558 PARAMETER Experiment Name: At_Drought_Soil_Dry_P Parameter: Organism Value: A. thaliana
  misc_feature: MA Experiment 20001558 PARAMETER Experiment Name: At_Drought_Soil_Dry_P Parameter: Plant Line Value: WS
  misc_feature: MA Experiment 20001558 PARAMETER Experiment Name: At_Drought_Soil_Dry_P Parameter: Post Timepoint (hr) Value: 6
  misc_feature: MA Experiment 20001558 PARAMETER Experiment Name: At_Drought_Soil_Dry_P Parameter: Post-Treatment Value: Re-Water vs. No Drought
  misc_feature: MA Experiment 20001558 PARAMETER Experiment Name: At_Drought_Soil_Dry_P Parameter: Timepoint (day) Value: 13
  misc_feature: MA Experiment 20001558 PARAMETER Experiment Name: At_Drought_Soil_Dry_P Parameter: Treatment Value: Drought vs. No Drought
gcacagccaaaccccccccaattttggcctctcgatttagttttttgaaaccctaagctcgatttcgatcctccggcatactcggtttcgccgccgaatctctgcttgtagcgagtgttactattcaatcggcgagaatgtcgatgtcgaagagttcaaaaatgcttcagttcatcaactacaggatgcgagtgacgatccaagacggaagacagctcgttgggaagttcatggcgtttgaccgtcacatgaacctcgttctcggcgattgcgaggagtttcgtaagcttccaccagctaaagggaagaagatcaacgaagagcgtgaagatcgccgtacgctaggtttagtgttgcttagaggtgaagaagttatcaatgactgtcgaaggaccacctcctcctgaagaatctcgtgctaaagctggctctgcagctgctgttgctggtccaggaattggccgtgccgctgggcgtggagttcctactggtccgttagttcaagctcagcctggtttatctggtcctgttcgtggtgttggtggacctgctccgggaatgatgcagcctcagatctctcgtccaccacagctttcagctcctccgattattcgacctccgggacagatgttgccaccgcctccttttggtggtcaaggtcctcctatgggaagaggtcctccaccgccttatggtatgaggccaccgccacagcagttttctggaccaccaccgcctcagtatgggcaaaggccaatgattcctcctcctggtggtatgatgagaggacctcctcctccacctcatggaatgcaaggacctcctccgcctcgccctggaatgcctcctgctcctggtggttttgctccaccgcgtcctggcatgccaccacataatcagcagcagtgattaggttagcagtgaatgaacaggactcttgtctcggctttttactgtttttgtcgctgttttcttgagattatgaaggctttaagatgtttgattgaacttcctcaggtttacggtatcgtgctatcatgttgcctttcattgactttagccgcaatttctcatctatcttagctttcaaagtttgtagatttgttgacgagtgagttgtctttgccttatcttcttgtgttttcttttaagaacgaatccact

SEQ ID NO: 23260 - protein, 176 aa, Arabidopsis thaliana
  peptide (1)..(176): Ceres Seq. ID no. 12345056
  misc_feature (57)..(170): Pfam Name: Extensin-like region Pfam Description: Extensin-like region
  misc_feature (1)..(159): Homolog of NCBI NO: 4507135 NR Description: small nuclear ribonucleoprotein polypeptide N
  misc_feature (1)..(159): Homolog of NCBI NO: 38150007 NR Description: small nuclear ribonucleoprotein polypeptide B/B'
  misc_feature (1)..(159): Homolog of NCBI NO: 8099650 NR Description: snRNP-associated protein; SmB [Danio rerio]
  misc_feature (1)..(159): Homolog of NCBI NO: 112305 NR Description: small nuclear ribonucleoprotein-associated
  misc_feature (1)..(159): Homolog of NCBI NO: 7208221 NR Description: small nuclear ribonucleoprotein B' [Macropus
  misc_feature (1)..(175): Homolog of NCBI NO: 33146808 NR Description: putative snRNP(small nuclear ribonucleoprotein
  misc_feature (1)..(175): Homolog of NCBI NO: 34900024 NR Description: putative snRNP protein [Oryza sativa (japonica
  misc_feature (1)..(175): Homolog of NCBI NO: 21536707 NR Description: putative snRNP protein [Arabidopsis thaliana]
  misc_feature (1)..(175): Homolog of NCBI NO: 15241519 NR Description: putative protein
  misc_feature (1)..(176): Homolog of NCBI NO: 15237095 NR Description: putative snRNP protein
MTVEGPPPPEESRAKAGSAAAVAGPGIGRAAGRGVPTGPLVQAQPGLSGPVRGVGGPAPGMMQPQISRPPQLSAPPIIRPPGQMLPPPPFGGQGPPMGRGPPPPYGMRPPPQQFSGPPPPQYGQRPMIPPPGGMMRGPPPPPHGMQGPPPPRPGMPPAPGGFAPPRPGMPPHNQQQ

SEQ ID NO: 23261 - protein, 116 aa, Arabidopsis thaliana
  peptide (1)..(116): Ceres Seq. ID no. 12345057
  misc_feature (1)..(110): Pfam Name: Extensin-like region Pfam Description: Extensin-like region
  misc_feature (1)..(99): Homolog of NCBI NO: 4507135 NR Description: small nuclear ribonucleoprotein polypeptide N
  misc_feature (1)..(99): Homolog of NCBI NO: 38150007 NR Description: small nuclear ribonucleoprotein polypeptide B/B'
  misc_feature (1)..(99): Homolog of NCBI NO: 8099650 NR Description: snRNP-associated protein; SmB [Danio rerio]
  misc_feature (1)..(99): Homolog of NCBI NO: 112305 NR Description: small nuclear ribonucleoprotein-associated
  misc_feature (1)..(99): Homolog of NCBI NO: 7208221 NR Description: small nuclear ribonucleoprotein B' [Macropus
  misc_feature (1)..(115): Homolog of NCBI NO: 33146808 NR Description: putative snRNP(small nuclear ribonucleoprotein
  misc_feature (1)..(115): Homolog of NCBI NO: 34900024 NR Description: putative snRNP protein [Oryza sativa (japonica
  misc_feature (1)..(115): Homolog of NCBI NO: 21536707 NR Description: putative snRNP protein [Arabidopsis thaliana]
  misc_feature (1)..(115): Homolog of NCBI NO: 15241519 NR Description: putative protein
  misc_feature (1)..(116): Homolog of NCBI NO: 15237095 NR Description: putative snRNP protein
MMQPQISRPPQLSAPPIIRPPGQMLPPPPFGGQGPPMGRGPPPPYGMRPPPQQFSGPPPPQYGQRPMIPPPGGMMRGPPPPPHGMQGPPPPRPGMPPAPGGFAPPRPGMPPHNQQQ

SEQ ID NO: 23262 - protein, 115 aa, Arabidopsis thaliana
  peptide (1)..(115): Ceres Seq. ID no. 12345058
  misc_feature (1)..(109): Pfam Name: Extensin-like region Pfam Description: Extensin-like region
  misc_feature (1)..(114): Homolog of NCBI NO: 21536707 NR Description: putative snRNP protein [Arabidopsis thaliana]
  misc_feature (1)..(114): Homolog of NCBI NO: 15241519 NR Description: putative protein
  misc_feature (1)..(98): Homolog of NCBI NO: 38150007 NR Description: small nuclear ribonucleoprotein polypeptide B/B'
  misc_feature (1)..(98): Homolog of NCBI NO: 112305 NR Description: small nuclear ribonucleoprotein-associated
  misc_feature (1)..(114): Homolog of NCBI NO: 33146808 NR Description: putative snRNP(small nuclear ribonucleoprotein
  misc_feature (1)..(114): Homolog of NCBI NO: 34900024 NR Description: putative snRNP protein [Oryza sativa (japonica
  misc_feature (1)..(98): Homolog of NCBI NO: 7208221 NR Description: small nuclear ribonucleoprotein B' [Macropus
  misc_feature (1)..(98): Homolog of NCBI NO: 8099650 NR Description: snRNP-associated protein; SmB [Danio rerio]
  misc_feature (1)..(98): Homolog of NCBI NO: 4507135 NR Description: small nuclear ribonucleoprotein polypeptide N
  misc_feature (1)..(115): Homolog of NCBI NO: 15237095 NR Description: putative snRNP protein
MQPQISRPPQLSAPPIIRPPGQMLPPPPFGGQGPPMGRGPPPPYGMRPPPQQFSGPPPPQYGQRPMIPPPGGMMRGPPPPPHGMQGPPPPRPGMPPAPGGFAPPRPGMPPHNQQQ

SEQ ID NO: 23263 - DNA, 1607 bp, Arabidopsis thaliana
  misc_feature (1)..(1607): Ceres Seq. ID no. 13487804
  misc_feature: MA Experiment ID: 108461 Result: Down-regulated in Transcription
  misc_feature: MA Experiment 108461 PARAMETER Experiment Name: At_Germinating_Seeds_cDNA_P Parameter: Age (day) Value: 1 vs. 0
  misc_feature: MA Experiment 108461 PARAMETER Experiment Name: At_Germinating_Seeds_cDNA_P Parameter: Tissue Value: Germinating Seeds
  misc_feature: MA Experiment ID: 108462 Result: Down-regulated in Transcription
  misc_feature: MA Experiment 108462 PARAMETER Experiment Name: At_Germinating_Seeds_cDNA_P Parameter: Age (day) Value: 2 vs. 0
  misc_feature: MA Experiment 108462 PARAMETER Experiment Name: At_Germinating_Seeds_cDNA_P Parameter: Tissue Value: Germinating Seeds
  misc_feature: MA Experiment ID: 108463 Result: Down-regulated in Transcription
  misc_feature: MA Experiment 108463 PARAMETER Experiment Name: At_Germinating_Seeds_cDNA_P Parameter: Age (day) Value: 3 vs. 0
  misc_feature: MA Experiment 108463 PARAMETER Experiment Name: At_Germinating_Seeds_cDNA_P Parameter: Tissue Value: Germinating Seeds
  misc_feature: MA Experiment ID: 108464 Result: Down-regulated in Transcription
  misc_feature: MA Experiment 108464 PARAMETER Experiment Name: At_Germinating_Seeds_cDNA_P Parameter: Age (day) Value: 4 vs. 0
  misc_feature: MA Experiment 108464 PARAMETER Experiment Name: At_Germinating_Seeds_cDNA_P Parameter: Tissue Value: Germinating Seeds
  misc_feature: MA Experiment ID: 20000180 Result: Down-regulated in Transcription
  misc_feature: MA Experiment 20000180 PARAMETER Experiment Name: At_Germinating_Seeds_P Parameter: Age (hr) Value: 24 vs. 0
  misc_feature: MA Experiment 20000180 PARAMETER Experiment Name: At_Germinating_Seeds_P Parameter: Tissue Value: Germinating Seeds
  misc_feature: MA Experiment ID: 20001557 Result: Up-regulated in Transcription
  misc_feature: MA Experiment 20001557 PARAMETER Experiment Name: At_Drought_Soil_Dry_P Parameter: Age (day) Value: 27
  misc_feature: MA Experiment 20001557 PARAMETER Experiment Name: At_Drought_Soil_Dry_P Parameter: Organism Value: A. thaliana
  misc_feature: MA Experiment 20001557 PARAMETER Experiment Name: At_Drought_Soil_Dry_P Parameter: Plant Line Value: WS
  misc_feature: MA Experiment 20001557 PARAMETER Experiment Name: At_Drought_Soil_Dry_P Parameter: Post Timepoint (hr) Value: 3
  misc_feature: MA Experiment 20001557 PARAMETER Experiment Name: At_Drought_Soil_Dry_P Parameter: Post-Treatment Value: Re-Water vs. No Drought
  misc_feature: MA Experiment 20001557 PARAMETER Experiment Name: At_Drought_Soil_Dry_P Parameter: Timepoint (day) Value: 13
  misc_feature: MA Experiment 20001557 PARAMETER Experiment Name: At_Drought_Soil_Dry_P Parameter: Treatment Value: Drought vs. No Drought
agtttcttacaatttgtaaagagatctgttttagggttttgccttgttcttgtggcgggaataacaaagacatcgccgatatggggaaagacgaagaggaaatgcgaggtgagatcgaggagcgactaatcaatgaagagtacaagatctggaagaagaacactcctttcctctacgatctcgttattactcacgctctcgagtggccttcacttactgttgaatggcttcctgaccgtgaagaaccttccggtaaagactactccgttcagaagatgattctcggtacccatacctccgagagcgagcccaattacttgatgctagcccaagttcagcttcctcttgacgataccgagagtgaagctcgtcagtacgatgatgaccgctctgaatttggtggctttggctgtgcaactggaaaggtacaaattatccagcagataaatcatgatggtgaggttaatcgagctcgctatatgcctcaaaaccctttcataattgctaccaagacagttaatgcggaggtctatgttttcgattacagtaagcatccatctaagcctcctcttgatggggcttgtaatcctgatttaaagcttagaggtcacagctctgagggatatggtctctcttggagtaagttcaagcagggtcatttgcttagtggctctgatgatgctcagatctgcttgtgggatattaacgctactcctaaaaacaaatctctggacgctcagcagatttttaaggctcatgaaggggttgtggaagatgttgcatggcatctgagacatgagtacctgtttggatcagttggagatgaccaataccttctcatatgggatctgcgttctccatctgccagtaaaccagtacagtctgtggttgctcattcgatggaggttaactgcttagccttcaatccatttaatgagtgggttgtggcaacaggatcaactgacaagactgttaaattattcgatctacggaagctaagcaccgctcttcacacatttgatagccacaaagaggaggtttttcaagttggttggaacccaaagaacgagactattttagcttcatgttgccttggtagaagacttatggtttgggaccttagcaggatcgatgaggaacagacagtggaggacgcagaagacggcccacctgagctgctgtttattcacggtggtcacactagcaaaatttcagatttctcgtggaacccttgtgaagattgggttatttccagtgttgctgaggacaacatactccaaatatggcaaatggctgaaaacatctatcatgatgaggatgacgctccaggggaagaaccatcaaaagcttcttagcttgttatttagtatccaaagcgcactgatcttatgggacagtatttatttatacatctctgctattgtttagttcaagtatttagtgttcattgtgtaaaatgaggcatgagaggatggtagcaagtgggaatttttctttataacatgaaggagttgattctaatctcactaagtagtgtcaaccaaagctataactcttagtttatacccagattgggcgacattagaaagaaattacaaatttgaatt

SEQ ID NO: 23264 - protein, 450 aa, Arabidopsis thaliana
  peptide (1)..(450): Ceres Seq. ID no. 13487805
  misc_feature (27)..(446): Homolog of NCBI NO: 5163126 NR Description: chromatin assembly factor 1 p48 subunit [Gallus
  misc_feature (24)..(445): Homolog of NCBI NO: 31207939 NR Description: ENSANGP00000014714 [Anopheles gambiae]
  misc_feature (31)..(439): Homolog of NCBI NO: 9454362 NR Description: Rbap46 polypeptide [Gallus gallus]
  misc_feature (30)..(445): Homolog of NCBI NO: 27503223 NR Description: Similar to retinoblastoma binding protein 7
  misc_feature (27)..(446): Homolog of NCBI NO: 34871596 NR Description: similar to retinoblastoma-binding protein mRbAp48
  misc_feature (27)..(446): Homolog of NCBI NO: 6677681 NR Description: retinoblastoma binding protein 4 [Mus musculus]
  misc_feature (27)..(446): Homolog of NCBI NO: 5032027 NR Description: retinoblastoma binding protein 4
  misc_feature (30)..(450): Homolog of NCBI NO: 17017388 NR Description: MSI type nucleosome/chromatin assembly factor C
  misc_feature (27)..(448): Homolog of NCBI NO: 3122386 NR Description: WD-40 repeat protein MSI1
  misc_feature (27)..(450): Homolog of NCBI NO: 15237140 NR Description: WD-40 repeat protein (MSI1) [Arabidopsis
FLTICKEICFRVLPCSCGGNNKDIADMGKDEEEMRGEIEERLINEEYKIWKKNTPFLYDLVITHALEWPSLTVEWLPDREEPSGKDYSVQKMILGTHTSESEPNYLMLAQVQLPLDDTESEARQYDDDRSEFGGFGCATGKVQIIQQINHDGEVNRARYMPQNPFIIATKTVNAEVYVFDYSKHPSKPPLDGACNPDLKLRGHSSEGYGLSWSKFKQGHLLSGSDDAQICLWDINATPKNKSLDAQQIFKAHEGVVEDVAWHLRHEYLFGSVGDDQYLLIWDLRSPSASKPVQSVVAHSMEVNCLAFNPFNEWVVATGSTDKTVKLFDLRKLSTALHTFDSHKEEVFQVGWNPKNETILASCCLGRRLMVWDLSRIDEEQTVEDAEDGPPELLFIHGGHTSKISDFSWNPCEDWVISSVAEDNILQIWQMAENIYHDEDDAPGEEPSKAS

SEQ ID NO: 23265 - protein, 424 aa, Arabidopsis thaliana
  peptide (1)..(424): Ceres Seq. ID no. 13487806
  misc_feature (1)..(420): Homolog of NCBI NO: 5163126 NR Description: chromatin assembly factor 1 p48 subunit [Gallus
  misc_feature (1)..(419): Homolog of NCBI NO: 31207939 NR Description: ENSANGP00000014714 [Anopheles gambiae]
  misc_feature (5)..(413): Homolog of NCBI NO: 9454362 NR Description: Rbap46 polypeptide [Gallus gallus]
  misc_feature (4)..(419): Homolog of NCBI NO: 27503223 NR Description: Similar to retinoblastoma binding protein 7
  misc_feature (1)..(420): Homolog of NCBI NO: 34871596 NR Description: similar to retinoblastoma-binding protein mRbAp48
  misc_feature (1)..(420): Homolog of NCBI NO: 6677681 NR Description: retinoblastoma binding protein 4 [Mus musculus]
  misc_feature (1)..(420): Homolog of NCBI NO: 5032027 NR Description: retinoblastoma binding protein 4
  misc_feature (4)..(424): Homolog of NCBI NO: 17017388 NR Description: MSI type nucleosome/chromatin assembly factor C
  misc_feature (1)..(422): Homolog of NCBI NO: 3122386 NR Description: WD-40 repeat protein MSI1
  misc_feature (1)..(424): Homolog of NCBI NO: 15237140 NR Description: WD-40 repeat protein (MSI1) [Arabidopsis
MGKDEEEMRGEIEERLINEEYKIWKKNTPFLYDLVITHALEWPSLTVEWLPDREEPSGKDYSVQKMILGTHTSESEPNYLMLAQVQLPLDDTESEARQYDDDRSEFGGFGCATGKVQIIQQINHDGEVNRARYMPQNPFIIATKTVNAEVYVFDYSKHPSKPPLDGACNPDLKLRGHSSEGYGLSWSKFKQGHLLSGSDDAQICLWDINATPKNKSLDAQQIFKAHEGVVEDVAWHLRHEYLFGSVGDDQYLLIWDLRSPSASKPVQSVVAHSMEVNCLAFNPFNEWVVATGSTDKTVKLFDLRKLSTALHTFDSHKEEVFQVGWNPKNETILASCCLGRRLMVWDLSRIDEEQTVEDAEDGPPELLFIHGGHTSKISDFSWNPCEDWVISSVAEDNILQIWQMAENIYHDEDDAPGEEPSKAS

SEQ ID NO: 23266 - protein, 417 aa, Arabidopsis thaliana
  peptide (1)..(417): Ceres Seq. ID no. 13487807
  misc_feature (1)..(413): Homolog of NCBI NO: 5163126 NR Description: chromatin assembly factor 1 p48 subunit [Gallus
  misc_feature (1)..(412): Homolog of NCBI NO: 31207939 NR Description: ENSANGP00000014714 [Anopheles gambiae]
  misc_feature (1)..(406): Homolog of NCBI NO: 9454362 NR Description: Rbap46 polypeptide [Gallus gallus]
  misc_feature (1)..(412): Homolog of NCBI NO: 27503223 NR Description: Similar to retinoblastoma binding protein 7
  misc_feature (1)..(413): Homolog of NCBI NO: 34871596 NR Description: similar to retinoblastoma-binding protein mRbAp48
  misc_feature (1)..(413): Homolog of NCBI NO: 6677681 NR Description: retinoblastoma binding protein 4 [Mus musculus]
  misc_feature (1)..(413): Homolog of NCBI NO: 5032027 NR Description: retinoblastoma binding protein 4
  misc_feature (1)..(417): Homolog of NCBI NO: 17017388 NR Description: MSI type nucleosome/chromatin assembly factor C
  misc_feature (1)..(415): Homolog of NCBI NO: 3122386 NR Description: WD-40 repeat protein MSI1
  misc_feature (1)..(417): Homolog of NCBI NO: 15237140 NR Description: WD-40 repeat protein (MSI1) [Arabidopsis
MRGEIEERLINEEYKIWKKNTPFLYDLVITHALEWPSLTVEWLPDREEPSGKDYSVQKMILGTHTSESEPNYLMLAQVQLPLDDTESEARQYDDDRSEFGGFGCATGKVQIIQQINHDGEVNRARYMPQNPFIIATKTVNAEVYVFDYSKHPSKPPLDGACNPDLKLRGHSSEGYGLSWSKFKQGHLLSGSDDAQICLWDINATPKNKSLDAQQIFKAHEGVVEDVAWHLRHEYLFGSVGDDQYLLIWDLRSPSASKPVQSVVAHSMEVNCLAFNPFNEWVVATGSTDKTVKLFDLRKLSTALHTFDSHKEEVFQVGWNPKNETILASCCLGRRLMVWDLSRIDEEQTVEDAEDGPPELLFIHGGHTSKISDFSWNPCEDWVISSVAEDNILQIWQMAENIYHDEDDAPGEEPSKAS

SEQ ID NO: 23267 - DNA, 1240 bp, Arabidopsis thaliana
  misc_feature (1)..(1240): Ceres Seq. ID no. 13487819
  misc_feature: MA Experiment ID: 108434 Result: Up-regulated in Transcription
  misc_feature: MA Experiment 108434 PARAMETER Experiment Name: At_Root_Tips_cDNA_P Parameter: Tissue Value: Root Tips
  misc_feature: MA Experiment ID: 108595 Result: Down-regulated in Transcription
  misc_feature: MA Experiment 108595 PARAMETER Experiment Name: At_Ler-pi_Ovule_cDNA_P Parameter: Plant Line Value: null
  misc_feature: MA Experiment ID: 20000185 Result: Down-regulated in Transcription
  misc_feature: MA Experiment 20000185 PARAMETER Experiment Name: At_Roots__P Parameter: Age (day) Value: 7 vs. 21
  misc_feature: MA Experiment 20000185 PARAMETER Experiment Name: At_Roots__P Parameter: Organism Value: A. thaliana
  misc_feature: MA Experiment 20000185 PARAMETER Experiment Name: At_Roots__P Parameter: Tissue Value: Roots vs. Whole Plant
  misc_feature: MA Experiment ID: 20000286 Result: Down-regulated in Transcription
  misc_feature: MA Experiment 20000286 PARAMETER Experiment Name: At_Open_Flower_P Parameter: Age (day) Value: 21
  misc_feature: MA Experiment 20000286 PARAMETER Experiment Name: At_Open_Flower_P Parameter: Plant Line Value: WS
  misc_feature: MA Experiment 20000286 PARAMETER Experiment Name: At_Open_Flower_P Parameter: Tissue Value: Half Open vs. Whole Plant
  misc_feature: MA Experiment ID: 20000439 Result: Down-regulated in Transcription
  misc_feature: MA Experiment 20000439 PARAMETER Experiment Name: At_Roots__P Parameter: Age (day) Value: 14 vs. 21
  misc_feature: MA Experiment 20000439 PARAMETER Experiment Name: At_Roots__P Parameter: Organism Value: A. thaliana
  misc_feature: MA Experiment 20000439 PARAMETER Experiment Name: At_Roots__P Parameter: Tissue Value: Roots vs. Whole Plant
agatcgttatcgtttcggggtcacagggactttcactctttctctctctctgcaacaaagaagaaatggaggtagcagcagcgactgcgacgagcttcacaacgcttcgagctcgtacgtcagcgattatcccgtcttctacacgtaatctgagatctaaaccgagattttcttcatcttcatctctcagagcttctctttcgaatggctttctttcgccgtataccggaggaagcatctctagtgacttatgcggcgctaagcttcgtgcggaatcgcttaatccgttaaatttttccagttccaagcctaaacgcggagttgtcactatggttatacctttctcaaagggaagtgcacacgaacaacctcctcctgatttggcatcatatttgttcaagaaccgaattgtatatttgggaatgtctctcgtaccttcagttactgagttgatacttgcggagtttctttaccttcagtatgaagacgagaaaaagcctatttacctttacataaactcgactgggacaaccaagaatggtgaaaagttgggctatgatactgaggcttttgcaatctatgatgtcatggggtatgtcaaaccaccaatctttactctttgcgtcgggaatgcttggggtgaagctgctttgcttctgactgctggtgcaaaaggaaatcgatctgcgttgccctcatcaactattatgataaagcagcccattgctcgatttcaaggccaagcaactgatgttgaaattgcaaggaaagaaatcaagcacataaagacagaaatggtcaagctgtattcaaagcatattggtaaatccccggagcagattgaagctgacatgaaacgcccgaaatattttagtcccactgaggctgttgaatatgggatcattgataaggtggtttacaatgaaaggggcagccaagacagaggagttgtgtctgaccttaaaaaggcacaactcatttgaatgtcagaactgtcttccgaaatcccatgattaacaggttggagatcttaccgctgatcaaatggggaatcagtgaaccattcaccggcacagaactgaggtaaagtctggaaaacatgttaaaaaaggttactagtaatgctgcaattgtagggttatttgaacagaaacaaacccatatgtgtaggcttgtgaatgcctagaaacaggattggtgtatcttcaatatatgtttctaagatgaatcaatttcatat

SEQ ID NO: 23268 - protein, 326 aa, Arabidopsis thaliana
  peptide (1)..(326): Ceres Seq. ID no. 13487820
  misc_feature (115)..(308): Pfam Name: Clp protease Pfam Description: Clp protease
  misc_feature (123)..(320): Homolog of NCBI NO: 18390982 NR Description: ATP-dependent Clp protease proteolytic subunit
  misc_feature (113)..(308): Homolog of NCBI NO: 23126723 NR Description: hypothetical protein [Nostoc punctiforme]
  misc_feature (117)..(308): Homolog of NCBI NO: 22299302 NR Description: ATP-dependent Clp protease proteolytic subunit 3
  misc_feature (113)..(308): Homolog of NCBI NO: 17231850 NR Description: ATP-dependent Clp protease proteolytic subunit
  misc_feature (123)..(314): Homolog of NCBI NO: 13812146 NR Description: ATP-dependent Clp protease proteolytic subunit
  misc_feature (105)..(241): Homolog of NCBI NO: 34903202 NR Description: unnamed protein product [Oryza sativa (japonica
  misc_feature (300)..(326): Homolog of NCBI NO: 7488077 NR Description: probable Clp proteinase - Arabidopsis thaliana
  misc_feature (22)..(246): Homolog of NCBI NO: 7488077 NR Description: probable Clp proteinase - Arabidopsis thaliana
  misc_feature (22)..(326): Homolog of NCBI NO: 18414804 NR Description: ATP-dependent Clp protease proteolytic subunit
  misc_feature (22)..(326): Homolog of NCBI NO: 19698857 NR Description: unknown protein [Arabidopsis thaliana]
IVIVSGSQGLSLFLSLCNKEEMEVAAATATSFTTLRARTSAIIPSSTRNLRSKPRFSSSSSLRASLSNGFLSPYTGGSISSDLCGAKLRAESLNPLNFSSSKPKRGVVTMVIPFSKGSAHEQPPPDLASYLFKNRIVYLGMSLVPSVTELILAEFLYLQYEDEKKPIYLYINSTGTTKNGEKLGYDTEAFAIYDVMGYVKPPIFTLCVGNAWGEAALLLTAGAKGNRSALPSSTIMIKQPIARFQGQATDVEIARKEIKHIKTEMVKLYSKHIGKSPEQIEADMKRPKYFSPTEAVEYGIIDKVVYNERGSQDRGVVSDLKKAQLI

SEQ ID NO: 23269 - protein, 305 aa, Arabidopsis thaliana
  peptide (1)..(305): Ceres Seq. ID no. 13487821
  misc_feature (94)..(287): Pfam Name: Clp protease Pfam Description: Clp protease
  misc_feature (102)..(299): Homolog of NCBI NO: 18390982 NR Description: ATP-dependent Clp protease proteolytic subunit
  misc_feature (92)..(287): Homolog of NCBI NO: 23126723 NR Description: hypothetical protein [Nostoc punctiforme]
  misc_feature (96)..(287): Homolog of NCBI NO: 22299302 NR Description: ATP-dependent Clp protease proteolytic subunit 3
  misc_feature (92)..(287): Homolog of NCBI NO: 17231850 NR Description: ATP-dependent Clp protease proteolytic subunit
  misc_feature (102)..(293): Homolog of NCBI NO: 13812146 NR Description: ATP-dependent Clp protease proteolytic subunit
  misc_feature (84)..(220): Homolog of NCBI NO: 34903202 NR Description: unnamed protein product [Oryza sativa (japonica
  misc_feature (279)..(305): Homolog of NCBI NO: 7488077 NR Description: probable Clp proteinase - Arabidopsis thaliana
  misc_feature (1)..(225): Homolog of NCBI NO: 7488077 NR Description: probable Clp proteinase - Arabidopsis thaliana
  misc_feature (1)..(305): Homolog of NCBI NO: 18414804 NR Description: ATP-dependent Clp protease proteolytic subunit
  misc_feature (1)..(305): Homolog of NCBI NO: 19698857 NR Description: unknown protein [Arabidopsis thaliana]
MEVAAATATSFTTLRARTSAIIPSSTRNLRSKPRFSSSSSLRASLSNGFLSPYTGGSISSDLCGAKLRAESLNPLNFSSSKPKRGVVTMVIPFSKGSAHEQPPPDLASYLFKNRIVYLGMSLVPSVTELILAEFLYLQYEDEKKPIYLYINSTGTTKNGEKLGYDTEAFAIYDVMGYVKPPIFTLCVGNAWGEAALLLTAGAKGNRSALPSSTIMIKQPIARFQGQATDVEIARKEIKHIKTEMVKLYSKHIGKSPEQIEADMKRPKYFSPTEAVEYGIIDKVVYNERGSQDRGVVSDLKKAQLI

SEQ ID NO: 23270 - protein, 217 aa, Arabidopsis thaliana
  peptide (1)..(217): Ceres Seq. ID no. 13487822
  misc_feature (6)..(199): Pfam Name: Clp protease Pfam Description: Clp protease
  misc_feature (14)..(211): Homolog of NCBI NO: 18390982 NR Description: ATP-dependent Clp protease proteolytic subunit
  misc_feature (4)..(199): Homolog of NCBI NO: 23126723 NR Description: hypothetical protein [Nostoc punctiforme]
  misc_feature (8)..(199): Homolog of NCBI NO: 22299302 NR Description: ATP-dependent Clp protease proteolytic subunit 3
  misc_feature (4)..(199): Homolog of NCBI NO: 17231850 NR Description: ATP-dependent Clp protease proteolytic subunit
  misc_feature (14)..(205): Homolog of NCBI NO: 13812146 NR Description: ATP-dependent Clp protease proteolytic subunit
  misc_feature (1)..(132): Homolog of NCBI NO: 34903202 NR Description: unnamed protein product [Oryza sativa (japonica
  misc_feature (191)..(217): Homolog of NCBI NO: 7488077 NR Description: probable Clp proteinase - Arabidopsis thaliana
  misc_feature (1)..(137): Homolog of NCBI NO: 7488077 NR Description: probable Clp proteinase - Arabidopsis thaliana
  misc_feature (1)..(217): Homolog of NCBI NO: 18414804 NR Description: ATP-dependent Clp protease proteolytic subunit
  misc_feature (1)..(217): Homolog of NCBI NO: 19698857 NR Description: unknown protein [Arabidopsis thaliana]
MVIPFSKGSAHEQPPPDLASYLFKNRIVYLGMSLVPSVTELILAEFLYLQYEDEKKPIYLYINSTGTTKNGEKLGYDTEAFAIYDVMGYVKPPIFTLCVGNAWGEAALLLTAGAKGNRSALPSSTIMIKQPIARFQGQATDVEIARKEIKHIKTEMVKLYSKHIGKSPEQIEADMKRPKYFSPTEAVEYGIIDKVVYNERGSQDRGVVSDLKKAQLI

SEQ ID NO: 23271 - DNA, 1346 bp, Arabidopsis thaliana
  misc_feature (1)..(1346): Ceres Seq. ID no. 12325009
  misc_feature: MA Experiment ID: 108434 Result: Down-regulated in Transcription
  misc_feature: MA Experiment 108434 PARAMETER Experiment Name: At_Root_Tips_cDNA_P Parameter: Tissue Value: Root Tips
  misc_feature: MA Experiment ID: 108569 Result: Up-regulated in Transcription
  misc_feature: MA Experiment 108569 PARAMETER Experiment Name: At_0.001%_MeJA__cDNA_P Parameter: Timepoint (hr) Value: 6
  misc_feature: MA Experiment 108569 PARAMETER Experiment Name: At_0.001%_MeJA__cDNA_P Parameter: Tissue Value: Aerial
  misc_feature: MA Experiment 108569 PARAMETER Experiment Name: At_0.001%_MeJA__cDNA_P Parameter: Treatment Value: 0.001% MeJA vs. No Treatment
  misc_feature: MA Experiment ID: 108574 Result: Up-regulated in Transcription
  misc_feature: MA Experiment 108574 PARAMETER Experiment Name: At_Wounding__cDNA_P Parameter: Timepoint (hr) Value: 1
  misc_feature: MA Experiment 108574 PARAMETER Experiment Name: At_Wounding__cDNA_P Parameter: Tissue Value: Aerial
  misc_feature: MA Experiment 108574 PARAMETER Experiment Name: At_Wounding__cDNA_P Parameter: Treatment Value: Wounding vs. No Wounding
  misc_feature: MA Experiment ID: 108576 Result: Down-regulated in Transcription
  misc_feature: MA Experiment 108576 PARAMETER Experiment Name: At_42deg_Heat_cDNA_P Parameter: Temperature (deg C) Value: 42 vs. 22
  misc_feature: MA Experiment 108576 PARAMETER Experiment Name: At_42deg_Heat_cDNA_P Parameter: Timepoint (hr) Value: 1
  misc_feature: MA Experiment 108576 PARAMETER Experiment Name: At_42deg_Heat_cDNA_P Parameter: Tissue Value: Aerial
  misc_feature: MA Experiment ID: 108577 Result: Down-regulated in Transcription
  misc_feature: MA Experiment 108577 PARAMETER Experiment Name: At_42deg_Heat_cDNA_P Parameter: Temperature (deg C) Value: 42 vs. 22
  misc_feature: MA Experiment 108577 PARAMETER Experiment Name: At_42deg_Heat_cDNA_P Parameter: Timepoint (hr) Value: 6
  misc_feature: MA Experiment 108577 PARAMETER Experiment Name: At_42deg_Heat_cDNA_P Parameter: Tissue Value: Aerial
  misc_feature: MA Experiment ID: 20000093 Result: Down-regulated in Transcription
  misc_feature: MA Experiment 20000093 PARAMETER Experiment Name: At_42deg_Heat_cDNA_P Parameter: Temperature (deg C) Value: 42 vs. 22
  misc_feature: MA Experiment 20000093 PARAMETER Experiment Name: At_42deg_Heat_cDNA_P Parameter: Timepoint (hr) Value: 0.5
  misc_feature: MA Experiment 20000093 PARAMETER Experiment Name: At_42deg_Heat_cDNA_P Parameter: Tissue Value: Aerial
  misc_feature: MA Experiment ID: 20000112 Result: Down-regulated in Transcription
  misc_feature: MA Experiment 20000112 PARAMETER Experiment Name: At_42deg_Heat_cDNA_P Parameter: Temperature (deg C) Value: 42 vs. 22
  misc_feature: MA Experiment 20000112 PARAMETER Experiment Name: At_42deg_Heat_cDNA_P Parameter: Timepoint (hr) Value: 2
  misc_feature: MA Experiment 20000112 PARAMETER Experiment Name: At_42deg_Heat_cDNA_P Parameter: Tissue Value: Aerial
  misc_feature: MA Experiment ID: 20000113 Result: Down-regulated in Transcription
  misc_feature: MA Experiment 20000113 PARAMETER Experiment Name: At_42deg_Heat_cDNA_P Parameter: Temperature (deg C) Value: 42 vs. 22
  misc_feature: MA Experiment 20000113 PARAMETER Experiment Name: At_42deg_Heat_cDNA_P Parameter: Timepoint (hr) Value: 8
  misc_feature: MA Experiment 20000113 PARAMETER Experiment Name: At_42deg_Heat_cDNA_P Parameter: Tissue Value: Aerial
  misc_feature: MA Experiment ID: 20000144 Result: Down-regulated in Transcription
  misc_feature: MA Experiment 20000144 PARAMETER Experiment Name: At_42deg_Heat_cDNA_P Parameter: Temperature (deg C) Value: 42 vs. 22
  misc_feature: MA Experiment 20000144 PARAMETER Experiment Name: At_42deg_Heat_cDNA_P Parameter: Timepoint (hr) Value: 1
  misc_feature: MA Experiment 20000144 PARAMETER Experiment Name: At_42deg_Heat_cDNA_P Parameter: Tissue Value: Aerial
  misc_feature: MA Experiment ID: 20000173 Result: Down-regulated in Transcription
  misc_feature: MA Experiment 20000173 PARAMETER Experiment Name: At_42deg_Heat_P Parameter: Age (day) Value: 14
  misc_feature: MA Experiment 20000173 PARAMETER Experiment Name: At_42deg_Heat_P Parameter: Organism Value: A. thaliana
  misc_feature: MA Experiment 20000173 PARAMETER Experiment Name: At_42deg_Heat_P Parameter: Plant Line Value: WS
  misc_feature: MA Experiment 20000173 PARAMETER Experiment Name: At_42deg_Heat_P Parameter: Temperature (deg C) Value: 42 vs. 22
  misc_feature: MA Experiment 20000173 PARAMETER Experiment Name: At_42deg_Heat_P Parameter: Timepoint (hr) Value: 6
  misc_feature: MA Experiment 20000173 PARAMETER Experiment Name: At_42deg_Heat_P Parameter: Tissue Value: Aerial
  misc_feature: MA Experiment ID: 20000211 Result: Up-regulated in Transcription
  misc_feature: MA Experiment 20000211 PARAMETER Experiment Name: At_0.001percent_MeJA__P Parameter: Age (day) Value: 14
  misc_feature: MA Experiment 20000211 PARAMETER Experiment Name: At_0.001percent_MeJA__P Parameter: Organism Value: A. thaliana
  misc_feature: MA Experiment 20000211 PARAMETER Experiment Name: At_0.001percent_MeJA__P Parameter: Plant Line Value: WS
  misc_feature: MA Experiment 20000211 PARAMETER Experiment Name: At_0.001percent_MeJA__P Parameter: Timepoint (hr) Value: 1
  misc_feature: MA Experiment 20000211 PARAMETER Experiment Name: At_0.001percent_MeJA__P Parameter: Tissue Value: Aerial
  misc_feature: MA Experiment 20000211 PARAMETER Experiment Name: At_0.001percent_MeJA__P Parameter: Treatment Value: 0.001percent MeJA vs. No Treatment
  misc_feature: MA Experiment ID: 20000234 Result: Down-regulated in Transcription
  misc_feature: MA Experiment 20000234 PARAMETER Experiment Name: At_Siliques_P Parameter: Age (day) Value: 21
  misc_feature: MA Experiment 20000234 PARAMETER Experiment Name: At_Siliques_P Parameter: Organism Value: A. thaliana
  misc_feature: MA Experiment 20000234 PARAMETER Experiment Name: At_Siliques_P Parameter: Plant Line Value: WS
  misc_feature: MA Experiment 20000234 PARAMETER Experiment Name: At_Siliques_P Parameter: Tissue Value: Less Than 5mm Siliques vs. Whole Plant
  misc_feature: MA Experiment ID: 20000235 Result: Down-regulated in Transcription
  misc_feature: MA Experiment 20000235 PARAMETER Experiment Name: At_Siliques_P Parameter: Age (day) Value: 21
  misc_feature: MA Experiment 20000235 PARAMETER Experiment Name: At_Siliques_P Parameter: Organism Value: A. thaliana
  misc_feature: MA Experiment 20000235 PARAMETER Experiment Name: At_Siliques_P Parameter: Plant Line Value: WS
  misc_feature: MA Experiment 20000235 PARAMETER Experiment Name: At_Siliques_P Parameter: Tissue Value: 5-10mm Siliques vs. Whole Plant
  misc_feature: MA Experiment ID: 20000264 Result: Down-regulated in Transcription
  misc_feature: MA Experiment 20000264 PARAMETER Experiment Name: At_Open_Flower_P Parameter: Age (day) Value: 21
  misc_feature: MA Experiment 20000264 PARAMETER Experiment Name: At_Open_Flower_P Parameter: Plant Line Value: WS
  misc_feature: MA Experiment 20000264 PARAMETER Experiment Name: At_Open_Flower_P Parameter: Tissue Value: Open Flower vs. Whole Plant
  misc_feature: MA Experiment ID: 20000265 Result: Down-regulated in Transcription
  misc_feature: MA Experiment 20000265 PARAMETER Experiment Name: At_Open_Flower_P Parameter: Age (day) Value: 21
  misc_feature: MA Experiment 20000265 PARAMETER Experiment Name: At_Open_Flower_P Parameter: Plant Line Value: WS
  misc_feature: MA Experiment 20000265 PARAMETER Experiment Name: At_Open_Flower_P Parameter: Tissue Value: Closed Flower vs. Whole Plant
  misc_feature: MA Experiment ID: 20000286 Result: Down-regulated in Transcription
  misc_feature: MA Experiment 20000286 PARAMETER Experiment Name: At_Open_Flower_P Parameter: Age (day) Value: 21
  misc_feature: MA Experiment 20000286 PARAMETER Experiment Name: At_Open_Flower_P Parameter: Plant Line Value: WS
  misc_feature: MA Experiment 20000286 PARAMETER Experiment Name: At_Open_Flower_P Parameter: Tissue Value: Half Open vs. Whole Plant
  misc_feature: MA Experiment ID: 20000437 Result: Down-regulated in Transcription
  misc_feature: MA Experiment 20000437 PARAMETER Experiment Name: At_Drought_P Parameter: Age (day) Value: 8
  misc_feature: MA Experiment 20000437 PARAMETER Experiment Name: At_Drought_P Parameter: Organism Value: A. thaliana
  misc_feature: MA Experiment 20000437 PARAMETER Experiment Name: At_Drought_P Parameter: Plant Line Value: WS
  misc_feature: MA Experiment 20000437 PARAMETER Experiment Name: At_Drought_P Parameter: Timepoint (hr) Value: 24
  misc_feature: MA Experiment 20000437 PARAMETER Experiment Name: At_Drought_P Parameter: Tissue Value: Whole Plant
  misc_feature: MA Experiment 20000437 PARAMETER Experiment Name: At_Drought_P Parameter: Treatment Value: Drought vs. No Drought
  misc_feature: MA Experiment ID: 20000438 Result: Down-regulated in Transcription
  misc_feature: MA Experiment 20000438 PARAMETER Experiment Name: At_Shoots__P Parameter: Age (day) Value: 14
  misc_feature: MA Experiment 20000438 PARAMETER Experiment Name: At_Shoots__P Parameter: Tissue Value: Shoots vs. Whole Plant
  misc_feature: MA Experiment ID: 20000441 Result: Up-regulated in Transcription
  misc_feature: MA Experiment 20000441 PARAMETER Experiment Name: At_1uM_BR-BRZ__P Parameter: Tissue Value: Shoot Apices
  misc_feature: MA Experiment 20000441 PARAMETER Experiment Name: At_1uM_BR-BRZ__P Parameter: Treatment Value: 1uM BR vs. No Treatment
  misc_feature: MA Experiment ID: 20000496 Result: Down-regulated in Transcription
  misc_feature: MA Experiment 20000496 PARAMETER Experiment Name: At_Guard_Cells_P Parameter: Harvest Date Value: 7/19/2002
  misc_feature: MA Experiment 20000496 PARAMETER Experiment Name: At_Guard_Cells_P Parameter: Organism Value: Canola
  misc_feature: MA Experiment 20000496 PARAMETER Experiment Name: At_Guard_Cells_P Parameter: Tissue Value: Guard Cells vs. Leaves
  misc_feature: MA Experiment ID: 20000794 Result: Down-regulated in Transcription
  misc_feature: MA Experiment 20000794 PARAMETER Experiment Name: At_Petals_P Parameter: Age (day) Value: 23-25 days
  misc_feature: MA Experiment 20000794 PARAMETER Experiment Name: At_Petals_P Parameter: Plant Line Value: WS
  misc_feature: MA Experiment 20000794 PARAMETER Experiment Name: At_Petals_P Parameter: Tissue Value: Petals vs. Whole plant
  misc_feature: MA Experiment ID: 20001248 Result: Down-regulated in Transcription
  misc_feature: MA Experiment 20001248 PARAMETER Experiment Name: At_Far-red-induction_P Parameter: Age (day) Value: 7
  misc_feature: MA Experiment 20001248 PARAMETER Experiment Name: At_Far-red-induction_P Parameter: Light Value: Far-red vs. White
  misc_feature: MA Experiment 20001248 PARAMETER Experiment Name: At_Far-red-induction_P Parameter: Organism Value: A. thaliana
  misc_feature: MA Experiment 20001248 PARAMETER Experiment Name: At_Far-red-induction_P Parameter: Plant Line Value: Columbia
  misc_feature: MA Experiment 20001248 PARAMETER Experiment Name: At_Far-red-induction_P Parameter: Timepoint (hr) Value: 4
  misc_feature: MA Experiment 20001248 PARAMETER Experiment Name: At_Far-red-induction_P Parameter: Tissue Value: Whole Plant
  misc_feature: MA Experiment ID: 20001450 Result: Down-regulated in Transcription
  misc_feature: MA Experiment 20001450 PARAMETER Experiment Name: At_Far-red-induction_P Parameter: Age (day) Value: 7
  misc_feature: MA Experiment 20001450 PARAMETER Experiment Name: At_Far-red-induction_P Parameter: Light Value: Far-red vs. White
  misc_feature: MA Experiment 20001450 PARAMETER Experiment Name: At_Far-red-induction_P Parameter: Organism Value: A. thaliana
  misc_feature: MA Experiment 20001450 PARAMETER Experiment Name: At_Far-red-induction_P Parameter: Plant Line Value: Columbia
  misc_feature: MA Experiment 20001450 PARAMETER Experiment Name: At_Far-red-induction_P Parameter: Timepoint (hr) Value: 8
  misc_feature: MA Experiment 20001450 PARAMETER Experiment Name: At_Far-red-induction_P Parameter: Tissue Value: Whole Plant
  misc_feature: MA Experiment ID: 20001451 Result: Down-regulated in Transcription
  misc_feature: MA Experiment 20001451 PARAMETER Experiment Name: At_Far-red-induction_P Parameter: Age (day) Value: 7
  misc_feature: MA Experiment 20001451 PARAMETER Experiment Name: At_Far-red-induction_P Parameter: Light Value: Far-red vs. White
  misc_feature: MA Experiment 20001451 PARAMETER Experiment Name: At_Far-red-induction_P Parameter: Organism Value: A. thaliana
  misc_feature: MA Experiment 20001451 PARAMETER Experiment Name: At_Far-red-induction_P Parameter: Plant Line Value: Columbia
  misc_feature: MA Experiment 20001451 PARAMETER Experiment Name: At_Far-red-induction_P Parameter: Timepoint (hr) Value: 24
  misc_feature: MA Experiment 20001451 PARAMETER Experiment Name: At_Far-red-induction_P Parameter: Tissue Value: Whole Plant
  misc_feature: MA Experiment ID: 20001556 Result: Down-regulated in Transcription
  misc_feature: MA Experiment 20001556 PARAMETER Experiment Name: At_Drought_Soil_Dry_P Parameter: Age (day) Value: 26
  misc_feature: MA Experiment 20001556 PARAMETER Experiment Name: At_Drought_Soil_Dry_P Parameter: Organism Value: A. thaliana
  misc_feature: MA Experiment 20001556 PARAMETER Experiment Name: At_Drought_Soil_Dry_P Parameter: Plant Line Value: WS
  misc_feature: MA Experiment 20001556 PARAMETER Experiment Name: At_Drought_Soil_Dry_P Parameter: Post Timepoint (hr) Value: None
  misc_feature: MA Experiment 20001556 PARAMETER Experiment Name: At_Drought_Soil_Dry_P Parameter: Post-Treatment Value: None
  misc_feature: MA Experiment 20001556 PARAMETER Experiment Name: At_Drought_Soil_Dry_P Parameter: Timepoint (day) Value: 12
  misc_feature: MA Experiment 20001556 PARAMETER Experiment Name: At_Drought_Soil_Dry_P Parameter: Treatment Value: Drought vs. No Drought
  misc_feature: MA Experiment ID: 20001904 Result: Down-regulated in Transcription
  misc_feature: MA Experiment 20001904 PARAMETER Experiment Name: At_Drought_Reproduction_P Parameter: Age (day) Value: 37
  misc_feature: MA Experiment 20001904 PARAMETER Experiment Name: At_Drought_Reproduction_P Parameter: Organism Value: A. thaliana
  misc_feature: MA Experiment 20001904 PARAMETER Experiment Name: At_Drought_Reproduction_P Parameter: Plant Line Value: WS
  misc_feature: MA Experiment 20001904 PARAMETER Experiment Name: At_Drought_Reproduction_P Parameter: Timepoint (day) Value: 7
  misc_feature: MA Experiment 20001904 PARAMETER Experiment Name: At_Drought_Reproduction_P Parameter: Tissue Value: Rosettes
  misc_feature: MA Experiment 20001904 PARAMETER Experiment Name: At_Drought_Reproduction_P Parameter: Treatment Value: Drought vs. No Drought
  misc_feature: MA Experiment ID: 20001911 Result: Down-regulated in Transcription
  misc_feature: MA Experiment 20001911 PARAMETER Experiment Name: At_Drought_Reproduction_P Parameter: Age (day) Value: 40
  misc_feature: MA Experiment 20001911 PARAMETER Experiment Name: At_Drought_Reproduction_P Parameter: Organism Value: A. thaliana
  misc_feature: MA Experiment 20001911 PARAMETER Experiment Name: At_Drought_Reproduction_P Parameter: Plant Line Value: WS
  misc_feature: MA Experiment 20001911 PARAMETER Experiment Name: At_Drought_Reproduction_P Parameter: Timepoint (day) Value: 10
  misc_feature: MA Experiment 20001911 PARAMETER Experiment Name: At_Drought_Reproduction_P Parameter: Tissue Value: Flowers
  misc_feature: MA Experiment 20001911 PARAMETER Experiment Name: At_Drought_Reproduction_P Parameter: Treatment Value: Drought vs. No Drought
aataattttacattggtttgttcaactgatgcgacccttatcgagccatcatcatcacctacctaaatctttcttcctattataaaacccattttctcatctctcaagaatctcaatcccatcttccacaactctaacaaaccttcccgattcatcctctttgactcccttcactcgatctcatccgcaatggaatcaaagacaacccaaaacggatccgaagtcgtcgaactcacagagttcgagaaaacccagaagaagtatcaagatttcatcgctacacttccaaagagcaaaggctggagaccagatgagatcttaacccaatacggtggacactggtggcaagaatgtctcctcgaaggtctttttcacgctaaagaccatttcgaagcacgaccaactgatttcctcgtctgtagctacccaaaaaccggtacaacttggctcaaagcactaacttacgcaatcgtcaatcgttctcgttacgacgacgccgcaaacccactcctcaaacgaaaccctcacgagtttgtcccttacgttgagatcgacttcgcgttttaccccaccgttgatgttcttcaagacagaaagaacccacttttctctactcatatcccaaacgggttattacccgattcgattgtgaactctggttgtaagatggtgtacatatggagagacccgaaagatactttcatctccatgtggactttcttacacaaggagaagtctcaagaaggtcaattagcgagtcttgaggacagctttgatatgttttgtaaaggtttatctgtgtatggtccttatctggatcatgttttgggttattggaaagcttaccaagagaatccagataggattttgttccttaggtacgagaccatgagggccaatcctttgccttttgtgaagagattggctgagttcatgggttatggattcactgatgaggaagaggagaatggtgttgctgagaaagtggtgaagctttgtagctttgagacgttgaagaatcttgaagctaacaaaggtgataaagaaagagaggatcgtcctgctgtttatgcgaatagcgcgtattttaggaaaggaaaggttggagattgggctaattatttgactcctgagatggctgctcgtattgatggcttagtggaggagaaattcaaagatactggcttgcttcaacatgataactgaatgtgttttattctggtccttctgttatttggtgcggcgaaacagaggatgctctgttttgctttgtttggttcagtattctcattattgtctgtatcatcttatttcaacaagagaaagatatttcgatttatgatccc

SEQ ID NO: 23272 - protein, 338 aa, Arabidopsis thaliana
  peptide (1)..(338): Ceres Seq. ID no. 12325010
  misc_feature (71)..(332): Pfam Name: Sulfotransferase domain Pfam Description: Sulfotransferase domain
  misc_feature (26)..(334): Homolog of NCBI NO: 4321096 NR Description: flavonol 3-sulfotransferase [Flaveria
  misc_feature (26)..(334): Homolog of NCBI NO: 1706918 NR Description: FLAVONOL SULFOTRANSFERASE-LIKE
  misc_feature (17)..(334): Homolog of NCBI NO: 285286 NR Description: flavonol 4'-sulfotransferase - Flaveria
  misc_feature (17)..(334): Homolog of NCBI NO: 1706740 NR Description: FLAVONOL 4'-SULFOTRANSFERASE (F4-ST)
  misc_feature (19)..(333): Homolog of NCBI NO: 15230602 NR Description: sulfotransferase-like protein; protein id:
  misc_feature (1)..(334): Homolog of NCBI NO: 15221820 NR Description: flavonol 4'-sulfotransferase, putative; protein
  misc_feature (14)..(336): Homolog of NCBI NO: 21593660 NR Description: putative flavonol sulfotransferase [Arabidopsis
  misc_feature (14)..(336): Homolog of NCBI NO: 15221130 NR Description: putative flavonol sulfotransferase
  misc_feature (1)..(338): Homolog of NCBI NO: 21593087 NR Description: putative flavonol sulfotransferase [Arabidopsis
  misc_feature (1)..(338): Homolog of NCBI NO: 15221131 NR Description: putative flavonol sulfotransferase
MESKTTQNGSEVVELTEFEKTQKKYQDFIATLPKSKGWRPDEILTQYGGHWWQECLLEGLFHAKDHFEARPTDFLVCSYPKTGTTWLKALTYAIVNRSRYDDAANPLLKRNPHEFVPYVEIDFAFYPTVDVLQDRKNPLFSTHIPNGLLPDSIVNSGCKMVYIWRDPKDTFISMWTFLHKEKSQEGQLASLEDSFDMFCKGLSVYGPYLDHVLGYWKAYQENPDRILFLRYETMRANPLPFVKRLAEFMGYGFTDEEEENGVAEKVVKLCSFETLKNLEANKGDKEREDRPAVYANSAYFRKGKVGDWANYLTPEMAARIDGLVEEKFKDTGLLQHDN

SEQ ID NO: 23273 - protein, 179 aa, Arabidopsis thaliana
  peptide (1)..(179): Ceres Seq. ID no. 12325011
  misc_feature (1)..(173): Pfam Name: Sulfotransferase domain Pfam Description: Sulfotransferase domain
  misc_feature (1)..(175): Homolog of NCBI NO: 4321096 NR Description: flavonol 3-sulfotransferase [Flaveria
  misc_feature (1)..(175): Homolog of NCBI NO: 1706918 NR Description: FLAVONOL SULFOTRANSFERASE-LIKE
  misc_feature (1)..(175): Homolog of NCBI NO: 285286 NR Description: flavonol 4'-sulfotransferase - Flaveria
  misc_feature (1)..(175): Homolog of NCBI NO: 1706740 NR Description: FLAVONOL 4'-SULFOTRANSFERASE (F4-ST)
  misc_feature (1)..(174): Homolog of NCBI NO: 15230602 NR Description: sulfotransferase-like protein; protein id:
  misc_feature (1)..(175): Homolog of NCBI NO: 15221820 NR Description: flavonol 4'-sulfotransferase, putative; protein
  misc_feature (1)..(177): Homolog of NCBI NO: 21593660 NR Description: putative flavonol sulfotransferase [Arabidopsis
  misc_feature (1)..(177): Homolog of NCBI NO: 15221130 NR Description: putative flavonol sulfotransferase
  misc_feature (1)..(179): Homolog of NCBI NO: 21593087 NR Description: putative flavonol sulfotransferase [Arabidopsis
  misc_feature (1)..(179): Homolog of NCBI NO: 15221131 NR Description: putative flavonol sulfotransferase
MVYIWRDPKDTFISMWTFLHKEKSQEGQLASLEDSFDMFCKGLSVYGPYLDHVLGYWKAYQENPDRILFLRYETMRANPLPFVKRLAEFMGYGFTDEEEENGVAEKVVKLCSFETLKNLEANKGDKEREDRPAVYANSAYFRKGKVGDWANYLTPEMAARIDGLVEEKFKDTGLLQHDN

SEQ ID NO: 23274 - DNA, 1295 bp, Arabidopsis thaliana
  misc_feature (1)..(1295): Ceres Seq. ID no. 12322832
  misc_feature: MA Experiment ID: 108576 Result: Up-regulated in Transcription
  misc_feature: MA Experiment 108576 PARAMETER Experiment Name: At_42deg_Heat_cDNA_P Parameter: Temperature (deg C) Value: 42 vs. 22
  misc_feature: MA Experiment 108576 PARAMETER Experiment Name: At_42deg_Heat_cDNA_P Parameter: Timepoint (hr) Value: 1
  misc_feature: MA Experiment 108576 PARAMETER Experiment Name: At_42deg_Heat_cDNA_P Parameter: Tissue Value: Aerial
  misc_feature: MA Experiment ID: 108595 Result: Down-regulated in Transcription
  misc_feature: MA Experiment 108595 PARAMETER Experiment Name: At_Ler-pi_Ovule_cDNA_P Parameter: Plant Line Value: null
  misc_feature: MA Experiment ID: 108668 Result: Down-regulated in Transcription
  misc_feature: MA Experiment 108668 PARAMETER Experiment Name: At_2mM_SA_cDNA_P Parameter: Plant Line Value: WS
  misc_feature: MA Experiment 108668 PARAMETER Experiment Name: At_2mM_SA_cDNA_P Parameter: Timepoint (hr) Value: 6
  misc_feature: MA Experiment 108668 PARAMETER Experiment Name: At_2mM_SA_cDNA_P Parameter: Treatment Value: 2mM SA vs. No Treatment
  misc_feature: MA Experiment ID: 20000093 Result: Up-regulated in Transcription
  misc_feature: MA Experiment 20000093 PARAMETER Experiment Name: At_42deg_Heat_cDNA_P Parameter: Temperature (deg C) Value: 42 vs. 22
  misc_feature: MA Experiment 20000093 PARAMETER Experiment Name: At_42deg_Heat_cDNA_P Parameter: Timepoint (hr) Value: 0.5
  misc_feature: MA Experiment 20000093 PARAMETER Experiment Name: At_42deg_Heat_cDNA_P Parameter: Tissue Value: Aerial
  misc_feature: MA Experiment ID: 20000112 Result: Up-regulated in Transcription
  misc_feature: MA Experiment 20000112 PARAMETER Experiment Name: At_42deg_Heat_cDNA_P Parameter: Temperature (deg C) Value: 42 vs. 22
  misc_feature: MA Experiment 20000112 PARAMETER Experiment Name: At_42deg_Heat_cDNA_P Parameter: Timepoint (hr) Value: 2
  misc_feature: MA Experiment 20000112 PARAMETER Experiment Name: At_42deg_Heat_cDNA_P Parameter: Tissue Value: Aerial
  misc_feature: MA Experiment ID: 20000113 Result: Up-regulated in Transcription
  misc_feature: MA Experiment 20000113 PARAMETER Experiment Name: At_42deg_Heat_cDNA_P Parameter: Temperature (deg C) Value: 42 vs. 22
  misc_feature: MA Experiment 20000113 PARAMETER Experiment Name: At_42deg_Heat_cDNA_P Parameter: Timepoint (hr) Value: 8
  misc_feature: MA Experiment 20000113 PARAMETER Experiment Name: At_42deg_Heat_cDNA_P Parameter: Tissue Value: Aerial
  misc_feature: MA Experiment ID: 20000144 Result: Up-regulated in Transcription
  misc_feature: MA Experiment 20000144 PARAMETER Experiment Name: At_42deg_Heat_cDNA_P Parameter: Temperature (deg C) Value: 42 vs. 22
  misc_feature: MA Experiment 20000144 PARAMETER Experiment Name: At_42deg_Heat_cDNA_P Parameter: Timepoint (hr) Value: 1
  misc_feature: MA Experiment 20000144 PARAMETER Experiment Name: At_42deg_Heat_cDNA_P Parameter: Tissue Value: Aerial
  misc_feature: MA Experiment ID: 20000171 Result: Up-regulated in Transcription
  misc_feature: MA Experiment 20000171 PARAMETER Experiment Name: At_42deg_Heat_P Parameter: Age (day) Value: 14
  misc_feature: MA Experiment 20000171 PARAMETER Experiment Name: At_42deg_Heat_P Parameter: Organism Value: A. thaliana
  misc_feature: MA Experiment 20000171 PARAMETER Experiment Name: At_42deg_Heat_P Parameter: Plant Line Value: WS
  misc_feature: MA Experiment 20000171 PARAMETER Experiment Name: At_42deg_Heat_P Parameter: Temperature (deg C) Value: 42 vs. 22
  misc_feature: MA Experiment 20000171 PARAMETER Experiment Name: At_42deg_Heat_P Parameter: Timepoint (hr) Value: 1
  misc_feature: MA Experiment 20000171 PARAMETER Experiment Name: At_42deg_Heat_P Parameter: Tissue Value: Aerial
  misc_feature: MA Experiment ID: 20000173 Result: Up-regulated in Transcription
  misc_feature: MA Experiment 20000173 PARAMETER Experiment Name: At_42deg_Heat_P Parameter: Age (day) Value: 14
  misc_feature: MA Experiment 20000173 PARAMETER Experiment Name: At_42deg_Heat_P Parameter: Organism Value: A. thaliana
  misc_feature: MA Experiment 20000173 PARAMETER Experiment Name: At_42deg_Heat_P Parameter: Plant Line Value: WS
  misc_feature: MA Experiment 20000173 PARAMETER Experiment Name: At_42deg_Heat_P Parameter: Temperature (deg C) Value: 42 vs. 22
  misc_feature: MA Experiment 20000173 PARAMETER Experiment Name: At_42deg_Heat_P Parameter: Timepoint (hr) Value: 6
  misc_feature: MA Experiment 20000173 PARAMETER Experiment Name: At_42deg_Heat_P Parameter: Tissue Value: Aerial
  misc_feature: MA Experiment ID: 20000794 Result: Up-regulated in Transcription
  misc_feature: MA Experiment 20000794 PARAMETER Experiment Name: At_Petals_P Parameter: Age (day) Value: 23-25 days
  misc_feature: MA Experiment 20000794 PARAMETER Experiment Name: At_Petals_P Parameter: Plant Line Value: WS
  misc_feature: MA Experiment 20000794 PARAMETER Experiment Name: At_Petals_P Parameter: Tissue Value: Petals vs. Whole plant
  misc_feature: MA Experiment ID: 20001910 Result: Up-regulated in Transcription
  misc_feature: MA Experiment 20001910 PARAMETER Experiment Name: At_Drought_Reproduction_P Parameter: Age (day) Value: 37
  misc_feature: MA Experiment 20001910 PARAMETER Experiment Name: At_Drought_Reproduction_P Parameter: Organism Value: A. thaliana
  misc_feature: MA Experiment 20001910 PARAMETER Experiment Name: At_Drought_Reproduction_P Parameter: Plant Line Value: WS
  misc_feature: MA Experiment 20001910 PARAMETER Experiment Name: At_Drought_Reproduction_P Parameter: Timepoint (day) Value: 7
  misc_feature: MA Experiment 20001910 PARAMETER Experiment Name: At_Drought_Reproduction_P Parameter: Tissue Value: Flowers
  misc_feature: MA Experiment 20001910 PARAMETER Experiment Name: At_Drought_Reproduction_P Parameter: Treatment Value: Drought vs. No Drought
ctattttattggcttctcaaaacgaaataacgaaatcgcctcctcttcttctcctcctcgacctggaaatcaatctttcgccgccgagttcttctctctgcggcggagaatcaattagcaatctccagaattaggtgagggaaaagaggatggctttgatcggaaaatccgagagattctctgctgattttgtgatgggtggtgctgcagccattgttgccaaatctgcagctgctccaatcgaaagggtgaagcttttactgcagaatcaaggggagatgataaagactggacatctcataagaccttacactggtttgggtaattgctttaccagaatctatagagaagaaggtgttttgtccttttggagaggaaaccaagccaatgtcatacgatatttccctacacaggcttccaactttgcatttaaaggttacttcaagaaccttcttggatgttcgaaagagaaagatggttacttgaagtggtttgctggaaatgtagcttcgggaagtgctgctggagcaacaacttccttgtttctgtaccatttggattatgcgcggacccgtttaggcactgatgcaaaggaatgttctgttaatggcaagagacagtttaaagggatgatcgatgtgtatcgtaaaactttgtcaagtgacggtattaaaggtctttaccgtggatttggtgtgtcaatagtgggaatcactctttaccgaggaatgtattttgggatgtacgacaccatcaaacccattgtgttagtcggttccttagagggaaacttcttggctagttttctattgggttggagtattactacctctgcaggcgtcattgcttacccttttgacacacttaggaggagaatgatgcttacatcaggacaacctgttaaataccggaacaccattcatgccttaagagagatattgaagtcggaagggttctatgcgctatatagaggagttactgcgaacatgcttcttggagtagcaggagcaggagtgcttgcgggatatgatcagcttcaccagattgcttataagcattgggttcagtagttttgaaccaaacccgaaacgatgacaatgaaagctgagctcaaaaagagaaggttagtaaacaccaagaagtctcacttgctttccaatgtattgtgttagttaacagaatctcggaatcattaaccgattgaaccagcagaagatagggaaaattgttcatagttcttgtgcagtaacattgttatatcaataatccaagaaaggcctatttgatttttgtgc

SEQ ID NO: 23275 - protein, 306 aa, Arabidopsis thaliana
  peptide (1)..(306): Ceres Seq. ID no. 12322833
  misc_feature (8)..(301): Homolog of NCBI NO: 485517 NR Description: ADP,ATP carrier protein - rice
  misc_feature (8)..(301): Homolog of NCBI NO: 399015 NR Description: ADP,ATP carrier protein, mitochondrial precursor
  misc_feature (1)..(301): Homolog of NCBI NO: 22166 NR Description: adenine nucleotide translocator [Zea mays]
  misc_feature (1)..(301): Homolog of NCBI NO: 113460 NR Description: ADP,ATP carrier protein 2, mitochondrial (ADP/ATP translocase 2) (Adenine nucleotide translocator 2) (ANT
  misc_feature (10)..(299): Homolog of NCBI NO: 15235280 NR Description: mitochondrial ADP,ATP carrier protein, putative
  misc_feature (1)..(301): Homolog of NCBI NO: 113456 NR Description: ADP,ATP carrier protein 1, mitochondrial (ADP/ATP translocase 1) (Adenine nucleotide translocator 1) (ANT
  misc_feature (6)..(301): Homolog of NCBI NO: 19112115 NR Description: adp,atp carrier protein [Schizosaccharomyces
  misc_feature (1)..(304): Homolog of NCBI NO: 11357161 NR Description: ADP/ATP translocase-like protein - Arabidopsis
  misc_feature (16)..(306): Homolog of NCBI NO: 21593088 NR Description: ADP/ATP translocase-like protein [Arabidopsis
  misc_feature (1)..(306): Homolog of NCBI NO: 18418286 NR Description: ADP/ATP translocase-like protein
MALIGKSERFSADFVMGGAAAIVAKSAAAPIERVKLLLQNQGEMIKTGHLIRPYTGLGNCFTRIYREEGVLSFWRGNQANVIRYFPTQASNFAFKGYFKNLLGCSKEKDGYLKWFAGNVASGSAAGATTSLFLYHLDYARTRLGTDAKECSVNGKRQFKGMIDVYRKTLSSDGIKGLYRGFGVSIVGITLYRGMYFGMYDTIKPIVLVGSLEGNFLASFLLGWSITTSAGVIAYPFDTLRRRMMLTSGQPVKYRNTIHALREILKSEGFYALYRGVTANMLLGVAGAGVLAGYDQLHQIAYKHWVQ

SEQ ID NO: 23276 - protein, 291 aa, Arabidopsis thaliana
  peptide (1)..(291): Ceres Seq. ID no. 12322834
  misc_feature (1)..(286): Homolog of NCBI NO: 485517 NR Description: ADP,ATP carrier protein - rice
  misc_feature (1)..(286): Homolog of NCBI NO: 399015 NR Description: ADP,ATP carrier protein, mitochondrial precursor
  misc_feature (1)..(286): Homolog of NCBI NO: 22166 NR Description: adenine nucleotide translocator [Zea mays]
  misc_feature (1)..(286): Homolog of NCBI NO: 113460 NR Description: ADP,ATP carrier protein 2, mitochondrial (ADP/ATP translocase 2) (Adenine nucleotide translocator 2) (ANT
  misc_feature (1)..(284): Homolog of NCBI NO: 15235280 NR Description: mitochondrial ADP,ATP carrier protein, putative
  misc_feature (1)..(286): Homolog of NCBI NO: 113456 NR Description: ADP,ATP carrier protein 1, mitochondrial (ADP/ATP translocase 1) (Adenine nucleotide translocator 1) (ANT
  misc_feature (1)..(286): Homolog of NCBI NO: 19112115 NR Description: adp,atp carrier protein [Schizosaccharomyces
  misc_feature (1)..(289): Homolog of NCBI NO: 11357161 NR Description: ADP/ATP translocase-like protein - Arabidopsis
  misc_feature (1)..(291): Homolog of NCBI NO: 21593088 NR Description: ADP/ATP translocase-like protein [Arabidopsis
  misc_feature (1)..(291): Homolog of NCBI NO: 18418286 NR Description: ADP/ATP translocase-like protein
MGGAAAIVAKSAAAPIERVKLLLQNQGEMIKTGHLIRPYTGLGNCFTRIYREEGVLSFWRGNQANVIRYFPTQASNFAFKGYFKNLLGCSKEKDGYLKWFAGNVASGSAAGATTSLFLYHLDYARTRLGTDAKECSVNGKRQFKGMIDVYRKTLSSDGIKGLYRGFGVSIVGITLYRGMYFGMYDTIKPIVLVGSLEGNFLASFLLGWSITTSAGVIAYPFDTLRRRMMLTSGQPVKYRNTIHALREILKSEGFYALYRGVTANMLLGVAGAGVLAGYDQLHQIAYKHWVQ

SEQ ID NO: 23277 - protein, 263 aa, Arabidopsis thaliana
  peptide (1)..(263): Ceres Seq. ID no. 12322835
  misc_feature (1)..(258): Homolog of NCBI NO: 485517 NR Description: ADP,ATP carrier protein - rice
  misc_feature (1)..(258): Homolog of NCBI NO: 399015 NR Description: ADP,ATP carrier protein, mitochondrial precursor
  misc_feature (1)..(258): Homolog of NCBI NO: 22166 NR Description: adenine nucleotide translocator [Zea mays]
  misc_feature (1)..(258): Homolog of NCBI NO: 113460 NR Description: ADP,ATP carrier protein 2, mitochondrial (ADP/ATP translocase 2) (Adenine nucleotide translocator 2) (ANT
  misc_feature (1)..(256): Homolog of NCBI NO: 15235280 NR Description: mitochondrial ADP,ATP carrier protein, putative
  misc_feature (1)..(258): Homolog of NCBI NO: 113456 NR Description: ADP,ATP carrier protein 1, mitochondrial (ADP/ATP translocase 1) (Adenine nucleotide translocator 1) (ANT
  misc_feature (1)..(258): Homolog of NCBI NO: 19112115 NR Description: adp,atp carrier protein [Schizosaccharomyces
  misc_feature (1)..(261): Homolog of NCBI NO: 11357161 NR Description: ADP/ATP translocase-like protein - Arabidopsis
  misc_feature (1)..(263): Homolog of NCBI NO: 21593088 NR Description: ADP/ATP translocase-like protein [Arabidopsis
  misc_feature (1)..(263): Homolog of NCBI NO: 18418286 NR Description: ADP/ATP translocase-like protein
MIKTGHLIRPYTGLGNCFTRIYREEGVLSFWRGNQANVIRYFPTQASNFAFKGYFKNLLGCSKEKDGYLKWFAGNVASGSAAGATTSLFLYHLDYARTRLGTDAKECSVNGKRQFKGMIDVYRKTLSSDGIKGLYRGFGVSIVGITLYRGMYFGMYDTIKPIVLVGSLEGNFLASFLLGWSITTSAGVIAYPFDTLRRRMMLTSGQPVKYRNTIHALREILKSEGFYALYRGVTANMLLGVAGAGVLAGYDQLHQIAYKHWVQ

SEQ ID NO: 23278 - DNA, 1686 bp, Arabidopsis thaliana
  misc_feature (1)..(1686): Ceres Seq. ID no. 13487095
  misc_feature: MA Experiment ID: 108434 Result: Up-regulated in Transcription
  misc_feature: MA Experiment 108434 PARAMETER Experiment Name: At_Root_Tips_cDNA_P Parameter: Tissue Value: Root Tips
  misc_feature: MA Experiment ID: 108469 Result: Up-regulated in Transcription
  misc_feature: MA Experiment ID: 108569 Result: Up-regulated in Transcription
  misc_feature: MA Experiment 108569 PARAMETER Experiment Name: At_0.001%_MeJA__cDNA_P Parameter: Timepoint (hr) Value: 6
  misc_feature: MA Experiment 108569 PARAMETER Experiment Name: At_0.001%_MeJA__cDNA_P Parameter: Tissue Value: Aerial
  misc_feature: MA Experiment 108569 PARAMETER Experiment Name: At_0.001%_MeJA__cDNA_P Parameter: Treatment Value: 0.001% MeJA vs. No Treatment
  misc_feature: MA Experiment ID: 108573 Result: Up-regulated in Transcription
  misc_feature: MA Experiment 108573 PARAMETER Experiment Name: At_Drought_cDNA_P Parameter: Timepoint (hr) Value: 6
  misc_feature: MA Experiment 108573 PARAMETER Experiment Name: At_Drought_cDNA_P Parameter: Tissue Value: Aerial
  misc_feature: MA Experiment 108573 PARAMETER Experiment Name: At_Drought_cDNA_P Parameter: Treatment Value: Drought vs. No Drought
  misc_feature: MA Experiment ID: 108585 Result: Up-regulated in Transcription
  misc_feature: MA Experiment 108585 PARAMETER Experiment Name: At_5mM_NaNP_cDNA_P Parameter: Timepoint (hr) Value: 6
  misc_feature: MA Experiment 108585 PARAMETER Experiment Name: At_5mM_NaNP_cDNA_P Parameter: Tissue Value: Aerial
  misc_feature: MA Experiment 108585 PARAMETER Experiment Name: At_5mM_NaNP_cDNA_P Parameter: Treatment Value: null
  misc_feature: MA Experiment ID: 20000087 Result: Down-regulated in Transcription
  misc_feature: MA Experiment 20000087 PARAMETER Experiment Name: At_100uM_ABA_Mutants_cDNA_P Parameter: Plant Line Value: WS
  misc_feature: MA Experiment 20000087 PARAMETER Experiment Name: At_100uM_ABA_Mutants_cDNA_P Parameter: Timepoint (hr) Value: 6
  misc_feature: MA Experiment 20000087 PARAMETER Experiment Name: At_100uM_ABA_Mutants_cDNA_P Parameter: Tissue Value: Aerial
  misc_feature: MA Experiment 20000087 PARAMETER Experiment Name: At_100uM_ABA_Mutants_cDNA_P Parameter: Treatment Value: 100uM ABA vs. No Treatment
  misc_feature: MA Experiment ID: 20000180 Result: Up-regulated in Transcription
  misc_feature: MA Experiment 20000180 PARAMETER Experiment Name: At_Germinating_Seeds_P Parameter: Age (hr) Value: 24 vs. 0
  misc_feature: MA Experiment 20000180 PARAMETER Experiment Name: At_Germinating_Seeds_P Parameter: Tissue Value: Germinating Seeds
  misc_feature: MA Experiment ID: 20000234 Result: Up-regulated in Transcription
  misc_feature: MA Experiment 20000234 PARAMETER Experiment Name: At_Siliques_P Parameter: Age (day) Value: 21
  misc_feature: MA Experiment 20000234 PARAMETER Experiment Name: At_Siliques_P Parameter: Organism Value: A. thaliana
  misc_feature: MA Experiment 20000234 PARAMETER Experiment Name: At_Siliques_P Parameter: Plant Line Value: WS
  misc_feature: MA Experiment 20000234 PARAMETER Experiment Name: At_Siliques_P Parameter: Tissue Value: Less Than 5mm Siliques vs. Whole Plant
  misc_feature: MA Experiment ID: 20000495 Result: Up-regulated in Transcription
  misc_feature: MA Experiment 20000495 PARAMETER Experiment Name: At_Guard_Cells_P Parameter: Harvest Date Value: 8/2/2002
  misc_feature: MA Experiment 20000495 PARAMETER Experiment Name: At_Guard_Cells_P Parameter: Organism Value: A. thaliana
  misc_feature: MA Experiment 20000495 PARAMETER Experiment Name: At_Guard_Cells_P Parameter: Tissue Value: Guard Cells vs. Leaves
  misc_feature: MA Experiment ID: 20001557 Result: Up-regulated in Transcription
  misc_feature: MA Experiment 20001557 PARAMETER Experiment Name: At_Drought_Soil_Dry_P Parameter: Age (day) Value: 27
  misc_feature: MA Experiment 20001557 PARAMETER Experiment Name: At_Drought_Soil_Dry_P Parameter: Organism Value: A. thaliana
  misc_feature: MA Experiment 20001557 PARAMETER Experiment Name: At_Drought_Soil_Dry_P Parameter: Plant Line Value: WS
  misc_feature: MA Experiment 20001557 PARAMETER Experiment Name: At_Drought_Soil_Dry_P Parameter: Post Timepoint (hr) Value: 3
  misc_feature: MA Experiment 20001557 PARAMETER Experiment Name: At_Drought_Soil_Dry_P Parameter: Post-Treatment Value: Re-Water vs. No Drought
  misc_feature: MA Experiment 20001557 PARAMETER Experiment Name: At_Drought_Soil_Dry_P Parameter: Timepoint (day) Value: 13
  misc_feature: MA Experiment 20001557 PARAMETER Experiment Name: At_Drought_Soil_Dry_P Parameter: Treatment Value: Drought vs. No Drought
  misc_feature: MA Experiment ID: 20001560 Result: Up-regulated in Transcription
  misc_feature: MA Experiment 20001560 PARAMETER Experiment Name: At_Drought_Soil_Dry_P Parameter: Age (day) Value: 28
  misc_feature: MA Experiment 20001560 PARAMETER Experiment Name: At_Drought_Soil_Dry_P Parameter: Organism Value: A. thaliana
  misc_feature: MA Experiment 20001560 PARAMETER Experiment Name: At_Drought_Soil_Dry_P Parameter: Plant Line Value: WS
  misc_feature: MA Experiment 20001560 PARAMETER Experiment Name: At_Drought_Soil_Dry_P Parameter: Post Timepoint (hr) Value: None
  misc_feature: MA Experiment 20001560 PARAMETER Experiment Name: At_Drought_Soil_Dry_P Parameter: Post-Treatment Value: None
  misc_feature: MA Experiment 20001560 PARAMETER Experiment Name: At_Drought_Soil_Dry_P Parameter: Timepoint (day) Value: 14
  misc_feature: MA Experiment 20001560 PARAMETER Experiment Name: At_Drought_Soil_Dry_P Parameter: Treatment Value: Drought vs. No Drought
  misc_feature: MA Experiment ID: 20001911 Result: Down-regulated in Transcription
  misc_feature: MA Experiment 20001911 PARAMETER Experiment Name: At_Drought_Reproduction_P Parameter: Age (day) Value: 40
  misc_feature: MA Experiment 20001911 PARAMETER Experiment Name: At_Drought_Reproduction_P Parameter: Organism Value: A. thaliana
  misc_feature: MA Experiment 20001911 PARAMETER Experiment Name: At_Drought_Reproduction_P Parameter: Plant Line Value: WS
  misc_feature: MA Experiment 20001911 PARAMETER Experiment Name: At_Drought_Reproduction_P Parameter: Timepoint (day) Value: 10
  misc_feature: MA Experiment 20001911 PARAMETER Experiment Name: At_Drought_Reproduction_P Parameter: Tissue Value: Flowers
  misc_feature: MA Experiment 20001911 PARAMETER Experiment Name: At_Drought_Reproduction_P Parameter: Treatment Value: Drought vs. No Drought
aaaaaaacgaaaaaaaacaaaaaaaaaactttgaatccgtttgttgcttcttcgcaacgttctctctcaaactcgcagagtaacagattcgataatgggaggaggatttagagttttgcatttggtgaggccattcttggcttttcttccagaagtgcaaagtgctgacaggaagattccatttagagagaaagtgatctacactgtcatctccctcttcattttccttgtttgtagtcagcttcctctctatgggatccattctaccaccggtgctgatccgttctattggatgcgtgtcattctcgcatcgaatcgtggaacggtgatggagcttggtattactcctattgtcacatctggattagtgatgcaactcttagcagggtcaaagattattgaggttgacaacaatgttcgtgaggatcgtgctctcttgaatggtgctcagaagcttcttgggattctgattgctattggtgaggctgttgcatatgttctttcgggaatgtatggtcctgttggtcaacttggtgttggaaatgctattctgatcatcctccagcttttctttgctggaatcatcgttatctgtcttgacgagcttcttcagaagggatatggtcttggctctggaatctctcttttcatagcaaccaatatctgtgaaagcattatctggaaagcatttagccccacgacaatcaacactggtcgtggagctgagtttgaaggcgctgtgattgcgttgttccatatgctgataactaagtccaataaggttgctgcgctcagacaagctttttaccggcagaaccttccaaatgttaccaacttgcttgcaacagtgttgatcttcttgattgttatatacttccaaggcttccgtgttgtgttgcccgtgaggtcaaagagtgctcgtggccaacagggttcatacccgatcaagctgttctacacctccaacatgccaatcattctccagtctgctctcgtctcaaacctctacttcatctctcagcttctctacaggaaattcagtggaaatttctttgtgaacctattgggacagtggaaagaatcagagtacagtggacaatctataccagttagtggtcttgcatatttgatcacagctccggcaagttttgccgatatggcagctcatccattccatgctctgttctatatcgtcttcatgctcactgcttgtgccctattctcaaaaacatggattgaagtctccgggtcttctgctagagatgtagctaagcagctaaaggaacaacaaatggtgatgccgggacacagagagtccaacttacaaaaggagctgaaccggtacatcccaacagcggctgcatttggaggagtgtgcatcggtgcgctcactgttttggctgatttcatgggagccattgggtcggggactggaatcttacttgcagtcacaatcatatatcagtattttgaaacctttgagaaggaaaaagccagcgagcttggtttctttggattctgattgtttctagtcatataaaggggtaaattttgctaagactagtgagaaatttgaaagcctaattaagaagtagctttcctcttatgtgttcattcaaaggttcaatagacgattaaaagagcattttggtagacactttttgattaaccaacagatttttctct

SEQ ID NO: 23279 - protein, 475 aa, Arabidopsis thaliana
  peptide (1)..(475): Ceres Seq. ID no. 13487096
  misc_feature (77)..(461): Pfam Name: eubacterial secY protein Pfam Description: eubacterial secY protein
  misc_feature (4)..(475): Homolog of NCBI NO: 32450765 NR Description: Sec61 [Harpagifer antarcticus]
  misc_feature (6)..(470): Homolog of NCBI NO: 23619385 NR Description: Pfsec61 [Plasmodium falciparum 3D7]
  misc_feature (1)..(474): Homolog of NCBI NO: 15219158 NR Description: protein transport protein sec61 alpha subunit
  misc_feature (1)..(475): Homolog of NCBI NO: 15375074 NR Description: Sec61 alpha subunit [Hordeum vulgare]
  misc_feature (1)..(475): Homolog of NCBI NO: 8886324 NR Description: Sec61p [Triticum aestivum]
  misc_feature (1)..(475): Homolog of NCBI NO: 6581004 NR Description: putative integral membrane protein [Phaseolus
  misc_feature (1)..(475): Homolog of NCBI NO: 21593089 NR Description: putative protein transport protein SEC61 alpha
  misc_feature (1)..(475): Homolog of NCBI NO: 15218887 NR Description: flower pigmentation protein ATAN11 [Arabidopsis
  misc_feature (1)..(475): Homolog of NCBI NO: 15226261 NR Description: protein transport protein SEC61 alpha subunit
  misc_feature (1)..(475): Homolog of NCBI NO: 20260296 NR Description: putative protein transport protein SEC61 alpha
MGGGFRVLHLVRPFLAFLPEVQSADRKIPFREKVIYTVISLFIFLVCSQLPLYGIHSTTGADPFYWMRVILASNRGTVMELGITPIVTSGLVMQLLAGSKIIEVDNNVREDRALLNGAQKLLGILIAIGEAVAYVLSGMYGPVGQLGVGNAILIILQLFFAGIIVICLDELLQKGYGLGSGISLFIATNICESIIWKAFSPTTINTGRGAEFEGAVIALFHMLITKSNKVAALRQAFYRQNLPNVTNLLATVLIFLIVIYFQGFRVVLPVRSKSARGQQGSYPIKLFYTSNMPIILQSALVSNLYFISQLLYRKFSGNFFVNLLGQWKESEYSGQSIPVSGLAYLITAPASFADMAAHPFHALFYIVFMLTACALFSKTWIEVSGSSARDVAKQLKEQQMVMPGHRESNLQKELNRYIPTAAAFGGVCIGALTVLADFMGAIGSGTGILLAVTIIYQYFETFEKEKASELGFFGF

SEQ ID NO: 23280 - protein, 409 aa, Arabidopsis thaliana
  peptide (1)..(409): Ceres Seq. ID no. 13487097
  misc_feature (11)..(395): Pfam Name: eubacterial secY protein Pfam Description: eubacterial secY protein
  misc_feature (1)..(409): Homolog of NCBI NO: 32450765 NR Description: Sec61 [Harpagifer antarcticus]
  misc_feature (1)..(404): Homolog of NCBI NO: 23619385 NR Description: Pfsec61 [Plasmodium falciparum 3D7]
  misc_feature (1)..(408): Homolog of NCBI NO: 15219158 NR Description: protein transport protein sec61 alpha subunit
  misc_feature (1)..(409): Homolog of NCBI NO: 15375074 NR Description: Sec61 alpha subunit [Hordeum vulgare]
  misc_feature (1)..(409): Homolog of NCBI NO: 8886324 NR Description: Sec61p [Triticum aestivum]
  misc_feature (1)..(409): Homolog of NCBI NO: 6581004 NR Description: putative integral membrane protein [Phaseolus
  misc_feature (1)..(409): Homolog of NCBI NO: 21593089 NR Description: putative protein transport protein SEC61 alpha
  misc_feature (1)..(409): Homolog of NCBI NO: 15218887 NR Description: flower pigmentation protein ATAN11 [Arabidopsis
  misc_feature (1)..(409): Homolog of NCBI NO: 15226261 NR Description: protein transport protein SEC61 alpha subunit
  misc_feature (1)..(409): Homolog of NCBI NO: 20260296 NR Description: putative protein transport protein SEC61 alpha
MRVILASNRGTVMELGITPIVTSGLVMQLLAGSKIIEVDNNVREDRALLNGAQKLLGILIAIGEAVAYVLSGMYGPVGQLGVGNAILIILQLFFAGIIVICLDELLQKGYGLGSGISLFIATNICESIIWKAFSPTTINTGRGAEFEGAVIALFHMLITKSNKVAALRQAFYRQNLPNVTNLLATVLIFLIVIYFQGFRVVLPVRSKSARGQQGSYPIKLFYTSNMPIILQSALVSNLYFISQLLYRKFSGNFFVNLLGQWKESEYSGQSIPVSGLAYLITAPASFADMAAHPFHALFYIVFMLTACALFSKTWIEVSGSSARDVAKQLKEQQMVMPGHRESNLQKELNRYIPTAAAFGGVCIGALTVLADFMGAIGSGTGILLAVTIIYQYFETFEKEKASELGFFGF

SEQ ID NO: 23281 - protein, 397 aa, Arabidopsis thaliana
  peptide (1)..(397): Ceres Seq. ID no. 13487098
  misc_feature (1)..(383): Pfam Name: eubacterial secY protein Pfam Description: eubacterial secY protein
  misc_feature (1)..(397): Homolog of NCBI NO: 32450765 NR Description: Sec61 [Harpagifer antarcticus]
  misc_feature (1)..(392): Homolog of NCBI NO: 23619385 NR Description: Pfsec61 [Plasmodium falciparum 3D7]
  misc_feature (1)..(396): Homolog of NCBI NO: 15219158 NR Description: protein transport protein sec61 alpha subunit
  misc_feature (1)..(397): Homolog of NCBI NO: 15375074 NR Description: Sec61 alpha subunit [Hordeum vulgare]
  misc_feature (1)..(397): Homolog of NCBI NO: 8886324 NR Description: Sec61p [Triticum aestivum]
  misc_feature (1)..(397): Homolog of NCBI NO: 6581004 NR Description: putative integral membrane protein [Phaseolus
  misc_feature (1)..(397): Homolog of NCBI NO: 21593089 NR Description: putative protein transport protein SEC61 alpha
  misc_feature (1)..(397): Homolog of NCBI NO: 15218887 NR Description: flower pigmentation protein ATAN11 [Arabidopsis
  misc_feature (1)..(397): Homolog of NCBI NO: 15226261 NR Description: protein transport protein SEC61 alpha subunit
  misc_feature (1)..(397): Homolog of NCBI NO: 20260296 NR Description: putative protein transport protein SEC61 alpha
MELGITPIVTSGLVMQLLAGSKIIEVDNNVREDRALLNGAQKLLGILIAIGEAVAYVLSGMYGPVGQLGVGNAILIILQLFFAGIIVICLDELLQKGYGLGSGISLFIATNICESIIWKAFSPTTINTGRGAEFEGAVIALFHMLITKSNKVAALRQAFYRQNLPNVTNLLATVLIFLIVIYFQGFRVVLPVRSKSARGQQGSYPIKLFYTSNMPIILQSALVSNLYFISQLLYRKFSGNFFVNLLGQWKESEYSGQSIPVSGLAYLITAPASFADMAAHPFHALFYIVFMLTACALFSKTWIEVSGSSARDVAKQLKEQQMVMPGHRESNLQKELNRYIPTAAAFGGVCIGALTVLADFMGAIGSGTGILLAVTIIYQYFETFEKEKASELGFFGF

SEQ ID NO: 23282 - DNA, 1015 bp, Arabidopsis thaliana
  misc_feature (1)..(1015): Ceres Seq. ID no. 13490836
  misc_feature: MA Experiment ID: 108576 Result: Up-regulated in Transcription
  misc_feature: MA Experiment 108576 PARAMETER Experiment Name: At_42deg_Heat_cDNA_P Parameter: Temperature (deg C) Value: 42 vs. 22
  misc_feature: MA Experiment 108576 PARAMETER Experiment Name: At_42deg_Heat_cDNA_P Parameter: Timepoint (hr) Value: 1
  misc_feature: MA Experiment 108576 PARAMETER Experiment Name: At_42deg_Heat_cDNA_P Parameter: Tissue Value: Aerial
  misc_feature: MA Experiment ID: 20000182 Result: Down-regulated in Transcription
  misc_feature: MA Experiment 20000182 PARAMETER Experiment Name: At_2mM_SA_P Parameter: Age (day) Value: 14
  misc_feature: MA Experiment 20000182 PARAMETER Experiment Name: At_2mM_SA_P Parameter: Organism Value: A. thaliana
  misc_feature: MA Experiment 20000182 PARAMETER Experiment Name: At_2mM_SA_P Parameter: Plant Line Value: WS
  misc_feature: MA Experiment 20000182 PARAMETER Experiment Name: At_2mM_SA_P Parameter: Timepoint (hr) Value: 6
  misc_feature: MA Experiment 20000182 PARAMETER Experiment Name: At_2mM_SA_P Parameter: Tissue Value: Aerial
  misc_feature: MA Experiment 20000182 PARAMETER Experiment Name: At_2mM_SA_P Parameter: Treatment Value: 2mM SA vs. No Treatment
  misc_feature: MA Experiment ID: 20000184 Result: Up-regulated in Transcription
  misc_feature: MA Experiment 20000184 PARAMETER Experiment Name: At_Shoots__P Parameter: Age (day) Value: 7
  misc_feature: MA Experiment 20000184 PARAMETER Experiment Name: At_Shoots__P Parameter: Tissue Value: Shoots vs. Whole Plant
  misc_feature: MA Experiment ID: 20000264 Result: Up-regulated in Transcription
  misc_feature: MA Experiment 20000264 PARAMETER Experiment Name: At_Open_Flower_P Parameter: Age (day) Value: 21
  misc_feature: MA Experiment 20000264 PARAMETER Experiment Name: At_Open_Flower_P Parameter: Plant Line Value: WS
  misc_feature: MA Experiment 20000264 PARAMETER Experiment Name: At_Open_Flower_P Parameter: Tissue Value: Open Flower vs. Whole Plant
  misc_feature: MA Experiment ID: 20000265 Result: Up-regulated in Transcription
  misc_feature: MA Experiment 20000265 PARAMETER Experiment Name: At_Open_Flower_P Parameter: Age (day) Value: 21
  misc_feature: MA Experiment 20000265 PARAMETER Experiment Name: At_Open_Flower_P Parameter: Plant Line Value: WS
  misc_feature: MA Experiment 20000265 PARAMETER Experiment Name: At_Open_Flower_P Parameter: Tissue Value: Closed Flower vs. Whole Plant
  misc_feature: MA Experiment ID: 20000286 Result: Up-regulated in Transcription
  misc_feature: MA Experiment 20000286 PARAMETER Experiment Name: At_Open_Flower_P Parameter: Age (day) Value: 21
  misc_feature: MA Experiment 20000286 PARAMETER Experiment Name: At_Open_Flower_P Parameter: Plant Line Value: WS
  misc_feature: MA Experiment 20000286 PARAMETER Experiment Name: At_Open_Flower_P Parameter: Tissue Value: Half Open vs. Whole Plant
  misc_feature: MA Experiment ID: 20000436 Result: Down-regulated in Transcription
  misc_feature: MA Experiment 20000436 PARAMETER Experiment Name: At_Drought_P Parameter: Age (day) Value: 7
  misc_feature: MA Experiment 20000436 PARAMETER Experiment Name: At_Drought_P Parameter: Organism Value: A. thaliana
  misc_feature: MA Experiment 20000436 PARAMETER Experiment Name: At_Drought_P Parameter: Plant Line Value: WS
  misc_feature: MA Experiment 20000436 PARAMETER Experiment Name: At_Drought_P Parameter: Timepoint (hr) Value: 12
  misc_feature: MA Experiment 20000436 PARAMETER Experiment Name: At_Drought_P Parameter: Tissue Value: Whole Plant
  misc_feature: MA Experiment 20000436 PARAMETER Experiment Name: At_Drought_P Parameter: Treatment Value: Drought vs. No Drought
  misc_feature: MA Experiment ID: 20000437 Result: Down-regulated in Transcription
  misc_feature: MA Experiment 20000437 PARAMETER Experiment Name: At_Drought_P Parameter: Age (day) Value: 8
  misc_feature: MA Experiment 20000437 PARAMETER Experiment Name: At_Drought_P Parameter: Organism Value: A. thaliana
  misc_feature: MA Experiment 20000437 PARAMETER Experiment Name: At_Drought_P Parameter: Plant Line Value: WS
  misc_feature: MA Experiment 20000437 PARAMETER Experiment Name: At_Drought_P Parameter: Timepoint (hr) Value: 24
  misc_feature: MA Experiment 20000437 PARAMETER Experiment Name: At_Drought_P Parameter: Tissue Value: Whole Plant
  misc_feature: MA Experiment 20000437 PARAMETER Experiment Name: At_Drought_P Parameter: Treatment Value: Drought vs. No Drought
  misc_feature: MA Experiment ID: 20000794 Result: Down-regulated in Transcription
  misc_feature: MA Experiment 20000794 PARAMETER Experiment Name: At_Petals_P Parameter: Age (day) Value: 23-25 days
  misc_feature: MA Experiment 20000794 PARAMETER Experiment Name: At_Petals_P Parameter: Plant Line Value: WS
  misc_feature: MA Experiment 20000794 PARAMETER Experiment Name: At_Petals_P Parameter: Tissue Value: Petals vs. Whole plant
  misc_feature: MA Experiment ID: 20001450 Result: Down-regulated in Transcription
  misc_feature: MA Experiment 20001450 PARAMETER Experiment Name: At_Far-red-induction_P Parameter: Age (day) Value: 7
  misc_feature: MA Experiment 20001450 PARAMETER Experiment Name: At_Far-red-induction_P Parameter: Light Value: Far-red vs. White
  misc_feature: MA Experiment 20001450 PARAMETER Experiment Name: At_Far-red-induction_P Parameter: Organism Value: A. thaliana
  misc_feature: MA Experiment 20001450 PARAMETER Experiment Name: At_Far-red-induction_P Parameter: Plant Line Value: Columbia
  misc_feature: MA Experiment 20001450 PARAMETER Experiment Name: At_Far-red-induction_P Parameter: Timepoint (hr) Value: 8
  misc_feature: MA Experiment 20001450 PARAMETER Experiment Name: At_Far-red-induction_P Parameter: Tissue Value: Whole Plant
  misc_feature: MA Experiment ID: 20001557 Result: Up-regulated in Transcription
  misc_feature: MA Experiment 20001557 PARAMETER Experiment Name: At_Drought_Soil_Dry_P Parameter: Age (day) Value: 27
  misc_feature: MA Experiment 20001557 PARAMETER Experiment Name: At_Drought_Soil_Dry_P Parameter: Organism Value: A. thaliana
  misc_feature: MA Experiment 20001557 PARAMETER Experiment Name: At_Drought_Soil_Dry_P Parameter: Plant Line Value: WS
  misc_feature: MA Experiment 20001557 PARAMETER Experiment Name: At_Drought_Soil_Dry_P Parameter: Post Timepoint (hr) Value: 3
  misc_feature: MA Experiment 20001557 PARAMETER Experiment Name: At_Drought_Soil_Dry_P Parameter: Post-Treatment Value: Re-Water vs. No Drought
  misc_feature: MA Experiment 20001557 PARAMETER Experiment Name: At_Drought_Soil_Dry_P Parameter: Timepoint (day) Value: 13
  misc_feature: MA Experiment 20001557 PARAMETER Experiment Name: At_Drought_Soil_Dry_P Parameter: Treatment Value: Drought vs. No Drought
  misc_feature: MA Experiment ID: 20001558 Result: Up-regulated in Transcription
  misc_feature: MA Experiment 20001558 PARAMETER Experiment Name: At_Drought_Soil_Dry_P Parameter: Age (day) Value: 27
  misc_feature: MA Experiment 20001558 PARAMETER Experiment Name: At_Drought_Soil_Dry_P Parameter: Organism Value: A. thaliana
  misc_feature: MA Experiment 20001558 PARAMETER Experiment Name: At_Drought_Soil_Dry_P Parameter: Plant Line Value: WS
  misc_feature: MA Experiment 20001558 PARAMETER Experiment Name: At_Drought_Soil_Dry_P Parameter: Post Timepoint (hr) Value: 6
  misc_feature: MA Experiment 20001558 PARAMETER Experiment Name: At_Drought_Soil_Dry_P Parameter: Post-Treatment Value: Re-Water vs. No Drought
  misc_feature: MA Experiment 20001558 PARAMETER Experiment Name: At_Drought_Soil_Dry_P Parameter: Timepoint (day) Value: 13
  misc_feature: MA Experiment 20001558 PARAMETER Experiment Name: At_Drought_Soil_Dry_P Parameter: Treatment Value: Drought vs. No Drought
  misc_feature: MA Experiment ID: 20001560 Result: Up-regulated in Transcription
  misc_feature: MA Experiment 20001560 PARAMETER Experiment Name: At_Drought_Soil_Dry_P Parameter: Age (day) Value: 28
  misc_feature: MA Experiment 20001560 PARAMETER Experiment Name: At_Drought_Soil_Dry_P Parameter: Organism Value: A. thaliana
  misc_feature: MA Experiment 20001560 PARAMETER Experiment Name: At_Drought_Soil_Dry_P Parameter: Plant Line Value: WS
  misc_feature: MA Experiment 20001560 PARAMETER Experiment Name: At_Drought_Soil_Dry_P Parameter: Post Timepoint (hr) Value: None
  misc_feature: MA Experiment 20001560 PARAMETER Experiment Name: At_Drought_Soil_Dry_P Parameter: Post-Treatment Value: None
  misc_feature: MA Experiment 20001560 PARAMETER Experiment Name: At_Drought_Soil_Dry_P Parameter: Timepoint (day) Value: 14
  misc_feature: MA Experiment 20001560 PARAMETER Experiment Name: At_Drought_Soil_Dry_P Parameter: Treatment Value: Drought vs. No Drought
  misc_feature: MA Experiment ID: 20001757 Result: Up-regulated in Transcription
  misc_feature: MA Experiment 20001757 PARAMETER Experiment Name: At_50mM_NH4NO3_L-to-H_P Parameter: Timepoint (hr) Value: 6
  misc_feature: MA Experiment 20001757 PARAMETER Experiment Name: At_50mM_NH4NO3_L-to-H_P Parameter: Tissue Value: Leaf
  misc_feature: MA Experiment 20001757 PARAMETER Experiment Name: At_50mM_NH4NO3_L-to-H_P Parameter: Treatment Value: 50mM NH4NO3 vs 100mM Mannitol
  misc_feature: MA Experiment ID: 20001911 Result: Down-regulated in Transcription
  misc_feature: MA Experiment 20001911 PARAMETER Experiment Name: At_Drought_Reproduction_P Parameter: Age (day) Value: 40
  misc_feature: MA Experiment 20001911 PARAMETER Experiment Name: At_Drought_Reproduction_P Parameter: Organism Value: A. thaliana
  misc_feature: MA Experiment 20001911 PARAMETER Experiment Name: At_Drought_Reproduction_P Parameter: Plant Line Value: WS
  misc_feature: MA Experiment 20001911 PARAMETER Experiment Name: At_Drought_Reproduction_P Parameter: Timepoint (day) Value: 10
  misc_feature: MA Experiment 20001911 PARAMETER Experiment Name: At_Drought_Reproduction_P Parameter: Tissue Value: Flowers
  misc_feature: MA Experiment 20001911 PARAMETER Experiment Name: At_Drought_Reproduction_P Parameter: Treatment Value: Drought vs. No Drought
acagaacaagtagccactctctcatctcaccacccctctttctctctacttgctctctatctctctctgtgtctctccactttctcttcttcttcttcttcttgctctagagatctctctatctccattcttttctctctctgtttctagaaagacaacagtgacattttgtctgaacgcatctatggctgctctggtgctttcacttctccttctatccttggctggacattctagtgcctcatggtgtgtgtgtaagacagggctgagtgatacagtgctacaggcaaccctagactatgcttgtggaaatggagcagattgtaatcctactaaaccaaaacaatcttgcttcaaccctgacaatgttaggtctcattgcaactatgcagtcaatagcttcttccaaaagaagggtcaatctcctggctcttgtaatttcgatggaactgccactcccactaactccgatcccagttatacaggttgtgcctttcctactagtgccagtggctctagcggcagcacaactgtgacacctggcacaaccaatccaaaaggcagcccaacgaccaccacacttcctggtagtggtaccaacagtccttattcagggaacccaaccaatggagtttttgggggaaatagcacaggaggcaccactgggacagggattaacccggattacacgacagacagcagcgcgtttgctctcaagaactcaagcaaattgttcatctgccttctcttgatcgcttcgagtggattctgctctttcctgatgctctaaggatgttaatggtctctggttctgtgggtgcacttagttatcgtttcgaggacattttggtctagtttagtggtaatctctgtctctgtgttatgggtctatgttatgtttttgtttgtaagaagatttcagctcttgcagttactcttaattacctctttgactgttctggtagatttgatgccagtgaaaaaaaatcttaatatataattacattatctcgtc

SEQ ID NO: 23283 - protein, 201 aa, Arabidopsis thaliana
  peptide (1)..(201): Ceres Seq. ID no. 13490837
  misc_feature (1)..(184): Homolog of NCBI NO: 25404810 NR Description: unknown protein, 45065-49536 [imported] -
  misc_feature (1)..(191): Homolog of NCBI NO: 8778409 NR Description: F16A14.5 [Arabidopsis thaliana]
  misc_feature (1)..(191): Homolog of NCBI NO: 22775658 NR Description: contains ESTs
  misc_feature (1)..(184): Homolog of NCBI NO: 21553768 NR Description: unknown [Arabidopsis thaliana]
  misc_feature (1)..(184): Homolog of NCBI NO: 18409239 NR Description: expressed protein [Arabidopsis thaliana]
  misc_feature (1)..(191): Homolog of NCBI NO: 30683485 NR Description: expressed protein [Arabidopsis thaliana]
  misc_feature (1)..(190): Homolog of NCBI NO: 18394637 NR Description: glycosyl hydrolase family 17 [Arabidopsis
  misc_feature (1)..(201): Homolog of NCBI NO: 15241485 NR Description: glycosyl hydrolase family 17 [Arabidopsis
  misc_feature (1)..(201): Homolog of NCBI NO: 21592859 NR Description: unknown [Arabidopsis thaliana]
  misc_feature (1)..(201): Homolog of NCBI NO: 30697478 NR Description: glycosyl hydrolase family 17 [Arabidopsis
MAALVLSLLLLSLAGHSSASWCVCKTGLSDTVLQATLDYACGNGADCNPTKPKQSCFNPDNVRSHCNYAVNSFFQKKGQSPGSCNFDGTATPTNSDPSYTGCAFPTSASGSSGSTTVTPGTTNPKGSPTTTTLPGSGTNSPYSGNPTNGVFGGNSTGGTTGTGINPDYTTDSSAFALKNSSKLFICLLLIASSGFCSFLML

SEQ ID NO: 23284 - DNA, 1762 bp, Arabidopsis thaliana
  misc_feature (1)..(1762): Ceres Seq. ID no. 13488250
  misc_feature: MA Experiment ID: 108569 Result: Down-regulated in Transcription
  misc_feature: MA Experiment 108569 PARAMETER Experiment Name: At_0.001%_MeJA__cDNA_P Parameter: Timepoint (hr) Value: 6
  misc_feature: MA Experiment 108569 PARAMETER Experiment Name: At_0.001%_MeJA__cDNA_P Parameter: Tissue Value: Aerial
  misc_feature: MA Experiment 108569 PARAMETER Experiment Name: At_0.001%_MeJA__cDNA_P Parameter: Treatment Value: 0.001% MeJA vs. No Treatment
  misc_feature: MA Experiment ID: 108595 Result: Up-regulated in Transcription
  misc_feature: MA Experiment 108595 PARAMETER Experiment Name: At_Ler-pi_Ovule_cDNA_P Parameter: Plant Line Value: null
  misc_feature: MA Experiment ID: 20000171 Result: Down-regulated in Transcription
  misc_feature: MA Experiment 20000171 PARAMETER Experiment Name: At_42deg_Heat_P Parameter: Age (day) Value: 14
  misc_feature: MA Experiment 20000171 PARAMETER Experiment Name: At_42deg_Heat_P Parameter: Organism Value: A. thaliana
  misc_feature: MA Experiment 20000171 PARAMETER Experiment Name: At_42deg_Heat_P Parameter: Plant Line Value: WS
  misc_feature: MA Experiment 20000171 PARAMETER Experiment Name: At_42deg_Heat_P Parameter: Temperature (deg C) Value: 42 vs. 22
  misc_feature: MA Experiment 20000171 PARAMETER Experiment Name: At_42deg_Heat_P Parameter: Timepoint (hr) Value: 1
  misc_feature: MA Experiment 20000171 PARAMETER Experiment Name: At_42deg_Heat_P Parameter: Tissue Value: Aerial
  misc_feature: MA Experiment ID: 20000173 Result: Down-regulated in Transcription
  misc_feature: MA Experiment 20000173 PARAMETER Experiment Name: At_42deg_Heat_P Parameter: Age (day) Value: 14
  misc_feature: MA Experiment 20000173 PARAMETER Experiment Name: At_42deg_Heat_P Parameter: Organism Value: A. thaliana
  misc_feature: MA Experiment 20000173 PARAMETER Experiment Name: At_42deg_Heat_P Parameter: Plant Line Value: WS
  misc_feature: MA Experiment 20000173 PARAMETER Experiment Name: At_42deg_Heat_P Parameter: Temperature (deg C) Value: 42 vs. 22
  misc_feature: MA Experiment 20000173 PARAMETER Experiment Name: At_42deg_Heat_P Parameter: Timepoint (hr) Value: 6
  misc_feature: MA Experiment 20000173 PARAMETER Experiment Name: At_42deg_Heat_P Parameter: Tissue Value: Aerial
  misc_feature: MA Experiment ID: 20000180 Result: Up-regulated in Transcription
  misc_feature: MA Experiment 20000180 PARAMETER Experiment Name: At_Germinating_Seeds_P Parameter: Age (hr) Value: 24 vs. 0
  misc_feature: MA Experiment 20000180 PARAMETER Experiment Name: At_Germinating_Seeds_P Parameter: Tissue Value: Germinating Seeds
  misc_feature: MA Experiment ID: 20000182 Result: Down-regulated in Transcription
  misc_feature: MA Experiment 20000182 PARAMETER Experiment Name: At_2mM_SA_P Parameter: Age (day) Value: 14
  misc_feature: MA Experiment 20000182 PARAMETER Experiment Name: At_2mM_SA_P Parameter: Organism Value: A. thaliana
  misc_feature: MA Experiment 20000182 PARAMETER Experiment Name: At_2mM_SA_P Parameter: Plant Line Value: WS
  misc_feature: MA Experiment 20000182 PARAMETER Experiment Name: At_2mM_SA_P Parameter: Timepoint (hr) Value: 6
  misc_feature: MA Experiment 20000182 PARAMETER Experiment Name: At_2mM_SA_P Parameter: Tissue Value: Aerial
  misc_feature: MA Experiment 20000182 PARAMETER Experiment Name: At_2mM_SA_P Parameter: Treatment Value: 2mM SA vs. No Treatment
  misc_feature: MA Experiment ID: 20000185 Result: Up-regulated in Transcription
  misc_feature: MA Experiment 20000185 PARAMETER Experiment Name: At_Roots__P Parameter: Age (day) Value: 7 vs. 21
  misc_feature: MA Experiment 20000185 PARAMETER Experiment Name: At_Roots__P Parameter: Organism Value: A. thaliana
  misc_feature: MA Experiment 20000185 PARAMETER Experiment Name: At_Roots__P Parameter: Tissue Value: Roots vs. Whole Plant
  misc_feature: MA Experiment ID: 20000213 Result: Up-regulated in Transcription
  misc_feature: MA Experiment 20000213 PARAMETER Experiment Name: At_4deg_Cold_P Parameter: Timepoint (hr) Value: 2
  misc_feature: MA Experiment ID: 20000234 Result: Up-regulated in Transcription
  misc_feature: MA Experiment 20000234 PARAMETER Experiment Name: At_Siliques_P Parameter: Age (day) Value: 21
  misc_feature: MA Experiment 20000234 PARAMETER Experiment Name: At_Siliques_P Parameter: Organism Value: A. thaliana
  misc_feature: MA Experiment 20000234 PARAMETER Experiment Name: At_Siliques_P Parameter: Plant Line Value: WS
  misc_feature: MA Experiment 20000234 PARAMETER Experiment Name: At_Siliques_P Parameter: Tissue Value: Less Than 5mm Siliques vs. Whole Plant
  misc_feature: MA Experiment ID: 20000264 Result: Up-regulated in Transcription
  misc_feature: MA Experiment 20000264 PARAMETER Experiment Name: At_Open_Flower_P Parameter: Age (day) Value: 21
  misc_feature: MA Experiment 20000264 PARAMETER Experiment Name: At_Open_Flower_P Parameter: Plant Line Value: WS
  misc_feature: MA Experiment 20000264 PARAMETER Experiment Name: At_Open_Flower_P Parameter: Tissue Value: Open Flower vs. Whole Plant
  misc_feature: MA Experiment ID: 20000265 Result: Up-regulated in Transcription
  misc_feature: MA Experiment 20000265 PARAMETER Experiment Name: At_Open_Flower_P Parameter: Age (day) Value: 21
  misc_feature: MA Experiment 20000265 PARAMETER Experiment Name: At_Open_Flower_P Parameter: Plant Line Value: WS
  misc_feature: MA Experiment 20000265 PARAMETER Experiment Name: At_Open_Flower_P Parameter: Tissue Value: Closed Flower vs. Whole Plant
  misc_feature: MA Experiment ID: 20000286 Result: Up-regulated in Transcription
  misc_feature: MA Experiment 20000286 PARAMETER Experiment Name: At_Open_Flower_P Parameter: Age (day) Value: 21
  misc_feature: MA Experiment 20000286 PARAMETER Experiment Name: At_Open_Flower_P Parameter: Plant Line Value: WS
  misc_feature: MA Experiment 20000286 PARAMETER Experiment Name: At_Open_Flower_P Parameter: Tissue Value: Half Open vs. Whole Plant
  misc_feature: MA Experiment ID: 20000439 Result: Up-regulated in Transcription
  misc_feature: MA Experiment 20000439 PARAMETER Experiment Name: At_Roots__P Parameter: Age (day) Value: 14 vs. 21
  misc_feature: MA Experiment 20000439 PARAMETER Experiment Name: At_Roots__P Parameter: Organism Value: A. thaliana
  misc_feature: MA Experiment 20000439 PARAMETER Experiment Name: At_Roots__P Parameter: Tissue Value: Roots vs. Whole Plant
  misc_feature: MA Experiment ID: 20000443 Result: Down-regulated in Transcription
  misc_feature: MA Experiment 20000443 PARAMETER Experiment Name: At_1uM_BR-BRZ__P Parameter: Tissue Value: Shoot Apices
  misc_feature: MA Experiment 20000443 PARAMETER Experiment Name: At_1uM_BR-BRZ__P Parameter: Treatment Value: 1uM BRZ vs. No Treatment
  misc_feature: MA Experiment ID: 20000794 Result: Down-regulated in Transcription
  misc_feature: MA Experiment 20000794 PARAMETER Experiment Name: At_Petals_P Parameter: Age (day) Value: 23-25 days
  misc_feature: MA Experiment 20000794 PARAMETER Experiment Name: At_Petals_P Parameter: Plant Line Value: WS
  misc_feature: MA Experiment 20000794 PARAMETER Experiment Name: At_Petals_P Parameter: Tissue Value: Petals vs. Whole plant
  misc_feature: MA Experiment ID: 20001450 Result: Down-regulated in Transcription
  misc_feature: MA Experiment 20001450 PARAMETER Experiment Name: At_Far-red-induction_P Parameter: Age (day) Value: 7
  misc_feature: MA Experiment 20001450 PARAMETER Experiment Name: At_Far-red-induction_P Parameter: Light Value: Far-red vs. White
  misc_feature: MA Experiment 20001450 PARAMETER Experiment Name: At_Far-red-induction_P Parameter: Organism Value: A. thaliana
  misc_feature: MA Experiment 20001450 PARAMETER Experiment Name: At_Far-red-induction_P Parameter: Plant Line Value: Columbia
  misc_feature: MA Experiment 20001450 PARAMETER Experiment Name: At_Far-red-induction_P Parameter: Timepoint (hr) Value: 8
  misc_feature: MA Experiment 20001450 PARAMETER Experiment Name: At_Far-red-induction_P Parameter: Tissue Value: Whole Plant
  misc_feature: MA Experiment ID: 20001451 Result: Down-regulated in Transcription
  misc_feature: MA Experiment 20001451 PARAMETER Experiment Name: At_Far-red-induction_P Parameter: Age (day) Value: 7
  misc_feature: MA Experiment 20001451 PARAMETER Experiment Name: At_Far-red-induction_P Parameter: Light Value: Far-red vs. White
  misc_feature: MA Experiment 20001451 PARAMETER Experiment Name: At_Far-red-induction_P Parameter: Organism Value: A. thaliana
  misc_feature: MA Experiment 20001451 PARAMETER Experiment Name: At_Far-red-induction_P Parameter: Plant Line Value: Columbia
  misc_feature: MA Experiment 20001451 PARAMETER Experiment Name: At_Far-red-induction_P Parameter: Timepoint (hr) Value: 24
  misc_feature: MA Experiment 20001451 PARAMETER Experiment Name: At_Far-red-induction_P Parameter: Tissue Value: Whole Plant
  misc_feature: MA Experiment ID: 20001555 Result: Down-regulated in Transcription
  misc_feature: MA Experiment 20001555 PARAMETER Experiment Name: At_Drought_Soil_Dry_P Parameter: Age (day) Value: 24
  misc_feature: MA Experiment 20001555 PARAMETER Experiment Name: At_Drought_Soil_Dry_P Parameter: Organism Value: A. thaliana
  misc_feature: MA Experiment 20001555 PARAMETER Experiment Name: At_Drought_Soil_Dry_P Parameter: Plant Line Value: WS
  misc_feature: MA Experiment 20001555 PARAMETER Experiment Name: At_Drought_Soil_Dry_P Parameter: Post Timepoint (hr) Value: None
  misc_feature: MA Experiment 20001555 PARAMETER Experiment Name: At_Drought_Soil_Dry_P Parameter: Post-Treatment Value: None
  misc_feature: MA Experiment 20001555 PARAMETER Experiment Name: At_Drought_Soil_Dry_P Parameter: Timepoint (day) Value: 10
  misc_feature: MA Experiment 20001555 PARAMETER Experiment Name: At_Drought_Soil_Dry_P Parameter: Treatment Value: Drought vs. No Drought
  misc_feature: MA Experiment ID: 20001557 Result: Up-regulated in Transcription
  misc_feature: MA Experiment 20001557 PARAMETER Experiment Name: At_Drought_Soil_Dry_P Parameter: Age (day) Value: 27
  misc_feature: MA Experiment 20001557 PARAMETER Experiment Name: At_Drought_Soil_Dry_P Parameter: Organism Value: A. thaliana
  misc_feature: MA Experiment 20001557 PARAMETER Experiment Name: At_Drought_Soil_Dry_P Parameter: Plant Line Value: WS
  misc_feature: MA Experiment 20001557 PARAMETER Experiment Name: At_Drought_Soil_Dry_P Parameter: Post Timepoint (hr) Value: 3
  misc_feature: MA Experiment 20001557 PARAMETER Experiment Name: At_Drought_Soil_Dry_P Parameter: Post-Treatment Value: Re-Water vs. No Drought
  misc_feature: MA Experiment 20001557 PARAMETER Experiment Name: At_Drought_Soil_Dry_P Parameter: Timepoint (day) Value: 13
  misc_feature: MA Experiment 20001557 PARAMETER Experiment Name: At_Drought_Soil_Dry_P Parameter: Treatment Value: Drought vs. No Drought
  misc_feature: MA Experiment ID: 20001560 Result: Up-regulated in Transcription
  misc_feature: MA Experiment 20001560 PARAMETER Experiment Name: At_Drought_Soil_Dry_P Parameter: Age (day) Value: 28
  misc_feature: MA Experiment 20001560 PARAMETER Experiment Name: At_Drought_Soil_Dry_P Parameter: Organism Value: A. thaliana
  misc_feature: MA Experiment 20001560 PARAMETER Experiment Name: At_Drought_Soil_Dry_P Parameter: Plant Line Value: WS
  misc_feature: MA Experiment 20001560 PARAMETER Experiment Name: At_Drought_Soil_Dry_P Parameter: Post Timepoint (hr) Value: None
  misc_feature: MA Experiment 20001560 PARAMETER Experiment Name: At_Drought_Soil_Dry_P Parameter: Post-Treatment Value: None
  misc_feature: MA Experiment 20001560 PARAMETER Experiment Name: At_Drought_Soil_Dry_P Parameter: Timepoint (day) Value: 14
  misc_feature: MA Experiment 20001560 PARAMETER Experiment Name: At_Drought_Soil_Dry_P Parameter: Treatment Value: Drought vs. No Drought
  misc_feature: MA Experiment ID: 20001904 Result: Down-regulated in Transcription
  misc_feature: MA Experiment 20001904 PARAMETER Experiment Name: At_Drought_Reproduction_P Parameter: Age (day) Value: 37
  misc_feature: MA Experiment 20001904 PARAMETER Experiment Name: At_Drought_Reproduction_P Parameter: Organism Value: A. thaliana
  misc_feature: MA Experiment 20001904 PARAMETER Experiment Name: At_Drought_Reproduction_P Parameter: Plant Line Value: WS
  misc_feature: MA Experiment 20001904 PARAMETER Experiment Name: At_Drought_Reproduction_P Parameter: Timepoint (day) Value: 7
  misc_feature: MA Experiment 20001904 PARAMETER Experiment Name: At_Drought_Reproduction_P Parameter: Tissue Value: Rosettes
  misc_feature: MA Experiment 20001904 PARAMETER Experiment Name: At_Drought_Reproduction_P Parameter: Treatment Value: Drought vs. No Drought
atctccactcttctttcttcttaccaaattactcaatccatctccctctcttcttctccttctccaaacaacaaaccaaagcttctctcttttcttgcttcagagagacctagaagagttatcaacatgagtcttcttctacatctctttgctctgtctctgctcatctctgtttcaggagcaaagttctccggccggccaggaatcaactatggccagctcggaaacaacctcccgtcaccgtccgactcagtcaacctcatcaagtccctaaacgcgaaacgcgtcaaactctacgacgctaacccaaaaatcctcgccgcgttaaacggcaccgacattaccgtctccgtcatggtcccaaacgagctcctcgtcaacatctccaaatccgcatcactctccgacgactggatccgatccaacatcctcccgttttacccaaccaccaagatccgttacctcctcgtcggcaacgagatcctctctttaccagactctgagctcaaatcttcactcgttcccgcaatgcgcaagatccaacgctccttaaagtctctcggcgttaaaaaagtcaaagtcggtactacactcgccaccgacgttctccaatcttcgtttcctccgtctagcggcgagtttcgggaggatatctccggtttaattatgaaaccgatgctccaattcttaaaccggaccaaatctttcctattcgttgatgtttacccgtatttcgcgtgggcacaagatccgacccatgtggatctcgattacgcgattttcgaatctaccaacgtcaccgtcacggatccggtttcgaatctgacataccacaacctattcgatcagatgattgacgctttcgtcttcgccatgaaacgagtcgggtatccggatattcggatctgggtcgcggaaacgggttggcccaataacggtgactacgaccaaattggagcgaatatttacaacgccgctacttacaatcgcaatgttgtcaagaaactcgccgctgacccgcccgtaggtacgcccgcccgacccggaaaggttctaccggcgtttgtattcgcactttacaacgaaaatcagaaaacgggtccgggtacggagcggcatttcggacttttacatccgaatgggactcaggtttacgggattgatttgtcggggaagacggagtacaaggaatcattgccggcgccggagaataacgacctgtacaaagggaagatttggtgcgtggtggctaaaggagcgaattggactcagctaggtgatgctctatcgtacgcttgctcacaggggaataatacctgtgacccgattcaacgcggaggcccatgtcagaaacctgatttgaccgttttgcacgccagttacgcctttagctcttattgggcccaatttcgtaagatcgggggaacttgctccttcaacggcttagctacacaaaccatcaaagatccaagttacggacgatgtgagtttccgagcgtgacattgtgaagacttacgagttacgaaaatgcatggtcgagaagagacgcacgagggaaaaccgcacgatgttacggctttcattaatggaaacagcacgtgactctctgtacgatgttacgtagcttgattatttagaaacggcacgtgattagtgtttaacttgctgtttatttattttatttttcttttcccgcgaataatgaaaactcatgaaataattaattcgttttcgggtaatgcaatcgccaatcggtctctt

SEQ ID NO: 23285 - protein, 502 aa, Arabidopsis thaliana
  peptide (1)..(502): Ceres Seq. ID no. 13488251
  misc_feature (67)..(389): Pfam Name: Glycosyl hydrolases family 17 Pfam Description: Glycosyl hydrolases family 17
  misc_feature (43)..(502): Homolog of NCBI NO: 21593090 NR Description: putative glucan endo-1-3-beta-glucosidase
  misc_feature (436)..(502): Homolog of NCBI NO: 6642633 NR Description: putative beta-1,3-glucanase precursor
  misc_feature (49)..(491): Homolog of NCBI NO: 29647494 NR Description: putative beta-1,3-glucanase
  misc_feature (62)..(502): Homolog of NCBI NO: 322641 NR Description: beta-1,3-glucanase homolog (clone A6) - rape
  misc_feature (64)..(502): Homolog of NCBI NO: 21592541 NR Description: beta-1,3-glucanase, putative [Arabidopsis
  misc_feature (34)..(502): Homolog of NCBI NO: 6714534 NR Description: beta-1,3-glucanase [Salix gilgiana]
  misc_feature (64)..(502): Homolog of NCBI NO: 15229514 NR Description: glycosyl hydrolase family 17 [Arabidopsis
  misc_feature (68)..(502): Homolog of NCBI NO: 15236405 NR Description: glycosyl hydrolase family 17 (anther-specific
  misc_feature (43)..(415): Homolog of NCBI NO: 6642633 NR Description: putative beta-1,3-glucanase precursor
  misc_feature (43)..(502): Homolog of NCBI NO: 22330905 NR Description: glycosyl hydrolase family 17 [Arabidopsis
ISTLLSSYQITQSISLSSSPSPNNKPKLLSFLASERPRRVINMSLLLHLFALSLLISVSGAKFSGRPGINYGQLGNNLPSPSDSVNLIKSLNAKRVKLYDANPKILAALNGTDITVSVMVPNELLVNISKSASLSDDWIRSNILPFYPTTKIRYLLVGNEILSLPDSELKSSLVPAMRKIQRSLKSLGVKKVKVGTTLATDVLQSSFPPSSGEFREDISGLIMKPMLQFLNRTKSFLFVDVYPYFAWAQDPTHVDLDYAIFESTNVTVTDPVSNLTYHNLFDQMIDAFVFAMKRVGYPDIRIWVAETGWPNNGDYDQIGANIYNAATYNRNVVKKLAADPPVGTPARPGKVLPAFVFALYNENQKTGPGTERHFGLLHPNGTQVYGIDLSGKTEYKESLPAPENNDLYKGKIWCVVAKGANWTQLGDALSYACSQGNNTCDPIQRGGPCQKPDLTVLHASYAFSSYWAQFRKIGGTCSFNGLATQTIKDPSYGRCEFPSVTL

SEQ ID NO: 23286 - protein, 460 aa, Arabidopsis thaliana
  peptide (1)..(460): Ceres Seq. ID no. 13488252
  misc_feature (25)..(347): Pfam Name: Glycosyl hydrolases family 17 Pfam Description: Glycosyl hydrolases family 17
  misc_feature (7)..(449): Homolog of NCBI NO: 29647494 NR Description: putative beta-1,3-glucanase
  misc_feature (26)..(460): Homolog of NCBI NO: 15236405 NR Description: glycosyl hydrolase family 17 (anther-specific
  misc_feature (20)..(460): Homolog of NCBI NO: 322641 NR Description: beta-1,3-glucanase homolog (clone A6) - rape
  misc_feature (22)..(460): Homolog of NCBI NO: 15229514 NR Description: glycosyl hydrolase family 17 [Arabidopsis
  misc_feature (22)..(460): Homolog of NCBI NO: 21592541 NR Description: beta-1,3-glucanase, putative [Arabidopsis
  misc_feature (1)..(460): Homolog of NCBI NO: 6714534 NR Description: beta-1,3-glucanase [Salix gilgiana]
  misc_feature (394)..(460): Homolog of NCBI NO: 6642633 NR Description: putative beta-1,3-glucanase precursor
  misc_feature (1)..(373): Homolog of NCBI NO: 6642633 NR Description: putative beta-1,3-glucanase precursor
  misc_feature (1)..(460): Homolog of NCBI NO: 21593090 NR Description: putative glucan endo-1-3-beta-glucosidase
  misc_feature (1)..(460): Homolog of NCBI NO: 22330905 NR Description: glycosyl hydrolase family 17 [Arabidopsis
MSLLLHLFALSLLISVSGAKFSGRPGINYGQLGNNLPSPSDSVNLIKSLNAKRVKLYDANPKILAALNGTDITVSVMVPNELLVNISKSASLSDDWIRSNILPFYPTTKIRYLLVGNEILSLPDSELKSSLVPAMRKIQRSLKSLGVKKVKVGTTLATDVLQSSFPPSSGEFREDISGLIMKPMLQFLNRTKSFLFVDVYPYFAWAQDPTHVDLDYAIFESTNVTVTDPVSNLTYHNLFDQMIDAFVFAMKRVGYPDIRIWVAETGWPNNGDYDQIGANIYNAATYNRNVVKKLAADPPVGTPARPGKVLPAFVFALYNENQKTGPGTERHFGLLHPNGTQVYGIDLSGKTEYKESLPAPENNDLYKGKIWCVVAKGANWTQLGDALSYACSQGNNTCDPIQRGGPCQKPDLTVLHASYAFSSYWAQFRKIGGTCSFNGLATQTIKDPSYGRCEFPSVTL

SEQ ID NO: 23287 - protein, 384 aa, Arabidopsis thaliana
  peptide (1)..(384): Ceres Seq. ID no. 13488253
  misc_feature (1)..(271): Pfam Name: Glycosyl hydrolases family 17 Pfam Description: Glycosyl hydrolases family 17
  misc_feature (1)..(373): Homolog of NCBI NO: 29647494 NR Description: putative beta-1,3-glucanase
  misc_feature (1)..(384): Homolog of NCBI NO: 15236405 NR Description: glycosyl hydrolase family 17 (anther-specific
  misc_feature (1)..(384): Homolog of NCBI NO: 322641 NR Description: beta-1,3-glucanase homolog (clone A6) - rape
  misc_feature (1)..(384): Homolog of NCBI NO: 15229514 NR Description: glycosyl hydrolase family 17 [Arabidopsis
  misc_feature (1)..(384): Homolog of NCBI NO: 21592541 NR Description: beta-1,3-glucanase, putative [Arabidopsis
  misc_feature (1)..(384): Homolog of NCBI NO: 6714534 NR Description: beta-1,3-glucanase [Salix gilgiana]
  misc_feature (318)..(384): Homolog of NCBI NO: 6642633 NR Description: putative beta-1,3-glucanase precursor
  misc_feature (1)..(297): Homolog of NCBI NO: 6642633 NR Description: putative beta-1,3-glucanase precursor
  misc_feature (1)..(384): Homolog of NCBI NO: 21593090 NR Description: putative glucan endo-1-3-beta-glucosidase
  misc_feature (1)..(384): Homolog of NCBI NO: 22330905 NR Description: glycosyl hydrolase family 17 [Arabidopsis
MVPNELLVNISKSASLSDDWIRSNILPFYPTTKIRYLLVGNEILSLPDSELKSSLVPAMRKIQRSLKSLGVKKVKVGTTLATDVLQSSFPPSSGEFREDISGLIMKPMLQFLNRTKSFLFVDVYPYFAWAQDPTHVDLDYAIFESTNVTVTDPVSNLTYHNLFDQMIDAFVFAMKRVGYPDIRIWVAETGWPNNGDYDQIGANIYNAATYNRNVVKKLAADPPVGTPARPGKVLPAFVFALYNENQKTGPGTERHFGLLHPNGTQVYGIDLSGKTEYKESLPAPENNDLYKGKIWCVVAKGANWTQLGDALSYACSQGNNTCDPIQRGGPCQKPDLTVLHASYAFSSYWAQFRKIGGTCSFNGLATQTIKDPSYGRCEFPSVTL

SEQ ID NO: 23288 - DNA, 1216 bp, Arabidopsis thaliana
  misc_feature (1)..(1216): Ceres Seq. ID no. 12324710
  misc_feature: MA Experiment ID: 20000087 Result: Up-regulated in Transcription
  misc_feature: MA Experiment 20000087 PARAMETER Experiment Name: At_100uM_ABA_Mutants_cDNA_P Parameter: Plant Line Value: WS
  misc_feature: MA Experiment 20000087 PARAMETER Experiment Name: At_100uM_ABA_Mutants_cDNA_P Parameter: Timepoint (hr) Value: 6
  misc_feature: MA Experiment 20000087 PARAMETER Experiment Name: At_100uM_ABA_Mutants_cDNA_P Parameter: Tissue Value: Aerial
  misc_feature: MA Experiment 20000087 PARAMETER Experiment Name: At_100uM_ABA_Mutants_cDNA_P Parameter: Treatment Value: 100uM ABA vs. No Treatment
  misc_feature: MA Experiment ID: 20000173 Result: Down-regulated in Transcription
  misc_feature: MA Experiment 20000173 PARAMETER Experiment Name: At_42deg_Heat_P Parameter: Age (day) Value: 14
  misc_feature: MA Experiment 20000173 PARAMETER Experiment Name: At_42deg_Heat_P Parameter: Organism Value: A. thaliana
  misc_feature: MA Experiment 20000173 PARAMETER Experiment Name: At_42deg_Heat_P Parameter: Plant Line Value: WS
  misc_feature: MA Experiment 20000173 PARAMETER Experiment Name: At_42deg_Heat_P Parameter: Temperature (deg C) Value: 42 vs. 22
  misc_feature: MA Experiment 20000173 PARAMETER Experiment Name: At_42deg_Heat_P Parameter: Timepoint (hr) Value: 6
  misc_feature: MA Experiment 20000173 PARAMETER Experiment Name: At_42deg_Heat_P Parameter: Tissue Value: Aerial
  misc_feature: MA Experiment ID: 20000185 Result: Down-regulated in Transcription
  misc_feature: MA Experiment 20000185 PARAMETER Experiment Name: At_Roots__P Parameter: Age (day) Value: 7 vs. 21
  misc_feature: MA Experiment 20000185 PARAMETER Experiment Name: At_Roots__P Parameter: Organism Value: A. thaliana
  misc_feature: MA Experiment 20000185 PARAMETER Experiment Name: At_Roots__P Parameter: Tissue Value: Roots vs. Whole Plant
  misc_feature: MA Experiment ID: 20000234 Result: Down-regulated in Transcription
  misc_feature: MA Experiment 20000234 PARAMETER Experiment Name: At_Siliques_P Parameter: Age (day) Value: 21
  misc_feature: MA Experiment 20000234 PARAMETER Experiment Name: At_Siliques_P Parameter: Organism Value: A. thaliana
  misc_feature: MA Experiment 20000234 PARAMETER Experiment Name: At_Siliques_P Parameter: Plant Line Value: WS
  misc_feature: MA Experiment 20000234 PARAMETER Experiment Name: At_Siliques_P Parameter: Tissue Value: Less Than 5mm Siliques vs. Whole Plant
  misc_feature: MA Experiment ID: 20000264 Result: Up-regulated in Transcription
  misc_feature: MA Experiment 20000264 PARAMETER Experiment Name: At_Open_Flower_P Parameter: Age (day) Value: 21
  misc_feature: MA Experiment 20000264 PARAMETER Experiment Name: At_Open_Flower_P Parameter: Plant Line Value: WS
  misc_feature: MA Experiment 20000264 PARAMETER Experiment Name: At_Open_Flower_P Parameter: Tissue Value: Open Flower vs. Whole Plant
  misc_feature: MA Experiment ID: 20000265 Result: Up-regulated in Transcription
  misc_feature: MA Experiment 20000265 PARAMETER Experiment Name: At_Open_Flower_P Parameter: Age (day) Value: 21
  misc_feature: MA Experiment 20000265 PARAMETER Experiment Name: At_Open_Flower_P Parameter: Plant Line Value: WS
  misc_feature: MA Experiment 20000265 PARAMETER Experiment Name: At_Open_Flower_P Parameter: Tissue Value: Closed Flower vs. Whole Plant
  misc_feature: MA Experiment ID: 20000286 Result: Up-regulated in Transcription
  misc_feature: MA Experiment 20000286 PARAMETER Experiment Name: At_Open_Flower_P Parameter: Age (day) Value: 21
  misc_feature: MA Experiment 20000286 PARAMETER Experiment Name: At_Open_Flower_P Parameter: Plant Line Value: WS
  misc_feature: MA Experiment 20000286 PARAMETER Experiment Name: At_Open_Flower_P Parameter: Tissue Value: Half Open vs. Whole Plant
  misc_feature: MA Experiment ID: 20000439 Result: Down-regulated in Transcription
  misc_feature: MA Experiment 20000439 PARAMETER Experiment Name: At_Roots__P Parameter: Age (day) Value: 14 vs. 21
  misc_feature: MA Experiment 20000439 PARAMETER Experiment Name: At_Roots__P Parameter: Organism Value: A. thaliana
  misc_feature: MA Experiment 20000439 PARAMETER Experiment Name: At_Roots__P Parameter: Tissue Value: Roots vs. Whole Plant
  misc_feature: MA Experiment ID: 20000794 Result: Up-regulated in Transcription
  misc_feature: MA Experiment 20000794 PARAMETER Experiment Name: At_Petals_P Parameter: Age (day) Value: 23-25 days
  misc_feature: MA Experiment 20000794 PARAMETER Experiment Name: At_Petals_P Parameter: Plant Line Value: WS
  misc_feature: MA Experiment 20000794 PARAMETER Experiment Name: At_Petals_P Parameter: Tissue Value: Petals vs. Whole plant
  misc_feature: MA Experiment ID: 20001248 Result: Up-regulated in Transcription
  misc_feature: MA Experiment 20001248 PARAMETER Experiment Name: At_Far-red-induction_P Parameter: Age (day) Value: 7
  misc_feature: MA Experiment 20001248 PARAMETER Experiment Name: At_Far-red-induction_P Parameter: Light Value: Far-red vs. White
  misc_feature: MA Experiment 20001248 PARAMETER Experiment Name: At_Far-red-induction_P Parameter: Organism Value: A. thaliana
  misc_feature: MA Experiment 20001248 PARAMETER Experiment Name: At_Far-red-induction_P Parameter: Plant Line Value: Columbia
  misc_feature: MA Experiment 20001248 PARAMETER Experiment Name: At_Far-red-induction_P Parameter: Timepoint (hr) Value: 4
  misc_feature: MA Experiment 20001248 PARAMETER Experiment Name: At_Far-red-induction_P Parameter: Tissue Value: Whole Plant
  misc_feature: MA Experiment ID: 20001450 Result: Up-regulated in Transcription
  misc_feature: MA Experiment 20001450 PARAMETER Experiment Name: At_Far-red-induction_P Parameter: Age (day) Value: 7
  misc_feature: MA Experiment 20001450 PARAMETER Experiment Name: At_Far-red-induction_P Parameter: Light Value: Far-red vs. White
  misc_feature: MA Experiment 20001450 PARAMETER Experiment Name: At_Far-red-induction_P Parameter: Organism Value: A. thaliana
  misc_feature: MA Experiment 20001450 PARAMETER Experiment Name: At_Far-red-induction_P Parameter: Plant Line Value: Columbia
  misc_feature: MA Experiment 20001450 PARAMETER Experiment Name: At_Far-red-induction_P Parameter: Timepoint (hr) Value: 8
  misc_feature: MA Experiment 20001450 PARAMETER Experiment Name: At_Far-red-induction_P Parameter: Tissue Value: Whole Plant
  misc_feature: MA Experiment ID: 20001557 Result: Up-regulated in Transcription
  misc_feature: MA Experiment 20001557 PARAMETER Experiment Name: At_Drought_Soil_Dry_P Parameter: Age (day) Value: 27
  misc_feature: MA Experiment 20001557 PARAMETER Experiment Name: At_Drought_Soil_Dry_P Parameter: Organism Value: A. thaliana
  misc_feature: MA Experiment 20001557 PARAMETER Experiment Name: At_Drought_Soil_Dry_P Parameter: Plant Line Value: WS
  misc_feature: MA Experiment 20001557 PARAMETER Experiment Name: At_Drought_Soil_Dry_P Parameter: Post Timepoint (hr) Value: 3
  misc_feature: MA Experiment 20001557 PARAMETER Experiment Name: At_Drought_Soil_Dry_P Parameter: Post-Treatment Value: Re-Water vs. No Drought
  misc_feature: MA Experiment 20001557 PARAMETER Experiment Name: At_Drought_Soil_Dry_P Parameter: Timepoint (day) Value: 13
  misc_feature: MA Experiment 20001557 PARAMETER Experiment Name: At_Drought_Soil_Dry_P Parameter: Treatment Value: Drought vs. No Drought
  misc_feature: MA Experiment ID: 20001911 Result: Down-regulated in Transcription
  misc_feature: MA Experiment 20001911 PARAMETER Experiment Name: At_Drought_Reproduction_P Parameter: Age (day) Value: 40
  misc_feature: MA Experiment 20001911 PARAMETER Experiment Name: At_Drought_Reproduction_P Parameter: Organism Value: A. thaliana
  misc_feature: MA Experiment 20001911 PARAMETER Experiment Name: At_Drought_Reproduction_P Parameter: Plant Line Value: WS
  misc_feature: MA Experiment 20001911 PARAMETER Experiment Name: At_Drought_Reproduction_P Parameter: Timepoint (day) Value: 10
  misc_feature: MA Experiment 20001911 PARAMETER Experiment Name: At_Drought_Reproduction_P Parameter: Tissue Value: Flowers
  misc_feature: MA Experiment 20001911 PARAMETER Experiment Name: At_Drought_Reproduction_P Parameter: Treatment Value: Drought vs. No Drought
atataagaaaataggcttcaataggcaaaatattcttcctgtgatgcagtgaggatgaagaatatgctgatgtagattgggacaaccttggattcagtcttgtacggacagatttcatgttcgccaccaaaagttgcagagacggaaacttcgaacagggttaccttagccgttacggcaacatcgagctcaaccctgctgctggaattctcaactatggccagggactaatagaggggatgaaagcgtacagaggagaagacggtagggttcttctcttccgtccagagctaaacgcgatgcgtatgaagataggagctgagagaatgtgtatgcattctccttctgttcatcagtttattgaaggtgttaagcagaccgttcttgcaaacaggcgttgggttcctcctccgggcaaaggctcgttgtatctcagaccgttgttgttcggaagtggagcaagcttgggtgtggctgcagcatcagagtacacgtttcttgtgtttggctctcctgttcaaaactacttcaaggaaggcacagcggcgttgaacctgtatgtggaggaggtgattccacgcgcttatcttggaggaactggtggtgtaaaggcaatatccaattacggtccagtgcttgaagtgatgagaagagcaaaatcaagagggttttcggatgttttgtatcttgatgcagatactgggaagaacatagaagaagtctctgctgctaatatattccttgtgaagggcaatacaatagtgacaccagctacgagcggaacgattctcggagggatcacacgtaagagcataatcgaaatcgcccttgatcttggttacaaagtggaagaacgaagtgttccggtagaagaactgaaggaagctgaagaagttttctgcactggaactgccgctggagttgcttctgttggaagcatcacttttaagaacacaaggactgagtacaaagttggagatgggattgttacacagcaacttcgatctattcttgtcggaatacaaacaggttctatccaagacactaaagattgggttttgcagattgcctaagttactttcatatcctataaataatgttgcactctcttgatcacccatcaaaagcttttgaaatagtttttggtaaatttgtgacataaatttgtgatatatcaccacatcgtattagtattaaacatttgtttcactcttcc

SEQ ID NO: 23289 - protein, 318 aa, Arabidopsis thaliana
  peptide (1)..(318): Ceres Seq. ID no. 12324711
  misc_feature (1)..(317): Homolog of NCBI NO: 6319165 NR Description: branched-chain amino acid aminotransferase
  misc_feature (1)..(317): Homolog of NCBI NO: 15222881 NR Description: branched-chain amino acid aminotransferase,
  misc_feature (1)..(318): Homolog of NCBI NO: 26391655 NR Description: Branched-chain amino acid aminotransferase 5,
  misc_feature (1)..(317): Homolog of NCBI NO: 34902362 NR Description: Putative aminotransferase
  misc_feature (1)..(317): Homolog of NCBI NO: 7450517 NR Description: branched-chain amino acid aminotransferase
  misc_feature (1)..(317): Homolog of NCBI NO: 6319167 NR Description: branched-chain amino acid aminotransferase
  misc_feature (1)..(317): Homolog of NCBI NO: 15218409 NR Description: tat-binding protein, putative
  misc_feature (1)..(317): Homolog of NCBI NO: 14280354 NR Description: branched-chain amino acid aminotransferase
  misc_feature (1)..(230): Homolog of NCBI NO: 18391105 NR Description: expressed protein
  misc_feature (1)..(318): Homolog of NCBI NO: 30681524 NR Description: branched-chain amino acid aminotransferase
MFATKSCRDGNFEQGYLSRYGNIELNPAAGILNYGQGLIEGMKAYRGEDGRVLLFRPELNAMRMKIGAERMCMHSPSVHQFIEGVKQTVLANRRWVPPPGKGSLYLRPLLFGSGASLGVAAASEYTFLVFGSPVQNYFKEGTAALNLYVEEVIPRAYLGGTGGVKAISNYGPVLEVMRRAKSRGFSDVLYLDADTGKNIEEVSAANIFLVKGNTIVTPATSGTILGGITRKSIIEIALDLGYKVEERSVPVEELKEAEEVFCTGTAAGVASVGSITFKNTRTEYKVGDGIVTQQLRSILVGIQTGSIQDTKDWVLQIA

SEQ ID NO: 23290 - protein, 277 aa, Arabidopsis thaliana
  peptide (1)..(277): Ceres Seq. ID no. 12324712
  misc_feature (1)..(276): Homolog of NCBI NO: 6319165 NR Description: branched-chain amino acid aminotransferase
  misc_feature (1)..(276): Homolog of NCBI NO: 15222881 NR Description: branched-chain amino acid aminotransferase,
  misc_feature (1)..(277): Homolog of NCBI NO: 26391655 NR Description: Branched-chain amino acid aminotransferase 5,
  misc_feature (1)..(276): Homolog of NCBI NO: 34902362 NR Description: Putative aminotransferase
  misc_feature (1)..(276): Homolog of NCBI NO: 7450517 NR Description: branched-chain amino acid aminotransferase
  misc_feature (1)..(276): Homolog of NCBI NO: 6319167 NR Description: branched-chain amino acid aminotransferase
  misc_feature (1)..(276): Homolog of NCBI NO: 15218409 NR Description: tat-binding protein, putative
  misc_feature (1)..(276): Homolog of NCBI NO: 14280354 NR Description: branched-chain amino acid aminotransferase
  misc_feature (1)..(189): Homolog of NCBI NO: 18391105 NR Description: expressed protein
  misc_feature (1)..(277): Homolog of NCBI NO: 30681524 NR Description: branched-chain amino acid aminotransferase
MKAYRGEDGRVLLFRPELNAMRMKIGAERMCMHSPSVHQFIEGVKQTVLANRRWVPPPGKGSLYLRPLLFGSGASLGVAAASEYTFLVFGSPVQNYFKEGTAALNLYVEEVIPRAYLGGTGGVKAISNYGPVLEVMRRAKSRGFSDVLYLDADTGKNIEEVSAANIFLVKGNTIVTPATSGTILGGITRKSIIEIALDLGYKVEERSVPVEELKEAEEVFCTGTAAGVASVGSITFKNTRTEYKVGDGIVTQQLRSILVGIQTGSIQDTKDWVLQIA

SEQ ID NO: 23291 - protein, 257 aa, Arabidopsis thaliana
  peptide (1)..(257): Ceres Seq. ID no. 12324713
  misc_feature (1)..(256): Homolog of NCBI NO: 6319165 NR Description: branched-chain amino acid aminotransferase
  misc_feature (1)..(256): Homolog of NCBI NO: 15222881 NR Description: branched-chain amino acid aminotransferase,
  misc_feature (1)..(257): Homolog of NCBI NO: 26391655 NR Description: Branched-chain amino acid aminotransferase 5,
  misc_feature (1)..(256): Homolog of NCBI NO: 34902362 NR Description: Putative aminotransferase
  misc_feature (1)..(256): Homolog of NCBI NO: 7450517 NR Description: branched-chain amino acid aminotransferase
  misc_feature (1)..(256): Homolog of NCBI NO: 6319167 NR Description: branched-chain amino acid aminotransferase
  misc_feature (1)..(256): Homolog of NCBI NO: 15218409 NR Description: tat-binding protein, putative
  misc_feature (1)..(256): Homolog of NCBI NO: 14280354 NR Description: branched-chain amino acid aminotransferase
  misc_feature (1)..(169): Homolog of NCBI NO: 18391105 NR Description: expressed protein
  misc_feature (1)..(257): Homolog of NCBI NO: 30681524 NR Description: branched-chain amino acid aminotransferase
MRMKIGAERMCMHSPSVHQFIEGVKQTVLANRRWVPPPGKGSLYLRPLLFGSGASLGVAAASEYTFLVFGSPVQNYFKEGTAALNLYVEEVIPRAYLGGTGGVKAISNYGPVLEVMRRAKSRGFSDVLYLDADTGKNIEEVSAANIFLVKGNTIVTPATSGTILGGITRKSIIEIALDLGYKVEERSVPVEELKEAEEVFCTGTAAGVASVGSITFKNTRTEYKVGDGIVTQQLRSILVGIQTGSIQDTKDWVLQIA

SEQ ID NO: 23292 - DNA, 961 bp, Arabidopsis thaliana
  misc_feature (1)..(961): Ceres Seq. ID no. 12421482
  misc_feature: MA Experiment ID: 108595 Result: Up-regulated in Transcription
  misc_feature: MA Experiment 108595 PARAMETER Experiment Name: At_Ler-pi_Ovule_cDNA_P Parameter: Plant Line Value: null
  misc_feature: MA Experiment ID: 20000179 Result: Up-regulated in Transcription
  misc_feature: MA Experiment 20000179 PARAMETER Experiment Name: At_Germinating_Seeds_P Parameter: Age (hr) Value: 6 vs. 0
  misc_feature: MA Experiment 20000179 PARAMETER Experiment Name: At_Germinating_Seeds_P Parameter: Tissue Value: Germinating Seeds
  misc_feature: MA Experiment ID: 20000180 Result: Up-regulated in Transcription
  misc_feature: MA Experiment 20000180 PARAMETER Experiment Name: At_Germinating_Seeds_P Parameter: Age (hr) Value: 24 vs. 0
  misc_feature: MA Experiment 20000180 PARAMETER Experiment Name: At_Germinating_Seeds_P Parameter: Tissue Value: Germinating Seeds
  misc_feature: MA Experiment ID: 20000227 Result: Up-regulated in Transcription
  misc_feature: MA Experiment 20000227 PARAMETER Experiment Name: At_Root-Tips-vs-Tops_P Parameter: Tissue Value: Root Tips vs. Root Tops
  misc_feature: MA Experiment ID: 20000234 Result: Up-regulated in Transcription
  misc_feature: MA Experiment 20000234 PARAMETER Experiment Name: At_Siliques_P Parameter: Age (day) Value: 21
  misc_feature: MA Experiment 20000234 PARAMETER Experiment Name: At_Siliques_P Parameter: Organism Value: A. thaliana
  misc_feature: MA Experiment 20000234 PARAMETER Experiment Name: At_Siliques_P Parameter: Plant Line Value: WS
  misc_feature: MA Experiment 20000234 PARAMETER Experiment Name: At_Siliques_P Parameter: Tissue Value: Less Than 5mm Siliques vs. Whole Plant
  misc_feature: MA Experiment ID: 20000496 Result: Up-regulated in Transcription
  misc_feature: MA Experiment 20000496 PARAMETER Experiment Name: At_Guard_Cells_P Parameter: Harvest Date Value: 7/19/2002
  misc_feature: MA Experiment 20000496 PARAMETER Experiment Name: At_Guard_Cells_P Parameter: Organism Value: Canola
  misc_feature: MA Experiment 20000496 PARAMETER Experiment Name: At_Guard_Cells_P Parameter: Tissue Value: Guard Cells vs. Leaves
  misc_feature: MA Experiment ID: 20000573 Result: Down-regulated in Transcription
  misc_feature: MA Experiment 20000573 PARAMETER Experiment Name: At_100uM_ABA_Mutants__P Parameter: Organism Value: A. thaliana
  misc_feature: MA Experiment 20000573 PARAMETER Experiment Name: At_100uM_ABA_Mutants__P Parameter: Plant Line Value: CS22 vs. Ler wt
  misc_feature: MA Experiment 20000573 PARAMETER Experiment Name: At_100uM_ABA_Mutants__P Parameter: Timepoint (hr) Value: N/A
  misc_feature: MA Experiment 20000573 PARAMETER Experiment Name: At_100uM_ABA_Mutants__P Parameter: Tissue Value: Whole Plant
  misc_feature: MA Experiment 20000573 PARAMETER Experiment Name: At_100uM_ABA_Mutants__P Parameter: Treatment Value: None
  misc_feature: MA Experiment ID: 20000574 Result: Down-regulated in Transcription
  misc_feature: MA Experiment 20000574 PARAMETER Experiment Name: At_100uM_ABA_Mutants__P Parameter: Organism Value: A. thaliana
  misc_feature: MA Experiment 20000574 PARAMETER Experiment Name: At_100uM_ABA_Mutants__P Parameter: Plant Line Value: CS23 vs. Ler wt
  misc_feature: MA Experiment 20000574 PARAMETER Experiment Name: At_100uM_ABA_Mutants__P Parameter: Timepoint (hr) Value: N/A
  misc_feature: MA Experiment 20000574 PARAMETER Experiment Name: At_100uM_ABA_Mutants__P Parameter: Tissue Value: Whole Plant
  misc_feature: MA Experiment 20000574 PARAMETER Experiment Name: At_100uM_ABA_Mutants__P Parameter: Treatment Value: None
  misc_feature: MA Experiment ID: 20001248 Result: Down-regulated in Transcription
  misc_feature: MA Experiment 20001248 PARAMETER Experiment Name: At_Far-red-induction_P Parameter: Age (day) Value: 7
  misc_feature: MA Experiment 20001248 PARAMETER Experiment Name: At_Far-red-induction_P Parameter: Light Value: Far-red vs. White
  misc_feature: MA Experiment 20001248 PARAMETER Experiment Name: At_Far-red-induction_P Parameter: Organism Value: A. thaliana
  misc_feature: MA Experiment 20001248 PARAMETER Experiment Name: At_Far-red-induction_P Parameter: Plant Line Value: Columbia
  misc_feature: MA Experiment 20001248 PARAMETER Experiment Name: At_Far-red-induction_P Parameter: Timepoint (hr) Value: 4
  misc_feature: MA Experiment 20001248 PARAMETER Experiment Name: At_Far-red-induction_P Parameter: Tissue Value: Whole Plant
  misc_feature: MA Experiment ID: 20001450 Result: Down-regulated in Transcription
  misc_feature: MA Experiment 20001450 PARAMETER Experiment Name: At_Far-red-induction_P Parameter: Age (day) Value: 7
  misc_feature: MA Experiment 20001450 PARAMETER Experiment Name: At_Far-red-induction_P Parameter: Light Value: Far-red vs. White
  misc_feature: MA Experiment 20001450 PARAMETER Experiment Name: At_Far-red-induction_P Parameter: Organism Value: A. thaliana
  misc_feature: MA Experiment 20001450 PARAMETER Experiment Name: At_Far-red-induction_P Parameter: Plant Line Value: Columbia
  misc_feature: MA Experiment 20001450 PARAMETER Experiment Name: At_Far-red-induction_P Parameter: Timepoint (hr) Value: 8
  misc_feature: MA Experiment 20001450 PARAMETER Experiment Name: At_Far-red-induction_P Parameter: Tissue Value: Whole Plant
  misc_feature: MA Experiment ID: 20001451 Result: Down-regulated in Transcription
  misc_feature: MA Experiment 20001451 PARAMETER Experiment Name: At_Far-red-induction_P Parameter: Age (day) Value: 7
  misc_feature: MA Experiment 20001451 PARAMETER Experiment Name: At_Far-red-induction_P Parameter: Light Value: Far-red vs. White
  misc_feature: MA Experiment 20001451 PARAMETER Experiment Name: At_Far-red-induction_P Parameter: Organism Value: A. thaliana
  misc_feature: MA Experiment 20001451 PARAMETER Experiment Name: At_Far-red-induction_P Parameter: Plant Line Value: Columbia
  misc_feature: MA Experiment 20001451 PARAMETER Experiment Name: At_Far-red-induction_P Parameter: Timepoint (hr) Value: 24
  misc_feature: MA Experiment 20001451 PARAMETER Experiment Name: At_Far-red-induction_P Parameter: Tissue Value: Whole Plant
atcatctccacattttccaaggcttcagtttcacttcatcactctctctgccaaaaaaaacaaaaatgagctctcaaatctgcagatctgcttccaaagcagccaaatctcttctctcttcagctaaaaatgctcgcttcttctctgaaggacgagccattggtgctgcggcagcggtttcggcgtcaggaaaaattcctttgtatgcatctaactttgcaagatcatcaggttctggtgttgcttctaagagttggatcactggactcttagctcttcctgctgcagcttatatgattcaagatcaagaggttcttgctgctgagatggaacgaacttttattgctatcaagcctgatggtgtgcaaagaggactgatatcagagatcatttctcgattcgaacgcaagggattcaagctagttggtatcaaagtcattgttccttctaaagatttcgcacaaaagcattaccatgatcttaaggaaagacctttcttcaatggtttgtgtgacttccttagctctggtcctgttattgccatggtctgggaaggagatggtgtgatcagatacggacgtaaactgattggagccactgatcctcagaaatctgagcctggaacaatccgaggagatcttgcagttactgttggcaggaacataatccatggaagtgatggaccagagactgcaaaggatgagatcagtctgtggtttaagcctcaagaacttgtttcttacactagtaactctgagaagtggctctatggtgacaactaaatccctcttcctcttgtcttttgaaatcaaatcacattggtttttcttttcttttcttacccatacaataaaaacaagaaacagttgttacggatacaaacacattccgggttttgatttttccccggtgaactcagtaatcagagcataagcaataagtatgggatgactagtatttg

SEQ ID NO: 23293 - protein, 259 aa, Arabidopsis thaliana
  peptide (1)..(259): Ceres Seq. ID no. 12421483
  misc_feature (110)..(247): Pfam Name: Nucleoside diphosphate kinase Pfam Description: Nucleoside diphosphate kinase
  misc_feature (107)..(256): Homolog of NCBI NO: 30584391 NR Description: Homo sapiens non-metastatic cells 2, protein
  misc_feature (107)..(259): Homolog of NCBI NO: 6225754 NR Description: NUCLEOSIDE DIPHOSPHATE KINASE III (NDK III) (NDP
  misc_feature (22)..(257): Homolog of NCBI NO: 20218817 NR Description: putative nucleoside diphosphate kinase [Pinus
  misc_feature (22)..(259): Homolog of NCBI NO: 19699051 NR Description: nucleoside diphosphate kinase III [Spinacia
  misc_feature (64)..(259): Homolog of NCBI NO: 8272416 NR Description: nucleoside diphosphate kinase 3 [Brassica rapa]
  misc_feature (22)..(259): Homolog of NCBI NO: 6435320 NR Description: nucleoside diphosphate kinase [Pisum sativum]
  misc_feature (22)..(259): Homolog of NCBI NO: 21593387 NR Description: nucleoside diphosphate kinase 3 (ndpk3)
  misc_feature (22)..(259): Homolog of NCBI NO: 18416233 NR Description: expressed protein
  misc_feature (22)..(259): Homolog of NCBI NO: 19744167 NR Description: NDPK III [Brassica rapa]
  misc_feature (22)..(259): Homolog of NCBI NO: 15237018 NR Description: nucleoside diphosphate kinase 3 (ndpk3)
HLHIFQGFSFTSSLSLPKKTKMSSQICRSASKAAKSLLSSAKNARFFSEGRAIGAAAAVSASGKIPLYASNFARSSGSGVASKSWITGLLALPAAAYMIQDQEVLAAEMERTFIAIKPDGVQRGLISEIISRFERKGFKLVGIKVIVPSKDFAQKHYHDLKERPFFNGLCDFLSSGPVIAMVWEGDGVIRYGRKLIGATDPQKSEPGTIRGDLAVTVGRNIIHGSDGPETAKDEISLWFKPQELVSYTSNSEKWLYGDN

SEQ ID NO: 23294 - protein, 238 aa, Arabidopsis thaliana
  peptide (1)..(238): Ceres Seq. ID no. 12421484
  misc_feature (89)..(226): Pfam Name: Nucleoside diphosphate kinase Pfam Description: Nucleoside diphosphate kinase
  misc_feature (86)..(235): Homolog of NCBI NO: 30584391 NR Description: Homo sapiens non-metastatic cells 2, protein
  misc_feature (86)..(238): Homolog of NCBI NO: 6225754 NR Description: NUCLEOSIDE DIPHOSPHATE KINASE III (NDK III) (NDP
  misc_feature (1)..(236): Homolog of NCBI NO: 20218817 NR Description: putative nucleoside diphosphate kinase [Pinus
  misc_feature (1)..(238): Homolog of NCBI NO: 19699051 NR Description: nucleoside diphosphate kinase III [Spinacia
  misc_feature (43)..(238): Homolog of NCBI NO: 8272416 NR Description: nucleoside diphosphate kinase 3 [Brassica rapa]
  misc_feature (1)..(238): Homolog of NCBI NO: 6435320 NR Description: nucleoside diphosphate kinase [Pisum sativum]
  misc_feature (1)..(238): Homolog of NCBI NO: 21593387 NR Description: nucleoside diphosphate kinase 3 (ndpk3)
  misc_feature (1)..(238): Homolog of NCBI NO: 18416233 NR Description: expressed protein
  misc_feature (1)..(238): Homolog of NCBI NO: 19744167 NR Description: NDPK III [Brassica rapa]
  misc_feature (1)..(238): Homolog of NCBI NO: 15237018 NR Description: nucleoside diphosphate kinase 3 (ndpk3)
MSSQICRSASKAAKSLLSSAKNARFFSEGRAIGAAAAVSASGKIPLYASNFARSSGSGVASKSWITGLLALPAAAYMIQDQEVLAAEMERTFIAIKPDGVQRGLISEIISRFERKGFKLVGIKVIVPSKDFAQKHYHDLKERPFFNGLCDFLSSGPVIAMVWEGDGVIRYGRKLIGATDPQKSEPGTIRGDLAVTVGRNIIHGSDGPETAKDEISLWFKPQELVSYTSNSEKWLYGDN

SEQ ID NO: 23295 - protein, 162 aa, Arabidopsis thaliana
  peptide (1)..(162): Ceres Seq. ID no. 12421485
  misc_feature (13)..(150): Pfam Name: Nucleoside diphosphate kinase Pfam Description: Nucleoside diphosphate kinase
  misc_feature (10)..(162): Homolog of NCBI NO: 6225754 NR Description: NUCLEOSIDE DIPHOSPHATE KINASE III (NDK III) (NDP
  misc_feature (1)..(160): Homolog of NCBI NO: 20218817 NR Description: putative nucleoside diphosphate kinase [Pinus
  misc_feature (1)..(162): Homolog of NCBI NO: 19699051 NR Description: nucleoside diphosphate kinase III [Spinacia
  misc_feature (1)..(162): Homolog of NCBI NO: 8272416 NR Description: nucleoside diphosphate kinase 3 [Brassica rapa]
  misc_feature (1)..(162): Homolog of NCBI NO: 6435320 NR Description: nucleoside diphosphate kinase [Pisum sativum]
  misc_feature (10)..(159): Homolog of NCBI NO: 30584391 NR Description: Homo sapiens non-metastatic cells 2, protein
  misc_feature (1)..(162): Homolog of NCBI NO: 21593387 NR Description: nucleoside diphosphate kinase 3 (ndpk3)
  misc_feature (1)..(162): Homolog of NCBI NO: 18416233 NR Description: expressed protein
  misc_feature (1)..(162): Homolog of NCBI NO: 19744167 NR Description: NDPK III [Brassica rapa]
  misc_feature (1)..(162): Homolog of NCBI NO: 15237018 NR Description: nucleoside diphosphate kinase 3 (ndpk3)
MIQDQEVLAAEMERTFIAIKPDGVQRGLISEIISRFERKGFKLVGIKVIVPSKDFAQKHYHDLKERPFFNGLCDFLSSGPVIAMVWEGDGVIRYGRKLIGATDPQKSEPGTIRGDLAVTVGRNIIHGSDGPETAKDEISLWFKPQELVSYTSNSEKWLYGDN

SEQ ID NO: 23296 - DNA, 1220 bp, Arabidopsis thaliana
  misc_feature (1)..(1220): Ceres Seq. ID no. 12338755
  misc_feature: MA Experiment ID: 20000111 Result: Up-regulated in Transcription
  misc_feature: MA Experiment 20000111 PARAMETER Experiment Name: At_42deg_Heat_cDNA_P Parameter: Temperature (deg C) Value: 42 vs. 22
  misc_feature: MA Experiment 20000111 PARAMETER Experiment Name: At_42deg_Heat_cDNA_P Parameter: Timepoint (hr) Value: 6
  misc_feature: MA Experiment 20000111 PARAMETER Experiment Name: At_42deg_Heat_cDNA_P Parameter: Tissue Value: Aerial
  misc_feature: MA Experiment ID: 20000179 Result: Up-regulated in Transcription
  misc_feature: MA Experiment 20000179 PARAMETER Experiment Name: At_Germinating_Seeds_P Parameter: Age (hr) Value: 6 vs. 0
  misc_feature: MA Experiment 20000179 PARAMETER Experiment Name: At_Germinating_Seeds_P Parameter: Tissue Value: Germinating Seeds
  misc_feature: MA Experiment ID: 20000180 Result: Up-regulated in Transcription
  misc_feature: MA Experiment 20000180 PARAMETER Experiment Name: At_Germinating_Seeds_P Parameter: Age (hr) Value: 24 vs. 0
  misc_feature: MA Experiment 20000180 PARAMETER Experiment Name: At_Germinating_Seeds_P Parameter: Tissue Value: Germinating Seeds
  misc_feature: MA Experiment ID: 20000182 Result: Up-regulated in Transcription
  misc_feature: MA Experiment 20000182 PARAMETER Experiment Name: At_2mM_SA_P Parameter: Age (day) Value: 14
  misc_feature: MA Experiment 20000182 PARAMETER Experiment Name: At_2mM_SA_P Parameter: Organism Value: A. thaliana
  misc_feature: MA Experiment 20000182 PARAMETER Experiment Name: At_2mM_SA_P Parameter: Plant Line Value: WS
  misc_feature: MA Experiment 20000182 PARAMETER Experiment Name: At_2mM_SA_P Parameter: Timepoint (hr) Value: 6
  misc_feature: MA Experiment 20000182 PARAMETER Experiment Name: At_2mM_SA_P Parameter: Tissue Value: Aerial
  misc_feature: MA Experiment 20000182 PARAMETER Experiment Name: At_2mM_SA_P Parameter: Treatment Value: 2mM SA vs. No Treatment
  misc_feature: MA Experiment ID: 20000184 Result: Down-regulated in Transcription
  misc_feature: MA Experiment 20000184 PARAMETER Experiment Name: At_Shoots__P Parameter: Age (day) Value: 7
  misc_feature: MA Experiment 20000184 PARAMETER Experiment Name: At_Shoots__P Parameter: Tissue Value: Shoots vs. Whole Plant
  misc_feature: MA Experiment ID: 20000185 Result: Up-regulated in Transcription
  misc_feature: MA Experiment 20000185 PARAMETER Experiment Name: At_Roots__P Parameter: Age (day) Value: 7 vs. 21
  misc_feature: MA Experiment 20000185 PARAMETER Experiment Name: At_Roots__P Parameter: Organism Value: A. thaliana
  misc_feature: MA Experiment 20000185 PARAMETER Experiment Name: At_Roots__P Parameter: Tissue Value: Roots vs. Whole Plant
  misc_feature: MA Experiment ID: 20000227 Result: Up-regulated in Transcription
  misc_feature: MA Experiment 20000227 PARAMETER Experiment Name: At_Root-Tips-vs-Tops_P Parameter: Tissue Value: Root Tips vs. Root Tops
  misc_feature: MA Experiment ID: 20000438 Result: Down-regulated in Transcription
  misc_feature: MA Experiment 20000438 PARAMETER Experiment Name: At_Shoots__P Parameter: Age (day) Value: 14
  misc_feature: MA Experiment 20000438 PARAMETER Experiment Name: At_Shoots__P Parameter: Tissue Value: Shoots vs. Whole Plant
  misc_feature: MA Experiment ID: 20001557 Result: Up-regulated in Transcription
  misc_feature: MA Experiment 20001557 PARAMETER Experiment Name: At_Drought_Soil_Dry_P Parameter: Age (day) Value: 27
  misc_feature: MA Experiment 20001557 PARAMETER Experiment Name: At_Drought_Soil_Dry_P Parameter: Organism Value: A. thaliana
  misc_feature: MA Experiment 20001557 PARAMETER Experiment Name: At_Drought_Soil_Dry_P Parameter: Plant Line Value: WS
  misc_feature: MA Experiment 20001557 PARAMETER Experiment Name: At_Drought_Soil_Dry_P Parameter: Post Timepoint (hr) Value: 3
  misc_feature: MA Experiment 20001557 PARAMETER Experiment Name: At_Drought_Soil_Dry_P Parameter: Post-Treatment Value: Re-Water vs. No Drought
  misc_feature: MA Experiment 20001557 PARAMETER Experiment Name: At_Drought_Soil_Dry_P Parameter: Timepoint (day) Value: 13
  misc_feature: MA Experiment 20001557 PARAMETER Experiment Name: At_Drought_Soil_Dry_P Parameter: Treatment Value: Drought vs. No Drought
gtaatttctctttcgttcaatgttattcttttagatctcgaacaaaacaaaatctccagaagaaaaaaccaaattccatggcgtctaaatcgaagcagcatcttcgttatcagccgcgaaaatctgtgtcacgatcaacacaagctttcacggtgcttatacttcttctcgtagtgattctgattcttctgggtctcgggattttgtcactacctaatgctaatagaaactcttccaagacgaatgatttgaccaacattgtacgaaagagtgagacgagttctggagatgaagaagggaatggtgaacgttgggttgaagttatttcttgggagcctcgtgctgttgtttatcacaatttcttgactaatgaagaatgtgagcacttgatcagccttgctaaaccgagtatggttaagtcaaccgtggtagatgagaaaaccggtgggagcaaagatagcagagtgagaactagctcaggaacttttcttagaagaggacatgacgaagttgtcgaggtgattgagaaaaggatttcagatttcaccttcattcctgttgaaaatggtgaaggtcttcaagttcttcactaccaagttgggcagaagtatgagcctcactatgactatttcttagatgagttcaacaccaagaatggaggacaacgaatagctactgtgcttatgtacctctctgatgtcgatgatggtggcgagactgtgttccctgcagcaagaggaaacattagtgctgtcccatggtggaacgagctctcaaaatgtggtaaagaaggactatctgttctaccaaagaagcgagatgctttacttttctggaacatgaggcctgatgcatctctagacccttcgagcttgcacggtggatgtccagtggtgaaaggaaacaaatggtcatccacgaaatggttccatgtccacgagttcaaggtttaagagaaaccaaacaaagaaagctaaaatatgaggaggtttttcatggaagcttcgaatgtgtgtggatacagttaaacaggtataatgtgtatttcccttttgaagtgagagatccttaggaaattggaggctgttctttcatgggggatatttgaactttttgtactttttcttctaaattattttgaatgatttgtactttacgacatattcgaatctgagtcttgtaacttttaacaactcaatacgaaccatgaattttccgtt

SEQ ID NO: 23297 - protein, 316 aa, Arabidopsis thaliana
  peptide (1)..(316): Ceres Seq. ID no. 12338756
  misc_feature (188)..(311): Pfam Name: 2OG-Fe(II) oxygenase superfamily Pfam Description: 2OG-Fe(II) oxygenase superfamily
  misc_feature (53)..(316): Homolog of NCBI NO: 18086437 NR Description: AT3g28480/MFJ20_16 [Arabidopsis thaliana]
  misc_feature (40)..(298): Homolog of NCBI NO: 37535718 NR Description: putative prolyl 4-hydroxylase, alpha subunit
  misc_feature (26)..(293): Homolog of NCBI NO: 15239240 NR Description: prolyl 4-hydroxylase, alpha subunit-like protein
  misc_feature (32)..(316): Homolog of NCBI NO: 21537370 NR Description: putative prolyl 4-hydroxylase, alpha subunit
  misc_feature (32)..(316): Homolog of NCBI NO: 18394842 NR Description: expressed protein
  misc_feature (26)..(157): Homolog of NCBI NO: 15233341 NR Description: putative protein; protein id: At4g35810.1
  misc_feature (154)..(293): Homolog of NCBI NO: 15233341 NR Description: putative protein; protein id: At4g35810.1
  misc_feature (26)..(293): Homolog of NCBI NO: 7488226 NR Description: procollagen-proline dioxygenase alpha chain
  misc_feature (26)..(316): Homolog of NCBI NO: 21593091 NR Description: putative prolyl 4-hydroxylase, alpha subunit
  misc_feature (26)..(316): Homolog of NCBI NO: 15227885 NR Description: putative prolyl 4-hydroxylase, alpha subunit
NFSFVQCYSFRSRTKQNLQKKKPNSMASKSKQHLRYQPRKSVSRSTQAFTVLILLLVVILILLGLGILSLPNANRNSSKTNDLTNIVRKSETSSGDEEGNGERWVEVISWEPRAVVYHNFLTNEECEHLISLAKPSMVKSTVVDEKTGGSKDSRVRTSSGTFLRRGHDEVVEVIEKRISDFTFIPVENGEGLQVLHYQVGQKYEPHYDYFLDEFNTKNGGQRIATVLMYLSDVDDGGETVFPAARGNISAVPWWNELSKCGKEGLSVLPKKRDALLFWNMRPDASLDPSSLHGGCPVVKGNKWSSTKWFHVHEFKV

SEQ ID NO: 23298 - protein, 291 aa, Arabidopsis thaliana
  peptide (1)..(291): Ceres Seq. ID no. 12338758
  misc_feature (163)..(286): Pfam Name: 2OG-Fe(II) oxygenase superfamily Pfam Description: 2OG-Fe(II) oxygenase superfamily
  misc_feature (28)..(291): Homolog of NCBI NO: 18086437 NR Description: AT3g28480/MFJ20_16 [Arabidopsis thaliana]
  misc_feature (15)..(273): Homolog of NCBI NO: 37535718 NR Description: putative prolyl 4-hydroxylase, alpha subunit
  misc_feature (1)..(268): Homolog of NCBI NO: 15239240 NR Description: prolyl 4-hydroxylase, alpha subunit-like protein
  misc_feature (7)..(291): Homolog of NCBI NO: 21537370 NR Description: putative prolyl 4-hydroxylase, alpha subunit
  misc_feature (7)..(291): Homolog of NCBI NO: 18394842 NR Description: expressed protein
  misc_feature (1)..(132): Homolog of NCBI NO: 15233341 NR Description: putative protein; protein id: At4g35810.1
  misc_feature (129)..(268): Homolog of NCBI NO: 15233341 NR Description: putative protein; protein id: At4g35810.1
  misc_feature (1)..(268): Homolog of NCBI NO: 7488226 NR Description: procollagen-proline dioxygenase alpha chain
  misc_feature (1)..(291): Homolog of NCBI NO: 21593091 NR Description: putative prolyl 4-hydroxylase, alpha subunit
  misc_feature (1)..(291): Homolog of NCBI NO: 15227885 NR Description: putative prolyl 4-hydroxylase, alpha subunit
MASKSKQHLRYQPRKSVSRSTQAFTVLILLLVVILILLGLGILSLPNANRNSSKTNDLTNIVRKSETSSGDEEGNGERWVEVISWEPRAVVYHNFLTNEECEHLISLAKPSMVKSTVVDEKTGGSKDSRVRTSSGTFLRRGHDEVVEVIEKRISDFTFIPVENGEGLQVLHYQVGQKYEPHYDYFLDEFNTKNGGQRIATVLMYLSDVDDGGETVFPAARGNISAVPWWNELSKCGKEGLSVLPKKRDALLFWNMRPDASLDPSSLHGGCPVVKGNKWSSTKWFHVHEFKV

SEQ ID NO: 23299 - protein, 180 aa, Arabidopsis thaliana
  peptide (1)..(180): Ceres Seq. ID no. 12338759
  misc_feature (52)..(175): Pfam Name: 2OG-Fe(II) oxygenase superfamily Pfam Description: 2OG-Fe(II) oxygenase superfamily
  misc_feature (1)..(180): Homolog of NCBI NO: 18086437 NR Description: AT3g28480/MFJ20_16 [Arabidopsis thaliana]
  misc_feature (1)..(162): Homolog of NCBI NO: 37535718 NR Description: putative prolyl 4-hydroxylase, alpha subunit
  misc_feature (1)..(157): Homolog of NCBI NO: 15239240 NR Description: prolyl 4-hydroxylase, alpha subunit-like protein
  misc_feature (1)..(180): Homolog of NCBI NO: 21537370 NR Description: putative prolyl 4-hydroxylase, alpha subunit
  misc_feature (1)..(180): Homolog of NCBI NO: 18394842 NR Description: expressed protein
  misc_feature (1)..(21): Homolog of NCBI NO: 15233341 NR Description: putative protein; protein id: At4g35810.1
  misc_feature (18)..(157): Homolog of NCBI NO: 15233341 NR Description: putative protein; protein id: At4g35810.1
  misc_feature (1)..(157): Homolog of NCBI NO: 7488226 NR Description: procollagen-proline dioxygenase alpha chain
  misc_feature (1)..(180): Homolog of NCBI NO: 21593091 NR Description: putative prolyl 4-hydroxylase, alpha subunit
  misc_feature (1)..(180): Homolog of NCBI NO: 15227885 NR Description: putative prolyl 4-hydroxylase, alpha subunit
MVKSTVVDEKTGGSKDSRVRTSSGTFLRRGHDEVVEVIEKRISDFTFIPVENGEGLQVLHYQVGQKYEPHYDYFLDEFNTKNGGQRIATVLMYLSDVDDGGETVFPAARGNISAVPWWNELSKCGKEGLSVLPKKRDALLFWNMRPDASLDPSSLHGGCPVVKGNKWSSTKWFHVHEFKV

SEQ ID NO: 23300 - DNA, 1386 bp, Arabidopsis thaliana
  misc_feature (1)..(1386): Ceres Seq. ID no. 12324734
  misc_feature: MA Experiment ID: 108576 Result: Up-regulated in Transcription
  misc_feature: MA Experiment 108576 PARAMETER Experiment Name: At_42deg_Heat_cDNA_P Parameter: Temperature (deg C) Value: 42 vs. 22
  misc_feature: MA Experiment 108576 PARAMETER Experiment Name: At_42deg_Heat_cDNA_P Parameter: Timepoint (hr) Value: 1
  misc_feature: MA Experiment 108576 PARAMETER Experiment Name: At_42deg_Heat_cDNA_P Parameter: Tissue Value: Aerial
  misc_feature: MA Experiment ID: 108595 Result: Up-regulated in Transcription
  misc_feature: MA Experiment 108595 PARAMETER Experiment Name: At_Ler-pi_Ovule_cDNA_P Parameter: Plant Line Value: null
  misc_feature: MA Experiment ID: 20000180 Result: Up-regulated in Transcription
  misc_feature: MA Experiment 20000180 PARAMETER Experiment Name: At_Germinating_Seeds_P Parameter: Age (hr) Value: 24 vs. 0
  misc_feature: MA Experiment 20000180 PARAMETER Experiment Name: At_Germinating_Seeds_P Parameter: Tissue Value: Germinating Seeds
  misc_feature: MA Experiment ID: 20001248 Result: Down-regulated in Transcription
  misc_feature: MA Experiment 20001248 PARAMETER Experiment Name: At_Far-red-induction_P Parameter: Age (day) Value: 7
  misc_feature: MA Experiment 20001248 PARAMETER Experiment Name: At_Far-red-induction_P Parameter: Light Value: Far-red vs. White
  misc_feature: MA Experiment 20001248 PARAMETER Experiment Name: At_Far-red-induction_P Parameter: Organism Value: A. thaliana
  misc_feature: MA Experiment 20001248 PARAMETER Experiment Name: At_Far-red-induction_P Parameter: Plant Line Value: Columbia
  misc_feature: MA Experiment 20001248 PARAMETER Experiment Name: At_Far-red-induction_P Parameter: Timepoint (hr) Value: 4
  misc_feature: MA Experiment 20001248 PARAMETER Experiment Name: At_Far-red-induction_P Parameter: Tissue Value: Whole Plant
  misc_feature: MA Experiment ID: 20001911 Result: Down-regulated in Transcription
  misc_feature: MA Experiment 20001911 PARAMETER Experiment Name: At_Drought_Reproduction_P Parameter: Age (day) Value: 40
  misc_feature: MA Experiment 20001911 PARAMETER Experiment Name: At_Drought_Reproduction_P Parameter: Organism Value: A. thaliana
  misc_feature: MA Experiment 20001911 PARAMETER Experiment Name: At_Drought_Reproduction_P Parameter: Plant Line Value: WS
  misc_feature: MA Experiment 20001911 PARAMETER Experiment Name: At_Drought_Reproduction_P Parameter: Timepoint (day) Value: 10
  misc_feature: MA Experiment 20001911 PARAMETER Experiment Name: At_Drought_Reproduction_P Parameter: Tissue Value: Flowers
  misc_feature: MA Experiment 20001911 PARAMETER Experiment Name: At_Drought_Reproduction_P Parameter: Treatment Value: Drought vs. No Drought
acttcttttatctctctttctatctcacacagagtgaagaatccagagagtctctaatggcagaatgaacaaaggaattagcaatcatcttcttctcggaagagaaaaatcatggctttagaagaggaggaagagagtcaaaacgcaccgttttgtgttcttgatggtcttttctgtgaggaagagagtgagtttcacgaacaagtagatttgtgcgacgagagtgttgaaaagtttccttttttaaatctgggtttgtctgatcatgatatgttgtgggatgatgatgagttatcaactttgatttcgaaacaagaaccgtgtctttatgacgaaatcttagatgatgagtttctggttttgtgtcgtgaaaaggctcttgattggatttttaaagtgaaatctcattatgggtttaattcattgacggctcttttagctgttaattacttcgataggtttattacaagcaggaagtttcagacagataagccatggatgtctcagcttactgctttggcttgtctgtctttagctgctaaggttgaagagatccgtgttccttttctcttagattttcaagtggaagaagcaagatatgtctttgaagctaagactatacagagaatggagcttcttgttctgtctactcttgactggaggatgcatcctgtgactccaatctcgtttttcgatcacattattcgacgatacagctttaaatctcatcatcaattggagttcttgagtagatgtgaatctttattactctccattattcctgattcgagatttctgagttttagtccttctgtgttagccactgcaataatggtctctgttattagagatttgaagatgtgtgacgaagctgtataccaatctcagctcatgactctactcaaagttgattcggagaaggtaaataaatgctatgagttagtgttagaccacagtccaagcaagaaaaggatgatgaattggatgcaacaacccgctagtccgatcggtgtgtttgatgcgtcattcagttctgatagctcgaatgagtcgtgggttgtgtctgcttctgcttcagtgtcgtcttcaccatcttcagagcctttgctcaagaggagaagagtgcaagagcagcagatgaggctatcttcaataaaccgaatgtttttcgatgtgcttagtagtagtcctcgctaataatgtcaacaacccatcaaaatgtgtcggtttagttacctaaaatctgtttccatgttttacatattatcggctatatggttctcggttcttgtgtttatggacggttgcaaatggtgtacgtttcgttatttgatattctaaaaacaaagttcttttacattaaaagtttccgctggatcttacctc

SEQ ID NO: 23301 - protein, 361 aa, Arabidopsis thaliana
  peptide (1)..(361): Ceres Seq. ID no. 12324735
  misc_feature (59)..(186): Pfam Name: Cyclin, N-terminal domain Pfam Description: Cyclin, N-terminal domain
  misc_feature (43)..(337): Homolog of NCBI NO: 6448484 NR Description: cyclin D3b [Antirrhinum majus]
  misc_feature (1)..(348): Homolog of NCBI NO: 5679622 NR Description: cyclin D3.1 [Lycopersicon esculentum]
  misc_feature (1)..(358): Homolog of NCBI NO: 6434199 NR Description: CycD3;2 [Lycopersicon esculentum]
  misc_feature (16)..(361): Homolog of NCBI NO: 4160302 NR Description: cyclin D3.2 protein [Nicotiana tabacum]
  misc_feature (1)..(358): Homolog of NCBI NO: 4160300 NR Description: cyclin D3.1 protein [Nicotiana tabacum]
  misc_feature (5)..(361): Homolog of NCBI NO: 4586801 NR Description: NtcycD3-1 [Nicotiana tabacum]
  misc_feature (16)..(358): Homolog of NCBI NO: 33517432 NR Description: cyclin D3-2 [Euphorbia esula]
  misc_feature (3)..(358): Homolog of NCBI NO: 29374148 NR Description: cyclin D [Populus alba]
  misc_feature (1)..(361): Homolog of NCBI NO: 15240257 NR Description: Cyclin D3
  misc_feature (1)..(361): Homolog of NCBI NO: 15229665 NR Description: Cyclin D3
MALEEEEESQNAPFCVLDGLFCEEESEFHEQVDLCDESVEKFPFLNLGLSDHDMLWDDDELSTLISKQEPCLYDEILDDEFLVLCREKALDWIFKVKSHYGFNSLTALLAVNYFDRFITSRKFQTDKPWMSQLTALACLSLAAKVEEIRVPFLLDFQVEEARYVFEAKTIQRMELLVLSTLDWRMHPVTPISFFDHIIRRYSFKSHHQLEFLSRCESLLLSIIPDSRFLSFSPSVLATAIMVSVIRDLKMCDEAVYQSQLMTLLKVDSEKVNKCYELVLDHSPSKKRMMNWMQQPASPIGVFDASFSSDSSNESWVVSASASVSSSPSSEPLLKRRRVQEQQMRLSSINRMFFDVLSSSPR

SEQ ID NO: 23302 - protein, 308 aa, Arabidopsis thaliana
  peptide (1)..(308): Ceres Seq. ID no. 12324736
  misc_feature (6)..(133): Pfam Name: Cyclin, N-terminal domain Pfam Description: Cyclin, N-terminal domain
  misc_feature (1)..(284): Homolog of NCBI NO: 6448484 NR Description: cyclin D3b [Antirrhinum majus]
  misc_feature (1)..(295): Homolog of NCBI NO: 5679622 NR Description: cyclin D3.1 [Lycopersicon esculentum]
  misc_feature (1)..(305): Homolog of NCBI NO: 6434199 NR Description: CycD3;2 [Lycopersicon esculentum]
  misc_feature (1)..(308): Homolog of NCBI NO: 4160302 NR Description: cyclin D3.2 protein [Nicotiana tabacum]
  misc_feature (1)..(305): Homolog of NCBI NO: 4160300 NR Description: cyclin D3.1 protein [Nicotiana tabacum]
  misc_feature (1)..(308): Homolog of NCBI NO: 4586801 NR Description: NtcycD3-1 [Nicotiana tabacum]
  misc_feature (1)..(305): Homolog of NCBI NO: 33517432 NR Description: cyclin D3-2 [Euphorbia esula]
  misc_feature (1)..(305): Homolog of NCBI NO: 29374148 NR Description: cyclin D [Populus alba]
  misc_feature (1)..(308): Homolog of NCBI NO: 15240257 NR Description: Cyclin D3
  misc_feature (1)..(308): Homolog of NCBI NO: 15229665 NR Description: Cyclin D3
MLWDDDELSTLISKQEPCLYDEILDDEFLVLCREKALDWIFKVKSHYGFNSLTALLAVNYFDRFITSRKFQTDKPWMSQLTALACLSLAAKVEEIRVPFLLDFQVEEARYVFEAKTIQRMELLVLSTLDWRMHPVTPISFFDHIIRRYSFKSHHQLEFLSRCESLLLSIIPDSRFLSFSPSVLATAIMVSVIRDLKMCDEAVYQSQLMTLLKVDSEKVNKCYELVLDHSPSKKRMMNWMQQPASPIGVFDASFSSDSSNESWVVSASASVSSSPSSEPLLKRRRVQEQQMRLSSINRMFFDVLSSSPR

SEQ ID NO: 23303 - protein, 232 aa, Arabidopsis thaliana
  peptide (1)..(232): Ceres Seq. ID no. 12324737
  misc_feature (1)..(57): Pfam Name: Cyclin, N-terminal domain Pfam Description: Cyclin, N-terminal domain
  misc_feature (1)..(208): Homolog of NCBI NO: 6448484 NR Description: cyclin D3b [Antirrhinum majus]
  misc_feature (1)..(219): Homolog of NCBI NO: 5679622 NR Description: cyclin D3.1 [Lycopersicon esculentum]
  misc_feature (1)..(229): Homolog of NCBI NO: 6434199 NR Description: CycD3;2 [Lycopersicon esculentum]
  misc_feature (1)..(232): Homolog of NCBI NO: 4160302 NR Description: cyclin D3.2 protein [Nicotiana tabacum]
  misc_feature (1)..(229): Homolog of NCBI NO: 4160300 NR Description: cyclin D3.1 protein [Nicotiana tabacum]
  misc_feature (1)..(232): Homolog of NCBI NO: 4586801 NR Description: NtcycD3-1 [Nicotiana tabacum]
  misc_feature (1)..(229): Homolog of NCBI NO: 33517432 NR Description: cyclin D3-2 [Euphorbia esula]
  misc_feature (1)..(229): Homolog of NCBI NO: 29374148 NR Description: cyclin D [Populus alba]
  misc_feature (1)..(232): Homolog of NCBI NO: 15240257 NR Description: Cyclin D3
  misc_feature (1)..(232): Homolog of NCBI NO: 15229665 NR Description: Cyclin D3
MSQLTALACLSLAAKVEEIRVPFLLDFQVEEARYVFEAKTIQRMELLVLSTLDWRMHPVTPISFFDHIIRRYSFKSHHQLEFLSRCESLLLSIIPDSRFLSFSPSVLATAIMVSVIRDLKMCDEAVYQSQLMTLLKVDSEKVNKCYELVLDHSPSKKRMMNWMQQPASPIGVFDASFSSDSSNESWVVSASASVSSSPSSEPLLKRRRVQEQQMRLSSINRMFFDVLSSSPR

SEQ ID NO: 23304 - DNA, 1460 bp, Arabidopsis thaliana
  misc_feature (1)..(1460): Ceres Seq. ID no. 13592742
  misc_feature: MA Experiment ID: 108434 Result: Down-regulated in Transcription
  misc_feature: MA Experiment 108434 PARAMETER Experiment Name: At_Root_Tips_cDNA_P Parameter: Tissue Value: Root Tips
  misc_feature: MA Experiment ID: 108435 Result: Down-regulated in Transcription
  misc_feature: MA Experiment 108435 PARAMETER Experiment Name: At_stm_Mutants_cDNA_P Parameter: Plant Line Value: wt Landsburg vs stm
  misc_feature: MA Experiment 108435 PARAMETER Experiment Name: At_stm_Mutants_cDNA_P Parameter: Tissue Value: Shoot Apical Meristem Region
  misc_feature: MA Experiment ID: 108461 Result: Up-regulated in Transcription
  misc_feature: MA Experiment 108461 PARAMETER Experiment Name: At_Germinating_Seeds_cDNA_P Parameter: Age (day) Value: 1 vs. 0
  misc_feature: MA Experiment 108461 PARAMETER Experiment Name: At_Germinating_Seeds_cDNA_P Parameter: Tissue Value: Germinating Seeds
  misc_feature: MA Experiment ID: 108462 Result: Up-regulated in Transcription
  misc_feature: MA Experiment 108462 PARAMETER Experiment Name: At_Germinating_Seeds_cDNA_P Parameter: Age (day) Value: 2 vs. 0
  misc_feature: MA Experiment 108462 PARAMETER Experiment Name: At_Germinating_Seeds_cDNA_P Parameter: Tissue Value: Germinating Seeds
  misc_feature: MA Experiment ID: 108463 Result: Up-regulated in Transcription
  misc_feature: MA Experiment 108463 PARAMETER Experiment Name: At_Germinating_Seeds_cDNA_P Parameter: Age (day) Value: 3 vs. 0
  misc_feature: MA Experiment 108463 PARAMETER Experiment Name: At_Germinating_Seeds_cDNA_P Parameter: Tissue Value: Germinating Seeds
  misc_feature: MA Experiment ID: 108488 Result: Up-regulated in Transcription
  misc_feature: MA Experiment ID: 108489 Result: Down-regulated in Transcription
  misc_feature: MA Experiment ID: 108573 Result: Up-regulated in Transcription
  misc_feature: MA Experiment 108573 PARAMETER Experiment Name: At_Drought_cDNA_P Parameter: Timepoint (hr) Value: 6
  misc_feature: MA Experiment 108573 PARAMETER Experiment Name: At_Drought_cDNA_P Parameter: Tissue Value: Aerial
  misc_feature: MA Experiment 108573 PARAMETER Experiment Name: At_Drought_cDNA_P Parameter: Treatment Value: Drought vs. No Drought
  misc_feature: MA Experiment ID: 108594 Result: Down-regulated in Transcription
  misc_feature: MA Experiment 108594 PARAMETER Experiment Name: At_Ler-rhl_Root_cDNA_P Parameter: Plant Line Value: null
  misc_feature: MA Experiment ID: 108595 Result: Down-regulated in Transcription
  misc_feature: MA Experiment 108595 PARAMETER Experiment Name: At_Ler-pi_Ovule_cDNA_P Parameter: Plant Line Value: null
  misc_feature: MA Experiment ID: 20000113 Result: Down-regulated in Transcription
  misc_feature: MA Experiment 20000113 PARAMETER Experiment Name: At_42deg_Heat_cDNA_P Parameter: Temperature (deg C) Value: 42 vs. 22
  misc_feature: MA Experiment 20000113 PARAMETER Experiment Name: At_42deg_Heat_cDNA_P Parameter: Timepoint (hr) Value: 8
  misc_feature: MA Experiment 20000113 PARAMETER Experiment Name: At_42deg_Heat_cDNA_P Parameter: Tissue Value: Aerial
  misc_feature: MA Experiment ID: 20000179 Result: Up-regulated in Transcription
  misc_feature: MA Experiment 20000179 PARAMETER Experiment Name: At_Germinating_Seeds_P Parameter: Age (hr) Value: 6 vs. 0
  misc_feature: MA Experiment 20000179 PARAMETER Experiment Name: At_Germinating_Seeds_P Parameter: Tissue Value: Germinating Seeds
  misc_feature: MA Experiment ID: 20000180 Result: Up-regulated in Transcription
  misc_feature: MA Experiment 20000180 PARAMETER Experiment Name: At_Germinating_Seeds_P Parameter: Age (hr) Value: 24 vs. 0
  misc_feature: MA Experiment 20000180 PARAMETER Experiment Name: At_Germinating_Seeds_P Parameter: Tissue Value: Germinating Seeds
  misc_feature: MA Experiment ID: 20000185 Result: Down-regulated in Transcription
  misc_feature: MA Experiment 20000185 PARAMETER Experiment Name: At_Roots__P Parameter: Age (day) Value: 7 vs. 21
  misc_feature: MA Experiment 20000185 PARAMETER Experiment Name: At_Roots__P Parameter: Organism Value: A. thaliana
  misc_feature: MA Experiment 20000185 PARAMETER Experiment Name: At_Roots__P Parameter: Tissue Value: Roots vs. Whole Plant
  misc_feature: MA Experiment ID: 20000227 Result: Down-regulated in Transcription
  misc_feature: MA Experiment 20000227 PARAMETER Experiment Name: At_Root-Tips-vs-Tops_P Parameter: Tissue Value: Root Tips vs. Root Tops
  misc_feature: MA Experiment ID: 20000269 Result: Down-regulated in Transcription
  misc_feature: MA Experiment 20000269 PARAMETER Experiment Name: At_1mM_KNO3_L-vs-H_Roots_P Parameter: Age (day) Value: 7,10,12
  misc_feature: MA Experiment 20000269 PARAMETER Experiment Name: At_1mM_KNO3_L-vs-H_Roots_P Parameter: Organism Value: A. thaliana
  misc_feature: MA Experiment 20000269 PARAMETER Experiment Name: At_1mM_KNO3_L-vs-H_Roots_P Parameter: Plant Line Value: WS
  misc_feature: MA Experiment 20000269 PARAMETER Experiment Name: At_1mM_KNO3_L-vs-H_Roots_P Parameter: Timepoint (day) Value: 7,10,12
  misc_feature: MA Experiment 20000269 PARAMETER Experiment Name: At_1mM_KNO3_L-vs-H_Roots_P Parameter: Tissue Value: Roots
  misc_feature: MA Experiment 20000269 PARAMETER Experiment Name: At_1mM_KNO3_L-vs-H_Roots_P Parameter: Treatment Value: 1mM KNO3 vs. 50mM KNO3
  misc_feature: MA Experiment ID: 20000437 Result: Down-regulated in Transcription
  misc_feature: MA Experiment 20000437 PARAMETER Experiment Name: At_Drought_P Parameter: Age (day) Value: 8
  misc_feature: MA Experiment 20000437 PARAMETER Experiment Name: At_Drought_P Parameter: Organism Value: A. thaliana
  misc_feature: MA Experiment 20000437 PARAMETER Experiment Name: At_Drought_P Parameter: Plant Line Value: WS
  misc_feature: MA Experiment 20000437 PARAMETER Experiment Name: At_Drought_P Parameter: Timepoint (hr) Value: 24
  misc_feature: MA Experiment 20000437 PARAMETER Experiment Name: At_Drought_P Parameter: Tissue Value: Whole Plant
  misc_feature: MA Experiment 20000437 PARAMETER Experiment Name: At_Drought_P Parameter: Treatment Value: Drought vs. No Drought
  misc_feature: MA Experiment ID: 20000439 Result: Down-regulated in Transcription
  misc_feature: MA Experiment 20000439 PARAMETER Experiment Name: At_Roots__P Parameter: Age (day) Value: 14 vs. 21
  misc_feature: MA Experiment 20000439 PARAMETER Experiment Name: At_Roots__P Parameter: Organism Value: A. thaliana
  misc_feature: MA Experiment 20000439 PARAMETER Experiment Name: At_Roots__P Parameter: Tissue Value: Roots vs. Whole Plant
  misc_feature: MA Experiment ID: 20001557 Result: Down-regulated in Transcription
  misc_feature: MA Experiment 20001557 PARAMETER Experiment Name: At_Drought_Soil_Dry_P Parameter: Age (day) Value: 27
  misc_feature: MA Experiment 20001557 PARAMETER Experiment Name: At_Drought_Soil_Dry_P Parameter: Organism Value: A. thaliana
  misc_feature: MA Experiment 20001557 PARAMETER Experiment Name: At_Drought_Soil_Dry_P Parameter: Plant Line Value: WS
  misc_feature: MA Experiment 20001557 PARAMETER Experiment Name: At_Drought_Soil_Dry_P Parameter: Post Timepoint (hr) Value: 3
  misc_feature: MA Experiment 20001557 PARAMETER Experiment Name: At_Drought_Soil_Dry_P Parameter: Post-Treatment Value: Re-Water vs. No Drought
  misc_feature: MA Experiment 20001557 PARAMETER Experiment Name: At_Drought_Soil_Dry_P Parameter: Timepoint (day) Value: 13
  misc_feature: MA Experiment 20001557 PARAMETER Experiment Name: At_Drought_Soil_Dry_P Parameter: Treatment Value: Drought vs. No Drought
  misc_feature: MA Experiment ID: 20001558 Result: Down-regulated in Transcription
  misc_feature: MA Experiment 20001558 PARAMETER Experiment Name: At_Drought_Soil_Dry_P Parameter: Age (day) Value: 27
  misc_feature: MA Experiment 20001558 PARAMETER Experiment Name: At_Drought_Soil_Dry_P Parameter: Organism Value: A. thaliana
  misc_feature: MA Experiment 20001558 PARAMETER Experiment Name: At_Drought_Soil_Dry_P Parameter: Plant Line Value: WS
  misc_feature: MA Experiment 20001558 PARAMETER Experiment Name: At_Drought_Soil_Dry_P Parameter: Post Timepoint (hr) Value: 6
  misc_feature: MA Experiment 20001558 PARAMETER Experiment Name: At_Drought_Soil_Dry_P Parameter: Post-Treatment Value: Re-Water vs. No Drought
  misc_feature: MA Experiment 20001558 PARAMETER Experiment Name: At_Drought_Soil_Dry_P Parameter: Timepoint (day) Value: 13
  misc_feature: MA Experiment 20001558 PARAMETER Experiment Name: At_Drought_Soil_Dry_P Parameter: Treatment Value: Drought vs. No Drought
  misc_feature: MA Experiment ID: 20001559 Result: Down-regulated in Transcription
  misc_feature: MA Experiment 20001559 PARAMETER Experiment Name: At_Drought_Soil_Dry_P Parameter: Age (day) Value: 28
  misc_feature: MA Experiment 20001559 PARAMETER Experiment Name: At_Drought_Soil_Dry_P Parameter: Organism Value: A. thaliana
  misc_feature: MA Experiment 20001559 PARAMETER Experiment Name: At_Drought_Soil_Dry_P Parameter: Plant Line Value: WS
  misc_feature: MA Experiment 20001559 PARAMETER Experiment Name: At_Drought_Soil_Dry_P Parameter: Post Timepoint (hr) Value: 29
  misc_feature: MA Experiment 20001559 PARAMETER Experiment Name: At_Drought_Soil_Dry_P Parameter: Post-Treatment Value: Re-Water vs. No Drought
  misc_feature: MA Experiment 20001559 PARAMETER Experiment Name: At_Drought_Soil_Dry_P Parameter: Timepoint (day) Value: 14
  misc_feature: MA Experiment 20001559 PARAMETER Experiment Name: At_Drought_Soil_Dry_P Parameter: Treatment Value: Drought vs. No Drought
  misc_feature: MA Experiment ID: 20001560 Result: Down-regulated in Transcription
  misc_feature: MA Experiment 20001560 PARAMETER Experiment Name: At_Drought_Soil_Dry_P Parameter: Age (day) Value: 28
  misc_feature: MA Experiment 20001560 PARAMETER Experiment Name: At_Drought_Soil_Dry_P Parameter: Organism Value: A. thaliana
  misc_feature: MA Experiment 20001560 PARAMETER Experiment Name: At_Drought_Soil_Dry_P Parameter: Plant Line Value: WS
  misc_feature: MA Experiment 20001560 PARAMETER Experiment Name: At_Drought_Soil_Dry_P Parameter: Post Timepoint (hr) Value: None
  misc_feature: MA Experiment 20001560 PARAMETER Experiment Name: At_Drought_Soil_Dry_P Parameter: Post-Treatment Value: None
  misc_feature: MA Experiment 20001560 PARAMETER Experiment Name: At_Drought_Soil_Dry_P Parameter: Timepoint (day) Value: 14
  misc_feature: MA Experiment 20001560 PARAMETER Experiment Name: At_Drought_Soil_Dry_P Parameter: Treatment Value: Drought vs. No Drought
  misc_feature: MA Experiment ID: 20001757 Result: Up-regulated in Transcription
  misc_feature: MA Experiment 20001757 PARAMETER Experiment Name: At_50mM_NH4NO3_L-to-H_P Parameter: Timepoint (hr) Value: 6
  misc_feature: MA Experiment 20001757 PARAMETER Experiment Name: At_50mM_NH4NO3_L-to-H_P Parameter: Tissue Value: Leaf
  misc_feature: MA Experiment 20001757 PARAMETER Experiment Name: At_50mM_NH4NO3_L-to-H_P Parameter: Treatment Value: 50mM NH4NO3 vs 100mM Mannitol
  misc_feature: MA Experiment ID: 20001904 Result: Down-regulated in Transcription
  misc_feature: MA Experiment 20001904 PARAMETER Experiment Name: At_Drought_Reproduction_P Parameter: Age (day) Value: 37
  misc_feature: MA Experiment 20001904 PARAMETER Experiment Name: At_Drought_Reproduction_P Parameter: Organism Value: A. thaliana
  misc_feature: MA Experiment 20001904 PARAMETER Experiment Name: At_Drought_Reproduction_P Parameter: Plant Line Value: WS
  misc_feature: MA Experiment 20001904 PARAMETER Experiment Name: At_Drought_Reproduction_P Parameter: Timepoint (day) Value: 7
  misc_feature: MA Experiment 20001904 PARAMETER Experiment Name: At_Drought_Reproduction_P Parameter: Tissue Value: Rosettes
  misc_feature: MA Experiment 20001904 PARAMETER Experiment Name: At_Drought_Reproduction_P Parameter: Treatment Value: Drought vs. No Drought
  misc_feature: MA Experiment ID: 20001905 Result: Down-regulated in Transcription
  misc_feature: MA Experiment 20001905 PARAMETER Experiment Name: At_Drought_Reproduction_P Parameter: Age (day) Value: 40
  misc_feature: MA Experiment 20001905 PARAMETER Experiment Name: At_Drought_Reproduction_P Parameter: Organism Value: A. thaliana
  misc_feature: MA Experiment 20001905 PARAMETER Experiment Name: At_Drought_Reproduction_P Parameter: Plant Line Value: WS
  misc_feature: MA Experiment 20001905 PARAMETER Experiment Name: At_Drought_Reproduction_P Parameter: Timepoint (day) Value: 10
  misc_feature: MA Experiment 20001905 PARAMETER Experiment Name: At_Drought_Reproduction_P Parameter: Tissue Value: Rosettes
  misc_feature: MA Experiment 20001905 PARAMETER Experiment Name: At_Drought_Reproduction_P Parameter: Treatment Value: Drought vs. No Drought
  misc_feature: MA Experiment ID: 20001906 Result: Down-regulated in Transcription
  misc_feature: MA Experiment 20001906 PARAMETER Experiment Name: At_Drought_Reproduction_P Parameter: Age (day) Value: 35
  misc_feature: MA Experiment 20001906 PARAMETER Experiment Name: At_Drought_Reproduction_P Parameter: Organism Value: A. thaliana
  misc_feature: MA Experiment 20001906 PARAMETER Experiment Name: At_Drought_Reproduction_P Parameter: Plant Line Value: WS
  misc_feature: MA Experiment 20001906 PARAMETER Experiment Name: At_Drought_Reproduction_P Parameter: Timepoint (day) Value: 5
  misc_feature: MA Experiment 20001906 PARAMETER Experiment Name: At_Drought_Reproduction_P Parameter: Tissue Value: Siliques
  misc_feature: MA Experiment 20001906 PARAMETER Experiment Name: At_Drought_Reproduction_P Parameter: Treatment Value: Drought vs. No Drought
  misc_feature: MA Experiment ID: 20001908 Result: Down-regulated in Transcription
  misc_feature: MA Experiment 20001908 PARAMETER Experiment Name: At_Drought_Reproduction_P Parameter: Age (day) Value: 40
  misc_feature: MA Experiment 20001908 PARAMETER Experiment Name: At_Drought_Reproduction_P Parameter: Organism Value: A. thaliana
  misc_feature: MA Experiment 20001908 PARAMETER Experiment Name: At_Drought_Reproduction_P Parameter: Plant Line Value: WS
  misc_feature: MA Experiment 20001908 PARAMETER Experiment Name: At_Drought_Reproduction_P Parameter: Timepoint (day) Value: 10
  misc_feature: MA Experiment 20001908 PARAMETER Experiment Name: At_Drought_Reproduction_P Parameter: Tissue Value: Siliques
  misc_feature: MA Experiment 20001908 PARAMETER Experiment Name: At_Drought_Reproduction_P Parameter: Treatment Value: Drought vs. No Drought
ctctttgctctcactatcaaaactctgaatttcgatttcaatggagtcacgcgtgctgttacgcgccaccgcgaatgtcgttggaattccgaaattgagacgaccaatcggagcgatccaccgtcaattcagcactgcatcgtcttcctcgttctcggttaaaccaatcggaggaatcggagagggagcgaatctgatctccggtcgtcagcttcgtccaattcttcttctcgattcgtcggcgatcaacggaggagagaaaagagagattctcaaaccggttaaagccgccgctgctgaaggtggagataccgctggggaagctaaagttggattcctcgccaagtatccatggctagtcactggattcttcttcttcatgtggtacttcttaaatgtgattttcaacatccttaacaagaagatctataattacttcccttatccctattttgtatcggtgatacacttgttcgtgggagttgtttactgcttgatcagctggtccgtgggtcttcctaaacgtgccccgattgactcgaacctcctcaaggtattgataccagtcgcagtctgtcacgccttaggccatgtcactagcaatgtctctttcgctgcggttgctgtctccttcactcacaccatcaaagcacttgagccattcttcaatgcggctgcttctcaattcattatgggacaatccatccccataacactatggttgtctctagctcctgttgttcttggtgttgcaatggcttcactaactgagctatcattcaactggctcggtttcatcagtgctatgatatcaaacatttctttcacttaccgaagcatcttctccaagaaagccatgactgatatggacagtacaaatgtctacgcttacatctccatcatcgcactcttcgtctgcattcctcctgccatcatcgttgaaggtcctaaactacttaaccatggtttcgccgacgcgattgctaaagttggaatgactaaattcatctctgatctcttctgggttggaatgttttaccatctctacaatcagctggctaccaataccttggagagggttgcaccgctgactcacgcggttggaaacgttctgaaacgtgtgttcgtgatcggtttctccatcgttatcttcggaaacaagatatcgacacagacaggtataggaacaggaatagccattgctggagttgcaatgtactctatcattaaggccaagatcgaagaagagaaacggcaaggaaagaaagcatagaaagcagctgaagacggcggtcgacagttgcataaacaagttctccgatggatatatatatctatataataaataaccaaatgcaatagtatgttgtattgtaccatcaaccattgttttcgagtttttcctttctttgttttttttttgctttctgaaaagttatatataaattttttattctgcc

SEQ ID NO: 23305 - protein, 410 aa, Arabidopsis thaliana
  peptide (1)..(410): Ceres Seq. ID no. 13592743
  misc_feature (1)..(410): Homolog of NCBI NO: 1352199 NR Description: Triose phosphate/phosphate translocator,
  misc_feature (1)..(410): Homolog of NCBI NO: 1352198 NR Description: TRIOSE PHOSPHATE/PHOSPHATE TRANSLOCATOR,
  misc_feature (1)..(410): Homolog of NCBI NO: 117290 NR Description: TRIOSE PHOSPHATE/PHOSPHATE TRANSLOCATOR,
  misc_feature (1)..(408): Homolog of NCBI NO: 117291 NR Description: TRIOSE PHOSPHATE/PHOSPHATE TRANSLOCATOR,
  misc_feature (1)..(410): Homolog of NCBI NO: 629694 NR Description: phosphate translocator, chloroplast - common
  misc_feature (1)..(410): Homolog of NCBI NO: 9295273 NR Description: triose phosphate/phosphate translocator precursor
  misc_feature (1)..(410): Homolog of NCBI NO: 1706107 NR Description: TRIOSE PHOSPHATE/PHOSPHATE TRANSLOCATOR,
  misc_feature (1)..(405): Homolog of NCBI NO: 9757731 NR Description: phosphate/triose-phosphate translocator precursor
  misc_feature (1)..(410): Homolog of NCBI NO: 30694881 NR Description: phosphate/triose-phosphate translocator, putative
  misc_feature (1)..(410): Homolog of NCBI NO: 21593093 NR Description: phosphate/triose-phosphate translocator precursor
MESRVLLRATANVVGIPKLRRPIGAIHRQFSTASSSSFSVKPIGGIGEGANLISGRQLRPILLLDSSAINGGEKREILKPVKAAAAEGGDTAGEAKVGFLAKYPWLVTGFFFFMWYFLNVIFNILNKKIYNYFPYPYFVSVIHLFVGVVYCLISWSVGLPKRAPIDSNLLKVLIPVAVCHALGHVTSNVSFAAVAVSFTHTIKALEPFFNAAASQFIMGQSIPITLWLSLAPVVLGVAMASLTELSFNWLGFISAMISNISFTYRSIFSKKAMTDMDSTNVYAYISIIALFVCIPPAIIVEGPKLLNHGFADAIAKVGMTKFISDLFWVGMFYHLYNQLATNTLERVAPLTHAVGNVLKRVFVIGFSIVIFGNKISTQTGIGTGIAIAGVAMYSIIKAKIEEEKRQGKKA

SEQ ID NO: 23306 - protein, 297 aa, Arabidopsis thaliana
  peptide (1)..(297): Ceres Seq. ID no. 13592744
  misc_feature (1)..(297): Homolog of NCBI NO: 1352199 NR Description: Triose phosphate/phosphate translocator,
  misc_feature (1)..(297): Homolog of NCBI NO: 1352198 NR Description: TRIOSE PHOSPHATE/PHOSPHATE TRANSLOCATOR,
  misc_feature (1)..(297): Homolog of NCBI NO: 117290 NR Description: TRIOSE PHOSPHATE/PHOSPHATE TRANSLOCATOR,
  misc_feature (1)..(295): Homolog of NCBI NO: 117291 NR Description: TRIOSE PHOSPHATE/PHOSPHATE TRANSLOCATOR,
  misc_feature (1)..(297): Homolog of NCBI NO: 629694 NR Description: phosphate translocator, chloroplast - common
  misc_feature (1)..(297): Homolog of NCBI NO: 9295273 NR Description: triose phosphate/phosphate translocator precursor
  misc_feature (1)..(297): Homolog of NCBI NO: 1706107 NR Description: TRIOSE PHOSPHATE/PHOSPHATE TRANSLOCATOR,
  misc_feature (1)..(292): Homolog of NCBI NO: 9757731 NR Description: phosphate/triose-phosphate translocator precursor
  misc_feature (1)..(297): Homolog of NCBI NO: 30694881 NR Description: phosphate/triose-phosphate translocator, putative
  misc_feature (1)..(297): Homolog of NCBI NO: 21593093 NR Description: phosphate/triose-phosphate translocator precursor
MWYFLNVIFNILNKKIYNYFPYPYFVSVIHLFVGVVYCLISWSVGLPKRAPIDSNLLKVLIPVAVCHALGHVTSNVSFAAVAVSFTHTIKALEPFFNAAASQFIMGQSIPITLWLSLAPVVLGVAMASLTELSFNWLGFISAMISNISFTYRSIFSKKAMTDMDSTNVYAYISIIALFVCIPPAIIVEGPKLLNHGFADAIAKVGMTKFISDLFWVGMFYHLYNQLATNTLERVAPLTHAVGNVLKRVFVIGFSIVIFGNKISTQTGIGTGIAIAGVAMYSIIKAKIEEEKRQGKKA

SEQ ID NO: 23307 - DNA, 588 bp, Arabidopsis thaliana
  misc_feature (1)..(588): Ceres Seq. ID no. 13621944
  misc_feature: MA Experiment ID: 108434 Result: Up-regulated in Transcription
  misc_feature: MA Experiment 108434 PARAMETER Experiment Name: At_Root_Tips_cDNA_P Parameter: Tissue Value: Root Tips
  misc_feature: MA Experiment ID: 108462 Result: Down-regulated in Transcription
  misc_feature: MA Experiment 108462 PARAMETER Experiment Name: At_Germinating_Seeds_cDNA_P Parameter: Age (day) Value: 2 vs. 0
  misc_feature: MA Experiment 108462 PARAMETER Experiment Name: At_Germinating_Seeds_cDNA_P Parameter: Tissue Value: Germinating Seeds
  misc_feature: MA Experiment ID: 108463 Result: Down-regulated in Transcription
  misc_feature: MA Experiment 108463 PARAMETER Experiment Name: At_Germinating_Seeds_cDNA_P Parameter: Age (day) Value: 3 vs. 0
  misc_feature: MA Experiment 108463 PARAMETER Experiment Name: At_Germinating_Seeds_cDNA_P Parameter: Tissue Value: Germinating Seeds
  misc_feature: MA Experiment ID: 108573 Result: Down-regulated in Transcription
  misc_feature: MA Experiment 108573 PARAMETER Experiment Name: At_Drought_cDNA_P Parameter: Timepoint (hr) Value: 6
  misc_feature: MA Experiment 108573 PARAMETER Experiment Name: At_Drought_cDNA_P Parameter: Tissue Value: Aerial
  misc_feature: MA Experiment 108573 PARAMETER Experiment Name: At_Drought_cDNA_P Parameter: Treatment Value: Drought vs. No Drought
  misc_feature: MA Experiment ID: 20000264 Result: Up-regulated in Transcription
  misc_feature: MA Experiment 20000264 PARAMETER Experiment Name: At_Open_Flower_P Parameter: Age (day) Value: 21
  misc_feature: MA Experiment 20000264 PARAMETER Experiment Name: At_Open_Flower_P Parameter: Plant Line Value: WS
  misc_feature: MA Experiment 20000264 PARAMETER Experiment Name: At_Open_Flower_P Parameter: Tissue Value: Open Flower vs. Whole Plant
  misc_feature: MA Experiment ID: 20000573 Result: Up-regulated in Transcription
  misc_feature: MA Experiment 20000573 PARAMETER Experiment Name: At_100uM_ABA_Mutants__P Parameter: Organism Value: A. thaliana
  misc_feature: MA Experiment 20000573 PARAMETER Experiment Name: At_100uM_ABA_Mutants__P Parameter: Plant Line Value: CS22 vs. Ler wt
  misc_feature: MA Experiment 20000573 PARAMETER Experiment Name: At_100uM_ABA_Mutants__P Parameter: Timepoint (hr) Value: N/A
  misc_feature: MA Experiment 20000573 PARAMETER Experiment Name: At_100uM_ABA_Mutants__P Parameter: Tissue Value: Whole Plant
  misc_feature: MA Experiment 20000573 PARAMETER Experiment Name: At_100uM_ABA_Mutants__P Parameter: Treatment Value: None
  misc_feature: MA Experiment ID: 20001558 Result: Up-regulated in Transcription
  misc_feature: MA Experiment 20001558 PARAMETER Experiment Name: At_Drought_Soil_Dry_P Parameter: Age (day) Value: 27
  misc_feature: MA Experiment 20001558 PARAMETER Experiment Name: At_Drought_Soil_Dry_P Parameter: Organism Value: A. thaliana
  misc_feature: MA Experiment 20001558 PARAMETER Experiment Name: At_Drought_Soil_Dry_P Parameter: Plant Line Value: WS
  misc_feature: MA Experiment 20001558 PARAMETER Experiment Name: At_Drought_Soil_Dry_P Parameter: Post Timepoint (hr) Value: 6
  misc_feature: MA Experiment 20001558 PARAMETER Experiment Name: At_Drought_Soil_Dry_P Parameter: Post-Treatment Value: Re-Water vs. No Drought
  misc_feature: MA Experiment 20001558 PARAMETER Experiment Name: At_Drought_Soil_Dry_P Parameter: Timepoint (day) Value: 13
  misc_feature: MA Experiment 20001558 PARAMETER Experiment Name: At_Drought_Soil_Dry_P Parameter: Treatment Value: Drought vs. No Drought
  misc_feature: MA Experiment ID: 20001560 Result: Up-regulated in Transcription
  misc_feature: MA Experiment 20001560 PARAMETER Experiment Name: At_Drought_Soil_Dry_P Parameter: Age (day) Value: 28
  misc_feature: MA Experiment 20001560 PARAMETER Experiment Name: At_Drought_Soil_Dry_P Parameter: Organism Value: A. thaliana
  misc_feature: MA Experiment 20001560 PARAMETER Experiment Name: At_Drought_Soil_Dry_P Parameter: Plant Line Value: WS
  misc_feature: MA Experiment 20001560 PARAMETER Experiment Name: At_Drought_Soil_Dry_P Parameter: Post Timepoint (hr) Value: None
  misc_feature: MA Experiment 20001560 PARAMETER Experiment Name: At_Drought_Soil_Dry_P Parameter: Post-Treatment Value: None
  misc_feature: MA Experiment 20001560 PARAMETER Experiment Name: At_Drought_Soil_Dry_P Parameter: Timepoint (day) Value: 14
  misc_feature: MA Experiment 20001560 PARAMETER Experiment Name: At_Drought_Soil_Dry_P Parameter: Treatment Value: Drought vs. No Drought
  misc_feature: MA Experiment ID: 20001757 Result: Up-regulated in Transcription
  misc_feature: MA Experiment 20001757 PARAMETER Experiment Name: At_50mM_NH4NO3_L-to-H_P Parameter: Timepoint (hr) Value: 6
  misc_feature: MA Experiment 20001757 PARAMETER Experiment Name: At_50mM_NH4NO3_L-to-H_P Parameter: Tissue Value: Leaf
  misc_feature: MA Experiment 20001757 PARAMETER Experiment Name: At_50mM_NH4NO3_L-to-H_P Parameter: Treatment Value: 50mM NH4NO3 vs 100mM Mannitol
acacttcttcatcgccgtctgcacaaaaccctaatctcacaatctcctacgagatctatcagtctccacgaagatgaaggttgttgccgcatacttgctcgctgttttgagcggaaaagcttcaccaaccagtgccgatatcaagactatccttggatcagttggtgctgagacagaggattctcagattgagcttttgttgaaggaagtgaaaggaaaagatttggctgagttgattgctgctggaagggagaagttagcttcagtgccgtctggtggcggaggtggtgttgcggttgcttctgctacatctggaggtggaggaggtggtggtgcttctgctgctgagtccaagaaagaagagaagaaggaagaaaaggaagaatccgatgatgacatgggtttcagtctattcgagtaagctggtagtagcatgaaaagtccggttttgttgtcctcttttaatattgtaaccttttgaaatctatatgttgttgttgtttagtttgtattcgatcatcttttttagacattgctgaaattctcaagagtttttgacccgaatgtcatttgcactttgttgttagc

SEQ ID NO: 23308 - protein, 115 aa, Arabidopsis thaliana
  peptide (1)..(115): Ceres Seq. ID no. 13621945
  misc_feature (17)..(114): Pfam Name: 60s Acidic ribosomal protein Pfam Description: 60s Acidic ribosomal protein
  misc_feature (1)..(115): Homolog of NCBI NO: 899610 NR Description: acidic ribosomal protein P2
  misc_feature (1)..(115): Homolog of NCBI NO: 1173073 NR Description: 60S ACIDIC RIBOSOMAL PROTEIN P2A (P2)
  misc_feature (1)..(115): Homolog of NCBI NO: 730583 NR Description: 60S acidic ribosomal protein P2
  misc_feature (1)..(115): Homolog of NCBI NO: 32400796 NR Description: acidic ribosomal protein [Triticum aestivum]
  misc_feature (1)..(115): Homolog of NCBI NO: 15230454 NR Description: 60S acidic ribosomal protein P2 (RPP2D)
  misc_feature (1)..(115): Homolog of NCBI NO: 34906408 NR Description: putative 60S acidic ribosomal protein P2A
  misc_feature (1)..(115): Homolog of NCBI NO: 24473796 NR Description: 60s acidic ribosomal protein [Prunus dulcis]
  misc_feature (1)..(115): Homolog of NCBI NO: 15226231 NR Description: 60S acidic ribosomal protein P2 (RPP2A)
  misc_feature (1)..(115): Homolog of NCBI NO: 21593095 NR Description: 60S acidic ribosomal protein P2 [Arabidopsis
  misc_feature (1)..(115): Homolog of NCBI NO: 15226230 NR Description: 60S acidic ribosomal protein P2 (RPP2B)
MKVVAAYLLAVLSGKASPTSADIKTILGSVGAETEDSQIELLLKEVKGKDLAELIAAGREKLASVPSGGGGGVAVASATSGGGGGGGASAAESKKEEKKEEKEESDDDMGFSLFE

SEQ ID NO: 23309 - DNA, 1209 bp, Arabidopsis thaliana
  misc_feature (1)..(1209): Ceres Seq. ID no. 12324461
  misc_feature: MA Experiment ID: 108461 Result: Up-regulated in Transcription
  misc_feature: MA Experiment 108461 PARAMETER Experiment Name: At_Germinating_Seeds_cDNA_P Parameter: Age (day) Value: 1 vs. 0
  misc_feature: MA Experiment 108461 PARAMETER Experiment Name: At_Germinating_Seeds_cDNA_P Parameter: Tissue Value: Germinating Seeds
  misc_feature: MA Experiment ID: 108462 Result: Up-regulated in Transcription
  misc_feature: MA Experiment 108462 PARAMETER Experiment Name: At_Germinating_Seeds_cDNA_P Parameter: Age (day) Value: 2 vs. 0
  misc_feature: MA Experiment 108462 PARAMETER Experiment Name: At_Germinating_Seeds_cDNA_P Parameter: Tissue Value: Germinating Seeds
  misc_feature: MA Experiment ID: 108463 Result: Up-regulated in Transcription
  misc_feature: MA Experiment 108463 PARAMETER Experiment Name: At_Germinating_Seeds_cDNA_P Parameter: Age (day) Value: 3 vs. 0
  misc_feature: MA Experiment 108463 PARAMETER Experiment Name: At_Germinating_Seeds_cDNA_P Parameter: Tissue Value: Germinating Seeds
  misc_feature: MA Experiment ID: 108464 Result: Up-regulated in Transcription
  misc_feature: MA Experiment 108464 PARAMETER Experiment Name: At_Germinating_Seeds_cDNA_P Parameter: Age (day) Value: 4 vs. 0
  misc_feature: MA Experiment 108464 PARAMETER Experiment Name: At_Germinating_Seeds_cDNA_P Parameter: Tissue Value: Germinating Seeds
  misc_feature: MA Experiment ID: 108488 Result: Up-regulated in Transcription
  misc_feature: MA Experiment ID: 108579 Result: Up-regulated in Transcription
  misc_feature: MA Experiment 108579 PARAMETER Experiment Name: At_4deg_Cold_cDNA_P Parameter: Temperature (deg C) Value: 4 vs. 22
  misc_feature: MA Experiment 108579 PARAMETER Experiment Name: At_4deg_Cold_cDNA_P Parameter: Timepoint (hr) Value: 6
  misc_feature: MA Experiment 108579 PARAMETER Experiment Name: At_4deg_Cold_cDNA_P Parameter: Tissue Value: Aerial
  misc_feature: MA Experiment ID: 108585 Result: Down-regulated in Transcription
  misc_feature: MA Experiment 108585 PARAMETER Experiment Name: At_5mM_NaNP_cDNA_P Parameter: Timepoint (hr) Value: 6
  misc_feature: MA Experiment 108585 PARAMETER Experiment Name: At_5mM_NaNP_cDNA_P Parameter: Tissue Value: Aerial
  misc_feature: MA Experiment 108585 PARAMETER Experiment Name: At_5mM_NaNP_cDNA_P Parameter: Treatment Value: null
  misc_feature: MA Experiment ID: 108595 Result: Down-regulated in Transcription
  misc_feature: MA Experiment 108595 PARAMETER Experiment Name: At_Ler-pi_Ovule_cDNA_P Parameter: Plant Line Value: null
  misc_feature: MA Experiment ID: 20000179 Result: Up-regulated in Transcription
  misc_feature: MA Experiment 20000179 PARAMETER Experiment Name: At_Germinating_Seeds_P Parameter: Age (hr) Value: 6 vs. 0
  misc_feature: MA Experiment 20000179 PARAMETER Experiment Name: At_Germinating_Seeds_P Parameter: Tissue Value: Germinating Seeds
  misc_feature: MA Experiment ID: 20000180 Result: Up-regulated in Transcription
  misc_feature: MA Experiment 20000180 PARAMETER Experiment Name: At_Germinating_Seeds_P Parameter: Age (hr) Value: 24 vs. 0
  misc_feature: MA Experiment 20000180 PARAMETER Experiment Name: At_Germinating_Seeds_P Parameter: Tissue Value: Germinating Seeds
  misc_feature: MA Experiment ID: 20000184 Result: Up-regulated in Transcription
  misc_feature: MA Experiment 20000184 PARAMETER Experiment Name: At_Shoots__P Parameter: Age (day) Value: 7
  misc_feature: MA Experiment 20000184 PARAMETER Experiment Name: At_Shoots__P Parameter: Tissue Value: Shoots vs. Whole Plant
  misc_feature: MA Experiment ID: 20000185 Result: Down-regulated in Transcription
  misc_feature: MA Experiment 20000185 PARAMETER Experiment Name: At_Roots__P Parameter: Age (day) Value: 7 vs. 21
  misc_feature: MA Experiment 20000185 PARAMETER Experiment Name: At_Roots__P Parameter: Organism Value: A. thaliana
  misc_feature: MA Experiment 20000185 PARAMETER Experiment Name: At_Roots__P Parameter: Tissue Value: Roots vs. Whole Plant
  misc_feature: MA Experiment ID: 20000438 Result: Up-regulated in Transcription
  misc_feature: MA Experiment 20000438 PARAMETER Experiment Name: At_Shoots__P Parameter: Age (day) Value: 14
  misc_feature: MA Experiment 20000438 PARAMETER Experiment Name: At_Shoots__P Parameter: Tissue Value: Shoots vs. Whole Plant
  misc_feature: MA Experiment ID: 20000527 Result: Up-regulated in Transcription
  misc_feature: MA Experiment 20000527 PARAMETER Experiment Name: At_10percent_PEG_P Parameter: Age (day) Value: 20
  misc_feature: MA Experiment 20000527 PARAMETER Experiment Name: At_10percent_PEG_P Parameter: Organism Value: A. thaliana
  misc_feature: MA Experiment 20000527 PARAMETER Experiment Name: At_10percent_PEG_P Parameter: Plant Line Value: WS
  misc_feature: MA Experiment 20000527 PARAMETER Experiment Name: At_10percent_PEG_P Parameter: Timepoint (day) Value: 20
  misc_feature: MA Experiment 20000527 PARAMETER Experiment Name: At_10percent_PEG_P Parameter: Tissue Value: Whole Plant
  misc_feature: MA Experiment 20000527 PARAMETER Experiment Name: At_10percent_PEG_P Parameter: Treatment Value: 10percent PEG vs. No Treatment
  misc_feature: MA Experiment ID: 20001248 Result: Down-regulated in Transcription
  misc_feature: MA Experiment 20001248 PARAMETER Experiment Name: At_Far-red-induction_P Parameter: Age (day) Value: 7
  misc_feature: MA Experiment 20001248 PARAMETER Experiment Name: At_Far-red-induction_P Parameter: Light Value: Far-red vs. White
  misc_feature: MA Experiment 20001248 PARAMETER Experiment Name: At_Far-red-induction_P Parameter: Organism Value: A. thaliana
  misc_feature: MA Experiment 20001248 PARAMETER Experiment Name: At_Far-red-induction_P Parameter: Plant Line Value: Columbia
  misc_feature: MA Experiment 20001248 PARAMETER Experiment Name: At_Far-red-induction_P Parameter: Timepoint (hr) Value: 4
  misc_feature: MA Experiment 20001248 PARAMETER Experiment Name: At_Far-red-induction_P Parameter: Tissue Value: Whole Plant
  misc_feature: MA Experiment ID: 20001450 Result: Down-regulated in Transcription
  misc_feature: MA Experiment 20001450 PARAMETER Experiment Name: At_Far-red-induction_P Parameter: Age (day) Value: 7
  misc_feature: MA Experiment 20001450 PARAMETER Experiment Name: At_Far-red-induction_P Parameter: Light Value: Far-red vs. White
  misc_feature: MA Experiment 20001450 PARAMETER Experiment Name: At_Far-red-induction_P Parameter: Organism Value: A. thaliana
  misc_feature: MA Experiment 20001450 PARAMETER Experiment Name: At_Far-red-induction_P Parameter: Plant Line Value: Columbia
  misc_feature: MA Experiment 20001450 PARAMETER Experiment Name: At_Far-red-induction_P Parameter: Timepoint (hr) Value: 8
  misc_feature: MA Experiment 20001450 PARAMETER Experiment Name: At_Far-red-induction_P Parameter: Tissue Value: Whole Plant
aagcgtggcaagtttaggatcacaggtcaatagagtgaaaaatgatcccaaactgaaaagagatgtcatcttctgaaacaggggaagttgcagagaatctagcgagaccaatggctactctggtctcgtctcaaacttacatctaccattgtcatattagtaaacaagctctttatcaggcaaaagaatcatactctcatcgtagaatttcccgtcataatcacagagaaagactcgatttttctcatagaaaccatagattgacaataactagaaagcagcaacctttgtctttcaacaccgtgtgttttgccgcagacgagccctccgaaatcagtgctgatgctagaatccgtagtgaggttctgtctccgttcagatcagtccgtatgttcttctacctcgcctttatagcaagcggttcattaggagaactaatagccacttctaggctcataggtaccctggcgaatccggctagatcaggtgaagttcttgagatcgttaagggtttgggagttgacattggtgctgcttctctctttgcgttcctatacttcaacgaaaacaagaccaagaacgcgcaaatggctaggctctcgagggaagagaatcttggcaaactcaaaatgagagtcgaagagaacaataaggtaatctccgtaggtgatctgagaggggttgctaggcttgtgatctgtgctggtcctgcggagtttattgaagaagcgtttaagagaagtaaagagtatacacaagggctcgtggagagaggtgtggttgtggtggcttatgctacggatgggaattcaccggttttggagtttgatgaaactgacattgcggatgaagaaatgagccagagaaggaagaaactgtggcgggtgactccggtttttgtcccggaatgggaaaagtggttaaatgagcagaagaagcttgccaatgtttcctcagactctccagtgtatttgtctctgcgtttggatgggcgtgtaagggcaagtggagtgggttatcctccatggcaagccttcgttgcacagcttcctccggttaagggaatgtggaccggtcttcttgacggtatggatggtagagtgtaaatactctaatacttagggataaagtcatatgttttttagtctcctataaattttataaaatgtatagttatgaaaagattttgacttcaaaattattatttcc

SEQ ID NO: 23310 - protein, 347 aa, Arabidopsis thaliana
  peptide (1)..(347): Ceres Seq. ID no. 12324462
  misc_feature (282)..(332): Homolog of NCBI NO: 15218638 NR Description: hypothetical protein; protein id: At1g02910.1
  misc_feature (94)..(242): Homolog of NCBI NO: 15218638 NR Description: hypothetical protein; protein id: At1g02910.1
  misc_feature (82)..(347): Homolog of NCBI NO: 32489514 NR Description: OSJNBa0043L24.5 [Oryza sativa (japonica
  misc_feature (17)..(347): Homolog of NCBI NO: 7485530 NR Description: hypothetical protein F16A16.150 - Arabidopsis
  misc_feature (1)..(347): Homolog of NCBI NO: 18417257 NR Description: expressed protein
  misc_feature (1)..(347): Homolog of NCBI NO: 15081662 NR Description: AT4g28740/F16A16_150 [Arabidopsis thaliana]
MSSSETGEVAENLARPMATLVSSQTYIYHCHISKQALYQAKESYSHRRISRHNHRERLDFSHRNHRLTITRKQQPLSFNTVCFAADEPSEISADARIRSEVLSPFRSVRMFFYLAFIASGSLGELIATSRLIGTLANPARSGEVLEIVKGLGVDIGAASLFAFLYFNENKTKNAQMARLSREENLGKLKMRVEENNKVISVGDLRGVARLVICAGPAEFIEEAFKRSKEYTQGLVERGVVVVAYATDGNSPVLEFDETDIADEEMSQRRKKLWRVTPVFVPEWEKWLNEQKKLANVSSDSPVYLSLRLDGRVRASGVGYPPWQAFVAQLPPVKGMWTGLLDGMDGRV

SEQ ID NO: 23311 - protein, 331 aa, Arabidopsis thaliana
  peptide (1)..(331): Ceres Seq. ID no. 12324463
  misc_feature (266)..(316): Homolog of NCBI NO: 15218638 NR Description: hypothetical protein; protein id: At1g02910.1
  misc_feature (78)..(226): Homolog of NCBI NO: 15218638 NR Description: hypothetical protein; protein id: At1g02910.1
  misc_feature (66)..(331): Homolog of NCBI NO: 32489514 NR Description: OSJNBa0043L24.5 [Oryza sativa (japonica
  misc_feature (1)..(331): Homolog of NCBI NO: 7485530 NR Description: hypothetical protein F16A16.150 - Arabidopsis
  misc_feature (1)..(331): Homolog of NCBI NO: 18417257 NR Description: expressed protein
  misc_feature (1)..(331): Homolog of NCBI NO: 15081662 NR Description: AT4g28740/F16A16_150 [Arabidopsis thaliana]
MATLVSSQTYIYHCHISKQALYQAKESYSHRRISRHNHRERLDFSHRNHRLTITRKQQPLSFNTVCFAADEPSEISADARIRSEVLSPFRSVRMFFYLAFIASGSLGELIATSRLIGTLANPARSGEVLEIVKGLGVDIGAASLFAFLYFNENKTKNAQMARLSREENLGKLKMRVEENNKVISVGDLRGVARLVICAGPAEFIEEAFKRSKEYTQGLVERGVVVVAYATDGNSPVLEFDETDIADEEMSQRRKKLWRVTPVFVPEWEKWLNEQKKLANVSSDSPVYLSLRLDGRVRASGVGYPPWQAFVAQLPPVKGMWTGLLDGMDGRV

SEQ ID NO: 23312 - protein, 238 aa, Arabidopsis thaliana
  peptide (1)..(238): Ceres Seq. ID no. 12324464
  misc_feature (173)..(223): Homolog of NCBI NO: 15218638 NR Description: hypothetical protein; protein id: At1g02910.1
  misc_feature (1)..(133): Homolog of NCBI NO: 15218638 NR Description: hypothetical protein; protein id: At1g02910.1
  misc_feature (1)..(238): Homolog of NCBI NO: 32489514 NR Description: OSJNBa0043L24.5 [Oryza sativa (japonica
  misc_feature (1)..(238): Homolog of NCBI NO: 7485530 NR Description: hypothetical protein F16A16.150 - Arabidopsis
  misc_feature (1)..(238): Homolog of NCBI NO: 18417257 NR Description: expressed protein
  misc_feature (1)..(238): Homolog of NCBI NO: 15081662 NR Description: AT4g28740/F16A16_150 [Arabidopsis thaliana]
MFFYLAFIASGSLGELIATSRLIGTLANPARSGEVLEIVKGLGVDIGAASLFAFLYFNENKTKNAQMARLSREENLGKLKMRVEENNKVISVGDLRGVARLVICAGPAEFIEEAFKRSKEYTQGLVERGVVVVAYATDGNSPVLEFDETDIADEEMSQRRKKLWRVTPVFVPEWEKWLNEQKKLANVSSDSPVYLSLRLDGRVRASGVGYPPWQAFVAQLPPVKGMWTGLLDGMDGRV

SEQ ID NO: 23313 - DNA, 1475 bp, Arabidopsis thaliana
  misc_feature (1)..(1475): Ceres Seq. ID no. 12738585
  misc_feature: MA Experiment ID: 108461 Result: Down-regulated in Transcription
  misc_feature: MA Experiment 108461 PARAMETER Experiment Name: At_Germinating_Seeds_cDNA_P Parameter: Age (day) Value: 1 vs. 0
  misc_feature: MA Experiment 108461 PARAMETER Experiment Name: At_Germinating_Seeds_cDNA_P Parameter: Tissue Value: Germinating Seeds
  misc_feature: MA Experiment ID: 108462 Result: Down-regulated in Transcription
  misc_feature: MA Experiment 108462 PARAMETER Experiment Name: At_Germinating_Seeds_cDNA_P Parameter: Age (day) Value: 2 vs. 0
  misc_feature: MA Experiment 108462 PARAMETER Experiment Name: At_Germinating_Seeds_cDNA_P Parameter: Tissue Value: Germinating Seeds
  misc_feature: MA Experiment ID: 108463 Result: Down-regulated in Transcription
  misc_feature: MA Experiment 108463 PARAMETER Experiment Name: At_Germinating_Seeds_cDNA_P Parameter: Age (day) Value: 3 vs. 0
  misc_feature: MA Experiment 108463 PARAMETER Experiment Name: At_Germinating_Seeds_cDNA_P Parameter: Tissue Value: Germinating Seeds
  misc_feature: MA Experiment ID: 108464 Result: Down-regulated in Transcription
  misc_feature: MA Experiment 108464 PARAMETER Experiment Name: At_Germinating_Seeds_cDNA_P Parameter: Age (day) Value: 4 vs. 0
  misc_feature: MA Experiment 108464 PARAMETER Experiment Name: At_Germinating_Seeds_cDNA_P Parameter: Tissue Value: Germinating Seeds
  misc_feature: MA Experiment ID: 108488 Result: Down-regulated in Transcription
  misc_feature: MA Experiment ID: 108573 Result: Up-regulated in Transcription
  misc_feature: MA Experiment 108573 PARAMETER Experiment Name: At_Drought_cDNA_P Parameter: Timepoint (hr) Value: 6
  misc_feature: MA Experiment 108573 PARAMETER Experiment Name: At_Drought_cDNA_P Parameter: Tissue Value: Aerial
  misc_feature: MA Experiment 108573 PARAMETER Experiment Name: At_Drought_cDNA_P Parameter: Treatment Value: Drought vs. No Drought
  misc_feature: MA Experiment ID: 108585 Result: Up-regulated in Transcription
  misc_feature: MA Experiment 108585 PARAMETER Experiment Name: At_5mM_NaNP_cDNA_P Parameter: Timepoint (hr) Value: 6
  misc_feature: MA Experiment 108585 PARAMETER Experiment Name: At_5mM_NaNP_cDNA_P Parameter: Tissue Value: Aerial
  misc_feature: MA Experiment 108585 PARAMETER Experiment Name: At_5mM_NaNP_cDNA_P Parameter: Treatment Value: null
  misc_feature: MA Experiment ID: 108595 Result: Down-regulated in Transcription
  misc_feature: MA Experiment 108595 PARAMETER Experiment Name: At_Ler-pi_Ovule_cDNA_P Parameter: Plant Line Value: null
  misc_feature: MA Experiment ID: 108605 Result: Up-regulated in Transcription
  misc_feature: MA Experiment 108605 PARAMETER Experiment Name: At_100uM_ABA_cDNA_P Parameter: Timepoint (hr) Value: 6
  misc_feature: MA Experiment 108605 PARAMETER Experiment Name: At_100uM_ABA_cDNA_P Parameter: Tissue Value: Aerial
  misc_feature: MA Experiment 108605 PARAMETER Experiment Name: At_100uM_ABA_cDNA_P Parameter: Treatment Value: 100uM ABA vs. No Treatment
  misc_feature: MA Experiment ID: 20000069 Result: Up-regulated in Transcription
  misc_feature: MA Experiment 20000069 PARAMETER Experiment Name: At_100uM_ABA_Mutants_cDNA_P Parameter: Plant Line Value: CS23
  misc_feature: MA Experiment 20000069 PARAMETER Experiment Name: At_100uM_ABA_Mutants_cDNA_P Parameter: Timepoint (hr) Value: 6
  misc_feature: MA Experiment 20000069 PARAMETER Experiment Name: At_100uM_ABA_Mutants_cDNA_P Parameter: Tissue Value: Aerial
  misc_feature: MA Experiment 20000069 PARAMETER Experiment Name: At_100uM_ABA_Mutants_cDNA_P Parameter: Treatment Value: 100uM ABA vs. No Treatment
  misc_feature: MA Experiment ID: 20000088 Result: Up-regulated in Transcription
  misc_feature: MA Experiment 20000088 PARAMETER Experiment Name: At_100uM_ABA_Mutants_cDNA_P Parameter: Plant Line Value: Landsberg
  misc_feature: MA Experiment 20000088 PARAMETER Experiment Name: At_100uM_ABA_Mutants_cDNA_P Parameter: Timepoint (hr) Value: 6
  misc_feature: MA Experiment 20000088 PARAMETER Experiment Name: At_100uM_ABA_Mutants_cDNA_P Parameter: Tissue Value: Aerial
  misc_feature: MA Experiment 20000088 PARAMETER Experiment Name: At_100uM_ABA_Mutants_cDNA_P Parameter: Treatment Value: 100uM ABA vs. No Treatment
  misc_feature: MA Experiment ID: 20000169 Result: Up-regulated in Transcription
  misc_feature: MA Experiment 20000169 PARAMETER Experiment Name: At_100uM_ABA_P Parameter: Age (day) Value: 14
  misc_feature: MA Experiment 20000169 PARAMETER Experiment Name: At_100uM_ABA_P Parameter: Organism Value: A. thaliana
  misc_feature: MA Experiment 20000169 PARAMETER Experiment Name: At_100uM_ABA_P Parameter: Plant Line Value: WS
  misc_feature: MA Experiment 20000169 PARAMETER Experiment Name: At_100uM_ABA_P Parameter: Timepoint (hr) Value: 6
  misc_feature: MA Experiment 20000169 PARAMETER Experiment Name: At_100uM_ABA_P Parameter: Tissue Value: Aerial
  misc_feature: MA Experiment 20000169 PARAMETER Experiment Name: At_100uM_ABA_P Parameter: Treatment Value: 100uM ABA vs. No Treatment
  misc_feature: MA Experiment ID: 20000179 Result: Down-regulated in Transcription
  misc_feature: MA Experiment 20000179 PARAMETER Experiment Name: At_Germinating_Seeds_P Parameter: Age (hr) Value: 6 vs. 0
  misc_feature: MA Experiment 20000179 PARAMETER Experiment Name: At_Germinating_Seeds_P Parameter: Tissue Value: Germinating Seeds
  misc_feature: MA Experiment ID: 20000180 Result: Down-regulated in Transcription
  misc_feature: MA Experiment 20000180 PARAMETER Experiment Name: At_Germinating_Seeds_P Parameter: Age (hr) Value: 24 vs. 0
  misc_feature: MA Experiment 20000180 PARAMETER Experiment Name: At_Germinating_Seeds_P Parameter: Tissue Value: Germinating Seeds
  misc_feature: MA Experiment ID: 20000227 Result: Up-regulated in Transcription
  misc_feature: MA Experiment 20000227 PARAMETER Experiment Name: At_Root-Tips-vs-Tops_P Parameter: Tissue Value: Root Tips vs. Root Tops
  misc_feature: MA Experiment ID: 20000437 Result: Up-regulated in Transcription
  misc_feature: MA Experiment 20000437 PARAMETER Experiment Name: At_Drought_P Parameter: Age (day) Value: 8
  misc_feature: MA Experiment 20000437 PARAMETER Experiment Name: At_Drought_P Parameter: Organism Value: A. thaliana
  misc_feature: MA Experiment 20000437 PARAMETER Experiment Name: At_Drought_P Parameter: Plant Line Value: WS
  misc_feature: MA Experiment 20000437 PARAMETER Experiment Name: At_Drought_P Parameter: Timepoint (hr) Value: 24
  misc_feature: MA Experiment 20000437 PARAMETER Experiment Name: At_Drought_P Parameter: Tissue Value: Whole Plant
  misc_feature: MA Experiment 20000437 PARAMETER Experiment Name: At_Drought_P Parameter: Treatment Value: Drought vs. No Drought
  misc_feature: MA Experiment ID: 20000794 Result: Up-regulated in Transcription
  misc_feature: MA Experiment 20000794 PARAMETER Experiment Name: At_Petals_P Parameter: Age (day) Value: 23-25 days
  misc_feature: MA Experiment 20000794 PARAMETER Experiment Name: At_Petals_P Parameter: Plant Line Value: WS
  misc_feature: MA Experiment 20000794 PARAMETER Experiment Name: At_Petals_P Parameter: Tissue Value: Petals vs. Whole plant
  misc_feature: MA Experiment ID: 20001560 Result: Up-regulated in Transcription
  misc_feature: MA Experiment 20001560 PARAMETER Experiment Name: At_Drought_Soil_Dry_P Parameter: Age (day) Value: 28
  misc_feature: MA Experiment 20001560 PARAMETER Experiment Name: At_Drought_Soil_Dry_P Parameter: Organism Value: A. thaliana
  misc_feature: MA Experiment 20001560 PARAMETER Experiment Name: At_Drought_Soil_Dry_P Parameter: Plant Line Value: WS
  misc_feature: MA Experiment 20001560 PARAMETER Experiment Name: At_Drought_Soil_Dry_P Parameter: Post Timepoint (hr) Value: None
  misc_feature: MA Experiment 20001560 PARAMETER Experiment Name: At_Drought_Soil_Dry_P Parameter: Post-Treatment Value: None
  misc_feature: MA Experiment 20001560 PARAMETER Experiment Name: At_Drought_Soil_Dry_P Parameter: Timepoint (day) Value: 14
  misc_feature: MA Experiment 20001560 PARAMETER Experiment Name: At_Drought_Soil_Dry_P Parameter: Treatment Value: Drought vs. No Drought
  misc_feature: MA Experiment ID: 20001905 Result: Up-regulated in Transcription
  misc_feature: MA Experiment 20001905 PARAMETER Experiment Name: At_Drought_Reproduction_P Parameter: Age (day) Value: 40
  misc_feature: MA Experiment 20001905 PARAMETER Experiment Name: At_Drought_Reproduction_P Parameter: Organism Value: A. thaliana
  misc_feature: MA Experiment 20001905 PARAMETER Experiment Name: At_Drought_Reproduction_P Parameter: Plant Line Value: WS
  misc_feature: MA Experiment 20001905 PARAMETER Experiment Name: At_Drought_Reproduction_P Parameter: Timepoint (day) Value: 10
  misc_feature: MA Experiment 20001905 PARAMETER Experiment Name: At_Drought_Reproduction_P Parameter: Tissue Value: Rosettes
  misc_feature: MA Experiment 20001905 PARAMETER Experiment Name: At_Drought_Reproduction_P Parameter: Treatment Value: Drought vs. No Drought
gtgatctatctttgaatctcaaaagcatacttgagagagatctgtttcgataatttgcttcaatcaccgtgttaatggcggccgtaggagtggaggcgagacctcctgtgacagcgatggaggaaacctgcaacgttaagggagcggcggcgaaacaaggagaagggcttaacaagtactacctccagcatctcgatgagctccagcgcctgcaacgcgaaaagtcgtataaccttaatcgtcttgaagctcagaggaatgaactcaattctcgagtacgaatgctcagagaagagttacagctccttcaagaacctgggtcctatgtgggtgaagtggtaaaagtgatgggaaaaaacaaggtcttggttaaggttcatccagaggggaagtatgttgtcgatattgacaaaagtatagacataacgaaactcactccatcaacgagagttgctctccgtaatgatagctatgttctccacctggttctgccaagtaaagtagatcccttggttaaccttatgaaagttgagaaggttccagactccacatatgacatgattggtggtcttgaccagcaaatcaaggaaataaaggaggtcattgaactgccaatcaagcatcctgaattgtttgagtctcttggaattgcgcagccaaagggtgtgttgttgtacggtccacctggaactgggaagacactattggctcgggctgtggcacatcacactgactgtactttcatcagagtttctggttctgagctggtccagaaatacattggagaaggttctagaatggtcagagaactttttgtgatggcaagggagcatgcaccatcaatcatcttcatggatgaaatcgatagtatcgggtctgctcgtatggaatctggtagtggaaatggtgacagtgaggtgcaaaggactatgcttgagcttctcaatcaacttgacggattcgaggcgtcaaacaaaatcaaggttttgatggctacaaatcgtattgatattctggatcaagctcttctccggcctggaaggattgataggaaaattgaatttcctaatcctaatgaagagtcacgttttgatatcttgaagatacactcaaggaaaatgaatttgatgcgtggaatcgatctgaaaaagattgcagagaagatgaatggtgcttcaggtgctgagctgaaggctgtatgcacggaggcgggcatgtttgcacttcgtgagaggagagtacatgtgactcaggaagactttgagatggctgtggcgaaggtaatgaagaaagacacagagaagaacatgtctctgcgtaagctctggaagtaggaatttcagagtcacagattaatttcgattatttcttctctactgtctgtggttctttctgaaaccttttcggctagcgctttaagcttttctaaacaatgtttgtacactagtttctattcattcaattggttgttcagc

SEQ ID NO: 23314 - protein, 419 aa, Arabidopsis thaliana
  peptide (1)..(419): Ceres Seq. ID no. 12738586
  misc_feature (197)..(385): Pfam Name: ATPase family associated with various cellular Pfam Description: ATPase family associated with various cellular
  misc_feature (27)..(419): Homolog of NCBI NO: 7110703 NR Description: protease (prosome, macropain) 26S subunit, ATPase
  misc_feature (27)..(419): Homolog of NCBI NO: 1262435 NR Description: put. 26S protease subunit [Sus scrofa]
  misc_feature (4)..(419): Homolog of NCBI NO: 6599051 NR Description: 26S proteasome subunit 8; Tat binding protein
  misc_feature (1)..(419): Homolog of NCBI NO: 11993907 NR Description: 26S proteasome RPT6a subunit [Dactylis glomerata]
  misc_feature (27)..(419): Homolog of NCBI NO: 6752880 NR Description: 26S proteasome regulatory subunit 8 [Pinus taeda]
  misc_feature (17)..(419): Homolog of NCBI NO: 17385640 NR Description: TAT-binding protein homolog [Matricaria
  misc_feature (3)..(419): Homolog of NCBI NO: 11094194 NR Description: 26S proteasome regulatory particle triple-A
  misc_feature (15)..(419): Homolog of NCBI NO: 6652888 NR Description: 26S proteasome AAA-ATPase subunit RPT6a
  misc_feature (1)..(419): Homolog of NCBI NO: 18420092 NR Description: 26S proteasome AAA-ATPase subunit RPT6a
  misc_feature (1)..(419): Homolog of NCBI NO: 15241241 NR Description: 26S proteasome AAA-ATPase subunit RPT6a
MAAVGVEARPPVTAMEETCNVKGAAAKQGEGLNKYYLQHLDELQRLQREKSYNLNRLEAQRNELNSRVRMLREELQLLQEPGSYVGEVVKVMGKNKVLVKVHPEGKYVVDIDKSIDITKLTPSTRVALRNDSYVLHLVLPSKVDPLVNLMKVEKVPDSTYDMIGGLDQQIKEIKEVIELPIKHPELFESLGIAQPKGVLLYGPPGTGKTLLARAVAHHTDCTFIRVSGSELVQKYIGEGSRMVRELFVMAREHAPSIIFMDEIDSIGSARMESGSGNGDSEVQRTMLELLNQLDGFEASNKIKVLMATNRIDILDQALLRPGRIDRKIEFPNPNEESRFDILKIHSRKMNLMRGIDLKKIAEKMNGASGAELKAVCTEAGMFALRERRVHVTQEDFEMAVAKVMKKDTEKNMSLRKLWK

SEQ ID NO: 23315 - protein, 405 aa, Arabidopsis thaliana
  peptide (1)..(405): Ceres Seq. ID no. 12738587
  misc_feature (183)..(371): Pfam Name: ATPase family associated with various cellular Pfam Description: ATPase family associated with various cellular
  misc_feature (13)..(405): Homolog of NCBI NO: 7110703 NR Description: protease (prosome, macropain) 26S subunit, ATPase
  misc_feature (13)..(405): Homolog of NCBI NO: 1262435 NR Description: put. 26S protease subunit [Sus scrofa]
  misc_feature (1)..(405): Homolog of NCBI NO: 6599051 NR Description: 26S proteasome subunit 8; Tat binding protein
  misc_feature (1)..(405): Homolog of NCBI NO: 11993907 NR Description: 26S proteasome RPT6a subunit [Dactylis glomerata]
  misc_feature (13)..(405): Homolog of NCBI NO: 6752880 NR Description: 26S proteasome regulatory subunit 8 [Pinus taeda]
  misc_feature (3)..(405): Homolog of NCBI NO: 17385640 NR Description: TAT-binding protein homolog [Matricaria
  misc_feature (1)..(405): Homolog of NCBI NO: 11094194 NR Description: 26S proteasome regulatory particle triple-A
  misc_feature (1)..(405): Homolog of NCBI NO: 6652888 NR Description: 26S proteasome AAA-ATPase subunit RPT6a
  misc_feature (1)..(405): Homolog of NCBI NO: 18420092 NR Description: 26S proteasome AAA-ATPase subunit RPT6a
  misc_feature (1)..(405): Homolog of NCBI NO: 15241241 NR Description: 26S proteasome AAA-ATPase subunit RPT6a
MEETCNVKGAAAKQGEGLNKYYLQHLDELQRLQREKSYNLNRLEAQRNELNSRVRMLREELQLLQEPGSYVGEVVKVMGKNKVLVKVHPEGKYVVDIDKSIDITKLTPSTRVALRNDSYVLHLVLPSKVDPLVNLMKVEKVPDSTYDMIGGLDQQIKEIKEVIELPIKHPELFESLGIAQPKGVLLYGPPGTGKTLLARAVAHHTDCTFIRVSGSELVQKYIGEGSRMVRELFVMAREHAPSIIFMDEIDSIGSARMESGSGNGDSEVQRTMLELLNQLDGFEASNKIKVLMATNRIDILDQALLRPGRIDRKIEFPNPNEESRFDILKIHSRKMNLMRGIDLKKIAEKMNGASGAELKAVCTEAGMFALRERRVHVTQEDFEMAVAKVMKKDTEKNMSLRKLWK

SEQ ID NO: 23316 - protein, 350 aa, Arabidopsis thaliana
  peptide (1)..(350): Ceres Seq. ID no. 12738588
  misc_feature (128)..(316): Pfam Name: ATPase family associated with various cellular Pfam Description: ATPase family associated with various cellular
  misc_feature (1)..(350): Homolog of NCBI NO: 7110703 NR Description: protease (prosome, macropain) 26S subunit, ATPase
  misc_feature (1)..(350): Homolog of NCBI NO: 1262435 NR Description: put. 26S protease subunit [Sus scrofa]
  misc_feature (1)..(350): Homolog of NCBI NO: 6599051 NR Description: 26S proteasome subunit 8; Tat binding protein
  misc_feature (1)..(350): Homolog of NCBI NO: 11993907 NR Description: 26S proteasome RPT6a subunit [Dactylis glomerata]
  misc_feature (1)..(350): Homolog of NCBI NO: 6752880 NR Description: 26S proteasome regulatory subunit 8 [Pinus taeda]
  misc_feature (1)..(350): Homolog of NCBI NO: 17385640 NR Description: TAT-binding protein homolog [Matricaria
  misc_feature (1)..(350): Homolog of NCBI NO: 11094194 NR Description: 26S proteasome regulatory particle triple-A
  misc_feature (1)..(350): Homolog of NCBI NO: 6652888 NR Description: 26S proteasome AAA-ATPase subunit RPT6a
  misc_feature (1)..(350): Homolog of NCBI NO: 18420092 NR Description: 26S proteasome AAA-ATPase subunit RPT6a
  misc_feature (1)..(350): Homolog of NCBI NO: 15241241 NR Description: 26S proteasome AAA-ATPase subunit RPT6a
MLREELQLLQEPGSYVGEVVKVMGKNKVLVKVHPEGKYVVDIDKSIDITKLTPSTRVALRNDSYVLHLVLPSKVDPLVNLMKVEKVPDSTYDMIGGLDQQIKEIKEVIELPIKHPELFESLGIAQPKGVLLYGPPGTGKTLLARAVAHHTDCTFIRVSGSELVQKYIGEGSRMVRELFVMAREHAPSIIFMDEIDSIGSARMESGSGNGDSEVQRTMLELLNQLDGFEASNKIKVLMATNRIDILDQALLRPGRIDRKIEFPNPNEESRFDILKIHSRKMNLMRGIDLKKIAEKMNGASGAELKAVCTEAGMFALRERRVHVTQEDFEMAVAKVMKKDTEKNMSLRKLWK

SEQ ID NO: 23317 - DNA, 1156 bp, Arabidopsis thaliana
  misc_feature (1)..(1156): Ceres Seq. ID no. 12327690
  misc_feature: MA Experiment ID: 108434 Result: Up-regulated in Transcription
  misc_feature: MA Experiment 108434 PARAMETER Experiment Name: At_Root_Tips_cDNA_P Parameter: Tissue Value: Root Tips
  misc_feature: MA Experiment ID: 108474 Result: Up-regulated in Transcription
  misc_feature: MA Experiment 108474 PARAMETER Experiment Name: At_Drought_Flowers_cDNA_P Parameter: Timepoint (hr) Value: null
  misc_feature: MA Experiment 108474 PARAMETER Experiment Name: At_Drought_Flowers_cDNA_P Parameter: Treatment Value: Drought vs. No Drought
  misc_feature: MA Experiment ID: 108489 Result: Up-regulated in Transcription
  misc_feature: MA Experiment ID: 108501 Result: Down-regulated in Transcription
  misc_feature: MA Experiment 108501 PARAMETER Experiment Name: At_ap2_floral_buds_cDNA_P Parameter: Plant Line Value: ap2 (Ler.)
  misc_feature: MA Experiment 108501 PARAMETER Experiment Name: At_ap2_floral_buds_cDNA_P Parameter: Tissue Value: Closed Flower
  misc_feature: MA Experiment ID: 108572 Result: Up-regulated in Transcription
  misc_feature: MA Experiment 108572 PARAMETER Experiment Name: At_Drought_cDNA_P Parameter: Timepoint (hr) Value: 1
  misc_feature: MA Experiment 108572 PARAMETER Experiment Name: At_Drought_cDNA_P Parameter: Tissue Value: Aerial
  misc_feature: MA Experiment 108572 PARAMETER Experiment Name: At_Drought_cDNA_P Parameter: Treatment Value: Drought vs. No Drought
  misc_feature: MA Experiment ID: 108585 Result: Up-regulated in Transcription
  misc_feature: MA Experiment 108585 PARAMETER Experiment Name: At_5mM_NaNP_cDNA_P Parameter: Timepoint (hr) Value: 6
  misc_feature: MA Experiment 108585 PARAMETER Experiment Name: At_5mM_NaNP_cDNA_P Parameter: Tissue Value: Aerial
  misc_feature: MA Experiment 108585 PARAMETER Experiment Name: At_5mM_NaNP_cDNA_P Parameter: Treatment Value: null
  misc_feature: MA Experiment ID: 108594 Result: Down-regulated in Transcription
  misc_feature: MA Experiment 108594 PARAMETER Experiment Name: At_Ler-rhl_Root_cDNA_P Parameter: Plant Line Value: null
  misc_feature: MA Experiment ID: 20000069 Result: Down-regulated in Transcription
  misc_feature: MA Experiment 20000069 PARAMETER Experiment Name: At_100uM_ABA_Mutants_cDNA_P Parameter: Plant Line Value: CS23
  misc_feature: MA Experiment 20000069 PARAMETER Experiment Name: At_100uM_ABA_Mutants_cDNA_P Parameter: Timepoint (hr) Value: 6
  misc_feature: MA Experiment 20000069 PARAMETER Experiment Name: At_100uM_ABA_Mutants_cDNA_P Parameter: Tissue Value: Aerial
  misc_feature: MA Experiment 20000069 PARAMETER Experiment Name: At_100uM_ABA_Mutants_cDNA_P Parameter: Treatment Value: 100uM ABA vs. No Treatment
  misc_feature: MA Experiment ID: 20000072 Result: Down-regulated in Transcription
  misc_feature: MA Experiment 20000072 PARAMETER Experiment Name: At_100uM_ABA_Mutants_cDNA_P Parameter: Plant Line Value: CS8105
  misc_feature: MA Experiment 20000072 PARAMETER Experiment Name: At_100uM_ABA_Mutants_cDNA_P Parameter: Timepoint (hr) Value: 6
  misc_feature: MA Experiment 20000072 PARAMETER Experiment Name: At_100uM_ABA_Mutants_cDNA_P Parameter: Tissue Value: Aerial
  misc_feature: MA Experiment 20000072 PARAMETER Experiment Name: At_100uM_ABA_Mutants_cDNA_P Parameter: Treatment Value: 100uM ABA vs. No Treatment
  misc_feature: MA Experiment ID: 20000184 Result: Up-regulated in Transcription
  misc_feature: MA Experiment 20000184 PARAMETER Experiment Name: At_Shoots__P Parameter: Age (day) Value: 7
  misc_feature: MA Experiment 20000184 PARAMETER Experiment Name: At_Shoots__P Parameter: Tissue Value: Shoots vs. Whole Plant
  misc_feature: MA Experiment ID: 20000185 Result: Up-regulated in Transcription
  misc_feature: MA Experiment 20000185 PARAMETER Experiment Name: At_Roots__P Parameter: Age (day) Value: 7 vs. 21
  misc_feature: MA Experiment 20000185 PARAMETER Experiment Name: At_Roots__P Parameter: Organism Value: A. thaliana
  misc_feature: MA Experiment 20000185 PARAMETER Experiment Name: At_Roots__P Parameter: Tissue Value: Roots vs. Whole Plant
  misc_feature: MA Experiment ID: 20000264 Result: Down-regulated in Transcription
  misc_feature: MA Experiment 20000264 PARAMETER Experiment Name: At_Open_Flower_P Parameter: Age (day) Value: 21
  misc_feature: MA Experiment 20000264 PARAMETER Experiment Name: At_Open_Flower_P Parameter: Plant Line Value: WS
  misc_feature: MA Experiment 20000264 PARAMETER Experiment Name: At_Open_Flower_P Parameter: Tissue Value: Open Flower vs. Whole Plant
  misc_feature: MA Experiment ID: 20000265 Result: Down-regulated in Transcription
  misc_feature: MA Experiment 20000265 PARAMETER Experiment Name: At_Open_Flower_P Parameter: Age (day) Value: 21
  misc_feature: MA Experiment 20000265 PARAMETER Experiment Name: At_Open_Flower_P Parameter: Plant Line Value: WS
  misc_feature: MA Experiment 20000265 PARAMETER Experiment Name: At_Open_Flower_P Parameter: Tissue Value: Closed Flower vs. Whole Plant
  misc_feature: MA Experiment ID: 20000286 Result: Down-regulated in Transcription
  misc_feature: MA Experiment 20000286 PARAMETER Experiment Name: At_Open_Flower_P Parameter: Age (day) Value: 21
  misc_feature: MA Experiment 20000286 PARAMETER Experiment Name: At_Open_Flower_P Parameter: Plant Line Value: WS
  misc_feature: MA Experiment 20000286 PARAMETER Experiment Name: At_Open_Flower_P Parameter: Tissue Value: Half Open vs. Whole Plant
  misc_feature: MA Experiment ID: 20000437 Result: Down-regulated in Transcription
  misc_feature: MA Experiment 20000437 PARAMETER Experiment Name: At_Drought_P Parameter: Age (day) Value: 8
  misc_feature: MA Experiment 20000437 PARAMETER Experiment Name: At_Drought_P Parameter: Organism Value: A. thaliana
  misc_feature: MA Experiment 20000437 PARAMETER Experiment Name: At_Drought_P Parameter: Plant Line Value: WS
  misc_feature: MA Experiment 20000437 PARAMETER Experiment Name: At_Drought_P Parameter: Timepoint (hr) Value: 24
  misc_feature: MA Experiment 20000437 PARAMETER Experiment Name: At_Drought_P Parameter: Tissue Value: Whole Plant
  misc_feature: MA Experiment 20000437 PARAMETER Experiment Name: At_Drought_P Parameter: Treatment Value: Drought vs. No Drought
  misc_feature: MA Experiment ID: 20000438 Result: Up-regulated in Transcription
  misc_feature: MA Experiment 20000438 PARAMETER Experiment Name: At_Shoots__P Parameter: Age (day) Value: 14
  misc_feature: MA Experiment 20000438 PARAMETER Experiment Name: At_Shoots__P Parameter: Tissue Value: Shoots vs. Whole Plant
  misc_feature: MA Experiment ID: 20000441 Result: Up-regulated in Transcription
  misc_feature: MA Experiment 20000441 PARAMETER Experiment Name: At_1uM_BR-BRZ__P Parameter: Tissue Value: Shoot Apices
  misc_feature: MA Experiment 20000441 PARAMETER Experiment Name: At_1uM_BR-BRZ__P Parameter: Treatment Value: 1uM BR vs. No Treatment
  misc_feature: MA Experiment ID: 20000495 Result: Up-regulated in Transcription
  misc_feature: MA Experiment 20000495 PARAMETER Experiment Name: At_Guard_Cells_P Parameter: Harvest Date Value: 8/2/2002
  misc_feature: MA Experiment 20000495 PARAMETER Experiment Name: At_Guard_Cells_P Parameter: Organism Value: A. thaliana
  misc_feature: MA Experiment 20000495 PARAMETER Experiment Name: At_Guard_Cells_P Parameter: Tissue Value: Guard Cells vs. Leaves
  misc_feature: MA Experiment ID: 20000709 Result: Up-regulated in Transcription
  misc_feature: MA Experiment 20000709 PARAMETER Experiment Name: At_15mM_NH4NO3_L-to-H_P Parameter: Age (hr) Value: 14
  misc_feature: MA Experiment 20000709 PARAMETER Experiment Name: At_15mM_NH4NO3_L-to-H_P Parameter: Organism Value: A. thaliana
  misc_feature: MA Experiment 20000709 PARAMETER Experiment Name: At_15mM_NH4NO3_L-to-H_P Parameter: Plant Line Value: WS
  misc_feature: MA Experiment 20000709 PARAMETER Experiment Name: At_15mM_NH4NO3_L-to-H_P Parameter: Timepoint (hr) Value: 4
  misc_feature: MA Experiment 20000709 PARAMETER Experiment Name: At_15mM_NH4NO3_L-to-H_P Parameter: Tissue Value: Aerial
  misc_feature: MA Experiment 20000709 PARAMETER Experiment Name: At_15mM_NH4NO3_L-to-H_P Parameter: Treatment Value: 15mM NH4NO3 vs. 30mM Mannitol
  misc_feature: MA Experiment ID: 20001451 Result: Up-regulated in Transcription
  misc_feature: MA Experiment 20001451 PARAMETER Experiment Name: At_Far-red-induction_P Parameter: Age (day) Value: 7
  misc_feature: MA Experiment 20001451 PARAMETER Experiment Name: At_Far-red-induction_P Parameter: Light Value: Far-red vs. White
  misc_feature: MA Experiment 20001451 PARAMETER Experiment Name: At_Far-red-induction_P Parameter: Organism Value: A. thaliana
  misc_feature: MA Experiment 20001451 PARAMETER Experiment Name: At_Far-red-induction_P Parameter: Plant Line Value: Columbia
  misc_feature: MA Experiment 20001451 PARAMETER Experiment Name: At_Far-red-induction_P Parameter: Timepoint (hr) Value: 24
  misc_feature: MA Experiment 20001451 PARAMETER Experiment Name: At_Far-red-induction_P Parameter: Tissue Value: Whole Plant
  misc_feature: MA Experiment ID: 20001457 Result: Up-regulated in Transcription
  misc_feature: MA Experiment 20001457 PARAMETER Experiment Name: At_50mM_NH4NO3_L-to-H_P Parameter: Age (day) Value: Undefined
  misc_feature: MA Experiment 20001457 PARAMETER Experiment Name: At_50mM_NH4NO3_L-to-H_P Parameter: Organism Value: Undefined
  misc_feature: MA Experiment 20001457 PARAMETER Experiment Name: At_50mM_NH4NO3_L-to-H_P Parameter: Plant Line Value: Undefined
  misc_feature: MA Experiment 20001457 PARAMETER Experiment Name: At_50mM_NH4NO3_L-to-H_P Parameter: Timepoint (hr) Value: 0.5
  misc_feature: MA Experiment 20001457 PARAMETER Experiment Name: At_50mM_NH4NO3_L-to-H_P Parameter: Tissue Value: Siliques
  misc_feature: MA Experiment 20001457 PARAMETER Experiment Name: At_50mM_NH4NO3_L-to-H_P Parameter: Treatment Value: 50mM NH4NO3 vs. 100mM Manitol
  misc_feature: MA Experiment ID: 20001458 Result: Up-regulated in Transcription
  misc_feature: MA Experiment 20001458 PARAMETER Experiment Name: At_50mM_NH4NO3_L-to-H_P Parameter: Age (day) Value: Undefined
  misc_feature: MA Experiment 20001458 PARAMETER Experiment Name: At_50mM_NH4NO3_L-to-H_P Parameter: Organism Value: Undefined
  misc_feature: MA Experiment 20001458 PARAMETER Experiment Name: At_50mM_NH4NO3_L-to-H_P Parameter: Plant Line Value: Undefined
  misc_feature: MA Experiment 20001458 PARAMETER Experiment Name: At_50mM_NH4NO3_L-to-H_P Parameter: Timepoint (hr) Value: 2
  misc_feature: MA Experiment 20001458 PARAMETER Experiment Name: At_50mM_NH4NO3_L-to-H_P Parameter: Tissue Value: Siliques
  misc_feature: MA Experiment 20001458 PARAMETER Experiment Name: At_50mM_NH4NO3_L-to-H_P Parameter: Treatment Value: 50mM NH4NO3 vs. 100mM Manitol
  misc_feature: MA Experiment ID: 20001459 Result: Up-regulated in Transcription
  misc_feature: MA Experiment 20001459 PARAMETER Experiment Name: At_50mM_NH4NO3_L-to-H_P Parameter: Age (day) Value: Undefined
  misc_feature: MA Experiment 20001459 PARAMETER Experiment Name: At_50mM_NH4NO3_L-to-H_P Parameter: Organism Value: Undefined
  misc_feature: MA Experiment 20001459 PARAMETER Experiment Name: At_50mM_NH4NO3_L-to-H_P Parameter: Plant Line Value: Undefined
  misc_feature: MA Experiment 20001459 PARAMETER Experiment Name: At_50mM_NH4NO3_L-to-H_P Parameter: Timepoint (hr) Value: 4
  misc_feature: MA Experiment 20001459 PARAMETER Experiment Name: At_50mM_NH4NO3_L-to-H_P Parameter: Tissue Value: Siliques
  misc_feature: MA Experiment 20001459 PARAMETER Experiment Name: At_50mM_NH4NO3_L-to-H_P Parameter: Treatment Value: 50mM NH4NO3 vs. 100mM Manitol
  misc_feature: MA Experiment ID: 20001557 Result: Down-regulated in Transcription
  misc_feature: MA Experiment 20001557 PARAMETER Experiment Name: At_Drought_Soil_Dry_P Parameter: Age (day) Value: 27
  misc_feature: MA Experiment 20001557 PARAMETER Experiment Name: At_Drought_Soil_Dry_P Parameter: Organism Value: A. thaliana
  misc_feature: MA Experiment 20001557 PARAMETER Experiment Name: At_Drought_Soil_Dry_P Parameter: Plant Line Value: WS
  misc_feature: MA Experiment 20001557 PARAMETER Experiment Name: At_Drought_Soil_Dry_P Parameter: Post Timepoint (hr) Value: 3
  misc_feature: MA Experiment 20001557 PARAMETER Experiment Name: At_Drought_Soil_Dry_P Parameter: Post-Treatment Value: Re-Water vs. No Drought
  misc_feature: MA Experiment 20001557 PARAMETER Experiment Name: At_Drought_Soil_Dry_P Parameter: Timepoint (day) Value: 13
  misc_feature: MA Experiment 20001557 PARAMETER Experiment Name: At_Drought_Soil_Dry_P Parameter: Treatment Value: Drought vs. No Drought
  misc_feature: MA Experiment ID: 20001559 Result: Down-regulated in Transcription
  misc_feature: MA Experiment 20001559 PARAMETER Experiment Name: At_Drought_Soil_Dry_P Parameter: Age (day) Value: 28
  misc_feature: MA Experiment 20001559 PARAMETER Experiment Name: At_Drought_Soil_Dry_P Parameter: Organism Value: A. thaliana
  misc_feature: MA Experiment 20001559 PARAMETER Experiment Name: At_Drought_Soil_Dry_P Parameter: Plant Line Value: WS
  misc_feature: MA Experiment 20001559 PARAMETER Experiment Name: At_Drought_Soil_Dry_P Parameter: Post Timepoint (hr) Value: 29
  misc_feature: MA Experiment 20001559 PARAMETER Experiment Name: At_Drought_Soil_Dry_P Parameter: Post-Treatment Value: Re-Water vs. No Drought
  misc_feature: MA Experiment 20001559 PARAMETER Experiment Name: At_Drought_Soil_Dry_P Parameter: Timepoint (day) Value: 14
  misc_feature: MA Experiment 20001559 PARAMETER Experiment Name: At_Drought_Soil_Dry_P Parameter: Treatment Value: Drought vs. No Drought
  misc_feature: MA Experiment ID: 20001755 Result: Up-regulated in Transcription
  misc_feature: MA Experiment 20001755 PARAMETER Experiment Name: At_50mM_NH4NO3_L-to-H_P Parameter: Timepoint (hr) Value: 2
  misc_feature: MA Experiment 20001755 PARAMETER Experiment Name: At_50mM_NH4NO3_L-to-H_P Parameter: Tissue Value: Leaf
  misc_feature: MA Experiment 20001755 PARAMETER Experiment Name: At_50mM_NH4NO3_L-to-H_P Parameter: Treatment Value: 50mM NH4NO3 vs 100mM Mannitol
  misc_feature: MA Experiment ID: 20001756 Result: Up-regulated in Transcription
  misc_feature: MA Experiment 20001756 PARAMETER Experiment Name: At_50mM_NH4NO3_L-to-H_P Parameter: Timepoint (hr) Value: 4
  misc_feature: MA Experiment 20001756 PARAMETER Experiment Name: At_50mM_NH4NO3_L-to-H_P Parameter: Tissue Value: Leaf
  misc_feature: MA Experiment 20001756 PARAMETER Experiment Name: At_50mM_NH4NO3_L-to-H_P Parameter: Treatment Value: 50mM NH4NO3 vs 100mM Mannitol
  misc_feature: MA Experiment ID: 20001757 Result: Up-regulated in Transcription
  misc_feature: MA Experiment 20001757 PARAMETER Experiment Name: At_50mM_NH4NO3_L-to-H_P Parameter: Timepoint (hr) Value: 6
  misc_feature: MA Experiment 20001757 PARAMETER Experiment Name: At_50mM_NH4NO3_L-to-H_P Parameter: Tissue Value: Leaf
  misc_feature: MA Experiment 20001757 PARAMETER Experiment Name: At_50mM_NH4NO3_L-to-H_P Parameter: Treatment Value: 50mM NH4NO3 vs 100mM Mannitol
  misc_feature: MA Experiment ID: 20001759 Result: Up-regulated in Transcription
  misc_feature: MA Experiment 20001759 PARAMETER Experiment Name: At_50mM_NH4NO3_L-to-H_P Parameter: Timepoint (hr) Value: 1
  misc_feature: MA Experiment 20001759 PARAMETER Experiment Name: At_50mM_NH4NO3_L-to-H_P Parameter: Tissue Value: Siliques
  misc_feature: MA Experiment 20001759 PARAMETER Experiment Name: At_50mM_NH4NO3_L-to-H_P Parameter: Treatment Value: 50mM NH4NO3 vs 100mM Mannitol
  misc_feature: MA Experiment ID: 20001760 Result: Up-regulated in Transcription
  misc_feature: MA Experiment 20001760 PARAMETER Experiment Name: At_50mM_NH4NO3_L-to-H_P Parameter: Timepoint (hr) Value: 2
  misc_feature: MA Experiment 20001760 PARAMETER Experiment Name: At_50mM_NH4NO3_L-to-H_P Parameter: Tissue Value: Siliques
  misc_feature: MA Experiment 20001760 PARAMETER Experiment Name: At_50mM_NH4NO3_L-to-H_P Parameter: Treatment Value: 50mM NH4NO3 vs 100mM Mannitol
  misc_feature: MA Experiment ID: 20001906 Result: Down-regulated in Transcription
  misc_feature: MA Experiment 20001906 PARAMETER Experiment Name: At_Drought_Reproduction_P Parameter: Age (day) Value: 35
  misc_feature: MA Experiment 20001906 PARAMETER Experiment Name: At_Drought_Reproduction_P Parameter: Organism Value: A. thaliana
  misc_feature: MA Experiment 20001906 PARAMETER Experiment Name: At_Drought_Reproduction_P Parameter: Plant Line Value: WS
  misc_feature: MA Experiment 20001906 PARAMETER Experiment Name: At_Drought_Reproduction_P Parameter: Timepoint (day) Value: 5
  misc_feature: MA Experiment 20001906 PARAMETER Experiment Name: At_Drought_Reproduction_P Parameter: Tissue Value: Siliques
  misc_feature: MA Experiment 20001906 PARAMETER Experiment Name: At_Drought_Reproduction_P Parameter: Treatment Value: Drought vs. No Drought
  misc_feature: MA Experiment ID: 20001908 Result: Down-regulated in Transcription
  misc_feature: MA Experiment 20001908 PARAMETER Experiment Name: At_Drought_Reproduction_P Parameter: Age (day) Value: 40
  misc_feature: MA Experiment 20001908 PARAMETER Experiment Name: At_Drought_Reproduction_P Parameter: Organism Value: A. thaliana
  misc_feature: MA Experiment 20001908 PARAMETER Experiment Name: At_Drought_Reproduction_P Parameter: Plant Line Value: WS
  misc_feature: MA Experiment 20001908 PARAMETER Experiment Name: At_Drought_Reproduction_P Parameter: Timepoint (day) Value: 10
  misc_feature: MA Experiment 20001908 PARAMETER Experiment Name: At_Drought_Reproduction_P Parameter: Tissue Value: Siliques
  misc_feature: MA Experiment 20001908 PARAMETER Experiment Name: At_Drought_Reproduction_P Parameter: Treatment Value: Drought vs. No Drought
cttcataaaacattttaatctctcttctcttttttttgtctgtgcaaagatatcactttcttgctcccaaagcaaaatcaactcttcttcttcttcttctcccagacatcagcaagattcaggagattaaaaccttaaattaaaacaatacaaactccaaattcaccggaggaaataacttaaaacttgaatctgaaaagatgagctgcaatggttgccgtgttctccggaaaggttgcagcgagaattgtatcctccggccatgtattcaatggattgaaaccgccgatgctcaaggccacgccaccgtcttcgtcgctaaattcttcggccgtgctggtctcatgtcctttatctccgctgttccggattctcaacgtcctgctttgtttcagtcgttgctctacgaagcttgtggaagaactgtcaatccagttaacggagcaatcggaatgttatggactggaaactggaatatctgtcaagcggctgttgaaacagtgcttcgcggcggttctttaagaccgatcccggagcttctcactcacggcggcggtttcgctggctttccttcgcctacatctgaagaagcatctgagatctgcaccgaaatgttgaatctccagcaaaatgattccaccgatcgtaacatctatcatcattcacgattctcaagctctagatctagatctactatggattcttcttctccgacgaaacgtaagagattatcatcggaagaccaaccatcttcggagcttgatctatctctcatccctaattttcccattaagcaaacaacaccttcttctacacggcggcgatcagtaacaccgtcgatgaactcagaggactccgggacgacgacgactacgacggcgttttgtgacaagggtgatgtgtacggtaacgaaggaggagaaacgaccaagttgcttaacctttttgtttaatgcaaaacggcgtcggttttctcagagttagtctagggttttaaatgtaattttacacattttcttcctttttcctggataaatattggaccggcgaattaacaactacgtcgttttgttctctcggttttgagtccccccccccccccattaaccaattgtaaaacttaatgagtgaaaaaagttatgtctagtttttctgc

SEQ ID NO: 23318 - protein, 250 aa, Arabidopsis thaliana
  peptide (1)..(250): Ceres Seq. ID no. 12327691
  misc_feature (2)..(107): Pfam Name: Protein of unknown function DUF260 Pfam Description: Protein of unknown function DUF260
  misc_feature (1)..(111): Homolog of NCBI NO: 34895540 NR Description: unnamed protein product [Oryza sativa (japonica
  misc_feature (1)..(110): Homolog of NCBI NO: 40539088 NR Description: expressed protein [Oryza sativa (japonica
  misc_feature (1)..(186): Homolog of NCBI NO: 15219829 NR Description: hypothetical protein; protein id: At1g67100.1
  misc_feature (1)..(222): Homolog of NCBI NO: 34394489 NR Description: putative lateral organ boundaries (LOB) domain
  misc_feature (1)..(250): Homolog of NCBI NO: 15235604 NR Description: putative protein
  misc_feature (1)..(250): Homolog of NCBI NO: 21592894 NR Description: unknown [Arabidopsis thaliana]
  misc_feature (1)..(249): Homolog of NCBI NO: 21553886 NR Description: unknown [Arabidopsis thaliana]
  misc_feature (1)..(249): Homolog of NCBI NO: 15229644 NR Description: putative protein
  misc_feature (1)..(250): Homolog of NCBI NO: 21593577 NR Description: unknown [Arabidopsis thaliana]
  misc_feature (1)..(250): Homolog of NCBI NO: 15240739 NR Description: putative protein
MSCNGCRVLRKGCSENCILRPCIQWIETADAQGHATVFVAKFFGRAGLMSFISAVPDSQRPALFQSLLYEACGRTVNPVNGAIGMLWTGNWNICQAAVETVLRGGSLRPIPELLTHGGGFAGFPSPTSEEASEICTEMLNLQQNDSTDRNIYHHSRFSSSRSRSTMDSSSPTKRKRLSSEDQPSSELDLSLIPNFPIKQTTPSSTRRRSVTPSMNSEDSGTTTTTTAFCDKGDVYGNEGGETTKLLNLFV

SEQ ID NO: 23319 - protein, 202 aa, Arabidopsis thaliana
  peptide (1)..(202): Ceres Seq. ID no. 12327692
  misc_feature (1)..(59): Pfam Name: Protein of unknown function DUF260 Pfam Description: Protein of unknown function DUF260
  misc_feature (1)..(63): Homolog of NCBI NO: 34895540 NR Description: unnamed protein product [Oryza sativa (japonica
  misc_feature (1)..(62): Homolog of NCBI NO: 40539088 NR Description: expressed protein [Oryza sativa (japonica
  misc_feature (1)..(138): Homolog of NCBI NO: 15219829 NR Description: hypothetical protein; protein id: At1g67100.1
  misc_feature (1)..(174): Homolog of NCBI NO: 34394489 NR Description: putative lateral organ boundaries (LOB) domain
  misc_feature (1)..(202): Homolog of NCBI NO: 15235604 NR Description: putative protein
  misc_feature (1)..(202): Homolog of NCBI NO: 21592894 NR Description: unknown [Arabidopsis thaliana]
  misc_feature (1)..(201): Homolog of NCBI NO: 21553886 NR Description: unknown [Arabidopsis thaliana]
  misc_feature (1)..(201): Homolog of NCBI NO: 15229644 NR Description: putative protein
  misc_feature (1)..(202): Homolog of NCBI NO: 21593577 NR Description: unknown [Arabidopsis thaliana]
  misc_feature (1)..(202): Homolog of NCBI NO: 15240739 NR Description: putative protein
MSFISAVPDSQRPALFQSLLYEACGRTVNPVNGAIGMLWTGNWNICQAAVETVLRGGSLRPIPELLTHGGGFAGFPSPTSEEASEICTEMLNLQQNDSTDRNIYHHSRFSSSRSRSTMDSSSPTKRKRLSSEDQPSSELDLSLIPNFPIKQTTPSSTRRRSVTPSMNSEDSGTTTTTTAFCDKGDVYGNEGGETTKLLNLFV

SEQ ID NO: 23320 - protein, 166 aa, Arabidopsis thaliana
  peptide (1)..(166): Ceres Seq. ID no. 12327693
  misc_feature (1)..(27): Homolog of NCBI NO: 34895540 NR Description: unnamed protein product [Oryza sativa (japonica
  misc_feature (1)..(26): Homolog of NCBI NO: 40539088 NR Description: expressed protein [Oryza sativa (japonica
  misc_feature (1)..(102): Homolog of NCBI NO: 15219829 NR Description: hypothetical protein; protein id: At1g67100.1
  misc_feature (1)..(138): Homolog of NCBI NO: 34394489 NR Description: putative lateral organ boundaries (LOB) domain
  misc_feature (1)..(166): Homolog of NCBI NO: 15235604 NR Description: putative protein
  misc_feature (1)..(166): Homolog of NCBI NO: 21592894 NR Description: unknown [Arabidopsis thaliana]
  misc_feature (1)..(165): Homolog of NCBI NO: 21553886 NR Description: unknown [Arabidopsis thaliana]
  misc_feature (1)..(165): Homolog of NCBI NO: 15229644 NR Description: putative protein
  misc_feature (1)..(166): Homolog of NCBI NO: 21593577 NR Description: unknown [Arabidopsis thaliana]
  misc_feature (1)..(166): Homolog of NCBI NO: 15240739 NR Description: putative protein
MLWTGNWNICQAAVETVLRGGSLRPIPELLTHGGGFAGFPSPTSEEASEICTEMLNLQQNDSTDRNIYHHSRFSSSRSRSTMDSSSPTKRKRLSSEDQPSSELDLSLIPNFPIKQTTPSSTRRRSVTPSMNSEDSGTTTTTTAFCDKGDVYGNEGGETTKLLNLFV

SEQ ID NO: 23321 - DNA, 1133 bp, Arabidopsis thaliana
  misc_feature (1)..(1133): Ceres Seq. ID no. 12324532
  misc_feature: MA Experiment ID: 108434 Result: Up-regulated in Transcription
  misc_feature: MA Experiment 108434 PARAMETER Experiment Name: At_Root_Tips_cDNA_P Parameter: Tissue Value: Root Tips
  misc_feature: MA Experiment ID: 108461 Result: Up-regulated in Transcription
  misc_feature: MA Experiment 108461 PARAMETER Experiment Name: At_Germinating_Seeds_cDNA_P Parameter: Age (day) Value: 1 vs. 0
  misc_feature: MA Experiment 108461 PARAMETER Experiment Name: At_Germinating_Seeds_cDNA_P Parameter: Tissue Value: Germinating Seeds
  misc_feature: MA Experiment ID: 108464 Result: Down-regulated in Transcription
  misc_feature: MA Experiment 108464 PARAMETER Experiment Name: At_Germinating_Seeds_cDNA_P Parameter: Age (day) Value: 4 vs. 0
  misc_feature: MA Experiment 108464 PARAMETER Experiment Name: At_Germinating_Seeds_cDNA_P Parameter: Tissue Value: Germinating Seeds
  misc_feature: MA Experiment ID: 108488 Result: Down-regulated in Transcription
  misc_feature: MA Experiment ID: 108576 Result: Up-regulated in Transcription
  misc_feature: MA Experiment 108576 PARAMETER Experiment Name: At_42deg_Heat_cDNA_P Parameter: Temperature (deg C) Value: 42 vs. 22
  misc_feature: MA Experiment 108576 PARAMETER Experiment Name: At_42deg_Heat_cDNA_P Parameter: Timepoint (hr) Value: 1
  misc_feature: MA Experiment 108576 PARAMETER Experiment Name: At_42deg_Heat_cDNA_P Parameter: Tissue Value: Aerial
  misc_feature: MA Experiment ID: 20000069 Result: Up-regulated in Transcription
  misc_feature: MA Experiment 20000069 PARAMETER Experiment Name: At_100uM_ABA_Mutants_cDNA_P Parameter: Plant Line Value: CS23
  misc_feature: MA Experiment 20000069 PARAMETER Experiment Name: At_100uM_ABA_Mutants_cDNA_P Parameter: Timepoint (hr) Value: 6
  misc_feature: MA Experiment 20000069 PARAMETER Experiment Name: At_100uM_ABA_Mutants_cDNA_P Parameter: Tissue Value: Aerial
  misc_feature: MA Experiment 20000069 PARAMETER Experiment Name: At_100uM_ABA_Mutants_cDNA_P Parameter: Treatment Value: 100uM ABA vs. No Treatment
  misc_feature: MA Experiment ID: 20000072 Result: Up-regulated in Transcription
  misc_feature: MA Experiment 20000072 PARAMETER Experiment Name: At_100uM_ABA_Mutants_cDNA_P Parameter: Plant Line Value: CS8105
  misc_feature: MA Experiment 20000072 PARAMETER Experiment Name: At_100uM_ABA_Mutants_cDNA_P Parameter: Timepoint (hr) Value: 6
  misc_feature: MA Experiment 20000072 PARAMETER Experiment Name: At_100uM_ABA_Mutants_cDNA_P Parameter: Tissue Value: Aerial
  misc_feature: MA Experiment 20000072 PARAMETER Experiment Name: At_100uM_ABA_Mutants_cDNA_P Parameter: Treatment Value: 100uM ABA vs. No Treatment
  misc_feature: MA Experiment ID: 20000087 Result: Up-regulated in Transcription
  misc_feature: MA Experiment 20000087 PARAMETER Experiment Name: At_100uM_ABA_Mutants_cDNA_P Parameter: Plant Line Value: WS
  misc_feature: MA Experiment 20000087 PARAMETER Experiment Name: At_100uM_ABA_Mutants_cDNA_P Parameter: Timepoint (hr) Value: 6
  misc_feature: MA Experiment 20000087 PARAMETER Experiment Name: At_100uM_ABA_Mutants_cDNA_P Parameter: Tissue Value: Aerial
  misc_feature: MA Experiment 20000087 PARAMETER Experiment Name: At_100uM_ABA_Mutants_cDNA_P Parameter: Treatment Value: 100uM ABA vs. No Treatment
  misc_feature: MA Experiment ID: 20000112 Result: Up-regulated in Transcription
  misc_feature: MA Experiment 20000112 PARAMETER Experiment Name: At_42deg_Heat_cDNA_P Parameter: Temperature (deg C) Value: 42 vs. 22
  misc_feature: MA Experiment 20000112 PARAMETER Experiment Name: At_42deg_Heat_cDNA_P Parameter: Timepoint (hr) Value: 2
  misc_feature: MA Experiment 20000112 PARAMETER Experiment Name: At_42deg_Heat_cDNA_P Parameter: Tissue Value: Aerial
  misc_feature: MA Experiment ID: 20000113 Result: Up-regulated in Transcription
  misc_feature: MA Experiment 20000113 PARAMETER Experiment Name: At_42deg_Heat_cDNA_P Parameter: Temperature (deg C) Value: 42 vs. 22
  misc_feature: MA Experiment 20000113 PARAMETER Experiment Name: At_42deg_Heat_cDNA_P Parameter: Timepoint (hr) Value: 8
  misc_feature: MA Experiment 20000113 PARAMETER Experiment Name: At_42deg_Heat_cDNA_P Parameter: Tissue Value: Aerial
  misc_feature: MA Experiment ID: 20000144 Result: Up-regulated in Transcription
  misc_feature: MA Experiment 20000144 PARAMETER Experiment Name: At_42deg_Heat_cDNA_P Parameter: Temperature (deg C) Value: 42 vs. 22
  misc_feature: MA Experiment 20000144 PARAMETER Experiment Name: At_42deg_Heat_cDNA_P Parameter: Timepoint (hr) Value: 1
  misc_feature: MA Experiment 20000144 PARAMETER Experiment Name: At_42deg_Heat_cDNA_P Parameter: Tissue Value: Aerial
  misc_feature: MA Experiment ID: 20000171 Result: Up-regulated in Transcription
  misc_feature: MA Experiment 20000171 PARAMETER Experiment Name: At_42deg_Heat_P Parameter: Age (day) Value: 14
  misc_feature: MA Experiment 20000171 PARAMETER Experiment Name: At_42deg_Heat_P Parameter: Organism Value: A. thaliana
  misc_feature: MA Experiment 20000171 PARAMETER Experiment Name: At_42deg_Heat_P Parameter: Plant Line Value: WS
  misc_feature: MA Experiment 20000171 PARAMETER Experiment Name: At_42deg_Heat_P Parameter: Temperature (deg C) Value: 42 vs. 22
  misc_feature: MA Experiment 20000171 PARAMETER Experiment Name: At_42deg_Heat_P Parameter: Timepoint (hr) Value: 1
  misc_feature: MA Experiment 20000171 PARAMETER Experiment Name: At_42deg_Heat_P Parameter: Tissue Value: Aerial
  misc_feature: MA Experiment ID: 20000179 Result: Up-regulated in Transcription
  misc_feature: MA Experiment 20000179 PARAMETER Experiment Name: At_Germinating_Seeds_P Parameter: Age (hr) Value: 6 vs. 0
  misc_feature: MA Experiment 20000179 PARAMETER Experiment Name: At_Germinating_Seeds_P Parameter: Tissue Value: Germinating Seeds
  misc_feature: Phenotype: WHOLE PLANT Size-Small
  misc_feature: Phenotype: WHOLE PLANT Size-Small
  misc_feature: Phenotype: WHOLE PLANT Size-Small
atttttaatagactatcaaaaaaacaatctcatttcatttgctctcttctccgagaaaatggcgtttggtttgatcggaagagttgttggaacgaaaccgtcacgattatccacggcggcgcgattgattccggcgcgatggacatcaaaaggatcagaagcacaatcgaaagcttcaaccggcggcggaggagcgagtctgaagacgtttcagatctatcgatggaatccagataatcctggaaagccagagcttcaagattacaaaatcgatctcaaggattgtggtccaatggttctagatgctttgattaagattaagaacgagatggatccatcgctcactttccgtcgctcttgccgtgaaggtatttgtggttcgtgtgctatgaacattgatggatgtaatggtcttgcttgtttaacgaagattgaatctggatctaaagagacgacgattacgccgttgccgcatatgtttgtgattaaggatttggttgtggatatgacgaatttttataatcagtataagagtattgagccgtggttgaagaggaagaatccagcatctgttcctgggaaagagattttacagagtaagaaagatagagctaagcttgatggaatgtatgaatgtattctctgtgcttgttgtagcacgtcttgccctagctattggtggaaccctgagtcttatcttggtccagctgctttgcttcatgccaacaggtggataagtgatagccgagatgagtacactaaggaaagacttgaagccattgacgatgagttcaaactgtatcgatgccacacaattctgaactgtgctcgtgcctgtccaaagggattgaacccagggaaacagatcacacacatcaagcagcttcagaaatctggttgaacaacaaatgaatcaggcagtacctaatggatttttgattctaataatctgcaagaaactccaattttggattcattcttgtattgctgtcacaactatcagaattagattattttgtggtatatcttgatgaattttttttgcctacaacaagcaataaaactctgctttttttatcatccactcattcagctttgccttaatacaaacatttggatttcgagttttgctc

SEQ ID NO: 23322 - protein, 299 aa, Arabidopsis thaliana
  peptide (1)..(299): Ceres Seq. ID no. 12324533
  misc_feature (81)..(145): Pfam Name: 2Fe-2S iron-sulfur cluster binding domain Pfam Description: 2Fe-2S iron-sulfur cluster binding domain
  misc_feature (68)..(295): Homolog of NCBI NO: 23508823 NR Description: iron-sulfur subunit of succinate dehydrogenase
  misc_feature (20)..(296): Homolog of NCBI NO: 4803711 NR Description: iron sulfur subunit of succinate dehydrogenase
  misc_feature (65)..(296): Homolog of NCBI NO: 28611029 NR Description: succinate dehydrogenase [Triticum aestivum]
  misc_feature (64)..(296): Homolog of NCBI NO: 5688947 NR Description: succinate dehydrogenase iron-protein subunit
  misc_feature (20)..(297): Homolog of NCBI NO: 21555840 NR Description: succinate dehydrogenase iron-protein subunit,
  misc_feature (20)..(297): Homolog of NCBI NO: 12049598 NR Description: mitochondrial succinate dehydrogenase
  misc_feature (20)..(297): Homolog of NCBI NO: 15232149 NR Description: succinate dehydrogenase iron-protein subunit,
  misc_feature (20)..(299): Homolog of NCBI NO: 15237464 NR Description: succinate dehydrogenase iron-protein subunit -like
  misc_feature (20)..(299): Homolog of NCBI NO: 12049600 NR Description: mitochondrial succinate dehydrogenase
  misc_feature (20)..(299): Homolog of NCBI NO: 21593098 NR Description: succinate dehydrogenase iron-protein subunit-like
FLIDYQKNNLISFALFSEKMAFGLIGRVVGTKPSRLSTAARLIPARWTSKGSEAQSKASTGGGGASLKTFQIYRWNPDNPGKPELQDYKIDLKDCGPMVLDALIKIKNEMDPSLTFRRSCREGICGSCAMNIDGCNGLACLTKIESGSKETTITPLPHMFVIKDLVVDMTNFYNQYKSIEPWLKRKNPASVPGKEILQSKKDRAKLDGMYECILCACCSTSCPSYWWNPESYLGPAALLHANRWISDSRDEYTKERLEAIDDEFKLYRCHTILNCARACPKGLNPGKQITHIKQLQKSG

SEQ ID NO: 23323 - protein, 280 aa, Arabidopsis thaliana
  peptide (1)..(280): Ceres Seq. ID no. 12324534
  misc_feature (62)..(126): Pfam Name: 2Fe-2S iron-sulfur cluster binding domain Pfam Description: 2Fe-2S iron-sulfur cluster binding domain
  misc_feature (49)..(276): Homolog of NCBI NO: 23508823 NR Description: iron-sulfur subunit of succinate dehydrogenase
  misc_feature (1)..(277): Homolog of NCBI NO: 4803711 NR Description: iron sulfur subunit of succinate dehydrogenase
  misc_feature (46)..(277): Homolog of NCBI NO: 28611029 NR Description: succinate dehydrogenase [Triticum aestivum]
  misc_feature (45)..(277): Homolog of NCBI NO: 5688947 NR Description: succinate dehydrogenase iron-protein subunit
  misc_feature (1)..(278): Homolog of NCBI NO: 21555840 NR Description: succinate dehydrogenase iron-protein subunit,
  misc_feature (1)..(278): Homolog of NCBI NO: 12049598 NR Description: mitochondrial succinate dehydrogenase
  misc_feature (1)..(278): Homolog of NCBI NO: 15232149 NR Description: succinate dehydrogenase iron-protein subunit,
  misc_feature (1)..(280): Homolog of NCBI NO: 15237464 NR Description: succinate dehydrogenase iron-protein subunit -like
  misc_feature (1)..(280): Homolog of NCBI NO: 12049600 NR Description: mitochondrial succinate dehydrogenase
  misc_feature (1)..(280): Homolog of NCBI NO: 21593098 NR Description: succinate dehydrogenase iron-protein subunit-like
MAFGLIGRVVGTKPSRLSTAARLIPARWTSKGSEAQSKASTGGGGASLKTFQIYRWNPDNPGKPELQDYKIDLKDCGPMVLDALIKIKNEMDPSLTFRRSCREGICGSCAMNIDGCNGLACLTKIESGSKETTITPLPHMFVIKDLVVDMTNFYNQYKSIEPWLKRKNPASVPGKEILQSKKDRAKLDGMYECILCACCSTSCPSYWWNPESYLGPAALLHANRWISDSRDEYTKERLEAIDDEFKLYRCHTILNCARACPKGLNPGKQITHIKQLQKSG

SEQ ID NO: 23324 - protein, 202 aa, Arabidopsis thaliana
  peptide (1)..(202): Ceres Seq. ID no. 12324535
  misc_feature (1)..(48): Pfam Name: 2Fe-2S iron-sulfur cluster binding domain Pfam Description: 2Fe-2S iron-sulfur cluster binding domain
  misc_feature (1)..(198): Homolog of NCBI NO: 23508823 NR Description: iron-sulfur subunit of succinate dehydrogenase
  misc_feature (1)..(199): Homolog of NCBI NO: 4803711 NR Description: iron sulfur subunit of succinate dehydrogenase
  misc_feature (1)..(199): Homolog of NCBI NO: 28611029 NR Description: succinate dehydrogenase [Triticum aestivum]
  misc_feature (1)..(199): Homolog of NCBI NO: 5688947 NR Description: succinate dehydrogenase iron-protein subunit
  misc_feature (1)..(200): Homolog of NCBI NO: 21555840 NR Description: succinate dehydrogenase iron-protein subunit,
  misc_feature (1)..(200): Homolog of NCBI NO: 12049598 NR Description: mitochondrial succinate dehydrogenase
  misc_feature (1)..(200): Homolog of NCBI NO: 15232149 NR Description: succinate dehydrogenase iron-protein subunit,
  misc_feature (1)..(202): Homolog of NCBI NO: 15237464 NR Description: succinate dehydrogenase iron-protein subunit -like
  misc_feature (1)..(202): Homolog of NCBI NO: 12049600 NR Description: mitochondrial succinate dehydrogenase
  misc_feature (1)..(202): Homolog of NCBI NO: 21593098 NR Description: succinate dehydrogenase iron-protein subunit-like
MVLDALIKIKNEMDPSLTFRRSCREGICGSCAMNIDGCNGLACLTKIESGSKETTITPLPHMFVIKDLVVDMTNFYNQYKSIEPWLKRKNPASVPGKEILQSKKDRAKLDGMYECILCACCSTSCPSYWWNPESYLGPAALLHANRWISDSRDEYTKERLEAIDDEFKLYRCHTILNCARACPKGLNPGKQITHIKQLQKSG

SEQ ID NO: 23325 - DNA, 1694 bp, Arabidopsis thaliana
  misc_feature (1)..(1694): Ceres Seq. ID no. 13488383
  misc_feature: MA Experiment ID: 108569 Result: Up-regulated in Transcription
  misc_feature: MA Experiment 108569 PARAMETER Experiment Name: At_0.001%_MeJA__cDNA_P Parameter: Timepoint (hr) Value: 6
  misc_feature: MA Experiment 108569 PARAMETER Experiment Name: At_0.001%_MeJA__cDNA_P Parameter: Tissue Value: Aerial
  misc_feature: MA Experiment 108569 PARAMETER Experiment Name: At_0.001%_MeJA__cDNA_P Parameter: Treatment Value: 0.001% MeJA vs. No Treatment
  misc_feature: MA Experiment ID: 108573 Result: Up-regulated in Transcription
  misc_feature: MA Experiment 108573 PARAMETER Experiment Name: At_Drought_cDNA_P Parameter: Timepoint (hr) Value: 6
  misc_feature: MA Experiment 108573 PARAMETER Experiment Name: At_Drought_cDNA_P Parameter: Tissue Value: Aerial
  misc_feature: MA Experiment 108573 PARAMETER Experiment Name: At_Drought_cDNA_P Parameter: Treatment Value: Drought vs. No Drought
  misc_feature: MA Experiment ID: 20000087 Result: Down-regulated in Transcription
  misc_feature: MA Experiment 20000087 PARAMETER Experiment Name: At_100uM_ABA_Mutants_cDNA_P Parameter: Plant Line Value: WS
  misc_feature: MA Experiment 20000087 PARAMETER Experiment Name: At_100uM_ABA_Mutants_cDNA_P Parameter: Timepoint (hr) Value: 6
  misc_feature: MA Experiment 20000087 PARAMETER Experiment Name: At_100uM_ABA_Mutants_cDNA_P Parameter: Tissue Value: Aerial
  misc_feature: MA Experiment 20000087 PARAMETER Experiment Name: At_100uM_ABA_Mutants_cDNA_P Parameter: Treatment Value: 100uM ABA vs. No Treatment
  misc_feature: MA Experiment ID: 20000794 Result: Up-regulated in Transcription
  misc_feature: MA Experiment 20000794 PARAMETER Experiment Name: At_Petals_P Parameter: Age (day) Value: 23-25 days
  misc_feature: MA Experiment 20000794 PARAMETER Experiment Name: At_Petals_P Parameter: Plant Line Value: WS
  misc_feature: MA Experiment 20000794 PARAMETER Experiment Name: At_Petals_P Parameter: Tissue Value: Petals vs. Whole plant
attatattgtccttgcaatttataagtaaaaacatttcttttctggtccactcgttttaacttccggcgatcgattttcacggcgagaaatgttgtcggcgcttggctttgctttactcagcatcttcgcgatcctcttgtcgttatcaaccttgtctaatggattacttcaacctcgtaggatttctcatggcttgacggaaagtagcaagtacttgacgagggatgagctctggttcaatcaaaccctagatcattactctccttctgatcatcgcgaattcaaacagcgatactatgaatatctagaccatttacgagttcctgatggacctatctttatgatgatctgtggcgaaggaccttgcaatggaatccccaatgactatataactgtgttagcaaagaagtttgatgcaggcattgtttcacttgagcatcgttattacggaaagagctcaccgtttaagtcattagccactgagaatctcaagtatctttcttctaaacaggctcttttcgatttagctgctttccgccaatattaccaggactctttgaatgttaagtttaatagaagtggcgatgttgagaatccgtggtttttcttcggagcttcttattctggagctttaagtgcttggttccggcttaagttccctcatttgacctgtggaagccttgctagttctgcagttgttcgtgcagtctacgaattccctgaatttgatcaacagataggtgagtcggctggaccggaatgtaaagctgcactacaagagactaataagctcttggaactagggcttaaagtgaataacagggctgtgaaagctctcttcaatgccaccgagcttgacgttgatgctgatttcttatacttgatagcagatgcagaagttatggcgatccaatacggaaacccagataaactatgtgtaccactcgtggaagctcagaagaatcgtgatgatttagtggaagcatatgctaaatatgttagagagttttgtgtgggggttttcgggctaagctctaaaacatatagccggaaacatctgctagacactgcggtcaccccagaaagtgcagataggctttggtggttccaagtttgcactgaagtggcatatttccaagtggcacctgcaaacgatagcatccggtctcatcaaatcaatacagagtatcatttggatctatgcaagagtctgtttgggaaaggtgtttaccctgaagtcgatgcaacaaacctgtattatggaagtgacagaattgctgcgaccaagattatcttcacaaatgggtcacaggatccatggcgtcatgcatccaaacagacctcatctcctgaactgccttcttacattgtgacttgccacaactgtggccatggaagtgatctccgtggatgccctcaatctcccatggtcattggaggtgattccaagaattgcagttcacctgatgcagtgaacaaagtgaggcaacatatagtagatcatatggacttgtggctctctgagtgtcgtggagggattaggagttccatgtaaagagtcacacgaagtcagaaactgcggttatgcaaataaataaaacatcagatgtatgtttcaaacctgtatctgtgtaactgtaacctctgatgtatgtttcgaacttgtctctacggacctaatacagtagtttac

SEQ ID NO: 23326 - protein, 488 aa, Arabidopsis thaliana
  peptide (1)..(488): Ceres Seq. ID no. 13488384
  misc_feature (52)..(469): Pfam Name: Serine carboxypeptidase S28 Pfam Description: Serine carboxypeptidase S28
  misc_feature (152)..(488): Homolog of NCBI NO: 15227960 NR Description: hypothetical protein [Arabidopsis thaliana]
  misc_feature (12)..(486): Homolog of NCBI NO: 37535980 NR Description: putative serine peptidase
  misc_feature (3)..(60): Homolog of NCBI NO: 37535976 NR Description: putative serine peptidase
  misc_feature (60)..(481): Homolog of NCBI NO: 37535976 NR Description: putative serine peptidase
  misc_feature (423)..(488): Homolog of NCBI NO: 7486037 NR Description: hypothetical protein F23E13.80 - Arabidopsis
  misc_feature (61)..(297): Homolog of NCBI NO: 7486037 NR Description: hypothetical protein F23E13.80 - Arabidopsis
  misc_feature (61)..(474): Homolog of NCBI NO: 7486037 NR Description: hypothetical protein F23E13.80 - Arabidopsis
  misc_feature (1)..(156): Homolog of NCBI NO: 18419798 NR Description: expressed protein [Arabidopsis thaliana]
  misc_feature (118)..(482): Homolog of NCBI NO: 18419798 NR Description: expressed protein [Arabidopsis thaliana]
  misc_feature (1)..(488): Homolog of NCBI NO: 18419800 NR Description: expressed protein [Arabidopsis thaliana]
MLSALGFALLSIFAILLSLSTLSNGLLQPRRISHGLTESSKYLTRDELWFNQTLDHYSPSDHREFKQRYYEYLDHLRVPDGPIFMMICGEGPCNGIPNDYITVLAKKFDAGIVSLEHRYYGKSSPFKSLATENLKYLSSKQALFDLAAFRQYYQDSLNVKFNRSGDVENPWFFFGASYSGALSAWFRLKFPHLTCGSLASSAVVRAVYEFPEFDQQIGESAGPECKAALQETNKLLELGLKVNNRAVKALFNATELDVDADFLYLIADAEVMAIQYGNPDKLCVPLVEAQKNRDDLVEAYAKYVREFCVGVFGLSSKTYSRKHLLDTAVTPESADRLWWFQVCTEVAYFQVAPANDSIRSHQINTEYHLDLCKSLFGKGVYPEVDATNLYYGSDRIAATKIIFTNGSQDPWRHASKQTSSPELPSYIVTCHNCGHGSDLRGCPQSPMVIGGDSKNCSSPDAVNKVRQHIVDHMDLWLSECRGGIRSSM

SEQ ID NO: 23327 - protein, 404 aa, Arabidopsis thaliana
  peptide (1)..(404): Ceres Seq. ID no. 13488385
  misc_feature (1)..(385): Pfam Name: Serine carboxypeptidase S28 Pfam Description: Serine carboxypeptidase S28
  misc_feature (1)..(25): Homolog of NCBI NO: 15227960 NR Description: hypothetical protein [Arabidopsis thaliana]
  misc_feature (68)..(404): Homolog of NCBI NO: 15227960 NR Description: hypothetical protein [Arabidopsis thaliana]
  misc_feature (1)..(402): Homolog of NCBI NO: 37535980 NR Description: putative serine peptidase
  misc_feature (1)..(397): Homolog of NCBI NO: 37535976 NR Description: putative serine peptidase
  misc_feature (339)..(404): Homolog of NCBI NO: 7486037 NR Description: hypothetical protein F23E13.80 - Arabidopsis
  misc_feature (1)..(213): Homolog of NCBI NO: 7486037 NR Description: hypothetical protein F23E13.80 - Arabidopsis
  misc_feature (1)..(390): Homolog of NCBI NO: 7486037 NR Description: hypothetical protein F23E13.80 - Arabidopsis
  misc_feature (1)..(72): Homolog of NCBI NO: 18419798 NR Description: expressed protein [Arabidopsis thaliana]
  misc_feature (34)..(398): Homolog of NCBI NO: 18419798 NR Description: expressed protein [Arabidopsis thaliana]
  misc_feature (1)..(404): Homolog of NCBI NO: 18419800 NR Description: expressed protein [Arabidopsis thaliana]
MMICGEGPCNGIPNDYITVLAKKFDAGIVSLEHRYYGKSSPFKSLATENLKYLSSKQALFDLAAFRQYYQDSLNVKFNRSGDVENPWFFFGASYSGALSAWFRLKFPHLTCGSLASSAVVRAVYEFPEFDQQIGESAGPECKAALQETNKLLELGLKVNNRAVKALFNATELDVDADFLYLIADAEVMAIQYGNPDKLCVPLVEAQKNRDDLVEAYAKYVREFCVGVFGLSSKTYSRKHLLDTAVTPESADRLWWFQVCTEVAYFQVAPANDSIRSHQINTEYHLDLCKSLFGKGVYPEVDATNLYYGSDRIAATKIIFTNGSQDPWRHASKQTSSPELPSYIVTCHNCGHGSDLRGCPQSPMVIGGDSKNCSSPDAVNKVRQHIVDHMDLWLSECRGGIRSSM

SEQ ID NO: 23328 - protein, 403 aa, Arabidopsis thaliana
  peptide (1)..(403): Ceres Seq. ID no. 13488386
  misc_feature (1)..(384): Pfam Name: Serine carboxypeptidase S28 Pfam Description: Serine carboxypeptidase S28
  misc_feature (1)..(24): Homolog of NCBI NO: 15227960 NR Description: hypothetical protein [Arabidopsis thaliana]
  misc_feature (67)..(403): Homolog of NCBI NO: 15227960 NR Description: hypothetical protein [Arabidopsis thaliana]
  misc_feature (1)..(401): Homolog of NCBI NO: 37535980 NR Description: putative serine peptidase
  misc_feature (1)..(396): Homolog of NCBI NO: 37535976 NR Description: putative serine peptidase
  misc_feature (338)..(403): Homolog of NCBI NO: 7486037 NR Description: hypothetical protein F23E13.80 - Arabidopsis
  misc_feature (1)..(212): Homolog of NCBI NO: 7486037 NR Description: hypothetical protein F23E13.80 - Arabidopsis
  misc_feature (1)..(389): Homolog of NCBI NO: 7486037 NR Description: hypothetical protein F23E13.80 - Arabidopsis
  misc_feature (1)..(71): Homolog of NCBI NO: 18419798 NR Description: expressed protein [Arabidopsis thaliana]
  misc_feature (33)..(397): Homolog of NCBI NO: 18419798 NR Description: expressed protein [Arabidopsis thaliana]
  misc_feature (1)..(403): Homolog of NCBI NO: 18419800 NR Description: expressed protein [Arabidopsis thaliana]
MICGEGPCNGIPNDYITVLAKKFDAGIVSLEHRYYGKSSPFKSLATENLKYLSSKQALFDLAAFRQYYQDSLNVKFNRSGDVENPWFFFGASYSGALSAWFRLKFPHLTCGSLASSAVVRAVYEFPEFDQQIGESAGPECKAALQETNKLLELGLKVNNRAVKALFNATELDVDADFLYLIADAEVMAIQYGNPDKLCVPLVEAQKNRDDLVEAYAKYVREFCVGVFGLSSKTYSRKHLLDTAVTPESADRLWWFQVCTEVAYFQVAPANDSIRSHQINTEYHLDLCKSLFGKGVYPEVDATNLYYGSDRIAATKIIFTNGSQDPWRHASKQTSSPELPSYIVTCHNCGHGSDLRGCPQSPMVIGGDSKNCSSPDAVNKVRQHIVDHMDLWLSECRGGIRSSM

SEQ ID NO: 23329 - DNA, 1321 bp, Arabidopsis thaliana
  misc_feature (1)..(1321): Ceres Seq. ID no. 13487919
  misc_feature: MA Experiment ID: 108434 Result: Up-regulated in Transcription
  misc_feature: MA Experiment 108434 PARAMETER Experiment Name: At_Root_Tips_cDNA_P Parameter: Tissue Value: Root Tips
  misc_feature: MA Experiment ID: 108435 Result: Up-regulated in Transcription
  misc_feature: MA Experiment 108435 PARAMETER Experiment Name: At_stm_Mutants_cDNA_P Parameter: Plant Line Value: wt Landsburg vs stm
  misc_feature: MA Experiment 108435 PARAMETER Experiment Name: At_stm_Mutants_cDNA_P Parameter: Tissue Value: Shoot Apical Meristem Region
  misc_feature: MA Experiment ID: 108462 Result: Down-regulated in Transcription
  misc_feature: MA Experiment 108462 PARAMETER Experiment Name: At_Germinating_Seeds_cDNA_P Parameter: Age (day) Value: 2 vs. 0
  misc_feature: MA Experiment 108462 PARAMETER Experiment Name: At_Germinating_Seeds_cDNA_P Parameter: Tissue Value: Germinating Seeds
  misc_feature: MA Experiment ID: 108463 Result: Down-regulated in Transcription
  misc_feature: MA Experiment 108463 PARAMETER Experiment Name: At_Germinating_Seeds_cDNA_P Parameter: Age (day) Value: 3 vs. 0
  misc_feature: MA Experiment 108463 PARAMETER Experiment Name: At_Germinating_Seeds_cDNA_P Parameter: Tissue Value: Germinating Seeds
  misc_feature: MA Experiment ID: 108464 Result: Down-regulated in Transcription
  misc_feature: MA Experiment 108464 PARAMETER Experiment Name: At_Germinating_Seeds_cDNA_P Parameter: Age (day) Value: 4 vs. 0
  misc_feature: MA Experiment 108464 PARAMETER Experiment Name: At_Germinating_Seeds_cDNA_P Parameter: Tissue Value: Germinating Seeds
  misc_feature: MA Experiment ID: 108585 Result: Down-regulated in Transcription
  misc_feature: MA Experiment 108585 PARAMETER Experiment Name: At_5mM_NaNP_cDNA_P Parameter: Timepoint (hr) Value: 6
  misc_feature: MA Experiment 108585 PARAMETER Experiment Name: At_5mM_NaNP_cDNA_P Parameter: Tissue Value: Aerial
  misc_feature: MA Experiment 108585 PARAMETER Experiment Name: At_5mM_NaNP_cDNA_P Parameter: Treatment Value: null
  misc_feature: MA Experiment ID: 20000227 Result: Up-regulated in Transcription
  misc_feature: MA Experiment 20000227 PARAMETER Experiment Name: At_Root-Tips-vs-Tops_P Parameter: Tissue Value: Root Tips vs. Root Tops
  misc_feature: MA Experiment ID: 20000264 Result: Up-regulated in Transcription
  misc_feature: MA Experiment 20000264 PARAMETER Experiment Name: At_Open_Flower_P Parameter: Age (day) Value: 21
  misc_feature: MA Experiment 20000264 PARAMETER Experiment Name: At_Open_Flower_P Parameter: Plant Line Value: WS
  misc_feature: MA Experiment 20000264 PARAMETER Experiment Name: At_Open_Flower_P Parameter: Tissue Value: Open Flower vs. Whole Plant
  misc_feature: MA Experiment ID: 20000286 Result: Up-regulated in Transcription
  misc_feature: MA Experiment 20000286 PARAMETER Experiment Name: At_Open_Flower_P Parameter: Age (day) Value: 21
  misc_feature: MA Experiment 20000286 PARAMETER Experiment Name: At_Open_Flower_P Parameter: Plant Line Value: WS
  misc_feature: MA Experiment 20000286 PARAMETER Experiment Name: At_Open_Flower_P Parameter: Tissue Value: Half Open vs. Whole Plant
  misc_feature: MA Experiment ID: 20000437 Result: Down-regulated in Transcription
  misc_feature: MA Experiment 20000437 PARAMETER Experiment Name: At_Drought_P Parameter: Age (day) Value: 8
  misc_feature: MA Experiment 20000437 PARAMETER Experiment Name: At_Drought_P Parameter: Organism Value: A. thaliana
  misc_feature: MA Experiment 20000437 PARAMETER Experiment Name: At_Drought_P Parameter: Plant Line Value: WS
  misc_feature: MA Experiment 20000437 PARAMETER Experiment Name: At_Drought_P Parameter: Timepoint (hr) Value: 24
  misc_feature: MA Experiment 20000437 PARAMETER Experiment Name: At_Drought_P Parameter: Tissue Value: Whole Plant
  misc_feature: MA Experiment 20000437 PARAMETER Experiment Name: At_Drought_P Parameter: Treatment Value: Drought vs. No Drought
  misc_feature: MA Experiment ID: 20001558 Result: Up-regulated in Transcription
  misc_feature: MA Experiment 20001558 PARAMETER Experiment Name: At_Drought_Soil_Dry_P Parameter: Age (day) Value: 27
  misc_feature: MA Experiment 20001558 PARAMETER Experiment Name: At_Drought_Soil_Dry_P Parameter: Organism Value: A. thaliana
  misc_feature: MA Experiment 20001558 PARAMETER Experiment Name: At_Drought_Soil_Dry_P Parameter: Plant Line Value: WS
  misc_feature: MA Experiment 20001558 PARAMETER Experiment Name: At_Drought_Soil_Dry_P Parameter: Post Timepoint (hr) Value: 6
  misc_feature: MA Experiment 20001558 PARAMETER Experiment Name: At_Drought_Soil_Dry_P Parameter: Post-Treatment Value: Re-Water vs. No Drought
  misc_feature: MA Experiment 20001558 PARAMETER Experiment Name: At_Drought_Soil_Dry_P Parameter: Timepoint (day) Value: 13
  misc_feature: MA Experiment 20001558 PARAMETER Experiment Name: At_Drought_Soil_Dry_P Parameter: Treatment Value: Drought vs. No Drought
  misc_feature: MA Experiment ID: 20001560 Result: Up-regulated in Transcription
  misc_feature: MA Experiment 20001560 PARAMETER Experiment Name: At_Drought_Soil_Dry_P Parameter: Age (day) Value: 28
  misc_feature: MA Experiment 20001560 PARAMETER Experiment Name: At_Drought_Soil_Dry_P Parameter: Organism Value: A. thaliana
  misc_feature: MA Experiment 20001560 PARAMETER Experiment Name: At_Drought_Soil_Dry_P Parameter: Plant Line Value: WS
  misc_feature: MA Experiment 20001560 PARAMETER Experiment Name: At_Drought_Soil_Dry_P Parameter: Post Timepoint (hr) Value: None
  misc_feature: MA Experiment 20001560 PARAMETER Experiment Name: At_Drought_Soil_Dry_P Parameter: Post-Treatment Value: None
  misc_feature: MA Experiment 20001560 PARAMETER Experiment Name: At_Drought_Soil_Dry_P Parameter: Timepoint (day) Value: 14
  misc_feature: MA Experiment 20001560 PARAMETER Experiment Name: At_Drought_Soil_Dry_P Parameter: Treatment Value: Drought vs. No Drought
  misc_feature: MA Experiment ID: 20001757 Result: Up-regulated in Transcription
  misc_feature: MA Experiment 20001757 PARAMETER Experiment Name: At_50mM_NH4NO3_L-to-H_P Parameter: Timepoint (hr) Value: 6
  misc_feature: MA Experiment 20001757 PARAMETER Experiment Name: At_50mM_NH4NO3_L-to-H_P Parameter: Tissue Value: Leaf
  misc_feature: MA Experiment 20001757 PARAMETER Experiment Name: At_50mM_NH4NO3_L-to-H_P Parameter: Treatment Value: 50mM NH4NO3 vs 100mM Mannitol
aaggtttgaacataaatcctaatttcgttgctcgacagcaatctcggaccaagtggaaaccgaaaatggcggcgaatgggctaatggcggcatctagtgtgtttctccaccgtcctgtacatccccatttctcgttctcttctagaacgaatcaaatggttccactcggcttcaaaggccgtgttagtttcatcggcaatgtgaaacgctgttttccggtggtattgtcaatgggaaagtcggagactttcgaggaagctggaaattccgttgcgcctggtaacggcatatcgatcatggtgaatggatgcagtggtaaaatggggaaagctgtcatcaaagcggcagattctgctggagtgaatattgttcctacatcatttgagtctgttgaagaggctggccagactgttgaggtctgtgaaaggagattcttgtgcatggtcctactgaaagagaaaaggtgctgtcttcagtgtttgagaagtatcctgaactaattgttgtggactacacaattccctctgcagtaaatgataatgcagagctgtatggcaaagtaggagttccgttcgtaatgggaacaactggaggagacaggacaagattgtataaaactgtcgaggaatcaaagatttatgctgtgatttctccacagatgggtaaacaggttgttgcgtttcttgcagcaatggagatcatgtctgagcagtttcctggtgcatttgctggttattccttagaggtgatggagtctcatcaagctagcaaattggatgcatctggtactgcaaaagctgttatttcttgctttcagaaattaggcgtgtcttacgacatggaccagatacaattaattcgagatcctaagcagcagattgaggtggtgggtgttccagaggagcatgtctcgggtcatgctttccatctttatcacttgacatcaccagataaaactgtgtcctttgagttccagcacaatgtttgcggaagatcaatatatgctgagggtactgttgatgcagtgctattccttgccaaaaagatccggtctaaagcagagaagaggatctataacatgattgatgtcttgtgagagggaaacatgcgttgaacaaaccccaagctgcagtggctagtaaagaagagtatatgaaactctatataaaaaaatgtcatgccaagttaaatgtgctttggttcttcatttctttgtagggttttgtctttttatggcttctctgtttctcttttcggatttgcaaaattcctgagaaaattgtcatttcttttcgattatagtcgtctttcttcgggatct

SEQ ID NO: 23330 - protein, 172 aa, Arabidopsis thaliana
  peptide (1)..(172): Ceres Seq. ID no. 13487920
  misc_feature (31)..(172): Pfam Name: Dihydrodipicolinate reductase, C-terminus Pfam Description: Dihydrodipicolinate reductase, C-terminus
  misc_feature (1)..(157): Homolog of NCBI NO: 7486478 NR Description: hypothetical protein At2g44040 [imported] -
  misc_feature (1)..(172): Homolog of NCBI NO: 18406430 NR Description: expressed protein [Arabidopsis thaliana]
  misc_feature (1)..(156): Homolog of NCBI NO: 11357603 NR Description: hypothetical protein F24G16.160 - Arabidopsis
  misc_feature (1)..(172): Homolog of NCBI NO: 18411368 NR Description: expressed protein [Arabidopsis thaliana]
MGTTGGDRTRLYKTVEESKIYAVISPQMGKQVVAFLAAMEIMSEQFPGAFAGYSLEVMESHQASKLDASGTAKAVISCFQKLGVSYDMDQIQLIRDPKQQIEVVGVPEEHVSGHAFHLYHLTSPDKTVSFEFQHNVCGRSIYAEGTVDAVLFLAKKIRSKAEKRIYNMIDVL

SEQ ID NO: 23331 - protein, 165 aa, Arabidopsis thaliana
  peptide (1)..(165): Ceres Seq. ID no. 13487921
  misc_feature (22)..(145): Homolog of NCBI NO: 18411368 NR Description: expressed protein [Arabidopsis thaliana]
  misc_feature (22)..(140): Homolog of NCBI NO: 18406430 NR Description: expressed protein [Arabidopsis thaliana]
  misc_feature (22)..(145): Homolog of NCBI NO: 11357603 NR Description: hypothetical protein F24G16.160 - Arabidopsis
  misc_feature (28)..(140): Homolog of NCBI NO: 7486478 NR Description: hypothetical protein At2g44040 [imported] -
GLNINPNFVARQQSRTKWKPKMAANGLMAASSVFLHRPVHPHFSFSSRTNQMVPLGFKGRVSFIGNVKRCFPVVLSMGKSETFEEAGNSVAPGNGISIMVNGCSGKMGKAVIKAADSAGVNIVPTSFESVEEAGQTVEVCERRFLCMVLLKEKRCCLQCLRSILN

SEQ ID NO: 23332 - protein, 145 aa, Arabidopsis thaliana
  peptide (1)..(145): Ceres Seq. ID no. 13487922
  misc_feature (4)..(145): Pfam Name: Dihydrodipicolinate reductase, C-terminus Pfam Description: Dihydrodipicolinate reductase, C-terminus
  misc_feature (1)..(130): Homolog of NCBI NO: 7486478 NR Description: hypothetical protein At2g44040 [imported] -
  misc_feature (1)..(145): Homolog of NCBI NO: 18406430 NR Description: expressed protein [Arabidopsis thaliana]
  misc_feature (1)..(129): Homolog of NCBI NO: 11357603 NR Description: hypothetical protein F24G16.160 - Arabidopsis
  misc_feature (1)..(145): Homolog of NCBI NO: 18411368 NR Description: expressed protein [Arabidopsis thaliana]
MGKQVVAFLAAMEIMSEQFPGAFAGYSLEVMESHQASKLDASGTAKAVISCFQKLGVSYDMDQIQLIRDPKQQIEVVGVPEEHVSGHAFHLYHLTSPDKTVSFEFQHNVCGRSIYAEGTVDAVLFLAKKIRSKAEKRIYNMIDVL

SEQ ID NO: 23333 - DNA, 1286 bp, Arabidopsis thaliana
  misc_feature (1)..(1286): Ceres Seq. ID no. 12335298
  misc_feature: MA Experiment ID: 108461 Result: Down-regulated in Transcription
  misc_feature: MA Experiment 108461 PARAMETER Experiment Name: At_Germinating_Seeds_cDNA_P Parameter: Age (day) Value: 1 vs. 0
  misc_feature: MA Experiment 108461 PARAMETER Experiment Name: At_Germinating_Seeds_cDNA_P Parameter: Tissue Value: Germinating Seeds
  misc_feature: MA Experiment ID: 108463 Result: Up-regulated in Transcription
  misc_feature: MA Experiment 108463 PARAMETER Experiment Name: At_Germinating_Seeds_cDNA_P Parameter: Age (day) Value: 3 vs. 0
  misc_feature: MA Experiment 108463 PARAMETER Experiment Name: At_Germinating_Seeds_cDNA_P Parameter: Tissue Value: Germinating Seeds
  misc_feature: MA Experiment ID: 108469 Result: Up-regulated in Transcription
  misc_feature: MA Experiment ID: 108561 Result: Up-regulated in Transcription
  misc_feature: MA Experiment 108561 PARAMETER Experiment Name: At_100uM_ABA_cDNA_P Parameter: Timepoint (hr) Value: 6
  misc_feature: MA Experiment 108561 PARAMETER Experiment Name: At_100uM_ABA_cDNA_P Parameter: Tissue Value: Aerial
  misc_feature: MA Experiment 108561 PARAMETER Experiment Name: At_100uM_ABA_cDNA_P Parameter: Treatment Value: 100uM ABA vs. No Treatment
  misc_feature: MA Experiment ID: 108573 Result: Up-regulated in Transcription
  misc_feature: MA Experiment 108573 PARAMETER Experiment Name: At_Drought_cDNA_P Parameter: Timepoint (hr) Value: 6
  misc_feature: MA Experiment 108573 PARAMETER Experiment Name: At_Drought_cDNA_P Parameter: Tissue Value: Aerial
  misc_feature: MA Experiment 108573 PARAMETER Experiment Name: At_Drought_cDNA_P Parameter: Treatment Value: Drought vs. No Drought
  misc_feature: MA Experiment ID: 108579 Result: Down-regulated in Transcription
  misc_feature: MA Experiment 108579 PARAMETER Experiment Name: At_4deg_Cold_cDNA_P Parameter: Temperature (deg C) Value: 4 vs. 22
  misc_feature: MA Experiment 108579 PARAMETER Experiment Name: At_4deg_Cold_cDNA_P Parameter: Timepoint (hr) Value: 6
  misc_feature: MA Experiment 108579 PARAMETER Experiment Name: At_4deg_Cold_cDNA_P Parameter: Tissue Value: Aerial
  misc_feature: MA Experiment ID: 108607 Result: Up-regulated in Transcription
  misc_feature: MA Experiment 108607 PARAMETER Experiment Name: At_100uM_ABA_cDNA_P Parameter: Timepoint (hr) Value: 4
  misc_feature: MA Experiment 108607 PARAMETER Experiment Name: At_100uM_ABA_cDNA_P Parameter: Tissue Value: Aerial
  misc_feature: MA Experiment 108607 PARAMETER Experiment Name: At_100uM_ABA_cDNA_P Parameter: Treatment Value: 100uM ABA vs. No Treatment
  misc_feature: MA Experiment ID: 20000069 Result: Up-regulated in Transcription
  misc_feature: MA Experiment 20000069 PARAMETER Experiment Name: At_100uM_ABA_Mutants_cDNA_P Parameter: Plant Line Value: CS23
  misc_feature: MA Experiment 20000069 PARAMETER Experiment Name: At_100uM_ABA_Mutants_cDNA_P Parameter: Timepoint (hr) Value: 6
  misc_feature: MA Experiment 20000069 PARAMETER Experiment Name: At_100uM_ABA_Mutants_cDNA_P Parameter: Tissue Value: Aerial
  misc_feature: MA Experiment 20000069 PARAMETER Experiment Name: At_100uM_ABA_Mutants_cDNA_P Parameter: Treatment Value: 100uM ABA vs. No Treatment
  misc_feature: MA Experiment ID: 20000070 Result: Up-regulated in Transcription
  misc_feature: MA Experiment 20000070 PARAMETER Experiment Name: At_100uM_ABA_Mutants_cDNA_P Parameter: Plant Line Value: CS24
  misc_feature: MA Experiment 20000070 PARAMETER Experiment Name: At_100uM_ABA_Mutants_cDNA_P Parameter: Timepoint (hr) Value: 6
  misc_feature: MA Experiment 20000070 PARAMETER Experiment Name: At_100uM_ABA_Mutants_cDNA_P Parameter: Tissue Value: Aerial
  misc_feature: MA Experiment 20000070 PARAMETER Experiment Name: At_100uM_ABA_Mutants_cDNA_P Parameter: Treatment Value: 100uM ABA vs. No Treatment
  misc_feature: MA Experiment ID: 20000071 Result: Up-regulated in Transcription
  misc_feature: MA Experiment 20000071 PARAMETER Experiment Name: At_100uM_ABA_Mutants_cDNA_P Parameter: Plant Line Value: CS8104
  misc_feature: MA Experiment 20000071 PARAMETER Experiment Name: At_100uM_ABA_Mutants_cDNA_P Parameter: Timepoint (hr) Value: 6
  misc_feature: MA Experiment 20000071 PARAMETER Experiment Name: At_100uM_ABA_Mutants_cDNA_P Parameter: Tissue Value: Aerial
  misc_feature: MA Experiment 20000071 PARAMETER Experiment Name: At_100uM_ABA_Mutants_cDNA_P Parameter: Treatment Value: 100uM ABA vs. No Treatment
  misc_feature: MA Experiment ID: 20000072 Result: Up-regulated in Transcription
  misc_feature: MA Experiment 20000072 PARAMETER Experiment Name: At_100uM_ABA_Mutants_cDNA_P Parameter: Plant Line Value: CS8105
  misc_feature: MA Experiment 20000072 PARAMETER Experiment Name: At_100uM_ABA_Mutants_cDNA_P Parameter: Timepoint (hr) Value: 6
  misc_feature: MA Experiment 20000072 PARAMETER Experiment Name: At_100uM_ABA_Mutants_cDNA_P Parameter: Tissue Value: Aerial
  misc_feature: MA Experiment 20000072 PARAMETER Experiment Name: At_100uM_ABA_Mutants_cDNA_P Parameter: Treatment Value: 100uM ABA vs. No Treatment
  misc_feature: MA Experiment ID: 20000086 Result: Up-regulated in Transcription
  misc_feature: MA Experiment 20000086 PARAMETER Experiment Name: At_100uM_ABA_Mutants_cDNA_P Parameter: Plant Line Value: CS22
  misc_feature: MA Experiment 20000086 PARAMETER Experiment Name: At_100uM_ABA_Mutants_cDNA_P Parameter: Timepoint (hr) Value: 6
  misc_feature: MA Experiment 20000086 PARAMETER Experiment Name: At_100uM_ABA_Mutants_cDNA_P Parameter: Tissue Value: Aerial
  misc_feature: MA Experiment 20000086 PARAMETER Experiment Name: At_100uM_ABA_Mutants_cDNA_P Parameter: Treatment Value: 100uM ABA vs. No Treatment
  misc_feature: MA Experiment ID: 20000087 Result: Up-regulated in Transcription
  misc_feature: MA Experiment 20000087 PARAMETER Experiment Name: At_100uM_ABA_Mutants_cDNA_P Parameter: Plant Line Value: WS
  misc_feature: MA Experiment 20000087 PARAMETER Experiment Name: At_100uM_ABA_Mutants_cDNA_P Parameter: Timepoint (hr) Value: 6
  misc_feature: MA Experiment 20000087 PARAMETER Experiment Name: At_100uM_ABA_Mutants_cDNA_P Parameter: Tissue Value: Aerial
  misc_feature: MA Experiment 20000087 PARAMETER Experiment Name: At_100uM_ABA_Mutants_cDNA_P Parameter: Treatment Value: 100uM ABA vs. No Treatment
  misc_feature: MA Experiment ID: 20000088 Result: Up-regulated in Transcription
  misc_feature: MA Experiment 20000088 PARAMETER Experiment Name: At_100uM_ABA_Mutants_cDNA_P Parameter: Plant Line Value: Landsberg
  misc_feature: MA Experiment 20000088 PARAMETER Experiment Name: At_100uM_ABA_Mutants_cDNA_P Parameter: Timepoint (hr) Value: 6
  misc_feature: MA Experiment 20000088 PARAMETER Experiment Name: At_100uM_ABA_Mutants_cDNA_P Parameter: Tissue Value: Aerial
  misc_feature: MA Experiment 20000088 PARAMETER Experiment Name: At_100uM_ABA_Mutants_cDNA_P Parameter: Treatment Value: 100uM ABA vs. No Treatment
  misc_feature: MA Experiment ID: 20000089 Result: Up-regulated in Transcription
  misc_feature: MA Experiment ID: 20000090 Result: Up-regulated in Transcription
  misc_feature: MA Experiment ID: 20000111 Result: Down-regulated in Transcription
  misc_feature: MA Experiment 20000111 PARAMETER Experiment Name: At_42deg_Heat_cDNA_P Parameter: Temperature (deg C) Value: 42 vs. 22
  misc_feature: MA Experiment 20000111 PARAMETER Experiment Name: At_42deg_Heat_cDNA_P Parameter: Timepoint (hr) Value: 6
  misc_feature: MA Experiment 20000111 PARAMETER Experiment Name: At_42deg_Heat_cDNA_P Parameter: Tissue Value: Aerial
  misc_feature: MA Experiment ID: 20000113 Result: Down-regulated in Transcription
  misc_feature: MA Experiment 20000113 PARAMETER Experiment Name: At_42deg_Heat_cDNA_P Parameter: Temperature (deg C) Value: 42 vs. 22
  misc_feature: MA Experiment 20000113 PARAMETER Experiment Name: At_42deg_Heat_cDNA_P Parameter: Timepoint (hr) Value: 8
  misc_feature: MA Experiment 20000113 PARAMETER Experiment Name: At_42deg_Heat_cDNA_P Parameter: Tissue Value: Aerial
  misc_feature: MA Experiment ID: 20000117 Result: Up-regulated in Transcription
  misc_feature: MA Experiment 20000117 PARAMETER Experiment Name: At_100uM_ABA_Mutants_cDNA_P Parameter: Plant Line Value: Columbia
  misc_feature: MA Experiment 20000117 PARAMETER Experiment Name: At_100uM_ABA_Mutants_cDNA_P Parameter: Timepoint (hr) Value: 6
  misc_feature: MA Experiment 20000117 PARAMETER Experiment Name: At_100uM_ABA_Mutants_cDNA_P Parameter: Tissue Value: Aerial
  misc_feature: MA Experiment 20000117 PARAMETER Experiment Name: At_100uM_ABA_Mutants_cDNA_P Parameter: Treatment Value: 100uM ABA vs. No Treatment
  misc_feature: MA Experiment ID: 20000166 Result: Up-regulated in Transcription
  misc_feature: MA Experiment 20000166 PARAMETER Experiment Name: At_100uM_ABA_P Parameter: Age (day) Value: 14
  misc_feature: MA Experiment 20000166 PARAMETER Experiment Name: At_100uM_ABA_P Parameter: Organism Value: A. thaliana
  misc_feature: MA Experiment 20000166 PARAMETER Experiment Name: At_100uM_ABA_P Parameter: Plant Line Value: WS
  misc_feature: MA Experiment 20000166 PARAMETER Experiment Name: At_100uM_ABA_P Parameter: Timepoint (hr) Value: 1
  misc_feature: MA Experiment 20000166 PARAMETER Experiment Name: At_100uM_ABA_P Parameter: Tissue Value: Aerial
  misc_feature: MA Experiment 20000166 PARAMETER Experiment Name: At_100uM_ABA_P Parameter: Treatment Value: 100uM ABA vs. No Treatment
  misc_feature: MA Experiment ID: 20000173 Result: Down-regulated in Transcription
  misc_feature: MA Experiment 20000173 PARAMETER Experiment Name: At_42deg_Heat_P Parameter: Age (day) Value: 14
  misc_feature: MA Experiment 20000173 PARAMETER Experiment Name: At_42deg_Heat_P Parameter: Organism Value: A. thaliana
  misc_feature: MA Experiment 20000173 PARAMETER Experiment Name: At_42deg_Heat_P Parameter: Plant Line Value: WS
  misc_feature: MA Experiment 20000173 PARAMETER Experiment Name: At_42deg_Heat_P Parameter: Temperature (deg C) Value: 42 vs. 22
  misc_feature: MA Experiment 20000173 PARAMETER Experiment Name: At_42deg_Heat_P Parameter: Timepoint (hr) Value: 6
  misc_feature: MA Experiment 20000173 PARAMETER Experiment Name: At_42deg_Heat_P Parameter: Tissue Value: Aerial
  misc_feature: MA Experiment ID: 20000179 Result: Down-regulated in Transcription
  misc_feature: MA Experiment 20000179 PARAMETER Experiment Name: At_Germinating_Seeds_P Parameter: Age (hr) Value: 6 vs. 0
  misc_feature: MA Experiment 20000179 PARAMETER Experiment Name: At_Germinating_Seeds_P Parameter: Tissue Value: Germinating Seeds
  misc_feature: MA Experiment ID: 20000184 Result: Down-regulated in Transcription
  misc_feature: MA Experiment 20000184 PARAMETER Experiment Name: At_Shoots__P Parameter: Age (day) Value: 7
  misc_feature: MA Experiment 20000184 PARAMETER Experiment Name: At_Shoots__P Parameter: Tissue Value: Shoots vs. Whole Plant
  misc_feature: MA Experiment ID: 20000224 Result: Up-regulated in Transcription
  misc_feature: MA Experiment ID: 20000234 Result: Down-regulated in Transcription
  misc_feature: MA Experiment 20000234 PARAMETER Experiment Name: At_Siliques_P Parameter: Age (day) Value: 21
  misc_feature: MA Experiment 20000234 PARAMETER Experiment Name: At_Siliques_P Parameter: Organism Value: A. thaliana
  misc_feature: MA Experiment 20000234 PARAMETER Experiment Name: At_Siliques_P Parameter: Plant Line Value: WS
  misc_feature: MA Experiment 20000234 PARAMETER Experiment Name: At_Siliques_P Parameter: Tissue Value: Less Than 5mm Siliques vs. Whole Plant
  misc_feature: MA Experiment ID: 20000235 Result: Down-regulated in Transcription
  misc_feature: MA Experiment 20000235 PARAMETER Experiment Name: At_Siliques_P Parameter: Age (day) Value: 21
  misc_feature: MA Experiment 20000235 PARAMETER Experiment Name: At_Siliques_P Parameter: Organism Value: A. thaliana
  misc_feature: MA Experiment 20000235 PARAMETER Experiment Name: At_Siliques_P Parameter: Plant Line Value: WS
  misc_feature: MA Experiment 20000235 PARAMETER Experiment Name: At_Siliques_P Parameter: Tissue Value: 5-10mm Siliques vs. Whole Plant
  misc_feature: MA Experiment ID: 20000286 Result: Down-regulated in Transcription
  misc_feature: MA Experiment 20000286 PARAMETER Experiment Name: At_Open_Flower_P Parameter: Age (day) Value: 21
  misc_feature: MA Experiment 20000286 PARAMETER Experiment Name: At_Open_Flower_P Parameter: Plant Line Value: WS
  misc_feature: MA Experiment 20000286 PARAMETER Experiment Name: At_Open_Flower_P Parameter: Tissue Value: Half Open vs. Whole Plant
  misc_feature: MA Experiment ID: 20000437 Result: Up-regulated in Transcription
  misc_feature: MA Experiment 20000437 PARAMETER Experiment Name: At_Drought_P Parameter: Age (day) Value: 8
  misc_feature: MA Experiment 20000437 PARAMETER Experiment Name: At_Drought_P Parameter: Organism Value: A. thaliana
  misc_feature: MA Experiment 20000437 PARAMETER Experiment Name: At_Drought_P Parameter: Plant Line Value: WS
  misc_feature: MA Experiment 20000437 PARAMETER Experiment Name: At_Drought_P Parameter: Timepoint (hr) Value: 24
  misc_feature: MA Experiment 20000437 PARAMETER Experiment Name: At_Drought_P Parameter: Tissue Value: Whole Plant
  misc_feature: MA Experiment 20000437 PARAMETER Experiment Name: At_Drought_P Parameter: Treatment Value: Drought vs. No Drought
  misc_feature: MA Experiment ID: 20001911 Result: Up-regulated in Transcription
  misc_feature: MA Experiment 20001911 PARAMETER Experiment Name: At_Drought_Reproduction_P Parameter: Age (day) Value: 40
  misc_feature: MA Experiment 20001911 PARAMETER Experiment Name: At_Drought_Reproduction_P Parameter: Organism Value: A. thaliana
  misc_feature: MA Experiment 20001911 PARAMETER Experiment Name: At_Drought_Reproduction_P Parameter: Plant Line Value: WS
  misc_feature: MA Experiment 20001911 PARAMETER Experiment Name: At_Drought_Reproduction_P Parameter: Timepoint (day) Value: 10
  misc_feature: MA Experiment 20001911 PARAMETER Experiment Name: At_Drought_Reproduction_P Parameter: Tissue Value: Flowers
  misc_feature: MA Experiment 20001911 PARAMETER Experiment Name: At_Drought_Reproduction_P Parameter: Treatment Value: Drought vs. No Drought
aaaattgattactctgttttggttttggatcagatcaaccaaaggaagcgaagaagaagaagactttatacactctcgacgctattgatttcgtctgtgcagttttgtttctctatcagttagttttaaagatgagttcttcagagagtgtggaaaacgagtgcatgtgttgggctgcaagagatccatctggtcttctttctcctcatactatcactcgcaggtctgttacaactgacgatgtttcactcacaatcactcattgtggagtgtgttacgctgatgttatctggagtagaaaccaacatggagactccaagtaccctttggttcctgggcatgagattgctggaatagtgactaaggttgggcctaatgttcaacgattcaaagttggagaccatgttggtgttggaacgtatgttaactcctgcagggagtgtgaatattgtaatgaaggacaagaagttaattgtgcgaaaggagtttttactttcaatggcattgatcatgatggctctgttactaaaggaggctactctagtcacattgttgttcatgaaaggtactgctacaagatacctgtggactatcccttggaatcagctgcaccattactctgtgctggaatcacggtttatgcacctatgatgcgtcacaatatgaatcaacctggtaaatctcttggggtgatcgggctaggtggtcttggacacatggcggttaagtttggcaaggcttttggacttagtgttacggtttttagcaccagcatttccaagaaagaagaagctttgaatctgctaggagctgagaatttcgttatctcatctgaccatgaccagatgaaggcactagagaaatctctagactttctagttgacacagcatctggtgatcacgcgtttgatccttacatgtctctcttgaagattgctggaacttatgtattggttggtttcccaagtgaaattaaaatcagtcctgccaatctcaatcttggtatgagaatgctcgctggaagcgtaaccggggggaccaaaataacacagcaaatgttagatttctgtgcagctcataagatttatccaaacatagaggtgattcccattcaaaagataaacgaagctctcgaaagagtggtgaagaaggacatcaagtaccgtttcgtgattgacatcaagaactccctcaaatagatgttgctcaaaggaaggaataatggagtctgtaataagagaataatactcactgctacaatctttattacgtatttggttttagtc

SEQ ID NO: 23334 - protein, 355 aa, Arabidopsis thaliana
  peptide (1)..(355): Ceres Seq. ID no. 12335299
  misc_feature (1)..(355): Homolog of NCBI NO: 33519154 NR Description: 10-hydroxygeraniol oxidoreductase [Camptotheca
  misc_feature (14)..(355): Homolog of NCBI NO: 38344562 NR Description: OSJNBa0065B15.8 [Oryza sativa (japonica
  misc_feature (1)..(353): Homolog of NCBI NO: 584872 NR Description: Cinnamyl-alcohol dehydrogenase 7/8 (CAD 7/8)
  misc_feature (1)..(353): Homolog of NCBI NO: 10719915 NR Description: Cinnamyl-alcohol dehydrogenase 2 (CAD 2)
  misc_feature (15)..(354): Homolog of NCBI NO: 19849248 NR Description: cinnamyl alcohol dehydrogenase [Lolium perenne]
  misc_feature (14)..(353): Homolog of NCBI NO: 10720088 NR Description: Probable mannitol dehydrogenase (NAD-dependent
  misc_feature (14)..(354): Homolog of NCBI NO: 3913193 NR Description: Probable mannitol dehydrogenase 1 (NAD-dependent
  misc_feature (1)..(354): Homolog of NCBI NO: 22475166 NR Description: putative sinapyl alcohol dehydrogenase
  misc_feature (3)..(355): Homolog of NCBI NO: 37532016 NR Description: putative cinnamyl alcohol dehydrogenase
  misc_feature (1)..(355): Homolog of NCBI NO: 15218564 NR Description: putative cinnamyl-alcohol dehydrogenase; protein
MSSSESVENECMCWAARDPSGLLSPHTITRRSVTTDDVSLTITHCGVCYADVIWSRNQHGDSKYPLVPGHEIAGIVTKVGPNVQRFKVGDHVGVGTYVNSCRECEYCNEGQEVNCAKGVFTFNGIDHDGSVTKGGYSSHIVVHERYCYKIPVDYPLESAAPLLCAGITVYAPMMRHNMNQPGKSLGVIGLGGLGHMAVKFGKAFGLSVTVFSTSISKKEEALNLLGAENFVISSDHDQMKALEKSLDFLVDTASGDHAFDPYMSLLKIAGTYVLVGFPSEIKISPANLNLGMRMLAGSVTGGTKITQQMLDFCAAHKIYPNIEVIPIQKINEALERVVKKDIKYRFVIDIKNSLK

SEQ ID NO: 23335 - protein, 344 aa, Arabidopsis thaliana
  peptide (1)..(344): Ceres Seq. ID no. 12335300
  misc_feature (1)..(344): Homolog of NCBI NO: 33519154 NR Description: 10-hydroxygeraniol oxidoreductase [Camptotheca
  misc_feature (3)..(344): Homolog of NCBI NO: 38344562 NR Description: OSJNBa0065B15.8 [Oryza sativa (japonica
  misc_feature (1)..(342): Homolog of NCBI NO: 584872 NR Description: Cinnamyl-alcohol dehydrogenase 7/8 (CAD 7/8)
  misc_feature (1)..(342): Homolog of NCBI NO: 10719915 NR Description: Cinnamyl-alcohol dehydrogenase 2 (CAD 2)
  misc_feature (4)..(343): Homolog of NCBI NO: 19849248 NR Description: cinnamyl alcohol dehydrogenase [Lolium perenne]
  misc_feature (3)..(342): Homolog of NCBI NO: 10720088 NR Description: Probable mannitol dehydrogenase (NAD-dependent
  misc_feature (3)..(343): Homolog of NCBI NO: 3913193 NR Description: Probable mannitol dehydrogenase 1 (NAD-dependent
  misc_feature (1)..(343): Homolog of NCBI NO: 22475166 NR Description: putative sinapyl alcohol dehydrogenase
  misc_feature (1)..(344): Homolog of NCBI NO: 37532016 NR Description: putative cinnamyl alcohol dehydrogenase
  misc_feature (1)..(344): Homolog of NCBI NO: 15218564 NR Description: putative cinnamyl-alcohol dehydrogenase; protein
MCWAARDPSGLLSPHTITRRSVTTDDVSLTITHCGVCYADVIWSRNQHGDSKYPLVPGHEIAGIVTKVGPNVQRFKVGDHVGVGTYVNSCRECEYCNEGQEVNCAKGVFTFNGIDHDGSVTKGGYSSHIVVHERYCYKIPVDYPLESAAPLLCAGITVYAPMMRHNMNQPGKSLGVIGLGGLGHMAVKFGKAFGLSVTVFSTSISKKEEALNLLGAENFVISSDHDQMKALEKSLDFLVDTASGDHAFDPYMSLLKIAGTYVLVGFPSEIKISPANLNLGMRMLAGSVTGGTKITQQMLDFCAAHKIYPNIEVIPIQKINEALERVVKKDIKYRFVIDIKNSLK

SEQ ID NO: 23336 - protein, 183 aa, Arabidopsis thaliana
  peptide (1)..(183): Ceres Seq. ID no. 12335301
  misc_feature (1)..(183): Homolog of NCBI NO: 33519154 NR Description: 10-hydroxygeraniol oxidoreductase [Camptotheca
  misc_feature (1)..(183): Homolog of NCBI NO: 38344562 NR Description: OSJNBa0065B15.8 [Oryza sativa (japonica
  misc_feature (1)..(181): Homolog of NCBI NO: 584872 NR Description: Cinnamyl-alcohol dehydrogenase 7/8 (CAD 7/8)
  misc_feature (1)..(181): Homolog of NCBI NO: 10719915 NR Description: Cinnamyl-alcohol dehydrogenase 2 (CAD 2)
  misc_feature (1)..(182): Homolog of NCBI NO: 19849248 NR Description: cinnamyl alcohol dehydrogenase [Lolium perenne]
  misc_feature (1)..(181): Homolog of NCBI NO: 10720088 NR Description: Probable mannitol dehydrogenase (NAD-dependent
  misc_feature (1)..(182): Homolog of NCBI NO: 3913193 NR Description: Probable mannitol dehydrogenase 1 (NAD-dependent
  misc_feature (1)..(182): Homolog of NCBI NO: 22475166 NR Description: putative sinapyl alcohol dehydrogenase
  misc_feature (1)..(183): Homolog of NCBI NO: 37532016 NR Description: putative cinnamyl alcohol dehydrogenase
  misc_feature (1)..(183): Homolog of NCBI NO: 15218564 NR Description: putative cinnamyl-alcohol dehydrogenase; protein
MMRHNMNQPGKSLGVIGLGGLGHMAVKFGKAFGLSVTVFSTSISKKEEALNLLGAENFVISSDHDQMKALEKSLDFLVDTASGDHAFDPYMSLLKIAGTYVLVGFPSEIKISPANLNLGMRMLAGSVTGGTKITQQMLDFCAAHKIYPNIEVIPIQKINEALERVVKKDIKYRFVIDIKNSLK

SEQ ID NO: 23337 - DNA, 1207 bp, Arabidopsis thaliana
  misc_feature (1)..(1207): Ceres Seq. ID no. 12324558
  misc_feature: MA Experiment ID: 108579 Result: Down-regulated in Transcription
  misc_feature: MA Experiment 108579 PARAMETER Experiment Name: At_4deg_Cold_cDNA_P Parameter: Temperature (deg C) Value: 4 vs. 22
  misc_feature: MA Experiment 108579 PARAMETER Experiment Name: At_4deg_Cold_cDNA_P Parameter: Timepoint (hr) Value: 6
  misc_feature: MA Experiment 108579 PARAMETER Experiment Name: At_4deg_Cold_cDNA_P Parameter: Tissue Value: Aerial
  misc_feature: MA Experiment ID: 108595 Result: Down-regulated in Transcription
  misc_feature: MA Experiment 108595 PARAMETER Experiment Name: At_Ler-pi_Ovule_cDNA_P Parameter: Plant Line Value: null
  misc_feature: MA Experiment ID: 20000184 Result: Down-regulated in Transcription
  misc_feature: MA Experiment 20000184 PARAMETER Experiment Name: At_Shoots__P Parameter: Age (day) Value: 7
  misc_feature: MA Experiment 20000184 PARAMETER Experiment Name: At_Shoots__P Parameter: Tissue Value: Shoots vs. Whole Plant
  misc_feature: MA Experiment ID: 20000286 Result: Down-regulated in Transcription
  misc_feature: MA Experiment 20000286 PARAMETER Experiment Name: At_Open_Flower_P Parameter: Age (day) Value: 21
  misc_feature: MA Experiment 20000286 PARAMETER Experiment Name: At_Open_Flower_P Parameter: Plant Line Value: WS
  misc_feature: MA Experiment 20000286 PARAMETER Experiment Name: At_Open_Flower_P Parameter: Tissue Value: Half Open vs. Whole Plant
  misc_feature: MA Experiment ID: 20000495 Result: Up-regulated in Transcription
  misc_feature: MA Experiment 20000495 PARAMETER Experiment Name: At_Guard_Cells_P Parameter: Harvest Date Value: 8/2/2002
  misc_feature: MA Experiment 20000495 PARAMETER Experiment Name: At_Guard_Cells_P Parameter: Organism Value: A. thaliana
  misc_feature: MA Experiment 20000495 PARAMETER Experiment Name: At_Guard_Cells_P Parameter: Tissue Value: Guard Cells vs. Leaves
  misc_feature: MA Experiment ID: 20001450 Result: Up-regulated in Transcription
  misc_feature: MA Experiment 20001450 PARAMETER Experiment Name: At_Far-red-induction_P Parameter: Age (day) Value: 7
  misc_feature: MA Experiment 20001450 PARAMETER Experiment Name: At_Far-red-induction_P Parameter: Light Value: Far-red vs. White
  misc_feature: MA Experiment 20001450 PARAMETER Experiment Name: At_Far-red-induction_P Parameter: Organism Value: A. thaliana
  misc_feature: MA Experiment 20001450 PARAMETER Experiment Name: At_Far-red-induction_P Parameter: Plant Line Value: Columbia
  misc_feature: MA Experiment 20001450 PARAMETER Experiment Name: At_Far-red-induction_P Parameter: Timepoint (hr) Value: 8
  misc_feature: MA Experiment 20001450 PARAMETER Experiment Name: At_Far-red-induction_P Parameter: Tissue Value: Whole Plant
  misc_feature: MA Experiment ID: 20001451 Result: Up-regulated in Transcription
  misc_feature: MA Experiment 20001451 PARAMETER Experiment Name: At_Far-red-induction_P Parameter: Age (day) Value: 7
  misc_feature: MA Experiment 20001451 PARAMETER Experiment Name: At_Far-red-induction_P Parameter: Light Value: Far-red vs. White
  misc_feature: MA Experiment 20001451 PARAMETER Experiment Name: At_Far-red-induction_P Parameter: Organism Value: A. thaliana
  misc_feature: MA Experiment 20001451 PARAMETER Experiment Name: At_Far-red-induction_P Parameter: Plant Line Value: Columbia
  misc_feature: MA Experiment 20001451 PARAMETER Experiment Name: At_Far-red-induction_P Parameter: Timepoint (hr) Value: 24
  misc_feature: MA Experiment 20001451 PARAMETER Experiment Name: At_Far-red-induction_P Parameter: Tissue Value: Whole Plant
aagctttaagcgaatccaaacgctatcgtattaaacgctattactatctgcgttttagctcttcatcttcttctccacttcagatgactttctcgcttaataaaaaaacactaacccaatcaaatccactttaatccttccctctctcgcgtccgattctccgatggctttaacggaggacaaatcagattccgatggtcgacgttggggcaaattcaaacttccatttcgaaactctaattcccaagctccttcagcctcctcgtcctcttccatggctacttcttcttcttctgtaacatcttctcatctaaatcaaaattacattcatcaatctcgccattttcaatatcacggtcctcctgtcgtcgaaggattgggtcaaaaccatcatcaatccgccgccacgatcccttctatgtcatctgtcgcgagatcgcttcttccaacaaaacgccgattaaagcttgatccttcagcaaaactttacttcccttatgagcctgggaagcaagtcaggagtgccattaagattaagaatacgagcaagtcacatgtagcgtttaagtttcaaacaacagtaccaaagagttgcttcatgcgcccggctggtgctattcttgctcccggggaagaaattatcgcaactgttttcaagtttgttgagcctcctgagaataatgaaaagccaatggaacaaaagagcggggttaagtttaaaatcatgagcttgaagatgaaagttccaacagactatatgcctgagctgtttgaggagcaaaaagatcatgtctctgaggagcaagtaatgcgtgtggtattcttggatcccgaaaaccctaactccatgatggagaaattgaagagtcaattggctgaagcggatgctgcagatgaagcacggaaaaaagcatcagagggtattgttggtccaaagccaattggagaagggcttgtgatcgatgaatggaagcaacgccgagagagatatcttgcacaacaacaaggaggagtagacgctgcttgaaacttaaagaccaccaagaccaaaaagtgtgtgtatgtgttttttttttttaattttgtgccgagtcaaaatgtgttgtgtgacgagatagaagattgtatttatgatcaattatcttagtaatcccaaaattatttgcagaggagatcatcgtgtttggtaaatgaaaaggatatttgc

SEQ ID NO: 23338 - protein, 287 aa, Arabidopsis thaliana
  peptide (1)..(287): Ceres Seq. ID no. 12324559
  misc_feature (39)..(281): Homolog of NCBI NO: 1800147 NR Description: membrane associated protein [Arabidopsis thaliana]
  misc_feature (39)..(269): Homolog of NCBI NO: 8809582 NR Description: membrane associated protein [Arabidopsis thaliana]
  misc_feature (39)..(281): Homolog of NCBI NO: 18423592 NR Description: membrane associated protein
  misc_feature (1)..(281): Homolog of NCBI NO: 34394013 NR Description: putative 27k vesicle-associated membrane
  misc_feature (1)..(286): Homolog of NCBI NO: 7485721 NR Description: hypothetical protein F18E5.70 - Arabidopsis
  misc_feature (1)..(286): Homolog of NCBI NO: 18415696 NR Description: putative membrane associated protein
  misc_feature (1)..(112): Homolog of NCBI NO: 25365874 NR Description: hypothetical protein AT4g05060 [imported] -
  misc_feature (169)..(287): Homolog of NCBI NO: 25365874 NR Description: hypothetical protein AT4g05060 [imported] -
  misc_feature (1)..(287): Homolog of NCBI NO: 21593103 NR Description: membrane associated protein-like protein
  misc_feature (1)..(287): Homolog of NCBI NO: 18412787 NR Description: contains similarity to Arabidopsis thaliana
MALTEDKSDSDGRRWGKFKLPFRNSNSQAPSASSSSSMATSSSSVTSSHLNQNYIHQSRHFQYHGPPVVEGLGQNHHQSAATIPSMSSVARSLLPTKRRLKLDPSAKLYFPYEPGKQVRSAIKIKNTSKSHVAFKFQTTVPKSCFMRPAGAILAPGEEIIATVFKFVEPPENNEKPMEQKSGVKFKIMSLKMKVPTDYMPELFEEQKDHVSEEQVMRVVFLDPENPNSMMEKLKSQLAEADAADEARKKASEGIVGPKPIGEGLVIDEWKQRRERYLAQQQGGVDAA

SEQ ID NO: 23339 - protein, 250 aa, Arabidopsis thaliana
  peptide (1)..(250): Ceres Seq. ID no. 12324560
  misc_feature (2)..(244): Homolog of NCBI NO: 1800147 NR Description: membrane associated protein [Arabidopsis thaliana]
  misc_feature (2)..(232): Homolog of NCBI NO: 8809582 NR Description: membrane associated protein [Arabidopsis thaliana]
  misc_feature (2)..(244): Homolog of NCBI NO: 18423592 NR Description: membrane associated protein
  misc_feature (1)..(244): Homolog of NCBI NO: 34394013 NR Description: putative 27k vesicle-associated membrane
  misc_feature (1)..(249): Homolog of NCBI NO: 7485721 NR Description: hypothetical protein F18E5.70 - Arabidopsis
  misc_feature (1)..(249): Homolog of NCBI NO: 18415696 NR Description: putative membrane associated protein
  misc_feature (1)..(75): Homolog of NCBI NO: 25365874 NR Description: hypothetical protein AT4g05060 [imported] -
  misc_feature (132)..(250): Homolog of NCBI NO: 25365874 NR Description: hypothetical protein AT4g05060 [imported] -
  misc_feature (1)..(250): Homolog of NCBI NO: 21593103 NR Description: membrane associated protein-like protein
  misc_feature (1)..(250): Homolog of NCBI NO: 18412787 NR Description: contains similarity to Arabidopsis thaliana
MATSSSSVTSSHLNQNYIHQSRHFQYHGPPVVEGLGQNHHQSAATIPSMSSVARSLLPTKRRLKLDPSAKLYFPYEPGKQVRSAIKIKNTSKSHVAFKFQTTVPKSCFMRPAGAILAPGEEIIATVFKFVEPPENNEKPMEQKSGVKFKIMSLKMKVPTDYMPELFEEQKDHVSEEQVMRVVFLDPENPNSMMEKLKSQLAEADAADEARKKASEGIVGPKPIGEGLVIDEWKQRRERYLAQQQGGVDAA

SEQ ID NO: 23340 - protein, 202 aa, Arabidopsis thaliana
  peptide (1)..(202): Ceres Seq. ID no. 12324561
  misc_feature (1)..(196): Homolog of NCBI NO: 1800147 NR Description: membrane associated protein [Arabidopsis thaliana]
  misc_feature (1)..(184): Homolog of NCBI NO: 8809582 NR Description: membrane associated protein [Arabidopsis thaliana]
  misc_feature (1)..(196): Homolog of NCBI NO: 18423592 NR Description: membrane associated protein
  misc_feature (1)..(196): Homolog of NCBI NO: 34394013 NR Description: putative 27k vesicle-associated membrane
  misc_feature (1)..(201): Homolog of NCBI NO: 7485721 NR Description: hypothetical protein F18E5.70 - Arabidopsis
  misc_feature (1)..(201): Homolog of NCBI NO: 18415696 NR Description: putative membrane associated protein
  misc_feature (1)..(27): Homolog of NCBI NO: 25365874 NR Description: hypothetical protein AT4g05060 [imported] -
  misc_feature (84)..(202): Homolog of NCBI NO: 25365874 NR Description: hypothetical protein AT4g05060 [imported] -
  misc_feature (1)..(202): Homolog of NCBI NO: 21593103 NR Description: membrane associated protein-like protein
  misc_feature (1)..(202): Homolog of NCBI NO: 18412787 NR Description: contains similarity to Arabidopsis thaliana
MSSVARSLLPTKRRLKLDPSAKLYFPYEPGKQVRSAIKIKNTSKSHVAFKFQTTVPKSCFMRPAGAILAPGEEIIATVFKFVEPPENNEKPMEQKSGVKFKIMSLKMKVPTDYMPELFEEQKDHVSEEQVMRVVFLDPENPNSMMEKLKSQLAEADAADEARKKASEGIVGPKPIGEGLVIDEWKQRRERYLAQQQGGVDAA

SEQ ID NO: 23341 - DNA, 1123 bp, Arabidopsis thaliana
  misc_feature (1)..(1123): Ceres Seq. ID no. 12335538
  misc_feature: MA Experiment ID: 108434 Result: Down-regulated in Transcription
  misc_feature: MA Experiment 108434 PARAMETER Experiment Name: At_Root_Tips_cDNA_P Parameter: Tissue Value: Root Tips
  misc_feature: MA Experiment ID: 108463 Result: Up-regulated in Transcription
  misc_feature: MA Experiment 108463 PARAMETER Experiment Name: At_Germinating_Seeds_cDNA_P Parameter: Age (day) Value: 3 vs. 0
  misc_feature: MA Experiment 108463 PARAMETER Experiment Name: At_Germinating_Seeds_cDNA_P Parameter: Tissue Value: Germinating Seeds
  misc_feature: MA Experiment ID: 108473 Result: Up-regulated in Transcription
  misc_feature: MA Experiment 108473 PARAMETER Experiment Name: At_Drought_Flowers_cDNA_P Parameter: Timepoint (hr) Value: 7 d
  misc_feature: MA Experiment 108473 PARAMETER Experiment Name: At_Drought_Flowers_cDNA_P Parameter: Tissue Value: Flower
  misc_feature: MA Experiment 108473 PARAMETER Experiment Name: At_Drought_Flowers_cDNA_P Parameter: Treatment Value: Drought vs. No Drought
  misc_feature: MA Experiment ID: 108572 Result: Up-regulated in Transcription
  misc_feature: MA Experiment 108572 PARAMETER Experiment Name: At_Drought_cDNA_P Parameter: Timepoint (hr) Value: 1
  misc_feature: MA Experiment 108572 PARAMETER Experiment Name: At_Drought_cDNA_P Parameter: Tissue Value: Aerial
  misc_feature: MA Experiment 108572 PARAMETER Experiment Name: At_Drought_cDNA_P Parameter: Treatment Value: Drought vs. No Drought
  misc_feature: MA Experiment ID: 108573 Result: Up-regulated in Transcription
  misc_feature: MA Experiment 108573 PARAMETER Experiment Name: At_Drought_cDNA_P Parameter: Timepoint (hr) Value: 6
  misc_feature: MA Experiment 108573 PARAMETER Experiment Name: At_Drought_cDNA_P Parameter: Tissue Value: Aerial
  misc_feature: MA Experiment 108573 PARAMETER Experiment Name: At_Drought_cDNA_P Parameter: Treatment Value: Drought vs. No Drought
  misc_feature: MA Experiment ID: 108577 Result: Up-regulated in Transcription
  misc_feature: MA Experiment 108577 PARAMETER Experiment Name: At_42deg_Heat_cDNA_P Parameter: Temperature (deg C) Value: 42 vs. 22
  misc_feature: MA Experiment 108577 PARAMETER Experiment Name: At_42deg_Heat_cDNA_P Parameter: Timepoint (hr) Value: 6
  misc_feature: MA Experiment 108577 PARAMETER Experiment Name: At_42deg_Heat_cDNA_P Parameter: Tissue Value: Aerial
  misc_feature: MA Experiment ID: 108594 Result: Up-regulated in Transcription
  misc_feature: MA Experiment 108594 PARAMETER Experiment Name: At_Ler-rhl_Root_cDNA_P Parameter: Plant Line Value: null
  misc_feature: MA Experiment ID: 108608 Result: Up-regulated in Transcription
  misc_feature: MA Experiment 108608 PARAMETER Experiment Name: At_100uM_ABA_cDNA_P Parameter: Timepoint (hr) Value: 1
  misc_feature: MA Experiment 108608 PARAMETER Experiment Name: At_100uM_ABA_cDNA_P Parameter: Tissue Value: Aerial
  misc_feature: MA Experiment 108608 PARAMETER Experiment Name: At_100uM_ABA_cDNA_P Parameter: Treatment Value: 100uM ABA vs. No Treatment
  misc_feature: MA Experiment ID: 108668 Result: Up-regulated in Transcription
  misc_feature: MA Experiment 108668 PARAMETER Experiment Name: At_2mM_SA_cDNA_P Parameter: Plant Line Value: WS
  misc_feature: MA Experiment 108668 PARAMETER Experiment Name: At_2mM_SA_cDNA_P Parameter: Timepoint (hr) Value: 6
  misc_feature: MA Experiment 108668 PARAMETER Experiment Name: At_2mM_SA_cDNA_P Parameter: Treatment Value: 2mM SA vs. No Treatment
  misc_feature: MA Experiment ID: 20000111 Result: Up-regulated in Transcription
  misc_feature: MA Experiment 20000111 PARAMETER Experiment Name: At_42deg_Heat_cDNA_P Parameter: Temperature (deg C) Value: 42 vs. 22
  misc_feature: MA Experiment 20000111 PARAMETER Experiment Name: At_42deg_Heat_cDNA_P Parameter: Timepoint (hr) Value: 6
  misc_feature: MA Experiment 20000111 PARAMETER Experiment Name: At_42deg_Heat_cDNA_P Parameter: Tissue Value: Aerial
  misc_feature: MA Experiment ID: 20000112 Result: Up-regulated in Transcription
  misc_feature: MA Experiment 20000112 PARAMETER Experiment Name: At_42deg_Heat_cDNA_P Parameter: Temperature (deg C) Value: 42 vs. 22
  misc_feature: MA Experiment 20000112 PARAMETER Experiment Name: At_42deg_Heat_cDNA_P Parameter: Timepoint (hr) Value: 2
  misc_feature: MA Experiment 20000112 PARAMETER Experiment Name: At_42deg_Heat_cDNA_P Parameter: Tissue Value: Aerial
  misc_feature: MA Experiment ID: 20000113 Result: Up-regulated in Transcription
  misc_feature: MA Experiment 20000113 PARAMETER Experiment Name: At_42deg_Heat_cDNA_P Parameter: Temperature (deg C) Value: 42 vs. 22
  misc_feature: MA Experiment 20000113 PARAMETER Experiment Name: At_42deg_Heat_cDNA_P Parameter: Timepoint (hr) Value: 8
  misc_feature: MA Experiment 20000113 PARAMETER Experiment Name: At_42deg_Heat_cDNA_P Parameter: Tissue Value: Aerial
  misc_feature: MA Experiment ID: 20000144 Result: Up-regulated in Transcription
  misc_feature: MA Experiment 20000144 PARAMETER Experiment Name: At_42deg_Heat_cDNA_P Parameter: Temperature (deg C) Value: 42 vs. 22
  misc_feature: MA Experiment 20000144 PARAMETER Experiment Name: At_42deg_Heat_cDNA_P Parameter: Timepoint (hr) Value: 1
  misc_feature: MA Experiment 20000144 PARAMETER Experiment Name: At_42deg_Heat_cDNA_P Parameter: Tissue Value: Aerial
  misc_feature: MA Experiment ID: 20000166 Result: Up-regulated in Transcription
  misc_feature: MA Experiment 20000166 PARAMETER Experiment Name: At_100uM_ABA_P Parameter: Age (day) Value: 14
  misc_feature: MA Experiment 20000166 PARAMETER Experiment Name: At_100uM_ABA_P Parameter: Organism Value: A. thaliana
  misc_feature: MA Experiment 20000166 PARAMETER Experiment Name: At_100uM_ABA_P Parameter: Plant Line Value: WS
  misc_feature: MA Experiment 20000166 PARAMETER Experiment Name: At_100uM_ABA_P Parameter: Timepoint (hr) Value: 1
  misc_feature: MA Experiment 20000166 PARAMETER Experiment Name: At_100uM_ABA_P Parameter: Tissue Value: Aerial
  misc_feature: MA Experiment 20000166 PARAMETER Experiment Name: At_100uM_ABA_P Parameter: Treatment Value: 100uM ABA vs. No Treatment
  misc_feature: MA Experiment ID: 20000171 Result: Up-regulated in Transcription
  misc_feature: MA Experiment 20000171 PARAMETER Experiment Name: At_42deg_Heat_P Parameter: Age (day) Value: 14
  misc_feature: MA Experiment 20000171 PARAMETER Experiment Name: At_42deg_Heat_P Parameter: Organism Value: A. thaliana
  misc_feature: MA Experiment 20000171 PARAMETER Experiment Name: At_42deg_Heat_P Parameter: Plant Line Value: WS
  misc_feature: MA Experiment 20000171 PARAMETER Experiment Name: At_42deg_Heat_P Parameter: Temperature (deg C) Value: 42 vs. 22
  misc_feature: MA Experiment 20000171 PARAMETER Experiment Name: At_42deg_Heat_P Parameter: Timepoint (hr) Value: 1
  misc_feature: MA Experiment 20000171 PARAMETER Experiment Name: At_42deg_Heat_P Parameter: Tissue Value: Aerial
  misc_feature: MA Experiment ID: 20000173 Result: Up-regulated in Transcription
  misc_feature: MA Experiment 20000173 PARAMETER Experiment Name: At_42deg_Heat_P Parameter: Age (day) Value: 14
  misc_feature: MA Experiment 20000173 PARAMETER Experiment Name: At_42deg_Heat_P Parameter: Organism Value: A. thaliana
  misc_feature: MA Experiment 20000173 PARAMETER Experiment Name: At_42deg_Heat_P Parameter: Plant Line Value: WS
  misc_feature: MA Experiment 20000173 PARAMETER Experiment Name: At_42deg_Heat_P Parameter: Temperature (deg C) Value: 42 vs. 22
  misc_feature: MA Experiment 20000173 PARAMETER Experiment Name: At_42deg_Heat_P Parameter: Timepoint (hr) Value: 6
  misc_feature: MA Experiment 20000173 PARAMETER Experiment Name: At_42deg_Heat_P Parameter: Tissue Value: Aerial
  misc_feature: MA Experiment ID: 20000184 Result: Down-regulated in Transcription
  misc_feature: MA Experiment 20000184 PARAMETER Experiment Name: At_Shoots__P Parameter: Age (day) Value: 7
  misc_feature: MA Experiment 20000184 PARAMETER Experiment Name: At_Shoots__P Parameter: Tissue Value: Shoots vs. Whole Plant
  misc_feature: MA Experiment ID: 20000185 Result: Down-regulated in Transcription
  misc_feature: MA Experiment 20000185 PARAMETER Experiment Name: At_Roots__P Parameter: Age (day) Value: 7 vs. 21
  misc_feature: MA Experiment 20000185 PARAMETER Experiment Name: At_Roots__P Parameter: Organism Value: A. thaliana
  misc_feature: MA Experiment 20000185 PARAMETER Experiment Name: At_Roots__P Parameter: Tissue Value: Roots vs. Whole Plant
  misc_feature: MA Experiment ID: 20000234 Result: Down-regulated in Transcription
  misc_feature: MA Experiment 20000234 PARAMETER Experiment Name: At_Siliques_P Parameter: Age (day) Value: 21
  misc_feature: MA Experiment 20000234 PARAMETER Experiment Name: At_Siliques_P Parameter: Organism Value: A. thaliana
  misc_feature: MA Experiment 20000234 PARAMETER Experiment Name: At_Siliques_P Parameter: Plant Line Value: WS
  misc_feature: MA Experiment 20000234 PARAMETER Experiment Name: At_Siliques_P Parameter: Tissue Value: Less Than 5mm Siliques vs. Whole Plant
  misc_feature: MA Experiment ID: 20000286 Result: Down-regulated in Transcription
  misc_feature: MA Experiment 20000286 PARAMETER Experiment Name: At_Open_Flower_P Parameter: Age (day) Value: 21
  misc_feature: MA Experiment 20000286 PARAMETER Experiment Name: At_Open_Flower_P Parameter: Plant Line Value: WS
  misc_feature: MA Experiment 20000286 PARAMETER Experiment Name: At_Open_Flower_P Parameter: Tissue Value: Half Open vs. Whole Plant
  misc_feature: MA Experiment ID: 20000436 Result: Up-regulated in Transcription
  misc_feature: MA Experiment 20000436 PARAMETER Experiment Name: At_Drought_P Parameter: Age (day) Value: 7
  misc_feature: MA Experiment 20000436 PARAMETER Experiment Name: At_Drought_P Parameter: Organism Value: A. thaliana
  misc_feature: MA Experiment 20000436 PARAMETER Experiment Name: At_Drought_P Parameter: Plant Line Value: WS
  misc_feature: MA Experiment 20000436 PARAMETER Experiment Name: At_Drought_P Parameter: Timepoint (hr) Value: 12
  misc_feature: MA Experiment 20000436 PARAMETER Experiment Name: At_Drought_P Parameter: Tissue Value: Whole Plant
  misc_feature: MA Experiment 20000436 PARAMETER Experiment Name: At_Drought_P Parameter: Treatment Value: Drought vs. No Drought
  misc_feature: MA Experiment ID: 20000437 Result: Up-regulated in Transcription
  misc_feature: MA Experiment 20000437 PARAMETER Experiment Name: At_Drought_P Parameter: Age (day) Value: 8
  misc_feature: MA Experiment 20000437 PARAMETER Experiment Name: At_Drought_P Parameter: Organism Value: A. thaliana
  misc_feature: MA Experiment 20000437 PARAMETER Experiment Name: At_Drought_P Parameter: Plant Line Value: WS
  misc_feature: MA Experiment 20000437 PARAMETER Experiment Name: At_Drought_P Parameter: Timepoint (hr) Value: 24
  misc_feature: MA Experiment 20000437 PARAMETER Experiment Name: At_Drought_P Parameter: Tissue Value: Whole Plant
  misc_feature: MA Experiment 20000437 PARAMETER Experiment Name: At_Drought_P Parameter: Treatment Value: Drought vs. No Drought
  misc_feature: MA Experiment ID: 20000438 Result: Down-regulated in Transcription
  misc_feature: MA Experiment 20000438 PARAMETER Experiment Name: At_Shoots__P Parameter: Age (day) Value: 14
  misc_feature: MA Experiment 20000438 PARAMETER Experiment Name: At_Shoots__P Parameter: Tissue Value: Shoots vs. Whole Plant
  misc_feature: MA Experiment ID: 20000439 Result: Down-regulated in Transcription
  misc_feature: MA Experiment 20000439 PARAMETER Experiment Name: At_Roots__P Parameter: Age (day) Value: 14 vs. 21
  misc_feature: MA Experiment 20000439 PARAMETER Experiment Name: At_Roots__P Parameter: Organism Value: A. thaliana
  misc_feature: MA Experiment 20000439 PARAMETER Experiment Name: At_Roots__P Parameter: Tissue Value: Roots vs. Whole Plant
  misc_feature: MA Experiment ID: 20001911 Result: Up-regulated in Transcription
  misc_feature: MA Experiment 20001911 PARAMETER Experiment Name: At_Drought_Reproduction_P Parameter: Age (day) Value: 40
  misc_feature: MA Experiment 20001911 PARAMETER Experiment Name: At_Drought_Reproduction_P Parameter: Organism Value: A. thaliana
  misc_feature: MA Experiment 20001911 PARAMETER Experiment Name: At_Drought_Reproduction_P Parameter: Plant Line Value: WS
  misc_feature: MA Experiment 20001911 PARAMETER Experiment Name: At_Drought_Reproduction_P Parameter: Timepoint (day) Value: 10
  misc_feature: MA Experiment 20001911 PARAMETER Experiment Name: At_Drought_Reproduction_P Parameter: Tissue Value: Flowers
  misc_feature: MA Experiment 20001911 PARAMETER Experiment Name: At_Drought_Reproduction_P Parameter: Treatment Value: Drought vs. No Drought
actttgtttgcttctattatatccacttccaacaagattcctcaaaaggaaagaagagaaagaagataagagatatctggttggtcggagatggagatgatcggaggagacgatacagatacagagatgtacggagctctagtgacggcacagtccttaaggttgcgtcatcttcaccactgcagagagaaccagtgtacctctgttctcgtcaaatacattcaagctcctgttcatcttgtttggtcactggtgcggagatttgatcagccgcagaaatacaaaccatttataagcagatgcactgtaaatggtgatcctgagatcggttgtctcagagaagtaaatgtcaaatctggtcttccagcaaccaccagtacagagagattggaacagcttgatgatgaagaacacatcctcggtatcaacatcattggtggtgatcatagacttaagaattactcttcgatcttgactgtgcatccggagatgattgatggaaggtcaggaactatggtgatggagtcttttgttgtggatgttcctcaaggcaacaccaaagatgatacatgttacttcgtggaatcactcataaagtgtaacctcaaatccttggcttgtgtctctgaaagattggctgctcaagacattaccaattccatcgcaactttctgtaacgcttccaatggatacagagagaagaatcatacagaaaccaacctttgaagatttggctagattagtcccacgaacaaactcagtgaaggaaatttagattcatagaagcacgtgtgatcatgcttctctgctgctttactcagatcagctccatgggccattttcgagcatgcagtcaaagttttgatgtaatttgttttctggtgtttgttggacagtgtctgtatttacgcaccattgttagaaaaaacagagctaggtagtatctatattatcaccaagagtcgttgcaggaacattttccgtctctgaaatgatgaacccttgccccttcttgtaaaacaatctcacggtttctcaaaaccgacatgtatttggctacggtgtggctatcagaacatatattcgtgtttttgaccactcttataggagctaagcctttctt

SEQ ID NO: 23342 - protein, 211 aa, Arabidopsis thaliana
  peptide (1)..(211): Ceres Seq. ID no. 12335539
  misc_feature (34)..(173): Pfam Name: Pathogenesis-related protein Bet v I family Pfam Description: Pathogenesis-related protein Bet v I family
  misc_feature (27)..(185): Homolog of NCBI NO: 18404709 NR Description: expressed protein
  misc_feature (18)..(191): Homolog of NCBI NO: 7486961 NR Description: hypothetical protein T13J8.30 - Arabidopsis
  misc_feature (18)..(191): Homolog of NCBI NO: 30687786 NR Description: expressed protein [Arabidopsis thaliana]
  misc_feature (23)..(190): Homolog of NCBI NO: 15238661 NR Description: putative protein; protein id: At5g53160.1
  misc_feature (6)..(188): Homolog of NCBI NO: 25348264 NR Description: hypothetical protein F6F3.16 - Arabidopsis
  misc_feature (6)..(188): Homolog of NCBI NO: 21593547 NR Description: unknown [Arabidopsis thaliana]
  misc_feature (3)..(188): Homolog of NCBI NO: 18378830 NR Description: expressed protein
  misc_feature (3)..(211): Homolog of NCBI NO: 21593105 NR Description: unknown [Arabidopsis thaliana]
  misc_feature (1)..(211): Homolog of NCBI NO: 18411513 NR Description: Expressed protein
  misc_feature (51)..(211): Homolog of NCBI NO: 7486358 NR Description: hypothetical protein F3I3.40 - Arabidopsis
MEMIGGDDTDTEMYGALVTAQSLRLRHLHHCRENQCTSVLVKYIQAPVHLVWSLVRRFDQPQKYKPFISRCTVNGDPEIGCLREVNVKSGLPATTSTERLEQLDDEEHILGINIIGGDHRLKNYSSILTVHPEMIDGRSGTMVMESFVVDVPQGNTKDDTCYFVESLIKCNLKSLACVSERLAAQDITNSIATFCNASNGYREKNHTETNL

SEQ ID NO: 23343 - protein, 209 aa, Arabidopsis thaliana
  peptide (1)..(209): Ceres Seq. ID no. 12335540
  misc_feature (32)..(171): Pfam Name: Pathogenesis-related protein Bet v I family Pfam Description: Pathogenesis-related protein Bet v I family
  misc_feature (49)..(209): Homolog of NCBI NO: 7486358 NR Description: hypothetical protein F3I3.40 - Arabidopsis
  misc_feature (25)..(183): Homolog of NCBI NO: 18404709 NR Description: expressed protein
  misc_feature (16)..(189): Homolog of NCBI NO: 7486961 NR Description: hypothetical protein T13J8.30 - Arabidopsis
  misc_feature (16)..(189): Homolog of NCBI NO: 30687786 NR Description: expressed protein [Arabidopsis thaliana]
  misc_feature (21)..(188): Homolog of NCBI NO: 15238661 NR Description: putative protein; protein id: At5g53160.1
  misc_feature (4)..(186): Homolog of NCBI NO: 25348264 NR Description: hypothetical protein F6F3.16 - Arabidopsis
  misc_feature (4)..(186): Homolog of NCBI NO: 21593547 NR Description: unknown [Arabidopsis thaliana]
  misc_feature (1)..(186): Homolog of NCBI NO: 18378830 NR Description: expressed protein
  misc_feature (1)..(209): Homolog of NCBI NO: 21593105 NR Description: unknown [Arabidopsis thaliana]
  misc_feature (1)..(209): Homolog of NCBI NO: 18411513 NR Description: Expressed protein
MIGGDDTDTEMYGALVTAQSLRLRHLHHCRENQCTSVLVKYIQAPVHLVWSLVRRFDQPQKYKPFISRCTVNGDPEIGCLREVNVKSGLPATTSTERLEQLDDEEHILGINIIGGDHRLKNYSSILTVHPEMIDGRSGTMVMESFVVDVPQGNTKDDTCYFVESLIKCNLKSLACVSERLAAQDITNSIATFCNASNGYREKNHTETNL

SEQ ID NO: 23344 - protein, 199 aa, Arabidopsis thaliana
  peptide (1)..(199): Ceres Seq. ID no. 12335541
  misc_feature (22)..(161): Pfam Name: Pathogenesis-related protein Bet v I family Pfam Description: Pathogenesis-related protein Bet v I family
  misc_feature (15)..(173): Homolog of NCBI NO: 18404709 NR Description: expressed protein
  misc_feature (6)..(179): Homolog of NCBI NO: 7486961 NR Description: hypothetical protein T13J8.30 - Arabidopsis
  misc_feature (6)..(179): Homolog of NCBI NO: 30687786 NR Description: expressed protein [Arabidopsis thaliana]
  misc_feature (11)..(178): Homolog of NCBI NO: 15238661 NR Description: putative protein; protein id: At5g53160.1
  misc_feature (1)..(176): Homolog of NCBI NO: 25348264 NR Description: hypothetical protein F6F3.16 - Arabidopsis
  misc_feature (1)..(176): Homolog of NCBI NO: 21593547 NR Description: unknown [Arabidopsis thaliana]
  misc_feature (1)..(176): Homolog of NCBI NO: 18378830 NR Description: expressed protein
  misc_feature (1)..(199): Homolog of NCBI NO: 21593105 NR Description: unknown [Arabidopsis thaliana]
  misc_feature (1)..(199): Homolog of NCBI NO: 18411513 NR Description: Expressed protein
  misc_feature (39)..(199): Homolog of NCBI NO: 7486358 NR Description: hypothetical protein F3I3.40 - Arabidopsis
MYGALVTAQSLRLRHLHHCRENQCTSVLVKYIQAPVHLVWSLVRRFDQPQKYKPFISRCTVNGDPEIGCLREVNVKSGLPATTSTERLEQLDDEEHILGINIIGGDHRLKNYSSILTVHPEMIDGRSGTMVMESFVVDVPQGNTKDDTCYFVESLIKCNLKSLACVSERLAAQDITNSIATFCNASNGYREKNHTETNL

SEQ ID NO: 23345 - DNA, 1271 bp, Arabidopsis thaliana
  misc_feature (1)..(1271): Ceres Seq. ID no. 12335844
  misc_feature: MA Experiment ID: 20000180 Result: Up-regulated in Transcription
  misc_feature: MA Experiment 20000180 PARAMETER Experiment Name: At_Germinating_Seeds_P Parameter: Age (hr) Value: 24 vs. 0
  misc_feature: MA Experiment 20000180 PARAMETER Experiment Name: At_Germinating_Seeds_P Parameter: Tissue Value: Germinating Seeds
  misc_feature: MA Experiment ID: 20000185 Result: Down-regulated in Transcription
  misc_feature: MA Experiment 20000185 PARAMETER Experiment Name: At_Roots__P Parameter: Age (day) Value: 7 vs. 21
  misc_feature: MA Experiment 20000185 PARAMETER Experiment Name: At_Roots__P Parameter: Organism Value: A. thaliana
  misc_feature: MA Experiment 20000185 PARAMETER Experiment Name: At_Roots__P Parameter: Tissue Value: Roots vs. Whole Plant
  misc_feature: MA Experiment ID: 20000439 Result: Down-regulated in Transcription
  misc_feature: MA Experiment 20000439 PARAMETER Experiment Name: At_Roots__P Parameter: Age (day) Value: 14 vs. 21
  misc_feature: MA Experiment 20000439 PARAMETER Experiment Name: At_Roots__P Parameter: Organism Value: A. thaliana
  misc_feature: MA Experiment 20000439 PARAMETER Experiment Name: At_Roots__P Parameter: Tissue Value: Roots vs. Whole Plant
  misc_feature: MA Experiment ID: 20001451 Result: Down-regulated in Transcription
  misc_feature: MA Experiment 20001451 PARAMETER Experiment Name: At_Far-red-induction_P Parameter: Age (day) Value: 7
  misc_feature: MA Experiment 20001451 PARAMETER Experiment Name: At_Far-red-induction_P Parameter: Light Value: Far-red vs. White
  misc_feature: MA Experiment 20001451 PARAMETER Experiment Name: At_Far-red-induction_P Parameter: Organism Value: A. thaliana
  misc_feature: MA Experiment 20001451 PARAMETER Experiment Name: At_Far-red-induction_P Parameter: Plant Line Value: Columbia
  misc_feature: MA Experiment 20001451 PARAMETER Experiment Name: At_Far-red-induction_P Parameter: Timepoint (hr) Value: 24
  misc_feature: MA Experiment 20001451 PARAMETER Experiment Name: At_Far-red-induction_P Parameter: Tissue Value: Whole Plant
aagaacaacagaaaatttcaaaatggtttctcagataatctcgtgtttatctcaatcttcgtctcttctatgtttatccgattcaaggaggttaattcttccgaagacttgtacttacggcggtttgagccggttttctccaggatttgctagccgccggttatttacggttaatcggaagaaatggagatcggcctgcattttcaactctggaaaggaacctggaggagagggaaagttacaaggaggtagctcagagtggccgatacttcagagatgggaagttccatggggatggcagacagtttcgttaacttcgtttgcttgtgcactaaggcagttttgttttgacaggattaaccgagatggcagtcataccgtttttaggaatcgacgttgagaaactgaccttggacgataaggcggagattttgttcctggatcaaggcctaacaaccgcggtggtacttgctgtcatattcactgttgccaaaaccttcgacccacttcctgaagatattcttcgctatgatttgagacaacccgtcaacctgcaaaaaggatggcttgtgtggggtggaatcggtctggttggtgctgttggtgctattgcgttaacaggtgttgttttatccgtgttcaggacagaagcacctgaaagggaggtagactctttgatgaagcttcttccattaattggatcctcaaacataagcaccttaagcttagtgggcataactggaatccttgctccacttctggaggagaccgtgtttcgcggattcttcatggtctctcttaccaaatgggtcccgaccccaatagcgatcatcatcagctcagctgcgtttgcccttgcccatttcacacctggtgaattcccgcagctgtttattctaggaagtgttttgggattatcatatgcacaaacccgcaatctcattaccccaatggtcatacacggtttctggaactcgggagttattttgctactcacttttcttcagatccaagggtatgacattaaggagctattgcaggcaaactagctctgagccatgctctttgtgctgtccgcatttaacatcaaaaagcttcattatgtgctcgatgttagtaagatattttgtattcgagaacagatttcatacttaatgcaatttgggttttggtagagttatctttattacaacatcatgacagtaatgtatgaactaatatggtagagatgaatctttttggaacaaaaaacaaatttatttacacagatt

SEQ ID NO: 23346 - protein, 227 aa, Arabidopsis thaliana
  peptide (1)..(227): Ceres Seq. ID no. 12335845
  misc_feature (121)..(210): Pfam Name: CAAX amino terminal protease family Pfam Description: CAAX amino terminal protease family
  misc_feature (107)..(213): Homolog of NCBI NO: 23043203 NR Description: hypothetical protein [Trichodesmium erythraeum
  misc_feature (3)..(210): Homolog of NCBI NO: 18424393 NR Description: putative protein
  misc_feature (3)..(210): Homolog of NCBI NO: 9759339 NR Description: gene_id:MUP24.17~pir||S76167~similar to unknown
  misc_feature (35)..(213): Homolog of NCBI NO: 23130090 NR Description: hypothetical protein [Nostoc punctiforme]
  misc_feature (1)..(213): Homolog of NCBI NO: 17231277 NR Description: hypothetical protein [Nostoc sp. PCC 7120]
  misc_feature (1)..(213): Homolog of NCBI NO: 16331018 NR Description: unknown protein [Synechocystis sp. PCC 6803]
  misc_feature (1)..(227): Homolog of NCBI NO: 20259411 NR Description: unknown protein [Arabidopsis thaliana]
  misc_feature (1)..(227): Homolog of NCBI NO: 25518680 NR Description: hypothetical protein F14L17.3 - Arabidopsis
  misc_feature (1)..(227): Homolog of NCBI NO: 21593106 NR Description: unknown [Arabidopsis thaliana]
  misc_feature (1)..(227): Homolog of NCBI NO: 30683693 NR Description: CAAX amino terminal protease family [Arabidopsis
MAVIPFLGIDVEKLTLDDKAEILFLDQGLTTAVVLAVIFTVAKTFDPLPEDILRYDLRQPVNLQKGWLVWGGIGLVGAVGAIALTGVVLSVFRTEAPEREVDSLMKLLPLIGSSNISTLSLVGITGILAPLLEETVFRGFFMVSLTKWVPTPIAIIISSAAFALAHFTPGEFPQLFILGSVLGLSYAQTRNLITPMVIHGFWNSGVILLLTFLQIQGYDIKELLQAN

SEQ ID NO: 23347 - protein, 132 aa, Arabidopsis thaliana
  peptide (1)..(132): Ceres Seq. ID no. 12335846
  misc_feature (8)..(112): Homolog of NCBI NO: 25518680 NR Description: hypothetical protein F14L17.3 - Arabidopsis
  misc_feature (8)..(111): Homolog of NCBI NO: 21593106 NR Description: unknown [Arabidopsis thaliana]
  misc_feature (1)..(111): Homolog of NCBI NO: 30683693 NR Description: CAAX amino terminal protease family [Arabidopsis
RTTENFKMVSQIISCLSQSSSLLCLSDSRRLILPKTCTYGGLSRFSPGFASRRLFTVNRKKWRSACIFNSGKEPGGEGKLQGGSSEWPILQRWEVPWGWQTVSLTSFACALRQFCFDRINRDGSHTVFRNRR

SEQ ID NO: 23348 - protein, 125 aa, Arabidopsis thaliana
  peptide (1)..(125): Ceres Seq. ID no. 12335847
  misc_feature (1)..(105): Homolog of NCBI NO: 25518680 NR Description: hypothetical protein F14L17.3 - Arabidopsis
  misc_feature (1)..(104): Homolog of NCBI NO: 21593106 NR Description: unknown [Arabidopsis thaliana]
  misc_feature (1)..(104): Homolog of NCBI NO: 30683693 NR Description: CAAX amino terminal protease family [Arabidopsis
MVSQIISCLSQSSSLLCLSDSRRLILPKTCTYGGLSRFSPGFASRRLFTVNRKKWRSACIFNSGKEPGGEGKLQGGSSEWPILQRWEVPWGWQTVSLTSFACALRQFCFDRINRDGSHTVFRNRR

SEQ ID NO: 23349 - DNA, 774 bp, Arabidopsis thaliana
  misc_feature (1)..(774): Ceres Seq. ID no. 12394701
  misc_feature: MA Experiment ID: 20000179 Result: Up-regulated in Transcription
  misc_feature: MA Experiment 20000179 PARAMETER Experiment Name: At_Germinating_Seeds_P Parameter: Age (hr) Value: 6 vs. 0
  misc_feature: MA Experiment 20000179 PARAMETER Experiment Name: At_Germinating_Seeds_P Parameter: Tissue Value: Germinating Seeds
  misc_feature: MA Experiment ID: 20000180 Result: Up-regulated in Transcription
  misc_feature: MA Experiment 20000180 PARAMETER Experiment Name: At_Germinating_Seeds_P Parameter: Age (hr) Value: 24 vs. 0
  misc_feature: MA Experiment 20000180 PARAMETER Experiment Name: At_Germinating_Seeds_P Parameter: Tissue Value: Germinating Seeds
  misc_feature: MA Experiment ID: 20000185 Result: Down-regulated in Transcription
  misc_feature: MA Experiment 20000185 PARAMETER Experiment Name: At_Roots__P Parameter: Age (day) Value: 7 vs. 21
  misc_feature: MA Experiment 20000185 PARAMETER Experiment Name: At_Roots__P Parameter: Organism Value: A. thaliana
  misc_feature: MA Experiment 20000185 PARAMETER Experiment Name: At_Roots__P Parameter: Tissue Value: Roots vs. Whole Plant
  misc_feature: MA Experiment ID: 20000286 Result: Down-regulated in Transcription
  misc_feature: MA Experiment 20000286 PARAMETER Experiment Name: At_Open_Flower_P Parameter: Age (day) Value: 21
  misc_feature: MA Experiment 20000286 PARAMETER Experiment Name: At_Open_Flower_P Parameter: Plant Line Value: WS
  misc_feature: MA Experiment 20000286 PARAMETER Experiment Name: At_Open_Flower_P Parameter: Tissue Value: Half Open vs. Whole Plant
  misc_feature: MA Experiment ID: 20000437 Result: Down-regulated in Transcription
  misc_feature: MA Experiment 20000437 PARAMETER Experiment Name: At_Drought_P Parameter: Age (day) Value: 8
  misc_feature: MA Experiment 20000437 PARAMETER Experiment Name: At_Drought_P Parameter: Organism Value: A. thaliana
  misc_feature: MA Experiment 20000437 PARAMETER Experiment Name: At_Drought_P Parameter: Plant Line Value: WS
  misc_feature: MA Experiment 20000437 PARAMETER Experiment Name: At_Drought_P Parameter: Timepoint (hr) Value: 24
  misc_feature: MA Experiment 20000437 PARAMETER Experiment Name: At_Drought_P Parameter: Tissue Value: Whole Plant
  misc_feature: MA Experiment 20000437 PARAMETER Experiment Name: At_Drought_P Parameter: Treatment Value: Drought vs. No Drought
  misc_feature: MA Experiment ID: 20000438 Result: Up-regulated in Transcription
  misc_feature: MA Experiment 20000438 PARAMETER Experiment Name: At_Shoots__P Parameter: Age (day) Value: 14
  misc_feature: MA Experiment 20000438 PARAMETER Experiment Name: At_Shoots__P Parameter: Tissue Value: Shoots vs. Whole Plant
  misc_feature: MA Experiment ID: 20000439 Result: Down-regulated in Transcription
  misc_feature: MA Experiment 20000439 PARAMETER Experiment Name: At_Roots__P Parameter: Age (day) Value: 14 vs. 21
  misc_feature: MA Experiment 20000439 PARAMETER Experiment Name: At_Roots__P Parameter: Organism Value: A. thaliana
  misc_feature: MA Experiment 20000439 PARAMETER Experiment Name: At_Roots__P Parameter: Tissue Value: Roots vs. Whole Plant
  misc_feature: MA Experiment ID: 20000496 Result: Down-regulated in Transcription
  misc_feature: MA Experiment 20000496 PARAMETER Experiment Name: At_Guard_Cells_P Parameter: Harvest Date Value: 7/19/2002
  misc_feature: MA Experiment 20000496 PARAMETER Experiment Name: At_Guard_Cells_P Parameter: Organism Value: Canola
  misc_feature: MA Experiment 20000496 PARAMETER Experiment Name: At_Guard_Cells_P Parameter: Tissue Value: Guard Cells vs. Leaves
  misc_feature: MA Experiment ID: 20000794 Result: Down-regulated in Transcription
  misc_feature: MA Experiment 20000794 PARAMETER Experiment Name: At_Petals_P Parameter: Age (day) Value: 23-25 days
  misc_feature: MA Experiment 20000794 PARAMETER Experiment Name: At_Petals_P Parameter: Plant Line Value: WS
  misc_feature: MA Experiment 20000794 PARAMETER Experiment Name: At_Petals_P Parameter: Tissue Value: Petals vs. Whole plant
  misc_feature: MA Experiment ID: 20001248 Result: Down-regulated in Transcription
  misc_feature: MA Experiment 20001248 PARAMETER Experiment Name: At_Far-red-induction_P Parameter: Age (day) Value: 7
  misc_feature: MA Experiment 20001248 PARAMETER Experiment Name: At_Far-red-induction_P Parameter: Light Value: Far-red vs. White
  misc_feature: MA Experiment 20001248 PARAMETER Experiment Name: At_Far-red-induction_P Parameter: Organism Value: A. thaliana
  misc_feature: MA Experiment 20001248 PARAMETER Experiment Name: At_Far-red-induction_P Parameter: Plant Line Value: Columbia
  misc_feature: MA Experiment 20001248 PARAMETER Experiment Name: At_Far-red-induction_P Parameter: Timepoint (hr) Value: 4
  misc_feature: MA Experiment 20001248 PARAMETER Experiment Name: At_Far-red-induction_P Parameter: Tissue Value: Whole Plant
  misc_feature: MA Experiment ID: 20001451 Result: Down-regulated in Transcription
  misc_feature: MA Experiment 20001451 PARAMETER Experiment Name: At_Far-red-induction_P Parameter: Age (day) Value: 7
  misc_feature: MA Experiment 20001451 PARAMETER Experiment Name: At_Far-red-induction_P Parameter: Light Value: Far-red vs. White
  misc_feature: MA Experiment 20001451 PARAMETER Experiment Name: At_Far-red-induction_P Parameter: Organism Value: A. thaliana
  misc_feature: MA Experiment 20001451 PARAMETER Experiment Name: At_Far-red-induction_P Parameter: Plant Line Value: Columbia
  misc_feature: MA Experiment 20001451 PARAMETER Experiment Name: At_Far-red-induction_P Parameter: Timepoint (hr) Value: 24
  misc_feature: MA Experiment 20001451 PARAMETER Experiment Name: At_Far-red-induction_P Parameter: Tissue Value: Whole Plant
  misc_feature: MA Experiment ID: 20001558 Result: Down-regulated in Transcription
  misc_feature: MA Experiment 20001558 PARAMETER Experiment Name: At_Drought_Soil_Dry_P Parameter: Age (day) Value: 27
  misc_feature: MA Experiment 20001558 PARAMETER Experiment Name: At_Drought_Soil_Dry_P Parameter: Organism Value: A. thaliana
  misc_feature: MA Experiment 20001558 PARAMETER Experiment Name: At_Drought_Soil_Dry_P Parameter: Plant Line Value: WS
  misc_feature: MA Experiment 20001558 PARAMETER Experiment Name: At_Drought_Soil_Dry_P Parameter: Post Timepoint (hr) Value: 6
  misc_feature: MA Experiment 20001558 PARAMETER Experiment Name: At_Drought_Soil_Dry_P Parameter: Post-Treatment Value: Re-Water vs. No Drought
  misc_feature: MA Experiment 20001558 PARAMETER Experiment Name: At_Drought_Soil_Dry_P Parameter: Timepoint (day) Value: 13
  misc_feature: MA Experiment 20001558 PARAMETER Experiment Name: At_Drought_Soil_Dry_P Parameter: Treatment Value: Drought vs. No Drought
  misc_feature: MA Experiment ID: 20001757 Result: Up-regulated in Transcription
  misc_feature: MA Experiment 20001757 PARAMETER Experiment Name: At_50mM_NH4NO3_L-to-H_P Parameter: Timepoint (hr) Value: 6
  misc_feature: MA Experiment 20001757 PARAMETER Experiment Name: At_50mM_NH4NO3_L-to-H_P Parameter: Tissue Value: Leaf
  misc_feature: MA Experiment 20001757 PARAMETER Experiment Name: At_50mM_NH4NO3_L-to-H_P Parameter: Treatment Value: 50mM NH4NO3 vs 100mM Mannitol
  misc_feature: MA Experiment ID: 20001905 Result: Down-regulated in Transcription
  misc_feature: MA Experiment 20001905 PARAMETER Experiment Name: At_Drought_Reproduction_P Parameter: Age (day) Value: 40
  misc_feature: MA Experiment 20001905 PARAMETER Experiment Name: At_Drought_Reproduction_P Parameter: Organism Value: A. thaliana
  misc_feature: MA Experiment 20001905 PARAMETER Experiment Name: At_Drought_Reproduction_P Parameter: Plant Line Value: WS
  misc_feature: MA Experiment 20001905 PARAMETER Experiment Name: At_Drought_Reproduction_P Parameter: Timepoint (day) Value: 10
  misc_feature: MA Experiment 20001905 PARAMETER Experiment Name: At_Drought_Reproduction_P Parameter: Tissue Value: Rosettes
  misc_feature: MA Experiment 20001905 PARAMETER Experiment Name: At_Drought_Reproduction_P Parameter: Treatment Value: Drought vs. No Drought
  misc_feature: MA Experiment ID: 20001906 Result: Down-regulated in Transcription
  misc_feature: MA Experiment 20001906 PARAMETER Experiment Name: At_Drought_Reproduction_P Parameter: Age (day) Value: 35
  misc_feature: MA Experiment 20001906 PARAMETER Experiment Name: At_Drought_Reproduction_P Parameter: Organism Value: A. thaliana
  misc_feature: MA Experiment 20001906 PARAMETER Experiment Name: At_Drought_Reproduction_P Parameter: Plant Line Value: WS
  misc_feature: MA Experiment 20001906 PARAMETER Experiment Name: At_Drought_Reproduction_P Parameter: Timepoint (day) Value: 5
  misc_feature: MA Experiment 20001906 PARAMETER Experiment Name: At_Drought_Reproduction_P Parameter: Tissue Value: Siliques
  misc_feature: MA Experiment 20001906 PARAMETER Experiment Name: At_Drought_Reproduction_P Parameter: Treatment Value: Drought vs. No Drought
  misc_feature: MA Experiment ID: 20001908 Result: Down-regulated in Transcription
  misc_feature: MA Experiment 20001908 PARAMETER Experiment Name: At_Drought_Reproduction_P Parameter: Age (day) Value: 40
  misc_feature: MA Experiment 20001908 PARAMETER Experiment Name: At_Drought_Reproduction_P Parameter: Organism Value: A. thaliana
  misc_feature: MA Experiment 20001908 PARAMETER Experiment Name: At_Drought_Reproduction_P Parameter: Plant Line Value: WS
  misc_feature: MA Experiment 20001908 PARAMETER Experiment Name: At_Drought_Reproduction_P Parameter: Timepoint (day) Value: 10
  misc_feature: MA Experiment 20001908 PARAMETER Experiment Name: At_Drought_Reproduction_P Parameter: Tissue Value: Siliques
  misc_feature: MA Experiment 20001908 PARAMETER Experiment Name: At_Drought_Reproduction_P Parameter: Treatment Value: Drought vs. No Drought
atcatcaaaacataccaataagcaatttgctcattagagaacagagaaaaaaaaaacaatggcaactcaagccgccgggatcttcaactccgccataacaaccgccgcaacctccggcgtcaagaaactccactttttctcaacaacccaccgtcccaaatccctctccttcaccaaaaccgcaatccgcgccgagaaaacagattcctccgccgccgctgctgcagcccccgccacgaaagaagctcccgtgggattcacgccaccgcagctagacccaaacacaccgtctccgatcttcgctggaagcaccggtggtcttctacgtaaagcgcaagtggaagagttctacgttatcacgtggaactcaccgaaagaacagatctttgagatgccgacaggaggagcagcgatcatgagagaaggtccgaatcttctgaagctagcgaggaaagagcagtgtttagctttggggacaaggcttagatccaagtacaagatcacttaccagttttacagagtgtttcctaacggtgaggttcaatatcttcatcctaaagatggtgtttatccagagaaggcgaatccaggaagagaaggtgttggtctcaacatgagatctattgggaaaaatgttagtcccattgaagttaagtttactggcaaacaaagttatgatttgtaagatctgtaaactaaaaaaaccaaaaactatgtgcatgtggtgatgattatgactatgtttcatgttaatttttaatagattttgttttg

SEQ ID NO: 23350 - protein, 208 aa, Arabidopsis thaliana; identical to SEQ ID NO: 21188
  peptide (1)..(208): Ceres Seq. ID no. 12394702
  misc_feature (70)..(207): Pfam Name: PsaD Pfam Description: PsaD
  misc_feature (5)..(208): Homolog of NCBI NO: 1488649 NR Description: psaD [Spinacia oleracea]
  misc_feature (1)..(208): Homolog of NCBI NO: 34787117 NR Description: putative photosystem I reaction centre PSI-D
  misc_feature (1)..(208): Homolog of NCBI NO: 417544 NR Description: Photosystem I reaction center subunit II,
  misc_feature (1)..(208): Homolog of NCBI NO: 19855891 NR Description: Photosystem I reaction center subunit II,
  misc_feature (1)..(208): Homolog of NCBI NO: 21293 NR Description: 20 kDa protein (AA 1-212) [Spinacia oleracea]
  misc_feature (1)..(208): Homolog of NCBI NO: 72680 NR Description: photosystem I chain II precursor - spinach
  misc_feature (1)..(208): Homolog of NCBI NO: 5732201 NR Description: photosystem I subunit II precursor [Arabidopsis
  misc_feature (1)..(208): Homolog of NCBI NO: 15218708 NR Description: putative photosystem I reaction center subunit II
  misc_feature (1)..(208): Homolog of NCBI NO: 21595031 NR Description: putative photosystem I reaction center subunit II
  misc_feature (1)..(208): Homolog of NCBI NO: 15235503 NR Description: putative photosystem I reaction center subunit II

SEQ ID NO: 23351 - DNA, 2006 bp, Arabidopsis thaliana
  misc_feature (1)..(2006): Ceres Seq. ID no. 13488387
  misc_feature: MA Experiment ID: 20000179 Result: Up-regulated in Transcription
  misc_feature: MA Experiment 20000179 PARAMETER Experiment Name: At_Germinating_Seeds_P Parameter: Age (hr) Value: 6 vs. 0
  misc_feature: MA Experiment 20000179 PARAMETER Experiment Name: At_Germinating_Seeds_P Parameter: Tissue Value: Germinating Seeds
  misc_feature: MA Experiment ID: 20000794 Result: Up-regulated in Transcription
  misc_feature: MA Experiment 20000794 PARAMETER Experiment Name: At_Petals_P Parameter: Age (day) Value: 23-25 days
  misc_feature: MA Experiment 20000794 PARAMETER Experiment Name: At_Petals_P Parameter: Plant Line Value: WS
  misc_feature: MA Experiment 20000794 PARAMETER Experiment Name: At_Petals_P Parameter: Tissue Value: Petals vs. Whole plant
aagtcgccgggaaaagtaaaataaaaagccgtcacgtctccgataaataatagagtatcgttagataggtagcttcaacgtaaggaatctaaattggttcagctcaaaaaacgaaaacgatgggttccatcgaagaagaagcaagacctctcatcgaagaaggtttaattttacaggaagtgaaattgtatgctgaagatggttcagtggactttaatggaaacccaccattgaaggagaaaacaggaaactggaaagcttgtccttttattcttggtaatgaatgttgtgagaggctagcttactatggtattgctgggaatttaatcacttacctcaccactaagcttcaccaaggaaatgtttctgctgctacaaacgttaccacatggcaagggacttgttatctcactcctctcattggagctgttctggctgatgcttactggggacgttactggaccatcgcttgtttctccgggatttatttcatcgggatgtctgcgttaactctttcagcttcagttccggcattgaagccagcggaatgtattggtgacttttgtccatctgcaacgccagctcagtatgcgatgttctttggtgggctttacctgatcgctcttggaactggaggtatcaaaccgtgtgtctcatccttcggtgccgatcagtttgatgacacggactctcgggaacgagttagaaaagcttcgttctttaactggttttacttctccatcaatattggagcacttgtgtcatctagtcttctagtttggattcaagagaatcgcgggtggggtttagggtttgggataccaacagtgttcatgggactagccattgcaagtttcttctttggcacacctctttataggtttcagaaacctggaggaagccctataactcggatttcccaagtcgtggttgcttcgttccggaaatcgtctgtcaaagtccctgaagacgccacacttctgtatgaaactcaagacaagaactctgctattgctggaagtagaaaaatcgagcataccgatgattgccagtatcttgacaaagccgctgttatctcagaagaagaatcgaaatccggagattattccaactcgtggagactatgcacggttacgcaagtcgaagaactcaagattctgatccgaatgttcccaatctgggcttctggtatcattttctcagctgtatacgcacaaatgtccacaatgtttgttcaacaaggccgagccatgaactgcaaaattggatcattccagcttcctcctgcagcactcgggacattcgacacagcaagcgtcatcatctgggtgccgctctacgaccggttcatcgttcccttagcaagaaagttcacaggagtagacaaaggattcactgagatacaaagaatgggaattggtctgtttgtctctgttctctgtatggcagctgcagctatcgtcgaaatcatccgtctccatatggccaacgatcttggattagtcgagtcaggagccccagttcccatatccgtcttgtggcagattccacagtacttcattctcggtgcagccgaagtattctacttcatcggtcagctcgagttcttctacgaccaatctccagatgcaatgagaagcttgtgcagtgccttagctcttttgaccaatgcacttggtaactacttgagctcgttgatcctcacgctcgtgacttattttacaacaagaaatgggcaagaaggttggatttcggataatctcaattcaggtcatctcgattacttcttctggctcttggctggtcttagccttgtgaacatggcggtttacttcttctctgctgctaggtataagcaaaagaaagcttcgtcgtagtaatgctgttatctatctactttcattacatacaaaagtttgtttctttcaactgtaactgtctctgtatcaataacaacattgctgtgtacttttcctttcaatttcaaaagtttaagtcgcatttgc

SEQ ID NO: 23352 - protein, 585 aa, Arabidopsis thaliana
  peptide (1)..(585): Ceres Seq. ID no. 13488388
  misc_feature (113)..(517): Pfam Name: POT family Pfam Description: POT family
  misc_feature (18)..(583): Homolog of NCBI NO: 15232435 NR Description: peptide transport - like protein [Arabidopsis
  misc_feature (319)..(582): Homolog of NCBI NO: 15226856 NR Description: peptide/amino acid transporter -related
  misc_feature (1)..(286): Homolog of NCBI NO: 15226856 NR Description: peptide/amino acid transporter -related
  misc_feature (26)..(583): Homolog of NCBI NO: 25404366 NR Description: hypothetical protein F19K23.13 [imported] -
  misc_feature (5)..(583): Homolog of NCBI NO: 30696666 NR Description: oligopeptide transporter -related [Arabidopsis
  misc_feature (1)..(556): Homolog of NCBI NO: 6635838 NR Description: amino acid/peptide transporter [Prunus dulcis]
  misc_feature (1)..(584): Homolog of NCBI NO: 15076661 NR Description: peptide transporter [Oryza sativa (japonica
  misc_feature (1)..(584): Homolog of NCBI NO: 31088360 NR Description: peptide transporter 1 [Vicia faba]
  misc_feature (15)..(584): Homolog of NCBI NO: 4102839 NR Description: LeOPT1 [Lycopersicon esculentum]
  misc_feature (1)..(585): Homolog of NCBI NO: 1076331 NR Description: histidine transport protein - Arabidopsis
MGSIEEEARPLIEEGLILQEVKLYAEDGSVDFNGNPPLKEKTGNWKACPFILGNECCERLAYYGIAGNLITYLTTKLHQGNVSAATNVTTWQGTCYLTPLIGAVLADAYWGRYWTIACFSGIYFIGMSALTLSASVPALKPAECIGDFCPSATPAQYAMFFGGLYLIALGTGGIKPCVSSFGADQFDDTDSRERVRKASFFNWFYFSINIGALVSSSLLVWIQENRGWGLGFGIPTVFMGLAIASFFFGTPLYRFQKPGGSPITRISQVVVASFRKSSVKVPEDATLLYETQDKNSAIAGSRKIEHTDDCQYLDKAAVISEEESKSGDYSNSWRLCTVTQVEELKILIRMFPIWASGIIFSAVYAQMSTMFVQQGRAMNCKIGSFQLPPAALGTFDTASVIIWVPLYDRFIVPLARKFTGVDKGFTEIQRMGIGLFVSVLCMAAAAIVEIIRLHMANDLGLVESGAPVPISVLWQIPQYFILGAAEVFYFIGQLEFFYDQSPDAMRSLCSALALLTNALGNYLSSLILTLVTYFTTRNGQEGWISDNLNSGHLDYFFWLLAGLSLVNMAVYFFSAARYKQKKASS

SEQ ID NO: 23353 - protein, 459 aa, Arabidopsis thaliana
  peptide (1)..(459): Ceres Seq. ID no. 13488389
  misc_feature (1)..(391): Pfam Name: POT family Pfam Description: POT family
  misc_feature (1)..(457): Homolog of NCBI NO: 15232435 NR Description: peptide transport - like protein [Arabidopsis
  misc_feature (193)..(456): Homolog of NCBI NO: 15226856 NR Description: peptide/amino acid transporter -related
  misc_feature (1)..(160): Homolog of NCBI NO: 15226856 NR Description: peptide/amino acid transporter -related
  misc_feature (1)..(457): Homolog of NCBI NO: 25404366 NR Description: hypothetical protein F19K23.13 [imported] -
  misc_feature (1)..(457): Homolog of NCBI NO: 30696666 NR Description: oligopeptide transporter -related [Arabidopsis
  misc_feature (1)..(430): Homolog of NCBI NO: 6635838 NR Description: amino acid/peptide transporter [Prunus dulcis]
  misc_feature (1)..(458): Homolog of NCBI NO: 15076661 NR Description: peptide transporter [Oryza sativa (japonica
  misc_feature (1)..(458): Homolog of NCBI NO: 31088360 NR Description: peptide transporter 1 [Vicia faba]
  misc_feature (1)..(458): Homolog of NCBI NO: 4102839 NR Description: LeOPT1 [Lycopersicon esculentum]
  misc_feature (1)..(459): Homolog of NCBI NO: 1076331 NR Description: histidine transport protein - Arabidopsis
MSALTLSASVPALKPAECIGDFCPSATPAQYAMFFGGLYLIALGTGGIKPCVSSFGADQFDDTDSRERVRKASFFNWFYFSINIGALVSSSLLVWIQENRGWGLGFGIPTVFMGLAIASFFFGTPLYRFQKPGGSPITRISQVVVASFRKSSVKVPEDATLLYETQDKNSAIAGSRKIEHTDDCQYLDKAAVISEEESKSGDYSNSWRLCTVTQVEELKILIRMFPIWASGIIFSAVYAQMSTMFVQQGRAMNCKIGSFQLPPAALGTFDTASVIIWVPLYDRFIVPLARKFTGVDKGFTEIQRMGIGLFVSVLCMAAAAIVEIIRLHMANDLGLVESGAPVPISVLWQIPQYFILGAAEVFYFIGQLEFFYDQSPDAMRSLCSALALLTNALGNYLSSLILTLVTYFTTRNGQEGWISDNLNSGHLDYFFWLLAGLSLVNMAVYFFSAARYKQKKASS

SEQ ID NO: 23354 - protein, 427 aa, Arabidopsis thaliana
  peptide (1)..(427): Ceres Seq. ID no. 13488390
  misc_feature (1)..(359): Pfam Name: POT family Pfam Description: POT family
  misc_feature (1)..(425): Homolog of NCBI NO: 15232435 NR Description: peptide transport - like protein [Arabidopsis
  misc_feature (161)..(424): Homolog of NCBI NO: 15226856 NR Description: peptide/amino acid transporter -related
  misc_feature (1)..(128): Homolog of NCBI NO: 15226856 NR Description: peptide/amino acid transporter -related
  misc_feature (1)..(425): Homolog of NCBI NO: 25404366 NR Description: hypothetical protein F19K23.13 [imported] -
  misc_feature (1)..(425): Homolog of NCBI NO: 30696666 NR Description: oligopeptide transporter -related [Arabidopsis
  misc_feature (1)..(398): Homolog of NCBI NO: 6635838 NR Description: amino acid/peptide transporter [Prunus dulcis]
  misc_feature (1)..(426): Homolog of NCBI NO: 15076661 NR Description: peptide transporter [Oryza sativa (japonica
  misc_feature (1)..(426): Homolog of NCBI NO: 31088360 NR Description: peptide transporter 1 [Vicia faba]
  misc_feature (1)..(426): Homolog of NCBI NO: 4102839 NR Description: LeOPT1 [Lycopersicon esculentum]
  misc_feature (1)..(427): Homolog of NCBI NO: 1076331 NR Description: histidine transport protein - Arabidopsis
MFFGGLYLIALGTGGIKPCVSSFGADQFDDTDSRERVRKASFFNWFYFSINIGALVSSSLLVWIQENRGWGLGFGIPTVFMGLAIASFFFGTPLYRFQKPGGSPITRISQVVVASFRKSSVKVPEDATLLYETQDKNSAIAGSRKIEHTDDCQYLDKAAVISEEESKSGDYSNSWRLCTVTQVEELKILIRMFPIWASGIIFSAVYAQMSTMFVQQGRAMNCKIGSFQLPPAALGTFDTASVIIWVPLYDRFIVPLARKFTGVDKGFTEIQRMGIGLFVSVLCMAAAAIVEIIRLHMANDLGLVESGAPVPISVLWQIPQYFILGAAEVFYFIGQLEFFYDQSPDAMRSLCSALALLTNALGNYLSSLILTLVTYFTTRNGQEGWISDNLNSGHLDYFFWLLAGLSLVNMAVYFFSAARYKQKKASS

SEQ ID NO: 23355 - DNA, 1396 bp, Arabidopsis thaliana
  misc_feature (1)..(1396): Ceres Seq. ID no. 13493873
  misc_feature: MA Experiment ID: 108434 Result: Down-regulated in Transcription
  misc_feature: MA Experiment 108434 PARAMETER Experiment Name: At_Root_Tips_cDNA_P Parameter: Tissue Value: Root Tips
  misc_feature: MA Experiment ID: 108462 Result: Up-regulated in Transcription
  misc_feature: MA Experiment 108462 PARAMETER Experiment Name: At_Germinating_Seeds_cDNA_P Parameter: Age (day) Value: 2 vs. 0
  misc_feature: MA Experiment 108462 PARAMETER Experiment Name: At_Germinating_Seeds_cDNA_P Parameter: Tissue Value: Germinating Seeds
  misc_feature: MA Experiment ID: 108569 Result: Up-regulated in Transcription
  misc_feature: MA Experiment 108569 PARAMETER Experiment Name: At_0.001%_MeJA__cDNA_P Parameter: Timepoint (hr) Value: 6
  misc_feature: MA Experiment 108569 PARAMETER Experiment Name: At_0.001%_MeJA__cDNA_P Parameter: Tissue Value: Aerial
  misc_feature: MA Experiment 108569 PARAMETER Experiment Name: At_0.001%_MeJA__cDNA_P Parameter: Treatment Value: 0.001% MeJA vs. No Treatment
  misc_feature: MA Experiment ID: 108573 Result: Up-regulated in Transcription
  misc_feature: MA Experiment 108573 PARAMETER Experiment Name: At_Drought_cDNA_P Parameter: Timepoint (hr) Value: 6
  misc_feature: MA Experiment 108573 PARAMETER Experiment Name: At_Drought_cDNA_P Parameter: Tissue Value: Aerial
  misc_feature: MA Experiment 108573 PARAMETER Experiment Name: At_Drought_cDNA_P Parameter: Treatment Value: Drought vs. No Drought
  misc_feature: MA Experiment ID: 108595 Result: Down-regulated in Transcription
  misc_feature: MA Experiment 108595 PARAMETER Experiment Name: At_Ler-pi_Ovule_cDNA_P Parameter: Plant Line Value: null
  misc_feature: MA Experiment ID: 108605 Result: Up-regulated in Transcription
  misc_feature: MA Experiment 108605 PARAMETER Experiment Name: At_100uM_ABA_cDNA_P Parameter: Timepoint (hr) Value: 6
  misc_feature: MA Experiment 108605 PARAMETER Experiment Name: At_100uM_ABA_cDNA_P Parameter: Tissue Value: Aerial
  misc_feature: MA Experiment 108605 PARAMETER Experiment Name: At_100uM_ABA_cDNA_P Parameter: Treatment Value: 100uM ABA vs. No Treatment
  misc_feature: MA Experiment ID: 20000087 Result: Down-regulated in Transcription
  misc_feature: MA Experiment 20000087 PARAMETER Experiment Name: At_100uM_ABA_Mutants_cDNA_P Parameter: Plant Line Value: WS
  misc_feature: MA Experiment 20000087 PARAMETER Experiment Name: At_100uM_ABA_Mutants_cDNA_P Parameter: Timepoint (hr) Value: 6
  misc_feature: MA Experiment 20000087 PARAMETER Experiment Name: At_100uM_ABA_Mutants_cDNA_P Parameter: Tissue Value: Aerial
  misc_feature: MA Experiment 20000087 PARAMETER Experiment Name: At_100uM_ABA_Mutants_cDNA_P Parameter: Treatment Value: 100uM ABA vs. No Treatment
  misc_feature: MA Experiment ID: 20000307 Result: Up-regulated in Transcription
  misc_feature: MA Experiment 20000307 PARAMETER Experiment Name: At_Germinating_Seeds_Sub_P Parameter: Age (hr) Value: 24 vs. 0
  misc_feature: MA Experiment 20000307 PARAMETER Experiment Name: At_Germinating_Seeds_Sub_P Parameter: Organism Value: A. thaliana
  misc_feature: MA Experiment 20000307 PARAMETER Experiment Name: At_Germinating_Seeds_Sub_P Parameter: Plant Line Value: WS
  misc_feature: MA Experiment 20000307 PARAMETER Experiment Name: At_Germinating_Seeds_Sub_P Parameter: Tissue Value: Germinating Seeds
  misc_feature: MA Experiment ID: 20000314 Result: Up-regulated in Transcription
  misc_feature: MA Experiment 20000314 PARAMETER Experiment Name: At_14day_Shoots-Roots_Sub_P Parameter: Age (day) Value: 14
  misc_feature: MA Experiment 20000314 PARAMETER Experiment Name: At_14day_Shoots-Roots_Sub_P Parameter: Organism Value: A. thaliana
  misc_feature: MA Experiment 20000314 PARAMETER Experiment Name: At_14day_Shoots-Roots_Sub_P Parameter: Plant Line Value: WS
  misc_feature: MA Experiment 20000314 PARAMETER Experiment Name: At_14day_Shoots-Roots_Sub_P Parameter: Tissue Value: Roots vs. Whole Plant
  misc_feature: MA Experiment ID: 20000327 Result: Down-regulated in Transcription
  misc_feature: MA Experiment 20000327 PARAMETER Experiment Name: At_42deg_Heat_Sub_P Parameter: Age (day) Value: 14
  misc_feature: MA Experiment 20000327 PARAMETER Experiment Name: At_42deg_Heat_Sub_P Parameter: Organism Value: A. thaliana
  misc_feature: MA Experiment 20000327 PARAMETER Experiment Name: At_42deg_Heat_Sub_P Parameter: Plant Line Value: WS
  misc_feature: MA Experiment 20000327 PARAMETER Experiment Name: At_42deg_Heat_Sub_P Parameter: Temperature (deg C) Value: 42 vs. 22
  misc_feature: MA Experiment 20000327 PARAMETER Experiment Name: At_42deg_Heat_Sub_P Parameter: Timepoint (hr) Value: 1
  misc_feature: MA Experiment 20000327 PARAMETER Experiment Name: At_42deg_Heat_Sub_P Parameter: Tissue Value: Aerial
  misc_feature: MA Experiment ID: 20000328 Result: Down-regulated in Transcription
  misc_feature: MA Experiment 20000328 PARAMETER Experiment Name: At_42deg_Heat_Sub_P Parameter: Age (day) Value: 14
  misc_feature: MA Experiment 20000328 PARAMETER Experiment Name: At_42deg_Heat_Sub_P Parameter: Organism Value: A. thaliana
  misc_feature: MA Experiment 20000328 PARAMETER Experiment Name: At_42deg_Heat_Sub_P Parameter: Plant Line Value: WS
  misc_feature: MA Experiment 20000328 PARAMETER Experiment Name: At_42deg_Heat_Sub_P Parameter: Temperature (deg C) Value: 42 vs. 22
  misc_feature: MA Experiment 20000328 PARAMETER Experiment Name: At_42deg_Heat_Sub_P Parameter: Timepoint (hr) Value: 6
  misc_feature: MA Experiment 20000328 PARAMETER Experiment Name: At_42deg_Heat_Sub_P Parameter: Tissue Value: Aerial
  misc_feature: MA Experiment ID: 20000347 Result: Up-regulated in Transcription
  misc_feature: MA Experiment 20000347 PARAMETER Experiment Name: At_2mM_SA_Sub_P Parameter: Age (day) Value: 14
  misc_feature: MA Experiment 20000347 PARAMETER Experiment Name: At_2mM_SA_Sub_P Parameter: Organism Value: A. thaliana
  misc_feature: MA Experiment 20000347 PARAMETER Experiment Name: At_2mM_SA_Sub_P Parameter: Plant Line Value: WS
  misc_feature: MA Experiment 20000347 PARAMETER Experiment Name: At_2mM_SA_Sub_P Parameter: Timepoint (hr) Value: 6
  misc_feature: MA Experiment 20000347 PARAMETER Experiment Name: At_2mM_SA_Sub_P Parameter: Tissue Value: Aerial
  misc_feature: MA Experiment 20000347 PARAMETER Experiment Name: At_2mM_SA_Sub_P Parameter: Treatment Value: 2mM SA vs. No Treatment
atcaaagtataaagtaaaaacaaagactcgagttaatatgtctagtactgaagaaatgtcatcagtcaaaaacacaactcaggttattggcgttgacccatcctccaccgtacgagttaccatcgttcaatcttccaccgtctataatgataccccggccactttagacaaggcggagaagtttattgtggaggcggcgagcaaaggagcgaagttggtgttgtttcccgaggcgttcatcggcggttatcctcgaggttttaggtttggtttagcggtgggagttcataacgaagaagggcgtgatgagtttcgtaactaccatgcttctgctattaaagtccctggccctgaagtggaaagattggctgagttggccgggaaaaataatgtgcacttggtaatgggggctatagagaaggatggttatacactctattgcacagctcttttcttcagtccacaaggtcagtttttaggtaagcaccgtaaagtcatgcccacatctttggaacgttgcatatggggtcaaggggacggatcaaccatccccgtttacgacactcctattggcaaaatcggtgctgctatttgctgggagaataggatgcccctctacagaactgcattgtacgctaaaggcattgagatttattgtgcacctactgctgattattcgttggaatggcaagcatcgatgattcacattgcggtagaaggtggatgtttcgtgttgtcagcgcaccagttctgcaagcgtagagagttccctgaacatcctgattacttgtttaatgacatagtagacactaaagaacatgatcctactgtctccggaggtggaagtgtcattatttcacctttgggaaaggttctcgccggaccaaactatgaatcagagggtctcgtcacagctgatcttgatcttggtgatatagcaagagccaagttatacttcgatgtggttggacattactcaaagccagatatttttaacttgaccgtaaatgagcacccgaagaaaccggttacattcatgacgaaggtcgagaaagcagaggatgaatcaaacaaatagtcaagatttgcaattcgtctactgaagttaagtcaagttcgaaatgtttttttttcagttttaaagttgatgttcaagtttatttttctttctcttcaataatgtaagaggactatttcgatatgttaaaataaaaccaattggttctctcctcttgtattcaattgtcgtgtaataatgttttgttcaattcgagtgttgattaagttgtattctttatttttcctttgcatgtcaaacacagattttttgctgtttaaataagttgctagctaagtctagatgtgagtttgaaaagtcactacaaaactacttaat

SEQ ID NO: 23356 - protein, 358 aa, Arabidopsis thaliana
  peptide (1)..(358): Ceres Seq. ID no. 13493874
  misc_feature (32)..(356): Homolog of NCBI NO: 15242205 NR Description: Nitrilase 4 (sp P46011) [Arabidopsis thaliana]
  misc_feature (13)..(356): Homolog of NCBI NO: 14211396 NR Description: nitrilase-like protein [Brassica napus]
  misc_feature (19)..(358): Homolog of NCBI NO: 25290267 NR Description: nitrilase (EC 3.5.5.1) 2 [imported] - Arabidopsis
  misc_feature (19)..(358): Homolog of NCBI NO: 15229932 NR Description: nitrilase 2 [Arabidopsis thaliana]
  misc_feature (19)..(358): Homolog of NCBI NO: 25290266 NR Description: nitrilase (EC 3.5.5.1) 2 [imported] - Arabidopsis
  misc_feature (13)..(358): Homolog of NCBI NO: 16226740 NR Description: AT3g44310/T10D17_100 [Arabidopsis thaliana]
  misc_feature (13)..(358): Homolog of NCBI NO: 417381 NR Description: Nitrilase 1
  misc_feature (13)..(358): Homolog of NCBI NO: 30692067 NR Description: nitrilase 1 [Arabidopsis thaliana]
  misc_feature (13)..(358): Homolog of NCBI NO: 21593107 NR Description: nitrilase 3 [Arabidopsis thaliana]
  misc_feature (13)..(358): Homolog of NCBI NO: 15229936 NR Description: nitrilase 3 [Arabidopsis thaliana]
SKYKVKTKTRVNMSSTEEMSSVKNTTQVIGVDPSSTVRVTIVQSSTVYNDTPATLDKAEKFIVEAASKGAKLVLFPEAFIGGYPRGFRFGLAVGVHNEEGRDEFRNYHASAIKVPGPEVERLAELAGKNNVHLVMGAIEKDGYTLYCTALFFSPQGQFLGKHRKVMPTSLERCIWGQGDGSTIPVYDTPIGKIGAAICWENRMPLYRTALYAKGIEIYCAPTADYSLEWQASMIHIAVEGGCFVLSAHQFCKRREFPEHPDYLFNDIVDTKEHDPTVSGGGSVIISPLGKVLAGPNYESEGLVTADLDLGDIARAKLYFDVVGHYSKPDIFNLTVNEHPKKPVTFMTKVEKAEDESNK

SEQ ID NO: 23357 - protein, 346 aa, Arabidopsis thaliana
  peptide (1)..(346): Ceres Seq. ID no. 13493875
  misc_feature (20)..(344): Homolog of NCBI NO: 15242205 NR Description: Nitrilase 4 (sp P46011) [Arabidopsis thaliana]
  misc_feature (1)..(344): Homolog of NCBI NO: 14211396 NR Description: nitrilase-like protein [Brassica napus]
  misc_feature (7)..(346): Homolog of NCBI NO: 25290267 NR Description: nitrilase (EC 3.5.5.1) 2 [imported] - Arabidopsis
  misc_feature (7)..(346): Homolog of NCBI NO: 15229932 NR Description: nitrilase 2 [Arabidopsis thaliana]
  misc_feature (7)..(346): Homolog of NCBI NO: 25290266 NR Description: nitrilase (EC 3.5.5.1) 2 [imported] - Arabidopsis
  misc_feature (1)..(346): Homolog of NCBI NO: 16226740 NR Description: AT3g44310/T10D17_100 [Arabidopsis thaliana]
  misc_feature (1)..(346): Homolog of NCBI NO: 417381 NR Description: Nitrilase 1
  misc_feature (1)..(346): Homolog of NCBI NO: 30692067 NR Description: nitrilase 1 [Arabidopsis thaliana]
  misc_feature (1)..(346): Homolog of NCBI NO: 21593107 NR Description: nitrilase 3 [Arabidopsis thaliana]
  misc_feature (1)..(346): Homolog of NCBI NO: 15229936 NR Description: nitrilase 3 [Arabidopsis thaliana]
MSSTEEMSSVKNTTQVIGVDPSSTVRVTIVQSSTVYNDTPATLDKAEKFIVEAASKGAKLVLFPEAFIGGYPRGFRFGLAVGVHNEEGRDEFRNYHASAIKVPGPEVERLAELAGKNNVHLVMGAIEKDGYTLYCTALFFSPQGQFLGKHRKVMPTSLERCIWGQGDGSTIPVYDTPIGKIGAAICWENRMPLYRTALYAKGIEIYCAPTADYSLEWQASMIHIAVEGGCFVLSAHQFCKRREFPEHPDYLFNDIVDTKEHDPTVSGGGSVIISPLGKVLAGPNYESEGLVTADLDLGDIARAKLYFDVVGHYSKPDIFNLTVNEHPKKPVTFMTKVEKAEDESNK

SEQ ID NO: 23358 - protein, 340 aa, Arabidopsis thaliana
  peptide (1)..(340): Ceres Seq. ID no. 13493876
  misc_feature (14)..(338): Homolog of NCBI NO: 15242205 NR Description: Nitrilase 4 (sp P46011) [Arabidopsis thaliana]
  misc_feature (1)..(338): Homolog of NCBI NO: 14211396 NR Description: nitrilase-like protein [Brassica napus]
  misc_feature (1)..(340): Homolog of NCBI NO: 25290267 NR Description: nitrilase (EC 3.5.5.1) 2 [imported] - Arabidopsis
  misc_feature (1)..(340): Homolog of NCBI NO: 15229932 NR Description: nitrilase 2 [Arabidopsis thaliana]
  misc_feature (1)..(340): Homolog of NCBI NO: 25290266 NR Description: nitrilase (EC 3.5.5.1) 2 [imported] - Arabidopsis
  misc_feature (1)..(340): Homolog of NCBI NO: 16226740 NR Description: AT3g44310/T10D17_100 [Arabidopsis thaliana]
  misc_feature (1)..(340): Homolog of NCBI NO: 417381 NR Description: Nitrilase 1
  misc_feature (1)..(340): Homolog of NCBI NO: 30692067 NR Description: nitrilase 1 [Arabidopsis thaliana]
  misc_feature (1)..(340): Homolog of NCBI NO: 21593107 NR Description: nitrilase 3 [Arabidopsis thaliana]
  misc_feature (1)..(340): Homolog of NCBI NO: 15229936 NR Description: nitrilase 3 [Arabidopsis thaliana]
MSSVKNTTQVIGVDPSSTVRVTIVQSSTVYNDTPATLDKAEKFIVEAASKGAKLVLFPEAFIGGYPRGFRFGLAVGVHNEEGRDEFRNYHASAIKVPGPEVERLAELAGKNNVHLVMGAIEKDGYTLYCTALFFSPQGQFLGKHRKVMPTSLERCIWGQGDGSTIPVYDTPIGKIGAAICWENRMPLYRTALYAKGIEIYCAPTADYSLEWQASMIHIAVEGGCFVLSAHQFCKRREFPEHPDYLFNDIVDTKEHDPTVSGGGSVIISPLGKVLAGPNYESEGLVTADLDLGDIARAKLYFDVVGHYSKPDIFNLTVNEHPKKPVTFMTKVEKAEDESNK

SEQ ID NO: 23359 - DNA, 1252 bp, Arabidopsis thaliana
  misc_feature (1)..(1252): Ceres Seq. ID no. 12338760
  misc_feature: MA Experiment ID: 108462 Result: Down-regulated in Transcription
  misc_feature: MA Experiment 108462 PARAMETER Experiment Name: At_Germinating_Seeds_cDNA_P Parameter: Age (day) Value: 2 vs. 0
  misc_feature: MA Experiment 108462 PARAMETER Experiment Name: At_Germinating_Seeds_cDNA_P Parameter: Tissue Value: Germinating Seeds
  misc_feature: MA Experiment ID: 20000264 Result: Up-regulated in Transcription
  misc_feature: MA Experiment 20000264 PARAMETER Experiment Name: At_Open_Flower_P Parameter: Age (day) Value: 21
  misc_feature: MA Experiment 20000264 PARAMETER Experiment Name: At_Open_Flower_P Parameter: Plant Line Value: WS
  misc_feature: MA Experiment 20000264 PARAMETER Experiment Name: At_Open_Flower_P Parameter: Tissue Value: Open Flower vs. Whole Plant
  misc_feature: MA Experiment ID: 20000265 Result: Up-regulated in Transcription
  misc_feature: MA Experiment 20000265 PARAMETER Experiment Name: At_Open_Flower_P Parameter: Age (day) Value: 21
  misc_feature: MA Experiment 20000265 PARAMETER Experiment Name: At_Open_Flower_P Parameter: Plant Line Value: WS
  misc_feature: MA Experiment 20000265 PARAMETER Experiment Name: At_Open_Flower_P Parameter: Tissue Value: Closed Flower vs. Whole Plant
  misc_feature: MA Experiment ID: 20000269 Result: Up-regulated in Transcription
  misc_feature: MA Experiment 20000269 PARAMETER Experiment Name: At_1mM_KNO3_L-vs-H_Roots_P Parameter: Age (day) Value: 7,10,12
  misc_feature: MA Experiment 20000269 PARAMETER Experiment Name: At_1mM_KNO3_L-vs-H_Roots_P Parameter: Organism Value: A. thaliana
  misc_feature: MA Experiment 20000269 PARAMETER Experiment Name: At_1mM_KNO3_L-vs-H_Roots_P Parameter: Plant Line Value: WS
  misc_feature: MA Experiment 20000269 PARAMETER Experiment Name: At_1mM_KNO3_L-vs-H_Roots_P Parameter: Timepoint (day) Value: 7,10,12
  misc_feature: MA Experiment 20000269 PARAMETER Experiment Name: At_1mM_KNO3_L-vs-H_Roots_P Parameter: Tissue Value: Roots
  misc_feature: MA Experiment 20000269 PARAMETER Experiment Name: At_1mM_KNO3_L-vs-H_Roots_P Parameter: Treatment Value: 1mM KNO3 vs. 50mM KNO3
  misc_feature: MA Experiment ID: 20000286 Result: Up-regulated in Transcription
  misc_feature: MA Experiment 20000286 PARAMETER Experiment Name: At_Open_Flower_P Parameter: Age (day) Value: 21
  misc_feature: MA Experiment 20000286 PARAMETER Experiment Name: At_Open_Flower_P Parameter: Plant Line Value: WS
  misc_feature: MA Experiment 20000286 PARAMETER Experiment Name: At_Open_Flower_P Parameter: Tissue Value: Half Open vs. Whole Plant
  misc_feature: MA Experiment ID: 20000437 Result: Up-regulated in Transcription
  misc_feature: MA Experiment 20000437 PARAMETER Experiment Name: At_Drought_P Parameter: Age (day) Value: 8
  misc_feature: MA Experiment 20000437 PARAMETER Experiment Name: At_Drought_P Parameter: Organism Value: A. thaliana
  misc_feature: MA Experiment 20000437 PARAMETER Experiment Name: At_Drought_P Parameter: Plant Line Value: WS
  misc_feature: MA Experiment 20000437 PARAMETER Experiment Name: At_Drought_P Parameter: Timepoint (hr) Value: 24
  misc_feature: MA Experiment 20000437 PARAMETER Experiment Name: At_Drought_P Parameter: Tissue Value: Whole Plant
  misc_feature: MA Experiment 20000437 PARAMETER Experiment Name: At_Drought_P Parameter: Treatment Value: Drought vs. No Drought
  misc_feature: MA Experiment ID: 20000451 Result: Up-regulated in Transcription
  misc_feature: MA Experiment 20000451 PARAMETER Experiment Name: At_CS6879_Shoots-Roots_P Parameter: Age (day) Value: 14
  misc_feature: MA Experiment 20000451 PARAMETER Experiment Name: At_CS6879_Shoots-Roots_P Parameter: Organism Value: A. thaliana
  misc_feature: MA Experiment 20000451 PARAMETER Experiment Name: At_CS6879_Shoots-Roots_P Parameter: Plant Line Value: CS6879 vs. WS
  misc_feature: MA Experiment 20000451 PARAMETER Experiment Name: At_CS6879_Shoots-Roots_P Parameter: Tissue Value: Roots
  misc_feature: MA Experiment ID: 20000453 Result: Up-regulated in Transcription
  misc_feature: MA Experiment 20000453 PARAMETER Experiment Name: At_100uM_ABA_P Parameter: Age (day) Value: 15
  misc_feature: MA Experiment 20000453 PARAMETER Experiment Name: At_100uM_ABA_P Parameter: Organism Value: A. thaliana
  misc_feature: MA Experiment 20000453 PARAMETER Experiment Name: At_100uM_ABA_P Parameter: Plant Line Value: WS
  misc_feature: MA Experiment 20000453 PARAMETER Experiment Name: At_100uM_ABA_P Parameter: Timepoint (hr) Value: 24
  misc_feature: MA Experiment 20000453 PARAMETER Experiment Name: At_100uM_ABA_P Parameter: Tissue Value: Aerial
  misc_feature: MA Experiment 20000453 PARAMETER Experiment Name: At_100uM_ABA_P Parameter: Treatment Value: 100uM ABA vs. No Treatment
  misc_feature: MA Experiment ID: 20001458 Result: Down-regulated in Transcription
  misc_feature: MA Experiment 20001458 PARAMETER Experiment Name: At_50mM_NH4NO3_L-to-H_P Parameter: Age (day) Value: Undefined
  misc_feature: MA Experiment 20001458 PARAMETER Experiment Name: At_50mM_NH4NO3_L-to-H_P Parameter: Organism Value: Undefined
  misc_feature: MA Experiment 20001458 PARAMETER Experiment Name: At_50mM_NH4NO3_L-to-H_P Parameter: Plant Line Value: Undefined
  misc_feature: MA Experiment 20001458 PARAMETER Experiment Name: At_50mM_NH4NO3_L-to-H_P Parameter: Timepoint (hr) Value: 2
  misc_feature: MA Experiment 20001458 PARAMETER Experiment Name: At_50mM_NH4NO3_L-to-H_P Parameter: Tissue Value: Siliques
  misc_feature: MA Experiment 20001458 PARAMETER Experiment Name: At_50mM_NH4NO3_L-to-H_P Parameter: Treatment Value: 50mM NH4NO3 vs. 100mM Manitol
  misc_feature: MA Experiment ID: 20001504 Result: Up-regulated in Transcription
  misc_feature: MA Experiment 20001504 PARAMETER Experiment Name: At_Far-red-enriched_P Parameter: Age (day) Value: 10
  misc_feature: MA Experiment 20001504 PARAMETER Experiment Name: At_Far-red-enriched_P Parameter: Light Value: Far-red enriched vs. White
  misc_feature: MA Experiment 20001504 PARAMETER Experiment Name: At_Far-red-enriched_P Parameter: Organism Value: A. thaliana
  misc_feature: MA Experiment 20001504 PARAMETER Experiment Name: At_Far-red-enriched_P Parameter: Plant Line Value: Columbia
  misc_feature: MA Experiment 20001504 PARAMETER Experiment Name: At_Far-red-enriched_P Parameter: Timepoint (day) Value: 6
  misc_feature: MA Experiment 20001504 PARAMETER Experiment Name: At_Far-red-enriched_P Parameter: Tissue Value: Whole Plant
  misc_feature: MA Experiment ID: 20001558 Result: Down-regulated in Transcription
  misc_feature: MA Experiment 20001558 PARAMETER Experiment Name: At_Drought_Soil_Dry_P Parameter: Age (day) Value: 27
  misc_feature: MA Experiment 20001558 PARAMETER Experiment Name: At_Drought_Soil_Dry_P Parameter: Organism Value: A. thaliana
  misc_feature: MA Experiment 20001558 PARAMETER Experiment Name: At_Drought_Soil_Dry_P Parameter: Plant Line Value: WS
  misc_feature: MA Experiment 20001558 PARAMETER Experiment Name: At_Drought_Soil_Dry_P Parameter: Post Timepoint (hr) Value: 6
  misc_feature: MA Experiment 20001558 PARAMETER Experiment Name: At_Drought_Soil_Dry_P Parameter: Post-Treatment Value: Re-Water vs. No Drought
  misc_feature: MA Experiment 20001558 PARAMETER Experiment Name: At_Drought_Soil_Dry_P Parameter: Timepoint (day) Value: 13
  misc_feature: MA Experiment 20001558 PARAMETER Experiment Name: At_Drought_Soil_Dry_P Parameter: Treatment Value: Drought vs. No Drought
  misc_feature: MA Experiment ID: 20001910 Result: Up-regulated in Transcription
  misc_feature: MA Experiment 20001910 PARAMETER Experiment Name: At_Drought_Reproduction_P Parameter: Age (day) Value: 37
  misc_feature: MA Experiment 20001910 PARAMETER Experiment Name: At_Drought_Reproduction_P Parameter: Organism Value: A. thaliana
  misc_feature: MA Experiment 20001910 PARAMETER Experiment Name: At_Drought_Reproduction_P Parameter: Plant Line Value: WS
  misc_feature: MA Experiment 20001910 PARAMETER Experiment Name: At_Drought_Reproduction_P Parameter: Timepoint (day) Value: 7
  misc_feature: MA Experiment 20001910 PARAMETER Experiment Name: At_Drought_Reproduction_P Parameter: Tissue Value: Flowers
  misc_feature: MA Experiment 20001910 PARAMETER Experiment Name: At_Drought_Reproduction_P Parameter: Treatment Value: Drought vs. No Drought
  misc_feature: MA Experiment ID: 20001911 Result: Up-regulated in Transcription
  misc_feature: MA Experiment 20001911 PARAMETER Experiment Name: At_Drought_Reproduction_P Parameter: Age (day) Value: 40
  misc_feature: MA Experiment 20001911 PARAMETER Experiment Name: At_Drought_Reproduction_P Parameter: Organism Value: A. thaliana
  misc_feature: MA Experiment 20001911 PARAMETER Experiment Name: At_Drought_Reproduction_P Parameter: Plant Line Value: WS
  misc_feature: MA Experiment 20001911 PARAMETER Experiment Name: At_Drought_Reproduction_P Parameter: Timepoint (day) Value: 10
  misc_feature: MA Experiment 20001911 PARAMETER Experiment Name: At_Drought_Reproduction_P Parameter: Tissue Value: Flowers
  misc_feature: MA Experiment 20001911 PARAMETER Experiment Name: At_Drought_Reproduction_P Parameter: Treatment Value: Drought vs. No Drought
atagctaaaactcacaaactagagcttcaagagttagaagaggcttcaagagctctatctctctcttaatttctcttggcctttgatactttttcccgctcataagttttttcgatagtccgaccaaacaaagggagagaaaactaatcaagaaacatcaagaaatggctctaactaacaatttatgggcatttgtgtttggaatcttgggtaacatcatatcattcgtcgtgttcttggccccagtgcccacttttgtaaggatatgcaagaagaaatcaaccgaaggttttcagtctctaccctatgtttcagcactttttagcgcgatgctttggatttactacgctatgcaaaaagatggcacagcctttcttctcatcaccataaacgcttttggatgcgtcatcgaaaccatctacatcgtcctctttgtctcctatgctaacaagaaaactagaatatccactttgaaagttcttggtctcttgaactttttgggatttgccgccattgttcttgtctgcgagctcttaaccaaaggttcaacacgtgagaaagttctcggagggatttgcgttggattttccgtcagtgttttcgcagctcctttgagtatcatgagagtggtggtacgaacaagaagtgtggagtttatgcctttctctttatcgttgtttcttacaattagcgccgtcacgtggctcttctacggtctcgctattaaagacttctacgttgcccttccaaatgtattaggcgcgttcttaggagctgttcaaatgattctctacataattttcaaatactacaaaactcctgtggctcagaagacagataaatccaaagacgtgtccgatcattccatcgacatagcaaagctaacgaccgtcatacccggtgcagttttggattccgcggttcatcaaccgcctgctcttcacaatgttcccgagactaaaattcaattgaccgaggtcaagagccagaacatgaccgatccgaaagaccagatcaacaaggatgtccagaaacaaagtcaagtttaagtagtgaatcttatttagagcctcattaataatgcattgtttgagttgtgcactctagctaactttccttttactgtagctttttggattttgtggtctttgtctctttaattagttttcttgtaccactttttatttctcatcattttcattccagggtatctggaaattgtgctatatatgatcaataaataagttgtttt

SEQ ID NO: 23360 - protein, 294 aa, Arabidopsis thaliana
  peptide (1)..(294): Ceres Seq. ID no. 12338761
  misc_feature (10)..(98): Pfam Name: MtN3/saliva family Pfam Description: MtN3/saliva family
  misc_feature (3)..(281): Homolog of NCBI NO: 15240040 NR Description: senescence-associated protein (SAG29)
  misc_feature (3)..(281): Homolog of NCBI NO: 21593422 NR Description: senescence-associated protein (SAG29)
  misc_feature (1)..(214): Homolog of NCBI NO: 1619602 NR Description: MtN3 [Medicago truncatula]
  misc_feature (1)..(258): Homolog of NCBI NO: 15241265 NR Description: MtN3-like protein
  misc_feature (1)..(242): Homolog of NCBI NO: 14715258 NR Description: N3 like protein [Medicago truncatula]
  misc_feature (4)..(243): Homolog of NCBI NO: 15229019 NR Description: MTN3-like protein
  misc_feature (1)..(243): Homolog of NCBI NO: 15237803 NR Description: MtN3-like protein
  misc_feature (1)..(242): Homolog of NCBI NO: 15234863 NR Description: MtN3 - like protein; protein id: At4g25010.1
  misc_feature (1)..(294): Homolog of NCBI NO: 21593109 NR Description: MtN3-like protein [Arabidopsis thaliana]
  misc_feature (1)..(294): Homolog of NCBI NO: 15241278 NR Description: MtN3-like protein
MALTNNLWAFVFGILGNIISFVVFLAPVPTFVRICKKKSTEGFQSLPYVSALFSAMLWIYYAMQKDGTAFLLITINAFGCVIETIYIVLFVSYANKKTRISTLKVLGLLNFLGFAAIVLVCELLTKGSTREKVLGGICVGFSVSVFAAPLSIMRVVVRTRSVEFMPFSLSLFLTISAVTWLFYGLAIKDFYVALPNVLGAFLGAVQMILYIIFKYYKTPVAQKTDKSKDVSDHSIDIAKLTTVIPGAVLDSAVHQPPALHNVPETKIQLTEVKSQNMTDPKDQINKDVQKQSQV

SEQ ID NO: 23361 - protein, 239 aa, Arabidopsis thaliana
  peptide (1)..(239): Ceres Seq. ID no. 12338762
  misc_feature (1)..(226): Homolog of NCBI NO: 15240040 NR Description: senescence-associated protein (SAG29)
  misc_feature (1)..(226): Homolog of NCBI NO: 21593422 NR Description: senescence-associated protein (SAG29)
  misc_feature (1)..(159): Homolog of NCBI NO: 1619602 NR Description: MtN3 [Medicago truncatula]
  misc_feature (1)..(203): Homolog of NCBI NO: 15241265 NR Description: MtN3-like protein
  misc_feature (1)..(187): Homolog of NCBI NO: 14715258 NR Description: N3 like protein [Medicago truncatula]
  misc_feature (1)..(188): Homolog of NCBI NO: 15229019 NR Description: MTN3-like protein
  misc_feature (1)..(188): Homolog of NCBI NO: 15237803 NR Description: MtN3-like protein
  misc_feature (1)..(187): Homolog of NCBI NO: 15234863 NR Description: MtN3 - like protein; protein id: At4g25010.1
  misc_feature (1)..(239): Homolog of NCBI NO: 21593109 NR Description: MtN3-like protein [Arabidopsis thaliana]
  misc_feature (1)..(239): Homolog of NCBI NO: 15241278 NR Description: MtN3-like protein
MLWIYYAMQKDGTAFLLITINAFGCVIETIYIVLFVSYANKKTRISTLKVLGLLNFLGFAAIVLVCELLTKGSTREKVLGGICVGFSVSVFAAPLSIMRVVVRTRSVEFMPFSLSLFLTISAVTWLFYGLAIKDFYVALPNVLGAFLGAVQMILYIIFKYYKTPVAQKTDKSKDVSDHSIDIAKLTTVIPGAVLDSAVHQPPALHNVPETKIQLTEVKSQNMTDPKDQINKDVQKQSQV

SEQ ID NO: 23362 - protein, 232 aa, Arabidopsis thaliana
  peptide (1)..(232): Ceres Seq. ID no. 12338764
  misc_feature (1)..(219): Homolog of NCBI NO: 15240040 NR Description: senescence-associated protein (SAG29)
  misc_feature (1)..(219): Homolog of NCBI NO: 21593422 NR Description: senescence-associated protein (SAG29)
  misc_feature (1)..(152): Homolog of NCBI NO: 1619602 NR Description: MtN3 [Medicago truncatula]
  misc_feature (1)..(196): Homolog of NCBI NO: 15241265 NR Description: MtN3-like protein
  misc_feature (1)..(180): Homolog of NCBI NO: 14715258 NR Description: N3 like protein [Medicago truncatula]
  misc_feature (1)..(181): Homolog of NCBI NO: 15229019 NR Description: MTN3-like protein
  misc_feature (1)..(181): Homolog of NCBI NO: 15237803 NR Description: MtN3-like protein
  misc_feature (1)..(180): Homolog of NCBI NO: 15234863 NR Description: MtN3 - like protein; protein id: At4g25010.1
  misc_feature (1)..(232): Homolog of NCBI NO: 21593109 NR Description: MtN3-like protein [Arabidopsis thaliana]
  misc_feature (1)..(232): Homolog of NCBI NO: 15241278 NR Description: MtN3-like protein
MQKDGTAFLLITINAFGCVIETIYIVLFVSYANKKTRISTLKVLGLLNFLGFAAIVLVCELLTKGSTREKVLGGICVGFSVSVFAAPLSIMRVVVRTRSVEFMPFSLSLFLTISAVTWLFYGLAIKDFYVALPNVLGAFLGAVQMILYIIFKYYKTPVAQKTDKSKDVSDHSIDIAKLTTVIPGAVLDSAVHQPPALHNVPETKIQLTEVKSQNMTDPKDQINKDVQKQSQV

SEQ ID NO: 23363 - DNA, 1298 bp, Arabidopsis thaliana
  misc_feature (1)..(1298): Ceres Seq. ID no. 12340096
  misc_feature: MA Experiment ID: 108573 Result: Up-regulated in Transcription
  misc_feature: MA Experiment 108573 PARAMETER Experiment Name: At_Drought_cDNA_P Parameter: Timepoint (hr) Value: 6
  misc_feature: MA Experiment 108573 PARAMETER Experiment Name: At_Drought_cDNA_P Parameter: Tissue Value: Aerial
  misc_feature: MA Experiment 108573 PARAMETER Experiment Name: At_Drought_cDNA_P Parameter: Treatment Value: Drought vs. No Drought
  misc_feature: MA Experiment ID: 20000184 Result: Up-regulated in Transcription
  misc_feature: MA Experiment 20000184 PARAMETER Experiment Name: At_Shoots__P Parameter: Age (day) Value: 7
  misc_feature: MA Experiment 20000184 PARAMETER Experiment Name: At_Shoots__P Parameter: Tissue Value: Shoots vs. Whole Plant
  misc_feature: MA Experiment ID: 20000264 Result: Up-regulated in Transcription
  misc_feature: MA Experiment 20000264 PARAMETER Experiment Name: At_Open_Flower_P Parameter: Age (day) Value: 21
  misc_feature: MA Experiment 20000264 PARAMETER Experiment Name: At_Open_Flower_P Parameter: Plant Line Value: WS
  misc_feature: MA Experiment 20000264 PARAMETER Experiment Name: At_Open_Flower_P Parameter: Tissue Value: Open Flower vs. Whole Plant
  misc_feature: MA Experiment ID: 20000438 Result: Up-regulated in Transcription
  misc_feature: MA Experiment 20000438 PARAMETER Experiment Name: At_Shoots__P Parameter: Age (day) Value: 14
  misc_feature: MA Experiment 20000438 PARAMETER Experiment Name: At_Shoots__P Parameter: Tissue Value: Shoots vs. Whole Plant
  misc_feature: MA Experiment ID: 20000439 Result: Down-regulated in Transcription
  misc_feature: MA Experiment 20000439 PARAMETER Experiment Name: At_Roots__P Parameter: Age (day) Value: 14 vs. 21
  misc_feature: MA Experiment 20000439 PARAMETER Experiment Name: At_Roots__P Parameter: Organism Value: A. thaliana
  misc_feature: MA Experiment 20000439 PARAMETER Experiment Name: At_Roots__P Parameter: Tissue Value: Roots vs. Whole Plant
  misc_feature: MA Experiment ID: 20001248 Result: Down-regulated in Transcription
  misc_feature: MA Experiment 20001248 PARAMETER Experiment Name: At_Far-red-induction_P Parameter: Age (day) Value: 7
  misc_feature: MA Experiment 20001248 PARAMETER Experiment Name: At_Far-red-induction_P Parameter: Light Value: Far-red vs. White
  misc_feature: MA Experiment 20001248 PARAMETER Experiment Name: At_Far-red-induction_P Parameter: Organism Value: A. thaliana
  misc_feature: MA Experiment 20001248 PARAMETER Experiment Name: At_Far-red-induction_P Parameter: Plant Line Value: Columbia
  misc_feature: MA Experiment 20001248 PARAMETER Experiment Name: At_Far-red-induction_P Parameter: Timepoint (hr) Value: 4
  misc_feature: MA Experiment 20001248 PARAMETER Experiment Name: At_Far-red-induction_P Parameter: Tissue Value: Whole Plant
  misc_feature: MA Experiment ID: 20001451 Result: Down-regulated in Transcription
  misc_feature: MA Experiment 20001451 PARAMETER Experiment Name: At_Far-red-induction_P Parameter: Age (day) Value: 7
  misc_feature: MA Experiment 20001451 PARAMETER Experiment Name: At_Far-red-induction_P Parameter: Light Value: Far-red vs. White
  misc_feature: MA Experiment 20001451 PARAMETER Experiment Name: At_Far-red-induction_P Parameter: Organism Value: A. thaliana
  misc_feature: MA Experiment 20001451 PARAMETER Experiment Name: At_Far-red-induction_P Parameter: Plant Line Value: Columbia
  misc_feature: MA Experiment 20001451 PARAMETER Experiment Name: At_Far-red-induction_P Parameter: Timepoint (hr) Value: 24
  misc_feature: MA Experiment 20001451 PARAMETER Experiment Name: At_Far-red-induction_P Parameter: Tissue Value: Whole Plant
gagattggaatgtttgtatcatggttggcaatttgaaggagagggcaaatgtgtcaagattcctcagcttcctgcaagtgctaagattccaaaggctgcttgtgtgaagacgtatgaggtgaaggattcacaaggagttgtgtgggtgtggatgtcaacaaagacacctccaaaccctgagaagcttccttggtttgagaatttcgctagacccggttttttcgacatttcgactactcatgagcttccttatgaccattccattcttttagagaatctgatggatcctgctcatgttcctatctctcatgatagaacggatttcactgctaaaagagaagatgctcagcctttggttttcgaggtcacagagcgaagtaatcggggtttcgcagggacttggggccgagagaaagaaggtgggaaagggagtaatttacttcggtttggtgctccttgtgttctgcagaacaatcgagagttcgaggggaaggatggagtgaagaactatttttcagggctgtttctttgtagacctacagggcaagggaagtctatgcttattgttaggtttggggtcacaaaaagatcgcctttggtttcggtgttacctcaatgtttctggcatcagaatgcctgcaaggtttttgaacaagacatggggtttctatcgtctcaaaacgaggttctgatgaaggagaaagtaccaactaaggacttgtatttgaatctaaagtcatcggacacatgggtcgctgaatatagaaagtggatggacaaagttggtcatgggatgccttaccatttcgggcataggaccatatctctccccaaagtccctcctgtcgtggaacatgccccggcagggctcattgcagctctctctgcttcttaccctgcaaaaggcggaattgggactatgcatgctcccaatttggctaaccggtacttcagacatattattcattgtagaagctgcagcaatgtgatcaaatcttttgagctctggaaaaatatcctctctgccacggcagtggctttgacggctttggccattctggtggttagtagacagtggaaggctgtcctgttaggttcagcagcattgtgctcagccgcagcttatacctgcttaagagctataaatctaaacaccaataacttcattagaacacacagaagactatgaaaatgtatagtgtcatgtttcctcttcttccaacaatatgtatttcatgaaataaatttttgcttgtaaacgcaattatataattcagaaggttccaatgtttgccacc

SEQ ID NO: 23364 - protein, 395 aa, Arabidopsis thaliana
  peptide (1)..(395): Ceres Seq. ID no. 12340097
  misc_feature (2)..(243): Homolog of NCBI NO: 15230543 NR Description: lethal leaf-spot 1 homolog Lls1
  misc_feature (2)..(267): Homolog of NCBI NO: 23041088 NR Description: hypothetical protein [Trichodesmium erythraeum
  misc_feature (312)..(375): Homolog of NCBI NO: 15451611 NR Description: Putative cell death suppressor protein [Oryza
  misc_feature (2)..(271): Homolog of NCBI NO: 15451611 NR Description: Putative cell death suppressor protein [Oryza
  misc_feature (312)..(376): Homolog of NCBI NO: 30088964 NR Description: lethal leaf spot 1-like protein [Vigna
  misc_feature (1)..(240): Homolog of NCBI NO: 30088964 NR Description: lethal leaf spot 1-like protein [Vigna
  misc_feature (1)..(273): Homolog of NCBI NO: 17232499 NR Description: similar to cell death suppressor protein Lls1
  misc_feature (1)..(273): Homolog of NCBI NO: 23125858 NR Description: hypothetical protein [Nostoc punctiforme]
  misc_feature (1)..(395): Homolog of NCBI NO: 7488843 NR Description: Rieske [2Fe-2S] iron-sulfur protein tic55 -
  misc_feature (1)..(395): Homolog of NCBI NO: 15224625 NR Description: putative Rieske iron-sulfur protein
RLECLYHGWQFEGEGKCVKIPQLPASAKIPKAACVKTYEVKDSQGVVWVWMSTKTPPNPEKLPWFENFARPGFFDISTTHELPYDHSILLENLMDPAHVPISHDRTDFTAKREDAQPLVFEVTERSNRGFAGTWGREKEGGKGSNLLRFGAPCVLQNNREFEGKDGVKNYFSGLFLCRPTGQGKSMLIVRFGVTKRSPLVSVLPQCFWHQNACKVFEQDMGFLSSQNEVLMKEKVPTKDLYLNLKSSDTWVAEYRKWMDKVGHGMPYHFGHRTISLPKVPPVVEHAPAGLIAALSASYPAKGGIGTMHAPNLANRYFRHIIHCRSCSNVIKSFELWKNILSATAVALTALAILVVSRQWKAVLLGSAALCSAAAYTCLRAINLNTNNFIRTHRRL

SEQ ID NO: 23365 - protein, 345 aa, Arabidopsis thaliana
  peptide (1)..(345): Ceres Seq. ID no. 12340098
  misc_feature (1)..(193): Homolog of NCBI NO: 15230543 NR Description: lethal leaf-spot 1 homolog Lls1
  misc_feature (1)..(217): Homolog of NCBI NO: 23041088 NR Description: hypothetical protein [Trichodesmium erythraeum
  misc_feature (262)..(325): Homolog of NCBI NO: 15451611 NR Description: Putative cell death suppressor protein [Oryza
  misc_feature (1)..(221): Homolog of NCBI NO: 15451611 NR Description: Putative cell death suppressor protein [Oryza
  misc_feature (262)..(326): Homolog of NCBI NO: 30088964 NR Description: lethal leaf spot 1-like protein [Vigna
  misc_feature (1)..(190): Homolog of NCBI NO: 30088964 NR Description: lethal leaf spot 1-like protein [Vigna
  misc_feature (1)..(223): Homolog of NCBI NO: 17232499 NR Description: similar to cell death suppressor protein Lls1
  misc_feature (1)..(223): Homolog of NCBI NO: 23125858 NR Description: hypothetical protein [Nostoc punctiforme]
  misc_feature (1)..(345): Homolog of NCBI NO: 7488843 NR Description: Rieske [2Fe-2S] iron-sulfur protein tic55 -
  misc_feature (1)..(345): Homolog of NCBI NO: 15224625 NR Description: putative Rieske iron-sulfur protein
MSTKTPPNPEKLPWFENFARPGFFDISTTHELPYDHSILLENLMDPAHVPISHDRTDFTAKREDAQPLVFEVTERSNRGFAGTWGREKEGGKGSNLLRFGAPCVLQNNREFEGKDGVKNYFSGLFLCRPTGQGKSMLIVRFGVTKRSPLVSVLPQCFWHQNACKVFEQDMGFLSSQNEVLMKEKVPTKDLYLNLKSSDTWVAEYRKWMDKVGHGMPYHFGHRTISLPKVPPVVEHAPAGLIAALSASYPAKGGIGTMHAPNLANRYFRHIIHCRSCSNVIKSFELWKNILSATAVALTALAILVVSRQWKAVLLGSAALCSAAAYTCLRAINLNTNNFIRTHRRL

SEQ ID NO: 23366 - protein, 302 aa, Arabidopsis thaliana
  peptide (1)..(302): Ceres Seq. ID no. 12340099
  misc_feature (1)..(150): Homolog of NCBI NO: 15230543 NR Description: lethal leaf-spot 1 homolog Lls1
  misc_feature (1)..(174): Homolog of NCBI NO: 23041088 NR Description: hypothetical protein [Trichodesmium erythraeum
  misc_feature (219)..(282): Homolog of NCBI NO: 15451611 NR Description: Putative cell death suppressor protein [Oryza
  misc_feature (1)..(178): Homolog of NCBI NO: 15451611 NR Description: Putative cell death suppressor protein [Oryza
  misc_feature (219)..(283): Homolog of NCBI NO: 30088964 NR Description: lethal leaf spot 1-like protein [Vigna
  misc_feature (1)..(147): Homolog of NCBI NO: 30088964 NR Description: lethal leaf spot 1-like protein [Vigna
  misc_feature (1)..(180): Homolog of NCBI NO: 17232499 NR Description: similar to cell death suppressor protein Lls1
  misc_feature (1)..(180): Homolog of NCBI NO: 23125858 NR Description: hypothetical protein [Nostoc punctiforme]
  misc_feature (1)..(302): Homolog of NCBI NO: 7488843 NR Description: Rieske [2Fe-2S] iron-sulfur protein tic55 -
  misc_feature (1)..(302): Homolog of NCBI NO: 15224625 NR Description: putative Rieske iron-sulfur protein
MDPAHVPISHDRTDFTAKREDAQPLVFEVTERSNRGFAGTWGREKEGGKGSNLLRFGAPCVLQNNREFEGKDGVKNYFSGLFLCRPTGQGKSMLIVRFGVTKRSPLVSVLPQCFWHQNACKVFEQDMGFLSSQNEVLMKEKVPTKDLYLNLKSSDTWVAEYRKWMDKVGHGMPYHFGHRTISLPKVPPVVEHAPAGLIAALSASYPAKGGIGTMHAPNLANRYFRHIIHCRSCSNVIKSFELWKNILSATAVALTALAILVVSRQWKAVLLGSAALCSAAAYTCLRAINLNTNNFIRTHRRL

SEQ ID NO: 23367 - DNA, 1285 bp, Arabidopsis thaliana
  misc_feature (1)..(1285): Ceres Seq. ID no. 12422321
  misc_feature: MA Experiment ID: 20001451 Result: Down-regulated in Transcription
  misc_feature: MA Experiment 20001451 PARAMETER Experiment Name: At_Far-red-induction_P Parameter: Age (day) Value: 7
  misc_feature: MA Experiment 20001451 PARAMETER Experiment Name: At_Far-red-induction_P Parameter: Light Value: Far-red vs. White
  misc_feature: MA Experiment 20001451 PARAMETER Experiment Name: At_Far-red-induction_P Parameter: Organism Value: A. thaliana
  misc_feature: MA Experiment 20001451 PARAMETER Experiment Name: At_Far-red-induction_P Parameter: Plant Line Value: Columbia
  misc_feature: MA Experiment 20001451 PARAMETER Experiment Name: At_Far-red-induction_P Parameter: Timepoint (hr) Value: 24
  misc_feature: MA Experiment 20001451 PARAMETER Experiment Name: At_Far-red-induction_P Parameter: Tissue Value: Whole Plant
accgttttggtcaatcctttgaatctctcctaataaaaccctaaaagatcatcatcatcatcgtcgtcgtcgtcccgctcaatggatactcgtcgcggagctcttgcggttcctaaagtccgtcgagtaggtttcttcacatcaatcgagccgcctccagaatcatcattacaacgaccaaatcgaagccaatccggtccagtagatgcaaccacctcttcttctcctctctccgattcaccttccggtaacttaatttctccggtcttaattccaccgtcgcgtcaccattccgacaatttaacctctcgcgttgctgctgctgctgctgctcctgtgcccgtccctggacctgcagctttccgccgatacttaactcctgaacggactcttcttcacgttggtagttacaatcctccggattcgcttctcgggacatcatcaccctcgagtaacggagggctttctgaggattcggcttctctgtttgggttccaacggagtgattcgacgaaattatcagcaagcttacctaatggaggctttgatttgactctagctgttagagctcctcaggaatctgaaaccaaaattgcgaccacgtctgcttctcaagggaaaaagaagatcgccgaagtttctggaaagagtgagtctgcgaccacaaaaccccagaaggaaaaggaaccaaaagcattgaaagataaaaccactaaagcagaaagacgtgccatccaagaggcacaacgggcagcaaaagctgctgcaaaaggcgaaggaagcaggcgtgcagatgagtctggtagagctaatcctggcaaggctgccataaagccccaaccaaagaaagaaagacttcccgtcacgtcctctgtttctgaaaaaacagctgtagcagtagaaaaagagaagaggatggatgtccctcagacacaaatgcagtatgatgataaaagccgagtggataaagctaagaggcgagctgtggttgaacagaccgagagcaagaacaaagttgaattatttctccatcttcctcaatacgaacgcagcaatcagcttcccaatttaagctccaattttttcacactcgattccatacaccatgcagtctataaggtgggtttgcaacatttggctggagatatatctggggacaatgcacgatgtattgccatgctccaagcatttcaagaagctatagaagattacagtacacctcctatgaaagacctgaccatggacttgacagccaagataaacggttatgtttcattcttgatag

SEQ ID NO: 23368 - protein, 401 aa, Arabidopsis thaliana
  peptide (1)..(401): Ceres Seq. ID no. 12422322
  misc_feature (215)..(400): Pfam Name: Initiation factor 2 subunit family Pfam Description: Initiation factor 2 subunit family
  misc_feature (45)..(400): Homolog of NCBI NO: 15240967 NR Description: putative protein
  misc_feature (1)..(187): Homolog of NCBI NO: 15222019 NR Description: hypothetical protein; protein id: At1g48970.1
  misc_feature (165)..(400): Homolog of NCBI NO: 33337571 NR Description: EIF-2B-delta-like protein [Homo sapiens]
  misc_feature (119)..(400): Homolog of NCBI NO: 1083344 NR Description: guanine nucleotide exchange factor eIF-2B delta
  misc_feature (119)..(400): Homolog of NCBI NO: 6010114 NR Description: guanine nucleotide exchange factor (long isoform)
  misc_feature (119)..(400): Homolog of NCBI NO: 6012058 NR Description: guanine nucleotide exchange factor [Homo sapiens]
  misc_feature (119)..(400): Homolog of NCBI NO: 529428 NR Description: guanine nucleotide exchange factor, eIF-2B, delta
  misc_feature (140)..(400): Homolog of NCBI NO: 26986532 NR Description: eukaryotic translation initiation factor 2B,
  misc_feature (140)..(400): Homolog of NCBI NO: 6563202 NR Description: translation initiation factor eIF-2b delta
  misc_feature (187)..(400): Homolog of NCBI NO: 15222019 NR Description: hypothetical protein; protein id: At1g48970.1
MDTRRGALAVPKVRRVGFFTSIEPPPESSLQRPNRSQSGPVDATTSSSPLSDSPSGNLISPVLIPPSRHHSDNLTSRVAAAAAAPVPVPGPAAFRRYLTPERTLLHVGSYNPPDSLLGTSSPSSNGGLSEDSASLFGFQRSDSTKLSASLPNGGFDLTLAVRAPQESETKIATTSASQGKKKIAEVSGKSESATTKPQKEKEPKALKDKTTKAERRAIQEAQRAAKAAAKGEGSRRADESGRANPGKAAIKPQPKKERLPVTSSVSEKTAVAVEKEKRMDVPQTQMQYDDKSRVDKAKRRAVVEQTESKNKVELFLHLPQYERSNQLPNLSSNFFTLDSIHHAVYKVGLQHLAGDISGDNARCIAMLQAFQEAIEDYSTPPMKDLTMDLTAKINGYVSFLI

SEQ ID NO: 23369 - DNA, 969 bp, Arabidopsis thaliana
  misc_feature (1)..(969): Ceres Seq. ID no. 12482521
  misc_feature: MA Experiment ID: 20000234 Result: Up-regulated in Transcription
  misc_feature: MA Experiment 20000234 PARAMETER Experiment Name: At_Siliques_P Parameter: Age (day) Value: 21
  misc_feature: MA Experiment 20000234 PARAMETER Experiment Name: At_Siliques_P Parameter: Organism Value: A. thaliana
  misc_feature: MA Experiment 20000234 PARAMETER Experiment Name: At_Siliques_P Parameter: Plant Line Value: WS
  misc_feature: MA Experiment 20000234 PARAMETER Experiment Name: At_Siliques_P Parameter: Tissue Value: Less Than 5mm Siliques vs. Whole Plant
  misc_feature: MA Experiment ID: 20000264 Result: Up-regulated in Transcription
  misc_feature: MA Experiment 20000264 PARAMETER Experiment Name: At_Open_Flower_P Parameter: Age (day) Value: 21
  misc_feature: MA Experiment 20000264 PARAMETER Experiment Name: At_Open_Flower_P Parameter: Plant Line Value: WS
  misc_feature: MA Experiment 20000264 PARAMETER Experiment Name: At_Open_Flower_P Parameter: Tissue Value: Open Flower vs. Whole Plant
  misc_feature: MA Experiment ID: 20000286 Result: Up-regulated in Transcription
  misc_feature: MA Experiment 20000286 PARAMETER Experiment Name: At_Open_Flower_P Parameter: Age (day) Value: 21
  misc_feature: MA Experiment 20000286 PARAMETER Experiment Name: At_Open_Flower_P Parameter: Plant Line Value: WS
  misc_feature: MA Experiment 20000286 PARAMETER Experiment Name: At_Open_Flower_P Parameter: Tissue Value: Half Open vs. Whole Plant
  misc_feature: MA Experiment ID: 20000436 Result: Up-regulated in Transcription
  misc_feature: MA Experiment 20000436 PARAMETER Experiment Name: At_Drought_P Parameter: Age (day) Value: 7
  misc_feature: MA Experiment 20000436 PARAMETER Experiment Name: At_Drought_P Parameter: Organism Value: A. thaliana
  misc_feature: MA Experiment 20000436 PARAMETER Experiment Name: At_Drought_P Parameter: Plant Line Value: WS
  misc_feature: MA Experiment 20000436 PARAMETER Experiment Name: At_Drought_P Parameter: Timepoint (hr) Value: 12
  misc_feature: MA Experiment 20000436 PARAMETER Experiment Name: At_Drought_P Parameter: Tissue Value: Whole Plant
  misc_feature: MA Experiment 20000436 PARAMETER Experiment Name: At_Drought_P Parameter: Treatment Value: Drought vs. No Drought
  misc_feature: MA Experiment ID: 20000437 Result: Up-regulated in Transcription
  misc_feature: MA Experiment 20000437 PARAMETER Experiment Name: At_Drought_P Parameter: Age (day) Value: 8
  misc_feature: MA Experiment 20000437 PARAMETER Experiment Name: At_Drought_P Parameter: Organism Value: A. thaliana
  misc_feature: MA Experiment 20000437 PARAMETER Experiment Name: At_Drought_P Parameter: Plant Line Value: WS
  misc_feature: MA Experiment 20000437 PARAMETER Experiment Name: At_Drought_P Parameter: Timepoint (hr) Value: 24
  misc_feature: MA Experiment 20000437 PARAMETER Experiment Name: At_Drought_P Parameter: Tissue Value: Whole Plant
  misc_feature: MA Experiment 20000437 PARAMETER Experiment Name: At_Drought_P Parameter: Treatment Value: Drought vs. No Drought
  misc_feature: MA Experiment ID: 20001905 Result: Up-regulated in Transcription
  misc_feature: MA Experiment 20001905 PARAMETER Experiment Name: At_Drought_Reproduction_P Parameter: Age (day) Value: 40
  misc_feature: MA Experiment 20001905 PARAMETER Experiment Name: At_Drought_Reproduction_P Parameter: Organism Value: A. thaliana
  misc_feature: MA Experiment 20001905 PARAMETER Experiment Name: At_Drought_Reproduction_P Parameter: Plant Line Value: WS
  misc_feature: MA Experiment 20001905 PARAMETER Experiment Name: At_Drought_Reproduction_P Parameter: Timepoint (day) Value: 10
  misc_feature: MA Experiment 20001905 PARAMETER Experiment Name: At_Drought_Reproduction_P Parameter: Tissue Value: Rosettes
  misc_feature: MA Experiment 20001905 PARAMETER Experiment Name: At_Drought_Reproduction_P Parameter: Treatment Value: Drought vs. No Drought
  misc_feature: MA Experiment ID: 20001911 Result: Up-regulated in Transcription
  misc_feature: MA Experiment 20001911 PARAMETER Experiment Name: At_Drought_Reproduction_P Parameter: Age (day) Value: 40
  misc_feature: MA Experiment 20001911 PARAMETER Experiment Name: At_Drought_Reproduction_P Parameter: Organism Value: A. thaliana
  misc_feature: MA Experiment 20001911 PARAMETER Experiment Name: At_Drought_Reproduction_P Parameter: Plant Line Value: WS
  misc_feature: MA Experiment 20001911 PARAMETER Experiment Name: At_Drought_Reproduction_P Parameter: Timepoint (day) Value: 10
  misc_feature: MA Experiment 20001911 PARAMETER Experiment Name: At_Drought_Reproduction_P Parameter: Tissue Value: Flowers
  misc_feature: MA Experiment 20001911 PARAMETER Experiment Name: At_Drought_Reproduction_P Parameter: Treatment Value: Drought vs. No Drought
aagattttccagatcttaaattctctcctcccccaattccatcttcgcaaattctccagattcttccgtcaatctttgagtttggtagagaaatggatcaacaaggacaatcatcagctatgaactatggttcaaacccatatcaaaccaacgccatgaccactacaccaaccggttcagaccatccagcttaccatcagatccaccagcaacaacaacaacagctcactcaacagcttcaatctttctgggagactcaattcaaagagattgagaaaaccactgatttcaagaaccatagccttccattggcaagaatcaagaaaatcatgaaagctgatgaagatgtgcgtatgatctcggccgaggcgcctgttgtgttcgccagggcctgcgagatgtttattctggagcttacgttaaggtcttggaaccatactgaggagaacaagagaaggacgttgcagaagaatgatatcgcggctgcggtgactagaactgatatttttgattttcttgtggatattgttcctcgggaggatcttcgtgatgaagtcttgggtggtgttggtgctgaagctgctacagctgcgggttatccgtatggatacttgcctcctggaacagctccaattgggaacccgggaatggttatgggtaacccgggcgcgtatccgccgaacccgtatatgggtcagccaatgtggcaacaaccaggacctgagcagcaggatcctgacaattagcttggcctaataaactagccgtctaattcgaagctctccccggtggatctactcaagaagaagaatgttaatagaaaactattgcgacataaaaagtttggtgtagtagaataatttctgttttatgatccatggatttatctattgttattcagtttggtttatcttgtcatcaaactgttttcggtcaatgtaacaaattcataaactgagaattgaactt

SEQ ID NO: 23370 - protein, 247 aa, Arabidopsis thaliana
  peptide (1)..(247): Ceres Seq. ID no. 12482522
  misc_feature (88)..(204): Homolog of NCBI NO: 2398533 NR Description: Transcription factor [Arabidopsis thaliana]
  misc_feature (72)..(211): Homolog of NCBI NO: 5257260 NR Description: Similar to sequence of BAC F7G19 from Arabidopsis
  misc_feature (26)..(204): Homolog of NCBI NO: 21554704 NR Description: transcription factor, putative [Arabidopsis
  misc_feature (26)..(204): Homolog of NCBI NO: 15223482 NR Description: transcription factor, putative
  misc_feature (64)..(236): Homolog of NCBI NO: 15242784 NR Description: transcription factor Hap5a-like protein
  misc_feature (31)..(236): Homolog of NCBI NO: 15228405 NR Description: transcription factor Hap5a
  misc_feature (54)..(247): Homolog of NCBI NO: 25372763 NR Description: hypothetical protein [imported] - Arabidopsis
  misc_feature (31)..(247): Homolog of NCBI NO: 6289057 NR Description: heme activated protein [Arabidopsis thaliana]
  misc_feature (31)..(247): Homolog of NCBI NO: 15223986 NR Description: putative transcription factor
  misc_feature (31)..(247): Homolog of NCBI NO: 15221912 NR Description: heme activated protein, putative; protein id:
DFPDLKFSPPPIPSSQILQILPSIFEFGREMDQQGQSSAMNYGSNPYQTNAMTTTPTGSDHPAYHQIHQQQQQQLTQQLQSFWETQFKEIEKTTDFKNHSLPLARIKKIMKADEDVRMISAEAPVVFARACEMFILELTLRSWNHTEENKRRTLQKNDIAAAVTRTDIFDFLVDIVPREDLRDEVLGGVGAEAATAAGYPYGYLPPGTAPIGNPGMVMGNPGAYPPNPYMGQPMWQQPGPEQQDPDN

SEQ ID NO: 23371 - protein, 217 aa, Arabidopsis thaliana
  peptide (1)..(217): Ceres Seq. ID no. 12482523
  misc_feature (58)..(174): Homolog of NCBI NO: 2398533 NR Description: Transcription factor [Arabidopsis thaliana]
  misc_feature (42)..(181): Homolog of NCBI NO: 5257260 NR Description: Similar to sequence of BAC F7G19 from Arabidopsis
  misc_feature (1)..(174): Homolog of NCBI NO: 21554704 NR Description: transcription factor, putative [Arabidopsis
  misc_feature (1)..(174): Homolog of NCBI NO: 15223482 NR Description: transcription factor, putative
  misc_feature (34)..(206): Homolog of NCBI NO: 15242784 NR Description: transcription factor Hap5a-like protein
  misc_feature (1)..(206): Homolog of NCBI NO: 15228405 NR Description: transcription factor Hap5a
  misc_feature (24)..(217): Homolog of NCBI NO: 25372763 NR Description: hypothetical protein [imported] - Arabidopsis
  misc_feature (1)..(217): Homolog of NCBI NO: 6289057 NR Description: heme activated protein [Arabidopsis thaliana]
  misc_feature (1)..(217): Homolog of NCBI NO: 15223986 NR Description: putative transcription factor
  misc_feature (1)..(217): Homolog of NCBI NO: 15221912 NR Description: heme activated protein, putative; protein id:
MDQQGQSSAMNYGSNPYQTNAMTTTPTGSDHPAYHQIHQQQQQQLTQQLQSFWETQFKEIEKTTDFKNHSLPLARIKKIMKADEDVRMISAEAPVVFARACEMFILELTLRSWNHTEENKRRTLQKNDIAAAVTRTDIFDFLVDIVPREDLRDEVLGGVGAEAATAAGYPYGYLPPGTAPIGNPGMVMGNPGAYPPNPYMGQPMWQQPGPEQQDPDN

SEQ ID NO: 23372 - protein, 208 aa, Arabidopsis thaliana
  peptide (1)..(208): Ceres Seq. ID no. 12482524
  misc_feature (49)..(165): Homolog of NCBI NO: 2398533 NR Description: Transcription factor [Arabidopsis thaliana]
  misc_feature (33)..(172): Homolog of NCBI NO: 5257260 NR Description: Similar to sequence of BAC F7G19 from Arabidopsis
  misc_feature (1)..(165): Homolog of NCBI NO: 21554704 NR Description: transcription factor, putative [Arabidopsis
  misc_feature (1)..(165): Homolog of NCBI NO: 15223482 NR Description: transcription factor, putative
  misc_feature (25)..(197): Homolog of NCBI NO: 15242784 NR Description: transcription factor Hap5a-like protein
  misc_feature (1)..(197): Homolog of NCBI NO: 15228405 NR Description: transcription factor Hap5a
  misc_feature (15)..(208): Homolog of NCBI NO: 25372763 NR Description: hypothetical protein [imported] - Arabidopsis
  misc_feature (1)..(208): Homolog of NCBI NO: 6289057 NR Description: heme activated protein [Arabidopsis thaliana]
  misc_feature (1)..(208): Homolog of NCBI NO: 15223986 NR Description: putative transcription factor
  misc_feature (1)..(208): Homolog of NCBI NO: 15221912 NR Description: heme activated protein, putative; protein id:
MNYGSNPYQTNAMTTTPTGSDHPAYHQIHQQQQQQLTQQLQSFWETQFKEIEKTTDFKNHSLPLARIKKIMKADEDVRMISAEAPVVFARACEMFILELTLRSWNHTEENKRRTLQKNDIAAAVTRTDIFDFLVDIVPREDLRDEVLGGVGAEAATAAGYPYGYLPPGTAPIGNPGMVMGNPGAYPPNPYMGQPMWQQPGPEQQDPDN

SEQ ID NO: 23373 - DNA, 1827 bp, Arabidopsis thaliana
  misc_feature (1)..(1827): Ceres Seq. ID no. 13504796
  misc_feature: MA Experiment ID: 108561 Result: Up-regulated in Transcription
  misc_feature: MA Experiment 108561 PARAMETER Experiment Name: At_100uM_ABA_cDNA_P Parameter: Timepoint (hr) Value: 6
  misc_feature: MA Experiment 108561 PARAMETER Experiment Name: At_100uM_ABA_cDNA_P Parameter: Tissue Value: Aerial
  misc_feature: MA Experiment 108561 PARAMETER Experiment Name: At_100uM_ABA_cDNA_P Parameter: Treatment Value: 100uM ABA vs. No Treatment
  misc_feature: MA Experiment ID: 108572 Result: Up-regulated in Transcription
  misc_feature: MA Experiment 108572 PARAMETER Experiment Name: At_Drought_cDNA_P Parameter: Timepoint (hr) Value: 1
  misc_feature: MA Experiment 108572 PARAMETER Experiment Name: At_Drought_cDNA_P Parameter: Tissue Value: Aerial
  misc_feature: MA Experiment 108572 PARAMETER Experiment Name: At_Drought_cDNA_P Parameter: Treatment Value: Drought vs. No Drought
  misc_feature: MA Experiment ID: 20000169 Result: Up-regulated in Transcription
  misc_feature: MA Experiment 20000169 PARAMETER Experiment Name: At_100uM_ABA_P Parameter: Age (day) Value: 14
  misc_feature: MA Experiment 20000169 PARAMETER Experiment Name: At_100uM_ABA_P Parameter: Organism Value: A. thaliana
  misc_feature: MA Experiment 20000169 PARAMETER Experiment Name: At_100uM_ABA_P Parameter: Plant Line Value: WS
  misc_feature: MA Experiment 20000169 PARAMETER Experiment Name: At_100uM_ABA_P Parameter: Timepoint (hr) Value: 6
  misc_feature: MA Experiment 20000169 PARAMETER Experiment Name: At_100uM_ABA_P Parameter: Tissue Value: Aerial
  misc_feature: MA Experiment 20000169 PARAMETER Experiment Name: At_100uM_ABA_P Parameter: Treatment Value: 100uM ABA vs. No Treatment
  misc_feature: MA Experiment ID: 20000180 Result: Up-regulated in Transcription
  misc_feature: MA Experiment 20000180 PARAMETER Experiment Name: At_Germinating_Seeds_P Parameter: Age (hr) Value: 24 vs. 0
  misc_feature: MA Experiment 20000180 PARAMETER Experiment Name: At_Germinating_Seeds_P Parameter: Tissue Value: Germinating Seeds
  misc_feature: MA Experiment ID: 20000185 Result: Down-regulated in Transcription
  misc_feature: MA Experiment 20000185 PARAMETER Experiment Name: At_Roots__P Parameter: Age (day) Value: 7 vs. 21
  misc_feature: MA Experiment 20000185 PARAMETER Experiment Name: At_Roots__P Parameter: Organism Value: A. thaliana
  misc_feature: MA Experiment 20000185 PARAMETER Experiment Name: At_Roots__P Parameter: Tissue Value: Roots vs. Whole Plant
  misc_feature: MA Experiment ID: 20000439 Result: Down-regulated in Transcription
  misc_feature: MA Experiment 20000439 PARAMETER Experiment Name: At_Roots__P Parameter: Age (day) Value: 14 vs. 21
  misc_feature: MA Experiment 20000439 PARAMETER Experiment Name: At_Roots__P Parameter: Organism Value: A. thaliana
  misc_feature: MA Experiment 20000439 PARAMETER Experiment Name: At_Roots__P Parameter: Tissue Value: Roots vs. Whole Plant
  misc_feature: MA Experiment ID: 20000794 Result: Up-regulated in Transcription
  misc_feature: MA Experiment 20000794 PARAMETER Experiment Name: At_Petals_P Parameter: Age (day) Value: 23-25 days
  misc_feature: MA Experiment 20000794 PARAMETER Experiment Name: At_Petals_P Parameter: Plant Line Value: WS
  misc_feature: MA Experiment 20000794 PARAMETER Experiment Name: At_Petals_P Parameter: Tissue Value: Petals vs. Whole plant
  misc_feature: MA Experiment ID: 20001554 Result: Up-regulated in Transcription
  misc_feature: MA Experiment 20001554 PARAMETER Experiment Name: At_Drought_Soil_Dry_P Parameter: Age (day) Value: 21
  misc_feature: MA Experiment 20001554 PARAMETER Experiment Name: At_Drought_Soil_Dry_P Parameter: Organism Value: A. thaliana
  misc_feature: MA Experiment 20001554 PARAMETER Experiment Name: At_Drought_Soil_Dry_P Parameter: Plant Line Value: WS
  misc_feature: MA Experiment 20001554 PARAMETER Experiment Name: At_Drought_Soil_Dry_P Parameter: Post Timepoint (hr) Value: None
  misc_feature: MA Experiment 20001554 PARAMETER Experiment Name: At_Drought_Soil_Dry_P Parameter: Post-Treatment Value: None
  misc_feature: MA Experiment 20001554 PARAMETER Experiment Name: At_Drought_Soil_Dry_P Parameter: Timepoint (day) Value: 7
  misc_feature: MA Experiment 20001554 PARAMETER Experiment Name: At_Drought_Soil_Dry_P Parameter: Treatment Value: Drought vs. No Drought
attaactcatcttcaaaaataccctaatcacattttgtaacaataatacaattatacattaaaactctccgacgatgcctcaggcaccgatgccagagttctctagctcggtgaagctcaagtacgtgaaacttggttaccaatatttggttaaccatttcttgagttttcttttgatcccgatcatggctattgtcgccgttgagcttcttcggatgggtcctgaagagatccttaatgtttggaattcactccagtttgacctagttcaggttctatgttcttccttctttgtcatcttcatctccactgtttacttcatgtccaagccacgcaccatctacctcgttgactattcttgttacaagccacctgtcacgtgtcgtgtccccttcgcaactttcatggaacactctcgtttgatcctcaaggacaagcctaagagcgtcgagttccaaatgagaatccttgaacgttctggcctcggtgaggagacttgtctccctccggctattcattatattcctcccacaccaaccatggacgcggctagaagcgaggctcagatggttatcttcgaggctatggacgatcttttcaagaaaaccggtcttaaacctaaagacgtcgacatccttatcgtcaactgctctcttttctctcccacaccatcgctctcagctatggtcatcaacaaatataagcttaggagtaatatcaagagcttcaatctttcggggatgggctgcagcgcgggcctgatctcagttgatctagcccgcgacttgctccaagttcatcccaattcaaatgcaatcatcgtcagcacggagatcataacgccaaattactatcaaggcaacgagagagccatgttgttacccaattgtctcttccgcatgggtgcggcagccatacacatgtcaaaccgccggtctgaccggtggcgagccaaatacaagctttcccacctcgtccggacacaccgtggcgctgacgacaagtctttctactgtgtctacgaacaggaagacaaagaaggacacgttggcatcaacttgtccaaagatctcatggccatcgccggtgaagccctcaaggcaaacatcaccacaataggtcctttggtcctaccggcgtcagaacaacttctcttcctcacgtccctaatcggacgtaaaatcttcaacccgaaatggaaaccatacataccggatttcaagctggccttcgaacacttttgcattcacgcaggaggcagagcggtgatcgacgagctccaaaagaatctacaactatcaggagaacacgttgaggcctcaagaatgacactacatcgttttggtaacacgtcatcttcatcgttatggtacgagcttagctacatcgagtctaaagggagaatgaggagaggcgatcgcgtttggcaaatcgcgtttgggagtggtttcaagtgtaactctgccgtgtggaagtgtaaccgtacgattaagacacctaaggacggaccatggtccgattgtatcgaccgttaccctgtctttattcccgaagttgtcaaactctaaactgaaaacgtctttgaacggtttagtaacggtttgattttgtgttacggtttaggtttatttggtctcgggatttggtttaaaggggattgagaaatgggaagttagagagaagaaaaagcaaagcataaatgtttgtatttaattgctctgcatatacttaaatctctgcttttcatttggggtattttttagtttctcgtgctgtaattaataacttgtggtgtactcaaataagaatatttctctctgttttatt

SEQ ID NO: 23374 - protein, 497 aa, Arabidopsis thaliana
  peptide (1)..(497): Ceres Seq. ID no. 13504797
  misc_feature (330)..(470): Pfam Name: Chalcone and stilbene synthases, C-terminal domain Pfam Description: Chalcone and stilbene synthases, C-terminal
  misc_feature (6)..(492): Homolog of NCBI NO: 29417540 NR Description: beta-ketoacyl-CoA-synthase [Marchantia polymorpha]
  misc_feature (6)..(489): Homolog of NCBI NO: 15223556 NR Description: very-long-chain fatty acid condensing enzyme
  misc_feature (6)..(489): Homolog of NCBI NO: 15226724 NR Description: very-long-chain fatty acid condensing enzyme
  misc_feature (1)..(349): Homolog of NCBI NO: 30697701 NR Description: very-long-chain fatty acid condensing enzyme
  misc_feature (6)..(497): Homolog of NCBI NO: 28393607 NR Description: putative fatty acid condensing enzyme CUT1
  misc_feature (6)..(497): Homolog of NCBI NO: 21618184 NR Description: fatty acid condensing enzyme CUT1, putative
  misc_feature (6)..(497): Homolog of NCBI NO: 15222592 NR Description: very-long-chain fatty acid condensing enzyme
  misc_feature (6)..(497): Homolog of NCBI NO: 21593111 NR Description: very-long-chain fatty acid condensing enzyme CUT1
  misc_feature (1)..(497): Homolog of NCBI NO: 17979464 NR Description: At1g68530/T26J14_10 [Arabidopsis thaliana]
  misc_feature (1)..(497): Homolog of NCBI NO: 15221431 NR Description: very-long-chain fatty acid condensing enzyme
MPQAPMPEFSSSVKLKYVKLGYQYLVNHFLSFLLIPIMAIVAVELLRMGPEEILNVWNSLQFDLVQVLCSSFFVIFISTVYFMSKPRTIYLVDYSCYKPPVTCRVPFATFMEHSRLILKDKPKSVEFQMRILERSGLGEETCLPPAIHYIPPTPTMDAARSEAQMVIFEAMDDLFKKTGLKPKDVDILIVNCSLFSPTPSLSAMVINKYKLRSNIKSFNLSGMGCSAGLISVDLARDLLQVHPNSNAIIVSTEIITPNYYQGNERAMLLPNCLFRMGAAAIHMSNRRSDRWRAKYKLSHLVRTHRGADDKSFYCVYEQEDKEGHVGINLSKDLMAIAGEALKANITTIGPLVLPASEQLLFLTSLIGRKIFNPKWKPYIPDFKLAFEHFCIHAGGRAVIDELQKNLQLSGEHVEASRMTLHRFGNTSSSSLWYELSYIESKGRMRRGDRVWQIAFGSGFKCNSAVWKCNRTIKTPKDGPWSDCIDRYPVFIPEVVKL

SEQ ID NO: 23375 - protein, 492 aa, Arabidopsis thaliana
  peptide (1)..(492): Ceres Seq. ID no. 13504798
  misc_feature (325)..(465): Pfam Name: Chalcone and stilbene synthases, C-terminal domain Pfam Description: Chalcone and stilbene synthases, C-terminal
  misc_feature (1)..(487): Homolog of NCBI NO: 29417540 NR Description: beta-ketoacyl-CoA-synthase [Marchantia polymorpha]
  misc_feature (1)..(484): Homolog of NCBI NO: 15223556 NR Description: very-long-chain fatty acid condensing enzyme
  misc_feature (1)..(484): Homolog of NCBI NO: 15226724 NR Description: very-long-chain fatty acid condensing enzyme
  misc_feature (1)..(344): Homolog of NCBI NO: 30697701 NR Description: very-long-chain fatty acid condensing enzyme
  misc_feature (1)..(492): Homolog of NCBI NO: 28393607 NR Description: putative fatty acid condensing enzyme CUT1
  misc_feature (1)..(492): Homolog of NCBI NO: 21618184 NR Description: fatty acid condensing enzyme CUT1, putative
  misc_feature (1)..(492): Homolog of NCBI NO: 15222592 NR Description: very-long-chain fatty acid condensing enzyme
  misc_feature (1)..(492): Homolog of NCBI NO: 21593111 NR Description: very-long-chain fatty acid condensing enzyme CUT1
  misc_feature (1)..(492): Homolog of NCBI NO: 17979464 NR Description: At1g68530/T26J14_10 [Arabidopsis thaliana]
  misc_feature (1)..(492): Homolog of NCBI NO: 15221431 NR Description: very-long-chain fatty acid condensing enzyme
MPEFSSSVKLKYVKLGYQYLVNHFLSFLLIPIMAIVAVELLRMGPEEILNVWNSLQFDLVQVLCSSFFVIFISTVYFMSKPRTIYLVDYSCYKPPVTCRVPFATFMEHSRLILKDKPKSVEFQMRILERSGLGEETCLPPAIHYIPPTPTMDAARSEAQMVIFEAMDDLFKKTGLKPKDVDILIVNCSLFSPTPSLSAMVINKYKLRSNIKSFNLSGMGCSAGLISVDLARDLLQVHPNSNAIIVSTEIITPNYYQGNERAMLLPNCLFRMGAAAIHMSNRRSDRWRAKYKLSHLVRTHRGADDKSFYCVYEQEDKEGHVGINLSKDLMAIAGEALKANITTIGPLVLPASEQLLFLTSLIGRKIFNPKWKPYIPDFKLAFEHFCIHAGGRAVIDELQKNLQLSGEHVEASRMTLHRFGNTSSSSLWYELSYIESKGRMRRGDRVWQIAFGSGFKCNSAVWKCNRTIKTPKDGPWSDCIDRYPVFIPEVVKL

SEQ ID NO: 23376 - protein, 460 aa, Arabidopsis thaliana
  peptide (1)..(460): Ceres Seq. ID no. 13504799
  misc_feature (293)..(433): Pfam Name: Chalcone and stilbene synthases, C-terminal domain Pfam Description: Chalcone and stilbene synthases, C-terminal
  misc_feature (1)..(455): Homolog of NCBI NO: 29417540 NR Description: beta-ketoacyl-CoA-synthase [Marchantia polymorpha]
  misc_feature (1)..(452): Homolog of NCBI NO: 15223556 NR Description: very-long-chain fatty acid condensing enzyme
  misc_feature (1)..(452): Homolog of NCBI NO: 15226724 NR Description: very-long-chain fatty acid condensing enzyme
  misc_feature (1)..(312): Homolog of NCBI NO: 30697701 NR Description: very-long-chain fatty acid condensing enzyme
  misc_feature (1)..(460): Homolog of NCBI NO: 28393607 NR Description: putative fatty acid condensing enzyme CUT1
  misc_feature (1)..(460): Homolog of NCBI NO: 21618184 NR Description: fatty acid condensing enzyme CUT1, putative
  misc_feature (1)..(460): Homolog of NCBI NO: 15222592 NR Description: very-long-chain fatty acid condensing enzyme
  misc_feature (1)..(460): Homolog of NCBI NO: 21593111 NR Description: very-long-chain fatty acid condensing enzyme CUT1
  misc_feature (1)..(460): Homolog of NCBI NO: 17979464 NR Description: At1g68530/T26J14_10 [Arabidopsis thaliana]
  misc_feature (1)..(460): Homolog of NCBI NO: 15221431 NR Description: very-long-chain fatty acid condensing enzyme
MAIVAVELLRMGPEEILNVWNSLQFDLVQVLCSSFFVIFISTVYFMSKPRTIYLVDYSCYKPPVTCRVPFATFMEHSRLILKDKPKSVEFQMRILERSGLGEETCLPPAIHYIPPTPTMDAARSEAQMVIFEAMDDLFKKTGLKPKDVDILIVNCSLFSPTPSLSAMVINKYKLRSNIKSFNLSGMGCSAGLISVDLARDLLQVHPNSNAIIVSTEIITPNYYQGNERAMLLPNCLFRMGAAAIHMSNRRSDRWRAKYKLSHLVRTHRGADDKSFYCVYEQEDKEGHVGINLSKDLMAIAGEALKANITTIGPLVLPASEQLLFLTSLIGRKIFNPKWKPYIPDFKLAFEHFCIHAGGRAVIDELQKNLQLSGEHVEASRMTLHRFGNTSSSSLWYELSYIESKGRMRRGDRVWQIAFGSGFKCNSAVWKCNRTIKTPKDGPWSDCIDRYPVFIPEVVKL

SEQ ID NO: 23377 - DNA, 1502 bp, Arabidopsis thaliana
  misc_feature (1)..(1502): Ceres Seq. ID no. 12371616
  misc_feature: MA Experiment ID: 20000179 Result: Up-regulated in Transcription
  misc_feature: MA Experiment 20000179 PARAMETER Experiment Name: At_Germinating_Seeds_P Parameter: Age (hr) Value: 6 vs. 0
  misc_feature: MA Experiment 20000179 PARAMETER Experiment Name: At_Germinating_Seeds_P Parameter: Tissue Value: Germinating Seeds
  misc_feature: MA Experiment ID: 20000180 Result: Up-regulated in Transcription
  misc_feature: MA Experiment 20000180 PARAMETER Experiment Name: At_Germinating_Seeds_P Parameter: Age (hr) Value: 24 vs. 0
  misc_feature: MA Experiment 20000180 PARAMETER Experiment Name: At_Germinating_Seeds_P Parameter: Tissue Value: Germinating Seeds
  misc_feature: MA Experiment ID: 20000184 Result: Up-regulated in Transcription
  misc_feature: MA Experiment 20000184 PARAMETER Experiment Name: At_Shoots__P Parameter: Age (day) Value: 7
  misc_feature: MA Experiment 20000184 PARAMETER Experiment Name: At_Shoots__P Parameter: Tissue Value: Shoots vs. Whole Plant
  misc_feature: MA Experiment ID: 20000265 Result: Up-regulated in Transcription
  misc_feature: MA Experiment 20000265 PARAMETER Experiment Name: At_Open_Flower_P Parameter: Age (day) Value: 21
  misc_feature: MA Experiment 20000265 PARAMETER Experiment Name: At_Open_Flower_P Parameter: Plant Line Value: WS
  misc_feature: MA Experiment 20000265 PARAMETER Experiment Name: At_Open_Flower_P Parameter: Tissue Value: Closed Flower vs. Whole Plant
  misc_feature: MA Experiment ID: 20000437 Result: Down-regulated in Transcription
  misc_feature: MA Experiment 20000437 PARAMETER Experiment Name: At_Drought_P Parameter: Age (day) Value: 8
  misc_feature: MA Experiment 20000437 PARAMETER Experiment Name: At_Drought_P Parameter: Organism Value: A. thaliana
  misc_feature: MA Experiment 20000437 PARAMETER Experiment Name: At_Drought_P Parameter: Plant Line Value: WS
  misc_feature: MA Experiment 20000437 PARAMETER Experiment Name: At_Drought_P Parameter: Timepoint (hr) Value: 24
  misc_feature: MA Experiment 20000437 PARAMETER Experiment Name: At_Drought_P Parameter: Tissue Value: Whole Plant
  misc_feature: MA Experiment 20000437 PARAMETER Experiment Name: At_Drought_P Parameter: Treatment Value: Drought vs. No Drought
  misc_feature: MA Experiment ID: 20000438 Result: Up-regulated in Transcription
  misc_feature: MA Experiment 20000438 PARAMETER Experiment Name: At_Shoots__P Parameter: Age (day) Value: 14
  misc_feature: MA Experiment 20000438 PARAMETER Experiment Name: At_Shoots__P Parameter: Tissue Value: Shoots vs. Whole Plant
  misc_feature: MA Experiment ID: 20000794 Result: Down-regulated in Transcription
  misc_feature: MA Experiment 20000794 PARAMETER Experiment Name: At_Petals_P Parameter: Age (day) Value: 23-25 days
  misc_feature: MA Experiment 20000794 PARAMETER Experiment Name: At_Petals_P Parameter: Plant Line Value: WS
  misc_feature: MA Experiment 20000794 PARAMETER Experiment Name: At_Petals_P Parameter: Tissue Value: Petals vs. Whole plant
  misc_feature: MA Experiment ID: 20001558 Result: Up-regulated in Transcription
  misc_feature: MA Experiment 20001558 PARAMETER Experiment Name: At_Drought_Soil_Dry_P Parameter: Age (day) Value: 27
  misc_feature: MA Experiment 20001558 PARAMETER Experiment Name: At_Drought_Soil_Dry_P Parameter: Organism Value: A. thaliana
  misc_feature: MA Experiment 20001558 PARAMETER Experiment Name: At_Drought_Soil_Dry_P Parameter: Plant Line Value: WS
  misc_feature: MA Experiment 20001558 PARAMETER Experiment Name: At_Drought_Soil_Dry_P Parameter: Post Timepoint (hr) Value: 6
  misc_feature: MA Experiment 20001558 PARAMETER Experiment Name: At_Drought_Soil_Dry_P Parameter: Post-Treatment Value: Re-Water vs. No Drought
  misc_feature: MA Experiment 20001558 PARAMETER Experiment Name: At_Drought_Soil_Dry_P Parameter: Timepoint (day) Value: 13
  misc_feature: MA Experiment 20001558 PARAMETER Experiment Name: At_Drought_Soil_Dry_P Parameter: Treatment Value: Drought vs. No Drought
  misc_feature: MA Experiment ID: 20001560 Result: Up-regulated in Transcription
  misc_feature: MA Experiment 20001560 PARAMETER Experiment Name: At_Drought_Soil_Dry_P Parameter: Age (day) Value: 28
  misc_feature: MA Experiment 20001560 PARAMETER Experiment Name: At_Drought_Soil_Dry_P Parameter: Organism Value: A. thaliana
  misc_feature: MA Experiment 20001560 PARAMETER Experiment Name: At_Drought_Soil_Dry_P Parameter: Plant Line Value: WS
  misc_feature: MA Experiment 20001560 PARAMETER Experiment Name: At_Drought_Soil_Dry_P Parameter: Post Timepoint (hr) Value: None
  misc_feature: MA Experiment 20001560 PARAMETER Experiment Name: At_Drought_Soil_Dry_P Parameter: Post-Treatment Value: None
  misc_feature: MA Experiment 20001560 PARAMETER Experiment Name: At_Drought_Soil_Dry_P Parameter: Timepoint (day) Value: 14
  misc_feature: MA Experiment 20001560 PARAMETER Experiment Name: At_Drought_Soil_Dry_P Parameter: Treatment Value: Drought vs. No Drought
  misc_feature: MA Experiment ID: 20001757 Result: Up-regulated in Transcription
  misc_feature: MA Experiment 20001757 PARAMETER Experiment Name: At_50mM_NH4NO3_L-to-H_P Parameter: Timepoint (hr) Value: 6
  misc_feature: MA Experiment 20001757 PARAMETER Experiment Name: At_50mM_NH4NO3_L-to-H_P Parameter: Tissue Value: Leaf
  misc_feature: MA Experiment 20001757 PARAMETER Experiment Name: At_50mM_NH4NO3_L-to-H_P Parameter: Treatment Value: 50mM NH4NO3 vs 100mM Mannitol
  misc_feature: MA Experiment ID: 20001911 Result: Down-regulated in Transcription
  misc_feature: MA Experiment 20001911 PARAMETER Experiment Name: At_Drought_Reproduction_P Parameter: Age (day) Value: 40
  misc_feature: MA Experiment 20001911 PARAMETER Experiment Name: At_Drought_Reproduction_P Parameter: Organism Value: A. thaliana
  misc_feature: MA Experiment 20001911 PARAMETER Experiment Name: At_Drought_Reproduction_P Parameter: Plant Line Value: WS
  misc_feature: MA Experiment 20001911 PARAMETER Experiment Name: At_Drought_Reproduction_P Parameter: Timepoint (day) Value: 10
  misc_feature: MA Experiment 20001911 PARAMETER Experiment Name: At_Drought_Reproduction_P Parameter: Tissue Value: Flowers
  misc_feature: MA Experiment 20001911 PARAMETER Experiment Name: At_Drought_Reproduction_P Parameter: Treatment Value: Drought vs. No Drought
atcgaagctcctctctcttacatatcatcacttcacatcaaccaaacctacttctgtctctctctctcgctctctatctctcacgctctcacagaagaaaaaattagaaaggttgtgagaatggcctacagcagcttcaccttacaaattgctacacgaaggccgagcatgtcttcgcctagcaaaattcttaaagcaggaacctacattgttggtgccaatcctggaaacgcttcatgggataaactttcatgcactcgccaattatcaaaccttggatgtttgagaaaccacagtgctgttccaacttgtaagagacccttttctttttccacaagggcaatgtctgaatccagtgaaaacaaggctccttcagggcttccaattgatttgagagggaaaagagctttcattgctggtatagctgatgataatggctatggttgggccatagcaaaatctcttgctgctgctggagctgaaatattggttgggacttgggttcctgcacttaatatatttgagacaagcttgagacgtggaaaattcgaccagtcacgagtgttgcctgacgggtcattgatggagattaagaaggtttatgctttggatgctgtgtttgacaatcctgaagatgtgcctgaagatgtgaaaacgaataagcgatatgcaggatcgtcaaactggaccgtacaggaagctgctgaatgtgtgaaaaaagattttggaagcattgacattcttgtccattcccttgcaaatggcccagaggttagcaaacctcttctggagacatcaaggaaaggctatctcgctgctatctctgcttcgagttactcctttgtttccttgctgaggcattttctgccaattatgaacccaggaggtgcttcaatatctcttacttacattgcctctgaaagaatcattcctgggtatggtggaggtatgagttctgccaaagctgcactagagagtgacacacgggtgcttgcatatgaagctggaaggaaatcaaacattagggtcaacaccatctctgcgggtcctttgggaagccgagcagcaaaagccattgggttcatagacaccatgattgagtattcctacaataatggacctattcagaaaacactgaccgcagatgaagttgggaatgcagcagccttcttggcatctccattggcctctgccataaccggtgcaaccatatatgtggacaatggtttgaatgcaatgggcgttgcactggacagccccgtgttcaaagaccttaacagcaagaattagagtcttgatcgacgactgaactcgagaaattccgtgttttcgtgagcttgcttgtttctttatgagttagtatgtacggcatatgttccccatcggctgtctttttttttctttctttaagagaataaattatggttctaggttgggtcatttagcaactatatatgtagtgatggattattattcctcttatgattgaaaatttgcaagtg

SEQ ID NO: 23378 - protein, 429 aa, Arabidopsis thaliana
  peptide (1)..(429): Ceres Seq. ID no. 12371617
  misc_feature (318)..(410): Pfam Name: short chain dehydrogenase Pfam Description: short chain dehydrogenase
  misc_feature (47)..(426): Homolog of NCBI NO: 99805 NR Description: enoyl-
  misc_feature (47)..(426): Homolog of NCBI NO: 461461 NR Description: Enoyl-
  misc_feature (47)..(426): Homolog of NCBI NO: 14422259 NR Description: enoyl-[acyl-carrier protein] reductase [Brassica
  misc_feature (42)..(425): Homolog of NCBI NO: 7488486 NR Description: probable enoyl-
  misc_feature (47)..(426): Homolog of NCBI NO: 14422261 NR Description: enoyl-[acyl carrier-protein] reductase [Brassica
  misc_feature (42)..(425): Homolog of NCBI NO: 14422257 NR Description: enoyl-[acyl-carrier protein] reductase [Brassica
  misc_feature (42)..(425): Homolog of NCBI NO: 14422255 NR Description: enoyl-[acyl-carrier protein] reductase [Brassica
  misc_feature (42)..(429): Homolog of NCBI NO: 2204087 NR Description: enoyl-ACP reductase [Arabidopsis thaliana]
  misc_feature (42)..(429): Homolog of NCBI NO: 7141083 NR Description: enoyl-ACP reductase [Arabidopsis thaliana]
  misc_feature (42)..(429): Homolog of NCBI NO: 18396215 NR Description: enoyl-ACP reductase (enr-A)
IEAPLSYISSLHINQTYFCLSLSLSISHALTEEKIRKVVRMAYSSFTLQIATRRPSMSSPSKILKAGTYIVGANPGNASWDKLSCTRQLSNLGCLRNHSAVPTCKRPFSFSTRAMSESSENKAPSGLPIDLRGKRAFIAGIADDNGYGWAIAKSLAAAGAEILVGTWVPALNIFETSLRRGKFDQSRVLPDGSLMEIKKVYALDAVFDNPEDVPEDVKTNKRYAGSSNWTVQEAAECVKKDFGSIDILVHSLANGPEVSKPLLETSRKGYLAAISASSYSFVSLLRHFLPIMNPGGASISLTYIASERIIPGYGGGMSSAKAALESDTRVLAYEAGRKSNIRVNTISAGPLGSRAAKAIGFIDTMIEYSYNNGPIQKTLTADEVGNAAAFLASPLASAITGATIYVDNGLNAMGVALDSPVFKDLNSKN

SEQ ID NO: 23379 - protein, 389 aa, Arabidopsis thaliana
  peptide (1)..(389): Ceres Seq. ID no. 12371618
  misc_feature (278)..(370): Pfam Name: short chain dehydrogenase Pfam Description: short chain dehydrogenase
  misc_feature (2)..(385): Homolog of NCBI NO: 14422257 NR Description: enoyl-[acyl-carrier protein] reductase [Brassica
  misc_feature (2)..(385): Homolog of NCBI NO: 14422255 NR Description: enoyl-[acyl-carrier protein] reductase [Brassica
  misc_feature (2)..(389): Homolog of NCBI NO: 2204087 NR Description: enoyl-ACP reductase [Arabidopsis thaliana]
  misc_feature (7)..(386): Homolog of NCBI NO: 14422261 NR Description: enoyl-[acyl carrier-protein] reductase [Brassica
  misc_feature (7)..(386): Homolog of NCBI NO: 461461 NR Description: Enoyl-
  misc_feature (7)..(386): Homolog of NCBI NO: 14422259 NR Description: enoyl-[acyl-carrier protein] reductase [Brassica
  misc_feature (7)..(386): Homolog of NCBI NO: 99805 NR Description: enoyl-
  misc_feature (2)..(385): Homolog of NCBI NO: 7488486 NR Description: probable enoyl-
  misc_feature (2)..(389): Homolog of NCBI NO: 7141083 NR Description: enoyl-ACP reductase [Arabidopsis thaliana]
  misc_feature (2)..(389): Homolog of NCBI NO: 18396215 NR Description: enoyl-ACP reductase (enr-A)
MAYSSFTLQIATRRPSMSSPSKILKAGTYIVGANPGNASWDKLSCTRQLSNLGCLRNHSAVPTCKRPFSFSTRAMSESSENKAPSGLPIDLRGKRAFIAGIADDNGYGWAIAKSLAAAGAEILVGTWVPALNIFETSLRRGKFDQSRVLPDGSLMEIKKVYALDAVFDNPEDVPEDVKTNKRYAGSSNWTVQEAAECVKKDFGSIDILVHSLANGPEVSKPLLETSRKGYLAAISASSYSFVSLLRHFLPIMNPGGASISLTYIASERIIPGYGGGMSSAKAALESDTRVLAYEAGRKSNIRVNTISAGPLGSRAAKAIGFIDTMIEYSYNNGPIQKTLTADEVGNAAAFLASPLASAITGATIYVDNGLNAMGVALDSPVFKDLNSKN

SEQ ID NO: 23380 - protein, 373 aa, Arabidopsis thaliana
  peptide (1)..(373): Ceres Seq. ID no. 12371619
  misc_feature (262)..(354): Pfam Name: short chain dehydrogenase Pfam Description: short chain dehydrogenase
  misc_feature (1)..(370): Homolog of NCBI NO: 99805 NR Description: enoyl-
  misc_feature (1)..(370): Homolog of NCBI NO: 461461 NR Description: Enoyl-
  misc_feature (1)..(370): Homolog of NCBI NO: 14422259 NR Description: enoyl-[acyl-carrier protein] reductase [Brassica
  misc_feature (1)..(369): Homolog of NCBI NO: 7488486 NR Description: probable enoyl-
  misc_feature (1)..(370): Homolog of NCBI NO: 14422261 NR Description: enoyl-[acyl carrier-protein] reductase [Brassica
  misc_feature (1)..(369): Homolog of NCBI NO: 14422257 NR Description: enoyl-[acyl-carrier protein] reductase [Brassica
  misc_feature (1)..(369): Homolog of NCBI NO: 14422255 NR Description: enoyl-[acyl-carrier protein] reductase [Brassica
  misc_feature (1)..(373): Homolog of NCBI NO: 2204087 NR Description: enoyl-ACP reductase [Arabidopsis thaliana]
  misc_feature (1)..(373): Homolog of NCBI NO: 7141083 NR Description: enoyl-ACP reductase [Arabidopsis thaliana]
  misc_feature (1)..(373): Homolog of NCBI NO: 18396215 NR Description: enoyl-ACP reductase (enr-A)
MSSPSKILKAGTYIVGANPGNASWDKLSCTRQLSNLGCLRNHSAVPTCKRPFSFSTRAMSESSENKAPSGLPIDLRGKRAFIAGIADDNGYGWAIAKSLAAAGAEILVGTWVPALNIFETSLRRGKFDQSRVLPDGSLMEIKKVYALDAVFDNPEDVPEDVKTNKRYAGSSNWTVQEAAECVKKDFGSIDILVHSLANGPEVSKPLLETSRKGYLAAISASSYSFVSLLRHFLPIMNPGGASISLTYIASERIIPGYGGGMSSAKAALESDTRVLAYEAGRKSNIRVNTISAGPLGSRAAKAIGFIDTMIEYSYNNGPIQKTLTADEVGNAAAFLASPLASAITGATIYVDNGLNAMGVALDSPVFKDLNSKN

SEQ ID NO: 23381 - DNA, 1085 bp, Arabidopsis thaliana
  misc_feature (1)..(1085): Ceres Seq. ID no. 12489481
  misc_feature: MA Experiment ID: 108573 Result: Up-regulated in Transcription
  misc_feature: MA Experiment 108573 PARAMETER Experiment Name: At_Drought_cDNA_P Parameter: Timepoint (hr) Value: 6
  misc_feature: MA Experiment 108573 PARAMETER Experiment Name: At_Drought_cDNA_P Parameter: Tissue Value: Aerial
  misc_feature: MA Experiment 108573 PARAMETER Experiment Name: At_Drought_cDNA_P Parameter: Treatment Value: Drought vs. No Drought
  misc_feature: MA Experiment ID: 108577 Result: Up-regulated in Transcription
  misc_feature: MA Experiment 108577 PARAMETER Experiment Name: At_42deg_Heat_cDNA_P Parameter: Temperature (deg C) Value: 42 vs. 22
  misc_feature: MA Experiment 108577 PARAMETER Experiment Name: At_42deg_Heat_cDNA_P Parameter: Timepoint (hr) Value: 6
  misc_feature: MA Experiment 108577 PARAMETER Experiment Name: At_42deg_Heat_cDNA_P Parameter: Tissue Value: Aerial
  misc_feature: MA Experiment ID: 108595 Result: Down-regulated in Transcription
  misc_feature: MA Experiment 108595 PARAMETER Experiment Name: At_Ler-pi_Ovule_cDNA_P Parameter: Plant Line Value: null
  misc_feature: MA Experiment ID: 20000173 Result: Down-regulated in Transcription
  misc_feature: MA Experiment 20000173 PARAMETER Experiment Name: At_42deg_Heat_P Parameter: Age (day) Value: 14
  misc_feature: MA Experiment 20000173 PARAMETER Experiment Name: At_42deg_Heat_P Parameter: Organism Value: A. thaliana
  misc_feature: MA Experiment 20000173 PARAMETER Experiment Name: At_42deg_Heat_P Parameter: Plant Line Value: WS
  misc_feature: MA Experiment 20000173 PARAMETER Experiment Name: At_42deg_Heat_P Parameter: Temperature (deg C) Value: 42 vs. 22
  misc_feature: MA Experiment 20000173 PARAMETER Experiment Name: At_42deg_Heat_P Parameter: Timepoint (hr) Value: 6
  misc_feature: MA Experiment 20000173 PARAMETER Experiment Name: At_42deg_Heat_P Parameter: Tissue Value: Aerial
  misc_feature: MA Experiment ID: 20000182 Result: Up-regulated in Transcription
  misc_feature: MA Experiment 20000182 PARAMETER Experiment Name: At_2mM_SA_P Parameter: Age (day) Value: 14
  misc_feature: MA Experiment 20000182 PARAMETER Experiment Name: At_2mM_SA_P Parameter: Organism Value: A. thaliana
  misc_feature: MA Experiment 20000182 PARAMETER Experiment Name: At_2mM_SA_P Parameter: Plant Line Value: WS
  misc_feature: MA Experiment 20000182 PARAMETER Experiment Name: At_2mM_SA_P Parameter: Timepoint (hr) Value: 6
  misc_feature: MA Experiment 20000182 PARAMETER Experiment Name: At_2mM_SA_P Parameter: Tissue Value: Aerial
  misc_feature: MA Experiment 20000182 PARAMETER Experiment Name: At_2mM_SA_P Parameter: Treatment Value: 2mM SA vs. No Treatment
  misc_feature: MA Experiment ID: 20000184 Result: Down-regulated in Transcription
  misc_feature: MA Experiment 20000184 PARAMETER Experiment Name: At_Shoots__P Parameter: Age (day) Value: 7
  misc_feature: MA Experiment 20000184 PARAMETER Experiment Name: At_Shoots__P Parameter: Tissue Value: Shoots vs. Whole Plant
  misc_feature: MA Experiment ID: 20000185 Result: Down-regulated in Transcription
  misc_feature: MA Experiment 20000185 PARAMETER Experiment Name: At_Roots__P Parameter: Age (day) Value: 7 vs. 21
  misc_feature: MA Experiment 20000185 PARAMETER Experiment Name: At_Roots__P Parameter: Organism Value: A. thaliana
  misc_feature: MA Experiment 20000185 PARAMETER Experiment Name: At_Roots__P Parameter: Tissue Value: Roots vs. Whole Plant
  misc_feature: MA Experiment ID: 20000234 Result: Down-regulated in Transcription
  misc_feature: MA Experiment 20000234 PARAMETER Experiment Name: At_Siliques_P Parameter: Age (day) Value: 21
  misc_feature: MA Experiment 20000234 PARAMETER Experiment Name: At_Siliques_P Parameter: Organism Value: A. thaliana
  misc_feature: MA Experiment 20000234 PARAMETER Experiment Name: At_Siliques_P Parameter: Plant Line Value: WS
  misc_feature: MA Experiment 20000234 PARAMETER Experiment Name: At_Siliques_P Parameter: Tissue Value: Less Than 5mm Siliques vs. Whole Plant
  misc_feature: MA Experiment ID: 20000235 Result: Down-regulated in Transcription
  misc_feature: MA Experiment 20000235 PARAMETER Experiment Name: At_Siliques_P Parameter: Age (day) Value: 21
  misc_feature: MA Experiment 20000235 PARAMETER Experiment Name: At_Siliques_P Parameter: Organism Value: A. thaliana
  misc_feature: MA Experiment 20000235 PARAMETER Experiment Name: At_Siliques_P Parameter: Plant Line Value: WS
  misc_feature: MA Experiment 20000235 PARAMETER Experiment Name: At_Siliques_P Parameter: Tissue Value: 5-10mm Siliques vs. Whole Plant
  misc_feature: MA Experiment ID: 20000264 Result: Down-regulated in Transcription
  misc_feature: MA Experiment 20000264 PARAMETER Experiment Name: At_Open_Flower_P Parameter: Age (day) Value: 21
  misc_feature: MA Experiment 20000264 PARAMETER Experiment Name: At_Open_Flower_P Parameter: Plant Line Value: WS
  misc_feature: MA Experiment 20000264 PARAMETER Experiment Name: At_Open_Flower_P Parameter: Tissue Value: Open Flower vs. Whole Plant
  misc_feature: MA Experiment ID: 20000265 Result: Down-regulated in Transcription
  misc_feature: MA Experiment 20000265 PARAMETER Experiment Name: At_Open_Flower_P Parameter: Age (day) Value: 21
  misc_feature: MA Experiment 20000265 PARAMETER Experiment Name: At_Open_Flower_P Parameter: Plant Line Value: WS
  misc_feature: MA Experiment 20000265 PARAMETER Experiment Name: At_Open_Flower_P Parameter: Tissue Value: Closed Flower vs. Whole Plant
  misc_feature: MA Experiment ID: 20000267 Result: Up-regulated in Transcription
  misc_feature: MA Experiment 20000267 PARAMETER Experiment Name: At_Drought_P Parameter: Age (day) Value: 7
  misc_feature: MA Experiment 20000267 PARAMETER Experiment Name: At_Drought_P Parameter: Organism Value: A. thaliana
  misc_feature: MA Experiment 20000267 PARAMETER Experiment Name: At_Drought_P Parameter: Plant Line Value: WS
  misc_feature: MA Experiment 20000267 PARAMETER Experiment Name: At_Drought_P Parameter: Timepoint (hr) Value: 6
  misc_feature: MA Experiment 20000267 PARAMETER Experiment Name: At_Drought_P Parameter: Tissue Value: Whole Plant
  misc_feature: MA Experiment 20000267 PARAMETER Experiment Name: At_Drought_P Parameter: Treatment Value: Drought vs. No Drought
  misc_feature: MA Experiment ID: 20000286 Result: Down-regulated in Transcription
  misc_feature: MA Experiment 20000286 PARAMETER Experiment Name: At_Open_Flower_P Parameter: Age (day) Value: 21
  misc_feature: MA Experiment 20000286 PARAMETER Experiment Name: At_Open_Flower_P Parameter: Plant Line Value: WS
  misc_feature: MA Experiment 20000286 PARAMETER Experiment Name: At_Open_Flower_P Parameter: Tissue Value: Half Open vs. Whole Plant
  misc_feature: MA Experiment ID: 20000288 Result: Up-regulated in Transcription
  misc_feature: MA Experiment 20000288 PARAMETER Experiment Name: At_Drought_P Parameter: Age (day) Value: 7
  misc_feature: MA Experiment 20000288 PARAMETER Experiment Name: At_Drought_P Parameter: Organism Value: A. thaliana
  misc_feature: MA Experiment 20000288 PARAMETER Experiment Name: At_Drought_P Parameter: Plant Line Value: WS
  misc_feature: MA Experiment 20000288 PARAMETER Experiment Name: At_Drought_P Parameter: Timepoint (hr) Value: 1
  misc_feature: MA Experiment 20000288 PARAMETER Experiment Name: At_Drought_P Parameter: Tissue Value: Whole Plant
  misc_feature: MA Experiment 20000288 PARAMETER Experiment Name: At_Drought_P Parameter: Treatment Value: Drought vs. No Drought
  misc_feature: MA Experiment ID: 20000436 Result: Up-regulated in Transcription
  misc_feature: MA Experiment 20000436 PARAMETER Experiment Name: At_Drought_P Parameter: Age (day) Value: 7
  misc_feature: MA Experiment 20000436 PARAMETER Experiment Name: At_Drought_P Parameter: Organism Value: A. thaliana
  misc_feature: MA Experiment 20000436 PARAMETER Experiment Name: At_Drought_P Parameter: Plant Line Value: WS
  misc_feature: MA Experiment 20000436 PARAMETER Experiment Name: At_Drought_P Parameter: Timepoint (hr) Value: 12
  misc_feature: MA Experiment 20000436 PARAMETER Experiment Name: At_Drought_P Parameter: Tissue Value: Whole Plant
  misc_feature: MA Experiment 20000436 PARAMETER Experiment Name: At_Drought_P Parameter: Treatment Value: Drought vs. No Drought
  misc_feature: MA Experiment ID: 20000437 Result: Up-regulated in Transcription
  misc_feature: MA Experiment 20000437 PARAMETER Experiment Name: At_Drought_P Parameter: Age (day) Value: 8
  misc_feature: MA Experiment 20000437 PARAMETER Experiment Name: At_Drought_P Parameter: Organism Value: A. thaliana
  misc_feature: MA Experiment 20000437 PARAMETER Experiment Name: At_Drought_P Parameter: Plant Line Value: WS
  misc_feature: MA Experiment 20000437 PARAMETER Experiment Name: At_Drought_P Parameter: Timepoint (hr) Value: 24
  misc_feature: MA Experiment 20000437 PARAMETER Experiment Name: At_Drought_P Parameter: Tissue Value: Whole Plant
  misc_feature: MA Experiment 20000437 PARAMETER Experiment Name: At_Drought_P Parameter: Treatment Value: Drought vs. No Drought
  misc_feature: MA Experiment ID: 20000438 Result: Down-regulated in Transcription
  misc_feature: MA Experiment 20000438 PARAMETER Experiment Name: At_Shoots__P Parameter: Age (day) Value: 14
  misc_feature: MA Experiment 20000438 PARAMETER Experiment Name: At_Shoots__P Parameter: Tissue Value: Shoots vs. Whole Plant
  misc_feature: MA Experiment ID: 20000439 Result: Down-regulated in Transcription
  misc_feature: MA Experiment 20000439 PARAMETER Experiment Name: At_Roots__P Parameter: Age (day) Value: 14 vs. 21
  misc_feature: MA Experiment 20000439 PARAMETER Experiment Name: At_Roots__P Parameter: Organism Value: A. thaliana
  misc_feature: MA Experiment 20000439 PARAMETER Experiment Name: At_Roots__P Parameter: Tissue Value: Roots vs. Whole Plant
  misc_feature: MA Experiment ID: 20000441 Result: Down-regulated in Transcription
  misc_feature: MA Experiment 20000441 PARAMETER Experiment Name: At_1uM_BR-BRZ__P Parameter: Tissue Value: Shoot Apices
  misc_feature: MA Experiment 20000441 PARAMETER Experiment Name: At_1uM_BR-BRZ__P Parameter: Treatment Value: 1uM BR vs. No Treatment
  misc_feature: MA Experiment ID: 20000443 Result: Down-regulated in Transcription
  misc_feature: MA Experiment 20000443 PARAMETER Experiment Name: At_1uM_BR-BRZ__P Parameter: Tissue Value: Shoot Apices
  misc_feature: MA Experiment 20000443 PARAMETER Experiment Name: At_1uM_BR-BRZ__P Parameter: Treatment Value: 1uM BRZ vs. No Treatment
  misc_feature: MA Experiment ID: 20000495 Result: Down-regulated in Transcription
  misc_feature: MA Experiment 20000495 PARAMETER Experiment Name: At_Guard_Cells_P Parameter: Harvest Date Value: 8/2/2002
  misc_feature: MA Experiment 20000495 PARAMETER Experiment Name: At_Guard_Cells_P Parameter: Organism Value: A. thaliana
  misc_feature: MA Experiment 20000495 PARAMETER Experiment Name: At_Guard_Cells_P Parameter: Tissue Value: Guard Cells vs. Leaves
  misc_feature: MA Experiment ID: 20000496 Result: Down-regulated in Transcription
  misc_feature: MA Experiment 20000496 PARAMETER Experiment Name: At_Guard_Cells_P Parameter: Harvest Date Value: 7/19/2002
  misc_feature: MA Experiment 20000496 PARAMETER Experiment Name: At_Guard_Cells_P Parameter: Organism Value: Canola
  misc_feature: MA Experiment 20000496 PARAMETER Experiment Name: At_Guard_Cells_P Parameter: Tissue Value: Guard Cells vs. Leaves
  misc_feature: MA Experiment ID: 20000527 Result: Down-regulated in Transcription
  misc_feature: MA Experiment 20000527 PARAMETER Experiment Name: At_10percent_PEG_P Parameter: Age (day) Value: 20
  misc_feature: MA Experiment 20000527 PARAMETER Experiment Name: At_10percent_PEG_P Parameter: Organism Value: A. thaliana
  misc_feature: MA Experiment 20000527 PARAMETER Experiment Name: At_10percent_PEG_P Parameter: Plant Line Value: WS
  misc_feature: MA Experiment 20000527 PARAMETER Experiment Name: At_10percent_PEG_P Parameter: Timepoint (day) Value: 20
  misc_feature: MA Experiment 20000527 PARAMETER Experiment Name: At_10percent_PEG_P Parameter: Tissue Value: Whole Plant
  misc_feature: MA Experiment 20000527 PARAMETER Experiment Name: At_10percent_PEG_P Parameter: Treatment Value: 10percent PEG vs. No Treatment
  misc_feature: MA Experiment ID: 20001248 Result: Up-regulated in Transcription
  misc_feature: MA Experiment 20001248 PARAMETER Experiment Name: At_Far-red-induction_P Parameter: Age (day) Value: 7
  misc_feature: MA Experiment 20001248 PARAMETER Experiment Name: At_Far-red-induction_P Parameter: Light Value: Far-red vs. White
  misc_feature: MA Experiment 20001248 PARAMETER Experiment Name: At_Far-red-induction_P Parameter: Organism Value: A. thaliana
  misc_feature: MA Experiment 20001248 PARAMETER Experiment Name: At_Far-red-induction_P Parameter: Plant Line Value: Columbia
  misc_feature: MA Experiment 20001248 PARAMETER Experiment Name: At_Far-red-induction_P Parameter: Timepoint (hr) Value: 4
  misc_feature: MA Experiment 20001248 PARAMETER Experiment Name: At_Far-red-induction_P Parameter: Tissue Value: Whole Plant
  misc_feature: MA Experiment ID: 20001450 Result: Up-regulated in Transcription
  misc_feature: MA Experiment 20001450 PARAMETER Experiment Name: At_Far-red-induction_P Parameter: Age (day) Value: 7
  misc_feature: MA Experiment 20001450 PARAMETER Experiment Name: At_Far-red-induction_P Parameter: Light Value: Far-red vs. White
  misc_feature: MA Experiment 20001450 PARAMETER Experiment Name: At_Far-red-induction_P Parameter: Organism Value: A. thaliana
  misc_feature: MA Experiment 20001450 PARAMETER Experiment Name: At_Far-red-induction_P Parameter: Plant Line Value: Columbia
  misc_feature: MA Experiment 20001450 PARAMETER Experiment Name: At_Far-red-induction_P Parameter: Timepoint (hr) Value: 8
  misc_feature: MA Experiment 20001450 PARAMETER Experiment Name: At_Far-red-induction_P Parameter: Tissue Value: Whole Plant
  misc_feature: MA Experiment ID: 20001451 Result: Up-regulated in Transcription
  misc_feature: MA Experiment 20001451 PARAMETER Experiment Name: At_Far-red-induction_P Parameter: Age (day) Value: 7
  misc_feature: MA Experiment 20001451 PARAMETER Experiment Name: At_Far-red-induction_P Parameter: Light Value: Far-red vs. White
  misc_feature: MA Experiment 20001451 PARAMETER Experiment Name: At_Far-red-induction_P Parameter: Organism Value: A. thaliana
  misc_feature: MA Experiment 20001451 PARAMETER Experiment Name: At_Far-red-induction_P Parameter: Plant Line Value: Columbia
  misc_feature: MA Experiment 20001451 PARAMETER Experiment Name: At_Far-red-induction_P Parameter: Timepoint (hr) Value: 24
  misc_feature: MA Experiment 20001451 PARAMETER Experiment Name: At_Far-red-induction_P Parameter: Tissue Value: Whole Plant
  misc_feature: MA Experiment ID: 20001555 Result: Down-regulated in Transcription
  misc_feature: MA Experiment 20001555 PARAMETER Experiment Name: At_Drought_Soil_Dry_P Parameter: Age (day) Value: 24
  misc_feature: MA Experiment 20001555 PARAMETER Experiment Name: At_Drought_Soil_Dry_P Parameter: Organism Value: A. thaliana
  misc_feature: MA Experiment 20001555 PARAMETER Experiment Name: At_Drought_Soil_Dry_P Parameter: Plant Line Value: WS
  misc_feature: MA Experiment 20001555 PARAMETER Experiment Name: At_Drought_Soil_Dry_P Parameter: Post Timepoint (hr) Value: None
  misc_feature: MA Experiment 20001555 PARAMETER Experiment Name: At_Drought_Soil_Dry_P Parameter: Post-Treatment Value: None
  misc_feature: MA Experiment 20001555 PARAMETER Experiment Name: At_Drought_Soil_Dry_P Parameter: Timepoint (day) Value: 10
  misc_feature: MA Experiment 20001555 PARAMETER Experiment Name: At_Drought_Soil_Dry_P Parameter: Treatment Value: Drought vs. No Drought
  misc_feature: MA Experiment ID: 20001556 Result: Down-regulated in Transcription
  misc_feature: MA Experiment 20001556 PARAMETER Experiment Name: At_Drought_Soil_Dry_P Parameter: Age (day) Value: 26
  misc_feature: MA Experiment 20001556 PARAMETER Experiment Name: At_Drought_Soil_Dry_P Parameter: Organism Value: A. thaliana
  misc_feature: MA Experiment 20001556 PARAMETER Experiment Name: At_Drought_Soil_Dry_P Parameter: Plant Line Value: WS
  misc_feature: MA Experiment 20001556 PARAMETER Experiment Name: At_Drought_Soil_Dry_P Parameter: Post Timepoint (hr) Value: None
  misc_feature: MA Experiment 20001556 PARAMETER Experiment Name: At_Drought_Soil_Dry_P Parameter: Post-Treatment Value: None
  misc_feature: MA Experiment 20001556 PARAMETER Experiment Name: At_Drought_Soil_Dry_P Parameter: Timepoint (day) Value: 12
  misc_feature: MA Experiment 20001556 PARAMETER Experiment Name: At_Drought_Soil_Dry_P Parameter: Treatment Value: Drought vs. No Drought
  misc_feature: MA Experiment ID: 20001559 Result: Down-regulated in Transcription
  misc_feature: MA Experiment 20001559 PARAMETER Experiment Name: At_Drought_Soil_Dry_P Parameter: Age (day) Value: 28
  misc_feature: MA Experiment 20001559 PARAMETER Experiment Name: At_Drought_Soil_Dry_P Parameter: Organism Value: A. thaliana
  misc_feature: MA Experiment 20001559 PARAMETER Experiment Name: At_Drought_Soil_Dry_P Parameter: Plant Line Value: WS
  misc_feature: MA Experiment 20001559 PARAMETER Experiment Name: At_Drought_Soil_Dry_P Parameter: Post Timepoint (hr) Value: 29
  misc_feature: MA Experiment 20001559 PARAMETER Experiment Name: At_Drought_Soil_Dry_P Parameter: Post-Treatment Value: Re-Water vs. No Drought
  misc_feature: MA Experiment 20001559 PARAMETER Experiment Name: At_Drought_Soil_Dry_P Parameter: Timepoint (day) Value: 14
  misc_feature: MA Experiment 20001559 PARAMETER Experiment Name: At_Drought_Soil_Dry_P Parameter: Treatment Value: Drought vs. No Drought
  misc_feature: MA Experiment ID: 20001560 Result: Down-regulated in Transcription
  misc_feature: MA Experiment 20001560 PARAMETER Experiment Name: At_Drought_Soil_Dry_P Parameter: Age (day) Value: 28
  misc_feature: MA Experiment 20001560 PARAMETER Experiment Name: At_Drought_Soil_Dry_P Parameter: Organism Value: A. thaliana
  misc_feature: MA Experiment 20001560 PARAMETER Experiment Name: At_Drought_Soil_Dry_P Parameter: Plant Line Value: WS
  misc_feature: MA Experiment 20001560 PARAMETER Experiment Name: At_Drought_Soil_Dry_P Parameter: Post Timepoint (hr) Value: None
  misc_feature: MA Experiment 20001560 PARAMETER Experiment Name: At_Drought_Soil_Dry_P Parameter: Post-Treatment Value: None
  misc_feature: MA Experiment 20001560 PARAMETER Experiment Name: At_Drought_Soil_Dry_P Parameter: Timepoint (day) Value: 14
  misc_feature: MA Experiment 20001560 PARAMETER Experiment Name: At_Drought_Soil_Dry_P Parameter: Treatment Value: Drought vs. No Drought
  misc_feature: MA Experiment ID: 20001905 Result: Down-regulated in Transcription
  misc_feature: MA Experiment 20001905 PARAMETER Experiment Name: At_Drought_Reproduction_P Parameter: Age (day) Value: 40
  misc_feature: MA Experiment 20001905 PARAMETER Experiment Name: At_Drought_Reproduction_P Parameter: Organism Value: A. thaliana
  misc_feature: MA Experiment 20001905 PARAMETER Experiment Name: At_Drought_Reproduction_P Parameter: Plant Line Value: WS
  misc_feature: MA Experiment 20001905 PARAMETER Experiment Name: At_Drought_Reproduction_P Parameter: Timepoint (day) Value: 10
  misc_feature: MA Experiment 20001905 PARAMETER Experiment Name: At_Drought_Reproduction_P Parameter: Tissue Value: Rosettes
  misc_feature: MA Experiment 20001905 PARAMETER Experiment Name: At_Drought_Reproduction_P Parameter: Treatment Value: Drought vs. No Drought
  misc_feature: MA Experiment ID: 20001906 Result: Down-regulated in Transcription
  misc_feature: MA Experiment 20001906 PARAMETER Experiment Name: At_Drought_Reproduction_P Parameter: Age (day) Value: 35
  misc_feature: MA Experiment 20001906 PARAMETER Experiment Name: At_Drought_Reproduction_P Parameter: Organism Value: A. thaliana
  misc_feature: MA Experiment 20001906 PARAMETER Experiment Name: At_Drought_Reproduction_P Parameter: Plant Line Value: WS
  misc_feature: MA Experiment 20001906 PARAMETER Experiment Name: At_Drought_Reproduction_P Parameter: Timepoint (day) Value: 5
  misc_feature: MA Experiment 20001906 PARAMETER Experiment Name: At_Drought_Reproduction_P Parameter: Tissue Value: Siliques
  misc_feature: MA Experiment 20001906 PARAMETER Experiment Name: At_Drought_Reproduction_P Parameter: Treatment Value: Drought vs. No Drought
  misc_feature: MA Experiment ID: 20001910 Result: Down-regulated in Transcription
  misc_feature: MA Experiment 20001910 PARAMETER Experiment Name: At_Drought_Reproduction_P Parameter: Age (day) Value: 37
  misc_feature: MA Experiment 20001910 PARAMETER Experiment Name: At_Drought_Reproduction_P Parameter: Organism Value: A. thaliana
  misc_feature: MA Experiment 20001910 PARAMETER Experiment Name: At_Drought_Reproduction_P Parameter: Plant Line Value: WS
  misc_feature: MA Experiment 20001910 PARAMETER Experiment Name: At_Drought_Reproduction_P Parameter: Timepoint (day) Value: 7
  misc_feature: MA Experiment 20001910 PARAMETER Experiment Name: At_Drought_Reproduction_P Parameter: Tissue Value: Flowers
  misc_feature: MA Experiment 20001910 PARAMETER Experiment Name: At_Drought_Reproduction_P Parameter: Treatment Value: Drought vs. No Drought
  misc_feature: MA Experiment ID: 20001911 Result: Down-regulated in Transcription
  misc_feature: MA Experiment 20001911 PARAMETER Experiment Name: At_Drought_Reproduction_P Parameter: Age (day) Value: 40
  misc_feature: MA Experiment 20001911 PARAMETER Experiment Name: At_Drought_Reproduction_P Parameter: Organism Value: A. thaliana
  misc_feature: MA Experiment 20001911 PARAMETER Experiment Name: At_Drought_Reproduction_P Parameter: Plant Line Value: WS
  misc_feature: MA Experiment 20001911 PARAMETER Experiment Name: At_Drought_Reproduction_P Parameter: Timepoint (day) Value: 10
  misc_feature: MA Experiment 20001911 PARAMETER Experiment Name: At_Drought_Reproduction_P Parameter: Tissue Value: Flowers
  misc_feature: MA Experiment 20001911 PARAMETER Experiment Name: At_Drought_Reproduction_P Parameter: Treatment Value: Drought vs. No Drought
ccatctaacaaaactcttgtacttaagcatggtggttaatcagaagatatccggccttgcatccgctatgaacgccaaaatcatcggttcaggagagagatcgatggtcttggcacacggtttcggaggcgaccagtcggtttgggataagataataccggtcttgtcccaatccttcaaagttttggtctttgactggcttttctctggagccattaaagatcaaactctctatgacccttcaaagtataactccttagacgtcttctctgacgatctcattgctcttatggaggagttgaagtttggccctgtcgtgttcgtaggccattccatgtcgggggtgatcggttgtgctgcttctattaaaaggcccgacttgtttacaaatcttctccttattgctgcttctccaaggtatataaacactgaggattataaaggagggtttgagtcaaaagacattgacacgatcattaccagcattggctccaactacgaagcttgggcggttgatttctcctcattcgtggtcgacccgagagactctctctcggtccaaaggttcgagaagtcccttaagaagatgaagcccgagacagctcttagctaagatagtgtttggtagcgacgagagagagattttgggacaagtgtcagtgccttgccatgtcatacaaccaggaaacgacgtcgtagtgcctgtctccgttgcatacttcatgcaggagaagattaaagggaaatcgacagtggagatcatcgaggacgcgatcgggcattttccacagatgacatcacatttggagctgcttggcgtcatgaggcgcctcctcgagttttaaggcttatataagagctttgcgtcgtttgatcgagtttcttcttgtctataatatcgtattactaatataacgaagtgggtctattagaagttttcatatatgtttgtgtaatgtgaatgtgttattttattcttagcacaatgattttcatttttagtgttttttttaaaacagatggattgaaagtactatgttataagtttctttatatcacactgtcaaaaaaaatttattgttacg

SEQ ID NO: 23382 - protein, 203 aa, Arabidopsis thaliana
  peptide (1)..(203): Ceres Seq. ID no. 12489482
  misc_feature (59)..(203): Pfam Name: alpha/beta hydrolase fold Pfam Description: alpha/beta hydrolase fold
  misc_feature (19)..(182): Homolog of NCBI NO: 16080463 NR Description: similar to hydrolase [Bacillus subtilis]
  misc_feature (140)..(203): Homolog of NCBI NO: 40736991 NR Description: putative hydrolases [Oryza sativa (japonica
  misc_feature (22)..(141): Homolog of NCBI NO: 40736991 NR Description: putative hydrolases [Oryza sativa (japonica
  misc_feature (24)..(201): Homolog of NCBI NO: 22987307 NR Description: hypothetical protein [Burkholderia fungorum]
  misc_feature (20)..(203): Homolog of NCBI NO: 24216360 NR Description: Predicted hydrolases or acyltransferases,
  misc_feature (19)..(202): Homolog of NCBI NO: 18396732 NR Description: expressed protein
  misc_feature (19)..(202): Homolog of NCBI NO: 21593927 NR Description: unknown [Arabidopsis thaliana]
  misc_feature (23)..(201): Homolog of NCBI NO: 34912326 NR Description: P0451D05.26 [Oryza sativa (japonica
  misc_feature (22)..(203): Homolog of NCBI NO: 15235567 NR Description: putative protein
  misc_feature (10)..(203): Homolog of NCBI NO: 15230110 NR Description: unknown protein; protein id: At3g24420.1
HLTKLLYLSMVVNQKISGLASAMNAKIIGSGERSMVLAHGFGGDQSVWDKIIPVLSQSFKVLVFDWLFSGAIKDQTLYDPSKYNSLDVFSDDLIALMEELKFGPVVFVGHSMSGVIGCAASIKRPDLFTNLLLIAASPRYINTEDYKGGFESKDIDTIITSIGSNYEAWAVDFSSFVVDPRDSLSVQRFEKSLKKMKPETALS

SEQ ID NO: 23383 - protein, 194 aa, Arabidopsis thaliana
  peptide (1)..(194): Ceres Seq. ID no. 12489483
  misc_feature (50)..(194): Pfam Name: alpha/beta hydrolase fold Pfam Description: alpha/beta hydrolase fold
  misc_feature (10)..(173): Homolog of NCBI NO: 16080463 NR Description: similar to hydrolase [Bacillus subtilis]
  misc_feature (131)..(194): Homolog of NCBI NO: 40736991 NR Description: putative hydrolases [Oryza sativa (japonica
  misc_feature (13)..(132): Homolog of NCBI NO: 40736991 NR Description: putative hydrolases [Oryza sativa (japonica
  misc_feature (15)..(192): Homolog of NCBI NO: 22987307 NR Description: hypothetical protein [Burkholderia fungorum]
  misc_feature (11)..(194): Homolog of NCBI NO: 24216360 NR Description: Predicted hydrolases or acyltransferases,
  misc_feature (10)..(193): Homolog of NCBI NO: 18396732 NR Description: expressed protein
  misc_feature (10)..(193): Homolog of NCBI NO: 21593927 NR Description: unknown [Arabidopsis thaliana]
  misc_feature (14)..(192): Homolog of NCBI NO: 34912326 NR Description: P0451D05.26 [Oryza sativa (japonica
  misc_feature (13)..(194): Homolog of NCBI NO: 15235567 NR Description: putative protein
  misc_feature (1)..(194): Homolog of NCBI NO: 15230110 NR Description: unknown protein; protein id: At3g24420.1
MVVNQKISGLASAMNAKIIGSGERSMVLAHGFGGDQSVWDKIIPVLSQSFKVLVFDWLFSGAIKDQTLYDPSKYNSLDVFSDDLIALMEELKFGPVVFVGHSMSGVIGCAASIKRPDLFTNLLLIAASPRYINTEDYKGGFESKDIDTIITSIGSNYEAWAVDFSSFVVDPRDSLSVQRFEKSLKKMKPETALS

SEQ ID NO: 23384 - protein, 181 aa, Arabidopsis thaliana
  peptide (1)..(181): Ceres Seq. ID no. 12489484
  misc_feature (37)..(181): Pfam Name: alpha/beta hydrolase fold Pfam Description: alpha/beta hydrolase fold
  misc_feature (1)..(160): Homolog of NCBI NO: 16080463 NR Description: similar to hydrolase [Bacillus subtilis]
  misc_feature (118)..(181): Homolog of NCBI NO: 40736991 NR Description: putative hydrolases [Oryza sativa (japonica
  misc_feature (1)..(119): Homolog of NCBI NO: 40736991 NR Description: putative hydrolases [Oryza sativa (japonica
  misc_feature (2)..(179): Homolog of NCBI NO: 22987307 NR Description: hypothetical protein [Burkholderia fungorum]
  misc_feature (1)..(181): Homolog of NCBI NO: 24216360 NR Description: Predicted hydrolases or acyltransferases,
  misc_feature (1)..(180): Homolog of NCBI NO: 18396732 NR Description: expressed protein
  misc_feature (1)..(180): Homolog of NCBI NO: 21593927 NR Description: unknown [Arabidopsis thaliana]
  misc_feature (1)..(179): Homolog of NCBI NO: 34912326 NR Description: P0451D05.26 [Oryza sativa (japonica
  misc_feature (1)..(181): Homolog of NCBI NO: 15235567 NR Description: putative protein
  misc_feature (1)..(181): Homolog of NCBI NO: 15230110 NR Description: unknown protein; protein id: At3g24420.1
MNAKIIGSGERSMVLAHGFGGDQSVWDKIIPVLSQSFKVLVFDWLFSGAIKDQTLYDPSKYNSLDVFSDDLIALMEELKFGPVVFVGHSMSGVIGCAASIKRPDLFTNLLLIAASPRYINTEDYKGGFESKDIDTIITSIGSNYEAWAVDFSSFVVDPRDSLSVQRFEKSLKKMKPETALS

SEQ ID NO: 23385 - DNA, 1152 bp, Arabidopsis thaliana
  misc_feature (1)..(1152): Ceres Seq. ID no. 12370401
  misc_feature: MA Experiment ID: 20000180 Result: Up-regulated in Transcription
  misc_feature: MA Experiment 20000180 PARAMETER Experiment Name: At_Germinating_Seeds_P Parameter: Age (hr) Value: 24 vs. 0
  misc_feature: MA Experiment 20000180 PARAMETER Experiment Name: At_Germinating_Seeds_P Parameter: Tissue Value: Germinating Seeds
  misc_feature: MA Experiment ID: 20000184 Result: Up-regulated in Transcription
  misc_feature: MA Experiment 20000184 PARAMETER Experiment Name: At_Shoots__P Parameter: Age (day) Value: 7
  misc_feature: MA Experiment 20000184 PARAMETER Experiment Name: At_Shoots__P Parameter: Tissue Value: Shoots vs. Whole Plant
  misc_feature: MA Experiment ID: 20000495 Result: Up-regulated in Transcription
  misc_feature: MA Experiment 20000495 PARAMETER Experiment Name: At_Guard_Cells_P Parameter: Harvest Date Value: 8/2/2002
  misc_feature: MA Experiment 20000495 PARAMETER Experiment Name: At_Guard_Cells_P Parameter: Organism Value: A. thaliana
  misc_feature: MA Experiment 20000495 PARAMETER Experiment Name: At_Guard_Cells_P Parameter: Tissue Value: Guard Cells vs. Leaves
  misc_feature: MA Experiment ID: 20001558 Result: Up-regulated in Transcription
  misc_feature: MA Experiment 20001558 PARAMETER Experiment Name: At_Drought_Soil_Dry_P Parameter: Age (day) Value: 27
  misc_feature: MA Experiment 20001558 PARAMETER Experiment Name: At_Drought_Soil_Dry_P Parameter: Organism Value: A. thaliana
  misc_feature: MA Experiment 20001558 PARAMETER Experiment Name: At_Drought_Soil_Dry_P Parameter: Plant Line Value: WS
  misc_feature: MA Experiment 20001558 PARAMETER Experiment Name: At_Drought_Soil_Dry_P Parameter: Post Timepoint (hr) Value: 6
  misc_feature: MA Experiment 20001558 PARAMETER Experiment Name: At_Drought_Soil_Dry_P Parameter: Post-Treatment Value: Re-Water vs. No Drought
  misc_feature: MA Experiment 20001558 PARAMETER Experiment Name: At_Drought_Soil_Dry_P Parameter: Timepoint (day) Value: 13
  misc_feature: MA Experiment 20001558 PARAMETER Experiment Name: At_Drought_Soil_Dry_P Parameter: Treatment Value: Drought vs. No Drought
  misc_feature: MA Experiment ID: 20001911 Result: Down-regulated in Transcription
  misc_feature: MA Experiment 20001911 PARAMETER Experiment Name: At_Drought_Reproduction_P Parameter: Age (day) Value: 40
  misc_feature: MA Experiment 20001911 PARAMETER Experiment Name: At_Drought_Reproduction_P Parameter: Organism Value: A. thaliana
  misc_feature: MA Experiment 20001911 PARAMETER Experiment Name: At_Drought_Reproduction_P Parameter: Plant Line Value: WS
  misc_feature: MA Experiment 20001911 PARAMETER Experiment Name: At_Drought_Reproduction_P Parameter: Timepoint (day) Value: 10
  misc_feature: MA Experiment 20001911 PARAMETER Experiment Name: At_Drought_Reproduction_P Parameter: Tissue Value: Flowers
  misc_feature: MA Experiment 20001911 PARAMETER Experiment Name: At_Drought_Reproduction_P Parameter: Treatment Value: Drought vs. No Drought
ataactagagagagaaaccaatctttttagtgagagagaaatcttagagctgagctaagaaaaatgtcaaaagaagtgagtgaagaaggaagacatggcaaagactacgtggatccacctccagctccacttctagacatggctgagcttaagctctggtctttctacagagctatcatcgcagagttcatcgccactctcctcttcctctatgtaacccagctacagtcattggccacaaaaaccaaaccggtccttgtggcggtgttggtttactcggcattgcgtgggcctttggtggcatgatctttgtcctcgtctattgcaccgccggtatctccggaggtcacattaacccagctgtgacatttggtctgttcttggctcgtaaagtgtcgctccctagagcagttgcttacatggtggctcagtgtcttggagccatttgtggagttggactcgttaaggcctttatgatgactccatacaaacgtctcggaggcggagctaacaccgtagctgatggttatagcaccggaactgctcttggtgctgagattatcggcacatttgtcttggtttacactgtcttctctgccactgaccccaaaagaagtgcccgtgactctcacgtcccggttttggctccgttacctataggatttgctgtgttcatggtgcatttggctactatccccataactggaactgggattaatccagctagaagctttggtgctgctgttatctacaacaatgagaaagcttgggacgaccattggatcttttgggttggaccattcgtgggagcattagcagcagcagcataccatcaatatatcttgagagctgcagcaatcaaagccttggcttcattccgcagcaaccccaccaattgatgattatgagacttcttagaacagtttgagatctttttttgtgtgtttaatgagagatatttgtgtcttttaatttgatgtaatcggatttattcattctcatagtttagtttggtttaattcatctttgtccgttgctttctttcatgtagggcatcttatgattcacttttatactatagtccgaattaaaacatttgttaagactttatatgaacccacatgcatgttcgtataaaacattccttggtgt

SEQ ID NO: 23386 - protein, 198 aa, Arabidopsis thaliana
  peptide (1)..(198): Ceres Seq. ID no. 12370402
  misc_feature (1)..(177): Pfam Name: Major intrinsic protein Pfam Description: Major intrinsic protein
  misc_feature (1)..(198): Homolog of NCBI NO: 1168480 NR Description: AQUAPORIN
  misc_feature (1)..(198): Homolog of NCBI NO: 7441276 NR Description: mipE protein - common ice plant
  misc_feature (1)..(198): Homolog of NCBI NO: 7441266 NR Description: plasma membrane major intrinsic protein 2 - beet
  misc_feature (1)..(198): Homolog of NCBI NO: 17940742 NR Description: aquaporin-like protein [Petunia x hybrida]
  misc_feature (1)..(198): Homolog of NCBI NO: 8071628 NR Description: putative aquaporin PIP2-2 [Vitis berlandieri x
  misc_feature (1)..(198): Homolog of NCBI NO: 2306917 NR Description: plasma membrane intrinsic protein [Arabidopsis
  misc_feature (1)..(198): Homolog of NCBI NO: 1688296 NR Description: plasma membrane intrinsic protein PIP3
  misc_feature (1)..(198): Homolog of NCBI NO: 15236267 NR Description: plasma membrane intrinsic protein (SIMIP)
  misc_feature (1)..(198): Homolog of NCBI NO: 11119335 NR Description: aquaporin [Brassica oleracea]
  misc_feature (1)..(198): Homolog of NCBI NO: 15227302 NR Description: putative plasma membrane intrinsic protein
MIFVLVYCTAGISGGHINPAVTFGLFLARKVSLPRAVAYMVAQCLGAICGVGLVKAFMMTPYKRLGGGANTVADGYSTGTALGAEIIGTFVLVYTVFSATDPKRSARDSHVPVLAPLPIGFAVFMVHLATIPITGTGINPARSFGAAVIYNNEKAWDDHWIFWVGPFVGALAAAAYHQYILRAAAIKALASFRSNPTN

SEQ ID NO: 23387 - protein, 159 aa, Arabidopsis thaliana
  peptide (1)..(159): Ceres Seq. ID no. 12370403
  misc_feature (1)..(138): Pfam Name: Major intrinsic protein Pfam Description: Major intrinsic protein
  misc_feature (1)..(159): Homolog of NCBI NO: 1168480 NR Description: AQUAPORIN
  misc_feature (1)..(159): Homolog of NCBI NO: 7441276 NR Description: mipE protein - common ice plant
  misc_feature (1)..(159): Homolog of NCBI NO: 7441266 NR Description: plasma membrane major intrinsic protein 2 - beet
  misc_feature (1)..(159): Homolog of NCBI NO: 17940742 NR Description: aquaporin-like protein [Petunia x hybrida]
  misc_feature (1)..(159): Homolog of NCBI NO: 8071628 NR Description: putative aquaporin PIP2-2 [Vitis berlandieri x
  misc_feature (1)..(159): Homolog of NCBI NO: 2306917 NR Description: plasma membrane intrinsic protein [Arabidopsis
  misc_feature (1)..(159): Homolog of NCBI NO: 1688296 NR Description: plasma membrane intrinsic protein PIP3
  misc_feature (1)..(159): Homolog of NCBI NO: 15236267 NR Description: plasma membrane intrinsic protein (SIMIP)
  misc_feature (1)..(159): Homolog of NCBI NO: 11119335 NR Description: aquaporin [Brassica oleracea]
  misc_feature (1)..(159): Homolog of NCBI NO: 15227302 NR Description: putative plasma membrane intrinsic protein
MVAQCLGAICGVGLVKAFMMTPYKRLGGGANTVADGYSTGTALGAEIIGTFVLVYTVFSATDPKRSARDSHVPVLAPLPIGFAVFMVHLATIPITGTGINPARSFGAAVIYNNEKAWDDHWIFWVGPFVGALAAAAYHQYILRAAAIKALASFRSNPTN

SEQ ID NO: 23388 - protein, 141 aa, Arabidopsis thaliana
  peptide (1)..(141): Ceres Seq. ID no. 12370404
  misc_feature (1)..(120): Pfam Name: Major intrinsic protein Pfam Description: Major intrinsic protein
  misc_feature (1)..(141): Homolog of NCBI NO: 1168480 NR Description: AQUAPORIN
  misc_feature (1)..(141): Homolog of NCBI NO: 7441276 NR Description: mipE protein - common ice plant
  misc_feature (1)..(141): Homolog of NCBI NO: 7441266 NR Description: plasma membrane major intrinsic protein 2 - beet
  misc_feature (1)..(141): Homolog of NCBI NO: 17940742 NR Description: aquaporin-like protein [Petunia x hybrida]
  misc_feature (1)..(141): Homolog of NCBI NO: 8071628 NR Description: putative aquaporin PIP2-2 [Vitis berlandieri x
  misc_feature (1)..(141): Homolog of NCBI NO: 2306917 NR Description: plasma membrane intrinsic protein [Arabidopsis
  misc_feature (1)..(141): Homolog of NCBI NO: 1688296 NR Description: plasma membrane intrinsic protein PIP3
  misc_feature (1)..(141): Homolog of NCBI NO: 15236267 NR Description: plasma membrane intrinsic protein (SIMIP)
  misc_feature (1)..(141): Homolog of NCBI NO: 11119335 NR Description: aquaporin [Brassica oleracea]
  misc_feature (1)..(141): Homolog of NCBI NO: 15227302 NR Description: putative plasma membrane intrinsic protein
MMTPYKRLGGGANTVADGYSTGTALGAEIIGTFVLVYTVFSATDPKRSARDSHVPVLAPLPIGFAVFMVHLATIPITGTGINPARSFGAAVIYNNEKAWDDHWIFWVGPFVGALAAAAYHQYILRAAAIKALASFRSNPTN

SEQ ID NO: 23389 - DNA, 1218 bp, Arabidopsis thaliana
  misc_feature (1)..(1218): Ceres Seq. ID no. 12738784
  misc_feature: MA Experiment ID: 108434 Result: Up-regulated in Transcription
  misc_feature: MA Experiment 108434 PARAMETER Experiment Name: At_Root_Tips_cDNA_P Parameter: Tissue Value: Root Tips
  misc_feature: MA Experiment ID: 108435 Result: Down-regulated in Transcription
  misc_feature: MA Experiment 108435 PARAMETER Experiment Name: At_stm_Mutants_cDNA_P Parameter: Plant Line Value: wt Landsburg vs stm
  misc_feature: MA Experiment 108435 PARAMETER Experiment Name: At_stm_Mutants_cDNA_P Parameter: Tissue Value: Shoot Apical Meristem Region
  misc_feature: MA Experiment ID: 108462 Result: Down-regulated in Transcription
  misc_feature: MA Experiment 108462 PARAMETER Experiment Name: At_Germinating_Seeds_cDNA_P Parameter: Age (day) Value: 2 vs. 0
  misc_feature: MA Experiment 108462 PARAMETER Experiment Name: At_Germinating_Seeds_cDNA_P Parameter: Tissue Value: Germinating Seeds
  misc_feature: MA Experiment ID: 108463 Result: Down-regulated in Transcription
  misc_feature: MA Experiment 108463 PARAMETER Experiment Name: At_Germinating_Seeds_cDNA_P Parameter: Age (day) Value: 3 vs. 0
  misc_feature: MA Experiment 108463 PARAMETER Experiment Name: At_Germinating_Seeds_cDNA_P Parameter: Tissue Value: Germinating Seeds
  misc_feature: MA Experiment ID: 108464 Result: Down-regulated in Transcription
  misc_feature: MA Experiment 108464 PARAMETER Experiment Name: At_Germinating_Seeds_cDNA_P Parameter: Age (day) Value: 4 vs. 0
  misc_feature: MA Experiment 108464 PARAMETER Experiment Name: At_Germinating_Seeds_cDNA_P Parameter: Tissue Value: Germinating Seeds
  misc_feature: MA Experiment ID: 108488 Result: Up-regulated in Transcription
  misc_feature: MA Experiment ID: 20000071 Result: Up-regulated in Transcription
  misc_feature: MA Experiment 20000071 PARAMETER Experiment Name: At_100uM_ABA_Mutants_cDNA_P Parameter: Plant Line Value: CS8104
  misc_feature: MA Experiment 20000071 PARAMETER Experiment Name: At_100uM_ABA_Mutants_cDNA_P Parameter: Timepoint (hr) Value: 6
  misc_feature: MA Experiment 20000071 PARAMETER Experiment Name: At_100uM_ABA_Mutants_cDNA_P Parameter: Tissue Value: Aerial
  misc_feature: MA Experiment 20000071 PARAMETER Experiment Name: At_100uM_ABA_Mutants_cDNA_P Parameter: Treatment Value: 100uM ABA vs. No Treatment
  misc_feature: MA Experiment ID: 20000184 Result: Up-regulated in Transcription
  misc_feature: MA Experiment 20000184 PARAMETER Experiment Name: At_Shoots__P Parameter: Age (day) Value: 7
  misc_feature: MA Experiment 20000184 PARAMETER Experiment Name: At_Shoots__P Parameter: Tissue Value: Shoots vs. Whole Plant
  misc_feature: MA Experiment ID: 20000185 Result: Down-regulated in Transcription
  misc_feature: MA Experiment 20000185 PARAMETER Experiment Name: At_Roots__P Parameter: Age (day) Value: 7 vs. 21
  misc_feature: MA Experiment 20000185 PARAMETER Experiment Name: At_Roots__P Parameter: Organism Value: A. thaliana
  misc_feature: MA Experiment 20000185 PARAMETER Experiment Name: At_Roots__P Parameter: Tissue Value: Roots vs. Whole Plant
  misc_feature: MA Experiment ID: 20000234 Result: Up-regulated in Transcription
  misc_feature: MA Experiment 20000234 PARAMETER Experiment Name: At_Siliques_P Parameter: Age (day) Value: 21
  misc_feature: MA Experiment 20000234 PARAMETER Experiment Name: At_Siliques_P Parameter: Organism Value: A. thaliana
  misc_feature: MA Experiment 20000234 PARAMETER Experiment Name: At_Siliques_P Parameter: Plant Line Value: WS
  misc_feature: MA Experiment 20000234 PARAMETER Experiment Name: At_Siliques_P Parameter: Tissue Value: Less Than 5mm Siliques vs. Whole Plant
  misc_feature: MA Experiment ID: 20000437 Result: Down-regulated in Transcription
  misc_feature: MA Experiment 20000437 PARAMETER Experiment Name: At_Drought_P Parameter: Age (day) Value: 8
  misc_feature: MA Experiment 20000437 PARAMETER Experiment Name: At_Drought_P Parameter: Organism Value: A. thaliana
  misc_feature: MA Experiment 20000437 PARAMETER Experiment Name: At_Drought_P Parameter: Plant Line Value: WS
  misc_feature: MA Experiment 20000437 PARAMETER Experiment Name: At_Drought_P Parameter: Timepoint (hr) Value: 24
  misc_feature: MA Experiment 20000437 PARAMETER Experiment Name: At_Drought_P Parameter: Tissue Value: Whole Plant
  misc_feature: MA Experiment 20000437 PARAMETER Experiment Name: At_Drought_P Parameter: Treatment Value: Drought vs. No Drought
  misc_feature: MA Experiment ID: 20000438 Result: Up-regulated in Transcription
  misc_feature: MA Experiment 20000438 PARAMETER Experiment Name: At_Shoots__P Parameter: Age (day) Value: 14
  misc_feature: MA Experiment 20000438 PARAMETER Experiment Name: At_Shoots__P Parameter: Tissue Value: Shoots vs. Whole Plant
  misc_feature: MA Experiment ID: 20000439 Result: Down-regulated in Transcription
  misc_feature: MA Experiment 20000439 PARAMETER Experiment Name: At_Roots__P Parameter: Age (day) Value: 14 vs. 21
  misc_feature: MA Experiment 20000439 PARAMETER Experiment Name: At_Roots__P Parameter: Organism Value: A. thaliana
  misc_feature: MA Experiment 20000439 PARAMETER Experiment Name: At_Roots__P Parameter: Tissue Value: Roots vs. Whole Plant
  misc_feature: MA Experiment ID: 20000495 Result: Up-regulated in Transcription
  misc_feature: MA Experiment 20000495 PARAMETER Experiment Name: At_Guard_Cells_P Parameter: Harvest Date Value: 8/2/2002
  misc_feature: MA Experiment 20000495 PARAMETER Experiment Name: At_Guard_Cells_P Parameter: Organism Value: A. thaliana
  misc_feature: MA Experiment 20000495 PARAMETER Experiment Name: At_Guard_Cells_P Parameter: Tissue Value: Guard Cells vs. Leaves
  misc_feature: MA Experiment ID: 20001451 Result: Up-regulated in Transcription
  misc_feature: MA Experiment 20001451 PARAMETER Experiment Name: At_Far-red-induction_P Parameter: Age (day) Value: 7
  misc_feature: MA Experiment 20001451 PARAMETER Experiment Name: At_Far-red-induction_P Parameter: Light Value: Far-red vs. White
  misc_feature: MA Experiment 20001451 PARAMETER Experiment Name: At_Far-red-induction_P Parameter: Organism Value: A. thaliana
  misc_feature: MA Experiment 20001451 PARAMETER Experiment Name: At_Far-red-induction_P Parameter: Plant Line Value: Columbia
  misc_feature: MA Experiment 20001451 PARAMETER Experiment Name: At_Far-red-induction_P Parameter: Timepoint (hr) Value: 24
  misc_feature: MA Experiment 20001451 PARAMETER Experiment Name: At_Far-red-induction_P Parameter: Tissue Value: Whole Plant
  misc_feature: MA Experiment ID: 20001757 Result: Up-regulated in Transcription
  misc_feature: MA Experiment 20001757 PARAMETER Experiment Name: At_50mM_NH4NO3_L-to-H_P Parameter: Timepoint (hr) Value: 6
  misc_feature: MA Experiment 20001757 PARAMETER Experiment Name: At_50mM_NH4NO3_L-to-H_P Parameter: Tissue Value: Leaf
  misc_feature: MA Experiment 20001757 PARAMETER Experiment Name: At_50mM_NH4NO3_L-to-H_P Parameter: Treatment Value: 50mM NH4NO3 vs 100mM Mannitol
atcttatctcaactctcaaaatcatcttcttcacccaaaaacccctaaaagccttatcccttcttcttcccatggctgcttcagctcctctctcgctctctcttccttcaaccctaaatctcttcctttcggcgtctccagacctgcctccgtttccctcttatctccttccctctcctttaaactcaattccgactccgtttccttctccatcgccgccaaatggaactctcccgcttctcgcttcgtccgtaacgttgcgattacctcagagttcgaggtggaagaagatggtttcgctgacgtcgctccgccaaaagagcaatctttctctgctgaccttaaactcttcgttggtaaccttcctttcaacgttgacagtgctcaggctcgctcagctctttgagagtgccggaaatgttgagatggttgaggtaatctatgacaaaattacaggaagaagcagaggttttggattcgtgactatgtcttcagtttctgaagttgaggcagctgctcagcagttcaatggctatgagttggatggtagacctttgagagtcaatgctggtcccccaccaccaaagagggaagatggtttctccagaggacctaggagcagctttggaagctcaggttctggatatggaggaggtggtggttctggtgctggttcaggaaaccgtgtttatgtgggtaacctctcttggggagttgatgacatggctcttgagagtttgttctcggagcaaggaaaggttgttgaggccagagtcatctacgacagggacagtggtcgatccaagggttttggatttgtgacatacgactcttctcaagaggtccaaaatgccatcaagtccttggatggtgctgatttggacggtagacaaattagagtctcggaagctgaggctaggcctccaaggcgccaatattgagcaccaatctatgacttcctattctcaaaaacgcatattctggagggcgcttcgaagtaaagagggtttgtgagatgatggcagtttcagacggtactaagctcttagcttcgcctatgtttgttgccttggatgcaagaaggtcgtaaaggaatggtctttttttttttgagaaacgtataattaagatagaaactggagagaccatgttcttgtctgtctgaatgctgccattgactgcttcgctttggttttgattcaatttttttttctctcc

SEQ ID NO: 23390 - protein, 312 aa, Arabidopsis thaliana
  peptide (1)..(312): Ceres Seq. ID no. 12738785
  misc_feature (229)..(300): Pfam Name: RNA recognition motif. (a.k.a. RRM, RBD, or RNP domain) Pfam Description: RNA recognition motif. (a.k.a. RRM, RBD, or RNP
  misc_feature (224)..(312): Homolog of NCBI NO: 18921322 NR Description: putative ribonucleoprotein [Oryza sativa]
  misc_feature (130)..(312): Homolog of NCBI NO: 1350821 NR Description: 31 kDa ribonucleoprotein, chloroplast precursor
  misc_feature (199)..(312): Homolog of NCBI NO: 30693824 NR Description: 29 kDa ribonucleoprotein, chloroplast
  misc_feature (22)..(225): Homolog of NCBI NO: 30693824 NR Description: 29 kDa ribonucleoprotein, chloroplast
  misc_feature (199)..(312): Homolog of NCBI NO: 15231817 NR Description: 29 kDa ribonucleoprotein, chloroplast precursor
  misc_feature (199)..(312): Homolog of NCBI NO: 681904 NR Description: cp29 [Arabidopsis thaliana]
  misc_feature (22)..(225): Homolog of NCBI NO: 15231817 NR Description: 29 kDa ribonucleoprotein, chloroplast precursor
  misc_feature (22)..(225): Homolog of NCBI NO: 681904 NR Description: cp29 [Arabidopsis thaliana]
  misc_feature (24)..(312): Homolog of NCBI NO: 21617920 NR Description: putative RNA-binding protein [Arabidopsis
  misc_feature (24)..(312): Homolog of NCBI NO: 15228102 NR Description: chloroplast RNA-binding protein cp29, putative
LISTLKIIFFTQKPLKALSLLLPMAASAPLSLSLPSTLNLFLSASPDLPPFPSYLLPSPLNSIPTPFPSPSPPNGTLPLLASSVTLRLPQSSRWKKMVSLTSLRQKSNLSLLTLNSSLVTFLSTLTVLRLAQLFESAGNVEMVEVIYDKITGRSRGFGFVTMSSVSEVEAAAQQFNGYELDGRPLRVNAGPPPPKREDGFSRGPRSSFGSSGSGYGGGGGSGAGSGNRVYVGNLSWGVDDMALESLFSEQGKVVEARVIYDRDSGRSKGFGFVTYDSSQEVQNAIKSLDGADLDGRQIRVSEAEARPPRRQY

SEQ ID NO: 23391 - protein, 289 aa, Arabidopsis thaliana
  peptide (1)..(289): Ceres Seq. ID no. 12738786
  misc_feature (206)..(277): Pfam Name: RNA recognition motif. (a.k.a. RRM, RBD, or RNP domain) Pfam Description: RNA recognition motif. (a.k.a. RRM, RBD, or RNP
  misc_feature (1)..(289): Homolog of NCBI NO: 15228102 NR Description: chloroplast RNA-binding protein cp29, putative
  misc_feature (1)..(202): Homolog of NCBI NO: 681904 NR Description: cp29 [Arabidopsis thaliana]
  misc_feature (1)..(289): Homolog of NCBI NO: 21617920 NR Description: putative RNA-binding protein [Arabidopsis
  misc_feature (201)..(289): Homolog of NCBI NO: 18921322 NR Description: putative ribonucleoprotein [Oryza sativa]
  misc_feature (107)..(289): Homolog of NCBI NO: 1350821 NR Description: 31 kDa ribonucleoprotein, chloroplast precursor
  misc_feature (176)..(289): Homolog of NCBI NO: 30693824 NR Description: 29 kDa ribonucleoprotein, chloroplast
  misc_feature (1)..(202): Homolog of NCBI NO: 30693824 NR Description: 29 kDa ribonucleoprotein, chloroplast
  misc_feature (176)..(289): Homolog of NCBI NO: 15231817 NR Description: 29 kDa ribonucleoprotein, chloroplast precursor
  misc_feature (176)..(289): Homolog of NCBI NO: 681904 NR Description: cp29 [Arabidopsis thaliana]
  misc_feature (1)..(202): Homolog of NCBI NO: 15231817 NR Description: 29 kDa ribonucleoprotein, chloroplast precursor
MAASAPLSLSLPSTLNLFLSASPDLPPFPSYLLPSPLNSIPTPFPSPSPPNGTLPLLASSVTLRLPQSSRWKKMVSLTSLRQKSNLSLLTLNSSLVTFLSTLTVLRLAQLFESAGNVEMVEVIYDKITGRSRGFGFVTMSSVSEVEAAAQQFNGYELDGRPLRVNAGPPPPKREDGFSRGPRSSFGSSGSGYGGGGGSGAGSGNRVYVGNLSWGVDDMALESLFSEQGKVVEARVIYDRDSGRSKGFGFVTYDSSQEVQNAIKSLDGADLDGRQIRVSEAEARPPRRQY

SEQ ID NO: 23392 - protein, 216 aa, Arabidopsis thaliana
  peptide (1)..(216): Ceres Seq. ID no. 12738787
  misc_feature (133)..(204): Pfam Name: RNA recognition motif. (a.k.a. RRM, RBD, or RNP domain) Pfam Description: RNA recognition motif. (a.k.a. RRM, RBD, or RNP
  misc_feature (128)..(216): Homolog of NCBI NO: 18921322 NR Description: putative ribonucleoprotein [Oryza sativa]
  misc_feature (34)..(216): Homolog of NCBI NO: 1350821 NR Description: 31 kDa ribonucleoprotein, chloroplast precursor
  misc_feature (103)..(216): Homolog of NCBI NO: 30693824 NR Description: 29 kDa ribonucleoprotein, chloroplast
  misc_feature (1)..(129): Homolog of NCBI NO: 30693824 NR Description: 29 kDa ribonucleoprotein, chloroplast
  misc_feature (103)..(216): Homolog of NCBI NO: 15231817 NR Description: 29 kDa ribonucleoprotein, chloroplast precursor
  misc_feature (103)..(216): Homolog of NCBI NO: 681904 NR Description: cp29 [Arabidopsis thaliana]
  misc_feature (1)..(129): Homolog of NCBI NO: 15231817 NR Description: 29 kDa ribonucleoprotein, chloroplast precursor
  misc_feature (1)..(129): Homolog of NCBI NO: 681904 NR Description: cp29 [Arabidopsis thaliana]
  misc_feature (1)..(216): Homolog of NCBI NO: 21617920 NR Description: putative RNA-binding protein [Arabidopsis
  misc_feature (1)..(216): Homolog of NCBI NO: 15228102 NR Description: chloroplast RNA-binding protein cp29, putative
MVSLTSLRQKSNLSLLTLNSSLVTFLSTLTVLRLAQLFESAGNVEMVEVIYDKITGRSRGFGFVTMSSVSEVEAAAQQFNGYELDGRPLRVNAGPPPPKREDGFSRGPRSSFGSSGSGYGGGGGSGAGSGNRVYVGNLSWGVDDMALESLFSEQGKVVEARVIYDRDSGRSKGFGFVTYDSSQEVQNAIKSLDGADLDGRQIRVSEAEARPPRRQY

SEQ ID NO: 23393 - DNA, 1222 bp, Arabidopsis thaliana
  misc_feature (1)..(1222): Ceres Seq. ID no. 12324946
  misc_feature: MA Experiment ID: 108434 Result: Up-regulated in Transcription
  misc_feature: MA Experiment 108434 PARAMETER Experiment Name: At_Root_Tips_cDNA_P Parameter: Tissue Value: Root Tips
  misc_feature: MA Experiment ID: 108461 Result: Up-regulated in Transcription
  misc_feature: MA Experiment 108461 PARAMETER Experiment Name: At_Germinating_Seeds_cDNA_P Parameter: Age (day) Value: 1 vs. 0
  misc_feature: MA Experiment 108461 PARAMETER Experiment Name: At_Germinating_Seeds_cDNA_P Parameter: Tissue Value: Germinating Seeds
  misc_feature: MA Experiment ID: 20000179 Result: Up-regulated in Transcription
  misc_feature: MA Experiment 20000179 PARAMETER Experiment Name: At_Germinating_Seeds_P Parameter: Age (hr) Value: 6 vs. 0
  misc_feature: MA Experiment 20000179 PARAMETER Experiment Name: At_Germinating_Seeds_P Parameter: Tissue Value: Germinating Seeds
  misc_feature: MA Experiment ID: 20000180 Result: Up-regulated in Transcription
  misc_feature: MA Experiment 20000180 PARAMETER Experiment Name: At_Germinating_Seeds_P Parameter: Age (hr) Value: 24 vs. 0
  misc_feature: MA Experiment 20000180 PARAMETER Experiment Name: At_Germinating_Seeds_P Parameter: Tissue Value: Germinating Seeds
  misc_feature: MA Experiment ID: 20000224 Result: Up-regulated in Transcription
  misc_feature: MA Experiment ID: 20000227 Result: Up-regulated in Transcription
  misc_feature: MA Experiment 20000227 PARAMETER Experiment Name: At_Root-Tips-vs-Tops_P Parameter: Tissue Value: Root Tips vs. Root Tops
  misc_feature: MA Experiment ID: 20001560 Result: Up-regulated in Transcription
  misc_feature: MA Experiment 20001560 PARAMETER Experiment Name: At_Drought_Soil_Dry_P Parameter: Age (day) Value: 28
  misc_feature: MA Experiment 20001560 PARAMETER Experiment Name: At_Drought_Soil_Dry_P Parameter: Organism Value: A. thaliana
  misc_feature: MA Experiment 20001560 PARAMETER Experiment Name: At_Drought_Soil_Dry_P Parameter: Plant Line Value: WS
  misc_feature: MA Experiment 20001560 PARAMETER Experiment Name: At_Drought_Soil_Dry_P Parameter: Post Timepoint (hr) Value: None
  misc_feature: MA Experiment 20001560 PARAMETER Experiment Name: At_Drought_Soil_Dry_P Parameter: Post-Treatment Value: None
  misc_feature: MA Experiment 20001560 PARAMETER Experiment Name: At_Drought_Soil_Dry_P Parameter: Timepoint (day) Value: 14
  misc_feature: MA Experiment 20001560 PARAMETER Experiment Name: At_Drought_Soil_Dry_P Parameter: Treatment Value: Drought vs. No Drought
aaaaaatccgggacgataattctcgcacacgttctccatcactttccctcgatccaaaaccagagtgggaactacacgcgaatcgaatcataaatggaatgtgaattttgaaatcgaggaagaagacgaaatcggagcattattggattgagttttgaagtttttaggagaaggaaatgatggcgtcggatccaaaactgaaggctgagatcggagccgatggtcttgcaagagaagctcctgttattgcttacacagagaagataatcgaggaagagcaagttcagctgaggaaatacattgaggagaactatacaaaaattagggatgttgaaagggaatttggaaacctttcaatggaattgaaactcactgctggacctaagaaagcagcaatggaacacttgagaaagaaaatcgaagtctcaactgaaaggatccatgctgctaagttgaaagaagaagaagcgcgaaaggcatttgaagcagcatcaaaagttgtgaaggatgaagaagcaacaaaacagagtctttgcgaagatttaaacagtctggtacaacaaagcagcaatacgcagtacgccagacttgaggaattgaaaagaagactagaagcgttgaatccaaatcgatcatctacttctattcagcaagtgcaagaaccggagactaaatctgtagtagacagcgcaccagcagccaatgcgaaccaaactcacccgggaaaacctgaaaataaccacgggaacgaggaaggtggtaaagaacatggacagagaccagcaacagctgaaggagaatcaaaagcgaaaaagaaaccacagaatcaagggaggggaagaggaattggaataatgaacaaaggcagaggaggttggacaggtgctggattcgatgtcgatggtagaaattgagatacatatatctagataatccatataccgaaagtgtcatttcgaatcagaagtatgtcaaatatattgttaccaggtatgttctatcatcttttaacatcgatggaccagtacgtagccacaaagacttctcattttctcatacacttgtgttactgaaaagaaatccatccaatcatatttggactgttcattgatcatctcttgtgtatgtctccaattttgtgcaattgggtttgatgtaataatctgagaacagttaagtttgattgtctaagaggttagagtgaggcatgattcgttatggc

SEQ ID NO: 23394 - protein, 245 aa, Arabidopsis thaliana
  peptide (1)..(245): Ceres Seq. ID no. 12324947
  misc_feature (6)..(239): Homolog of NCBI NO: 37531870 NR Description: hypothetical protein [Oryza sativa (japonica
  misc_feature (46)..(244): Homolog of NCBI NO: 37531870 NR Description: hypothetical protein [Oryza sativa (japonica
  misc_feature (1)..(100): Homolog of NCBI NO: 10177883 NR Description: gene_id:MIO24.2~unknown protein [Arabidopsis
  misc_feature (2)..(245): Homolog of NCBI NO: 21593113 NR Description: unknown [Arabidopsis thaliana]
  misc_feature (1)..(245): Homolog of NCBI NO: 18423326 NR Description: expressed protein
MMASDPKLKAEIGADGLAREAPVIAYTEKIIEEEQVQLRKYIEENYTKIRDVEREFGNLSMELKLTAGPKKAAMEHLRKKIEVSTERIHAAKLKEEEARKAFEAASKVVKDEEATKQSLCEDLNSLVQQSSNTQYARLEELKRRLEALNPNRSSTSIQQVQEPETKSVVDSAPAANANQTHPGKPENNHGNEEGGKEHGQRPATAEGESKAKKKPQNQGRGRGIGIMNKGRGGWTGAGFDVDGRN

SEQ ID NO: 23395 - protein, 244 aa, Arabidopsis thaliana
  peptide (1)..(244): Ceres Seq. ID no. 12324948
  misc_feature (5)..(238): Homolog of NCBI NO: 37531870 NR Description: hypothetical protein [Oryza sativa (japonica
  misc_feature (45)..(243): Homolog of NCBI NO: 37531870 NR Description: hypothetical protein [Oryza sativa (japonica
  misc_feature (1)..(99): Homolog of NCBI NO: 10177883 NR Description: gene_id:MIO24.2~unknown protein [Arabidopsis
  misc_feature (1)..(244): Homolog of NCBI NO: 21593113 NR Description: unknown [Arabidopsis thaliana]
  misc_feature (1)..(244): Homolog of NCBI NO: 18423326 NR Description: expressed protein
MASDPKLKAEIGADGLAREAPVIAYTEKIIEEEQVQLRKYIEENYTKIRDVEREFGNLSMELKLTAGPKKAAMEHLRKKIEVSTERIHAAKLKEEEARKAFEAASKVVKDEEATKQSLCEDLNSLVQQSSNTQYARLEELKRRLEALNPNRSSTSIQQVQEPETKSVVDSAPAANANQTHPGKPENNHGNEEGGKEHGQRPATAEGESKAKKKPQNQGRGRGIGIMNKGRGGWTGAGFDVDGRN

SEQ ID NO: 23396 - protein, 185 aa, Arabidopsis thaliana
  peptide (1)..(185): Ceres Seq. ID no. 12324949
  misc_feature (1)..(179): Homolog of NCBI NO: 37531870 NR Description: hypothetical protein [Oryza sativa (japonica
  misc_feature (1)..(184): Homolog of NCBI NO: 37531870 NR Description: hypothetical protein [Oryza sativa (japonica
  misc_feature (1)..(40): Homolog of NCBI NO: 10177883 NR Description: gene_id:MIO24.2~unknown protein [Arabidopsis
  misc_feature (1)..(185): Homolog of NCBI NO: 21593113 NR Description: unknown [Arabidopsis thaliana]
  misc_feature (1)..(185): Homolog of NCBI NO: 18423326 NR Description: expressed protein
MELKLTAGPKKAAMEHLRKKIEVSTERIHAAKLKEEEARKAFEAASKVVKDEEATKQSLCEDLNSLVQQSSNTQYARLEELKRRLEALNPNRSSTSIQQVQEPETKSVVDSAPAANANQTHPGKPENNHGNEEGGKEHGQRPATAEGESKAKKKPQNQGRGRGIGIMNKGRGGWTGAGFDVDGRN

SEQ ID NO: 23397 - DNA, 1484 bp, Arabidopsis thaliana
  misc_feature (1)..(1484): Ceres Seq. ID no. 13487099
  misc_feature: MA Experiment ID: 108464 Result: Up-regulated in Transcription
  misc_feature: MA Experiment 108464 PARAMETER Experiment Name: At_Germinating_Seeds_cDNA_P Parameter: Age (day) Value: 4 vs. 0
  misc_feature: MA Experiment 108464 PARAMETER Experiment Name: At_Germinating_Seeds_cDNA_P Parameter: Tissue Value: Germinating Seeds
  misc_feature: MA Experiment ID: 108488 Result: Down-regulated in Transcription
  misc_feature: MA Experiment ID: 108668 Result: Up-regulated in Transcription
  misc_feature: MA Experiment 108668 PARAMETER Experiment Name: At_2mM_SA_cDNA_P Parameter: Plant Line Value: WS
  misc_feature: MA Experiment 108668 PARAMETER Experiment Name: At_2mM_SA_cDNA_P Parameter: Timepoint (hr) Value: 6
  misc_feature: MA Experiment 108668 PARAMETER Experiment Name: At_2mM_SA_cDNA_P Parameter: Treatment Value: 2mM SA vs. No Treatment
  misc_feature: MA Experiment ID: 20000090 Result: Up-regulated in Transcription
  misc_feature: MA Experiment ID: 20000182 Result: Up-regulated in Transcription
  misc_feature: MA Experiment 20000182 PARAMETER Experiment Name: At_2mM_SA_P Parameter: Age (day) Value: 14
  misc_feature: MA Experiment 20000182 PARAMETER Experiment Name: At_2mM_SA_P Parameter: Organism Value: A. thaliana
  misc_feature: MA Experiment 20000182 PARAMETER Experiment Name: At_2mM_SA_P Parameter: Plant Line Value: WS
  misc_feature: MA Experiment 20000182 PARAMETER Experiment Name: At_2mM_SA_P Parameter: Timepoint (hr) Value: 6
  misc_feature: MA Experiment 20000182 PARAMETER Experiment Name: At_2mM_SA_P Parameter: Tissue Value: Aerial
  misc_feature: MA Experiment 20000182 PARAMETER Experiment Name: At_2mM_SA_P Parameter: Treatment Value: 2mM SA vs. No Treatment
  misc_feature: MA Experiment ID: 20000527 Result: Down-regulated in Transcription
  misc_feature: MA Experiment 20000527 PARAMETER Experiment Name: At_10percent_PEG_P Parameter: Age (day) Value: 20
  misc_feature: MA Experiment 20000527 PARAMETER Experiment Name: At_10percent_PEG_P Parameter: Organism Value: A. thaliana
  misc_feature: MA Experiment 20000527 PARAMETER Experiment Name: At_10percent_PEG_P Parameter: Plant Line Value: WS
  misc_feature: MA Experiment 20000527 PARAMETER Experiment Name: At_10percent_PEG_P Parameter: Timepoint (day) Value: 20
  misc_feature: MA Experiment 20000527 PARAMETER Experiment Name: At_10percent_PEG_P Parameter: Tissue Value: Whole Plant
  misc_feature: MA Experiment 20000527 PARAMETER Experiment Name: At_10percent_PEG_P Parameter: Treatment Value: 10percent PEG vs. No Treatment
  misc_feature: MA Experiment ID: 20000709 Result: Down-regulated in Transcription
  misc_feature: MA Experiment 20000709 PARAMETER Experiment Name: At_15mM_NH4NO3_L-to-H_P Parameter: Age (hr) Value: 14
  misc_feature: MA Experiment 20000709 PARAMETER Experiment Name: At_15mM_NH4NO3_L-to-H_P Parameter: Organism Value: A. thaliana
  misc_feature: MA Experiment 20000709 PARAMETER Experiment Name: At_15mM_NH4NO3_L-to-H_P Parameter: Plant Line Value: WS
  misc_feature: MA Experiment 20000709 PARAMETER Experiment Name: At_15mM_NH4NO3_L-to-H_P Parameter: Timepoint (hr) Value: 4
  misc_feature: MA Experiment 20000709 PARAMETER Experiment Name: At_15mM_NH4NO3_L-to-H_P Parameter: Tissue Value: Aerial
  misc_feature: MA Experiment 20000709 PARAMETER Experiment Name: At_15mM_NH4NO3_L-to-H_P Parameter: Treatment Value: 15mM NH4NO3 vs. 30mM Mannitol
  misc_feature: MA Experiment ID: 20000794 Result: Up-regulated in Transcription
  misc_feature: MA Experiment 20000794 PARAMETER Experiment Name: At_Petals_P Parameter: Age (day) Value: 23-25 days
  misc_feature: MA Experiment 20000794 PARAMETER Experiment Name: At_Petals_P Parameter: Plant Line Value: WS
  misc_feature: MA Experiment 20000794 PARAMETER Experiment Name: At_Petals_P Parameter: Tissue Value: Petals vs. Whole plant
  misc_feature: MA Experiment ID: 20001558 Result: Down-regulated in Transcription
  misc_feature: MA Experiment 20001558 PARAMETER Experiment Name: At_Drought_Soil_Dry_P Parameter: Age (day) Value: 27
  misc_feature: MA Experiment 20001558 PARAMETER Experiment Name: At_Drought_Soil_Dry_P Parameter: Organism Value: A. thaliana
  misc_feature: MA Experiment 20001558 PARAMETER Experiment Name: At_Drought_Soil_Dry_P Parameter: Plant Line Value: WS
  misc_feature: MA Experiment 20001558 PARAMETER Experiment Name: At_Drought_Soil_Dry_P Parameter: Post Timepoint (hr) Value: 6
  misc_feature: MA Experiment 20001558 PARAMETER Experiment Name: At_Drought_Soil_Dry_P Parameter: Post-Treatment Value: Re-Water vs. No Drought
  misc_feature: MA Experiment 20001558 PARAMETER Experiment Name: At_Drought_Soil_Dry_P Parameter: Timepoint (day) Value: 13
  misc_feature: MA Experiment 20001558 PARAMETER Experiment Name: At_Drought_Soil_Dry_P Parameter: Treatment Value: Drought vs. No Drought
  misc_feature: MA Experiment ID: 20001560 Result: Down-regulated in Transcription
  misc_feature: MA Experiment 20001560 PARAMETER Experiment Name: At_Drought_Soil_Dry_P Parameter: Age (day) Value: 28
  misc_feature: MA Experiment 20001560 PARAMETER Experiment Name: At_Drought_Soil_Dry_P Parameter: Organism Value: A. thaliana
  misc_feature: MA Experiment 20001560 PARAMETER Experiment Name: At_Drought_Soil_Dry_P Parameter: Plant Line Value: WS
  misc_feature: MA Experiment 20001560 PARAMETER Experiment Name: At_Drought_Soil_Dry_P Parameter: Post Timepoint (hr) Value: None
  misc_feature: MA Experiment 20001560 PARAMETER Experiment Name: At_Drought_Soil_Dry_P Parameter: Post-Treatment Value: None
  misc_feature: MA Experiment 20001560 PARAMETER Experiment Name: At_Drought_Soil_Dry_P Parameter: Timepoint (day) Value: 14
  misc_feature: MA Experiment 20001560 PARAMETER Experiment Name: At_Drought_Soil_Dry_P Parameter: Treatment Value: Drought vs. No Drought
ctcttaacgtcgatcacctgtttttctctttccctctctctctatttttctcaactaggaatcaaccatgaatctcccatcattctcacttctctcttctaattctttcatggaattttcaggttagaagaagattccgggcagattatctgttgattcgaagaataccgaatacgcgtttgaaatttctgaagaattatgggatacttggacttggccttgtcgtattccaaccagccgcagactgttgaagctccagcgagcggaggaggtctcagccagaatggaaaatttagctatggatatgcaagctccgctggcaagagatcatctatggaagacttttttgaaactaggatcgacggtatcaatggagaaatagttggtctatttggagtttttgatggccatggtggagccagagcagctgagtacgtgaagcgccatcttttcagtaatctgatcacccacccaaagtttatctctgacaccaaatcagctataactgatgcttataaccatacagactccgaacttctcaagtcagaaaatagtcacaatagagacgctggttctactgcgtctacagctattcttgttggtgaccgtttagttgttgcaaatgttggtgattctagagctgttatcagcagaggcggaaaagccattgctgtgtcaagggaccataaaccggaccaaagtgatgaacgtgaaaggattgagaatgctggtggatttgtgatgtgggcaggaacttggagggtaggaggagttcttgcagtttctcgtgcgtttggtgatcggcttctgaagcaatatgttgttgctgatccagaaatccaggaagaaaagattgatgatactcttgagtttttgattctagcaagtgatggactgtgggatgttttctctaatgaggcagcagttgcaatggtaaaggaagttgaagatcccgaggactcagcgaaaaaactggtgggtgaagcaataaagagaggaagtgcagataacatcacatgtgttgtcgttcgtttcttggagaagaagtcagcttcatcaagccacattagctcttcctcctccaaggaagccaaggaaatgcctccacttggagaccttgctatctcatcgaatgaagctaagcaagtccagatcggctcagggaacaaaccagagaatgtaacgaatcgaaaaccggacactgcaagtcgctcaactgatacactgacccttgagaggaattcagtgaccgacaaggtataaatagcgattccctctattctctaggaactaaagacagtgttctcttccctcaaacacggcaaacaaacttactgatcgttgatcgcgtttgcatttaggattgaagatgtatttaatacgattgttttaagtttatgattacgtttgtgtgtatataatacatgcatcgacttttgtatttgtttatgtgtaaatgttttaaatttcatgatagtttattc

SEQ ID NO: 23398 - protein, 354 aa, Arabidopsis thaliana
  peptide (1)..(354): Ceres Seq. ID no. 13487100
  misc_feature (32)..(272): Pfam Name: Protein phosphatase 2C Pfam Description: Protein phosphatase 2C
  misc_feature (22)..(279): Homolog of NCBI NO: 30693757 NR Description: protein phosphatase 2C (PP2C), putative
  misc_feature (46)..(286): Homolog of NCBI NO: 19387276 NR Description: putative protein phosphatase 2C
  misc_feature (1)..(286): Homolog of NCBI NO: 38345197 NR Description: OSJNBa0015K02.7 [Oryza sativa (japonica
  misc_feature (204)..(295): Homolog of NCBI NO: 7486331 NR Description: hypothetical protein F28M20.60 - Arabidopsis
  misc_feature (27)..(215): Homolog of NCBI NO: 7486331 NR Description: hypothetical protein F28M20.60 - Arabidopsis
  misc_feature (1)..(295): Homolog of NCBI NO: 30689144 NR Description: protein phosphatase 2C (PP2C), putative
  misc_feature (1)..(312): Homolog of NCBI NO: 20146110 NR Description: protein phosphatase 2C [Mesembryanthemum
  misc_feature (1)..(350): Homolog of NCBI NO: 15238651 NR Description: protein phosphatase 2C (PP2C), putative
  misc_feature (1)..(354): Homolog of NCBI NO: 11358728 NR Description: protein phosphatase 2C-like protein - Arabidopsis
  misc_feature (1)..(354): Homolog of NCBI NO: 18416366 NR Description: protein phosphatase 2C (PP2C) -related
MGYLDLALSYSNQPQTVEAPASGGGLSQNGKFSYGYASSAGKRSSMEDFFETRIDGINGEIVGLFGVFDGHGGARAAEYVKRHLFSNLITHPKFISDTKSAITDAYNHTDSELLKSENSHNRDAGSTASTAILVGDRLVVANVGDSRAVISRGGKAIAVSRDHKPDQSDERERIENAGGFVMWAGTWRVGGVLAVSRAFGDRLLKQYVVADPEIQEEKIDDTLEFLILASDGLWDVFSNEAAVAMVKEVEDPEDSAKKLVGEAIKRGSADNITCVVVRFLEKKSASSSHISSSSSKEAKEMPPLGDLAISSNEAKQVQIGSGNKPENVTNRKPDTASRSTDTLTLERNSVTDKV

SEQ ID NO: 23399 - protein, 309 aa, Arabidopsis thaliana
  peptide (1)..(309): Ceres Seq. ID no. 13487101
  misc_feature (1)..(227): Pfam Name: Protein phosphatase 2C Pfam Description: Protein phosphatase 2C
  misc_feature (1)..(234): Homolog of NCBI NO: 30693757 NR Description: protein phosphatase 2C (PP2C), putative
  misc_feature (1)..(241): Homolog of NCBI NO: 19387276 NR Description: putative protein phosphatase 2C
  misc_feature (1)..(241): Homolog of NCBI NO: 38345197 NR Description: OSJNBa0015K02.7 [Oryza sativa (japonica
  misc_feature (159)..(250): Homolog of NCBI NO: 7486331 NR Description: hypothetical protein F28M20.60 - Arabidopsis
  misc_feature (1)..(170): Homolog of NCBI NO: 7486331 NR Description: hypothetical protein F28M20.60 - Arabidopsis
  misc_feature (1)..(250): Homolog of NCBI NO: 30689144 NR Description: protein phosphatase 2C (PP2C), putative
  misc_feature (1)..(267): Homolog of NCBI NO: 20146110 NR Description: protein phosphatase 2C [Mesembryanthemum
  misc_feature (1)..(305): Homolog of NCBI NO: 15238651 NR Description: protein phosphatase 2C (PP2C), putative
  misc_feature (1)..(309): Homolog of NCBI NO: 11358728 NR Description: protein phosphatase 2C-like protein - Arabidopsis
  misc_feature (1)..(309): Homolog of NCBI NO: 18416366 NR Description: protein phosphatase 2C (PP2C) -related
MEDFFETRIDGINGEIVGLFGVFDGHGGARAAEYVKRHLFSNLITHPKFISDTKSAITDAYNHTDSELLKSENSHNRDAGSTASTAILVGDRLVVANVGDSRAVISRGGKAIAVSRDHKPDQSDERERIENAGGFVMWAGTWRVGGVLAVSRAFGDRLLKQYVVADPEIQEEKIDDTLEFLILASDGLWDVFSNEAAVAMVKEVEDPEDSAKKLVGEAIKRGSADNITCVVVRFLEKKSASSSHISSSSSKEAKEMPPLGDLAISSNEAKQVQIGSGNKPENVTNRKPDTASRSTDTLTLERNSVTDKV

SEQ ID NO: 23400 - DNA, 1626 bp, Arabidopsis thaliana
  misc_feature (1)..(1626): Ceres Seq. ID no. 12379505
  misc_feature: MA Experiment ID: 108434 Result: Down-regulated in Transcription
  misc_feature: MA Experiment 108434 PARAMETER Experiment Name: At_Root_Tips_cDNA_P Parameter: Tissue Value: Root Tips
  misc_feature: MA Experiment ID: 108435 Result: Up-regulated in Transcription
  misc_feature: MA Experiment 108435 PARAMETER Experiment Name: At_stm_Mutants_cDNA_P Parameter: Plant Line Value: wt Landsburg vs stm
  misc_feature: MA Experiment 108435 PARAMETER Experiment Name: At_stm_Mutants_cDNA_P Parameter: Tissue Value: Shoot Apical Meristem Region
  misc_feature: MA Experiment ID: 108461 Result: Up-regulated in Transcription
  misc_feature: MA Experiment 108461 PARAMETER Experiment Name: At_Germinating_Seeds_cDNA_P Parameter: Age (day) Value: 1 vs. 0
  misc_feature: MA Experiment 108461 PARAMETER Experiment Name: At_Germinating_Seeds_cDNA_P Parameter: Tissue Value: Germinating Seeds
  misc_feature: MA Experiment ID: 108462 Result: Up-regulated in Transcription
  misc_feature: MA Experiment 108462 PARAMETER Experiment Name: At_Germinating_Seeds_cDNA_P Parameter: Age (day) Value: 2 vs. 0
  misc_feature: MA Experiment 108462 PARAMETER Experiment Name: At_Germinating_Seeds_cDNA_P Parameter: Tissue Value: Germinating Seeds
  misc_feature: MA Experiment ID: 108463 Result: Up-regulated in Transcription
  misc_feature: MA Experiment 108463 PARAMETER Experiment Name: At_Germinating_Seeds_cDNA_P Parameter: Age (day) Value: 3 vs. 0
  misc_feature: MA Experiment 108463 PARAMETER Experiment Name: At_Germinating_Seeds_cDNA_P Parameter: Tissue Value: Germinating Seeds
  misc_feature: MA Experiment ID: 108464 Result: Up-regulated in Transcription
  misc_feature: MA Experiment 108464 PARAMETER Experiment Name: At_Germinating_Seeds_cDNA_P Parameter: Age (day) Value: 4 vs. 0
  misc_feature: MA Experiment 108464 PARAMETER Experiment Name: At_Germinating_Seeds_cDNA_P Parameter: Tissue Value: Germinating Seeds
  misc_feature: MA Experiment ID: 108573 Result: Up-regulated in Transcription
  misc_feature: MA Experiment 108573 PARAMETER Experiment Name: At_Drought_cDNA_P Parameter: Timepoint (hr) Value: 6
  misc_feature: MA Experiment 108573 PARAMETER Experiment Name: At_Drought_cDNA_P Parameter: Tissue Value: Aerial
  misc_feature: MA Experiment 108573 PARAMETER Experiment Name: At_Drought_cDNA_P Parameter: Treatment Value: Drought vs. No Drought
  misc_feature: MA Experiment ID: 108574 Result: Down-regulated in Transcription
  misc_feature: MA Experiment 108574 PARAMETER Experiment Name: At_Wounding__cDNA_P Parameter: Timepoint (hr) Value: 1
  misc_feature: MA Experiment 108574 PARAMETER Experiment Name: At_Wounding__cDNA_P Parameter: Tissue Value: Aerial
  misc_feature: MA Experiment 108574 PARAMETER Experiment Name: At_Wounding__cDNA_P Parameter: Treatment Value: Wounding vs. No Wounding
  misc_feature: MA Experiment ID: 108577 Result: Down-regulated in Transcription
  misc_feature: MA Experiment 108577 PARAMETER Experiment Name: At_42deg_Heat_cDNA_P Parameter: Temperature (deg C) Value: 42 vs. 22
  misc_feature: MA Experiment 108577 PARAMETER Experiment Name: At_42deg_Heat_cDNA_P Parameter: Timepoint (hr) Value: 6
  misc_feature: MA Experiment 108577 PARAMETER Experiment Name: At_42deg_Heat_cDNA_P Parameter: Tissue Value: Aerial
  misc_feature: MA Experiment ID: 108579 Result: Down-regulated in Transcription
  misc_feature: MA Experiment 108579 PARAMETER Experiment Name: At_4deg_Cold_cDNA_P Parameter: Temperature (deg C) Value: 4 vs. 22
  misc_feature: MA Experiment 108579 PARAMETER Experiment Name: At_4deg_Cold_cDNA_P Parameter: Timepoint (hr) Value: 6
  misc_feature: MA Experiment 108579 PARAMETER Experiment Name: At_4deg_Cold_cDNA_P Parameter: Tissue Value: Aerial
  misc_feature: MA Experiment ID: 108605 Result: Up-regulated in Transcription
  misc_feature: MA Experiment 108605 PARAMETER Experiment Name: At_100uM_ABA_cDNA_P Parameter: Timepoint (hr) Value: 6
  misc_feature: MA Experiment 108605 PARAMETER Experiment Name: At_100uM_ABA_cDNA_P Parameter: Tissue Value: Aerial
  misc_feature: MA Experiment 108605 PARAMETER Experiment Name: At_100uM_ABA_cDNA_P Parameter: Treatment Value: 100uM ABA vs. No Treatment
  misc_feature: MA Experiment ID: 108608 Result: Down-regulated in Transcription
  misc_feature: MA Experiment 108608 PARAMETER Experiment Name: At_100uM_ABA_cDNA_P Parameter: Timepoint (hr) Value: 1
  misc_feature: MA Experiment 108608 PARAMETER Experiment Name: At_100uM_ABA_cDNA_P Parameter: Tissue Value: Aerial
  misc_feature: MA Experiment 108608 PARAMETER Experiment Name: At_100uM_ABA_cDNA_P Parameter: Treatment Value: 100uM ABA vs. No Treatment
  misc_feature: MA Experiment ID: 20000069 Result: Up-regulated in Transcription
  misc_feature: MA Experiment 20000069 PARAMETER Experiment Name: At_100uM_ABA_Mutants_cDNA_P Parameter: Plant Line Value: CS23
  misc_feature: MA Experiment 20000069 PARAMETER Experiment Name: At_100uM_ABA_Mutants_cDNA_P Parameter: Timepoint (hr) Value: 6
  misc_feature: MA Experiment 20000069 PARAMETER Experiment Name: At_100uM_ABA_Mutants_cDNA_P Parameter: Tissue Value: Aerial
  misc_feature: MA Experiment 20000069 PARAMETER Experiment Name: At_100uM_ABA_Mutants_cDNA_P Parameter: Treatment Value: 100uM ABA vs. No Treatment
  misc_feature: MA Experiment ID: 20000072 Result: Up-regulated in Transcription
  misc_feature: MA Experiment 20000072 PARAMETER Experiment Name: At_100uM_ABA_Mutants_cDNA_P Parameter: Plant Line Value: CS8105
  misc_feature: MA Experiment 20000072 PARAMETER Experiment Name: At_100uM_ABA_Mutants_cDNA_P Parameter: Timepoint (hr) Value: 6
  misc_feature: MA Experiment 20000072 PARAMETER Experiment Name: At_100uM_ABA_Mutants_cDNA_P Parameter: Tissue Value: Aerial
  misc_feature: MA Experiment 20000072 PARAMETER Experiment Name: At_100uM_ABA_Mutants_cDNA_P Parameter: Treatment Value: 100uM ABA vs. No Treatment
  misc_feature: MA Experiment ID: 20000086 Result: Up-regulated in Transcription
  misc_feature: MA Experiment 20000086 PARAMETER Experiment Name: At_100uM_ABA_Mutants_cDNA_P Parameter: Plant Line Value: CS22
  misc_feature: MA Experiment 20000086 PARAMETER Experiment Name: At_100uM_ABA_Mutants_cDNA_P Parameter: Timepoint (hr) Value: 6
  misc_feature: MA Experiment 20000086 PARAMETER Experiment Name: At_100uM_ABA_Mutants_cDNA_P Parameter: Tissue Value: Aerial
  misc_feature: MA Experiment 20000086 PARAMETER Experiment Name: At_100uM_ABA_Mutants_cDNA_P Parameter: Treatment Value: 100uM ABA vs. No Treatment
  misc_feature: MA Experiment ID: 20000088 Result: Up-regulated in Transcription
  misc_feature: MA Experiment 20000088 PARAMETER Experiment Name: At_100uM_ABA_Mutants_cDNA_P Parameter: Plant Line Value: Landsberg
  misc_feature: MA Experiment 20000088 PARAMETER Experiment Name: At_100uM_ABA_Mutants_cDNA_P Parameter: Timepoint (hr) Value: 6
  misc_feature: MA Experiment 20000088 PARAMETER Experiment Name: At_100uM_ABA_Mutants_cDNA_P Parameter: Tissue Value: Aerial
  misc_feature: MA Experiment 20000088 PARAMETER Experiment Name: At_100uM_ABA_Mutants_cDNA_P Parameter: Treatment Value: 100uM ABA vs. No Treatment
  misc_feature: MA Experiment ID: 20000111 Result: Down-regulated in Transcription
  misc_feature: MA Experiment 20000111 PARAMETER Experiment Name: At_42deg_Heat_cDNA_P Parameter: Temperature (deg C) Value: 42 vs. 22
  misc_feature: MA Experiment 20000111 PARAMETER Experiment Name: At_42deg_Heat_cDNA_P Parameter: Timepoint (hr) Value: 6
  misc_feature: MA Experiment 20000111 PARAMETER Experiment Name: At_42deg_Heat_cDNA_P Parameter: Tissue Value: Aerial
  misc_feature: MA Experiment ID: 20000113 Result: Down-regulated in Transcription
  misc_feature: MA Experiment 20000113 PARAMETER Experiment Name: At_42deg_Heat_cDNA_P Parameter: Temperature (deg C) Value: 42 vs. 22
  misc_feature: MA Experiment 20000113 PARAMETER Experiment Name: At_42deg_Heat_cDNA_P Parameter: Timepoint (hr) Value: 8
  misc_feature: MA Experiment 20000113 PARAMETER Experiment Name: At_42deg_Heat_cDNA_P Parameter: Tissue Value: Aerial
  misc_feature: MA Experiment ID: 20000144 Result: Down-regulated in Transcription
  misc_feature: MA Experiment 20000144 PARAMETER Experiment Name: At_42deg_Heat_cDNA_P Parameter: Temperature (deg C) Value: 42 vs. 22
  misc_feature: MA Experiment 20000144 PARAMETER Experiment Name: At_42deg_Heat_cDNA_P Parameter: Timepoint (hr) Value: 1
  misc_feature: MA Experiment 20000144 PARAMETER Experiment Name: At_42deg_Heat_cDNA_P Parameter: Tissue Value: Aerial
  misc_feature: MA Experiment ID: 20000166 Result: Down-regulated in Transcription
  misc_feature: MA Experiment 20000166 PARAMETER Experiment Name: At_100uM_ABA_P Parameter: Age (day) Value: 14
  misc_feature: MA Experiment 20000166 PARAMETER Experiment Name: At_100uM_ABA_P Parameter: Organism Value: A. thaliana
  misc_feature: MA Experiment 20000166 PARAMETER Experiment Name: At_100uM_ABA_P Parameter: Plant Line Value: WS
  misc_feature: MA Experiment 20000166 PARAMETER Experiment Name: At_100uM_ABA_P Parameter: Timepoint (hr) Value: 1
  misc_feature: MA Experiment 20000166 PARAMETER Experiment Name: At_100uM_ABA_P Parameter: Tissue Value: Aerial
  misc_feature: MA Experiment 20000166 PARAMETER Experiment Name: At_100uM_ABA_P Parameter: Treatment Value: 100uM ABA vs. No Treatment
  misc_feature: MA Experiment ID: 20000171 Result: Down-regulated in Transcription
  misc_feature: MA Experiment 20000171 PARAMETER Experiment Name: At_42deg_Heat_P Parameter: Age (day) Value: 14
  misc_feature: MA Experiment 20000171 PARAMETER Experiment Name: At_42deg_Heat_P Parameter: Organism Value: A. thaliana
  misc_feature: MA Experiment 20000171 PARAMETER Experiment Name: At_42deg_Heat_P Parameter: Plant Line Value: WS
  misc_feature: MA Experiment 20000171 PARAMETER Experiment Name: At_42deg_Heat_P Parameter: Temperature (deg C) Value: 42 vs. 22
  misc_feature: MA Experiment 20000171 PARAMETER Experiment Name: At_42deg_Heat_P Parameter: Timepoint (hr) Value: 1
  misc_feature: MA Experiment 20000171 PARAMETER Experiment Name: At_42deg_Heat_P Parameter: Tissue Value: Aerial
  misc_feature: MA Experiment ID: 20000173 Result: Down-regulated in Transcription
  misc_feature: MA Experiment 20000173 PARAMETER Experiment Name: At_42deg_Heat_P Parameter: Age (day) Value: 14
  misc_feature: MA Experiment 20000173 PARAMETER Experiment Name: At_42deg_Heat_P Parameter: Organism Value: A. thaliana
  misc_feature: MA Experiment 20000173 PARAMETER Experiment Name: At_42deg_Heat_P Parameter: Plant Line Value: WS
  misc_feature: MA Experiment 20000173 PARAMETER Experiment Name: At_42deg_Heat_P Parameter: Temperature (deg C) Value: 42 vs. 22
  misc_feature: MA Experiment 20000173 PARAMETER Experiment Name: At_42deg_Heat_P Parameter: Timepoint (hr) Value: 6
  misc_feature: MA Experiment 20000173 PARAMETER Experiment Name: At_42deg_Heat_P Parameter: Tissue Value: Aerial
  misc_feature: MA Experiment ID: 20000184 Result: Down-regulated in Transcription
  misc_feature: MA Experiment 20000184 PARAMETER Experiment Name: At_Shoots__P Parameter: Age (day) Value: 7
  misc_feature: MA Experiment 20000184 PARAMETER Experiment Name: At_Shoots__P Parameter: Tissue Value: Shoots vs. Whole Plant
  misc_feature: MA Experiment ID: 20000185 Result: Down-regulated in Transcription
  misc_feature: MA Experiment 20000185 PARAMETER Experiment Name: At_Roots__P Parameter: Age (day) Value: 7 vs. 21
  misc_feature: MA Experiment 20000185 PARAMETER Experiment Name: At_Roots__P Parameter: Organism Value: A. thaliana
  misc_feature: MA Experiment 20000185 PARAMETER Experiment Name: At_Roots__P Parameter: Tissue Value: Roots vs. Whole Plant
  misc_feature: MA Experiment ID: 20000213 Result: Down-regulated in Transcription
  misc_feature: MA Experiment 20000213 PARAMETER Experiment Name: At_4deg_Cold_P Parameter: Timepoint (hr) Value: 2
  misc_feature: MA Experiment ID: 20000214 Result: Down-regulated in Transcription
  misc_feature: MA Experiment 20000214 PARAMETER Experiment Name: At_4deg_Cold_P Parameter: Timepoint (hr) Value: 6
  misc_feature: MA Experiment ID: 20000234 Result: Down-regulated in Transcription
  misc_feature: MA Experiment 20000234 PARAMETER Experiment Name: At_Siliques_P Parameter: Age (day) Value: 21
  misc_feature: MA Experiment 20000234 PARAMETER Experiment Name: At_Siliques_P Parameter: Organism Value: A. thaliana
  misc_feature: MA Experiment 20000234 PARAMETER Experiment Name: At_Siliques_P Parameter: Plant Line Value: WS
  misc_feature: MA Experiment 20000234 PARAMETER Experiment Name: At_Siliques_P Parameter: Tissue Value: Less Than 5mm Siliques vs. Whole Plant
  misc_feature: MA Experiment ID: 20000265 Result: Down-regulated in Transcription
  misc_feature: MA Experiment 20000265 PARAMETER Experiment Name: At_Open_Flower_P Parameter: Age (day) Value: 21
  misc_feature: MA Experiment 20000265 PARAMETER Experiment Name: At_Open_Flower_P Parameter: Plant Line Value: WS
  misc_feature: MA Experiment 20000265 PARAMETER Experiment Name: At_Open_Flower_P Parameter: Tissue Value: Closed Flower vs. Whole Plant
  misc_feature: MA Experiment ID: 20000286 Result: Down-regulated in Transcription
  misc_feature: MA Experiment 20000286 PARAMETER Experiment Name: At_Open_Flower_P Parameter: Age (day) Value: 21
  misc_feature: MA Experiment 20000286 PARAMETER Experiment Name: At_Open_Flower_P Parameter: Plant Line Value: WS
  misc_feature: MA Experiment 20000286 PARAMETER Experiment Name: At_Open_Flower_P Parameter: Tissue Value: Half Open vs. Whole Plant
  misc_feature: MA Experiment ID: 20000438 Result: Down-regulated in Transcription
  misc_feature: MA Experiment 20000438 PARAMETER Experiment Name: At_Shoots__P Parameter: Age (day) Value: 14
  misc_feature: MA Experiment 20000438 PARAMETER Experiment Name: At_Shoots__P Parameter: Tissue Value: Shoots vs. Whole Plant
  misc_feature: MA Experiment ID: 20000439 Result: Down-regulated in Transcription
  misc_feature: MA Experiment 20000439 PARAMETER Experiment Name: At_Roots__P Parameter: Age (day) Value: 14 vs. 21
  misc_feature: MA Experiment 20000439 PARAMETER Experiment Name: At_Roots__P Parameter: Organism Value: A. thaliana
  misc_feature: MA Experiment 20000439 PARAMETER Experiment Name: At_Roots__P Parameter: Tissue Value: Roots vs. Whole Plant
  misc_feature: MA Experiment ID: 20000495 Result: Down-regulated in Transcription
  misc_feature: MA Experiment 20000495 PARAMETER Experiment Name: At_Guard_Cells_P Parameter: Harvest Date Value: 8/2/2002
  misc_feature: MA Experiment 20000495 PARAMETER Experiment Name: At_Guard_Cells_P Parameter: Organism Value: A. thaliana
  misc_feature: MA Experiment 20000495 PARAMETER Experiment Name: At_Guard_Cells_P Parameter: Tissue Value: Guard Cells vs. Leaves
  misc_feature: MA Experiment ID: 20000573 Result: Up-regulated in Transcription
  misc_feature: MA Experiment 20000573 PARAMETER Experiment Name: At_100uM_ABA_Mutants__P Parameter: Organism Value: A. thaliana
  misc_feature: MA Experiment 20000573 PARAMETER Experiment Name: At_100uM_ABA_Mutants__P Parameter: Plant Line Value: CS22 vs. Ler wt
  misc_feature: MA Experiment 20000573 PARAMETER Experiment Name: At_100uM_ABA_Mutants__P Parameter: Timepoint (hr) Value: N/A
  misc_feature: MA Experiment 20000573 PARAMETER Experiment Name: At_100uM_ABA_Mutants__P Parameter: Tissue Value: Whole Plant
  misc_feature: MA Experiment 20000573 PARAMETER Experiment Name: At_100uM_ABA_Mutants__P Parameter: Treatment Value: None
  misc_feature: MA Experiment ID: 20000794 Result: Up-regulated in Transcription
  misc_feature: MA Experiment 20000794 PARAMETER Experiment Name: At_Petals_P Parameter: Age (day) Value: 23-25 days
  misc_feature: MA Experiment 20000794 PARAMETER Experiment Name: At_Petals_P Parameter: Plant Line Value: WS
  misc_feature: MA Experiment 20000794 PARAMETER Experiment Name: At_Petals_P Parameter: Tissue Value: Petals vs. Whole plant
  misc_feature: MA Experiment ID: 20001560 Result: Down-regulated in Transcription
  misc_feature: MA Experiment 20001560 PARAMETER Experiment Name: At_Drought_Soil_Dry_P Parameter: Age (day) Value: 28
  misc_feature: MA Experiment 20001560 PARAMETER Experiment Name: At_Drought_Soil_Dry_P Parameter: Organism Value: A. thaliana
  misc_feature: MA Experiment 20001560 PARAMETER Experiment Name: At_Drought_Soil_Dry_P Parameter: Plant Line Value: WS
  misc_feature: MA Experiment 20001560 PARAMETER Experiment Name: At_Drought_Soil_Dry_P Parameter: Post Timepoint (hr) Value: None
  misc_feature: MA Experiment 20001560 PARAMETER Experiment Name: At_Drought_Soil_Dry_P Parameter: Post-Treatment Value: None
  misc_feature: MA Experiment 20001560 PARAMETER Experiment Name: At_Drought_Soil_Dry_P Parameter: Timepoint (day) Value: 14
  misc_feature: MA Experiment 20001560 PARAMETER Experiment Name: At_Drought_Soil_Dry_P Parameter: Treatment Value: Drought vs. No Drought
ctgcttccgccattgctcgaaaatcgcgtcttctgacaatgtgctgaaactgagtcatcgtccgagttagcaaagtgaaacttcgaagtttctcttacactaatctcaggtttgggattttgtaagaaaccgcgtttacaaaatgttcaagttgaagcaatggttgatttatttggtgtattcgttagtaataatgaacacagaaggactgtttgtcaatattacatttgttcgaaacgcagtcgctaaaggggccgtttgtttagatggaagtccaccagcttatcatttggatagaggttctggaactggaatcaatagttggttgatacagcttgagggaggaggatggtgcaataatgtaacaaattgcgttagtcggatgcatactcgattaggttcatcgaagaaaatggtggagaaccttgctttctcagctattcttagcaataagaaacaatataatcctgatttttacaattggaatagagtgaaagttagatactgtgacggggcatcattcacaggagatgtagaagcagtgaaccctgctactaatcttcacttcagaggtgctcgagtttggttagccgttatgcaagagctgctagctaaaggcatgataaacgccgagaatgctgttttgtctggctgttctgctggcgggttagcttcgctgatgcattgtgatagtttccgtgctctattaccgatgggaaccaaagtaaaatgtctttcagatgctgggttttttctcaacacaagagacgtctcaggagttcaatacattaaaacatacttcgaagatgttgttactcttcatggatcagcaaagaacttgccgaggtcatgcacatcaagattaactcctgcaatgtgtttctttccgcaatatgtggctcgccagattagaactcctctgttcattcttaatgccgcttatgactcttggcagataaagaacattttggctccgcgagcagctgatccttacggaaaatggcaaagttgtcaactagacatcaagaattgccatccaagtcagatcaaagttatgcaagatttcaggttagagttcttgagtgcagtgataggtttagggagatcttcatcaagagggatgttcatagattcttgctacactcactgccaaaccgagacacaaacttcatggttctggcaagattctccaattctaaaccgaacgacaatagcaaaagctgttggagattgggtttatgacagaacattgtttcagaagatagattgtccttacccttgtaaccctacttgccaccacagggtttttcactcctctagatgctcctccaatttaagtgattctaccatatacagtatagatttattattattttgaaaagaaaatttgcttataaatgattcatttgttagatacatatagtgaaatattcctagggtttagctatagaagatgaaaaagaaaaagagtgtgattaattcttgagtgttgagaataagcaataggagtaattttcttcagcacttgtcttgtgtgctgtttaaattgctctgtttctcttctattctgatgtaaaatgcaaattgttacctttatcctatcaaataaagtataattcttttctc

SEQ ID NO: 23401 - protein, 411 aa, Arabidopsis thaliana
  peptide (1)..(411): Ceres Seq. ID no. 12379506
  misc_feature (11)..(374): Pfam Name: Pectinacetylesterase Pfam Description: Pectinacetylesterase
  misc_feature (159)..(384): Homolog of NCBI NO: 7488140 NR Description: probable pectin acetylesterase (EC 3.1.1.-) -
  misc_feature (4)..(384): Homolog of NCBI NO: 15242357 NR Description: pectinacetylesterase, putative
  misc_feature (1)..(384): Homolog of NCBI NO: 21593445 NR Description: pectin acetylesterase [Arabidopsis thaliana]
  misc_feature (6)..(387): Homolog of NCBI NO: 38344147 NR Description: OSJNBa0041A02.14 [Oryza sativa (japonica
  misc_feature (1)..(384): Homolog of NCBI NO: 18415308 NR Description: pectinacetylesterase, putative
  misc_feature (356)..(389): Homolog of NCBI NO: 7487998 NR Description: pectin acetylesterase homolog T5K18.200 -
  misc_feature (1)..(38): Homolog of NCBI NO: 7487998 NR Description: pectin acetylesterase homolog T5K18.200 -
  misc_feature (68)..(245): Homolog of NCBI NO: 7487998 NR Description: pectin acetylesterase homolog T5K18.200 -
  misc_feature (6)..(389): Homolog of NCBI NO: 7488883 NR Description: pectin acetylesterase (EC 3.1.1.-) precursor -
  misc_feature (1)..(389): Homolog of NCBI NO: 22328797 NR Description: pectinacetylesterase family; protein id:
MFKLKQWLIYLVYSLVIMNTEGLFVNITFVRNAVAKGAVCLDGSPPAYHLDRGSGTGINSWLIQLEGGGWCNNVTNCVSRMHTRLGSSKKMVENLAFSAILSNKKQYNPDFYNWNRVKVRYCDGASFTGDVEAVNPATNLHFRGARVWLAVMQELLAKGMINAENAVLSGCSAGGLASLMHCDSFRALLPMGTKVKCLSDAGFFLNTRDVSGVQYIKTYFEDVVTLHGSAKNLPRSCTSRLTPAMCFFPQYVARQIRTPLFILNAAYDSWQIKNILAPRAADPYGKWQSCQLDIKNCHPSQIKVMQDFRLEFLSAVIGLGRSSSRGMFIDSCYTHCQTETQTSWFWQDSPILNRTTIAKAVGDWVYDRTLFQKIDCPYPCNPTCHHRVFHSSRCSSNLSDSTIYSIDLLLF

SEQ ID NO: 23402 - protein, 394 aa, Arabidopsis thaliana
  peptide (1)..(394): Ceres Seq. ID no. 12379507
  misc_feature (1)..(357): Pfam Name: Pectinacetylesterase Pfam Description: Pectinacetylesterase
  misc_feature (142)..(367): Homolog of NCBI NO: 7488140 NR Description: probable pectin acetylesterase (EC 3.1.1.-) -
  misc_feature (1)..(367): Homolog of NCBI NO: 15242357 NR Description: pectinacetylesterase, putative
  misc_feature (1)..(367): Homolog of NCBI NO: 21593445 NR Description: pectin acetylesterase [Arabidopsis thaliana]
  misc_feature (1)..(370): Homolog of NCBI NO: 38344147 NR Description: OSJNBa0041A02.14 [Oryza sativa (japonica
  misc_feature (1)..(367): Homolog of NCBI NO: 18415308 NR Description: pectinacetylesterase, putative
  misc_feature (339)..(372): Homolog of NCBI NO: 7487998 NR Description: pectin acetylesterase homolog T5K18.200 -
  misc_feature (1)..(21): Homolog of NCBI NO: 7487998 NR Description: pectin acetylesterase homolog T5K18.200 -
  misc_feature (51)..(228): Homolog of NCBI NO: 7487998 NR Description: pectin acetylesterase homolog T5K18.200 -
  misc_feature (1)..(372): Homolog of NCBI NO: 7488883 NR Description: pectin acetylesterase (EC 3.1.1.-) precursor -
  misc_feature (1)..(372): Homolog of NCBI NO: 22328797 NR Description: pectinacetylesterase family; protein id:
MNTEGLFVNITFVRNAVAKGAVCLDGSPPAYHLDRGSGTGINSWLIQLEGGGWCNNVTNCVSRMHTRLGSSKKMVENLAFSAILSNKKQYNPDFYNWNRVKVRYCDGASFTGDVEAVNPATNLHFRGARVWLAVMQELLAKGMINAENAVLSGCSAGGLASLMHCDSFRALLPMGTKVKCLSDAGFFLNTRDVSGVQYIKTYFEDVVTLHGSAKNLPRSCTSRLTPAMCFFPQYVARQIRTPLFILNAAYDSWQIKNILAPRAADPYGKWQSCQLDIKNCHPSQIKVMQDFRLEFLSAVIGLGRSSSRGMFIDSCYTHCQTETQTSWFWQDSPILNRTTIAKAVGDWVYDRTLFQKIDCPYPCNPTCHHRVFHSSRCSSNLSDSTIYSIDLLLF

SEQ ID NO: 23403 - protein, 331 aa, Arabidopsis thaliana
  peptide (1)..(331): Ceres Seq. ID no. 12379508
  misc_feature (1)..(294): Pfam Name: Pectinacetylesterase Pfam Description: Pectinacetylesterase
  misc_feature (1)..(309): Homolog of NCBI NO: 22328797 NR Description: pectinacetylesterase family; protein id:
  misc_feature (1)..(57): Homolog of NCBI NO: 7488140 NR Description: probable pectin acetylesterase (EC 3.1.1.-) -
  misc_feature (79)..(304): Homolog of NCBI NO: 7488140 NR Description: probable pectin acetylesterase (EC 3.1.1.-) -
  misc_feature (1)..(304): Homolog of NCBI NO: 15242357 NR Description: pectinacetylesterase, putative
  misc_feature (1)..(304): Homolog of NCBI NO: 21593445 NR Description: pectin acetylesterase [Arabidopsis thaliana]
  misc_feature (1)..(307): Homolog of NCBI NO: 38344147 NR Description: OSJNBa0041A02.14 [Oryza sativa (japonica
  misc_feature (1)..(304): Homolog of NCBI NO: 18415308 NR Description: pectinacetylesterase, putative
  misc_feature (276)..(309): Homolog of NCBI NO: 7487998 NR Description: pectin acetylesterase homolog T5K18.200 -
  misc_feature (1)..(165): Homolog of NCBI NO: 7487998 NR Description: pectin acetylesterase homolog T5K18.200 -
  misc_feature (1)..(309): Homolog of NCBI NO: 7488883 NR Description: pectin acetylesterase (EC 3.1.1.-) precursor -
MHTRLGSSKKMVENLAFSAILSNKKQYNPDFYNWNRVKVRYCDGASFTGDVEAVNPATNLHFRGARVWLAVMQELLAKGMINAENAVLSGCSAGGLASLMHCDSFRALLPMGTKVKCLSDAGFFLNTRDVSGVQYIKTYFEDVVTLHGSAKNLPRSCTSRLTPAMCFFPQYVARQIRTPLFILNAAYDSWQIKNILAPRAADPYGKWQSCQLDIKNCHPSQIKVMQDFRLEFLSAVIGLGRSSSRGMFIDSCYTHCQTETQTSWFWQDSPILNRTTIAKAVGDWVYDRTLFQKIDCPYPCNPTCHHRVFHSSRCSSNLSDSTIYSIDLLLF

SEQ ID NO: 23404 - DNA, 954 bp, Arabidopsis thaliana
  misc_feature (1)..(954): Ceres Seq. ID no. 13497549
  misc_feature: MA Experiment ID: 108434 Result: Up-regulated in Transcription
  misc_feature: MA Experiment 108434 PARAMETER Experiment Name: At_Root_Tips_cDNA_P Parameter: Tissue Value: Root Tips
aaaaaagataaaacaaaagctgaaaggaggaaaccagaggaaggagacgacgaccaccaccacaacgcatctcagctcttccttaatccatggcagacaagggccgcccgttgccgaagtttggaagagctgagatgcgttgtggtggtggtcgtcgcctccttcttcaatctcatcgcaatcatgatcatatccgagactaatcgccgtgagatctccaagtacctcttcaaagagggtgttttgtttgccaaaaaggatttcaatttaccacaacatcctttgattgagagtgttccaaatctgcaagttatcaagttgatgcagagtttcaaatctaaggaatatgtgagagagacctttgcttggatgcattactactggttcctcacaaatgaaggtattgactttcttaggacttaccttaatctcccatctgagattgttcctgctactctgaagaagcaacagaagcctcttggtcgaccttttggaggtggtggtgaccgtccccgtggccctcctcgtggtgatggagagaggaggtttggtgacagagatggataccgtggaggtcctaaatcaggtggagagtatggtgacaaggctggagcacctgctgattaccagcctggcttcaggggtggagctagtggagcaaggcaagggtttggtcgtggagctggtggttttggtggtggtgctggtccagctgctggatctgatctaccttgaaaaggactttcttgtttctttttggtcttatttaaggttacatagcaccttattgagaacgaatgtgtcttttggaactttgtttctttctcttaaaccatttcacaatatgattgtttttttacgttagaattttatgaagaaatgttggatcgttacatgaatctttttacactgtcctcctttttaaattctcctatttagtttttttcgaagctt

SEQ ID NO: 23405 - protein, 244 aa, Arabidopsis thaliana
  peptide (1)..(244): Ceres Seq. ID no. 13497550
  misc_feature (64)..(160): Pfam Name: Plectin/S10 domain Pfam Description: Plectin/S10 domain
  misc_feature (62)..(222): Homolog of NCBI NO: 20139984 NR Description: 40S ribosomal protein S10
  misc_feature (62)..(229): Homolog of NCBI NO: 24266976 NR Description: ribosomal protein S10 [Branchiostoma belcheri]
  misc_feature (62)..(229): Homolog of NCBI NO: 40642980 NR Description: ribosomal protein S10 [Crassostrea gigas]
  misc_feature (62)..(241): Homolog of NCBI NO: 20140213 NR Description: 40S ribosomal protein S10
  misc_feature (62)..(235): Homolog of NCBI NO: 34905824 NR Description: putative ribosomal protein S10
  misc_feature (62)..(241): Homolog of NCBI NO: 34897532 NR Description: OSJNBa0042L16.3 [Oryza sativa (japonica
  misc_feature (62)..(244): Homolog of NCBI NO: 15237217 NR Description: 40S ribosomal protein S10 (RPS10C) [Arabidopsis
  misc_feature (62)..(244): Homolog of NCBI NO: 20139798 NR Description: 40S ribosomal protein S10-3
  misc_feature (62)..(244): Homolog of NCBI NO: 15235985 NR Description: 40S ribosomal protein S10 (RPS10A) [Arabidopsis
  misc_feature (62)..(244): Homolog of NCBI NO: 15238099 NR Description: expressed protein [Arabidopsis thaliana]
KKDKTKAERRKPEEGDDDHHHNASQLFLNPWQTRAARCRSLEELRCVVVVVVASFFNLIAIMIISETNRREISKYLFKEGVLFAKKDFNLPQHPLIESVPNLQVIKLMQSFKSKEYVRETFAWMHYYWFLTNEGIDFLRTYLNLPSEIVPATLKKQQKPLGRPFGGGGDRPRGPPRGDGERRFGDRDGYRGGPKSGGEYGDKAGAPADYQPGFRGGASGARQGFGRGAGGFGGGAGPAAGSDLP

SEQ ID NO: 23406 - protein, 183 aa, Arabidopsis thaliana
  peptide (1)..(183): Ceres Seq. ID no. 13497551
  misc_feature (3)..(99): Pfam Name: Plectin/S10 domain Pfam Description: Plectin/S10 domain
  misc_feature (1)..(161): Homolog of NCBI NO: 20139984 NR Description: 40S ribosomal protein S10
  misc_feature (1)..(168): Homolog of NCBI NO: 24266976 NR Description: ribosomal protein S10 [Branchiostoma belcheri]
  misc_feature (1)..(168): Homolog of NCBI NO: 40642980 NR Description: ribosomal protein S10 [Crassostrea gigas]
  misc_feature (1)..(180): Homolog of NCBI NO: 20140213 NR Description: 40S ribosomal protein S10
  misc_feature (1)..(174): Homolog of NCBI NO: 34905824 NR Description: putative ribosomal protein S10
  misc_feature (1)..(180): Homolog of NCBI NO: 34897532 NR Description: OSJNBa0042L16.3 [Oryza sativa (japonica
  misc_feature (1)..(183): Homolog of NCBI NO: 15237217 NR Description: 40S ribosomal protein S10 (RPS10C) [Arabidopsis
  misc_feature (1)..(183): Homolog of NCBI NO: 20139798 NR Description: 40S ribosomal protein S10-3
  misc_feature (1)..(183): Homolog of NCBI NO: 15235985 NR Description: 40S ribosomal protein S10 (RPS10A) [Arabidopsis
  misc_feature (1)..(183): Homolog of NCBI NO: 15238099 NR Description: expressed protein [Arabidopsis thaliana]
MIISETNRREISKYLFKEGVLFAKKDFNLPQHPLIESVPNLQVIKLMQSFKSKEYVRETFAWMHYYWFLTNEGIDFLRTYLNLPSEIVPATLKKQQKPLGRPFGGGGDRPRGPPRGDGERRFGDRDGYRGGPKSGGEYGDKAGAPADYQPGFRGGASGARQGFGRGAGGFGGGAGPAAGSDLP

SEQ ID NO: 23407 - protein, 137 aa, Arabidopsis thaliana
  peptide (1)..(137): Ceres Seq. ID no. 13497552
  misc_feature (1)..(53): Pfam Name: Plectin/S10 domain Pfam Description: Plectin/S10 domain
  misc_feature (1)..(115): Homolog of NCBI NO: 20139984 NR Description: 40S ribosomal protein S10
  misc_feature (1)..(122): Homolog of NCBI NO: 24266976 NR Description: ribosomal protein S10 [Branchiostoma belcheri]
  misc_feature (1)..(122): Homolog of NCBI NO: 40642980 NR Description: ribosomal protein S10 [Crassostrea gigas]
  misc_feature (1)..(134): Homolog of NCBI NO: 20140213 NR Description: 40S ribosomal protein S10
  misc_feature (1)..(128): Homolog of NCBI NO: 34905824 NR Description: putative ribosomal protein S10
  misc_feature (1)..(134): Homolog of NCBI NO: 34897532 NR Description: OSJNBa0042L16.3 [Oryza sativa (japonica
  misc_feature (1)..(137): Homolog of NCBI NO: 15237217 NR Description: 40S ribosomal protein S10 (RPS10C) [Arabidopsis
  misc_feature (1)..(137): Homolog of NCBI NO: 20139798 NR Description: 40S ribosomal protein S10-3
  misc_feature (1)..(137): Homolog of NCBI NO: 15235985 NR Description: 40S ribosomal protein S10 (RPS10A) [Arabidopsis
  misc_feature (1)..(137): Homolog of NCBI NO: 15238099 NR Description: expressed protein [Arabidopsis thaliana]
MQSFKSKEYVRETFAWMHYYWFLTNEGIDFLRTYLNLPSEIVPATLKKQQKPLGRPFGGGGDRPRGPPRGDGERRFGDRDGYRGGPKSGGEYGDKAGAPADYQPGFRGGASGARQGFGRGAGGFGGGAGPAAGSDLP

SEQ ID NO: 23408 - DNA, 1682 bp, Arabidopsis thaliana
  misc_feature (1)..(1682): Ceres Seq. ID no. 12348720
  misc_feature: MA Experiment ID: 108434 Result: Up-regulated in Transcription
  misc_feature: MA Experiment 108434 PARAMETER Experiment Name: At_Root_Tips_cDNA_P Parameter: Tissue Value: Root Tips
  misc_feature: MA Experiment ID: 108435 Result: Down-regulated in Transcription
  misc_feature: MA Experiment 108435 PARAMETER Experiment Name: At_stm_Mutants_cDNA_P Parameter: Plant Line Value: wt Landsburg vs stm
  misc_feature: MA Experiment 108435 PARAMETER Experiment Name: At_stm_Mutants_cDNA_P Parameter: Tissue Value: Shoot Apical Meristem Region
  misc_feature: MA Experiment ID: 108488 Result: Up-regulated in Transcription
  misc_feature: MA Experiment ID: 108574 Result: Down-regulated in Transcription
  misc_feature: MA Experiment 108574 PARAMETER Experiment Name: At_Wounding__cDNA_P Parameter: Timepoint (hr) Value: 1
  misc_feature: MA Experiment 108574 PARAMETER Experiment Name: At_Wounding__cDNA_P Parameter: Tissue Value: Aerial
  misc_feature: MA Experiment 108574 PARAMETER Experiment Name: At_Wounding__cDNA_P Parameter: Treatment Value: Wounding vs. No Wounding
  misc_feature: MA Experiment ID: 108577 Result: Down-regulated in Transcription
  misc_feature: MA Experiment 108577 PARAMETER Experiment Name: At_42deg_Heat_cDNA_P Parameter: Temperature (deg C) Value: 42 vs. 22
  misc_feature: MA Experiment 108577 PARAMETER Experiment Name: At_42deg_Heat_cDNA_P Parameter: Timepoint (hr) Value: 6
  misc_feature: MA Experiment 108577 PARAMETER Experiment Name: At_42deg_Heat_cDNA_P Parameter: Tissue Value: Aerial
  misc_feature: MA Experiment ID: 108579 Result: Down-regulated in Transcription
  misc_feature: MA Experiment 108579 PARAMETER Experiment Name: At_4deg_Cold_cDNA_P Parameter: Temperature (deg C) Value: 4 vs. 22
  misc_feature: MA Experiment 108579 PARAMETER Experiment Name: At_4deg_Cold_cDNA_P Parameter: Timepoint (hr) Value: 6
  misc_feature: MA Experiment 108579 PARAMETER Experiment Name: At_4deg_Cold_cDNA_P Parameter: Tissue Value: Aerial
  misc_feature: MA Experiment ID: 108595 Result: Down-regulated in Transcription
  misc_feature: MA Experiment 108595 PARAMETER Experiment Name: At_Ler-pi_Ovule_cDNA_P Parameter: Plant Line Value: null
  misc_feature: MA Experiment ID: 108608 Result: Down-regulated in Transcription
  misc_feature: MA Experiment 108608 PARAMETER Experiment Name: At_100uM_ABA_cDNA_P Parameter: Timepoint (hr) Value: 1
  misc_feature: MA Experiment 108608 PARAMETER Experiment Name: At_100uM_ABA_cDNA_P Parameter: Tissue Value: Aerial
  misc_feature: MA Experiment 108608 PARAMETER Experiment Name: At_100uM_ABA_cDNA_P Parameter: Treatment Value: 100uM ABA vs. No Treatment
  misc_feature: MA Experiment ID: 20000185 Result: Down-regulated in Transcription
  misc_feature: MA Experiment 20000185 PARAMETER Experiment Name: At_Roots__P Parameter: Age (day) Value: 7 vs. 21
  misc_feature: MA Experiment 20000185 PARAMETER Experiment Name: At_Roots__P Parameter: Organism Value: A. thaliana
  misc_feature: MA Experiment 20000185 PARAMETER Experiment Name: At_Roots__P Parameter: Tissue Value: Roots vs. Whole Plant
  misc_feature: MA Experiment ID: 20000213 Result: Down-regulated in Transcription
  misc_feature: MA Experiment 20000213 PARAMETER Experiment Name: At_4deg_Cold_P Parameter: Timepoint (hr) Value: 2
  misc_feature: MA Experiment ID: 20000224 Result: Down-regulated in Transcription
  misc_feature: MA Experiment ID: 20000234 Result: Down-regulated in Transcription
  misc_feature: MA Experiment 20000234 PARAMETER Experiment Name: At_Siliques_P Parameter: Age (day) Value: 21
  misc_feature: MA Experiment 20000234 PARAMETER Experiment Name: At_Siliques_P Parameter: Organism Value: A. thaliana
  misc_feature: MA Experiment 20000234 PARAMETER Experiment Name: At_Siliques_P Parameter: Plant Line Value: WS
  misc_feature: MA Experiment 20000234 PARAMETER Experiment Name: At_Siliques_P Parameter: Tissue Value: Less Than 5mm Siliques vs. Whole Plant
  misc_feature: MA Experiment ID: 20000264 Result: Down-regulated in Transcription
  misc_feature: MA Experiment 20000264 PARAMETER Experiment Name: At_Open_Flower_P Parameter: Age (day) Value: 21
  misc_feature: MA Experiment 20000264 PARAMETER Experiment Name: At_Open_Flower_P Parameter: Plant Line Value: WS
  misc_feature: MA Experiment 20000264 PARAMETER Experiment Name: At_Open_Flower_P Parameter: Tissue Value: Open Flower vs. Whole Plant
  misc_feature: MA Experiment ID: 20000286 Result: Down-regulated in Transcription
  misc_feature: MA Experiment 20000286 PARAMETER Experiment Name: At_Open_Flower_P Parameter: Age (day) Value: 21
  misc_feature: MA Experiment 20000286 PARAMETER Experiment Name: At_Open_Flower_P Parameter: Plant Line Value: WS
  misc_feature: MA Experiment 20000286 PARAMETER Experiment Name: At_Open_Flower_P Parameter: Tissue Value: Half Open vs. Whole Plant
  misc_feature: MA Experiment ID: 20000439 Result: Down-regulated in Transcription
  misc_feature: MA Experiment 20000439 PARAMETER Experiment Name: At_Roots__P Parameter: Age (day) Value: 14 vs. 21
  misc_feature: MA Experiment 20000439 PARAMETER Experiment Name: At_Roots__P Parameter: Organism Value: A. thaliana
  misc_feature: MA Experiment 20000439 PARAMETER Experiment Name: At_Roots__P Parameter: Tissue Value: Roots vs. Whole Plant
  misc_feature: MA Experiment ID: 20001247 Result: Up-regulated in Transcription
  misc_feature: MA Experiment 20001247 PARAMETER Experiment Name: At_Far-red-induction_P Parameter: Age (day) Value: 7
  misc_feature: MA Experiment 20001247 PARAMETER Experiment Name: At_Far-red-induction_P Parameter: Light Value: Far-red vs. White
  misc_feature: MA Experiment 20001247 PARAMETER Experiment Name: At_Far-red-induction_P Parameter: Organism Value: A. thaliana
  misc_feature: MA Experiment 20001247 PARAMETER Experiment Name: At_Far-red-induction_P Parameter: Plant Line Value: Columbia
  misc_feature: MA Experiment 20001247 PARAMETER Experiment Name: At_Far-red-induction_P Parameter: Timepoint (hr) Value: 1
  misc_feature: MA Experiment 20001247 PARAMETER Experiment Name: At_Far-red-induction_P Parameter: Tissue Value: Whole Plant
  misc_feature: MA Experiment ID: 20001248 Result: Up-regulated in Transcription
  misc_feature: MA Experiment 20001248 PARAMETER Experiment Name: At_Far-red-induction_P Parameter: Age (day) Value: 7
  misc_feature: MA Experiment 20001248 PARAMETER Experiment Name: At_Far-red-induction_P Parameter: Light Value: Far-red vs. White
  misc_feature: MA Experiment 20001248 PARAMETER Experiment Name: At_Far-red-induction_P Parameter: Organism Value: A. thaliana
  misc_feature: MA Experiment 20001248 PARAMETER Experiment Name: At_Far-red-induction_P Parameter: Plant Line Value: Columbia
  misc_feature: MA Experiment 20001248 PARAMETER Experiment Name: At_Far-red-induction_P Parameter: Timepoint (hr) Value: 4
  misc_feature: MA Experiment 20001248 PARAMETER Experiment Name: At_Far-red-induction_P Parameter: Tissue Value: Whole Plant
  misc_feature: MA Experiment ID: 20001450 Result: Up-regulated in Transcription
  misc_feature: MA Experiment 20001450 PARAMETER Experiment Name: At_Far-red-induction_P Parameter: Age (day) Value: 7
  misc_feature: MA Experiment 20001450 PARAMETER Experiment Name: At_Far-red-induction_P Parameter: Light Value: Far-red vs. White
  misc_feature: MA Experiment 20001450 PARAMETER Experiment Name: At_Far-red-induction_P Parameter: Organism Value: A. thaliana
  misc_feature: MA Experiment 20001450 PARAMETER Experiment Name: At_Far-red-induction_P Parameter: Plant Line Value: Columbia
  misc_feature: MA Experiment 20001450 PARAMETER Experiment Name: At_Far-red-induction_P Parameter: Timepoint (hr) Value: 8
  misc_feature: MA Experiment 20001450 PARAMETER Experiment Name: At_Far-red-induction_P Parameter: Tissue Value: Whole Plant
  misc_feature: MA Experiment ID: 20001451 Result: Up-regulated in Transcription
  misc_feature: MA Experiment 20001451 PARAMETER Experiment Name: At_Far-red-induction_P Parameter: Age (day) Value: 7
  misc_feature: MA Experiment 20001451 PARAMETER Experiment Name: At_Far-red-induction_P Parameter: Light Value: Far-red vs. White
  misc_feature: MA Experiment 20001451 PARAMETER Experiment Name: At_Far-red-induction_P Parameter: Organism Value: A. thaliana
  misc_feature: MA Experiment 20001451 PARAMETER Experiment Name: At_Far-red-induction_P Parameter: Plant Line Value: Columbia
  misc_feature: MA Experiment 20001451 PARAMETER Experiment Name: At_Far-red-induction_P Parameter: Timepoint (hr) Value: 24
  misc_feature: MA Experiment 20001451 PARAMETER Experiment Name: At_Far-red-induction_P Parameter: Tissue Value: Whole Plant
  misc_feature: MA Experiment ID: 20001556 Result: Down-regulated in Transcription
  misc_feature: MA Experiment 20001556 PARAMETER Experiment Name: At_Drought_Soil_Dry_P Parameter: Age (day) Value: 26
  misc_feature: MA Experiment 20001556 PARAMETER Experiment Name: At_Drought_Soil_Dry_P Parameter: Organism Value: A. thaliana
  misc_feature: MA Experiment 20001556 PARAMETER Experiment Name: At_Drought_Soil_Dry_P Parameter: Plant Line Value: WS
  misc_feature: MA Experiment 20001556 PARAMETER Experiment Name: At_Drought_Soil_Dry_P Parameter: Post Timepoint (hr) Value: None
  misc_feature: MA Experiment 20001556 PARAMETER Experiment Name: At_Drought_Soil_Dry_P Parameter: Post-Treatment Value: None
  misc_feature: MA Experiment 20001556 PARAMETER Experiment Name: At_Drought_Soil_Dry_P Parameter: Timepoint (day) Value: 12
  misc_feature: MA Experiment 20001556 PARAMETER Experiment Name: At_Drought_Soil_Dry_P Parameter: Treatment Value: Drought vs. No Drought
  misc_feature: MA Experiment ID: 20001557 Result: Down-regulated in Transcription
  misc_feature: MA Experiment 20001557 PARAMETER Experiment Name: At_Drought_Soil_Dry_P Parameter: Age (day) Value: 27
  misc_feature: MA Experiment 20001557 PARAMETER Experiment Name: At_Drought_Soil_Dry_P Parameter: Organism Value: A. thaliana
  misc_feature: MA Experiment 20001557 PARAMETER Experiment Name: At_Drought_Soil_Dry_P Parameter: Plant Line Value: WS
  misc_feature: MA Experiment 20001557 PARAMETER Experiment Name: At_Drought_Soil_Dry_P Parameter: Post Timepoint (hr) Value: 3
  misc_feature: MA Experiment 20001557 PARAMETER Experiment Name: At_Drought_Soil_Dry_P Parameter: Post-Treatment Value: Re-Water vs. No Drought
  misc_feature: MA Experiment 20001557 PARAMETER Experiment Name: At_Drought_Soil_Dry_P Parameter: Timepoint (day) Value: 13
  misc_feature: MA Experiment 20001557 PARAMETER Experiment Name: At_Drought_Soil_Dry_P Parameter: Treatment Value: Drought vs. No Drought
  misc_feature: MA Experiment ID: 20001558 Result: Down-regulated in Transcription
  misc_feature: MA Experiment 20001558 PARAMETER Experiment Name: At_Drought_Soil_Dry_P Parameter: Age (day) Value: 27
  misc_feature: MA Experiment 20001558 PARAMETER Experiment Name: At_Drought_Soil_Dry_P Parameter: Organism Value: A. thaliana
  misc_feature: MA Experiment 20001558 PARAMETER Experiment Name: At_Drought_Soil_Dry_P Parameter: Plant Line Value: WS
  misc_feature: MA Experiment 20001558 PARAMETER Experiment Name: At_Drought_Soil_Dry_P Parameter: Post Timepoint (hr) Value: 6
  misc_feature: MA Experiment 20001558 PARAMETER Experiment Name: At_Drought_Soil_Dry_P Parameter: Post-Treatment Value: Re-Water vs. No Drought
  misc_feature: MA Experiment 20001558 PARAMETER Experiment Name: At_Drought_Soil_Dry_P Parameter: Timepoint (day) Value: 13
  misc_feature: MA Experiment 20001558 PARAMETER Experiment Name: At_Drought_Soil_Dry_P Parameter: Treatment Value: Drought vs. No Drought
  misc_feature: MA Experiment ID: 20001559 Result: Down-regulated in Transcription
  misc_feature: MA Experiment 20001559 PARAMETER Experiment Name: At_Drought_Soil_Dry_P Parameter: Age (day) Value: 28
  misc_feature: MA Experiment 20001559 PARAMETER Experiment Name: At_Drought_Soil_Dry_P Parameter: Organism Value: A. thaliana
  misc_feature: MA Experiment 20001559 PARAMETER Experiment Name: At_Drought_Soil_Dry_P Parameter: Plant Line Value: WS
  misc_feature: MA Experiment 20001559 PARAMETER Experiment Name: At_Drought_Soil_Dry_P Parameter: Post Timepoint (hr) Value: 29
  misc_feature: MA Experiment 20001559 PARAMETER Experiment Name: At_Drought_Soil_Dry_P Parameter: Post-Treatment Value: Re-Water vs. No Drought
  misc_feature: MA Experiment 20001559 PARAMETER Experiment Name: At_Drought_Soil_Dry_P Parameter: Timepoint (day) Value: 14
  misc_feature: MA Experiment 20001559 PARAMETER Experiment Name: At_Drought_Soil_Dry_P Parameter: Treatment Value: Drought vs. No Drought
  misc_feature: MA Experiment ID: 20001560 Result: Down-regulated in Transcription
  misc_feature: MA Experiment 20001560 PARAMETER Experiment Name: At_Drought_Soil_Dry_P Parameter: Age (day) Value: 28
  misc_feature: MA Experiment 20001560 PARAMETER Experiment Name: At_Drought_Soil_Dry_P Parameter: Organism Value: A. thaliana
  misc_feature: MA Experiment 20001560 PARAMETER Experiment Name: At_Drought_Soil_Dry_P Parameter: Plant Line Value: WS
  misc_feature: MA Experiment 20001560 PARAMETER Experiment Name: At_Drought_Soil_Dry_P Parameter: Post Timepoint (hr) Value: None
  misc_feature: MA Experiment 20001560 PARAMETER Experiment Name: At_Drought_Soil_Dry_P Parameter: Post-Treatment Value: None
  misc_feature: MA Experiment 20001560 PARAMETER Experiment Name: At_Drought_Soil_Dry_P Parameter: Timepoint (day) Value: 14
  misc_feature: MA Experiment 20001560 PARAMETER Experiment Name: At_Drought_Soil_Dry_P Parameter: Treatment Value: Drought vs. No Drought
  misc_feature: MA Experiment ID: 20001757 Result: Up-regulated in Transcription
  misc_feature: MA Experiment 20001757 PARAMETER Experiment Name: At_50mM_NH4NO3_L-to-H_P Parameter: Timepoint (hr) Value: 6
  misc_feature: MA Experiment 20001757 PARAMETER Experiment Name: At_50mM_NH4NO3_L-to-H_P Parameter: Tissue Value: Leaf
  misc_feature: MA Experiment 20001757 PARAMETER Experiment Name: At_50mM_NH4NO3_L-to-H_P Parameter: Treatment Value: 50mM NH4NO3 vs 100mM Mannitol
  misc_feature: MA Experiment ID: 20001904 Result: Down-regulated in Transcription
  misc_feature: MA Experiment 20001904 PARAMETER Experiment Name: At_Drought_Reproduction_P Parameter: Age (day) Value: 37
  misc_feature: MA Experiment 20001904 PARAMETER Experiment Name: At_Drought_Reproduction_P Parameter: Organism Value: A. thaliana
  misc_feature: MA Experiment 20001904 PARAMETER Experiment Name: At_Drought_Reproduction_P Parameter: Plant Line Value: WS
  misc_feature: MA Experiment 20001904 PARAMETER Experiment Name: At_Drought_Reproduction_P Parameter: Timepoint (day) Value: 7
  misc_feature: MA Experiment 20001904 PARAMETER Experiment Name: At_Drought_Reproduction_P Parameter: Tissue Value: Rosettes
  misc_feature: MA Experiment 20001904 PARAMETER Experiment Name: At_Drought_Reproduction_P Parameter: Treatment Value: Drought vs. No Drought
  misc_feature: Phenotype: ROSETTE LEAVES Petiole Length-Short Petioles
  misc_feature: Phenotype: ROSETTE LEAVES Shape-Oval
  misc_feature: Phenotype: ROSETTE LEAVES Petiole Length-Short Petioles
  misc_feature: Phenotype: ROSETTE LEAVES Shape-Oval
  misc_feature: Phenotype: ROSETTE LEAVES Petiole Length-Short Petioles
  misc_feature: Phenotype: ROSETTE LEAVES Shape-Oval
  misc_feature: Phenotype: ROSETTE LEAVES Petiole Length-Short Petioles
  misc_feature: Phenotype: ROSETTE LEAVES Shape-Oval
  misc_feature: Phenotype: ROSETTE LEAVES Petiole Length-Short Petioles
  misc_feature: Phenotype: ROSETTE LEAVES Shape-Oval
  misc_feature: Phenotype: ROSETTE LEAVES Petiole Length-Short Petioles
  misc_feature: Phenotype: ROSETTE LEAVES Shape-Oval
  misc_feature: Phenotype: ROSETTE LEAVES Petiole Length-Short Petioles
  misc_feature: Phenotype: ROSETTE LEAVES Shape-Oval
  misc_feature: Phenotype: ROSETTE LEAVES Petiole Length-Short Petioles
  misc_feature: Phenotype: ROSETTE LEAVES Shape-Oval
  misc_feature: Phenotype: ROSETTE LEAVES Petiole Length-Short Petioles
  misc_feature: Phenotype: ROSETTE LEAVES Shape-Oval
  misc_feature: Phenotype: ROSETTE LEAVES Petiole Length-Short Petioles
  misc_feature: Phenotype: ROSETTE LEAVES Shape-Oval
tccattaatactctctctccctcatcctctcttcttctctcatcatcatcttcttcttcaatggccttcaccgcttttctcctcctcctctcttccatcgccgccggcttcctcctcctactccgccgtacacgttaccgtcggatgggtctgcctccgggaagccttggtctccctctgataggagagacttttcagctgatcggagcttacaaaacagagaaccctgagcctttcatcgacgagagagtagcccggtacggttcggttttcatgacgcatctttttggtgaaccgacgattttctcagctgacccggaaacgaaccggtttgttcttcagaacgaagggaagctttttgagtgttcttatcctgcttccatttgtaaccttttggggaaacactctctgcttcttatgaaaggttctttgcataaacgtatgcactctctcaccatgagctttgctaattcttcaatcattaaagaccatctcatgcttgatattgaccggttagtccggtttaatcttgattcttggtcttctcgtgttctcctcatggaagaagccaaaaagataacgtttgagctaacggtgaagcagttgatgagctttgatccaggggaatggagtgagagtttaaggaaagagtatcttcttgtcatcgaaggcttcttctctcttcctctccctctcttctccaccacttaccgcaaagccatccaagcgcggaggaaggtggcggaggcgttgacggtggtggtgatgaaaaggagggaggaggaggaagaaggagcggagagaaagaaagatatgcttgcggcgttgcttgcggcggatgatggattttccgatgaagagattgttgacttcttggtggctttacttgtcgccggttatgaaacaacctccacgatcatgactctcgccgtcaaatttctcaccgagactcctttagctcttgctcaactcaaggaagagcatgaaaagattagggcaatgaagagtgattcgtatagtcttgaatggagtgattacaagtcaatgccattcacacaatgtgtggttaatgagacgctacgagtggctaacatcatcggcggtgttttcagacgtgcaatgacggatgttgagatcaaaggttataaaattccaaaagggtggaaagtattctcatcgtttagagcggttcatttagacccaaaccacttcaaagatgctcgcactttcaacccttggagatggcagagcaactcggtaacgacaggcccttctaatgtgttcacaccgtttggtggagggccaaggctatgtcccggttacgagctggctagggttgcactctctgttttccttcaccgcctagtgacaggcttcagttgggttcctgcagagcaagacaagctggttttctttccaactacaagaacgcagaaacggtacccgatcttcgtgaagcgccgtgattttgctacttgaagaagaagagacccatctgattttatttatagaacaacagtatttttcaggattaatttcttcttctttttttgcctccttgtgggtctagtgtttgacaataaaagttatcattactctataaagccttagcttctgtgtacataaaaaaaaaaaacttttgtttaccttatgcttgcataaatctcttctgcttcaatggt

SEQ ID NO: 23409 - protein, 492 aa, Arabidopsis thaliana
  peptide (1)..(492): Ceres Seq. ID no. 12348721
  misc_feature (225)..(487): Pfam Name: Cytochrome P450 Pfam Description: Cytochrome P450
  misc_feature (51)..(489): Homolog of NCBI NO: 13878393 NR Description: Cytochrome P450 90C1 (ROTUNDIFOLIA3)
  misc_feature (52)..(487): Homolog of NCBI NO: 18400142 NR Description: cytochrome P450, putative
  misc_feature (51)..(489): Homolog of NCBI NO: 34903584 NR Description: cytochrome P450-like protein
  misc_feature (47)..(487): Homolog of NCBI NO: 34902330 NR Description: Putative steroid 22-alpha-hydroxylase
  misc_feature (267)..(487): Homolog of NCBI NO: 2935342 NR Description: steroid 22-alpha-hydroxylase; DWF4; CYP90B1
  misc_feature (27)..(314): Homolog of NCBI NO: 2935342 NR Description: steroid 22-alpha-hydroxylase; DWF4; CYP90B1
  misc_feature (267)..(487): Homolog of NCBI NO: 15229822 NR Description: steroid 22-alpha-hydroxylase (DWF4)
  misc_feature (27)..(314): Homolog of NCBI NO: 15229822 NR Description: steroid 22-alpha-hydroxylase (DWF4)
  misc_feature (27)..(489): Homolog of NCBI NO: 9587211 NR Description: cytochrome P450 [Vigna radiata]
  misc_feature (21)..(492): Homolog of NCBI NO: 15239203 NR Description: cytochrome p450, putative
SINTLSPSSSLLLSSSSSSSMAFTAFLLLLSSIAAGFLLLLRRTRYRRMGLPPGSLGLPLIGETFQLIGAYKTENPEPFIDERVARYGSVFMTHLFGEPTIFSADPETNRFVLQNEGKLFECSYPASICNLLGKHSLLLMKGSLHKRMHSLTMSFANSSIIKDHLMLDIDRLVRFNLDSWSSRVLLMEEAKKITFELTVKQLMSFDPGEWSESLRKEYLLVIEGFFSLPLPLFSTTYRKAIQARRKVAEALTVVVMKRREEEEEGAERKKDMLAALLAADDGFSDEEIVDFLVALLVAGYETTSTIMTLAVKFLTETPLALAQLKEEHEKIRAMKSDSYSLEWSDYKSMPFTQCVVNETLRVANIIGGVFRRAMTDVEIKGYKIPKGWKVFSSFRAVHLDPNHFKDARTFNPWRWQSNSVTTGPSNVFTPFGGGPRLCPGYELARVALSVFLHRLVTGFSWVPAEQDKLVFFPTTRTQKRYPIFVKRRDFAT

SEQ ID NO: 23410 - protein, 472 aa, Arabidopsis thaliana
  peptide (1)..(472): Ceres Seq. ID no. 12348722
  misc_feature (205)..(467): Pfam Name: Cytochrome P450 Pfam Description: Cytochrome P450
  misc_feature (31)..(469): Homolog of NCBI NO: 13878393 NR Description: Cytochrome P450 90C1 (ROTUNDIFOLIA3)
  misc_feature (32)..(467): Homolog of NCBI NO: 18400142 NR Description: cytochrome P450, putative
  misc_feature (31)..(469): Homolog of NCBI NO: 34903584 NR Description: cytochrome P450-like protein
  misc_feature (27)..(467): Homolog of NCBI NO: 34902330 NR Description: Putative steroid 22-alpha-hydroxylase
  misc_feature (247)..(467): Homolog of NCBI NO: 2935342 NR Description: steroid 22-alpha-hydroxylase; DWF4; CYP90B1
  misc_feature (7)..(294): Homolog of NCBI NO: 2935342 NR Description: steroid 22-alpha-hydroxylase; DWF4; CYP90B1
  misc_feature (247)..(467): Homolog of NCBI NO: 15229822 NR Description: steroid 22-alpha-hydroxylase (DWF4)
  misc_feature (7)..(294): Homolog of NCBI NO: 15229822 NR Description: steroid 22-alpha-hydroxylase (DWF4)
  misc_feature (7)..(469): Homolog of NCBI NO: 9587211 NR Description: cytochrome P450 [Vigna radiata]
  misc_feature (1)..(472): Homolog of NCBI NO: 15239203 NR Description: cytochrome p450, putative
MAFTAFLLLLSSIAAGFLLLLRRTRYRRMGLPPGSLGLPLIGETFQLIGAYKTENPEPFIDERVARYGSVFMTHLFGEPTIFSADPETNRFVLQNEGKLFECSYPASICNLLGKHSLLLMKGSLHKRMHSLTMSFANSSIIKDHLMLDIDRLVRFNLDSWSSRVLLMEEAKKITFELTVKQLMSFDPGEWSESLRKEYLLVIEGFFSLPLPLFSTTYRKAIQARRKVAEALTVVVMKRREEEEEGAERKKDMLAALLAADDGFSDEEIVDFLVALLVAGYETTSTIMTLAVKFLTETPLALAQLKEEHEKIRAMKSDSYSLEWSDYKSMPFTQCVVNETLRVANIIGGVFRRAMTDVEIKGYKIPKGWKVFSSFRAVHLDPNHFKDARTFNPWRWQSNSVTTGPSNVFTPFGGGPRLCPGYELARVALSVFLHRLVTGFSWVPAEQDKLVFFPTTRTQKRYPIFVKRRDFAT

SEQ ID NO: 23411 - protein, 444 aa, Arabidopsis thaliana
  peptide (1)..(444): Ceres Seq. ID no. 12348723
  misc_feature (177)..(439): Pfam Name: Cytochrome P450 Pfam Description: Cytochrome P450
  misc_feature (3)..(441): Homolog of NCBI NO: 13878393 NR Description: Cytochrome P450 90C1 (ROTUNDIFOLIA3)
  misc_feature (4)..(439): Homolog of NCBI NO: 18400142 NR Description: cytochrome P450, putative
  misc_feature (3)..(441): Homolog of NCBI NO: 34903584 NR Description: cytochrome P450-like protein
  misc_feature (1)..(439): Homolog of NCBI NO: 34902330 NR Description: Putative steroid 22-alpha-hydroxylase
  misc_feature (219)..(439): Homolog of NCBI NO: 2935342 NR Description: steroid 22-alpha-hydroxylase; DWF4; CYP90B1
  misc_feature (1)..(266): Homolog of NCBI NO: 2935342 NR Description: steroid 22-alpha-hydroxylase; DWF4; CYP90B1
  misc_feature (219)..(439): Homolog of NCBI NO: 15229822 NR Description: steroid 22-alpha-hydroxylase (DWF4)
  misc_feature (1)..(266): Homolog of NCBI NO: 15229822 NR Description: steroid 22-alpha-hydroxylase (DWF4)
  misc_feature (1)..(441): Homolog of NCBI NO: 9587211 NR Description: cytochrome P450 [Vigna radiata]
  misc_feature (1)..(444): Homolog of NCBI NO: 15239203 NR Description: cytochrome p450, putative
MGLPPGSLGLPLIGETFQLIGAYKTENPEPFIDERVARYGSVFMTHLFGEPTIFSADPETNRFVLQNEGKLFECSYPASICNLLGKHSLLLMKGSLHKRMHSLTMSFANSSIIKDHLMLDIDRLVRFNLDSWSSRVLLMEEAKKITFELTVKQLMSFDPGEWSESLRKEYLLVIEGFFSLPLPLFSTTYRKAIQARRKVAEALTVVVMKRREEEEEGAERKKDMLAALLAADDGFSDEEIVDFLVALLVAGYETTSTIMTLAVKFLTETPLALAQLKEEHEKIRAMKSDSYSLEWSDYKSMPFTQCVVNETLRVANIIGGVFRRAMTDVEIKGYKIPKGWKVFSSFRAVHLDPNHFKDARTFNPWRWQSNSVTTGPSNVFTPFGGGPRLCPGYELARVALSVFLHRLVTGFSWVPAEQDKLVFFPTTRTQKRYPIFVKRRDFAT

SEQ ID NO: 23412 - DNA, 1084 bp, Arabidopsis thaliana
  misc_feature (1)..(1084): Ceres Seq. ID no. 12422456
  misc_feature: MA Experiment ID: 108573 Result: Down-regulated in Transcription
  misc_feature: MA Experiment 108573 PARAMETER Experiment Name: At_Drought_cDNA_P Parameter: Timepoint (hr) Value: 6
  misc_feature: MA Experiment 108573 PARAMETER Experiment Name: At_Drought_cDNA_P Parameter: Tissue Value: Aerial
  misc_feature: MA Experiment 108573 PARAMETER Experiment Name: At_Drought_cDNA_P Parameter: Treatment Value: Drought vs. No Drought
  misc_feature: MA Experiment ID: 20000179 Result: Up-regulated in Transcription
  misc_feature: MA Experiment 20000179 PARAMETER Experiment Name: At_Germinating_Seeds_P Parameter: Age (hr) Value: 6 vs. 0
  misc_feature: MA Experiment 20000179 PARAMETER Experiment Name: At_Germinating_Seeds_P Parameter: Tissue Value: Germinating Seeds
  misc_feature: MA Experiment ID: 20000180 Result: Up-regulated in Transcription
  misc_feature: MA Experiment 20000180 PARAMETER Experiment Name: At_Germinating_Seeds_P Parameter: Age (hr) Value: 24 vs. 0
  misc_feature: MA Experiment 20000180 PARAMETER Experiment Name: At_Germinating_Seeds_P Parameter: Tissue Value: Germinating Seeds
  misc_feature: MA Experiment ID: 20000227 Result: Up-regulated in Transcription
  misc_feature: MA Experiment 20000227 PARAMETER Experiment Name: At_Root-Tips-vs-Tops_P Parameter: Tissue Value: Root Tips vs. Root Tops
  misc_feature: MA Experiment ID: 20000235 Result: Up-regulated in Transcription
  misc_feature: MA Experiment 20000235 PARAMETER Experiment Name: At_Siliques_P Parameter: Age (day) Value: 21
  misc_feature: MA Experiment 20000235 PARAMETER Experiment Name: At_Siliques_P Parameter: Organism Value: A. thaliana
  misc_feature: MA Experiment 20000235 PARAMETER Experiment Name: At_Siliques_P Parameter: Plant Line Value: WS
  misc_feature: MA Experiment 20000235 PARAMETER Experiment Name: At_Siliques_P Parameter: Tissue Value: 5-10mm Siliques vs. Whole Plant
  misc_feature: MA Experiment ID: 20001560 Result: Up-regulated in Transcription
  misc_feature: MA Experiment 20001560 PARAMETER Experiment Name: At_Drought_Soil_Dry_P Parameter: Age (day) Value: 28
  misc_feature: MA Experiment 20001560 PARAMETER Experiment Name: At_Drought_Soil_Dry_P Parameter: Organism Value: A. thaliana
  misc_feature: MA Experiment 20001560 PARAMETER Experiment Name: At_Drought_Soil_Dry_P Parameter: Plant Line Value: WS
  misc_feature: MA Experiment 20001560 PARAMETER Experiment Name: At_Drought_Soil_Dry_P Parameter: Post Timepoint (hr) Value: None
  misc_feature: MA Experiment 20001560 PARAMETER Experiment Name: At_Drought_Soil_Dry_P Parameter: Post-Treatment Value: None
  misc_feature: MA Experiment 20001560 PARAMETER Experiment Name: At_Drought_Soil_Dry_P Parameter: Timepoint (day) Value: 14
  misc_feature: MA Experiment 20001560 PARAMETER Experiment Name: At_Drought_Soil_Dry_P Parameter: Treatment Value: Drought vs. No Drought
  misc_feature: MA Experiment ID: 20001911 Result: Down-regulated in Transcription
  misc_feature: MA Experiment 20001911 PARAMETER Experiment Name: At_Drought_Reproduction_P Parameter: Age (day) Value: 40
  misc_feature: MA Experiment 20001911 PARAMETER Experiment Name: At_Drought_Reproduction_P Parameter: Organism Value: A. thaliana
  misc_feature: MA Experiment 20001911 PARAMETER Experiment Name: At_Drought_Reproduction_P Parameter: Plant Line Value: WS
  misc_feature: MA Experiment 20001911 PARAMETER Experiment Name: At_Drought_Reproduction_P Parameter: Timepoint (day) Value: 10
  misc_feature: MA Experiment 20001911 PARAMETER Experiment Name: At_Drought_Reproduction_P Parameter: Tissue Value: Flowers
  misc_feature: MA Experiment 20001911 PARAMETER Experiment Name: At_Drought_Reproduction_P Parameter: Treatment Value: Drought vs. No Drought
aaaaaggacttgaaatattgaaatccctattctttacgcgtactcgagatttttcgctcttgagagaatcacttcgacaatgtcggtaacggctgctttcattgattcggatcaaactcagcacaacattcttatggattcccaatcaactgtctccggtgtgaaaactgtcaagattagcaatgtttcactaattgtttctaagaaagatgtcaaagagttcttttctttctctggtgacattcaatacgtcgagatgcgaagtgagacacaagagagtcaggtcgcatatgttacttttaaggattcacaaggagctgaaactgcaatgctcttaacgggagctgtcattgcagatcttcgtgttagtataactcctgctgttaactatcagctaccaccagaagcccttgcacttgactcggaacattcgtttaatggtttttctgtcaagaaagctgaagatgtggtgaacatcatggtgggaagaggttatgctcttggaaaagacgccatggagaaagccaaagcatttgatgacagacacaacttgatctcaaacgcttctgcaaccattgcatcgcttgacgataagatgggtctgagcgaaaagctaagcataggaacaactgtggttaatgagaagttgagagatatcgatgagcgatatcaggtgagggagataacgaaatctgctttagcagctgctgaagagacagcaatcagtgcaagaacggctttaatggcaaacccttatgtatcaagtggagcttcgtggttttcaaacgcgtttggcgcagtgacaaaggcggttaaagagaaagttgagaatggaggagaaggaagaaaggagatcatcacacttgatccctcttcacccaaagttcctgctgtagttcctgttaagctcggttgatgcagatctcatcaaaccaatcggatctcgactaaattctttgataggtttgttgttcatatatatgctttcgtatgctaaagaaaagataaaaagacataaaccatgaaaggtgttgttacattcaaccagcatttgttcctctcttgaaagagattattaagattc

SEQ ID NO: 23413 - protein, 278 aa, Arabidopsis thaliana
  peptide (1)..(278): Ceres Seq. ID no. 12422457
  misc_feature (31)..(98): Pfam Name: RNA recognition motif. (a.k.a. RRM, RBD, or RNP domain) Pfam Description: RNA recognition motif. (a.k.a. RRM, RBD, or RNP
  misc_feature (60)..(278): Homolog of NCBI NO: 25404689 NR Description: unknown protein, 64612-65506 [imported] -
  misc_feature (60)..(278): Homolog of NCBI NO: 30697600 NR Description: RNA recognition motif (RRM)-containing protein
  misc_feature (1)..(248): Homolog of NCBI NO: 26450623 NR Description: unknown protein [Arabidopsis thaliana]
  misc_feature (30)..(247): Homolog of NCBI NO: 18414951 NR Description: RRM-containing protein
  misc_feature (26)..(266): Homolog of NCBI NO: 38347069 NR Description: OSJNBa0006A01.10 [Oryza sativa (japonica
  misc_feature (28)..(260): Homolog of NCBI NO: 18071362 NR Description: putative splicing regulatory protein
  misc_feature (28)..(263): Homolog of NCBI NO: 38344181 NR Description: OSJNBa0053K19.20 [Oryza sativa (japonica
  misc_feature (1)..(278): Homolog of NCBI NO: 30697595 NR Description: RNA recognition motif (RRM)-containing protein
  misc_feature (1)..(278): Homolog of NCBI NO: 30697598 NR Description: RNA recognition motif (RRM)-containing protein
  misc_feature (1)..(278): Homolog of NCBI NO: 18408904 NR Description: RRM-containing protein
MSVTAAFIDSDQTQHNILMDSQSTVSGVKTVKISNVSLIVSKKDVKEFFSFSGDIQYVEMRSETQESQVAYVTFKDSQGAETAMLLTGAVIADLRVSITPAVNYQLPPEALALDSEHSFNGFSVKKAEDVVNIMVGRGYALGKDAMEKAKAFDDRHNLISNASATIASLDDKMGLSEKLSIGTTVVNEKLRDIDERYQVREITKSALAAAEETAISARTALMANPYVSSGASWFSNAFGAVTKAVKEKVENGGEGRKEIITLDPSSPKVPAVVPVKLG

SEQ ID NO: 23414 - protein, 260 aa, Arabidopsis thaliana
  peptide (1)..(260): Ceres Seq. ID no. 12422458
  misc_feature (13)..(80): Pfam Name: RNA recognition motif. (a.k.a. RRM, RBD, or RNP domain) Pfam Description: RNA recognition motif. (a.k.a. RRM, RBD, or RNP
  misc_feature (12)..(229): Homolog of NCBI NO: 18414951 NR Description: RRM-containing protein
  misc_feature (10)..(245): Homolog of NCBI NO: 38344181 NR Description: OSJNBa0053K19.20 [Oryza sativa (japonica
  misc_feature (8)..(248): Homolog of NCBI NO: 38347069 NR Description: OSJNBa0006A01.10 [Oryza sativa (japonica
  misc_feature (10)..(242): Homolog of NCBI NO: 18071362 NR Description: putative splicing regulatory protein
  misc_feature (42)..(260): Homolog of NCBI NO: 25404689 NR Description: unknown protein, 64612-65506 [imported] -
  misc_feature (42)..(260): Homolog of NCBI NO: 30697600 NR Description: RNA recognition motif (RRM)-containing protein
  misc_feature (1)..(230): Homolog of NCBI NO: 26450623 NR Description: unknown protein [Arabidopsis thaliana]
  misc_feature (1)..(260): Homolog of NCBI NO: 30697595 NR Description: RNA recognition motif (RRM)-containing protein
  misc_feature (1)..(260): Homolog of NCBI NO: 30697598 NR Description: RNA recognition motif (RRM)-containing protein
  misc_feature (1)..(260): Homolog of NCBI NO: 18408904 NR Description: RRM-containing protein
MDSQSTVSGVKTVKISNVSLIVSKKDVKEFFSFSGDIQYVEMRSETQESQVAYVTFKDSQGAETAMLLTGAVIADLRVSITPAVNYQLPPEALALDSEHSFNGFSVKKAEDVVNIMVGRGYALGKDAMEKAKAFDDRHNLISNASATIASLDDKMGLSEKLSIGTTVVNEKLRDIDERYQVREITKSALAAAEETAISARTALMANPYVSSGASWFSNAFGAVTKAVKEKVENGGEGRKEIITLDPSSPKVPAVVPVKLG

SEQ ID NO: 23415 - protein, 219 aa, Arabidopsis thaliana
  peptide (1)..(219): Ceres Seq. ID no. 12422459
  misc_feature (1)..(188): Homolog of NCBI NO: 18414951 NR Description: RRM-containing protein
  misc_feature (1)..(204): Homolog of NCBI NO: 38344181 NR Description: OSJNBa0053K19.20 [Oryza sativa (japonica
  misc_feature (1)..(207): Homolog of NCBI NO: 38347069 NR Description: OSJNBa0006A01.10 [Oryza sativa (japonica
  misc_feature (1)..(201): Homolog of NCBI NO: 18071362 NR Description: putative splicing regulatory protein
  misc_feature (1)..(219): Homolog of NCBI NO: 25404689 NR Description: unknown protein, 64612-65506 [imported] -
  misc_feature (1)..(219): Homolog of NCBI NO: 30697600 NR Description: RNA recognition motif (RRM)-containing protein
  misc_feature (1)..(189): Homolog of NCBI NO: 26450623 NR Description: unknown protein [Arabidopsis thaliana]
  misc_feature (1)..(219): Homolog of NCBI NO: 30697595 NR Description: RNA recognition motif (RRM)-containing protein
  misc_feature (1)..(219): Homolog of NCBI NO: 30697598 NR Description: RNA recognition motif (RRM)-containing protein
  misc_feature (1)..(219): Homolog of NCBI NO: 18408904 NR Description: RRM-containing protein
MRSETQESQVAYVTFKDSQGAETAMLLTGAVIADLRVSITPAVNYQLPPEALALDSEHSFNGFSVKKAEDVVNIMVGRGYALGKDAMEKAKAFDDRHNLISNASATIASLDDKMGLSEKLSIGTTVVNEKLRDIDERYQVREITKSALAAAEETAISARTALMANPYVSSGASWFSNAFGAVTKAVKEKVENGGEGRKEIITLDPSSPKVPAVVPVKLG

SEQ ID NO: 23416 - DNA, 1456 bp, Arabidopsis thaliana
  misc_feature (1)..(1456): Ceres Seq. ID no. 12371577
  misc_feature: MA Experiment ID: 108461 Result: Down-regulated in Transcription
  misc_feature: MA Experiment 108461 PARAMETER Experiment Name: At_Germinating_Seeds_cDNA_P Parameter: Age (day) Value: 1 vs. 0
  misc_feature: MA Experiment 108461 PARAMETER Experiment Name: At_Germinating_Seeds_cDNA_P Parameter: Tissue Value: Germinating Seeds
  misc_feature: MA Experiment ID: 108462 Result: Down-regulated in Transcription
  misc_feature: MA Experiment 108462 PARAMETER Experiment Name: At_Germinating_Seeds_cDNA_P Parameter: Age (day) Value: 2 vs. 0
  misc_feature: MA Experiment 108462 PARAMETER Experiment Name: At_Germinating_Seeds_cDNA_P Parameter: Tissue Value: Germinating Seeds
  misc_feature: MA Experiment ID: 108463 Result: Down-regulated in Transcription
  misc_feature: MA Experiment 108463 PARAMETER Experiment Name: At_Germinating_Seeds_cDNA_P Parameter: Age (day) Value: 3 vs. 0
  misc_feature: MA Experiment 108463 PARAMETER Experiment Name: At_Germinating_Seeds_cDNA_P Parameter: Tissue Value: Germinating Seeds
  misc_feature: MA Experiment ID: 108464 Result: Down-regulated in Transcription
  misc_feature: MA Experiment 108464 PARAMETER Experiment Name: At_Germinating_Seeds_cDNA_P Parameter: Age (day) Value: 4 vs. 0
  misc_feature: MA Experiment 108464 PARAMETER Experiment Name: At_Germinating_Seeds_cDNA_P Parameter: Tissue Value: Germinating Seeds
  misc_feature: MA Experiment ID: 108473 Result: Up-regulated in Transcription
  misc_feature: MA Experiment 108473 PARAMETER Experiment Name: At_Drought_Flowers_cDNA_P Parameter: Timepoint (hr) Value: 7 d
  misc_feature: MA Experiment 108473 PARAMETER Experiment Name: At_Drought_Flowers_cDNA_P Parameter: Tissue Value: Flower
  misc_feature: MA Experiment 108473 PARAMETER Experiment Name: At_Drought_Flowers_cDNA_P Parameter: Treatment Value: Drought vs. No Drought
  misc_feature: MA Experiment ID: 108488 Result: Down-regulated in Transcription
  misc_feature: MA Experiment ID: 108572 Result: Up-regulated in Transcription
  misc_feature: MA Experiment 108572 PARAMETER Experiment Name: At_Drought_cDNA_P Parameter: Timepoint (hr) Value: 1
  misc_feature: MA Experiment 108572 PARAMETER Experiment Name: At_Drought_cDNA_P Parameter: Tissue Value: Aerial
  misc_feature: MA Experiment 108572 PARAMETER Experiment Name: At_Drought_cDNA_P Parameter: Treatment Value: Drought vs. No Drought
  misc_feature: MA Experiment ID: 108573 Result: Up-regulated in Transcription
  misc_feature: MA Experiment 108573 PARAMETER Experiment Name: At_Drought_cDNA_P Parameter: Timepoint (hr) Value: 6
  misc_feature: MA Experiment 108573 PARAMETER Experiment Name: At_Drought_cDNA_P Parameter: Tissue Value: Aerial
  misc_feature: MA Experiment 108573 PARAMETER Experiment Name: At_Drought_cDNA_P Parameter: Treatment Value: Drought vs. No Drought
  misc_feature: MA Experiment ID: 108574 Result: Up-regulated in Transcription
  misc_feature: MA Experiment 108574 PARAMETER Experiment Name: At_Wounding__cDNA_P Parameter: Timepoint (hr) Value: 1
  misc_feature: MA Experiment 108574 PARAMETER Experiment Name: At_Wounding__cDNA_P Parameter: Tissue Value: Aerial
  misc_feature: MA Experiment 108574 PARAMETER Experiment Name: At_Wounding__cDNA_P Parameter: Treatment Value: Wounding vs. No Wounding
  misc_feature: MA Experiment ID: 108576 Result: Up-regulated in Transcription
  misc_feature: MA Experiment 108576 PARAMETER Experiment Name: At_42deg_Heat_cDNA_P Parameter: Temperature (deg C) Value: 42 vs. 22
  misc_feature: MA Experiment 108576 PARAMETER Experiment Name: At_42deg_Heat_cDNA_P Parameter: Timepoint (hr) Value: 1
  misc_feature: MA Experiment 108576 PARAMETER Experiment Name: At_42deg_Heat_cDNA_P Parameter: Tissue Value: Aerial
  misc_feature: MA Experiment ID: 108579 Result: Up-regulated in Transcription
  misc_feature: MA Experiment 108579 PARAMETER Experiment Name: At_4deg_Cold_cDNA_P Parameter: Temperature (deg C) Value: 4 vs. 22
  misc_feature: MA Experiment 108579 PARAMETER Experiment Name: At_4deg_Cold_cDNA_P Parameter: Timepoint (hr) Value: 6
  misc_feature: MA Experiment 108579 PARAMETER Experiment Name: At_4deg_Cold_cDNA_P Parameter: Tissue Value: Aerial
  misc_feature: MA Experiment ID: 108585 Result: Up-regulated in Transcription
  misc_feature: MA Experiment 108585 PARAMETER Experiment Name: At_5mM_NaNP_cDNA_P Parameter: Timepoint (hr) Value: 6
  misc_feature: MA Experiment 108585 PARAMETER Experiment Name: At_5mM_NaNP_cDNA_P Parameter: Tissue Value: Aerial
  misc_feature: MA Experiment 108585 PARAMETER Experiment Name: At_5mM_NaNP_cDNA_P Parameter: Treatment Value: null
  misc_feature: MA Experiment ID: 108595 Result: Up-regulated in Transcription
  misc_feature: MA Experiment 108595 PARAMETER Experiment Name: At_Ler-pi_Ovule_cDNA_P Parameter: Plant Line Value: null
  misc_feature: MA Experiment ID: 108608 Result: Up-regulated in Transcription
  misc_feature: MA Experiment 108608 PARAMETER Experiment Name: At_100uM_ABA_cDNA_P Parameter: Timepoint (hr) Value: 1
  misc_feature: MA Experiment 108608 PARAMETER Experiment Name: At_100uM_ABA_cDNA_P Parameter: Tissue Value: Aerial
  misc_feature: MA Experiment 108608 PARAMETER Experiment Name: At_100uM_ABA_cDNA_P Parameter: Treatment Value: 100uM ABA vs. No Treatment
  misc_feature: MA Experiment ID: 108609 Result: Up-regulated in Transcription
  misc_feature: MA Experiment 108609 PARAMETER Experiment Name: At_100uM_ABA_cDNA_P Parameter: Timepoint (hr) Value: 24
  misc_feature: MA Experiment 108609 PARAMETER Experiment Name: At_100uM_ABA_cDNA_P Parameter: Tissue Value: Aerial
  misc_feature: MA Experiment 108609 PARAMETER Experiment Name: At_100uM_ABA_cDNA_P Parameter: Treatment Value: 100uM ABA vs. No Treatment
  misc_feature: MA Experiment ID: 108667 Result: Up-regulated in Transcription
  misc_feature: MA Experiment 108667 PARAMETER Experiment Name: At_2mM_SA_cDNA_P Parameter: Plant Line Value: WS
  misc_feature: MA Experiment 108667 PARAMETER Experiment Name: At_2mM_SA_cDNA_P Parameter: Timepoint (hr) Value: 1
  misc_feature: MA Experiment 108667 PARAMETER Experiment Name: At_2mM_SA_cDNA_P Parameter: Treatment Value: 2mM SA vs. No Treatment
  misc_feature: MA Experiment ID: 108668 Result: Up-regulated in Transcription
  misc_feature: MA Experiment 108668 PARAMETER Experiment Name: At_2mM_SA_cDNA_P Parameter: Plant Line Value: WS
  misc_feature: MA Experiment 108668 PARAMETER Experiment Name: At_2mM_SA_cDNA_P Parameter: Timepoint (hr) Value: 6
  misc_feature: MA Experiment 108668 PARAMETER Experiment Name: At_2mM_SA_cDNA_P Parameter: Treatment Value: 2mM SA vs. No Treatment
  misc_feature: MA Experiment ID: 20000071 Result: Up-regulated in Transcription
  misc_feature: MA Experiment 20000071 PARAMETER Experiment Name: At_100uM_ABA_Mutants_cDNA_P Parameter: Plant Line Value: CS8104
  misc_feature: MA Experiment 20000071 PARAMETER Experiment Name: At_100uM_ABA_Mutants_cDNA_P Parameter: Timepoint (hr) Value: 6
  misc_feature: MA Experiment 20000071 PARAMETER Experiment Name: At_100uM_ABA_Mutants_cDNA_P Parameter: Tissue Value: Aerial
  misc_feature: MA Experiment 20000071 PARAMETER Experiment Name: At_100uM_ABA_Mutants_cDNA_P Parameter: Treatment Value: 100uM ABA vs. No Treatment
  misc_feature: MA Experiment ID: 20000072 Result: Up-regulated in Transcription
  misc_feature: MA Experiment 20000072 PARAMETER Experiment Name: At_100uM_ABA_Mutants_cDNA_P Parameter: Plant Line Value: CS8105
  misc_feature: MA Experiment 20000072 PARAMETER Experiment Name: At_100uM_ABA_Mutants_cDNA_P Parameter: Timepoint (hr) Value: 6
  misc_feature: MA Experiment 20000072 PARAMETER Experiment Name: At_100uM_ABA_Mutants_cDNA_P Parameter: Tissue Value: Aerial
  misc_feature: MA Experiment 20000072 PARAMETER Experiment Name: At_100uM_ABA_Mutants_cDNA_P Parameter: Treatment Value: 100uM ABA vs. No Treatment
  misc_feature: MA Experiment ID: 20000086 Result: Up-regulated in Transcription
  misc_feature: MA Experiment 20000086 PARAMETER Experiment Name: At_100uM_ABA_Mutants_cDNA_P Parameter: Plant Line Value: CS22
  misc_feature: MA Experiment 20000086 PARAMETER Experiment Name: At_100uM_ABA_Mutants_cDNA_P Parameter: Timepoint (hr) Value: 6
  misc_feature: MA Experiment 20000086 PARAMETER Experiment Name: At_100uM_ABA_Mutants_cDNA_P Parameter: Tissue Value: Aerial
  misc_feature: MA Experiment 20000086 PARAMETER Experiment Name: At_100uM_ABA_Mutants_cDNA_P Parameter: Treatment Value: 100uM ABA vs. No Treatment
  misc_feature: MA Experiment ID: 20000087 Result: Up-regulated in Transcription
  misc_feature: MA Experiment 20000087 PARAMETER Experiment Name: At_100uM_ABA_Mutants_cDNA_P Parameter: Plant Line Value: WS
  misc_feature: MA Experiment 20000087 PARAMETER Experiment Name: At_100uM_ABA_Mutants_cDNA_P Parameter: Timepoint (hr) Value: 6
  misc_feature: MA Experiment 20000087 PARAMETER Experiment Name: At_100uM_ABA_Mutants_cDNA_P Parameter: Tissue Value: Aerial
  misc_feature: MA Experiment 20000087 PARAMETER Experiment Name: At_100uM_ABA_Mutants_cDNA_P Parameter: Treatment Value: 100uM ABA vs. No Treatment
  misc_feature: MA Experiment ID: 20000088 Result: Up-regulated in Transcription
  misc_feature: MA Experiment 20000088 PARAMETER Experiment Name: At_100uM_ABA_Mutants_cDNA_P Parameter: Plant Line Value: Landsberg
  misc_feature: MA Experiment 20000088 PARAMETER Experiment Name: At_100uM_ABA_Mutants_cDNA_P Parameter: Timepoint (hr) Value: 6
  misc_feature: MA Experiment 20000088 PARAMETER Experiment Name: At_100uM_ABA_Mutants_cDNA_P Parameter: Tissue Value: Aerial
  misc_feature: MA Experiment 20000088 PARAMETER Experiment Name: At_100uM_ABA_Mutants_cDNA_P Parameter: Treatment Value: 100uM ABA vs. No Treatment
  misc_feature: MA Experiment ID: 20000090 Result: Up-regulated in Transcription
  misc_feature: MA Experiment ID: 20000111 Result: Up-regulated in Transcription
  misc_feature: MA Experiment 20000111 PARAMETER Experiment Name: At_42deg_Heat_cDNA_P Parameter: Temperature (deg C) Value: 42 vs. 22
  misc_feature: MA Experiment 20000111 PARAMETER Experiment Name: At_42deg_Heat_cDNA_P Parameter: Timepoint (hr) Value: 6
  misc_feature: MA Experiment 20000111 PARAMETER Experiment Name: At_42deg_Heat_cDNA_P Parameter: Tissue Value: Aerial
  misc_feature: MA Experiment ID: 20000112 Result: Up-regulated in Transcription
  misc_feature: MA Experiment 20000112 PARAMETER Experiment Name: At_42deg_Heat_cDNA_P Parameter: Temperature (deg C) Value: 42 vs. 22
  misc_feature: MA Experiment 20000112 PARAMETER Experiment Name: At_42deg_Heat_cDNA_P Parameter: Timepoint (hr) Value: 2
  misc_feature: MA Experiment 20000112 PARAMETER Experiment Name: At_42deg_Heat_cDNA_P Parameter: Tissue Value: Aerial
  misc_feature: MA Experiment ID: 20000113 Result: Up-regulated in Transcription
  misc_feature: MA Experiment 20000113 PARAMETER Experiment Name: At_42deg_Heat_cDNA_P Parameter: Temperature (deg C) Value: 42 vs. 22
  misc_feature: MA Experiment 20000113 PARAMETER Experiment Name: At_42deg_Heat_cDNA_P Parameter: Timepoint (hr) Value: 8
  misc_feature: MA Experiment 20000113 PARAMETER Experiment Name: At_42deg_Heat_cDNA_P Parameter: Tissue Value: Aerial
  misc_feature: MA Experiment ID: 20000144 Result: Up-regulated in Transcription
  misc_feature: MA Experiment 20000144 PARAMETER Experiment Name: At_42deg_Heat_cDNA_P Parameter: Temperature (deg C) Value: 42 vs. 22
  misc_feature: MA Experiment 20000144 PARAMETER Experiment Name: At_42deg_Heat_cDNA_P Parameter: Timepoint (hr) Value: 1
  misc_feature: MA Experiment 20000144 PARAMETER Experiment Name: At_42deg_Heat_cDNA_P Parameter: Tissue Value: Aerial
  misc_feature: MA Experiment ID: 20000171 Result: Up-regulated in Transcription
  misc_feature: MA Experiment 20000171 PARAMETER Experiment Name: At_42deg_Heat_P Parameter: Age (day) Value: 14
  misc_feature: MA Experiment 20000171 PARAMETER Experiment Name: At_42deg_Heat_P Parameter: Organism Value: A. thaliana
  misc_feature: MA Experiment 20000171 PARAMETER Experiment Name: At_42deg_Heat_P Parameter: Plant Line Value: WS
  misc_feature: MA Experiment 20000171 PARAMETER Experiment Name: At_42deg_Heat_P Parameter: Temperature (deg C) Value: 42 vs. 22
  misc_feature: MA Experiment 20000171 PARAMETER Experiment Name: At_42deg_Heat_P Parameter: Timepoint (hr) Value: 1
  misc_feature: MA Experiment 20000171 PARAMETER Experiment Name: At_42deg_Heat_P Parameter: Tissue Value: Aerial
  misc_feature: MA Experiment ID: 20000173 Result: Up-regulated in Transcription
  misc_feature: MA Experiment 20000173 PARAMETER Experiment Name: At_42deg_Heat_P Parameter: Age (day) Value: 14
  misc_feature: MA Experiment 20000173 PARAMETER Experiment Name: At_42deg_Heat_P Parameter: Organism Value: A. thaliana
  misc_feature: MA Experiment 20000173 PARAMETER Experiment Name: At_42deg_Heat_P Parameter: Plant Line Value: WS
  misc_feature: MA Experiment 20000173 PARAMETER Experiment Name: At_42deg_Heat_P Parameter: Temperature (deg C) Value: 42 vs. 22
  misc_feature: MA Experiment 20000173 PARAMETER Experiment Name: At_42deg_Heat_P Parameter: Timepoint (hr) Value: 6
  misc_feature: MA Experiment 20000173 PARAMETER Experiment Name: At_42deg_Heat_P Parameter: Tissue Value: Aerial
  misc_feature: MA Experiment ID: 20000180 Result: Down-regulated in Transcription
  misc_feature: MA Experiment 20000180 PARAMETER Experiment Name: At_Germinating_Seeds_P Parameter: Age (hr) Value: 24 vs. 0
  misc_feature: MA Experiment 20000180 PARAMETER Experiment Name: At_Germinating_Seeds_P Parameter: Tissue Value: Germinating Seeds
  misc_feature: MA Experiment ID: 20000182 Result: Up-regulated in Transcription
  misc_feature: MA Experiment 20000182 PARAMETER Experiment Name: At_2mM_SA_P Parameter: Age (day) Value: 14
  misc_feature: MA Experiment 20000182 PARAMETER Experiment Name: At_2mM_SA_P Parameter: Organism Value: A. thaliana
  misc_feature: MA Experiment 20000182 PARAMETER Experiment Name: At_2mM_SA_P Parameter: Plant Line Value: WS
  misc_feature: MA Experiment 20000182 PARAMETER Experiment Name: At_2mM_SA_P Parameter: Timepoint (hr) Value: 6
  misc_feature: MA Experiment 20000182 PARAMETER Experiment Name: At_2mM_SA_P Parameter: Tissue Value: Aerial
  misc_feature: MA Experiment 20000182 PARAMETER Experiment Name: At_2mM_SA_P Parameter: Treatment Value: 2mM SA vs. No Treatment
  misc_feature: MA Experiment ID: 20000184 Result: Down-regulated in Transcription
  misc_feature: MA Experiment 20000184 PARAMETER Experiment Name: At_Shoots__P Parameter: Age (day) Value: 7
  misc_feature: MA Experiment 20000184 PARAMETER Experiment Name: At_Shoots__P Parameter: Tissue Value: Shoots vs. Whole Plant
  misc_feature: MA Experiment ID: 20000234 Result: Down-regulated in Transcription
  misc_feature: MA Experiment 20000234 PARAMETER Experiment Name: At_Siliques_P Parameter: Age (day) Value: 21
  misc_feature: MA Experiment 20000234 PARAMETER Experiment Name: At_Siliques_P Parameter: Organism Value: A. thaliana
  misc_feature: MA Experiment 20000234 PARAMETER Experiment Name: At_Siliques_P Parameter: Plant Line Value: WS
  misc_feature: MA Experiment 20000234 PARAMETER Experiment Name: At_Siliques_P Parameter: Tissue Value: Less Than 5mm Siliques vs. Whole Plant
  misc_feature: MA Experiment ID: 20000235 Result: Down-regulated in Transcription
  misc_feature: MA Experiment 20000235 PARAMETER Experiment Name: At_Siliques_P Parameter: Age (day) Value: 21
  misc_feature: MA Experiment 20000235 PARAMETER Experiment Name: At_Siliques_P Parameter: Organism Value: A. thaliana
  misc_feature: MA Experiment 20000235 PARAMETER Experiment Name: At_Siliques_P Parameter: Plant Line Value: WS
  misc_feature: MA Experiment 20000235 PARAMETER Experiment Name: At_Siliques_P Parameter: Tissue Value: 5-10mm Siliques vs. Whole Plant
  misc_feature: MA Experiment ID: 20000264 Result: Down-regulated in Transcription
  misc_feature: MA Experiment 20000264 PARAMETER Experiment Name: At_Open_Flower_P Parameter: Age (day) Value: 21
  misc_feature: MA Experiment 20000264 PARAMETER Experiment Name: At_Open_Flower_P Parameter: Plant Line Value: WS
  misc_feature: MA Experiment 20000264 PARAMETER Experiment Name: At_Open_Flower_P Parameter: Tissue Value: Open Flower vs. Whole Plant
  misc_feature: MA Experiment ID: 20000265 Result: Down-regulated in Transcription
  misc_feature: MA Experiment 20000265 PARAMETER Experiment Name: At_Open_Flower_P Parameter: Age (day) Value: 21
  misc_feature: MA Experiment 20000265 PARAMETER Experiment Name: At_Open_Flower_P Parameter: Plant Line Value: WS
  misc_feature: MA Experiment 20000265 PARAMETER Experiment Name: At_Open_Flower_P Parameter: Tissue Value: Closed Flower vs. Whole Plant
  misc_feature: MA Experiment ID: 20000267 Result: Up-regulated in Transcription
  misc_feature: MA Experiment 20000267 PARAMETER Experiment Name: At_Drought_P Parameter: Age (day) Value: 7
  misc_feature: MA Experiment 20000267 PARAMETER Experiment Name: At_Drought_P Parameter: Organism Value: A. thaliana
  misc_feature: MA Experiment 20000267 PARAMETER Experiment Name: At_Drought_P Parameter: Plant Line Value: WS
  misc_feature: MA Experiment 20000267 PARAMETER Experiment Name: At_Drought_P Parameter: Timepoint (hr) Value: 6
  misc_feature: MA Experiment 20000267 PARAMETER Experiment Name: At_Drought_P Parameter: Tissue Value: Whole Plant
  misc_feature: MA Experiment 20000267 PARAMETER Experiment Name: At_Drought_P Parameter: Treatment Value: Drought vs. No Drought
  misc_feature: MA Experiment ID: 20000268 Result: Up-regulated in Transcription
  misc_feature: MA Experiment 20000268 PARAMETER Experiment Name: At_100mM_NaCl__P Parameter: Age (day) Value: 14
  misc_feature: MA Experiment 20000268 PARAMETER Experiment Name: At_100mM_NaCl__P Parameter: Organism Value: A. thaliana
  misc_feature: MA Experiment 20000268 PARAMETER Experiment Name: At_100mM_NaCl__P Parameter: Plant Line Value: WS
  misc_feature: MA Experiment 20000268 PARAMETER Experiment Name: At_100mM_NaCl__P Parameter: Timepoint (hr) Value: 6
  misc_feature: MA Experiment 20000268 PARAMETER Experiment Name: At_100mM_NaCl__P Parameter: Tissue Value: Whole Plant
  misc_feature: MA Experiment 20000268 PARAMETER Experiment Name: At_100mM_NaCl__P Parameter: Treatment Value: 100mM NaCl vs. No Treatment
  misc_feature: MA Experiment ID: 20000286 Result: Down-regulated in Transcription
  misc_feature: MA Experiment 20000286 PARAMETER Experiment Name: At_Open_Flower_P Parameter: Age (day) Value: 21
  misc_feature: MA Experiment 20000286 PARAMETER Experiment Name: At_Open_Flower_P Parameter: Plant Line Value: WS
  misc_feature: MA Experiment 20000286 PARAMETER Experiment Name: At_Open_Flower_P Parameter: Tissue Value: Half Open vs. Whole Plant
  misc_feature: MA Experiment ID: 20000436 Result: Up-regulated in Transcription
  misc_feature: MA Experiment 20000436 PARAMETER Experiment Name: At_Drought_P Parameter: Age (day) Value: 7
  misc_feature: MA Experiment 20000436 PARAMETER Experiment Name: At_Drought_P Parameter: Organism Value: A. thaliana
  misc_feature: MA Experiment 20000436 PARAMETER Experiment Name: At_Drought_P Parameter: Plant Line Value: WS
  misc_feature: MA Experiment 20000436 PARAMETER Experiment Name: At_Drought_P Parameter: Timepoint (hr) Value: 12
  misc_feature: MA Experiment 20000436 PARAMETER Experiment Name: At_Drought_P Parameter: Tissue Value: Whole Plant
  misc_feature: MA Experiment 20000436 PARAMETER Experiment Name: At_Drought_P Parameter: Treatment Value: Drought vs. No Drought
  misc_feature: MA Experiment ID: 20000437 Result: Up-regulated in Transcription
  misc_feature: MA Experiment 20000437 PARAMETER Experiment Name: At_Drought_P Parameter: Age (day) Value: 8
  misc_feature: MA Experiment 20000437 PARAMETER Experiment Name: At_Drought_P Parameter: Organism Value: A. thaliana
  misc_feature: MA Experiment 20000437 PARAMETER Experiment Name: At_Drought_P Parameter: Plant Line Value: WS
  misc_feature: MA Experiment 20000437 PARAMETER Experiment Name: At_Drought_P Parameter: Timepoint (hr) Value: 24
  misc_feature: MA Experiment 20000437 PARAMETER Experiment Name: At_Drought_P Parameter: Tissue Value: Whole Plant
  misc_feature: MA Experiment 20000437 PARAMETER Experiment Name: At_Drought_P Parameter: Treatment Value: Drought vs. No Drought
  misc_feature: MA Experiment ID: 20000438 Result: Down-regulated in Transcription
  misc_feature: MA Experiment 20000438 PARAMETER Experiment Name: At_Shoots__P Parameter: Age (day) Value: 14
  misc_feature: MA Experiment 20000438 PARAMETER Experiment Name: At_Shoots__P Parameter: Tissue Value: Shoots vs. Whole Plant
  misc_feature: MA Experiment ID: 20000453 Result: Up-regulated in Transcription
  misc_feature: MA Experiment 20000453 PARAMETER Experiment Name: At_100uM_ABA_P Parameter: Age (day) Value: 15
  misc_feature: MA Experiment 20000453 PARAMETER Experiment Name: At_100uM_ABA_P Parameter: Organism Value: A. thaliana
  misc_feature: MA Experiment 20000453 PARAMETER Experiment Name: At_100uM_ABA_P Parameter: Plant Line Value: WS
  misc_feature: MA Experiment 20000453 PARAMETER Experiment Name: At_100uM_ABA_P Parameter: Timepoint (hr) Value: 24
  misc_feature: MA Experiment 20000453 PARAMETER Experiment Name: At_100uM_ABA_P Parameter: Tissue Value: Aerial
  misc_feature: MA Experiment 20000453 PARAMETER Experiment Name: At_100uM_ABA_P Parameter: Treatment Value: 100uM ABA vs. No Treatment
  misc_feature: MA Experiment ID: 20000460 Result: Up-regulated in Transcription
  misc_feature: MA Experiment 20000460 PARAMETER Experiment Name: At_10percent_PEG_P Parameter: Age (day) Value: 12
  misc_feature: MA Experiment 20000460 PARAMETER Experiment Name: At_10percent_PEG_P Parameter: Organism Value: A. thaliana
  misc_feature: MA Experiment 20000460 PARAMETER Experiment Name: At_10percent_PEG_P Parameter: Plant Line Value: WS
  misc_feature: MA Experiment 20000460 PARAMETER Experiment Name: At_10percent_PEG_P Parameter: Timepoint (day) Value: 12
  misc_feature: MA Experiment 20000460 PARAMETER Experiment Name: At_10percent_PEG_P Parameter: Tissue Value: Whole Plant
  misc_feature: MA Experiment 20000460 PARAMETER Experiment Name: At_10percent_PEG_P Parameter: Treatment Value: 10percent PEG vs. No Treatment
  misc_feature: MA Experiment ID: 20000495 Result: Down-regulated in Transcription
  misc_feature: MA Experiment 20000495 PARAMETER Experiment Name: At_Guard_Cells_P Parameter: Harvest Date Value: 8/2/2002
  misc_feature: MA Experiment 20000495 PARAMETER Experiment Name: At_Guard_Cells_P Parameter: Organism Value: A. thaliana
  misc_feature: MA Experiment 20000495 PARAMETER Experiment Name: At_Guard_Cells_P Parameter: Tissue Value: Guard Cells vs. Leaves
  misc_feature: MA Experiment ID: 20000527 Result: Up-regulated in Transcription
  misc_feature: MA Experiment 20000527 PARAMETER Experiment Name: At_10percent_PEG_P Parameter: Age (day) Value: 20
  misc_feature: MA Experiment 20000527 PARAMETER Experiment Name: At_10percent_PEG_P Parameter: Organism Value: A. thaliana
  misc_feature: MA Experiment 20000527 PARAMETER Experiment Name: At_10percent_PEG_P Parameter: Plant Line Value: WS
  misc_feature: MA Experiment 20000527 PARAMETER Experiment Name: At_10percent_PEG_P Parameter: Timepoint (day) Value: 20
  misc_feature: MA Experiment 20000527 PARAMETER Experiment Name: At_10percent_PEG_P Parameter: Tissue Value: Whole Plant
  misc_feature: MA Experiment 20000527 PARAMETER Experiment Name: At_10percent_PEG_P Parameter: Treatment Value: 10percent PEG vs. No Treatment
  misc_feature: MA Experiment ID: 20000709 Result: Up-regulated in Transcription
  misc_feature: MA Experiment 20000709 PARAMETER Experiment Name: At_15mM_NH4NO3_L-to-H_P Parameter: Age (hr) Value: 14
  misc_feature: MA Experiment 20000709 PARAMETER Experiment Name: At_15mM_NH4NO3_L-to-H_P Parameter: Organism Value: A. thaliana
  misc_feature: MA Experiment 20000709 PARAMETER Experiment Name: At_15mM_NH4NO3_L-to-H_P Parameter: Plant Line Value: WS
  misc_feature: MA Experiment 20000709 PARAMETER Experiment Name: At_15mM_NH4NO3_L-to-H_P Parameter: Timepoint (hr) Value: 4
  misc_feature: MA Experiment 20000709 PARAMETER Experiment Name: At_15mM_NH4NO3_L-to-H_P Parameter: Tissue Value: Aerial
  misc_feature: MA Experiment 20000709 PARAMETER Experiment Name: At_15mM_NH4NO3_L-to-H_P Parameter: Treatment Value: 15mM NH4NO3 vs. 30mM Mannitol
  misc_feature: MA Experiment ID: 20001458 Result: Up-regulated in Transcription
  misc_feature: MA Experiment 20001458 PARAMETER Experiment Name: At_50mM_NH4NO3_L-to-H_P Parameter: Age (day) Value: Undefined
  misc_feature: MA Experiment 20001458 PARAMETER Experiment Name: At_50mM_NH4NO3_L-to-H_P Parameter: Organism Value: Undefined
  misc_feature: MA Experiment 20001458 PARAMETER Experiment Name: At_50mM_NH4NO3_L-to-H_P Parameter: Plant Line Value: Undefined
  misc_feature: MA Experiment 20001458 PARAMETER Experiment Name: At_50mM_NH4NO3_L-to-H_P Parameter: Timepoint (hr) Value: 2
  misc_feature: MA Experiment 20001458 PARAMETER Experiment Name: At_50mM_NH4NO3_L-to-H_P Parameter: Tissue Value: Siliques
  misc_feature: MA Experiment 20001458 PARAMETER Experiment Name: At_50mM_NH4NO3_L-to-H_P Parameter: Treatment Value: 50mM NH4NO3 vs. 100mM Manitol
  misc_feature: MA Experiment ID: 20001554 Result: Up-regulated in Transcription
  misc_feature: MA Experiment 20001554 PARAMETER Experiment Name: At_Drought_Soil_Dry_P Parameter: Age (day) Value: 21
  misc_feature: MA Experiment 20001554 PARAMETER Experiment Name: At_Drought_Soil_Dry_P Parameter: Organism Value: A. thaliana
  misc_feature: MA Experiment 20001554 PARAMETER Experiment Name: At_Drought_Soil_Dry_P Parameter: Plant Line Value: WS
  misc_feature: MA Experiment 20001554 PARAMETER Experiment Name: At_Drought_Soil_Dry_P Parameter: Post Timepoint (hr) Value: None
  misc_feature: MA Experiment 20001554 PARAMETER Experiment Name: At_Drought_Soil_Dry_P Parameter: Post-Treatment Value: None
  misc_feature: MA Experiment 20001554 PARAMETER Experiment Name: At_Drought_Soil_Dry_P Parameter: Timepoint (day) Value: 7
  misc_feature: MA Experiment 20001554 PARAMETER Experiment Name: At_Drought_Soil_Dry_P Parameter: Treatment Value: Drought vs. No Drought
  misc_feature: MA Experiment ID: 20001556 Result: Up-regulated in Transcription
  misc_feature: MA Experiment 20001556 PARAMETER Experiment Name: At_Drought_Soil_Dry_P Parameter: Age (day) Value: 26
  misc_feature: MA Experiment 20001556 PARAMETER Experiment Name: At_Drought_Soil_Dry_P Parameter: Organism Value: A. thaliana
  misc_feature: MA Experiment 20001556 PARAMETER Experiment Name: At_Drought_Soil_Dry_P Parameter: Plant Line Value: WS
  misc_feature: MA Experiment 20001556 PARAMETER Experiment Name: At_Drought_Soil_Dry_P Parameter: Post Timepoint (hr) Value: None
  misc_feature: MA Experiment 20001556 PARAMETER Experiment Name: At_Drought_Soil_Dry_P Parameter: Post-Treatment Value: None
  misc_feature: MA Experiment 20001556 PARAMETER Experiment Name: At_Drought_Soil_Dry_P Parameter: Timepoint (day) Value: 12
  misc_feature: MA Experiment 20001556 PARAMETER Experiment Name: At_Drought_Soil_Dry_P Parameter: Treatment Value: Drought vs. No Drought
  misc_feature: MA Experiment ID: 20001557 Result: Up-regulated in Transcription
  misc_feature: MA Experiment 20001557 PARAMETER Experiment Name: At_Drought_Soil_Dry_P Parameter: Age (day) Value: 27
  misc_feature: MA Experiment 20001557 PARAMETER Experiment Name: At_Drought_Soil_Dry_P Parameter: Organism Value: A. thaliana
  misc_feature: MA Experiment 20001557 PARAMETER Experiment Name: At_Drought_Soil_Dry_P Parameter: Plant Line Value: WS
  misc_feature: MA Experiment 20001557 PARAMETER Experiment Name: At_Drought_Soil_Dry_P Parameter: Post Timepoint (hr) Value: 3
  misc_feature: MA Experiment 20001557 PARAMETER Experiment Name: At_Drought_Soil_Dry_P Parameter: Post-Treatment Value: Re-Water vs. No Drought
  misc_feature: MA Experiment 20001557 PARAMETER Experiment Name: At_Drought_Soil_Dry_P Parameter: Timepoint (day) Value: 13
  misc_feature: MA Experiment 20001557 PARAMETER Experiment Name: At_Drought_Soil_Dry_P Parameter: Treatment Value: Drought vs. No Drought
  misc_feature: MA Experiment ID: 20001559 Result: Up-regulated in Transcription
  misc_feature: MA Experiment 20001559 PARAMETER Experiment Name: At_Drought_Soil_Dry_P Parameter: Age (day) Value: 28
  misc_feature: MA Experiment 20001559 PARAMETER Experiment Name: At_Drought_Soil_Dry_P Parameter: Organism Value: A. thaliana
  misc_feature: MA Experiment 20001559 PARAMETER Experiment Name: At_Drought_Soil_Dry_P Parameter: Plant Line Value: WS
  misc_feature: MA Experiment 20001559 PARAMETER Experiment Name: At_Drought_Soil_Dry_P Parameter: Post Timepoint (hr) Value: 29
  misc_feature: MA Experiment 20001559 PARAMETER Experiment Name: At_Drought_Soil_Dry_P Parameter: Post-Treatment Value: Re-Water vs. No Drought
  misc_feature: MA Experiment 20001559 PARAMETER Experiment Name: At_Drought_Soil_Dry_P Parameter: Timepoint (day) Value: 14
  misc_feature: MA Experiment 20001559 PARAMETER Experiment Name: At_Drought_Soil_Dry_P Parameter: Treatment Value: Drought vs. No Drought
  misc_feature: MA Experiment ID: 20001904 Result: Up-regulated in Transcription
  misc_feature: MA Experiment 20001904 PARAMETER Experiment Name: At_Drought_Reproduction_P Parameter: Age (day) Value: 37
  misc_feature: MA Experiment 20001904 PARAMETER Experiment Name: At_Drought_Reproduction_P Parameter: Organism Value: A. thaliana
  misc_feature: MA Experiment 20001904 PARAMETER Experiment Name: At_Drought_Reproduction_P Parameter: Plant Line Value: WS
  misc_feature: MA Experiment 20001904 PARAMETER Experiment Name: At_Drought_Reproduction_P Parameter: Timepoint (day) Value: 7
  misc_feature: MA Experiment 20001904 PARAMETER Experiment Name: At_Drought_Reproduction_P Parameter: Tissue Value: Rosettes
  misc_feature: MA Experiment 20001904 PARAMETER Experiment Name: At_Drought_Reproduction_P Parameter: Treatment Value: Drought vs. No Drought
  misc_feature: MA Experiment ID: 20001905 Result: Up-regulated in Transcription
  misc_feature: MA Experiment 20001905 PARAMETER Experiment Name: At_Drought_Reproduction_P Parameter: Age (day) Value: 40
  misc_feature: MA Experiment 20001905 PARAMETER Experiment Name: At_Drought_Reproduction_P Parameter: Organism Value: A. thaliana
  misc_feature: MA Experiment 20001905 PARAMETER Experiment Name: At_Drought_Reproduction_P Parameter: Plant Line Value: WS
  misc_feature: MA Experiment 20001905 PARAMETER Experiment Name: At_Drought_Reproduction_P Parameter: Timepoint (day) Value: 10
  misc_feature: MA Experiment 20001905 PARAMETER Experiment Name: At_Drought_Reproduction_P Parameter: Tissue Value: Rosettes
  misc_feature: MA Experiment 20001905 PARAMETER Experiment Name: At_Drought_Reproduction_P Parameter: Treatment Value: Drought vs. No Drought
  misc_feature: MA Experiment ID: 20001906 Result: Up-regulated in Transcription
  misc_feature: MA Experiment 20001906 PARAMETER Experiment Name: At_Drought_Reproduction_P Parameter: Age (day) Value: 35
  misc_feature: MA Experiment 20001906 PARAMETER Experiment Name: At_Drought_Reproduction_P Parameter: Organism Value: A. thaliana
  misc_feature: MA Experiment 20001906 PARAMETER Experiment Name: At_Drought_Reproduction_P Parameter: Plant Line Value: WS
  misc_feature: MA Experiment 20001906 PARAMETER Experiment Name: At_Drought_Reproduction_P Parameter: Timepoint (day) Value: 5
  misc_feature: MA Experiment 20001906 PARAMETER Experiment Name: At_Drought_Reproduction_P Parameter: Tissue Value: Siliques
  misc_feature: MA Experiment 20001906 PARAMETER Experiment Name: At_Drought_Reproduction_P Parameter: Treatment Value: Drought vs. No Drought
  misc_feature: MA Experiment ID: 20001910 Result: Up-regulated in Transcription
  misc_feature: MA Experiment 20001910 PARAMETER Experiment Name: At_Drought_Reproduction_P Parameter: Age (day) Value: 37
  misc_feature: MA Experiment 20001910 PARAMETER Experiment Name: At_Drought_Reproduction_P Parameter: Organism Value: A. thaliana
  misc_feature: MA Experiment 20001910 PARAMETER Experiment Name: At_Drought_Reproduction_P Parameter: Plant Line Value: WS
  misc_feature: MA Experiment 20001910 PARAMETER Experiment Name: At_Drought_Reproduction_P Parameter: Timepoint (day) Value: 7
  misc_feature: MA Experiment 20001910 PARAMETER Experiment Name: At_Drought_Reproduction_P Parameter: Tissue Value: Flowers
  misc_feature: MA Experiment 20001910 PARAMETER Experiment Name: At_Drought_Reproduction_P Parameter: Treatment Value: Drought vs. No Drought
  misc_feature: MA Experiment ID: 20001911 Result: Up-regulated in Transcription
  misc_feature: MA Experiment 20001911 PARAMETER Experiment Name: At_Drought_Reproduction_P Parameter: Age (day) Value: 40
  misc_feature: MA Experiment 20001911 PARAMETER Experiment Name: At_Drought_Reproduction_P Parameter: Organism Value: A. thaliana
  misc_feature: MA Experiment 20001911 PARAMETER Experiment Name: At_Drought_Reproduction_P Parameter: Plant Line Value: WS
  misc_feature: MA Experiment 20001911 PARAMETER Experiment Name: At_Drought_Reproduction_P Parameter: Timepoint (day) Value: 10
  misc_feature: MA Experiment 20001911 PARAMETER Experiment Name: At_Drought_Reproduction_P Parameter: Tissue Value: Flowers
  misc_feature: MA Experiment 20001911 PARAMETER Experiment Name: At_Drought_Reproduction_P Parameter: Treatment Value: Drought vs. No Drought
agatattttgatttctgctaaagctgtctgatagaaagaagaggaaaactcgaaaaagctacacacaagaagaagaagaaaagatacgagcaagaagactaaacacgaaagcgatttatctactcgaaggaagagactttgattttcaaatttcgtcccttatagattgtgttgtttctgggaaggagatggcagtttatgaccagagtggagatataaacagaacacaaattgatacatcgaggaaaaggaaatctagaagtagaggtgatggtactactgtggctgagagattaaagagatggaaagagtatagagactgtagaagaagtgtctaccaagaagaggaaagtacctgcgaaagggtcgaagaagggttgtatgaaaggtaaaggaggaccagagaatagtcgatgtagtttcagaggagttaggcaaaggatttggggtaaatgggttgctgagatcagagagcctaatcgaggtagcaggctttggcttggtactttccctactgctcaagaagctgcttctgcttatgatgaggctgctaaagctatgtatggtcctttggctcgtcttaatttccctcggtctgatgtgtctgaggttacgagtacatcgagtcagtctgaggtgtgtactgttgagactcctggttgtgttcatgtgaaaacagaggatgcagattgtgaatctaaacccttctccggtggagtggagccgatgtattgtctggagaatggtgcggaagagatgaagagaggtgttaaagcggataagggttggctagcgagtttgaacataactattggagtgatattttgaaagagaaagaaaaacagaaggagcaagagattgtagaaacctgtcagcaacagcagcaacaacagcaggattcgctatctgttgcagactatggttggcccaatgatgtggatcagagtcacttggattcttcagacatgtttgatgtcgatgagcttctacgtgacctaaatggcgacgatgtttttgcaggcttaaatcacgaccagtacccggggaacaatgttgccaacggttcatacaggcctgagagtcaacaaagtggttttgatccgctacaaagcctcaactacggaatacctccgtttcagctcgaggggaaggatggtaatggattcttcgacgacttgagttacttggatctggagaactaaacaaaacaatatgaagctttttggatttgatatttgccttaatcccacaacgactgttgattctctatccgagttttagtgatatagagaactgcagaacacgttttttcttgttacaaaggtgaactgtatatatcgaaacagtgatatgacaatggagaagacaactatagtttgttagtctgcttctcttaagttgttctttagatatgttttatgttttataacaacgggaatgaataatatacacttgt

SEQ ID NO: 23417 - protein, 148 aa, Arabidopsis thaliana
  peptide (1)..(148): Ceres Seq. ID no. 12371578
  misc_feature (11)..(75): Pfam Name: AP2 domain Pfam Description: AP2 domain
  misc_feature (1)..(109): Homolog of NCBI NO: 34896106 NR Description: putative AP2-domain DNA-binding protein
  misc_feature (1)..(109): Homolog of NCBI NO: 25989383 NR Description: DREB1 [Oryza sativa]
  misc_feature (1)..(109): Homolog of NCBI NO: 22594971 NR Description: DRE binding protein 2 [Oryza sativa]
  misc_feature (1)..(89): Homolog of NCBI NO: 25992100 NR Description: dehydration responsive element binding protein
  misc_feature (1)..(106): Homolog of NCBI NO: 27960757 NR Description: AP2 domain protein [Hordeum vulgare]
  misc_feature (1)..(106): Homolog of NCBI NO: 30313898 NR Description: AP2 transcriptional activator DRF1.1 [Hordeum
  misc_feature (1)..(106): Homolog of NCBI NO: 27960760 NR Description: dehydration-responsive AP2 domain transcriptional
  misc_feature (1)..(88): Homolog of NCBI NO: 8346773 NR Description: AP2-domain DNA-binding protein [Catharanthus
  misc_feature (1)..(110): Homolog of NCBI NO: 15228427 NR Description: DRE binding protein (DREB2B)
  misc_feature (1)..(138): Homolog of NCBI NO: 15239107 NR Description: DRE binding protein (DREB2A)
MKGKGGPENSRCSFRGVRQRIWGKWVAEIREPNRGSRLWLGTFPTAQEAASAYDEAAKAMYGPLARLNFPRSDVSEVTSTSSQSEVCTVETPGCVHVKTEDADCESKPFSGGVEPMYCLENGAEEMKRGVKADKGWLASLNITIGVIF

SEQ ID NO: 23418 - protein, 89 aa, Arabidopsis thaliana
  peptide (1)..(89): Ceres Seq. ID no. 12371579
  misc_feature (1)..(50): Homolog of NCBI NO: 34896106 NR Description: putative AP2-domain DNA-binding protein
  misc_feature (1)..(50): Homolog of NCBI NO: 25989383 NR Description: DREB1 [Oryza sativa]
  misc_feature (1)..(50): Homolog of NCBI NO: 22594971 NR Description: DRE binding protein 2 [Oryza sativa]
  misc_feature (1)..(30): Homolog of NCBI NO: 25992100 NR Description: dehydration responsive element binding protein
  misc_feature (1)..(47): Homolog of NCBI NO: 27960757 NR Description: AP2 domain protein [Hordeum vulgare]
  misc_feature (1)..(47): Homolog of NCBI NO: 30313898 NR Description: AP2 transcriptional activator DRF1.1 [Hordeum
  misc_feature (1)..(47): Homolog of NCBI NO: 27960760 NR Description: dehydration-responsive AP2 domain transcriptional
  misc_feature (1)..(29): Homolog of NCBI NO: 8346773 NR Description: AP2-domain DNA-binding protein [Catharanthus
  misc_feature (1)..(51): Homolog of NCBI NO: 15228427 NR Description: DRE binding protein (DREB2B)
  misc_feature (1)..(79): Homolog of NCBI NO: 15239107 NR Description: DRE binding protein (DREB2A)
MYGPLARLNFPRSDVSEVTSTSSQSEVCTVETPGCVHVKTEDADCESKPFSGGVEPMYCLENGAEEMKRGVKADKGWLASLNITIGVIF

SEQ ID NO: 23419 - protein, 78 aa, Arabidopsis thaliana
  peptide (1)..(78): Ceres Seq. ID no. 12371580
  misc_feature (1)..(35): Homolog of NCBI NO: 15228427 NR Description: DRE binding protein (DREB2B)
  misc_feature (1)..(78): Homolog of NCBI NO: 15239107 NR Description: DRE binding protein (DREB2A)
MFDVDELLRDLNGDDVFAGLNHDQYPGNNVANGSYRPESQQSGFDPLQSLNYGIPPFQLEGKDGNGFFDDLSYLDLEN

SEQ ID NO: 23420 - DNA, 1490 bp, Arabidopsis thaliana
  misc_feature (1)..(1490): Ceres Seq. ID no. 13497463
  misc_feature: MA Experiment ID: 108461 Result: Up-regulated in Transcription
  misc_feature: MA Experiment 108461 PARAMETER Experiment Name: At_Germinating_Seeds_cDNA_P Parameter: Age (day) Value: 1 vs. 0
  misc_feature: MA Experiment 108461 PARAMETER Experiment Name: At_Germinating_Seeds_cDNA_P Parameter: Tissue Value: Germinating Seeds
  misc_feature: MA Experiment ID: 108462 Result: Up-regulated in Transcription
  misc_feature: MA Experiment 108462 PARAMETER Experiment Name: At_Germinating_Seeds_cDNA_P Parameter: Age (day) Value: 2 vs. 0
  misc_feature: MA Experiment 108462 PARAMETER Experiment Name: At_Germinating_Seeds_cDNA_P Parameter: Tissue Value: Germinating Seeds
  misc_feature: MA Experiment ID: 108463 Result: Up-regulated in Transcription
  misc_feature: MA Experiment 108463 PARAMETER Experiment Name: At_Germinating_Seeds_cDNA_P Parameter: Age (day) Value: 3 vs. 0
  misc_feature: MA Experiment 108463 PARAMETER Experiment Name: At_Germinating_Seeds_cDNA_P Parameter: Tissue Value: Germinating Seeds
  misc_feature: MA Experiment ID: 108595 Result: Down-regulated in Transcription
  misc_feature: MA Experiment 108595 PARAMETER Experiment Name: At_Ler-pi_Ovule_cDNA_P Parameter: Plant Line Value: null
  misc_feature: MA Experiment ID: 20000087 Result: Down-regulated in Transcription
  misc_feature: MA Experiment 20000087 PARAMETER Experiment Name: At_100uM_ABA_Mutants_cDNA_P Parameter: Plant Line Value: WS
  misc_feature: MA Experiment 20000087 PARAMETER Experiment Name: At_100uM_ABA_Mutants_cDNA_P Parameter: Timepoint (hr) Value: 6
  misc_feature: MA Experiment 20000087 PARAMETER Experiment Name: At_100uM_ABA_Mutants_cDNA_P Parameter: Tissue Value: Aerial
  misc_feature: MA Experiment 20000087 PARAMETER Experiment Name: At_100uM_ABA_Mutants_cDNA_P Parameter: Treatment Value: 100uM ABA vs. No Treatment
  misc_feature: MA Experiment ID: 20000113 Result: Down-regulated in Transcription
  misc_feature: MA Experiment 20000113 PARAMETER Experiment Name: At_42deg_Heat_cDNA_P Parameter: Temperature (deg C) Value: 42 vs. 22
  misc_feature: MA Experiment 20000113 PARAMETER Experiment Name: At_42deg_Heat_cDNA_P Parameter: Timepoint (hr) Value: 8
  misc_feature: MA Experiment 20000113 PARAMETER Experiment Name: At_42deg_Heat_cDNA_P Parameter: Tissue Value: Aerial
  misc_feature: MA Experiment ID: 20000171 Result: Down-regulated in Transcription
  misc_feature: MA Experiment 20000171 PARAMETER Experiment Name: At_42deg_Heat_P Parameter: Age (day) Value: 14
  misc_feature: MA Experiment 20000171 PARAMETER Experiment Name: At_42deg_Heat_P Parameter: Organism Value: A. thaliana
  misc_feature: MA Experiment 20000171 PARAMETER Experiment Name: At_42deg_Heat_P Parameter: Plant Line Value: WS
  misc_feature: MA Experiment 20000171 PARAMETER Experiment Name: At_42deg_Heat_P Parameter: Temperature (deg C) Value: 42 vs. 22
  misc_feature: MA Experiment 20000171 PARAMETER Experiment Name: At_42deg_Heat_P Parameter: Timepoint (hr) Value: 1
  misc_feature: MA Experiment 20000171 PARAMETER Experiment Name: At_42deg_Heat_P Parameter: Tissue Value: Aerial
  misc_feature: MA Experiment ID: 20000173 Result: Down-regulated in Transcription
  misc_feature: MA Experiment 20000173 PARAMETER Experiment Name: At_42deg_Heat_P Parameter: Age (day) Value: 14
  misc_feature: MA Experiment 20000173 PARAMETER Experiment Name: At_42deg_Heat_P Parameter: Organism Value: A. thaliana
  misc_feature: MA Experiment 20000173 PARAMETER Experiment Name: At_42deg_Heat_P Parameter: Plant Line Value: WS
  misc_feature: MA Experiment 20000173 PARAMETER Experiment Name: At_42deg_Heat_P Parameter: Temperature (deg C) Value: 42 vs. 22
  misc_feature: MA Experiment 20000173 PARAMETER Experiment Name: At_42deg_Heat_P Parameter: Timepoint (hr) Value: 6
  misc_feature: MA Experiment 20000173 PARAMETER Experiment Name: At_42deg_Heat_P Parameter: Tissue Value: Aerial
  misc_feature: MA Experiment ID: 20000227 Result: Up-regulated in Transcription
  misc_feature: MA Experiment 20000227 PARAMETER Experiment Name: At_Root-Tips-vs-Tops_P Parameter: Tissue Value: Root Tips vs. Root Tops
agaaacatcatgatatgatatttttctcaagtcttttggtgttggagaagaagagagaagaagaacttggtttctctctctaaaagtttattgcttggctccataaaaagtgcacctttttctctcttttctttctctctctctctctctctctctctctctctcacttctcctcggatgcactattgtccgtgagatcagagattcaccctctttagattttgcgcagaaacttttgcccacaattttgtattcgtcaaatctgagctgagatctctagagtgagaaaatgagcatcactaatgaagaagcagtgaagcaattgcgtgctttaatggaagatgttgatgattcactcagagagtcgtatcggaacattcatcaagggtatccgacagagaatttgttacgctttcttaaagccagggatgggaatgtccagaaagctcataaaatgttgctcgagtgtttggaatggaggactcaaaacgagattgacaagatactaactaaacccattgttcctgttgacctgtacagaggaatcagagacacacaacttgtcggtgtgtctggttactctaaagagggtctccctgtcattgccattggtgtggggcttagcacatatgataaagcctccgttcactactatgtacagtctcacattcaaatgaatgagtaccgggatcgtgttgtattgccatctgcttcaaagaaacagggacgaccaatttgcacttgtttgaaaattttggatatgtctggtttaaagctttcagctttaagtcaaattaagttaatgactgctataacaacaatagatgatttgaactatccagagaagacagagacatactatgttgtcaatgtcccgtacatattctctgcttgttggaaaaccataaagcctctgttgcaagagagaacaaagaagaagattcaagttctgaaaggttgcgggaaagatgagttgctaaagataatggactatgagtctctcccacatttctgtagaagagaagggtctggatctggtaggcatatctcaaatggaacagtagacaattgtttctctctggatcactctttccaccaagacctttatgattatgtcaagcagcaggctctggttaaaggatcaggtgcaccgatcagacatggttcagtccacgttaagttccctgagccagacaccgaaggcaacaagatcttcgataccttagaaaatgagttccagaagcttggaaatgaccagaagatctgagtgatctacaacccttataacacgaattgcccataagaaaccggaatttgtctctggttgatgagcagtatttaagataagaatcaatcacctttacttgtattactagtttcgcttgcatcagctcgatgcaggttttgtttaaaaagaagatggaacacaatttcctcggaatggatcttttgatctagtaccattatatatatagaactcatttctattt

SEQ ID NO: 23421 - protein, 325 aa, Arabidopsis thaliana
  peptide (1)..(325): Ceres Seq. ID no. 13497464
  misc_feature (135)..(239): Pfam Name: CRAL/TRIO domain Pfam Description: CRAL/TRIO domain
  misc_feature (135)..(239): Pfam Name: CRAL/TRIO domain Pfam Description: CRAL/TRIO domain
  misc_feature (1)..(28): Homolog of NCBI NO: 25295905 NR Description: protein F14J16.8 [imported] - Arabidopsis
  misc_feature (18)..(325): Homolog of NCBI NO: 25295905 NR Description: protein F14J16.8 [imported] - Arabidopsis
  misc_feature (18)..(325): Homolog of NCBI NO: 25295905 NR Description: protein F14J16.8 [imported] - Arabidopsis
  misc_feature (1)..(325): Homolog of NCBI NO: 15222786 NR Description: sec14 cytosolic factor, putative
  misc_feature (1)..(28): Homolog of NCBI NO: 25295905 NR Description: protein F14J16.8 [imported] - Arabidopsis
  misc_feature (1)..(325): Homolog of NCBI NO: 15222786 NR Description: sec14 cytosolic factor, putative
MSITNEEAVKQLRALMEDVDDSLRESYRNIHQGYPTENLLRFLKARDGNVQKAHKMLLECLEWRTQNEIDKILTKPIVPVDLYRGIRDTQLVGVSGYSKEGLPVIAIGVGLSTYDKASVHYYVQSHIQMNEYRDRVVLPSASKKQGRPICTCLKILDMSGLKLSALSQIKLMTAITTIDDLNYPEKTETYYVVNVPYIFSACWKTIKPLLQERTKKKIQVLKGCGKDELLKIMDYESLPHFCRREGSGSGRHISNGTVDNCFSLDHSFHQDLYDYVKQQALVKGSGAPIRHGSVHVKFPEPDTEGNKIFDTLENEFQKLGNDQKI

SEQ ID NO: 23422 - protein, 310 aa, Arabidopsis thaliana
  peptide (1)..(310): Ceres Seq. ID no. 13497465
  misc_feature (120)..(224): Pfam Name: CRAL/TRIO domain Pfam Description: CRAL/TRIO domain
  misc_feature (120)..(224): Pfam Name: CRAL/TRIO domain Pfam Description: CRAL/TRIO domain
  misc_feature (1)..(13): Homolog of NCBI NO: 25295905 NR Description: protein F14J16.8 [imported] - Arabidopsis
  misc_feature (3)..(310): Homolog of NCBI NO: 25295905 NR Description: protein F14J16.8 [imported] - Arabidopsis
  misc_feature (3)..(310): Homolog of NCBI NO: 25295905 NR Description: protein F14J16.8 [imported] - Arabidopsis
  misc_feature (1)..(310): Homolog of NCBI NO: 15222786 NR Description: sec14 cytosolic factor, putative
  misc_feature (1)..(13): Homolog of NCBI NO: 25295905 NR Description: protein F14J16.8 [imported] - Arabidopsis
  misc_feature (1)..(310): Homolog of NCBI NO: 15222786 NR Description: sec14 cytosolic factor, putative
MEDVDDSLRESYRNIHQGYPTENLLRFLKARDGNVQKAHKMLLECLEWRTQNEIDKILTKPIVPVDLYRGIRDTQLVGVSGYSKEGLPVIAIGVGLSTYDKASVHYYVQSHIQMNEYRDRVVLPSASKKQGRPICTCLKILDMSGLKLSALSQIKLMTAITTIDDLNYPEKTETYYVVNVPYIFSACWKTIKPLLQERTKKKIQVLKGCGKDELLKIMDYESLPHFCRREGSGSGRHISNGTVDNCFSLDHSFHQDLYDYVKQQALVKGSGAPIRHGSVHVKFPEPDTEGNKIFDTLENEFQKLGNDQKI

SEQ ID NO: 23423 - protein, 270 aa, Arabidopsis thaliana
  peptide (1)..(270): Ceres Seq. ID no. 13497466
  misc_feature (80)..(184): Pfam Name: CRAL/TRIO domain Pfam Description: CRAL/TRIO domain
  misc_feature (80)..(184): Pfam Name: CRAL/TRIO domain Pfam Description: CRAL/TRIO domain
  misc_feature (1)..(270): Homolog of NCBI NO: 25295905 NR Description: protein F14J16.8 [imported] - Arabidopsis
  misc_feature (1)..(270): Homolog of NCBI NO: 25295905 NR Description: protein F14J16.8 [imported] - Arabidopsis
  misc_feature (1)..(270): Homolog of NCBI NO: 15222786 NR Description: sec14 cytosolic factor, putative
  misc_feature (1)..(270): Homolog of NCBI NO: 15222786 NR Description: sec14 cytosolic factor, putative
MLLECLEWRTQNEIDKILTKPIVPVDLYRGIRDTQLVGVSGYSKEGLPVIAIGVGLSTYDKASVHYYVQSHIQMNEYRDRVVLPSASKKQGRPICTCLKILDMSGLKLSALSQIKLMTAITTIDDLNYPEKTETYYVVNVPYIFSACWKTIKPLLQERTKKKIQVLKGCGKDELLKIMDYESLPHFCRREGSGSGRHISNGTVDNCFSLDHSFHQDLYDYVKQQALVKGSGAPIRHGSVHVKFPEPDTEGNKIFDTLENEFQKLGNDQKI

SEQ ID NO: 23424 - DNA, 1129 bp, Arabidopsis thaliana
  misc_feature (1)..(1129): Ceres Seq. ID no. 12325093
  misc_feature: MA Experiment ID: 20000185 Result: Down-regulated in Transcription
  misc_feature: MA Experiment 20000185 PARAMETER Experiment Name: At_Roots__P Parameter: Age (day) Value: 7 vs. 21
  misc_feature: MA Experiment 20000185 PARAMETER Experiment Name: At_Roots__P Parameter: Organism Value: A. thaliana
  misc_feature: MA Experiment 20000185 PARAMETER Experiment Name: At_Roots__P Parameter: Tissue Value: Roots vs. Whole Plant
  misc_feature: MA Experiment ID: 20000437 Result: Down-regulated in Transcription
  misc_feature: MA Experiment 20000437 PARAMETER Experiment Name: At_Drought_P Parameter: Age (day) Value: 8
  misc_feature: MA Experiment 20000437 PARAMETER Experiment Name: At_Drought_P Parameter: Organism Value: A. thaliana
  misc_feature: MA Experiment 20000437 PARAMETER Experiment Name: At_Drought_P Parameter: Plant Line Value: WS
  misc_feature: MA Experiment 20000437 PARAMETER Experiment Name: At_Drought_P Parameter: Timepoint (hr) Value: 24
  misc_feature: MA Experiment 20000437 PARAMETER Experiment Name: At_Drought_P Parameter: Tissue Value: Whole Plant
  misc_feature: MA Experiment 20000437 PARAMETER Experiment Name: At_Drought_P Parameter: Treatment Value: Drought vs. No Drought
  misc_feature: MA Experiment ID: 20000439 Result: Down-regulated in Transcription
  misc_feature: MA Experiment 20000439 PARAMETER Experiment Name: At_Roots__P Parameter: Age (day) Value: 14 vs. 21
  misc_feature: MA Experiment 20000439 PARAMETER Experiment Name: At_Roots__P Parameter: Organism Value: A. thaliana
  misc_feature: MA Experiment 20000439 PARAMETER Experiment Name: At_Roots__P Parameter: Tissue Value: Roots vs. Whole Plant
  misc_feature: MA Experiment ID: 20000496 Result: Up-regulated in Transcription
  misc_feature: MA Experiment 20000496 PARAMETER Experiment Name: At_Guard_Cells_P Parameter: Harvest Date Value: 7/19/2002
  misc_feature: MA Experiment 20000496 PARAMETER Experiment Name: At_Guard_Cells_P Parameter: Organism Value: Canola
  misc_feature: MA Experiment 20000496 PARAMETER Experiment Name: At_Guard_Cells_P Parameter: Tissue Value: Guard Cells vs. Leaves
  misc_feature: MA Experiment ID: 20000794 Result: Down-regulated in Transcription
  misc_feature: MA Experiment 20000794 PARAMETER Experiment Name: At_Petals_P Parameter: Age (day) Value: 23-25 days
  misc_feature: MA Experiment 20000794 PARAMETER Experiment Name: At_Petals_P Parameter: Plant Line Value: WS
  misc_feature: MA Experiment 20000794 PARAMETER Experiment Name: At_Petals_P Parameter: Tissue Value: Petals vs. Whole plant
  misc_feature: MA Experiment ID: 20001757 Result: Up-regulated in Transcription
  misc_feature: MA Experiment 20001757 PARAMETER Experiment Name: At_50mM_NH4NO3_L-to-H_P Parameter: Timepoint (hr) Value: 6
  misc_feature: MA Experiment 20001757 PARAMETER Experiment Name: At_50mM_NH4NO3_L-to-H_P Parameter: Tissue Value: Leaf
  misc_feature: MA Experiment 20001757 PARAMETER Experiment Name: At_50mM_NH4NO3_L-to-H_P Parameter: Treatment Value: 50mM NH4NO3 vs 100mM Mannitol
  misc_feature: Phenotype: WHOLE PLANT Size-Small
  misc_feature: Phenotype: INFLORESCENCE Height-Short
  misc_feature: Phenotype: INFLORESCENCE Internode Length-Short Internode
  misc_feature: Phenotype: SILIQUES Length-Short
  misc_feature: Phenotype: SILIQUES Other
  misc_feature: Phenotype: FERTILITY Fertility-Reduced
  misc_feature: Phenotype: FLOWERS Other
  misc_feature: Phenotype: INFLORESCENCE Branching-Reduced Apical Dominance
  misc_feature: Phenotype: INFLORESCENCE Height-Short
  misc_feature: Phenotype: INFLORESCENCE Internode Length-Short Internode
  misc_feature: Phenotype: SILIQUES Length-Short
  misc_feature: Phenotype: FERTILITY Fertility-Reduced
  misc_feature: Phenotype: SENESCENCE TIME Senescence Time-Late Senescence
  misc_feature: Phenotype: ROSETTE LEAVES Shape-Serrate
  misc_feature: Phenotype: ROSETTE LEAVES Shape-Serrate
  misc_feature: Phenotype: ROSETTE LEAVES Other
  misc_feature: Phenotype: ROSETTE LEAVES Other
  misc_feature: Phenotype: WHOLE PLANT Size-Small
  misc_feature: Phenotype: WHOLE PLANT Size-Small
  misc_feature: Phenotype: INFLORESCENCE Branching-Reduced Apical Dominance
  misc_feature: Phenotype: INFLORESCENCE Height-Short
  misc_feature: Phenotype: INFLORESCENCE Internode Length-Short Internode
  misc_feature: Phenotype: INFLORESCENCE Strength-Weak
  misc_feature: Phenotype: SILIQUES Length-Short
  misc_feature: Phenotype: FERTILITY Fertility-Reduced
  misc_feature: Phenotype: SENESCENCE TIME Senescence Time-Late Senescence
  misc_feature: Phenotype: ROSETTE LEAVES Shape-Lanceolate
  misc_feature: Phenotype: ROSETTE LEAVES Shape-Serrate
  misc_feature: Phenotype: ROSETTE LEAVES Other
  misc_feature: Phenotype: WHOLE PLANT Size-Small
  misc_feature: Phenotype: WHOLE PLANT Size-Small
  misc_feature: Phenotype: INFLORESCENCE Internode Length-Short Internode
  misc_feature: Phenotype: FERTILITY Fertility-Reduced
  misc_feature: Phenotype: ROSETTE LEAVES Shape-Oval
  misc_feature: Phenotype: ROSETTE LEAVES Other
  misc_feature: Phenotype: WHOLE PLANT Color-Dark Green
  misc_feature: Phenotype: WHOLE PLANT Dwarf-Misc. Dwarf
  misc_feature: Phenotype: WHOLE PLANT Size-Small
  misc_feature: Phenotype: INFLORESCENCE Flowering Time-Late Flowering
aagcttcccaaagcgtttgttttatcctctcagagagctttctttagtgatggcggcgcttatccggtgttgctcctccttctctcatacttccggtggccaaccaccgccgcgtgacaagtctcgagctccagagattggaaaatttgctacatctattggctactcagtagtcagaaaacctggggatcatcctcctttctccaaaattatacattcgtcttcacagcctaaggagcgacaaggaaagggaatcttacaaacgccatttgccagtgtgggatctcttgacaagttttcagcttttgagggaattgggaggctcaaattaccggtgatggcagtgttgttgacaaactcccttcagatggctacacctcttgaagctttggctgctgagatatgtgagcctgagagctccatgttcagcatgcctattttgttgcttgttgctcttattggagccaccgttggagggttgcttgctcggcagaggaaaggggagttacagaggttgaatgaacaactacgacagattaacgcagctcttaggagacaagccaaaatcgagtcttatgcaccaagcttgagttatgctccagtgggagcaagaatcccagatagtgaaatcattgtggaaccaaagaaacaagagttgatttccaagttgaaaacaggaaaaacctttcttaggaaccaagaaccagagaaagcttatacagagttcaagatagctttggaacttgcccagagtctcaaagaccccaccgaagaaaagaaggctgcaagaggcctaggcgcctcgctgcagcgccaagggaagtatagggaagccatacagtatcactccatggttctagccatctcaaagagggaaagtgaagattctggaatcactgaagcatatggagctattgcagactgttataccgagctgggagatctcgagaaagctggaaagttctatgatacgtacattgctcggttagagactgactgatccttccgcaatgtttttttctttgttgtctgtttatgttcatgtaaaatcacatagaatggatatccaaatcccttttattgaatgtaattcgcttgtcttacaatccatgggaatacataactaatc

SEQ ID NO: 23425 - protein, 332 aa, Arabidopsis thaliana
  peptide (1)..(332): Ceres Seq. ID no. 12325094
  misc_feature (299)..(332): Pfam Name: TPR Domain Pfam Description: TPR Domain
  misc_feature (299)..(332): Pfam Name: TPR Domain Pfam Description: TPR Domain
  misc_feature (117)..(332): Homolog of NCBI NO: 34914598 NR Description: P0520B06.12 [Oryza sativa (japonica
  misc_feature (17)..(332): Homolog of NCBI NO: 9294636 NR Description: emb|CAB41081.1~gene_id:MAG2.7~similar to unknown
  misc_feature (17)..(332): Homolog of NCBI NO: 9294636 NR Description: emb|CAB41081.1~gene_id:MAG2.7~similar to unknown
  misc_feature (17)..(332): Homolog of NCBI NO: 18400278 NR Description: expressed protein
  misc_feature (117)..(332): Homolog of NCBI NO: 34914598 NR Description: P0520B06.12 [Oryza sativa (japonica
  misc_feature (17)..(332): Homolog of NCBI NO: 18400278 NR Description: expressed protein
SFPKRLFYPLRELSLVMAALIRCCSSFSHTSGGQPPPRDKSRAPEIGKFATSIGYSVVRKPGDHPPFSKIIHSSSQPKERQGKGILQTPFASVGSLDKFSAFEGIGRLKLPVMAVLLTNSLQMATPLEALAAEICEPESSMFSMPILLLVALIGATVGGLLARQRKGELQRLNEQLRQINAALRRQAKIESYAPSLSYAPVGARIPDSEIIVEPKKQELISKLKTGKTFLRNQEPEKAYTEFKIALELAQSLKDPTEEKKAARGLGASLQRQGKYREAIQYHSMVLAISKRESEDSGITEAYGAIADCYTELGDLEKAGKFYDTYIARLETD

SEQ ID NO: 23426 - protein, 316 aa, Arabidopsis thaliana
  peptide (1)..(316): Ceres Seq. ID no. 12325095
  misc_feature (283)..(316): Pfam Name: TPR Domain Pfam Description: TPR Domain
  misc_feature (283)..(316): Pfam Name: TPR Domain Pfam Description: TPR Domain
  misc_feature (101)..(316): Homolog of NCBI NO: 34914598 NR Description: P0520B06.12 [Oryza sativa (japonica
  misc_feature (1)..(316): Homolog of NCBI NO: 9294636 NR Description: emb|CAB41081.1~gene_id:MAG2.7~similar to unknown
  misc_feature (1)..(316): Homolog of NCBI NO: 9294636 NR Description: emb|CAB41081.1~gene_id:MAG2.7~similar to unknown
  misc_feature (1)..(316): Homolog of NCBI NO: 18400278 NR Description: expressed protein
  misc_feature (101)..(316): Homolog of NCBI NO: 34914598 NR Description: P0520B06.12 [Oryza sativa (japonica
  misc_feature (1)..(316): Homolog of NCBI NO: 18400278 NR Description: expressed protein
MAALIRCCSSFSHTSGGQPPPRDKSRAPEIGKFATSIGYSVVRKPGDHPPFSKIIHSSSQPKERQGKGILQTPFASVGSLDKFSAFEGIGRLKLPVMAVLLTNSLQMATPLEALAAEICEPESSMFSMPILLLVALIGATVGGLLARQRKGELQRLNEQLRQINAALRRQAKIESYAPSLSYAPVGARIPDSEIIVEPKKQELISKLKTGKTFLRNQEPEKAYTEFKIALELAQSLKDPTEEKKAARGLGASLQRQGKYREAIQYHSMVLAISKRESEDSGITEAYGAIADCYTELGDLEKAGKFYDTYIARLETD

SEQ ID NO: 23427 - protein, 220 aa, Arabidopsis thaliana
  peptide (1)..(220): Ceres Seq. ID no. 12325096
  misc_feature (187)..(220): Pfam Name: TPR Domain Pfam Description: TPR Domain
  misc_feature (187)..(220): Pfam Name: TPR Domain Pfam Description: TPR Domain
  misc_feature (5)..(220): Homolog of NCBI NO: 34914598 NR Description: P0520B06.12 [Oryza sativa (japonica
  misc_feature (1)..(220): Homolog of NCBI NO: 9294636 NR Description: emb|CAB41081.1~gene_id:MAG2.7~similar to unknown
  misc_feature (1)..(220): Homolog of NCBI NO: 9294636 NR Description: emb|CAB41081.1~gene_id:MAG2.7~similar to unknown
  misc_feature (1)..(220): Homolog of NCBI NO: 18400278 NR Description: expressed protein
  misc_feature (5)..(220): Homolog of NCBI NO: 34914598 NR Description: P0520B06.12 [Oryza sativa (japonica
  misc_feature (1)..(220): Homolog of NCBI NO: 18400278 NR Description: expressed protein
MAVLLTNSLQMATPLEALAAEICEPESSMFSMPILLLVALIGATVGGLLARQRKGELQRLNEQLRQINAALRRQAKIESYAPSLSYAPVGARIPDSEIIVEPKKQELISKLKTGKTFLRNQEPEKAYTEFKIALELAQSLKDPTEEKKAARGLGASLQRQGKYREAIQYHSMVLAISKRESEDSGITEAYGAIADCYTELGDLEKAGKFYDTYIARLETD

SEQ ID NO: 23428 - DNA, 1763 bp, Arabidopsis thaliana
  misc_feature (1)..(1763): Ceres Seq. ID no. 12327473
  misc_feature: MA Experiment ID: 108569 Result: Up-regulated in Transcription
  misc_feature: MA Experiment 108569 PARAMETER Experiment Name: At_0.001%_MeJA__cDNA_P Parameter: Timepoint (hr) Value: 6
  misc_feature: MA Experiment 108569 PARAMETER Experiment Name: At_0.001%_MeJA__cDNA_P Parameter: Tissue Value: Aerial
  misc_feature: MA Experiment 108569 PARAMETER Experiment Name: At_0.001%_MeJA__cDNA_P Parameter: Treatment Value: 0.001% MeJA vs. No Treatment
  misc_feature: MA Experiment ID: 20000111 Result: Up-regulated in Transcription
  misc_feature: MA Experiment 20000111 PARAMETER Experiment Name: At_42deg_Heat_cDNA_P Parameter: Temperature (deg C) Value: 42 vs. 22
  misc_feature: MA Experiment 20000111 PARAMETER Experiment Name: At_42deg_Heat_cDNA_P Parameter: Timepoint (hr) Value: 6
  misc_feature: MA Experiment 20000111 PARAMETER Experiment Name: At_42deg_Heat_cDNA_P Parameter: Tissue Value: Aerial
  misc_feature: MA Experiment ID: 20001451 Result: Down-regulated in Transcription
  misc_feature: MA Experiment 20001451 PARAMETER Experiment Name: At_Far-red-induction_P Parameter: Age (day) Value: 7
  misc_feature: MA Experiment 20001451 PARAMETER Experiment Name: At_Far-red-induction_P Parameter: Light Value: Far-red vs. White
  misc_feature: MA Experiment 20001451 PARAMETER Experiment Name: At_Far-red-induction_P Parameter: Organism Value: A. thaliana
  misc_feature: MA Experiment 20001451 PARAMETER Experiment Name: At_Far-red-induction_P Parameter: Plant Line Value: Columbia
  misc_feature: MA Experiment 20001451 PARAMETER Experiment Name: At_Far-red-induction_P Parameter: Timepoint (hr) Value: 24
  misc_feature: MA Experiment 20001451 PARAMETER Experiment Name: At_Far-red-induction_P Parameter: Tissue Value: Whole Plant
aaatttctgcctcaacgatgaacagggtgctcgcaaggaatcttaggacaagtgtctgtggaacaaggattttgcagaggacttgttcgactgttgtgacacatgatgtttctacttcttgttccaatgagagcaatgcattaaataattccactgacgatggtccacaacatgacattgctattgttggtggtggaatggttggaatcgctttagctgcttcattggccagcaagccattgacaaagcacttgaatgtcgctattattgacaataatcctcttttggggagaagaaatatcatagagaaagggcatcaacctgatcccagagtcagtacagtcacacctgcaacaatatccttcctcaaagatattggtgcctggaaatacattgagcaacagcgacatgcgtattttgataagatgcaggtatgggactatacaggccttggatatacaagatacaatgctaatgatgtacatcaagatgttttggggtgtgtagtggagaataaagttcttcagagttctcagctatcttgtgtacaggaatcagatctccagaagactgtttatcccgcgaggttaaatgcgatggatatgctacctagctcttcgttgacaggtcttggtgaagtaccatccacaacagacttgttcatgcgaggacgccttgctaagctggagctaagcgatggaaatcgcgtctacgcaaaactggtggtaggcgctgatgggtctaagtcgcgagtaagggagttggctgggatcaaaacgactggatggaactactcacagaacgctataatttgtactgttgagcatacagccgaaaactacacagcatggcaacggtttttacccaatggcccaatcgcacttcttcccattggtgacaagtttagcaacatagtatggaccatggacccaaaagaggcatcagatcgaaaattgatgaacgaggatgacttcatcaaagctgtaaatgatgctctggattctggatatggtcctaatccagagactacaagttcacgggatagtctctcttggcttacaggagatgcgaccatatctgccaaagagaggtttgaaactcctcccaaggttgtgaagctttcttcagagagaatgatgttccctttgtctttaagtcacgcaaaagactatgtgtcaaaacgtgtggctcttgttggtgactcagctcatacagttcacccgttggctggtcaaggagtaaatttaggatttgcagatgcgtgtgctctctccaaagctatagcagagggcattgctcttggtactgatataggcgaggcgaatctgctcaaacgttatgaagcagagagaaaacctgcaaatatagcaatgatggcggttttagacggaatccagaagatgtactcggtggatttcggaccgctgaatgctctaagagcagctgcattccacggggctcactacatttcgccgcttaaaaagcgtatcatatcttatgcttcaggagagcaatctttgccgctattttcttgaagaatgcgagggattgttcgctttgttctcaaaatactctgcatcatctcttcttttgccttatatagaaatttaatggtgactgaaaacagctcccagagcccatgttttaaataagtctgttgtatttagttttttatgtttcagtcaataaaatactaaaatgttacataatctgatatcaaaacaatgtaaaatgtgaatactgtgatttaaattttgatgtcc

SEQ ID NO: 23429 - protein, 510 aa, Arabidopsis thaliana
  peptide (1)..(510): Ceres Seq. ID no. 12327474
  misc_feature (237)..(462): Pfam Name: Monooxygenase Pfam Description: Monooxygenase
  misc_feature (57)..(501): Homolog of NCBI NO: 27369832 NR Description: RIKEN cDNA 5930427M12 [Mus musculus]
  misc_feature (22)..(501): Homolog of NCBI NO: 4680659 NR Description: CGI-10 protein [Homo sapiens]
  misc_feature (57)..(501): Homolog of NCBI NO: 26006706 NR Description: Ubiquinone biosynthesis monooxgenase COQ6
  misc_feature (57)..(501): Homolog of NCBI NO: 30047245 NR Description: Coq6 protein [Mus musculus]
  misc_feature (57)..(501): Homolog of NCBI NO: 18848355 NR Description: Similar to CGI-10 protein [Mus musculus]
  misc_feature (50)..(501): Homolog of NCBI NO: 15680256 NR Description: Unknown (protein for MGC:23201) [Homo sapiens]
  misc_feature (50)..(501): Homolog of NCBI NO: 32967305 NR Description: CGI-10 protein isoform a; CGI-10 protein [Homo
  misc_feature (58)..(510): Homolog of NCBI NO: 28376703 NR Description: putative oxygenase [Oryza sativa (japonica
  misc_feature (31)..(510): Homolog of NCBI NO: 11994239 NR Description: gb|AAD27719.1~gene_id:MUJ8.10~similar to unknown
  misc_feature (7)..(510): Homolog of NCBI NO: 30687388 NR Description: monooxygenase family [Arabidopsis thaliana]
ISASTMNRVLARNLRTSVCGTRILQRTCSTVVTHDVSTSCSNESNALNNSTDDGPQHDIAIVGGGMVGIALAASLASKPLTKHLNVAIIDNNPLLGRRNIIEKGHQPDPRVSTVTPATISFLKDIGAWKYIEQQRHAYFDKMQVWDYTGLGYTRYNANDVHQDVLGCVVENKVLQSSQLSCVQESDLQKTVYPARLNAMDMLPSSSLTGLGEVPSTTDLFMRGRLAKLELSDGNRVYAKLVVGADGSKSRVRELAGIKTTGWNYSQNAIICTVEHTAENYTAWQRFLPNGPIALLPIGDKFSNIVWTMDPKEASDRKLMNEDDFIKAVNDALDSGYGPNPETTSSRDSLSWLTGDATISAKERFETPPKVVKLSSERMMFPLSLSHAKDYVSKRVALVGDSAHTVHPLAGQGVNLGFADACALSKAIAEGIALGTDIGEANLLKRYEAERKPANIAMMAVLDGIQKMYSVDFGPLNALRAAAFHGAHYISPLKKRIISYASGEQSLPLFS

SEQ ID NO: 23430 - protein, 505 aa, Arabidopsis thaliana
  peptide (1)..(505): Ceres Seq. ID no. 12327475
  misc_feature (232)..(457): Pfam Name: Monooxygenase Pfam Description: Monooxygenase
  misc_feature (52)..(496): Homolog of NCBI NO: 27369832 NR Description: RIKEN cDNA 5930427M12 [Mus musculus]
  misc_feature (17)..(496): Homolog of NCBI NO: 4680659 NR Description: CGI-10 protein [Homo sapiens]
  misc_feature (52)..(496): Homolog of NCBI NO: 26006706 NR Description: Ubiquinone biosynthesis monooxgenase COQ6
  misc_feature (52)..(496): Homolog of NCBI NO: 30047245 NR Description: Coq6 protein [Mus musculus]
  misc_feature (52)..(496): Homolog of NCBI NO: 18848355 NR Description: Similar to CGI-10 protein [Mus musculus]
  misc_feature (45)..(496): Homolog of NCBI NO: 15680256 NR Description: Unknown (protein for MGC:23201) [Homo sapiens]
  misc_feature (45)..(496): Homolog of NCBI NO: 32967305 NR Description: CGI-10 protein isoform a; CGI-10 protein [Homo
  misc_feature (53)..(505): Homolog of NCBI NO: 28376703 NR Description: putative oxygenase [Oryza sativa (japonica
  misc_feature (26)..(505): Homolog of NCBI NO: 11994239 NR Description: gb|AAD27719.1~gene_id:MUJ8.10~similar to unknown
  misc_feature (2)..(505): Homolog of NCBI NO: 30687388 NR Description: monooxygenase family [Arabidopsis thaliana]
MNRVLARNLRTSVCGTRILQRTCSTVVTHDVSTSCSNESNALNNSTDDGPQHDIAIVGGGMVGIALAASLASKPLTKHLNVAIIDNNPLLGRRNIIEKGHQPDPRVSTVTPATISFLKDIGAWKYIEQQRHAYFDKMQVWDYTGLGYTRYNANDVHQDVLGCVVENKVLQSSQLSCVQESDLQKTVYPARLNAMDMLPSSSLTGLGEVPSTTDLFMRGRLAKLELSDGNRVYAKLVVGADGSKSRVRELAGIKTTGWNYSQNAIICTVEHTAENYTAWQRFLPNGPIALLPIGDKFSNIVWTMDPKEASDRKLMNEDDFIKAVNDALDSGYGPNPETTSSRDSLSWLTGDATISAKERFETPPKVVKLSSERMMFPLSLSHAKDYVSKRVALVGDSAHTVHPLAGQGVNLGFADACALSKAIAEGIALGTDIGEANLLKRYEAERKPANIAMMAVLDGIQKMYSVDFGPLNALRAAAFHGAHYISPLKKRIISYASGEQSLPLFS

SEQ ID NO: 23431 - protein, 445 aa, Arabidopsis thaliana
  peptide (1)..(445): Ceres Seq. ID no. 12327476
  misc_feature (172)..(397): Pfam Name: Monooxygenase Pfam Description: Monooxygenase
  misc_feature (1)..(436): Homolog of NCBI NO: 27369832 NR Description: RIKEN cDNA 5930427M12 [Mus musculus]
  misc_feature (1)..(436): Homolog of NCBI NO: 4680659 NR Description: CGI-10 protein [Homo sapiens]
  misc_feature (1)..(436): Homolog of NCBI NO: 30047245 NR Description: Coq6 protein [Mus musculus]
  misc_feature (1)..(436): Homolog of NCBI NO: 26006706 NR Description: Ubiquinone biosynthesis monooxgenase COQ6
  misc_feature (1)..(436): Homolog of NCBI NO: 18848355 NR Description: Similar to CGI-10 protein [Mus musculus]
  misc_feature (1)..(436): Homolog of NCBI NO: 15680256 NR Description: Unknown (protein for MGC:23201) [Homo sapiens]
  misc_feature (1)..(436): Homolog of NCBI NO: 32967305 NR Description: CGI-10 protein isoform a; CGI-10 protein [Homo
  misc_feature (1)..(445): Homolog of NCBI NO: 28376703 NR Description: putative oxygenase [Oryza sativa (japonica
  misc_feature (1)..(445): Homolog of NCBI NO: 11994239 NR Description: gb|AAD27719.1~gene_id:MUJ8.10~similar to unknown
  misc_feature (1)..(445): Homolog of NCBI NO: 30687388 NR Description: monooxygenase family [Arabidopsis thaliana]
MVGIALAASLASKPLTKHLNVAIIDNNPLLGRRNIIEKGHQPDPRVSTVTPATISFLKDIGAWKYIEQQRHAYFDKMQVWDYTGLGYTRYNANDVHQDVLGCVVENKVLQSSQLSCVQESDLQKTVYPARLNAMDMLPSSSLTGLGEVPSTTDLFMRGRLAKLELSDGNRVYAKLVVGADGSKSRVRELAGIKTTGWNYSQNAIICTVEHTAENYTAWQRFLPNGPIALLPIGDKFSNIVWTMDPKEASDRKLMNEDDFIKAVNDALDSGYGPNPETTSSRDSLSWLTGDATISAKERFETPPKVVKLSSERMMFPLSLSHAKDYVSKRVALVGDSAHTVHPLAGQGVNLGFADACALSKAIAEGIALGTDIGEANLLKRYEAERKPANIAMMAVLDGIQKMYSVDFGPLNALRAAAFHGAHYISPLKKRIISYASGEQSLPLFS

SEQ ID NO: 23432 - DNA, 1414 bp, Arabidopsis thaliana
  misc_feature (1)..(1414): Ceres Seq. ID no. 13487106
  misc_feature: MA Experiment ID: 108434 Result: Down-regulated in Transcription
  misc_feature: MA Experiment 108434 PARAMETER Experiment Name: At_Root_Tips_cDNA_P Parameter: Tissue Value: Root Tips
  misc_feature: MA Experiment ID: 108462 Result: Up-regulated in Transcription
  misc_feature: MA Experiment 108462 PARAMETER Experiment Name: At_Germinating_Seeds_cDNA_P Parameter: Age (day) Value: 2 vs. 0
  misc_feature: MA Experiment 108462 PARAMETER Experiment Name: At_Germinating_Seeds_cDNA_P Parameter: Tissue Value: Germinating Seeds
  misc_feature: MA Experiment ID: 108463 Result: Up-regulated in Transcription
  misc_feature: MA Experiment 108463 PARAMETER Experiment Name: At_Germinating_Seeds_cDNA_P Parameter: Age (day) Value: 3 vs. 0
  misc_feature: MA Experiment 108463 PARAMETER Experiment Name: At_Germinating_Seeds_cDNA_P Parameter: Tissue Value: Germinating Seeds
  misc_feature: MA Experiment ID: 108464 Result: Up-regulated in Transcription
  misc_feature: MA Experiment 108464 PARAMETER Experiment Name: At_Germinating_Seeds_cDNA_P Parameter: Age (day) Value: 4 vs. 0
  misc_feature: MA Experiment 108464 PARAMETER Experiment Name: At_Germinating_Seeds_cDNA_P Parameter: Tissue Value: Germinating Seeds
  misc_feature: MA Experiment ID: 108573 Result: Up-regulated in Transcription
  misc_feature: MA Experiment 108573 PARAMETER Experiment Name: At_Drought_cDNA_P Parameter: Timepoint (hr) Value: 6
  misc_feature: MA Experiment 108573 PARAMETER Experiment Name: At_Drought_cDNA_P Parameter: Tissue Value: Aerial
  misc_feature: MA Experiment 108573 PARAMETER Experiment Name: At_Drought_cDNA_P Parameter: Treatment Value: Drought vs. No Drought
  misc_feature: MA Experiment ID: 108585 Result: Up-regulated in Transcription
  misc_feature: MA Experiment 108585 PARAMETER Experiment Name: At_5mM_NaNP_cDNA_P Parameter: Timepoint (hr) Value: 6
  misc_feature: MA Experiment 108585 PARAMETER Experiment Name: At_5mM_NaNP_cDNA_P Parameter: Tissue Value: Aerial
  misc_feature: MA Experiment 108585 PARAMETER Experiment Name: At_5mM_NaNP_cDNA_P Parameter: Treatment Value: null
  misc_feature: MA Experiment ID: 20000111 Result: Down-regulated in Transcription
  misc_feature: MA Experiment 20000111 PARAMETER Experiment Name: At_42deg_Heat_cDNA_P Parameter: Temperature (deg C) Value: 42 vs. 22
  misc_feature: MA Experiment 20000111 PARAMETER Experiment Name: At_42deg_Heat_cDNA_P Parameter: Timepoint (hr) Value: 6
  misc_feature: MA Experiment 20000111 PARAMETER Experiment Name: At_42deg_Heat_cDNA_P Parameter: Tissue Value: Aerial
  misc_feature: MA Experiment ID: 20000224 Result: Down-regulated in Transcription
  misc_feature: MA Experiment ID: 20000328 Result: Down-regulated in Transcription
  misc_feature: MA Experiment 20000328 PARAMETER Experiment Name: At_42deg_Heat_Sub_P Parameter: Age (day) Value: 14
  misc_feature: MA Experiment 20000328 PARAMETER Experiment Name: At_42deg_Heat_Sub_P Parameter: Organism Value: A. thaliana
  misc_feature: MA Experiment 20000328 PARAMETER Experiment Name: At_42deg_Heat_Sub_P Parameter: Plant Line Value: WS
  misc_feature: MA Experiment 20000328 PARAMETER Experiment Name: At_42deg_Heat_Sub_P Parameter: Temperature (deg C) Value: 42 vs. 22
  misc_feature: MA Experiment 20000328 PARAMETER Experiment Name: At_42deg_Heat_Sub_P Parameter: Timepoint (hr) Value: 6
  misc_feature: MA Experiment 20000328 PARAMETER Experiment Name: At_42deg_Heat_Sub_P Parameter: Tissue Value: Aerial
  misc_feature: MA Experiment ID: 20000440 Result: Down-regulated in Transcription
  misc_feature: MA Experiment 20000440 PARAMETER Experiment Name: At_Closed-Flower__Sub_P Parameter: Tissue Value: Closed Flower vs. Whole Plant
  misc_feature: MA Experiment ID: 20001560 Result: Down-regulated in Transcription
  misc_feature: MA Experiment 20001560 PARAMETER Experiment Name: At_Drought_Soil_Dry_P Parameter: Age (day) Value: 28
  misc_feature: MA Experiment 20001560 PARAMETER Experiment Name: At_Drought_Soil_Dry_P Parameter: Organism Value: A. thaliana
  misc_feature: MA Experiment 20001560 PARAMETER Experiment Name: At_Drought_Soil_Dry_P Parameter: Plant Line Value: WS
  misc_feature: MA Experiment 20001560 PARAMETER Experiment Name: At_Drought_Soil_Dry_P Parameter: Post Timepoint (hr) Value: None
  misc_feature: MA Experiment 20001560 PARAMETER Experiment Name: At_Drought_Soil_Dry_P Parameter: Post-Treatment Value: None
  misc_feature: MA Experiment 20001560 PARAMETER Experiment Name: At_Drought_Soil_Dry_P Parameter: Timepoint (day) Value: 14
  misc_feature: MA Experiment 20001560 PARAMETER Experiment Name: At_Drought_Soil_Dry_P Parameter: Treatment Value: Drought vs. No Drought
acggcaacttttgtggttagtcatataagaacaaccgcgttacaaacttctctcgtctttcctggaaatttctgtccacaaatattagtctttaattttcgaaacttctctcaggcgaattcaagtttcatagttttggtctagtttttgtccaccgatctatctctttagttgaaacttatcagaatggctcgtccacaagaccctccacgtggtttcttcccttttggaaaccccttcaaaaatctatcttcgaagaactcggtactctcctcaaagcttctcccactcctgaacaattttgagaccaacttagcatcttctattagtaagcttgtccctaaggaaaagagcgatatcctgactgtctcatggatgaaacaagctatggaatctctttgcgagacacataatggtatcaagacccttataaccgatcttgagcttcctgtatcagattgggaggataaatgggttgatgtctatcttgacattagtgtgaagcttcttgatctctgcaatgcctttagctctgagcttacccgtctcaaccaaggtcatctcttactccagtttgctctgcataacttggaggccaactctcctcagaatctgtcgaaagctcagtcatcactagacagttggaagcaacacattgtctccaagaacccgagaatagaaaattgccgtgcaatcttgagcagccttgttcagaccttgaatctccccaaggtgaaaaactcggccaaagggaaagtcttgatgagagctctatatggtgtaaaggttaagaccttatacatctctggtgtttttgctgcagcgttctcaggttcatcgcagaatctgatgtaccttacagtctcaaacgagcttccatgggcacaatcattcatggaagtgcagaacaccatgaacgcagaaatcaagaacatatttttgtcagacgggttaacggttctgaaagagctagaggcagttgcttcaggtgtcaagaaactctaccctgcgatccaacaaggatcaatagatcccatatcgctgcagccactgaaggactcggtcacagaattatcgaatgggatagatcttgtttcgaaagaagtggattgtttcttcaagattctgttatcggggagagacacattactagagaacctaaggtcgatgggtgcatcaaccctacaggcaacatcgccaaaaaaggctgccggaaaaaattacagaggattctgataaactataaatgtttgtacagatggttttacttcaagtgttccatcttcttggtattgaatgtattattaggtttttgtgcaatcgtagtcgtttgtatgagatgctttgaaagtagtagttgtataagtaaaggttttaccaacttatctatatatattatgaatatctttgaagc

SEQ ID NO: 23433 - protein, 349 aa, Arabidopsis thaliana
  peptide (1)..(349): Ceres Seq. ID no. 13487107
  misc_feature (16)..(345): Homolog of NCBI NO: 7485228 NR Description: hypothetical protein A_IG002N01.26 - Arabidopsis
  misc_feature (1)..(327): Homolog of NCBI NO: 16604342 NR Description: At2g46080/T3F17.27 [Arabidopsis thaliana]
  misc_feature (1)..(327): Homolog of NCBI NO: 18406969 NR Description: expressed protein [Arabidopsis thaliana]
  misc_feature (1)..(349): Homolog of NCBI NO: 18378853 NR Description: expressed protein [Arabidopsis thaliana]
  misc_feature (68)..(325): Homolog of NCBI NO: 15233126 NR Description: hypothetical protein [Arabidopsis thaliana]
  misc_feature (1)..(313): Homolog of NCBI NO: 37536014 NR Description: unknown protein [Oryza sativa (japonica
  misc_feature (16)..(345): Homolog of NCBI NO: 28392962 NR Description: unknown protein [Arabidopsis thaliana]
  misc_feature (16)..(345): Homolog of NCBI NO: 30678866 NR Description: expressed protein [Arabidopsis thaliana]
MARPQDPPRGFFPFGNPFKNLSSKNSVLSSKLLPLLNNFETNLASSISKLVPKEKSDILTVSWMKQAMESLCETHNGIKTLITDLELPVSDWEDKWVDVYLDISVKLLDLCNAFSSELTRLNQGHLLLQFALHNLEANSPQNLSKAQSSLDSWKQHIVSKNPRIENCRAILSSLVQTLNLPKVKNSAKGKVLMRALYGVKVKTLYISGVFAAAFSGSSQNLMYLTVSNELPWAQSFMEVQNTMNAEIKNIFLSDGLTVLKELEAVASGVKKLYPAIQQGSIDPISLQPLKDSVTELSNGIDLVSKEVDCFFKILLSGRDTLLENLRSMGASTLQATSPKKAAGKNYRGF

SEQ ID NO: 23434 - protein, 286 aa, Arabidopsis thaliana
  peptide (1)..(286): Ceres Seq. ID no. 13487108
  misc_feature (5)..(262): Homolog of NCBI NO: 15233126 NR Description: hypothetical protein [Arabidopsis thaliana]
  misc_feature (1)..(250): Homolog of NCBI NO: 37536014 NR Description: unknown protein [Oryza sativa (japonica
  misc_feature (1)..(282): Homolog of NCBI NO: 28392962 NR Description: unknown protein [Arabidopsis thaliana]
  misc_feature (1)..(282): Homolog of NCBI NO: 30678866 NR Description: expressed protein [Arabidopsis thaliana]
  misc_feature (1)..(282): Homolog of NCBI NO: 7485228 NR Description: hypothetical protein A_IG002N01.26 - Arabidopsis
  misc_feature (1)..(264): Homolog of NCBI NO: 16604342 NR Description: At2g46080/T3F17.27 [Arabidopsis thaliana]
  misc_feature (1)..(264): Homolog of NCBI NO: 18406969 NR Description: expressed protein [Arabidopsis thaliana]
  misc_feature (1)..(286): Homolog of NCBI NO: 18378853 NR Description: expressed protein [Arabidopsis thaliana]
MKQAMESLCETHNGIKTLITDLELPVSDWEDKWVDVYLDISVKLLDLCNAFSSELTRLNQGHLLLQFALHNLEANSPQNLSKAQSSLDSWKQHIVSKNPRIENCRAILSSLVQTLNLPKVKNSAKGKVLMRALYGVKVKTLYISGVFAAAFSGSSQNLMYLTVSNELPWAQSFMEVQNTMNAEIKNIFLSDGLTVLKELEAVASGVKKLYPAIQQGSIDPISLQPLKDSVTELSNGIDLVSKEVDCFFKILLSGRDTLLENLRSMGASTLQATSPKKAAGKNYRGF

SEQ ID NO: 23435 - protein, 282 aa, Arabidopsis thaliana
  peptide (1)..(282): Ceres Seq. ID no. 13487109
  misc_feature (1)..(258): Homolog of NCBI NO: 15233126 NR Description: hypothetical protein [Arabidopsis thaliana]
  misc_feature (1)..(246): Homolog of NCBI NO: 37536014 NR Description: unknown protein [Oryza sativa (japonica
  misc_feature (1)..(278): Homolog of NCBI NO: 28392962 NR Description: unknown protein [Arabidopsis thaliana]
  misc_feature (1)..(278): Homolog of NCBI NO: 30678866 NR Description: expressed protein [Arabidopsis thaliana]
  misc_feature (1)..(278): Homolog of NCBI NO: 7485228 NR Description: hypothetical protein A_IG002N01.26 - Arabidopsis
  misc_feature (1)..(260): Homolog of NCBI NO: 16604342 NR Description: At2g46080/T3F17.27 [Arabidopsis thaliana]
  misc_feature (1)..(260): Homolog of NCBI NO: 18406969 NR Description: expressed protein [Arabidopsis thaliana]
  misc_feature (1)..(282): Homolog of NCBI NO: 18378853 NR Description: expressed protein [Arabidopsis thaliana]
MESLCETHNGIKTLITDLELPVSDWEDKWVDVYLDISVKLLDLCNAFSSELTRLNQGHLLLQFALHNLEANSPQNLSKAQSSLDSWKQHIVSKNPRIENCRAILSSLVQTLNLPKVKNSAKGKVLMRALYGVKVKTLYISGVFAAAFSGSSQNLMYLTVSNELPWAQSFMEVQNTMNAEIKNIFLSDGLTVLKELEAVASGVKKLYPAIQQGSIDPISLQPLKDSVTELSNGIDLVSKEVDCFFKILLSGRDTLLENLRSMGASTLQATSPKKAAGKNYRGF

SEQ ID NO: 23436 - DNA, 677 bp, Arabidopsis thaliana
  misc_feature (1)..(677): Ceres Seq. ID no. 12561632
  misc_feature: MA Experiment ID: 20000166 Result: Down-regulated in Transcription
  misc_feature: MA Experiment 20000166 PARAMETER Experiment Name: At_100uM_ABA_P Parameter: Age (day) Value: 14
  misc_feature: MA Experiment 20000166 PARAMETER Experiment Name: At_100uM_ABA_P Parameter: Organism Value: A. thaliana
  misc_feature: MA Experiment 20000166 PARAMETER Experiment Name: At_100uM_ABA_P Parameter: Plant Line Value: WS
  misc_feature: MA Experiment 20000166 PARAMETER Experiment Name: At_100uM_ABA_P Parameter: Timepoint (hr) Value: 1
  misc_feature: MA Experiment 20000166 PARAMETER Experiment Name: At_100uM_ABA_P Parameter: Tissue Value: Aerial
  misc_feature: MA Experiment 20000166 PARAMETER Experiment Name: At_100uM_ABA_P Parameter: Treatment Value: 100uM ABA vs. No Treatment
  misc_feature: MA Experiment ID: 20000179 Result: Up-regulated in Transcription
  misc_feature: MA Experiment 20000179 PARAMETER Experiment Name: At_Germinating_Seeds_P Parameter: Age (hr) Value: 6 vs. 0
  misc_feature: MA Experiment 20000179 PARAMETER Experiment Name: At_Germinating_Seeds_P Parameter: Tissue Value: Germinating Seeds
  misc_feature: MA Experiment ID: 20000180 Result: Up-regulated in Transcription
  misc_feature: MA Experiment 20000180 PARAMETER Experiment Name: At_Germinating_Seeds_P Parameter: Age (hr) Value: 24 vs. 0
  misc_feature: MA Experiment 20000180 PARAMETER Experiment Name: At_Germinating_Seeds_P Parameter: Tissue Value: Germinating Seeds
  misc_feature: MA Experiment ID: 20000182 Result: Down-regulated in Transcription
  misc_feature: MA Experiment 20000182 PARAMETER Experiment Name: At_2mM_SA_P Parameter: Age (day) Value: 14
  misc_feature: MA Experiment 20000182 PARAMETER Experiment Name: At_2mM_SA_P Parameter: Organism Value: A. thaliana
  misc_feature: MA Experiment 20000182 PARAMETER Experiment Name: At_2mM_SA_P Parameter: Plant Line Value: WS
  misc_feature: MA Experiment 20000182 PARAMETER Experiment Name: At_2mM_SA_P Parameter: Timepoint (hr) Value: 6
  misc_feature: MA Experiment 20000182 PARAMETER Experiment Name: At_2mM_SA_P Parameter: Tissue Value: Aerial
  misc_feature: MA Experiment 20000182 PARAMETER Experiment Name: At_2mM_SA_P Parameter: Treatment Value: 2mM SA vs. No Treatment
  misc_feature: MA Experiment ID: 20000185 Result: Down-regulated in Transcription
  misc_feature: MA Experiment 20000185 PARAMETER Experiment Name: At_Roots__P Parameter: Age (day) Value: 7 vs. 21
  misc_feature: MA Experiment 20000185 PARAMETER Experiment Name: At_Roots__P Parameter: Organism Value: A. thaliana
  misc_feature: MA Experiment 20000185 PARAMETER Experiment Name: At_Roots__P Parameter: Tissue Value: Roots vs. Whole Plant
  misc_feature: MA Experiment ID: 20000227 Result: Up-regulated in Transcription
  misc_feature: MA Experiment 20000227 PARAMETER Experiment Name: At_Root-Tips-vs-Tops_P Parameter: Tissue Value: Root Tips vs. Root Tops
  misc_feature: MA Experiment ID: 20000234 Result: Down-regulated in Transcription
  misc_feature: MA Experiment 20000234 PARAMETER Experiment Name: At_Siliques_P Parameter: Age (day) Value: 21
  misc_feature: MA Experiment 20000234 PARAMETER Experiment Name: At_Siliques_P Parameter: Organism Value: A. thaliana
  misc_feature: MA Experiment 20000234 PARAMETER Experiment Name: At_Siliques_P Parameter: Plant Line Value: WS
  misc_feature: MA Experiment 20000234 PARAMETER Experiment Name: At_Siliques_P Parameter: Tissue Value: Less Than 5mm Siliques vs. Whole Plant
  misc_feature: MA Experiment ID: 20000264 Result: Down-regulated in Transcription
  misc_feature: MA Experiment 20000264 PARAMETER Experiment Name: At_Open_Flower_P Parameter: Age (day) Value: 21
  misc_feature: MA Experiment 20000264 PARAMETER Experiment Name: At_Open_Flower_P Parameter: Plant Line Value: WS
  misc_feature: MA Experiment 20000264 PARAMETER Experiment Name: At_Open_Flower_P Parameter: Tissue Value: Open Flower vs. Whole Plant
  misc_feature: MA Experiment ID: 20000265 Result: Down-regulated in Transcription
  misc_feature: MA Experiment 20000265 PARAMETER Experiment Name: At_Open_Flower_P Parameter: Age (day) Value: 21
  misc_feature: MA Experiment 20000265 PARAMETER Experiment Name: At_Open_Flower_P Parameter: Plant Line Value: WS
  misc_feature: MA Experiment 20000265 PARAMETER Experiment Name: At_Open_Flower_P Parameter: Tissue Value: Closed Flower vs. Whole Plant
  misc_feature: MA Experiment ID: 20000267 Result: Down-regulated in Transcription
  misc_feature: MA Experiment 20000267 PARAMETER Experiment Name: At_Drought_P Parameter: Age (day) Value: 7
  misc_feature: MA Experiment 20000267 PARAMETER Experiment Name: At_Drought_P Parameter: Organism Value: A. thaliana
  misc_feature: MA Experiment 20000267 PARAMETER Experiment Name: At_Drought_P Parameter: Plant Line Value: WS
  misc_feature: MA Experiment 20000267 PARAMETER Experiment Name: At_Drought_P Parameter: Timepoint (hr) Value: 6
  misc_feature: MA Experiment 20000267 PARAMETER Experiment Name: At_Drought_P Parameter: Tissue Value: Whole Plant
  misc_feature: MA Experiment 20000267 PARAMETER Experiment Name: At_Drought_P Parameter: Treatment Value: Drought vs. No Drought
  misc_feature: MA Experiment ID: 20000268 Result: Down-regulated in Transcription
  misc_feature: MA Experiment 20000268 PARAMETER Experiment Name: At_100mM_NaCl__P Parameter: Age (day) Value: 14
  misc_feature: MA Experiment 20000268 PARAMETER Experiment Name: At_100mM_NaCl__P Parameter: Organism Value: A. thaliana
  misc_feature: MA Experiment 20000268 PARAMETER Experiment Name: At_100mM_NaCl__P Parameter: Plant Line Value: WS
  misc_feature: MA Experiment 20000268 PARAMETER Experiment Name: At_100mM_NaCl__P Parameter: Timepoint (hr) Value: 6
  misc_feature: MA Experiment 20000268 PARAMETER Experiment Name: At_100mM_NaCl__P Parameter: Tissue Value: Whole Plant
  misc_feature: MA Experiment 20000268 PARAMETER Experiment Name: At_100mM_NaCl__P Parameter: Treatment Value: 100mM NaCl vs. No Treatment
  misc_feature: MA Experiment ID: 20000286 Result: Down-regulated in Transcription
  misc_feature: MA Experiment 20000286 PARAMETER Experiment Name: At_Open_Flower_P Parameter: Age (day) Value: 21
  misc_feature: MA Experiment 20000286 PARAMETER Experiment Name: At_Open_Flower_P Parameter: Plant Line Value: WS
  misc_feature: MA Experiment 20000286 PARAMETER Experiment Name: At_Open_Flower_P Parameter: Tissue Value: Half Open vs. Whole Plant
  misc_feature: MA Experiment ID: 20000308 Result: Down-regulated in Transcription
  misc_feature: MA Experiment 20000308 PARAMETER Experiment Name: At_100mM_NaCl__P Parameter: Age (day) Value: 17
  misc_feature: MA Experiment 20000308 PARAMETER Experiment Name: At_100mM_NaCl__P Parameter: Organism Value: A. thaliana
  misc_feature: MA Experiment 20000308 PARAMETER Experiment Name: At_100mM_NaCl__P Parameter: Plant Line Value: WS
  misc_feature: MA Experiment 20000308 PARAMETER Experiment Name: At_100mM_NaCl__P Parameter: Timepoint (hr) Value: 72
  misc_feature: MA Experiment 20000308 PARAMETER Experiment Name: At_100mM_NaCl__P Parameter: Tissue Value: Whole Plant
  misc_feature: MA Experiment 20000308 PARAMETER Experiment Name: At_100mM_NaCl__P Parameter: Treatment Value: 100mM NaCl vs. No Treatment
  misc_feature: MA Experiment ID: 20000436 Result: Down-regulated in Transcription
  misc_feature: MA Experiment 20000436 PARAMETER Experiment Name: At_Drought_P Parameter: Age (day) Value: 7
  misc_feature: MA Experiment 20000436 PARAMETER Experiment Name: At_Drought_P Parameter: Organism Value: A. thaliana
  misc_feature: MA Experiment 20000436 PARAMETER Experiment Name: At_Drought_P Parameter: Plant Line Value: WS
  misc_feature: MA Experiment 20000436 PARAMETER Experiment Name: At_Drought_P Parameter: Timepoint (hr) Value: 12
  misc_feature: MA Experiment 20000436 PARAMETER Experiment Name: At_Drought_P Parameter: Tissue Value: Whole Plant
  misc_feature: MA Experiment 20000436 PARAMETER Experiment Name: At_Drought_P Parameter: Treatment Value: Drought vs. No Drought
  misc_feature: MA Experiment ID: 20000437 Result: Down-regulated in Transcription
  misc_feature: MA Experiment 20000437 PARAMETER Experiment Name: At_Drought_P Parameter: Age (day) Value: 8
  misc_feature: MA Experiment 20000437 PARAMETER Experiment Name: At_Drought_P Parameter: Organism Value: A. thaliana
  misc_feature: MA Experiment 20000437 PARAMETER Experiment Name: At_Drought_P Parameter: Plant Line Value: WS
  misc_feature: MA Experiment 20000437 PARAMETER Experiment Name: At_Drought_P Parameter: Timepoint (hr) Value: 24
  misc_feature: MA Experiment 20000437 PARAMETER Experiment Name: At_Drought_P Parameter: Tissue Value: Whole Plant
  misc_feature: MA Experiment 20000437 PARAMETER Experiment Name: At_Drought_P Parameter: Treatment Value: Drought vs. No Drought
  misc_feature: MA Experiment ID: 20000439 Result: Down-regulated in Transcription
  misc_feature: MA Experiment 20000439 PARAMETER Experiment Name: At_Roots__P Parameter: Age (day) Value: 14 vs. 21
  misc_feature: MA Experiment 20000439 PARAMETER Experiment Name: At_Roots__P Parameter: Organism Value: A. thaliana
  misc_feature: MA Experiment 20000439 PARAMETER Experiment Name: At_Roots__P Parameter: Tissue Value: Roots vs. Whole Plant
  misc_feature: MA Experiment ID: 20000441 Result: Up-regulated in Transcription
  misc_feature: MA Experiment 20000441 PARAMETER Experiment Name: At_1uM_BR-BRZ__P Parameter: Tissue Value: Shoot Apices
  misc_feature: MA Experiment 20000441 PARAMETER Experiment Name: At_1uM_BR-BRZ__P Parameter: Treatment Value: 1uM BR vs. No Treatment
  misc_feature: MA Experiment ID: 20000443 Result: Up-regulated in Transcription
  misc_feature: MA Experiment 20000443 PARAMETER Experiment Name: At_1uM_BR-BRZ__P Parameter: Tissue Value: Shoot Apices
  misc_feature: MA Experiment 20000443 PARAMETER Experiment Name: At_1uM_BR-BRZ__P Parameter: Treatment Value: 1uM BRZ vs. No Treatment
  misc_feature: MA Experiment ID: 20000460 Result: Down-regulated in Transcription
  misc_feature: MA Experiment 20000460 PARAMETER Experiment Name: At_10percent_PEG_P Parameter: Age (day) Value: 12
  misc_feature: MA Experiment 20000460 PARAMETER Experiment Name: At_10percent_PEG_P Parameter: Organism Value: A. thaliana
  misc_feature: MA Experiment 20000460 PARAMETER Experiment Name: At_10percent_PEG_P Parameter: Plant Line Value: WS
  misc_feature: MA Experiment 20000460 PARAMETER Experiment Name: At_10percent_PEG_P Parameter: Timepoint (day) Value: 12
  misc_feature: MA Experiment 20000460 PARAMETER Experiment Name: At_10percent_PEG_P Parameter: Tissue Value: Whole Plant
  misc_feature: MA Experiment 20000460 PARAMETER Experiment Name: At_10percent_PEG_P Parameter: Treatment Value: 10percent PEG vs. No Treatment
  misc_feature: MA Experiment ID: 20000794 Result: Down-regulated in Transcription
  misc_feature: MA Experiment 20000794 PARAMETER Experiment Name: At_Petals_P Parameter: Age (day) Value: 23-25 days
  misc_feature: MA Experiment 20000794 PARAMETER Experiment Name: At_Petals_P Parameter: Plant Line Value: WS
  misc_feature: MA Experiment 20000794 PARAMETER Experiment Name: At_Petals_P Parameter: Tissue Value: Petals vs. Whole plant
  misc_feature: MA Experiment ID: 20001248 Result: Up-regulated in Transcription
  misc_feature: MA Experiment 20001248 PARAMETER Experiment Name: At_Far-red-induction_P Parameter: Age (day) Value: 7
  misc_feature: MA Experiment 20001248 PARAMETER Experiment Name: At_Far-red-induction_P Parameter: Light Value: Far-red vs. White
  misc_feature: MA Experiment 20001248 PARAMETER Experiment Name: At_Far-red-induction_P Parameter: Organism Value: A. thaliana
  misc_feature: MA Experiment 20001248 PARAMETER Experiment Name: At_Far-red-induction_P Parameter: Plant Line Value: Columbia
  misc_feature: MA Experiment 20001248 PARAMETER Experiment Name: At_Far-red-induction_P Parameter: Timepoint (hr) Value: 4
  misc_feature: MA Experiment 20001248 PARAMETER Experiment Name: At_Far-red-induction_P Parameter: Tissue Value: Whole Plant
  misc_feature: MA Experiment ID: 20001450 Result: Up-regulated in Transcription
  misc_feature: MA Experiment 20001450 PARAMETER Experiment Name: At_Far-red-induction_P Parameter: Age (day) Value: 7
  misc_feature: MA Experiment 20001450 PARAMETER Experiment Name: At_Far-red-induction_P Parameter: Light Value: Far-red vs. White
  misc_feature: MA Experiment 20001450 PARAMETER Experiment Name: At_Far-red-induction_P Parameter: Organism Value: A. thaliana
  misc_feature: MA Experiment 20001450 PARAMETER Experiment Name: At_Far-red-induction_P Parameter: Plant Line Value: Columbia
  misc_feature: MA Experiment 20001450 PARAMETER Experiment Name: At_Far-red-induction_P Parameter: Timepoint (hr) Value: 8
  misc_feature: MA Experiment 20001450 PARAMETER Experiment Name: At_Far-red-induction_P Parameter: Tissue Value: Whole Plant
  misc_feature: MA Experiment ID: 20001554 Result: Down-regulated in Transcription
  misc_feature: MA Experiment 20001554 PARAMETER Experiment Name: At_Drought_Soil_Dry_P Parameter: Age (day) Value: 21
  misc_feature: MA Experiment 20001554 PARAMETER Experiment Name: At_Drought_Soil_Dry_P Parameter: Organism Value: A. thaliana
  misc_feature: MA Experiment 20001554 PARAMETER Experiment Name: At_Drought_Soil_Dry_P Parameter: Plant Line Value: WS
  misc_feature: MA Experiment 20001554 PARAMETER Experiment Name: At_Drought_Soil_Dry_P Parameter: Post Timepoint (hr) Value: None
  misc_feature: MA Experiment 20001554 PARAMETER Experiment Name: At_Drought_Soil_Dry_P Parameter: Post-Treatment Value: None
  misc_feature: MA Experiment 20001554 PARAMETER Experiment Name: At_Drought_Soil_Dry_P Parameter: Timepoint (day) Value: 7
  misc_feature: MA Experiment 20001554 PARAMETER Experiment Name: At_Drought_Soil_Dry_P Parameter: Treatment Value: Drought vs. No Drought
  misc_feature: MA Experiment ID: 20001555 Result: Down-regulated in Transcription
  misc_feature: MA Experiment 20001555 PARAMETER Experiment Name: At_Drought_Soil_Dry_P Parameter: Age (day) Value: 24
  misc_feature: MA Experiment 20001555 PARAMETER Experiment Name: At_Drought_Soil_Dry_P Parameter: Organism Value: A. thaliana
  misc_feature: MA Experiment 20001555 PARAMETER Experiment Name: At_Drought_Soil_Dry_P Parameter: Plant Line Value: WS
  misc_feature: MA Experiment 20001555 PARAMETER Experiment Name: At_Drought_Soil_Dry_P Parameter: Post Timepoint (hr) Value: None
  misc_feature: MA Experiment 20001555 PARAMETER Experiment Name: At_Drought_Soil_Dry_P Parameter: Post-Treatment Value: None
  misc_feature: MA Experiment 20001555 PARAMETER Experiment Name: At_Drought_Soil_Dry_P Parameter: Timepoint (day) Value: 10
  misc_feature: MA Experiment 20001555 PARAMETER Experiment Name: At_Drought_Soil_Dry_P Parameter: Treatment Value: Drought vs. No Drought
  misc_feature: MA Experiment ID: 20001556 Result: Down-regulated in Transcription
  misc_feature: MA Experiment 20001556 PARAMETER Experiment Name: At_Drought_Soil_Dry_P Parameter: Age (day) Value: 26
  misc_feature: MA Experiment 20001556 PARAMETER Experiment Name: At_Drought_Soil_Dry_P Parameter: Organism Value: A. thaliana
  misc_feature: MA Experiment 20001556 PARAMETER Experiment Name: At_Drought_Soil_Dry_P Parameter: Plant Line Value: WS
  misc_feature: MA Experiment 20001556 PARAMETER Experiment Name: At_Drought_Soil_Dry_P Parameter: Post Timepoint (hr) Value: None
  misc_feature: MA Experiment 20001556 PARAMETER Experiment Name: At_Drought_Soil_Dry_P Parameter: Post-Treatment Value: None
  misc_feature: MA Experiment 20001556 PARAMETER Experiment Name: At_Drought_Soil_Dry_P Parameter: Timepoint (day) Value: 12
  misc_feature: MA Experiment 20001556 PARAMETER Experiment Name: At_Drought_Soil_Dry_P Parameter: Treatment Value: Drought vs. No Drought
  misc_feature: MA Experiment ID: 20001559 Result: Down-regulated in Transcription
  misc_feature: MA Experiment 20001559 PARAMETER Experiment Name: At_Drought_Soil_Dry_P Parameter: Age (day) Value: 28
  misc_feature: MA Experiment 20001559 PARAMETER Experiment Name: At_Drought_Soil_Dry_P Parameter: Organism Value: A. thaliana
  misc_feature: MA Experiment 20001559 PARAMETER Experiment Name: At_Drought_Soil_Dry_P Parameter: Plant Line Value: WS
  misc_feature: MA Experiment 20001559 PARAMETER Experiment Name: At_Drought_Soil_Dry_P Parameter: Post Timepoint (hr) Value: 29
  misc_feature: MA Experiment 20001559 PARAMETER Experiment Name: At_Drought_Soil_Dry_P Parameter: Post-Treatment Value: Re-Water vs. No Drought
  misc_feature: MA Experiment 20001559 PARAMETER Experiment Name: At_Drought_Soil_Dry_P Parameter: Timepoint (day) Value: 14
  misc_feature: MA Experiment 20001559 PARAMETER Experiment Name: At_Drought_Soil_Dry_P Parameter: Treatment Value: Drought vs. No Drought
  misc_feature: MA Experiment ID: 20001756 Result: Up-regulated in Transcription
  misc_feature: MA Experiment 20001756 PARAMETER Experiment Name: At_50mM_NH4NO3_L-to-H_P Parameter: Timepoint (hr) Value: 4
  misc_feature: MA Experiment 20001756 PARAMETER Experiment Name: At_50mM_NH4NO3_L-to-H_P Parameter: Tissue Value: Leaf
  misc_feature: MA Experiment 20001756 PARAMETER Experiment Name: At_50mM_NH4NO3_L-to-H_P Parameter: Treatment Value: 50mM NH4NO3 vs 100mM Mannitol
  misc_feature: MA Experiment ID: 20001757 Result: Up-regulated in Transcription
  misc_feature: MA Experiment 20001757 PARAMETER Experiment Name: At_50mM_NH4NO3_L-to-H_P Parameter: Timepoint (hr) Value: 6
  misc_feature: MA Experiment 20001757 PARAMETER Experiment Name: At_50mM_NH4NO3_L-to-H_P Parameter: Tissue Value: Leaf
  misc_feature: MA Experiment 20001757 PARAMETER Experiment Name: At_50mM_NH4NO3_L-to-H_P Parameter: Treatment Value: 50mM NH4NO3 vs 100mM Mannitol
  misc_feature: MA Experiment ID: 20001768 Result: Down-regulated in Transcription
  misc_feature: MA Experiment 20001768 PARAMETER Experiment Name: At_Far-red-enriched-adult_P Parameter: Age (day) Value: 28
  misc_feature: MA Experiment 20001768 PARAMETER Experiment Name: At_Far-red-enriched-adult_P Parameter: Light Value: Far-red enriched vs. White
  misc_feature: MA Experiment 20001768 PARAMETER Experiment Name: At_Far-red-enriched-adult_P Parameter: Organism Value: A. thaliana
  misc_feature: MA Experiment 20001768 PARAMETER Experiment Name: At_Far-red-enriched-adult_P Parameter: Plant Line Value: Columbia
  misc_feature: MA Experiment 20001768 PARAMETER Experiment Name: At_Far-red-enriched-adult_P Parameter: Timepoint (hr) Value: 1
  misc_feature: MA Experiment 20001768 PARAMETER Experiment Name: At_Far-red-enriched-adult_P Parameter: Tissue Value: Aerial
  misc_feature: MA Experiment ID: 20001904 Result: Down-regulated in Transcription
  misc_feature: MA Experiment 20001904 PARAMETER Experiment Name: At_Drought_Reproduction_P Parameter: Age (day) Value: 37
  misc_feature: MA Experiment 20001904 PARAMETER Experiment Name: At_Drought_Reproduction_P Parameter: Organism Value: A. thaliana
  misc_feature: MA Experiment 20001904 PARAMETER Experiment Name: At_Drought_Reproduction_P Parameter: Plant Line Value: WS
  misc_feature: MA Experiment 20001904 PARAMETER Experiment Name: At_Drought_Reproduction_P Parameter: Timepoint (day) Value: 7
  misc_feature: MA Experiment 20001904 PARAMETER Experiment Name: At_Drought_Reproduction_P Parameter: Tissue Value: Rosettes
  misc_feature: MA Experiment 20001904 PARAMETER Experiment Name: At_Drought_Reproduction_P Parameter: Treatment Value: Drought vs. No Drought
  misc_feature: MA Experiment ID: 20001906 Result: Down-regulated in Transcription
  misc_feature: MA Experiment 20001906 PARAMETER Experiment Name: At_Drought_Reproduction_P Parameter: Age (day) Value: 35
  misc_feature: MA Experiment 20001906 PARAMETER Experiment Name: At_Drought_Reproduction_P Parameter: Organism Value: A. thaliana
  misc_feature: MA Experiment 20001906 PARAMETER Experiment Name: At_Drought_Reproduction_P Parameter: Plant Line Value: WS
  misc_feature: MA Experiment 20001906 PARAMETER Experiment Name: At_Drought_Reproduction_P Parameter: Timepoint (day) Value: 5
  misc_feature: MA Experiment 20001906 PARAMETER Experiment Name: At_Drought_Reproduction_P Parameter: Tissue Value: Siliques
  misc_feature: MA Experiment 20001906 PARAMETER Experiment Name: At_Drought_Reproduction_P Parameter: Treatment Value: Drought vs. No Drought
  misc_feature: MA Experiment ID: 20001910 Result: Down-regulated in Transcription
  misc_feature: MA Experiment 20001910 PARAMETER Experiment Name: At_Drought_Reproduction_P Parameter: Age (day) Value: 37
  misc_feature: MA Experiment 20001910 PARAMETER Experiment Name: At_Drought_Reproduction_P Parameter: Organism Value: A. thaliana
  misc_feature: MA Experiment 20001910 PARAMETER Experiment Name: At_Drought_Reproduction_P Parameter: Plant Line Value: WS
  misc_feature: MA Experiment 20001910 PARAMETER Experiment Name: At_Drought_Reproduction_P Parameter: Timepoint (day) Value: 7
  misc_feature: MA Experiment 20001910 PARAMETER Experiment Name: At_Drought_Reproduction_P Parameter: Tissue Value: Flowers
  misc_feature: MA Experiment 20001910 PARAMETER Experiment Name: At_Drought_Reproduction_P Parameter: Treatment Value: Drought vs. No Drought
  misc_feature: MA Experiment ID: 20001911 Result: Down-regulated in Transcription
  misc_feature: MA Experiment 20001911 PARAMETER Experiment Name: At_Drought_Reproduction_P Parameter: Age (day) Value: 40
  misc_feature: MA Experiment 20001911 PARAMETER Experiment Name: At_Drought_Reproduction_P Parameter: Organism Value: A. thaliana
  misc_feature: MA Experiment 20001911 PARAMETER Experiment Name: At_Drought_Reproduction_P Parameter: Plant Line Value: WS
  misc_feature: MA Experiment 20001911 PARAMETER Experiment Name: At_Drought_Reproduction_P Parameter: Timepoint (day) Value: 10
  misc_feature: MA Experiment 20001911 PARAMETER Experiment Name: At_Drought_Reproduction_P Parameter: Tissue Value: Flowers
  misc_feature: MA Experiment 20001911 PARAMETER Experiment Name: At_Drought_Reproduction_P Parameter: Treatment Value: Drought vs. No Drought
aaaccatgtcctatatctctccttcacattcatcccaaaacattacaaaacgttacaatggcttctaaggctcttgcagttacagctcttcttattacacttaatcttcttttcttcacctttgtaacctccacaaaatgtccaccaactactcctaaacccccaaaaaccccgaaatcgcctaagaaggctcctgccgtgaaacccacttgtcctaccgacacacttaagcttggtgtttgcgcagacttattgggcctagttaacgttgttgttggttctccaccaaagactccttgttgtacacttcttcaaggtcttgctaatcttgaagctgcggtttgtctctgcaccgctcttaaagccaatgtcttggggattaatctcaatgttcctattgatctaaccttgctgttgaactattgtggcaagaaagttcctcatggtttccaatgttcttgaagatttgagactttaaaagagaaaaatctctttggtttgctatgtttttatatgtttgtttctactgttatctattgtttttgtgagaaaaagctttgttctgtcactgttgagtttgatgtaatgcttgagcttgttcatgatagaacctttgttctctcaatattgagtttgatgtaatgcttgagcttgttaatggattttatgttcttagt

SEQ ID NO: 23437 - protein, 153 aa, Arabidopsis thaliana
  peptide (1)..(153): Ceres Seq. ID no. 12561633
  misc_feature (71)..(152): Pfam Name: Protease inhibitor/seed storage/LTP family Pfam Description: Protease inhibitor/seed storage/LTP family
  misc_feature (71)..(152): Pfam Name: Protease inhibitor/seed storage/LTP family Pfam Description: Protease inhibitor/seed storage/LTP family
  misc_feature (71)..(152): Pfam Name: Protease inhibitor/seed storage/LTP family Pfam Description: Protease inhibitor/seed storage/LTP family
  misc_feature (20)..(152): Homolog of NCBI NO: 15221484 NR Description: similar to 14KD proline-rich protein DC2.15
  misc_feature (48)..(153): Homolog of NCBI NO: 7488729 NR Description: CIC protein, cold-inducible - alfalfa
  misc_feature (20)..(153): Homolog of NCBI NO: 10798752 NR Description: P-rich protein EIG-I30 [Nicotiana tabacum]
  misc_feature (35)..(152): Homolog of NCBI NO: 2129871 NR Description: proline-rich protein, 14K - kidney bean
  misc_feature (20)..(152): Homolog of NCBI NO: 10798758 NR Description: P-rich protein Nt-SubC29 [Nicotiana tabacum]
  misc_feature (20)..(152): Homolog of NCBI NO: 15221484 NR Description: similar to 14KD proline-rich protein DC2.15
  misc_feature (20)..(153): Homolog of NCBI NO: 10798752 NR Description: P-rich protein EIG-I30 [Nicotiana tabacum]
  misc_feature (20)..(152): Homolog of NCBI NO: 10798758 NR Description: P-rich protein Nt-SubC29 [Nicotiana tabacum]
  misc_feature (35)..(152): Homolog of NCBI NO: 2129871 NR Description: proline-rich protein, 14K - kidney bean
  misc_feature (20)..(153): Homolog of NCBI NO: 10798752 NR Description: P-rich protein EIG-I30 [Nicotiana tabacum]
  misc_feature (48)..(153): Homolog of NCBI NO: 7488729 NR Description: CIC protein, cold-inducible - alfalfa
  misc_feature (20)..(152): Homolog of NCBI NO: 15221484 NR Description: similar to 14KD proline-rich protein DC2.15
  misc_feature (20)..(153): Homolog of NCBI NO: 18406723 NR Description: expressed protein
  misc_feature (20)..(153): Homolog of NCBI NO: 481236 NR Description: hypothetical protein - Madagascar periwinkle
  misc_feature (20)..(153): Homolog of NCBI NO: 4454097 NR Description: hybrid proline-rich protein [Catharanthus roseus]
  misc_feature (20)..(153): Homolog of NCBI NO: 7484770 NR Description: extensin like protein - black poplar
  misc_feature (20)..(153): Homolog of NCBI NO: 112697 NR Description: 14 KD PROLINE-RICH PROTEIN DC2.15 PRECURSOR
  misc_feature (20)..(153): Homolog of NCBI NO: 18406723 NR Description: expressed protein
  misc_feature (20)..(153): Homolog of NCBI NO: 481236 NR Description: hypothetical protein - Madagascar periwinkle
  misc_feature (20)..(153): Homolog of NCBI NO: 4454097 NR Description: hybrid proline-rich protein [Catharanthus roseus]
  misc_feature (20)..(153): Homolog of NCBI NO: 7484770 NR Description: extensin like protein - black poplar
  misc_feature (20)..(153): Homolog of NCBI NO: 112697 NR Description: 14 KD PROLINE-RICH PROTEIN DC2.15 PRECURSOR
  misc_feature (20)..(152): Homolog of NCBI NO: 10798758 NR Description: P-rich protein Nt-SubC29 [Nicotiana tabacum]
  misc_feature (35)..(152): Homolog of NCBI NO: 2129871 NR Description: proline-rich protein, 14K - kidney bean
  misc_feature (48)..(153): Homolog of NCBI NO: 7488729 NR Description: CIC protein, cold-inducible - alfalfa
  misc_feature (20)..(153): Homolog of NCBI NO: 112697 NR Description: 14 KD PROLINE-RICH PROTEIN DC2.15 PRECURSOR
  misc_feature (20)..(153): Homolog of NCBI NO: 7484770 NR Description: extensin like protein - black poplar
  misc_feature (20)..(153): Homolog of NCBI NO: 4454097 NR Description: hybrid proline-rich protein [Catharanthus roseus]
  misc_feature (20)..(153): Homolog of NCBI NO: 481236 NR Description: hypothetical protein - Madagascar periwinkle
  misc_feature (20)..(153): Homolog of NCBI NO: 18406723 NR Description: expressed protein
KPCPISLLHIHPKTLQNVTMASKALAVTALLITLNLLFFTFVTSTKCPPTTPKPPKTPKSPKKAPAVKPTCPTDTLKLGVCADLLGLVNVVVGSPPKTPCCTLLQGLANLEAAVCLCTALKANVLGINLNVPIDLTLLLNYCGKKVPHGFQCS

SEQ ID NO: 23438 - protein, 134 aa, Arabidopsis thaliana
  peptide (1)..(134): Ceres Seq. ID no. 12561634
  misc_feature (52)..(133): Pfam Name: Protease inhibitor/seed storage/LTP family Pfam Description: Protease inhibitor/seed storage/LTP family
  misc_feature (52)..(133): Pfam Name: Protease inhibitor/seed storage/LTP family Pfam Description: Protease inhibitor/seed storage/LTP family
  misc_feature (52)..(133): Pfam Name: Protease inhibitor/seed storage/LTP family Pfam Description: Protease inhibitor/seed storage/LTP family
  misc_feature (1)..(133): Homolog of NCBI NO: 15221484 NR Description: similar to 14KD proline-rich protein DC2.15
  misc_feature (29)..(134): Homolog of NCBI NO: 7488729 NR Description: CIC protein, cold-inducible - alfalfa
  misc_feature (1)..(134): Homolog of NCBI NO: 10798752 NR Description: P-rich protein EIG-I30 [Nicotiana tabacum]
  misc_feature (16)..(133): Homolog of NCBI NO: 2129871 NR Description: proline-rich protein, 14K - kidney bean
  misc_feature (1)..(133): Homolog of NCBI NO: 10798758 NR Description: P-rich protein Nt-SubC29 [Nicotiana tabacum]
  misc_feature (1)..(133): Homolog of NCBI NO: 15221484 NR Description: similar to 14KD proline-rich protein DC2.15
  misc_feature (1)..(134): Homolog of NCBI NO: 10798752 NR Description: P-rich protein EIG-I30 [Nicotiana tabacum]
  misc_feature (1)..(133): Homolog of NCBI NO: 10798758 NR Description: P-rich protein Nt-SubC29 [Nicotiana tabacum]
  misc_feature (16)..(133): Homolog of NCBI NO: 2129871 NR Description: proline-rich protein, 14K - kidney bean
  misc_feature (1)..(134): Homolog of NCBI NO: 10798752 NR Description: P-rich protein EIG-I30 [Nicotiana tabacum]
  misc_feature (29)..(134): Homolog of NCBI NO: 7488729 NR Description: CIC protein, cold-inducible - alfalfa
  misc_feature (1)..(133): Homolog of NCBI NO: 15221484 NR Description: similar to 14KD proline-rich protein DC2.15
  misc_feature (1)..(134): Homolog of NCBI NO: 18406723 NR Description: expressed protein
  misc_feature (1)..(134): Homolog of NCBI NO: 481236 NR Description: hypothetical protein - Madagascar periwinkle
  misc_feature (1)..(134): Homolog of NCBI NO: 4454097 NR Description: hybrid proline-rich protein [Catharanthus roseus]
  misc_feature (1)..(134): Homolog of NCBI NO: 7484770 NR Description: extensin like protein - black poplar
  misc_feature (1)..(134): Homolog of NCBI NO: 112697 NR Description: 14 KD PROLINE-RICH PROTEIN DC2.15 PRECURSOR
  misc_feature (1)..(134): Homolog of NCBI NO: 18406723 NR Description: expressed protein
  misc_feature (1)..(134): Homolog of NCBI NO: 481236 NR Description: hypothetical protein - Madagascar periwinkle
  misc_feature (1)..(134): Homolog of NCBI NO: 4454097 NR Description: hybrid proline-rich protein [Catharanthus roseus]
  misc_feature (1)..(134): Homolog of NCBI NO: 7484770 NR Description: extensin like protein - black poplar
  misc_feature (1)..(134): Homolog of NCBI NO: 112697 NR Description: 14 KD PROLINE-RICH PROTEIN DC2.15 PRECURSOR
  misc_feature (1)..(133): Homolog of NCBI NO: 10798758 NR Description: P-rich protein Nt-SubC29 [Nicotiana tabacum]
  misc_feature (16)..(133): Homolog of NCBI NO: 2129871 NR Description: proline-rich protein, 14K - kidney bean
  misc_feature (29)..(134): Homolog of NCBI NO: 7488729 NR Description: CIC protein, cold-inducible - alfalfa
  misc_feature (1)..(134): Homolog of NCBI NO: 112697 NR Description: 14 KD PROLINE-RICH PROTEIN DC2.15 PRECURSOR
  misc_feature (1)..(134): Homolog of NCBI NO: 7484770 NR Description: extensin like protein - black poplar
  misc_feature (1)..(134): Homolog of NCBI NO: 4454097 NR Description: hybrid proline-rich protein [Catharanthus roseus]
  misc_feature (1)..(134): Homolog of NCBI NO: 481236 NR Description: hypothetical protein - Madagascar periwinkle
  misc_feature (1)..(134): Homolog of NCBI NO: 18406723 NR Description: expressed protein
MASKALAVTALLITLNLLFFTFVTSTKCPPTTPKPPKTPKSPKKAPAVKPTCPTDTLKLGVCADLLGLVNVVVGSPPKTPCCTLLQGLANLEAAVCLCTALKANVLGINLNVPIDLTLLLNYCGKKVPHGFQCS

SEQ ID NO: 23439 - DNA, 1067 bp, Arabidopsis thaliana
  misc_feature (1)..(1067): Ceres Seq. ID no. 12394725
  misc_feature: MA Experiment ID: 108461 Result: Up-regulated in Transcription
  misc_feature: MA Experiment 108461 PARAMETER Experiment Name: At_Germinating_Seeds_cDNA_P Parameter: Age (day) Value: 1 vs. 0
  misc_feature: MA Experiment 108461 PARAMETER Experiment Name: At_Germinating_Seeds_cDNA_P Parameter: Tissue Value: Germinating Seeds
  misc_feature: MA Experiment ID: 108462 Result: Up-regulated in Transcription
  misc_feature: MA Experiment 108462 PARAMETER Experiment Name: At_Germinating_Seeds_cDNA_P Parameter: Age (day) Value: 2 vs. 0
  misc_feature: MA Experiment 108462 PARAMETER Experiment Name: At_Germinating_Seeds_cDNA_P Parameter: Tissue Value: Germinating Seeds
  misc_feature: MA Experiment ID: 20000171 Result: Up-regulated in Transcription
  misc_feature: MA Experiment 20000171 PARAMETER Experiment Name: At_42deg_Heat_P Parameter: Age (day) Value: 14
  misc_feature: MA Experiment 20000171 PARAMETER Experiment Name: At_42deg_Heat_P Parameter: Organism Value: A. thaliana
  misc_feature: MA Experiment 20000171 PARAMETER Experiment Name: At_42deg_Heat_P Parameter: Plant Line Value: WS
  misc_feature: MA Experiment 20000171 PARAMETER Experiment Name: At_42deg_Heat_P Parameter: Temperature (deg C) Value: 42 vs. 22
  misc_feature: MA Experiment 20000171 PARAMETER Experiment Name: At_42deg_Heat_P Parameter: Timepoint (hr) Value: 1
  misc_feature: MA Experiment 20000171 PARAMETER Experiment Name: At_42deg_Heat_P Parameter: Tissue Value: Aerial
  misc_feature: MA Experiment ID: 20000173 Result: Up-regulated in Transcription
  misc_feature: MA Experiment 20000173 PARAMETER Experiment Name: At_42deg_Heat_P Parameter: Age (day) Value: 14
  misc_feature: MA Experiment 20000173 PARAMETER Experiment Name: At_42deg_Heat_P Parameter: Organism Value: A. thaliana
  misc_feature: MA Experiment 20000173 PARAMETER Experiment Name: At_42deg_Heat_P Parameter: Plant Line Value: WS
  misc_feature: MA Experiment 20000173 PARAMETER Experiment Name: At_42deg_Heat_P Parameter: Temperature (deg C) Value: 42 vs. 22
  misc_feature: MA Experiment 20000173 PARAMETER Experiment Name: At_42deg_Heat_P Parameter: Timepoint (hr) Value: 6
  misc_feature: MA Experiment 20000173 PARAMETER Experiment Name: At_42deg_Heat_P Parameter: Tissue Value: Aerial
  misc_feature: MA Experiment ID: 20000182 Result: Up-regulated in Transcription
  misc_feature: MA Experiment 20000182 PARAMETER Experiment Name: At_2mM_SA_P Parameter: Age (day) Value: 14
  misc_feature: MA Experiment 20000182 PARAMETER Experiment Name: At_2mM_SA_P Parameter: Organism Value: A. thaliana
  misc_feature: MA Experiment 20000182 PARAMETER Experiment Name: At_2mM_SA_P Parameter: Plant Line Value: WS
  misc_feature: MA Experiment 20000182 PARAMETER Experiment Name: At_2mM_SA_P Parameter: Timepoint (hr) Value: 6
  misc_feature: MA Experiment 20000182 PARAMETER Experiment Name: At_2mM_SA_P Parameter: Tissue Value: Aerial
  misc_feature: MA Experiment 20000182 PARAMETER Experiment Name: At_2mM_SA_P Parameter: Treatment Value: 2mM SA vs. No Treatment
  misc_feature: MA Experiment ID: 20000227 Result: Down-regulated in Transcription
  misc_feature: MA Experiment 20000227 PARAMETER Experiment Name: At_Root-Tips-vs-Tops_P Parameter: Tissue Value: Root Tips vs. Root Tops
  misc_feature: MA Experiment ID: 20000234 Result: Down-regulated in Transcription
  misc_feature: MA Experiment 20000234 PARAMETER Experiment Name: At_Siliques_P Parameter: Age (day) Value: 21
  misc_feature: MA Experiment 20000234 PARAMETER Experiment Name: At_Siliques_P Parameter: Organism Value: A. thaliana
  misc_feature: MA Experiment 20000234 PARAMETER Experiment Name: At_Siliques_P Parameter: Plant Line Value: WS
  misc_feature: MA Experiment 20000234 PARAMETER Experiment Name: At_Siliques_P Parameter: Tissue Value: Less Than 5mm Siliques vs. Whole Plant
  misc_feature: MA Experiment ID: 20000286 Result: Down-regulated in Transcription
  misc_feature: MA Experiment 20000286 PARAMETER Experiment Name: At_Open_Flower_P Parameter: Age (day) Value: 21
  misc_feature: MA Experiment 20000286 PARAMETER Experiment Name: At_Open_Flower_P Parameter: Plant Line Value: WS
  misc_feature: MA Experiment 20000286 PARAMETER Experiment Name: At_Open_Flower_P Parameter: Tissue Value: Half Open vs. Whole Plant
  misc_feature: MA Experiment ID: 20000495 Result: Down-regulated in Transcription
  misc_feature: MA Experiment 20000495 PARAMETER Experiment Name: At_Guard_Cells_P Parameter: Harvest Date Value: 8/2/2002
  misc_feature: MA Experiment 20000495 PARAMETER Experiment Name: At_Guard_Cells_P Parameter: Organism Value: A. thaliana
  misc_feature: MA Experiment 20000495 PARAMETER Experiment Name: At_Guard_Cells_P Parameter: Tissue Value: Guard Cells vs. Leaves
  misc_feature: MA Experiment ID: 20001558 Result: Down-regulated in Transcription
  misc_feature: MA Experiment 20001558 PARAMETER Experiment Name: At_Drought_Soil_Dry_P Parameter: Age (day) Value: 27
  misc_feature: MA Experiment 20001558 PARAMETER Experiment Name: At_Drought_Soil_Dry_P Parameter: Organism Value: A. thaliana
  misc_feature: MA Experiment 20001558 PARAMETER Experiment Name: At_Drought_Soil_Dry_P Parameter: Plant Line Value: WS
  misc_feature: MA Experiment 20001558 PARAMETER Experiment Name: At_Drought_Soil_Dry_P Parameter: Post Timepoint (hr) Value: 6
  misc_feature: MA Experiment 20001558 PARAMETER Experiment Name: At_Drought_Soil_Dry_P Parameter: Post-Treatment Value: Re-Water vs. No Drought
  misc_feature: MA Experiment 20001558 PARAMETER Experiment Name: At_Drought_Soil_Dry_P Parameter: Timepoint (day) Value: 13
  misc_feature: MA Experiment 20001558 PARAMETER Experiment Name: At_Drought_Soil_Dry_P Parameter: Treatment Value: Drought vs. No Drought
aatattttcattaatcgattctcaaagtcaagcaaaaaaaacgaaacaatggatgcgttctcttccttcttcgattctcaacctggtagcagaagctggagctatgattctcttaaaaacttccgtcagatttctccagccgttcagaatcatcttaaacgggtttatttgaccttatgttgtgctcttgtggcgtctgcctttggagcttacctccatgtgctctggaatatcggcggtattcttacaacgattggatgtattggaactatgatttggctcctttcatgtcctccttatgaacaccaaaaaaggctttctcttctgtttgtgtctgctgttcttgaaggtgcttctgttggccccttgatcaaagtggcaattgatgttgacccaagcatccttatcactgcatttgttggaactgcgatagcgtttgtctgtttctcagcagcagcaatgttagcaagacgcagggagtatctctaccttggaggactgctttcatctggcttgtctatgctaatgtggctccagtttgcctcttcaatctttggtggctctgcatctatctttaagtttgagttgtactttggacttttgatctttgtgggatacatggtggtggacacacaagagattatagaaaaggcacacctcggtgacatggactatgtaaaacattcgttgacccttttcactgactttgtagctgtgtttgttcggattctcatcataatgttgaagaactcagcagataaagaagagaagaagaagaaaaggagaaactgaggggatgtaaagtaaatttaactttatggttgttatcgtgtgtggccactttgaagatattacttgttagcactctctattggtgaccagacatgtttccactaaaaaggatctgcttgtttcacttctgcacaagtaccatcttcagattgtaaatgactcgagtgttgttcttcttttcataaacttttgttctttaagagtttggttctactgattgcatcttaccaagctaagaataatgtaggaaaatgataatcctgtttaaattttcc

SEQ ID NO: 23440 - protein, 263 aa, Arabidopsis thaliana
  peptide (1)..(263): Ceres Seq. ID no. 12394726
  misc_feature (42)..(251): Pfam Name: Uncharacterised protein family UPF0005 Pfam Description: Uncharacterised protein family UPF0005
  misc_feature (26)..(170): Homolog of NCBI NO: 27526517 NR Description: putative BAX inhibitor 1 [Hordeum vulgare subsp.
  misc_feature (77)..(254): Homolog of NCBI NO: 15238018 NR Description: putative protein; protein id: At5g47130.1
  misc_feature (33)..(263): Homolog of NCBI NO: 15236582 NR Description: Bax inhibitor-1-like protein; protein id:
  misc_feature (17)..(262): Homolog of NCBI NO: 13940165 NR Description: BAX inhibitor 1 [Hordeum vulgare subsp. vulgare]
  misc_feature (17)..(263): Homolog of NCBI NO: 12229685 NR Description: Bax inhibitor-1 (BI-1) (OsBI-1)
  misc_feature (17)..(263): Homolog of NCBI NO: 14719276 NR Description: Bax inhibitor 1 [Nicotiana tabacum]
  misc_feature (17)..(261): Homolog of NCBI NO: 17981376 NR Description: bax inhibitor-like protein [Brassica oleracea]
  misc_feature (17)..(263): Homolog of NCBI NO: 14719274 NR Description: Bax inhibitor 1 [Brassica napus]
  misc_feature (17)..(263): Homolog of NCBI NO: 21593125 NR Description: Bax inhibitor-1 like [Arabidopsis thaliana]
  misc_feature (17)..(263): Homolog of NCBI NO: 15238017 NR Description: Bax inhibitor-1 like
NIFINRFSKSSKKNETMDAFSSFFDSQPGSRSWSYDSLKNFRQISPAVQNHLKRVYLTLCCALVASAFGAYLHVLWNIGGILTTIGCIGTMIWLLSCPPYEHQKRLSLLFVSAVLEGASVGPLIKVAIDVDPSILITAFVGTAIAFVCFSAAAMLARRREYLYLGGLLSSGLSMLMWLQFASSIFGGSASIFKFELYFGLLIFVGYMVVDTQEIIEKAHLGDMDYVKHSLTLFTDFVAVFVRILIIMLKNSADKEEKKKKRRN

SEQ ID NO: 23441 - protein, 247 aa, Arabidopsis thaliana
  peptide (1)..(247): Ceres Seq. ID no. 12394727
  misc_feature (26)..(235): Pfam Name: Uncharacterised protein family UPF0005 Pfam Description: Uncharacterised protein family UPF0005
  misc_feature (10)..(154): Homolog of NCBI NO: 27526517 NR Description: putative BAX inhibitor 1 [Hordeum vulgare subsp.
  misc_feature (61)..(238): Homolog of NCBI NO: 15238018 NR Description: putative protein; protein id: At5g47130.1
  misc_feature (17)..(247): Homolog of NCBI NO: 15236582 NR Description: Bax inhibitor-1-like protein; protein id:
  misc_feature (1)..(246): Homolog of NCBI NO: 13940165 NR Description: BAX inhibitor 1 [Hordeum vulgare subsp. vulgare]
  misc_feature (1)..(247): Homolog of NCBI NO: 12229685 NR Description: Bax inhibitor-1 (BI-1) (OsBI-1)
  misc_feature (1)..(247): Homolog of NCBI NO: 14719276 NR Description: Bax inhibitor 1 [Nicotiana tabacum]
  misc_feature (1)..(245): Homolog of NCBI NO: 17981376 NR Description: bax inhibitor-like protein [Brassica oleracea]
  misc_feature (1)..(247): Homolog of NCBI NO: 14719274 NR Description: Bax inhibitor 1 [Brassica napus]
  misc_feature (1)..(247): Homolog of NCBI NO: 21593125 NR Description: Bax inhibitor-1 like [Arabidopsis thaliana]
  misc_feature (1)..(247): Homolog of NCBI NO: 15238017 NR Description: Bax inhibitor-1 like
MDAFSSFFDSQPGSRSWSYDSLKNFRQISPAVQNHLKRVYLTLCCALVASAFGAYLHVLWNIGGILTTIGCIGTMIWLLSCPPYEHQKRLSLLFVSAVLEGASVGPLIKVAIDVDPSILITAFVGTAIAFVCFSAAAMLARRREYLYLGGLLSSGLSMLMWLQFASSIFGGSASIFKFELYFGLLIFVGYMVVDTQEIIEKAHLGDMDYVKHSLTLFTDFVAVFVRILIIMLKNSADKEEKKKKRRN

SEQ ID NO: 23442 - protein, 173 aa, Arabidopsis thaliana
  peptide (1)..(173): Ceres Seq. ID no. 12394728
  misc_feature (1)..(161): Pfam Name: Uncharacterised protein family UPF0005 Pfam Description: Uncharacterised protein family UPF0005
  misc_feature (1)..(80): Homolog of NCBI NO: 27526517 NR Description: putative BAX inhibitor 1 [Hordeum vulgare subsp.
  misc_feature (1)..(164): Homolog of NCBI NO: 15238018 NR Description: putative protein; protein id: At5g47130.1
  misc_feature (1)..(173): Homolog of NCBI NO: 15236582 NR Description: Bax inhibitor-1-like protein; protein id:
  misc_feature (1)..(172): Homolog of NCBI NO: 13940165 NR Description: BAX inhibitor 1 [Hordeum vulgare subsp. vulgare]
  misc_feature (1)..(173): Homolog of NCBI NO: 12229685 NR Description: Bax inhibitor-1 (BI-1) (OsBI-1)
  misc_feature (1)..(173): Homolog of NCBI NO: 14719276 NR Description: Bax inhibitor 1 [Nicotiana tabacum]
  misc_feature (1)..(171): Homolog of NCBI NO: 17981376 NR Description: bax inhibitor-like protein [Brassica oleracea]
  misc_feature (1)..(173): Homolog of NCBI NO: 14719274 NR Description: Bax inhibitor 1 [Brassica napus]
  misc_feature (1)..(173): Homolog of NCBI NO: 21593125 NR Description: Bax inhibitor-1 like [Arabidopsis thaliana]
  misc_feature (1)..(173): Homolog of NCBI NO: 15238017 NR Description: Bax inhibitor-1 like
MIWLLSCPPYEHQKRLSLLFVSAVLEGASVGPLIKVAIDVDPSILITAFVGTAIAFVCFSAAAMLARRREYLYLGGLLSSGLSMLMWLQFASSIFGGSASIFKFELYFGLLIFVGYMVVDTQEIIEKAHLGDMDYVKHSLTLFTDFVAVFVRILIIMLKNSADKEEKKKKRRN

SEQ ID NO: 23443 - DNA, 1104 bp, Arabidopsis thaliana
  misc_feature (1)..(1104): Ceres Seq. ID no. 12335306
  misc_feature: MA Experiment ID: 108576 Result: Up-regulated in Transcription
  misc_feature: MA Experiment 108576 PARAMETER Experiment Name: At_42deg_Heat_cDNA_P Parameter: Temperature (deg C) Value: 42 vs. 22
  misc_feature: MA Experiment 108576 PARAMETER Experiment Name: At_42deg_Heat_cDNA_P Parameter: Timepoint (hr) Value: 1
  misc_feature: MA Experiment 108576 PARAMETER Experiment Name: At_42deg_Heat_cDNA_P Parameter: Tissue Value: Aerial
aacaaaagacaaaaactttcaattatgtgaagaatcgtacacctttcttatcgtcttctccatcgtttctccctgaagatttgttctactactctttttgggttcagtttcagaatttaaacaagatgcagctcaaagtccctgaacatcaggttgcaggacacattgctaaagacgggaagcctggtcctctcgtagatgacaagggtcggttcttcaagccacttcagggcgattctcgtggtgaaatcgaggtaaagttctacgaatctttctcctcaaacacagaggttccagaacacatccatagatatttcccggtgtatcacggcactcaagcagttgaaggttctgatggagcagccatgatggtgttggaaaatcttcttgcagaatactcaaaaccatcagtaatggatgttaagatgggttcgagaacatggtatcctgatgcatctgaagaatacatccaaaaatgtttgaagaaagacacgggtaccacaaccgtgtcatcgggtttcaggatctctggtttcgaagtgtatgatcacaaagaatcgagtttctggaagcccgagaggaagcttcttcgcgggctcgatgtagatggagcgagattgactctgaggaagtttgtatcatctaactcactttcggacactggctcgaaacctgactctgcttttgcctcgagtgtttacggcggttcccacgggatcttaacgcagttgctggaactcaagacctggttcgagaaccaaacgctctaccatttcaactcttgttcgattttaatggtctatgagaatgaatccatcttgaagggaaatgatgatgatgctagaccacaagtcaagctggtggattttgctcatgttcttgatggtaatggtgtcattgaccataacttcttgggtggtctttgctctttcataaacttcattcgtgagattcttcagagcccagatgagtctgcagattcttagatttaagttaatttgtttgttatggctttggctgattccaatttttggatataaacttatgtttccttcacatatgtacttgattacctaaagagcagaatacattcgtactcttttc

SEQ ID NO: 23444 - protein, 327 aa, Arabidopsis thaliana
  peptide (1)..(327): Ceres Seq. ID no. 12335307
  misc_feature (58)..(315): Pfam Name: Inositol polyphosphate kinase Pfam Description: Inositol polyphosphate kinase
  misc_feature (46)..(277): Homolog of NCBI NO: 26331140 NR Description: unnamed protein product [Mus musculus]
  misc_feature (43)..(318): Homolog of NCBI NO: 24580674 NR Description: CG13688-PA [Drosophila melanogaster]
  misc_feature (43)..(318): Homolog of NCBI NO: 21430778 NR Description: SD14726p [Drosophila melanogaster]
  misc_feature (44)..(316): Homolog of NCBI NO: 13509210 NR Description: hypothetical protein [Linum usitatissimum]
  misc_feature (45)..(325): Homolog of NCBI NO: 13509208 NR Description: hypothetical protein [Linum usitatissimum]
  misc_feature (44)..(323): Homolog of NCBI NO: 21553994 NR Description: putative inositol hexaphosphate kinase
  misc_feature (44)..(323): Homolog of NCBI NO: 15240350 NR Description: putative protein
  misc_feature (42)..(327): Homolog of NCBI NO: 8919088 NR Description: putative inositol hexaphosphate kinase
  misc_feature (42)..(327): Homolog of NCBI NO: 15240776 NR Description: putative protein
  misc_feature (42)..(327): Homolog of NCBI NO: 21592823 NR Description: putative inositol hexaphosphate kinase
QKTKTFNYVKNRTPFLSSSPSFLPEDLFYYSFWVQFQNLNKMQLKVPEHQVAGHIAKDGKPGPLVDDKGRFFKPLQGDSRGEIEVKFYESFSSNTEVPEHIHRYFPVYHGTQAVEGSDGAAMMVLENLLAEYSKPSVMDVKMGSRTWYPDASEEYIQKCLKKDTGTTTVSSGFRISGFEVYDHKESSFWKPERKLLRGLDVDGARLTLRKFVSSNSLSDTGSKPDSAFASSVYGGSHGILTQLLELKTWFENQTLYHFNSCSILMVYENESILKGNDDDARPQVKLVDFAHVLDGNGVIDHNFLGGLCSFINFIREILQSPDESADS

SEQ ID NO: 23445 - protein, 286 aa, Arabidopsis thaliana
  peptide (1)..(286): Ceres Seq. ID no. 12335308
  misc_feature (17)..(274): Pfam Name: Inositol polyphosphate kinase Pfam Description: Inositol polyphosphate kinase
  misc_feature (5)..(236): Homolog of NCBI NO: 26331140 NR Description: unnamed protein product [Mus musculus]
  misc_feature (2)..(277): Homolog of NCBI NO: 24580674 NR Description: CG13688-PA [Drosophila melanogaster]
  misc_feature (2)..(277): Homolog of NCBI NO: 21430778 NR Description: SD14726p [Drosophila melanogaster]
  misc_feature (3)..(275): Homolog of NCBI NO: 13509210 NR Description: hypothetical protein [Linum usitatissimum]
  misc_feature (4)..(284): Homolog of NCBI NO: 13509208 NR Description: hypothetical protein [Linum usitatissimum]
  misc_feature (3)..(282): Homolog of NCBI NO: 21553994 NR Description: putative inositol hexaphosphate kinase
  misc_feature (3)..(282): Homolog of NCBI NO: 15240350 NR Description: putative protein
  misc_feature (1)..(286): Homolog of NCBI NO: 8919088 NR Description: putative inositol hexaphosphate kinase
  misc_feature (1)..(286): Homolog of NCBI NO: 15240776 NR Description: putative protein
  misc_feature (1)..(286): Homolog of NCBI NO: 21592823 NR Description: putative inositol hexaphosphate kinase
MQLKVPEHQVAGHIAKDGKPGPLVDDKGRFFKPLQGDSRGEIEVKFYESFSSNTEVPEHIHRYFPVYHGTQAVEGSDGAAMMVLENLLAEYSKPSVMDVKMGSRTWYPDASEEYIQKCLKKDTGTTTVSSGFRISGFEVYDHKESSFWKPERKLLRGLDVDGARLTLRKFVSSNSLSDTGSKPDSAFASSVYGGSHGILTQLLELKTWFENQTLYHFNSCSILMVYENESILKGNDDDARPQVKLVDFAHVLDGNGVIDHNFLGGLCSFINFIREILQSPDESADS

SEQ ID NO: 23446 - protein, 206 aa, Arabidopsis thaliana
  peptide (1)..(206): Ceres Seq. ID no. 12335309
  misc_feature (1)..(194): Pfam Name: Inositol polyphosphate kinase Pfam Description: Inositol polyphosphate kinase
  misc_feature (1)..(206): Homolog of NCBI NO: 21592823 NR Description: putative inositol hexaphosphate kinase
  misc_feature (1)..(156): Homolog of NCBI NO: 26331140 NR Description: unnamed protein product [Mus musculus]
  misc_feature (1)..(197): Homolog of NCBI NO: 24580674 NR Description: CG13688-PA [Drosophila melanogaster]
  misc_feature (1)..(197): Homolog of NCBI NO: 21430778 NR Description: SD14726p [Drosophila melanogaster]
  misc_feature (1)..(195): Homolog of NCBI NO: 13509210 NR Description: hypothetical protein [Linum usitatissimum]
  misc_feature (1)..(204): Homolog of NCBI NO: 13509208 NR Description: hypothetical protein [Linum usitatissimum]
  misc_feature (1)..(202): Homolog of NCBI NO: 21553994 NR Description: putative inositol hexaphosphate kinase
  misc_feature (1)..(202): Homolog of NCBI NO: 15240350 NR Description: putative protein
  misc_feature (1)..(206): Homolog of NCBI NO: 8919088 NR Description: putative inositol hexaphosphate kinase
  misc_feature (1)..(206): Homolog of NCBI NO: 15240776 NR Description: putative protein
MMVLENLLAEYSKPSVMDVKMGSRTWYPDASEEYIQKCLKKDTGTTTVSSGFRISGFEVYDHKESSFWKPERKLLRGLDVDGARLTLRKFVSSNSLSDTGSKPDSAFASSVYGGSHGILTQLLELKTWFENQTLYHFNSCSILMVYENESILKGNDDDARPQVKLVDFAHVLDGNGVIDHNFLGGLCSFINFIREILQSPDESADS

SEQ ID NO: 23447 - DNA, 1579 bp, Arabidopsis thaliana
  misc_feature (1)..(1579): Ceres Seq. ID no. 12335526
  misc_feature: MA Experiment ID: 108461 Result: Down-regulated in Transcription
  misc_feature: MA Experiment 108461 PARAMETER Experiment Name: At_Germinating_Seeds_cDNA_P Parameter: Age (day) Value: 1 vs. 0
  misc_feature: MA Experiment 108461 PARAMETER Experiment Name: At_Germinating_Seeds_cDNA_P Parameter: Tissue Value: Germinating Seeds
  misc_feature: MA Experiment ID: 108462 Result: Down-regulated in Transcription
  misc_feature: MA Experiment 108462 PARAMETER Experiment Name: At_Germinating_Seeds_cDNA_P Parameter: Age (day) Value: 2 vs. 0
  misc_feature: MA Experiment 108462 PARAMETER Experiment Name: At_Germinating_Seeds_cDNA_P Parameter: Tissue Value: Germinating Seeds
  misc_feature: MA Experiment ID: 108463 Result: Down-regulated in Transcription
  misc_feature: MA Experiment 108463 PARAMETER Experiment Name: At_Germinating_Seeds_cDNA_P Parameter: Age (day) Value: 3 vs. 0
  misc_feature: MA Experiment 108463 PARAMETER Experiment Name: At_Germinating_Seeds_cDNA_P Parameter: Tissue Value: Germinating Seeds
  misc_feature: MA Experiment ID: 108573 Result: Up-regulated in Transcription
  misc_feature: MA Experiment 108573 PARAMETER Experiment Name: At_Drought_cDNA_P Parameter: Timepoint (hr) Value: 6
  misc_feature: MA Experiment 108573 PARAMETER Experiment Name: At_Drought_cDNA_P Parameter: Tissue Value: Aerial
  misc_feature: MA Experiment 108573 PARAMETER Experiment Name: At_Drought_cDNA_P Parameter: Treatment Value: Drought vs. No Drought
  misc_feature: MA Experiment ID: 108585 Result: Up-regulated in Transcription
  misc_feature: MA Experiment 108585 PARAMETER Experiment Name: At_5mM_NaNP_cDNA_P Parameter: Timepoint (hr) Value: 6
  misc_feature: MA Experiment 108585 PARAMETER Experiment Name: At_5mM_NaNP_cDNA_P Parameter: Tissue Value: Aerial
  misc_feature: MA Experiment 108585 PARAMETER Experiment Name: At_5mM_NaNP_cDNA_P Parameter: Treatment Value: null
  misc_feature: MA Experiment ID: 20000179 Result: Down-regulated in Transcription
  misc_feature: MA Experiment 20000179 PARAMETER Experiment Name: At_Germinating_Seeds_P Parameter: Age (hr) Value: 6 vs. 0
  misc_feature: MA Experiment 20000179 PARAMETER Experiment Name: At_Germinating_Seeds_P Parameter: Tissue Value: Germinating Seeds
aaattagaacttctttaccctttcgagaaaaaagaaaagaaaaaagaacttgttttcctcttcagcaagacacataaatcgtaatccattttctctcaactttaggaatctcaaatctccgatttggaaatccggcgacaatggtgagagatattgaagatgagattagagacgagaagaatcctcgtcctcttgatgaagatgatatcgctctcctcaagacttatgggttagggccttactctgcacctatcaagaaagtggagaaagaaattaaggatctcgccaagaagatcaacgatctatgtggtatcaaggagtctgatactggtttagctcctcccagtcaatgggatcttgtatctgataagcaaatgatgcaagaagagcaacctctgcaggttgcgagatgcacaaagattataagtccaaacactgaagacgccaaatacgtcataaatgtcaaacaaattgctaagtttgttgttggacttggcgataaagtttctcccactgatattgaggaaggcatgcgtgttggagttgatcggaataaatatcagattcagattcctctacctcccaaaatcgatcctagcgtgaccatgatgactgtcgaagagaaacctgatgtaacttacaatgatgttggtggatgcaaggagcagattgagaagatgcgagaggttgttgaactgccaatgcttcatccagagaaatttgtgaagcttggaatagatcctcccaagggtgttctctgctacggacctcctggtactggtaaaactcttctggctagagctgtggccaacagaaccgatgcttgctttatcagggttattggaagtgagcttgttcagaagtatgttggtgaaggagctaggatggttcgtgaactgtttcagatggcacggtccaagaaagcctgcattgtgttctttgacgaagttgatgccattggtggtgcaagatttgatgatggtgttggtggtgataacgaagtccaacgtactatgcttgagattgtgaatcagcttgatgggtttgacgcacgtggtaacatcaaggttcttatggcaacaaacaggcctgacacactagacccagctcttttacgtcctggacgtcttgaccgtaaggttgagtttggtctacctgacctggagagcagaacacagatcttcaagattcacacaagaaccatgaactgcgaaagagacatccgtttcgaactccttgctcgcctctgcccaaactcaacgggagctgatattcgaagtgtatgcactgaagcaggaatgtacgcaatcagagctaggagaaagactgtgactgagaaagactttctagacgcagtgaacaaagtcattaaaggttaccaaaagttcagtgccactcccaagtatatggtctacaattagagagattgagacagatagaagaactccgaaataaaactccgaaacactctttgttctttgtttgtgtctcttcccttcaagctcttttgtagtacttgtttcacaacttattccagtaactcgggtttatcttcttcaatgtctactacttttggatt

SEQ ID NO: 23448 - protein, 426 aa, Arabidopsis thaliana
  peptide (1)..(426): Ceres Seq. ID no. 12335527
  misc_feature (204)..(391): Pfam Name: ATPase family associated with various cellular Pfam Description: ATPase family associated with various cellular
  misc_feature (3)..(426): Homolog of NCBI NO: 33859604 NR Description: proteasome (prosome, macropain) 26S subunit,
  misc_feature (3)..(426): Homolog of NCBI NO: 20532410 NR Description: 26S protease regulatory subunit 7 (MSS1 protein)
  misc_feature (4)..(426): Homolog of NCBI NO: 28829138 NR Description: similar to Oryza sativa (Rice). 26S proteasome
  misc_feature (33)..(425): Homolog of NCBI NO: 25289951 NR Description: hypothetical protein T18A20.2 [imported] -
  misc_feature (33)..(425): Homolog of NCBI NO: 15220933 NR Description: 26S proteasome ATPase subunit, putative; protein
  misc_feature (7)..(426): Homolog of NCBI NO: 3914449 NR Description: 26S protease regulatory subunit 7 (26S proteasome
  misc_feature (1)..(426): Homolog of NCBI NO: 2492519 NR Description: 26S protease regulatory subunit 7 (26S proteasome
  misc_feature (1)..(426): Homolog of NCBI NO: 28558165 NR Description: 26S protease regulatory subunit 7 (26S proteasome
  misc_feature (1)..(426): Homolog of NCBI NO: 6652878 NR Description: 26S proteasome AAA-ATPase subunit RPT1a
  misc_feature (1)..(426): Homolog of NCBI NO: 15220930 NR Description: 26S proteasome AAA-ATPase subunit RPT1a
MVRDIEDEIRDEKNPRPLDEDDIALLKTYGLGPYSAPIKKVEKEIKDLAKKINDLCGIKESDTGLAPPSQWDLVSDKQMMQEEQPLQVARCTKIISPNTEDAKYVINVKQIAKFVVGLGDKVSPTDIEEGMRVGVDRNKYQIQIPLPPKIDPSVTMMTVEEKPDVTYNDVGGCKEQIEKMREVVELPMLHPEKFVKLGIDPPKGVLCYGPPGTGKTLLARAVANRTDACFIRVIGSELVQKYVGEGARMVRELFQMARSKKACIVFFDEVDAIGGARFDDGVGGDNEVQRTMLEIVNQLDGFDARGNIKVLMATNRPDTLDPALLRPGRLDRKVEFGLPDLESRTQIFKIHTRTMNCERDIRFELLARLCPNSTGADIRSVCTEAGMYAIRARRKTVTEKDFLDAVNKVIKGYQKFSATPKYMVYN

SEQ ID NO: 23449 - protein, 348 aa, Arabidopsis thaliana
  peptide (1)..(348): Ceres Seq. ID no. 12335528
  misc_feature (126)..(313): Pfam Name: ATPase family associated with various cellular Pfam Description: ATPase family associated with various cellular
  misc_feature (1)..(348): Homolog of NCBI NO: 33859604 NR Description: proteasome (prosome, macropain) 26S subunit,
  misc_feature (1)..(348): Homolog of NCBI NO: 20532410 NR Description: 26S protease regulatory subunit 7 (MSS1 protein)
  misc_feature (1)..(348): Homolog of NCBI NO: 28829138 NR Description: similar to Oryza sativa (Rice). 26S proteasome
  misc_feature (1)..(347): Homolog of NCBI NO: 25289951 NR Description: hypothetical protein T18A20.2 [imported] -
  misc_feature (1)..(347): Homolog of NCBI NO: 15220933 NR Description: 26S proteasome ATPase subunit, putative; protein
  misc_feature (1)..(348): Homolog of NCBI NO: 3914449 NR Description: 26S protease regulatory subunit 7 (26S proteasome
  misc_feature (1)..(348): Homolog of NCBI NO: 2492519 NR Description: 26S protease regulatory subunit 7 (26S proteasome
  misc_feature (1)..(348): Homolog of NCBI NO: 28558165 NR Description: 26S protease regulatory subunit 7 (26S proteasome
  misc_feature (1)..(348): Homolog of NCBI NO: 6652878 NR Description: 26S proteasome AAA-ATPase subunit RPT1a
  misc_feature (1)..(348): Homolog of NCBI NO: 15220930 NR Description: 26S proteasome AAA-ATPase subunit RPT1a
MMQEEQPLQVARCTKIISPNTEDAKYVINVKQIAKFVVGLGDKVSPTDIEEGMRVGVDRNKYQIQIPLPPKIDPSVTMMTVEEKPDVTYNDVGGCKEQIEKMREVVELPMLHPEKFVKLGIDPPKGVLCYGPPGTGKTLLARAVANRTDACFIRVIGSELVQKYVGEGARMVRELFQMARSKKACIVFFDEVDAIGGARFDDGVGGDNEVQRTMLEIVNQLDGFDARGNIKVLMATNRPDTLDPALLRPGRLDRKVEFGLPDLESRTQIFKIHTRTMNCERDIRFELLARLCPNSTGADIRSVCTEAGMYAIRARRKTVTEKDFLDAVNKVIKGYQKFSATPKYMVYN

SEQ ID NO: 23450 - protein, 347 aa, Arabidopsis thaliana
  peptide (1)..(347): Ceres Seq. ID no. 12335529
  misc_feature (125)..(312): Pfam Name: ATPase family associated with various cellular Pfam Description: ATPase family associated with various cellular
  misc_feature (1)..(347): Homolog of NCBI NO: 33859604 NR Description: proteasome (prosome, macropain) 26S subunit,
  misc_feature (1)..(347): Homolog of NCBI NO: 20532410 NR Description: 26S protease regulatory subunit 7 (MSS1 protein)
  misc_feature (1)..(347): Homolog of NCBI NO: 28829138 NR Description: similar to Oryza sativa (Rice). 26S proteasome
  misc_feature (1)..(346): Homolog of NCBI NO: 25289951 NR Description: hypothetical protein T18A20.2 [imported] -
  misc_feature (1)..(346): Homolog of NCBI NO: 15220933 NR Description: 26S proteasome ATPase subunit, putative; protein
  misc_feature (1)..(347): Homolog of NCBI NO: 3914449 NR Description: 26S protease regulatory subunit 7 (26S proteasome
  misc_feature (1)..(347): Homolog of NCBI NO: 2492519 NR Description: 26S protease regulatory subunit 7 (26S proteasome
  misc_feature (1)..(347): Homolog of NCBI NO: 28558165 NR Description: 26S protease regulatory subunit 7 (26S proteasome
  misc_feature (1)..(347): Homolog of NCBI NO: 6652878 NR Description: 26S proteasome AAA-ATPase subunit RPT1a
  misc_feature (1)..(347): Homolog of NCBI NO: 15220930 NR Description: 26S proteasome AAA-ATPase subunit RPT1a
MQEEQPLQVARCTKIISPNTEDAKYVINVKQIAKFVVGLGDKVSPTDIEEGMRVGVDRNKYQIQIPLPPKIDPSVTMMTVEEKPDVTYNDVGGCKEQIEKMREVVELPMLHPEKFVKLGIDPPKGVLCYGPPGTGKTLLARAVANRTDACFIRVIGSELVQKYVGEGARMVRELFQMARSKKACIVFFDEVDAIGGARFDDGVGGDNEVQRTMLEIVNQLDGFDARGNIKVLMATNRPDTLDPALLRPGRLDRKVEFGLPDLESRTQIFKIHTRTMNCERDIRFELLARLCPNSTGADIRSVCTEAGMYAIRARRKTVTEKDFLDAVNKVIKGYQKFSATPKYMVYN

SEQ ID NO: 23451 - DNA, 1668 bp, Arabidopsis thaliana
  misc_feature (1)..(1668): Ceres Seq. ID no. 13504820
  misc_feature: MA Experiment ID: 108435 Result: Down-regulated in Transcription
  misc_feature: MA Experiment 108435 PARAMETER Experiment Name: At_stm_Mutants_cDNA_P Parameter: Plant Line Value: wt Landsburg vs stm
  misc_feature: MA Experiment 108435 PARAMETER Experiment Name: At_stm_Mutants_cDNA_P Parameter: Tissue Value: Shoot Apical Meristem Region
  misc_feature: MA Experiment ID: 108463 Result: Up-regulated in Transcription
  misc_feature: MA Experiment 108463 PARAMETER Experiment Name: At_Germinating_Seeds_cDNA_P Parameter: Age (day) Value: 3 vs. 0
  misc_feature: MA Experiment 108463 PARAMETER Experiment Name: At_Germinating_Seeds_cDNA_P Parameter: Tissue Value: Germinating Seeds
  misc_feature: MA Experiment ID: 108464 Result: Up-regulated in Transcription
  misc_feature: MA Experiment 108464 PARAMETER Experiment Name: At_Germinating_Seeds_cDNA_P Parameter: Age (day) Value: 4 vs. 0
  misc_feature: MA Experiment 108464 PARAMETER Experiment Name: At_Germinating_Seeds_cDNA_P Parameter: Tissue Value: Germinating Seeds
  misc_feature: MA Experiment ID: 108488 Result: Down-regulated in Transcription
  misc_feature: MA Experiment ID: 108501 Result: Down-regulated in Transcription
  misc_feature: MA Experiment 108501 PARAMETER Experiment Name: At_ap2_floral_buds_cDNA_P Parameter: Plant Line Value: ap2 (Ler.)
  misc_feature: MA Experiment 108501 PARAMETER Experiment Name: At_ap2_floral_buds_cDNA_P Parameter: Tissue Value: Closed Flower
  misc_feature: MA Experiment ID: 108561 Result: Up-regulated in Transcription
  misc_feature: MA Experiment 108561 PARAMETER Experiment Name: At_100uM_ABA_cDNA_P Parameter: Timepoint (hr) Value: 6
  misc_feature: MA Experiment 108561 PARAMETER Experiment Name: At_100uM_ABA_cDNA_P Parameter: Tissue Value: Aerial
  misc_feature: MA Experiment 108561 PARAMETER Experiment Name: At_100uM_ABA_cDNA_P Parameter: Treatment Value: 100uM ABA vs. No Treatment
  misc_feature: MA Experiment ID: 108572 Result: Up-regulated in Transcription
  misc_feature: MA Experiment 108572 PARAMETER Experiment Name: At_Drought_cDNA_P Parameter: Timepoint (hr) Value: 1
  misc_feature: MA Experiment 108572 PARAMETER Experiment Name: At_Drought_cDNA_P Parameter: Tissue Value: Aerial
  misc_feature: MA Experiment 108572 PARAMETER Experiment Name: At_Drought_cDNA_P Parameter: Treatment Value: Drought vs. No Drought
  misc_feature: MA Experiment ID: 108573 Result: Up-regulated in Transcription
  misc_feature: MA Experiment 108573 PARAMETER Experiment Name: At_Drought_cDNA_P Parameter: Timepoint (hr) Value: 6
  misc_feature: MA Experiment 108573 PARAMETER Experiment Name: At_Drought_cDNA_P Parameter: Tissue Value: Aerial
  misc_feature: MA Experiment 108573 PARAMETER Experiment Name: At_Drought_cDNA_P Parameter: Treatment Value: Drought vs. No Drought
  misc_feature: MA Experiment ID: 108574 Result: Down-regulated in Transcription
  misc_feature: MA Experiment 108574 PARAMETER Experiment Name: At_Wounding__cDNA_P Parameter: Timepoint (hr) Value: 1
  misc_feature: MA Experiment 108574 PARAMETER Experiment Name: At_Wounding__cDNA_P Parameter: Tissue Value: Aerial
  misc_feature: MA Experiment 108574 PARAMETER Experiment Name: At_Wounding__cDNA_P Parameter: Treatment Value: Wounding vs. No Wounding
  misc_feature: MA Experiment ID: 108579 Result: Down-regulated in Transcription
  misc_feature: MA Experiment 108579 PARAMETER Experiment Name: At_4deg_Cold_cDNA_P Parameter: Temperature (deg C) Value: 4 vs. 22
  misc_feature: MA Experiment 108579 PARAMETER Experiment Name: At_4deg_Cold_cDNA_P Parameter: Timepoint (hr) Value: 6
  misc_feature: MA Experiment 108579 PARAMETER Experiment Name: At_4deg_Cold_cDNA_P Parameter: Tissue Value: Aerial
  misc_feature: MA Experiment ID: 108585 Result: Up-regulated in Transcription
  misc_feature: MA Experiment 108585 PARAMETER Experiment Name: At_5mM_NaNP_cDNA_P Parameter: Timepoint (hr) Value: 6
  misc_feature: MA Experiment 108585 PARAMETER Experiment Name: At_5mM_NaNP_cDNA_P Parameter: Tissue Value: Aerial
  misc_feature: MA Experiment 108585 PARAMETER Experiment Name: At_5mM_NaNP_cDNA_P Parameter: Treatment Value: null
  misc_feature: MA Experiment ID: 108595 Result: Up-regulated in Transcription
  misc_feature: MA Experiment 108595 PARAMETER Experiment Name: At_Ler-pi_Ovule_cDNA_P Parameter: Plant Line Value: null
  misc_feature: MA Experiment ID: 108605 Result: Up-regulated in Transcription
  misc_feature: MA Experiment 108605 PARAMETER Experiment Name: At_100uM_ABA_cDNA_P Parameter: Timepoint (hr) Value: 6
  misc_feature: MA Experiment 108605 PARAMETER Experiment Name: At_100uM_ABA_cDNA_P Parameter: Tissue Value: Aerial
  misc_feature: MA Experiment 108605 PARAMETER Experiment Name: At_100uM_ABA_cDNA_P Parameter: Treatment Value: 100uM ABA vs. No Treatment
  misc_feature: MA Experiment ID: 108607 Result: Up-regulated in Transcription
  misc_feature: MA Experiment 108607 PARAMETER Experiment Name: At_100uM_ABA_cDNA_P Parameter: Timepoint (hr) Value: 4
  misc_feature: MA Experiment 108607 PARAMETER Experiment Name: At_100uM_ABA_cDNA_P Parameter: Tissue Value: Aerial
  misc_feature: MA Experiment 108607 PARAMETER Experiment Name: At_100uM_ABA_cDNA_P Parameter: Treatment Value: 100uM ABA vs. No Treatment
  misc_feature: MA Experiment ID: 20000069 Result: Up-regulated in Transcription
  misc_feature: MA Experiment 20000069 PARAMETER Experiment Name: At_100uM_ABA_Mutants_cDNA_P Parameter: Plant Line Value: CS23
  misc_feature: MA Experiment 20000069 PARAMETER Experiment Name: At_100uM_ABA_Mutants_cDNA_P Parameter: Timepoint (hr) Value: 6
  misc_feature: MA Experiment 20000069 PARAMETER Experiment Name: At_100uM_ABA_Mutants_cDNA_P Parameter: Tissue Value: Aerial
  misc_feature: MA Experiment 20000069 PARAMETER Experiment Name: At_100uM_ABA_Mutants_cDNA_P Parameter: Treatment Value: 100uM ABA vs. No Treatment
  misc_feature: MA Experiment ID: 20000070 Result: Up-regulated in Transcription
  misc_feature: MA Experiment 20000070 PARAMETER Experiment Name: At_100uM_ABA_Mutants_cDNA_P Parameter: Plant Line Value: CS24
  misc_feature: MA Experiment 20000070 PARAMETER Experiment Name: At_100uM_ABA_Mutants_cDNA_P Parameter: Timepoint (hr) Value: 6
  misc_feature: MA Experiment 20000070 PARAMETER Experiment Name: At_100uM_ABA_Mutants_cDNA_P Parameter: Tissue Value: Aerial
  misc_feature: MA Experiment 20000070 PARAMETER Experiment Name: At_100uM_ABA_Mutants_cDNA_P Parameter: Treatment Value: 100uM ABA vs. No Treatment
  misc_feature: MA Experiment ID: 20000071 Result: Up-regulated in Transcription
  misc_feature: MA Experiment 20000071 PARAMETER Experiment Name: At_100uM_ABA_Mutants_cDNA_P Parameter: Plant Line Value: CS8104
  misc_feature: MA Experiment 20000071 PARAMETER Experiment Name: At_100uM_ABA_Mutants_cDNA_P Parameter: Timepoint (hr) Value: 6
  misc_feature: MA Experiment 20000071 PARAMETER Experiment Name: At_100uM_ABA_Mutants_cDNA_P Parameter: Tissue Value: Aerial
  misc_feature: MA Experiment 20000071 PARAMETER Experiment Name: At_100uM_ABA_Mutants_cDNA_P Parameter: Treatment Value: 100uM ABA vs. No Treatment
  misc_feature: MA Experiment ID: 20000072 Result: Up-regulated in Transcription
  misc_feature: MA Experiment 20000072 PARAMETER Experiment Name: At_100uM_ABA_Mutants_cDNA_P Parameter: Plant Line Value: CS8105
  misc_feature: MA Experiment 20000072 PARAMETER Experiment Name: At_100uM_ABA_Mutants_cDNA_P Parameter: Timepoint (hr) Value: 6
  misc_feature: MA Experiment 20000072 PARAMETER Experiment Name: At_100uM_ABA_Mutants_cDNA_P Parameter: Tissue Value: Aerial
  misc_feature: MA Experiment 20000072 PARAMETER Experiment Name: At_100uM_ABA_Mutants_cDNA_P Parameter: Treatment Value: 100uM ABA vs. No Treatment
  misc_feature: MA Experiment ID: 20000086 Result: Up-regulated in Transcription
  misc_feature: MA Experiment 20000086 PARAMETER Experiment Name: At_100uM_ABA_Mutants_cDNA_P Parameter: Plant Line Value: CS22
  misc_feature: MA Experiment 20000086 PARAMETER Experiment Name: At_100uM_ABA_Mutants_cDNA_P Parameter: Timepoint (hr) Value: 6
  misc_feature: MA Experiment 20000086 PARAMETER Experiment Name: At_100uM_ABA_Mutants_cDNA_P Parameter: Tissue Value: Aerial
  misc_feature: MA Experiment 20000086 PARAMETER Experiment Name: At_100uM_ABA_Mutants_cDNA_P Parameter: Treatment Value: 100uM ABA vs. No Treatment
  misc_feature: MA Experiment ID: 20000087 Result: Up-regulated in Transcription
  misc_feature: MA Experiment 20000087 PARAMETER Experiment Name: At_100uM_ABA_Mutants_cDNA_P Parameter: Plant Line Value: WS
  misc_feature: MA Experiment 20000087 PARAMETER Experiment Name: At_100uM_ABA_Mutants_cDNA_P Parameter: Timepoint (hr) Value: 6
  misc_feature: MA Experiment 20000087 PARAMETER Experiment Name: At_100uM_ABA_Mutants_cDNA_P Parameter: Tissue Value: Aerial
  misc_feature: MA Experiment 20000087 PARAMETER Experiment Name: At_100uM_ABA_Mutants_cDNA_P Parameter: Treatment Value: 100uM ABA vs. No Treatment
  misc_feature: MA Experiment ID: 20000088 Result: Up-regulated in Transcription
  misc_feature: MA Experiment 20000088 PARAMETER Experiment Name: At_100uM_ABA_Mutants_cDNA_P Parameter: Plant Line Value: Landsberg
  misc_feature: MA Experiment 20000088 PARAMETER Experiment Name: At_100uM_ABA_Mutants_cDNA_P Parameter: Timepoint (hr) Value: 6
  misc_feature: MA Experiment 20000088 PARAMETER Experiment Name: At_100uM_ABA_Mutants_cDNA_P Parameter: Tissue Value: Aerial
  misc_feature: MA Experiment 20000088 PARAMETER Experiment Name: At_100uM_ABA_Mutants_cDNA_P Parameter: Treatment Value: 100uM ABA vs. No Treatment
  misc_feature: MA Experiment ID: 20000089 Result: Up-regulated in Transcription
  misc_feature: MA Experiment ID: 20000111 Result: Down-regulated in Transcription
  misc_feature: MA Experiment 20000111 PARAMETER Experiment Name: At_42deg_Heat_cDNA_P Parameter: Temperature (deg C) Value: 42 vs. 22
  misc_feature: MA Experiment 20000111 PARAMETER Experiment Name: At_42deg_Heat_cDNA_P Parameter: Timepoint (hr) Value: 6
  misc_feature: MA Experiment 20000111 PARAMETER Experiment Name: At_42deg_Heat_cDNA_P Parameter: Tissue Value: Aerial
  misc_feature: MA Experiment ID: 20000117 Result: Up-regulated in Transcription
  misc_feature: MA Experiment 20000117 PARAMETER Experiment Name: At_100uM_ABA_Mutants_cDNA_P Parameter: Plant Line Value: Columbia
  misc_feature: MA Experiment 20000117 PARAMETER Experiment Name: At_100uM_ABA_Mutants_cDNA_P Parameter: Timepoint (hr) Value: 6
  misc_feature: MA Experiment 20000117 PARAMETER Experiment Name: At_100uM_ABA_Mutants_cDNA_P Parameter: Tissue Value: Aerial
  misc_feature: MA Experiment 20000117 PARAMETER Experiment Name: At_100uM_ABA_Mutants_cDNA_P Parameter: Treatment Value: 100uM ABA vs. No Treatment
  misc_feature: MA Experiment ID: 20000169 Result: Up-regulated in Transcription
  misc_feature: MA Experiment 20000169 PARAMETER Experiment Name: At_100uM_ABA_P Parameter: Age (day) Value: 14
  misc_feature: MA Experiment 20000169 PARAMETER Experiment Name: At_100uM_ABA_P Parameter: Organism Value: A. thaliana
  misc_feature: MA Experiment 20000169 PARAMETER Experiment Name: At_100uM_ABA_P Parameter: Plant Line Value: WS
  misc_feature: MA Experiment 20000169 PARAMETER Experiment Name: At_100uM_ABA_P Parameter: Timepoint (hr) Value: 6
  misc_feature: MA Experiment 20000169 PARAMETER Experiment Name: At_100uM_ABA_P Parameter: Tissue Value: Aerial
  misc_feature: MA Experiment 20000169 PARAMETER Experiment Name: At_100uM_ABA_P Parameter: Treatment Value: 100uM ABA vs. No Treatment
  misc_feature: MA Experiment ID: 20000173 Result: Down-regulated in Transcription
  misc_feature: MA Experiment 20000173 PARAMETER Experiment Name: At_42deg_Heat_P Parameter: Age (day) Value: 14
  misc_feature: MA Experiment 20000173 PARAMETER Experiment Name: At_42deg_Heat_P Parameter: Organism Value: A. thaliana
  misc_feature: MA Experiment 20000173 PARAMETER Experiment Name: At_42deg_Heat_P Parameter: Plant Line Value: WS
  misc_feature: MA Experiment 20000173 PARAMETER Experiment Name: At_42deg_Heat_P Parameter: Temperature (deg C) Value: 42 vs. 22
  misc_feature: MA Experiment 20000173 PARAMETER Experiment Name: At_42deg_Heat_P Parameter: Timepoint (hr) Value: 6
  misc_feature: MA Experiment 20000173 PARAMETER Experiment Name: At_42deg_Heat_P Parameter: Tissue Value: Aerial
  misc_feature: MA Experiment ID: 20000180 Result: Up-regulated in Transcription
  misc_feature: MA Experiment 20000180 PARAMETER Experiment Name: At_Germinating_Seeds_P Parameter: Age (hr) Value: 24 vs. 0
  misc_feature: MA Experiment 20000180 PARAMETER Experiment Name: At_Germinating_Seeds_P Parameter: Tissue Value: Germinating Seeds
  misc_feature: MA Experiment ID: 20000184 Result: Down-regulated in Transcription
  misc_feature: MA Experiment 20000184 PARAMETER Experiment Name: At_Shoots__P Parameter: Age (day) Value: 7
  misc_feature: MA Experiment 20000184 PARAMETER Experiment Name: At_Shoots__P Parameter: Tissue Value: Shoots vs. Whole Plant
  misc_feature: MA Experiment ID: 20000185 Result: Down-regulated in Transcription
  misc_feature: MA Experiment 20000185 PARAMETER Experiment Name: At_Roots__P Parameter: Age (day) Value: 7 vs. 21
  misc_feature: MA Experiment 20000185 PARAMETER Experiment Name: At_Roots__P Parameter: Organism Value: A. thaliana
  misc_feature: MA Experiment 20000185 PARAMETER Experiment Name: At_Roots__P Parameter: Tissue Value: Roots vs. Whole Plant
  misc_feature: MA Experiment ID: 20000214 Result: Down-regulated in Transcription
  misc_feature: MA Experiment 20000214 PARAMETER Experiment Name: At_4deg_Cold_P Parameter: Timepoint (hr) Value: 6
  misc_feature: MA Experiment ID: 20000224 Result: Down-regulated in Transcription
  misc_feature: MA Experiment ID: 20000234 Result: Down-regulated in Transcription
  misc_feature: MA Experiment 20000234 PARAMETER Experiment Name: At_Siliques_P Parameter: Age (day) Value: 21
  misc_feature: MA Experiment 20000234 PARAMETER Experiment Name: At_Siliques_P Parameter: Organism Value: A. thaliana
  misc_feature: MA Experiment 20000234 PARAMETER Experiment Name: At_Siliques_P Parameter: Plant Line Value: WS
  misc_feature: MA Experiment 20000234 PARAMETER Experiment Name: At_Siliques_P Parameter: Tissue Value: Less Than 5mm Siliques vs. Whole Plant
  misc_feature: MA Experiment ID: 20000436 Result: Up-regulated in Transcription
  misc_feature: MA Experiment 20000436 PARAMETER Experiment Name: At_Drought_P Parameter: Age (day) Value: 7
  misc_feature: MA Experiment 20000436 PARAMETER Experiment Name: At_Drought_P Parameter: Organism Value: A. thaliana
  misc_feature: MA Experiment 20000436 PARAMETER Experiment Name: At_Drought_P Parameter: Plant Line Value: WS
  misc_feature: MA Experiment 20000436 PARAMETER Experiment Name: At_Drought_P Parameter: Timepoint (hr) Value: 12
  misc_feature: MA Experiment 20000436 PARAMETER Experiment Name: At_Drought_P Parameter: Tissue Value: Whole Plant
  misc_feature: MA Experiment 20000436 PARAMETER Experiment Name: At_Drought_P Parameter: Treatment Value: Drought vs. No Drought
  misc_feature: MA Experiment ID: 20000437 Result: Up-regulated in Transcription
  misc_feature: MA Experiment 20000437 PARAMETER Experiment Name: At_Drought_P Parameter: Age (day) Value: 8
  misc_feature: MA Experiment 20000437 PARAMETER Experiment Name: At_Drought_P Parameter: Organism Value: A. thaliana
  misc_feature: MA Experiment 20000437 PARAMETER Experiment Name: At_Drought_P Parameter: Plant Line Value: WS
  misc_feature: MA Experiment 20000437 PARAMETER Experiment Name: At_Drought_P Parameter: Timepoint (hr) Value: 24
  misc_feature: MA Experiment 20000437 PARAMETER Experiment Name: At_Drought_P Parameter: Tissue Value: Whole Plant
  misc_feature: MA Experiment 20000437 PARAMETER Experiment Name: At_Drought_P Parameter: Treatment Value: Drought vs. No Drought
  misc_feature: MA Experiment ID: 20000438 Result: Down-regulated in Transcription
  misc_feature: MA Experiment 20000438 PARAMETER Experiment Name: At_Shoots__P Parameter: Age (day) Value: 14
  misc_feature: MA Experiment 20000438 PARAMETER Experiment Name: At_Shoots__P Parameter: Tissue Value: Shoots vs. Whole Plant
  misc_feature: MA Experiment ID: 20000439 Result: Down-regulated in Transcription
  misc_feature: MA Experiment 20000439 PARAMETER Experiment Name: At_Roots__P Parameter: Age (day) Value: 14 vs. 21
  misc_feature: MA Experiment 20000439 PARAMETER Experiment Name: At_Roots__P Parameter: Organism Value: A. thaliana
  misc_feature: MA Experiment 20000439 PARAMETER Experiment Name: At_Roots__P Parameter: Tissue Value: Roots vs. Whole Plant
  misc_feature: MA Experiment ID: 20000453 Result: Up-regulated in Transcription
  misc_feature: MA Experiment 20000453 PARAMETER Experiment Name: At_100uM_ABA_P Parameter: Age (day) Value: 15
  misc_feature: MA Experiment 20000453 PARAMETER Experiment Name: At_100uM_ABA_P Parameter: Organism Value: A. thaliana
  misc_feature: MA Experiment 20000453 PARAMETER Experiment Name: At_100uM_ABA_P Parameter: Plant Line Value: WS
  misc_feature: MA Experiment 20000453 PARAMETER Experiment Name: At_100uM_ABA_P Parameter: Timepoint (hr) Value: 24
  misc_feature: MA Experiment 20000453 PARAMETER Experiment Name: At_100uM_ABA_P Parameter: Tissue Value: Aerial
  misc_feature: MA Experiment 20000453 PARAMETER Experiment Name: At_100uM_ABA_P Parameter: Treatment Value: 100uM ABA vs. No Treatment
  misc_feature: MA Experiment ID: 20000573 Result: Up-regulated in Transcription
  misc_feature: MA Experiment 20000573 PARAMETER Experiment Name: At_100uM_ABA_Mutants__P Parameter: Organism Value: A. thaliana
  misc_feature: MA Experiment 20000573 PARAMETER Experiment Name: At_100uM_ABA_Mutants__P Parameter: Plant Line Value: CS22 vs. Ler wt
  misc_feature: MA Experiment 20000573 PARAMETER Experiment Name: At_100uM_ABA_Mutants__P Parameter: Timepoint (hr) Value: N/A
  misc_feature: MA Experiment 20000573 PARAMETER Experiment Name: At_100uM_ABA_Mutants__P Parameter: Tissue Value: Whole Plant
  misc_feature: MA Experiment 20000573 PARAMETER Experiment Name: At_100uM_ABA_Mutants__P Parameter: Treatment Value: None
  misc_feature: MA Experiment ID: 20000794 Result: Up-regulated in Transcription
  misc_feature: MA Experiment 20000794 PARAMETER Experiment Name: At_Petals_P Parameter: Age (day) Value: 23-25 days
  misc_feature: MA Experiment 20000794 PARAMETER Experiment Name: At_Petals_P Parameter: Plant Line Value: WS
  misc_feature: MA Experiment 20000794 PARAMETER Experiment Name: At_Petals_P Parameter: Tissue Value: Petals vs. Whole plant
  misc_feature: MA Experiment ID: 20001248 Result: Up-regulated in Transcription
  misc_feature: MA Experiment 20001248 PARAMETER Experiment Name: At_Far-red-induction_P Parameter: Age (day) Value: 7
  misc_feature: MA Experiment 20001248 PARAMETER Experiment Name: At_Far-red-induction_P Parameter: Light Value: Far-red vs. White
  misc_feature: MA Experiment 20001248 PARAMETER Experiment Name: At_Far-red-induction_P Parameter: Organism Value: A. thaliana
  misc_feature: MA Experiment 20001248 PARAMETER Experiment Name: At_Far-red-induction_P Parameter: Plant Line Value: Columbia
  misc_feature: MA Experiment 20001248 PARAMETER Experiment Name: At_Far-red-induction_P Parameter: Timepoint (hr) Value: 4
  misc_feature: MA Experiment 20001248 PARAMETER Experiment Name: At_Far-red-induction_P Parameter: Tissue Value: Whole Plant
  misc_feature: MA Experiment ID: 20001450 Result: Up-regulated in Transcription
  misc_feature: MA Experiment 20001450 PARAMETER Experiment Name: At_Far-red-induction_P Parameter: Age (day) Value: 7
  misc_feature: MA Experiment 20001450 PARAMETER Experiment Name: At_Far-red-induction_P Parameter: Light Value: Far-red vs. White
  misc_feature: MA Experiment 20001450 PARAMETER Experiment Name: At_Far-red-induction_P Parameter: Organism Value: A. thaliana
  misc_feature: MA Experiment 20001450 PARAMETER Experiment Name: At_Far-red-induction_P Parameter: Plant Line Value: Columbia
  misc_feature: MA Experiment 20001450 PARAMETER Experiment Name: At_Far-red-induction_P Parameter: Timepoint (hr) Value: 8
  misc_feature: MA Experiment 20001450 PARAMETER Experiment Name: At_Far-red-induction_P Parameter: Tissue Value: Whole Plant
  misc_feature: MA Experiment ID: 20001451 Result: Up-regulated in Transcription
  misc_feature: MA Experiment 20001451 PARAMETER Experiment Name: At_Far-red-induction_P Parameter: Age (day) Value: 7
  misc_feature: MA Experiment 20001451 PARAMETER Experiment Name: At_Far-red-induction_P Parameter: Light Value: Far-red vs. White
  misc_feature: MA Experiment 20001451 PARAMETER Experiment Name: At_Far-red-induction_P Parameter: Organism Value: A. thaliana
  misc_feature: MA Experiment 20001451 PARAMETER Experiment Name: At_Far-red-induction_P Parameter: Plant Line Value: Columbia
  misc_feature: MA Experiment 20001451 PARAMETER Experiment Name: At_Far-red-induction_P Parameter: Timepoint (hr) Value: 24
  misc_feature: MA Experiment 20001451 PARAMETER Experiment Name: At_Far-red-induction_P Parameter: Tissue Value: Whole Plant
  misc_feature: MA Experiment ID: 20001558 Result: Down-regulated in Transcription
  misc_feature: MA Experiment 20001558 PARAMETER Experiment Name: At_Drought_Soil_Dry_P Parameter: Age (day) Value: 27
  misc_feature: MA Experiment 20001558 PARAMETER Experiment Name: At_Drought_Soil_Dry_P Parameter: Organism Value: A. thaliana
  misc_feature: MA Experiment 20001558 PARAMETER Experiment Name: At_Drought_Soil_Dry_P Parameter: Plant Line Value: WS
  misc_feature: MA Experiment 20001558 PARAMETER Experiment Name: At_Drought_Soil_Dry_P Parameter: Post Timepoint (hr) Value: 6
  misc_feature: MA Experiment 20001558 PARAMETER Experiment Name: At_Drought_Soil_Dry_P Parameter: Post-Treatment Value: Re-Water vs. No Drought
  misc_feature: MA Experiment 20001558 PARAMETER Experiment Name: At_Drought_Soil_Dry_P Parameter: Timepoint (day) Value: 13
  misc_feature: MA Experiment 20001558 PARAMETER Experiment Name: At_Drought_Soil_Dry_P Parameter: Treatment Value: Drought vs. No Drought
  misc_feature: MA Experiment ID: 20001911 Result: Up-regulated in Transcription
  misc_feature: MA Experiment 20001911 PARAMETER Experiment Name: At_Drought_Reproduction_P Parameter: Age (day) Value: 40
  misc_feature: MA Experiment 20001911 PARAMETER Experiment Name: At_Drought_Reproduction_P Parameter: Organism Value: A. thaliana
  misc_feature: MA Experiment 20001911 PARAMETER Experiment Name: At_Drought_Reproduction_P Parameter: Plant Line Value: WS
  misc_feature: MA Experiment 20001911 PARAMETER Experiment Name: At_Drought_Reproduction_P Parameter: Timepoint (day) Value: 10
  misc_feature: MA Experiment 20001911 PARAMETER Experiment Name: At_Drought_Reproduction_P Parameter: Tissue Value: Flowers
  misc_feature: MA Experiment 20001911 PARAMETER Experiment Name: At_Drought_Reproduction_P Parameter: Treatment Value: Drought vs. No Drought
acctatagtttcttcttctgaaaatcagcaacaaactacaaatcatccaatgatagaatttcagctttaattatcaaacaaattaaagataaccccattgataatatcgccacgtctcatcggatgaaatagtactatctgacacgacacgaatctcttatgagagaaacagaagagcacggaatctccataaatcaaaatacatgatcggagctttctcactatcaaaagctttccggcgacaaaaccaaccatctcctccttatctccaccatgatctcactccactcatcagccattaaagcctctctctacggctctttcccttcttcgttacgatcaacactctctgtttccttctctgctggatctcttattcggcttccttccgtcggcaagcgcaatctctccgtcgtcgtttcctctggaagagactcctcgatgtcatcaaacaatgtttctcgcggatcgtcttcaaaggttgctgctgaatctttcttcaggagtgtcttagggcagatggaaactgtttacctaaatcgaaacccgacgcctaaatccgtcttggagcttgttcgatctgttgatgaccagcaactttgctatgatcatctcgctttcagaacgtttgggattggtggttatgggattgactcgcttgcaagctttttccttgactatggatatacaccgatggatgagctaaaatttccggccaaaaagcttagagctttgtggtttgcacctcctaatgcttctgctgttcctggtggcagcggcgttaacggtcctttaccgagagtttttatctcagagctcctggtggaccagatgagttcacagactcaggatgtaatcagaaaatacacggaagcatcacctaatgggaaaaagtatgctggactttctagtgctttgggtactttaacttgggaaaagcctctatcttctgagtttgagcaattggctagggaaagtgaatacgcagcatggacccttgtcaatggatatgcacttaaccacgtcacgatttctgttcatcggcttaaatctcatctaaacaaaatcaagaagctcaatcagttcctcgaagaaaaaggtatcaaattgaactcagaaggaggagtccttaaagttagccctgatggtggtttgcagcaaagctcaactgtagcagattcgatatctttcaagttcgctgatggtgttaccaaatctatcccttgttcatacattgagtttgctgaacgccttgtacttccgcagtaccaaaatatacccgaaagcgagatacaagagtctcatcgacgtgatggatttgaggtcggaaatgctgacaagatcttcgagagcacatttcaggagcagctttcccgacgaaccgggtgatagcaaatagtagccacggctttggatatatgtcaatcatgcctcgtacatgtgtaacgagtaaaaagctcaaaactgcttgtaatcttgatcagtaaagatgctaatccaagaactcttaatcaaatatatttatgtgtatatttccgactactttcctagtggtgagaaggaggtaaacaaagataacaggaatagttacaaaacataaaacgataatgatgttgtatggttttgttcttgttctgcatttgagcttgttttaccgattggtaactt

SEQ ID NO: 23452 - protein, 371 aa, Arabidopsis thaliana
  peptide (1)..(371): Ceres Seq. ID no. 13504821
  misc_feature (109)..(326): Homolog of NCBI NO: 37523419 NR Description: hypothetical protein glr3850 [Gloeobacter
  misc_feature (87)..(361): Homolog of NCBI NO: 24372211 NR Description: conserved hypothetical protein [Shewanella
  misc_feature (87)..(326): Homolog of NCBI NO: 27364716 NR Description: Conserved hypothetical protein [Vibrio vulnificus
  misc_feature (87)..(336): Homolog of NCBI NO: 15642610 NR Description: conserved hypothetical protein [Vibrio cholerae]
  misc_feature (87)..(361): Homolog of NCBI NO: 28899568 NR Description: conserved hypothetical protein
  misc_feature (146)..(370): Homolog of NCBI NO: 22973852 NR Description: hypothetical protein [Chloroflexus aurantiacus]
  misc_feature (57)..(361): Homolog of NCBI NO: 15223410 NR Description: expressed protein [Arabidopsis thaliana]
  misc_feature (57)..(361): Homolog of NCBI NO: 18396149 NR Description: expressed protein [Arabidopsis thaliana]
  misc_feature (72)..(370): Homolog of NCBI NO: 37535166 NR Description: unknown protein [Oryza sativa (japonica
  misc_feature (1)..(371): Homolog of NCBI NO: 18390717 NR Description: expressed protein [Arabidopsis thaliana]
MISLHSSAIKASLYGSFPSSLRSTLSVSFSAGSLIRLPSVGKRNLSVVVSSGRDSSMSSNNVSRGSSSKVAAESFFRSVLGQMETVYLNRNPTPKSVLELVRSVDDQQLCYDHLAFRTFGIGGYGIDSLASFFLDYGYTPMDELKFPAKKLRALWFAPPNASAVPGGSGVNGPLPRVFISELLVDQMSSQTQDVIRKYTEASPNGKKYAGLSSALGTLTWEKPLSSEFEQLARESEYAAWTLVNGYALNHVTISVHRLKSHLNKIKKLNQFLEEKGIKLNSEGGVLKVSPDGGLQQSSTVADSISFKFADGVTKSIPCSYIEFAERLVLPQYQNIPESEIQESHRRDGFEVGNADKIFESTFQEQLSRRTG

SEQ ID NO: 23453 - protein, 315 aa, Arabidopsis thaliana
  peptide (1)..(315): Ceres Seq. ID no. 13504822
  misc_feature (53)..(270): Homolog of NCBI NO: 37523419 NR Description: hypothetical protein glr3850 [Gloeobacter
  misc_feature (31)..(305): Homolog of NCBI NO: 24372211 NR Description: conserved hypothetical protein [Shewanella
  misc_feature (31)..(270): Homolog of NCBI NO: 27364716 NR Description: Conserved hypothetical protein [Vibrio vulnificus
  misc_feature (31)..(280): Homolog of NCBI NO: 15642610 NR Description: conserved hypothetical protein [Vibrio cholerae]
  misc_feature (31)..(305): Homolog of NCBI NO: 28899568 NR Description: conserved hypothetical protein
  misc_feature (90)..(314): Homolog of NCBI NO: 22973852 NR Description: hypothetical protein [Chloroflexus aurantiacus]
  misc_feature (1)..(305): Homolog of NCBI NO: 15223410 NR Description: expressed protein [Arabidopsis thaliana]
  misc_feature (1)..(305): Homolog of NCBI NO: 18396149 NR Description: expressed protein [Arabidopsis thaliana]
  misc_feature (16)..(314): Homolog of NCBI NO: 37535166 NR Description: unknown protein [Oryza sativa (japonica
  misc_feature (1)..(315): Homolog of NCBI NO: 18390717 NR Description: expressed protein [Arabidopsis thaliana]
MSSNNVSRGSSSKVAAESFFRSVLGQMETVYLNRNPTPKSVLELVRSVDDQQLCYDHLAFRTFGIGGYGIDSLASFFLDYGYTPMDELKFPAKKLRALWFAPPNASAVPGGSGVNGPLPRVFISELLVDQMSSQTQDVIRKYTEASPNGKKYAGLSSALGTLTWEKPLSSEFEQLARESEYAAWTLVNGYALNHVTISVHRLKSHLNKIKKLNQFLEEKGIKLNSEGGVLKVSPDGGLQQSSTVADSISFKFADGVTKSIPCSYIEFAERLVLPQYQNIPESEIQESHRRDGFEVGNADKIFESTFQEQLSRRTG

SEQ ID NO: 23454 - protein, 289 aa, Arabidopsis thaliana
  peptide (1)..(289): Ceres Seq. ID no. 13504823
  misc_feature (27)..(244): Homolog of NCBI NO: 37523419 NR Description: hypothetical protein glr3850 [Gloeobacter
  misc_feature (5)..(279): Homolog of NCBI NO: 24372211 NR Description: conserved hypothetical protein [Shewanella
  misc_feature (5)..(244): Homolog of NCBI NO: 27364716 NR Description: Conserved hypothetical protein [Vibrio vulnificus
  misc_feature (5)..(254): Homolog of NCBI NO: 15642610 NR Description: conserved hypothetical protein [Vibrio cholerae]
  misc_feature (5)..(279): Homolog of NCBI NO: 28899568 NR Description: conserved hypothetical protein
  misc_feature (64)..(288): Homolog of NCBI NO: 22973852 NR Description: hypothetical protein [Chloroflexus aurantiacus]
  misc_feature (1)..(279): Homolog of NCBI NO: 15223410 NR Description: expressed protein [Arabidopsis thaliana]
  misc_feature (1)..(279): Homolog of NCBI NO: 18396149 NR Description: expressed protein [Arabidopsis thaliana]
  misc_feature (1)..(288): Homolog of NCBI NO: 37535166 NR Description: unknown protein [Oryza sativa (japonica
  misc_feature (1)..(289): Homolog of NCBI NO: 18390717 NR Description: expressed protein [Arabidopsis thaliana]
METVYLNRNPTPKSVLELVRSVDDQQLCYDHLAFRTFGIGGYGIDSLASFFLDYGYTPMDELKFPAKKLRALWFAPPNASAVPGGSGVNGPLPRVFISELLVDQMSSQTQDVIRKYTEASPNGKKYAGLSSALGTLTWEKPLSSEFEQLARESEYAAWTLVNGYALNHVTISVHRLKSHLNKIKKLNQFLEEKGIKLNSEGGVLKVSPDGGLQQSSTVADSISFKFADGVTKSIPCSYIEFAERLVLPQYQNIPESEIQESHRRDGFEVGNADKIFESTFQEQLSRRTG

SEQ ID NO: 23455 - DNA, 1536 bp, Arabidopsis thaliana
  misc_feature (1)..(1536): Ceres Seq. ID no. 13497467
  misc_feature: MA Experiment ID: 108434 Result: Up-regulated in Transcription
  misc_feature: MA Experiment 108434 PARAMETER Experiment Name: At_Root_Tips_cDNA_P Parameter: Tissue Value: Root Tips
  misc_feature: MA Experiment ID: 108461 Result: Up-regulated in Transcription
  misc_feature: MA Experiment 108461 PARAMETER Experiment Name: At_Germinating_Seeds_cDNA_P Parameter: Age (day) Value: 1 vs. 0
  misc_feature: MA Experiment 108461 PARAMETER Experiment Name: At_Germinating_Seeds_cDNA_P Parameter: Tissue Value: Germinating Seeds
  misc_feature: MA Experiment ID: 108462 Result: Up-regulated in Transcription
  misc_feature: MA Experiment 108462 PARAMETER Experiment Name: At_Germinating_Seeds_cDNA_P Parameter: Age (day) Value: 2 vs. 0
  misc_feature: MA Experiment 108462 PARAMETER Experiment Name: At_Germinating_Seeds_cDNA_P Parameter: Tissue Value: Germinating Seeds
  misc_feature: MA Experiment ID: 108463 Result: Up-regulated in Transcription
  misc_feature: MA Experiment 108463 PARAMETER Experiment Name: At_Germinating_Seeds_cDNA_P Parameter: Age (day) Value: 3 vs. 0
  misc_feature: MA Experiment 108463 PARAMETER Experiment Name: At_Germinating_Seeds_cDNA_P Parameter: Tissue Value: Germinating Seeds
  misc_feature: MA Experiment ID: 108464 Result: Up-regulated in Transcription
  misc_feature: MA Experiment 108464 PARAMETER Experiment Name: At_Germinating_Seeds_cDNA_P Parameter: Age (day) Value: 4 vs. 0
  misc_feature: MA Experiment 108464 PARAMETER Experiment Name: At_Germinating_Seeds_cDNA_P Parameter: Tissue Value: Germinating Seeds
  misc_feature: MA Experiment ID: 108595 Result: Down-regulated in Transcription
  misc_feature: MA Experiment 108595 PARAMETER Experiment Name: At_Ler-pi_Ovule_cDNA_P Parameter: Plant Line Value: null
  misc_feature: MA Experiment ID: 20000179 Result: Up-regulated in Transcription
  misc_feature: MA Experiment 20000179 PARAMETER Experiment Name: At_Germinating_Seeds_P Parameter: Age (hr) Value: 6 vs. 0
  misc_feature: MA Experiment 20000179 PARAMETER Experiment Name: At_Germinating_Seeds_P Parameter: Tissue Value: Germinating Seeds
  misc_feature: MA Experiment ID: 20000180 Result: Up-regulated in Transcription
  misc_feature: MA Experiment 20000180 PARAMETER Experiment Name: At_Germinating_Seeds_P Parameter: Age (hr) Value: 24 vs. 0
  misc_feature: MA Experiment 20000180 PARAMETER Experiment Name: At_Germinating_Seeds_P Parameter: Tissue Value: Germinating Seeds
  misc_feature: MA Experiment ID: 20000224 Result: Down-regulated in Transcription
  misc_feature: MA Experiment ID: 20000227 Result: Up-regulated in Transcription
  misc_feature: MA Experiment 20000227 PARAMETER Experiment Name: At_Root-Tips-vs-Tops_P Parameter: Tissue Value: Root Tips vs. Root Tops
  misc_feature: MA Experiment ID: 20000265 Result: Up-regulated in Transcription
  misc_feature: MA Experiment 20000265 PARAMETER Experiment Name: At_Open_Flower_P Parameter: Age (day) Value: 21
  misc_feature: MA Experiment 20000265 PARAMETER Experiment Name: At_Open_Flower_P Parameter: Plant Line Value: WS
  misc_feature: MA Experiment 20000265 PARAMETER Experiment Name: At_Open_Flower_P Parameter: Tissue Value: Closed Flower vs. Whole Plant
  misc_feature: MA Experiment ID: 20001451 Result: Down-regulated in Transcription
  misc_feature: MA Experiment 20001451 PARAMETER Experiment Name: At_Far-red-induction_P Parameter: Age (day) Value: 7
  misc_feature: MA Experiment 20001451 PARAMETER Experiment Name: At_Far-red-induction_P Parameter: Light Value: Far-red vs. White
  misc_feature: MA Experiment 20001451 PARAMETER Experiment Name: At_Far-red-induction_P Parameter: Organism Value: A. thaliana
  misc_feature: MA Experiment 20001451 PARAMETER Experiment Name: At_Far-red-induction_P Parameter: Plant Line Value: Columbia
  misc_feature: MA Experiment 20001451 PARAMETER Experiment Name: At_Far-red-induction_P Parameter: Timepoint (hr) Value: 24
  misc_feature: MA Experiment 20001451 PARAMETER Experiment Name: At_Far-red-induction_P Parameter: Tissue Value: Whole Plant
gacaaagaagagtcgtgttggtgagctaactacccaacctgtgaagctacccccattctctctcaacgttttcgttttgaaatggcgaggaagaagatcagagagtatgactcaaagaggttggtgaaggaacatttcaaaaggctttctggcaaagagcttcctatcagatccgttcagattaatgaaacaactgatctaaatgagctagttgaaaaggaaccttggctctcgtctgagaagctggtggtgaaacctgacatgttgtttggaaagcgtggcaagagtggtttggttgccttgaaattagattttgctgatgttgccacttttgttaaagaacgtttgggaaaagaggtagagatgagtggatgcaaaggacccataacaacattcatagttgaaccatttgttccacacaatgaggagtattatctcaatgttgtctcggatcggcttggttgcagcataagcttttctgagtgtggaggaattgagatcgaggagaactgggacaaggtcaagacaatatttttaccaacaggtgcttccctgacacctgaaatatgtgcacctcttgtcgcaactcttcccttagagatcaaagctgaaattgaagaatttatcaaagtcattttcaccctattccaagatcttgatttcactttcttggagatgaatcctttcactctagttgatggaagtccttatcctctggatatgaggggtgagcttgatgatactgctgccttcaaaaactttaaaaaatggggcgacattgaatttcctctgccatttggaagagtaatgagtcctacagaaagctttatccacggactggatgagaagacaagtgcgtctttgaagtttaccgttctgaaccccaagggacggatttggacaatggtagctggtggaggagcaagtgtcatctatgcggatacggttggagatctcgggtatgcatctgaacttggcaactatgctgaatacagtggagcacccaaagaagatgaggttttgcagtacgccagagtcgttattgattgtgctacagcaaacccggatggaaaaagcagagcccttgtcatcggaggcggaattgccaacttcactgacgttgctgctactttcaatggcataatccgcgctcttaaagaaaaggaagcaaagctgaaagcagcaaggatgcatatatttgtgaggagaggaggaccaaactaccaaaagggacttgctaaaatgcgagcccttggagatgatatcggtgtccccatcgaggtctatggcccagaagcaaccatgacaggtatctgcaaggaggcaatccagtacatcacagcagcagcataagcttctctcagtaccttctatgaccaaaactttgtctgtgttttagagcctttatttactgtggttaagattactcaagctataagatacttgcaatttcttgaaaacttctgttgttcgattctctttcccctaacgttttcttcagattcaataaataatcgttacttttttttcccctct

SEQ ID NO: 23456 - protein, 423 aa, Arabidopsis thaliana
  peptide (1)..(423): Ceres Seq. ID no. 13497468
  misc_feature (42)..(199): Pfam Name: ATP-grasp domain Pfam Description: ATP-grasp domain
  misc_feature (1)..(411): Homolog of NCBI NO: 8392839 NR Description: ATP citrate lyase [Rattus norvegicus]
  misc_feature (1)..(416): Homolog of NCBI NO: 28372804 NR Description: LD21334p [Drosophila melanogaster]
  misc_feature (1)..(416): Homolog of NCBI NO: 24653988 NR Description: ATP citrate lyase CG8322-PA [Drosophila
  misc_feature (1)..(416): Homolog of NCBI NO: 9229902 NR Description: ATP citrate-lyase [Ciona intestinalis]
  misc_feature (1)..(419): Homolog of NCBI NO: 15217510 NR Description: expressed protein [Arabidopsis thaliana]
  misc_feature (1)..(423): Homolog of NCBI NO: 15919089 NR Description: ATP citrate lyase b-subunit [Lupinus albus]
  misc_feature (1)..(423): Homolog of NCBI NO: 19698853 NR Description: similar to ATP-citrate-lyase [Arabidopsis
  misc_feature (1)..(423): Homolog of NCBI NO: 15219818 NR Description: ATP citrate-lyase -related [Arabidopsis thaliana]
  misc_feature (1)..(423): Homolog of NCBI NO: 21593129 NR Description: ATP citrate-lyase, putative [Arabidopsis thaliana]
  misc_feature (1)..(423): Homolog of NCBI NO: 15220186 NR Description: ATP citrate-lyase -related [Arabidopsis thaliana]
MARKKIREYDSKRLVKEHFKRLSGKELPIRSVQINETTDLNELVEKEPWLSSEKLVVKPDMLFGKRGKSGLVALKLDFADVATFVKERLGKEVEMSGCKGPITTFIVEPFVPHNEEYYLNVVSDRLGCSISFSECGGIEIEENWDKVKTIFLPTGASLTPEICAPLVATLPLEIKAEIEEFIKVIFTLFQDLDFTFLEMNPFTLVDGSPYPLDMRGELDDTAAFKNFKKWGDIEFPLPFGRVMSPTESFIHGLDEKTSASLKFTVLNPKGRIWTMVAGGGASVIYADTVGDLGYASELGNYAEYSGAPKEDEVLQYARVVIDCATANPDGKSRALVIGGGIANFTDVAATFNGIIRALKEKEAKLKAARMHIFVRRGGPNYQKGLAKMRALGDDIGVPIEVYGPEATMTGICKEAIQYITAAA

SEQ ID NO: 23457 - protein, 363 aa, Arabidopsis thaliana
  peptide (1)..(363): Ceres Seq. ID no. 13497469
  misc_feature (1)..(139): Pfam Name: ATP-grasp domain Pfam Description: ATP-grasp domain
  misc_feature (1)..(351): Homolog of NCBI NO: 8392839 NR Description: ATP citrate lyase [Rattus norvegicus]
  misc_feature (1)..(356): Homolog of NCBI NO: 28372804 NR Description: LD21334p [Drosophila melanogaster]
  misc_feature (1)..(356): Homolog of NCBI NO: 24653988 NR Description: ATP citrate lyase CG8322-PA [Drosophila
  misc_feature (1)..(356): Homolog of NCBI NO: 9229902 NR Description: ATP citrate-lyase [Ciona intestinalis]
  misc_feature (1)..(359): Homolog of NCBI NO: 15217510 NR Description: expressed protein [Arabidopsis thaliana]
  misc_feature (1)..(363): Homolog of NCBI NO: 15919089 NR Description: ATP citrate lyase b-subunit [Lupinus albus]
  misc_feature (1)..(363): Homolog of NCBI NO: 19698853 NR Description: similar to ATP-citrate-lyase [Arabidopsis
  misc_feature (1)..(363): Homolog of NCBI NO: 15219818 NR Description: ATP citrate-lyase -related [Arabidopsis thaliana]
  misc_feature (1)..(363): Homolog of NCBI NO: 21593129 NR Description: ATP citrate-lyase, putative [Arabidopsis thaliana]
  misc_feature (1)..(363): Homolog of NCBI NO: 15220186 NR Description: ATP citrate-lyase -related [Arabidopsis thaliana]
MLFGKRGKSGLVALKLDFADVATFVKERLGKEVEMSGCKGPITTFIVEPFVPHNEEYYLNVVSDRLGCSISFSECGGIEIEENWDKVKTIFLPTGASLTPEICAPLVATLPLEIKAEIEEFIKVIFTLFQDLDFTFLEMNPFTLVDGSPYPLDMRGELDDTAAFKNFKKWGDIEFPLPFGRVMSPTESFIHGLDEKTSASLKFTVLNPKGRIWTMVAGGGASVIYADTVGDLGYASELGNYAEYSGAPKEDEVLQYARVVIDCATANPDGKSRALVIGGGIANFTDVAATFNGIIRALKEKEAKLKAARMHIFVRRGGPNYQKGLAKMRALGDDIGVPIEVYGPEATMTGICKEAIQYITAAA

SEQ ID NO: 23458 - protein, 329 aa, Arabidopsis thaliana
  peptide (1)..(329): Ceres Seq. ID no. 13497470
  misc_feature (1)..(105): Pfam Name: ATP-grasp domain Pfam Description: ATP-grasp domain
  misc_feature (1)..(317): Homolog of NCBI NO: 8392839 NR Description: ATP citrate lyase [Rattus norvegicus]
  misc_feature (1)..(322): Homolog of NCBI NO: 28372804 NR Description: LD21334p [Drosophila melanogaster]
  misc_feature (1)..(322): Homolog of NCBI NO: 24653988 NR Description: ATP citrate lyase CG8322-PA [Drosophila
  misc_feature (1)..(322): Homolog of NCBI NO: 9229902 NR Description: ATP citrate-lyase [Ciona intestinalis]
  misc_feature (1)..(325): Homolog of NCBI NO: 15217510 NR Description: expressed protein [Arabidopsis thaliana]
  misc_feature (1)..(329): Homolog of NCBI NO: 15919089 NR Description: ATP citrate lyase b-subunit [Lupinus albus]
  misc_feature (1)..(329): Homolog of NCBI NO: 19698853 NR Description: similar to ATP-citrate-lyase [Arabidopsis
  misc_feature (1)..(329): Homolog of NCBI NO: 15219818 NR Description: ATP citrate-lyase -related [Arabidopsis thaliana]
  misc_feature (1)..(329): Homolog of NCBI NO: 21593129 NR Description: ATP citrate-lyase, putative [Arabidopsis thaliana]
  misc_feature (1)..(329): Homolog of NCBI NO: 15220186 NR Description: ATP citrate-lyase -related [Arabidopsis thaliana]
MSGCKGPITTFIVEPFVPHNEEYYLNVVSDRLGCSISFSECGGIEIEENWDKVKTIFLPTGASLTPEICAPLVATLPLEIKAEIEEFIKVIFTLFQDLDFTFLEMNPFTLVDGSPYPLDMRGELDDTAAFKNFKKWGDIEFPLPFGRVMSPTESFIHGLDEKTSASLKFTVLNPKGRIWTMVAGGGASVIYADTVGDLGYASELGNYAEYSGAPKEDEVLQYARVVIDCATANPDGKSRALVIGGGIANFTDVAATFNGIIRALKEKEAKLKAARMHIFVRRGGPNYQKGLAKMRALGDDIGVPIEVYGPEATMTGICKEAIQYITAAA

SEQ ID NO: 23459 - DNA, 1234 bp, Arabidopsis thaliana
  misc_feature (1)..(1234): Ceres Seq. ID no. 12337502
  misc_feature: MA Experiment ID: 108501 Result: Down-regulated in Transcription
  misc_feature: MA Experiment 108501 PARAMETER Experiment Name: At_ap2_floral_buds_cDNA_P Parameter: Plant Line Value: ap2 (Ler.)
  misc_feature: MA Experiment 108501 PARAMETER Experiment Name: At_ap2_floral_buds_cDNA_P Parameter: Tissue Value: Closed Flower
  misc_feature: MA Experiment ID: 108579 Result: Down-regulated in Transcription
  misc_feature: MA Experiment 108579 PARAMETER Experiment Name: At_4deg_Cold_cDNA_P Parameter: Temperature (deg C) Value: 4 vs. 22
  misc_feature: MA Experiment 108579 PARAMETER Experiment Name: At_4deg_Cold_cDNA_P Parameter: Timepoint (hr) Value: 6
  misc_feature: MA Experiment 108579 PARAMETER Experiment Name: At_4deg_Cold_cDNA_P Parameter: Tissue Value: Aerial
  misc_feature: MA Experiment ID: 108595 Result: Up-regulated in Transcription
  misc_feature: MA Experiment 108595 PARAMETER Experiment Name: At_Ler-pi_Ovule_cDNA_P Parameter: Plant Line Value: null
  misc_feature: MA Experiment ID: 20000030 Result: Down-regulated in Transcription
  misc_feature: MA Experiment 20000030 PARAMETER Experiment Name: At_CS6630_Roots_cDNA_P Parameter: Plant Line Value: CS6630 vs. WS
  misc_feature: MA Experiment 20000030 PARAMETER Experiment Name: At_CS6630_Roots_cDNA_P Parameter: Tissue Value: Roots
  misc_feature: MA Experiment ID: 20000089 Result: Up-regulated in Transcription
acttccggcggagaacgatgtctctgataccggaaagggcaaagcttcacatagctatggtggtgtttcagacaggctacgctggtaatcacgtgatcatgagatatgctctaaacttaggagtaagcaagctcgtcttcccactttaccgcaccatcgtcgctttctctgttcttgctccctctgcttacttccttgaaaaaaaagaaagaccggcgatgaaaatcagtttcctgattcaattcttccttcttggactcgttggaataacgttaaaccaaggattttacatctttggattggacaatacctcaccaacattcgcatcagcaactgaaaatgttgttcctgctgtttcattcctcatggcagcgttgctcggaatagagaaggtggaatggaagaggaaagatggtatagccaaagtggtggggacaattgtatctgtcgcaggctctttggttataacactctataaaggaccaaccatttaccaaccgagtctgaatatagtgaaccaaactattaaacctgaagaagcagaggaagaaaacaagaactggacgttgggatgtctctgtttgatgggtcactgtttatgttggtcaagttggattgtgttacaatcaccattgcttaaaaagtacccagctcgcttctccttcgtctcctattcttgctttttcgcagtgatacagttctttggaatttcggcttatttcgagagagatctagagaggtggaagataatatcaggaggcgaattatacgcgttactctacactggtttagttggttcagcaatggtgtttgcaatacaaatatatgtagtggaaagaggaggacctctgtttgtatcagcgtatttgcctcttcaaactttgattgctgctgttttagctactttagctcttggtgaacacttttaccttggaggattgataggtgcaatactaatcatgagtggactatacttagttgtgatgggaaagagttgggagaatcaagctctttgccaacaacaacaacacatgatttcttcagcagcatcagattttggtgatgaagaagactaccataataataaaccaagatctcctattagtcaaccattaatttcttcctaaattttgttagatcctatttatgtcttaaattcctagttcctactctcttcctcattaaaatcgaaatggacccggttgacgaaatagagataaaaataaatttggtt

SEQ ID NO: 23460 - protein, 374 aa, Arabidopsis thaliana
  peptide (1)..(374): Ceres Seq. ID no. 12337503
  misc_feature (24)..(157): Pfam Name: Integral membrane protein DUF6 Pfam Description: Integral membrane protein DUF6
  misc_feature (3)..(88): Homolog of NCBI NO: 25404978 NR Description: protein F10A5.28 [imported] - Arabidopsis
  misc_feature (149)..(372): Homolog of NCBI NO: 25404978 NR Description: protein F10A5.28 [imported] - Arabidopsis
  misc_feature (8)..(342): Homolog of NCBI NO: 15229596 NR Description: integral membrane protein, putative; protein id:
  misc_feature (8)..(342): Homolog of NCBI NO: 9294076 NR Description: nodulin-like protein [Arabidopsis thaliana]
  misc_feature (7)..(336): Homolog of NCBI NO: 34895316 NR Description: putative nodulin [Oryza sativa (japonica
  misc_feature (3)..(372): Homolog of NCBI NO: 18410867 NR Description: nodulin-like protein
  misc_feature (230)..(374): Homolog of NCBI NO: 11358354 NR Description: hypothetical protein T4D2.140 - Arabidopsis
  misc_feature (6)..(195): Homolog of NCBI NO: 11358354 NR Description: hypothetical protein T4D2.140 - Arabidopsis
  misc_feature (19)..(374): Homolog of NCBI NO: 21593130 NR Description: nodulin-like protein [Arabidopsis thaliana]
  misc_feature (6)..(374): Homolog of NCBI NO: 18409794 NR Description: putative protein
FRRRTMSLIPERAKLHIAMVVFQTGYAGNHVIMRYALNLGVSKLVFPLYRTIVAFSVLAPSAYFLEKKERPAMKISFLIQFFLLGLVGITLNQGFYIFGLDNTSPTFASATENVVPAVSFLMAALLGIEKVEWKRKDGIAKVVGTIVSVAGSLVITLYKGPTIYQPSLNIVNQTIKPEEAEEENKNWTLGCLCLMGHCLCWSSWIVLQSPLLKKYPARFSFVSYSCFFAVIQFFGISAYFERDLERWKIISGGELYALLYTGLVGSAMVFAIQIYVVERGGPLFVSAYLPLQTLIAAVLATLALGEHFYLGGLIGAILIMSGLYLVVMGKSWENQALCQQQQHMISSAASDFGDEEDYHNNKPRSPISQPLISS

SEQ ID NO: 23461 - protein, 369 aa, Arabidopsis thaliana
  peptide (1)..(369): Ceres Seq. ID no. 12337504
  misc_feature (19)..(152): Pfam Name: Integral membrane protein DUF6 Pfam Description: Integral membrane protein DUF6
  misc_feature (1)..(83): Homolog of NCBI NO: 25404978 NR Description: protein F10A5.28 [imported] - Arabidopsis
  misc_feature (144)..(367): Homolog of NCBI NO: 25404978 NR Description: protein F10A5.28 [imported] - Arabidopsis
  misc_feature (3)..(337): Homolog of NCBI NO: 15229596 NR Description: integral membrane protein, putative; protein id:
  misc_feature (3)..(337): Homolog of NCBI NO: 9294076 NR Description: nodulin-like protein [Arabidopsis thaliana]
  misc_feature (2)..(331): Homolog of NCBI NO: 34895316 NR Description: putative nodulin [Oryza sativa (japonica
  misc_feature (1)..(367): Homolog of NCBI NO: 18410867 NR Description: nodulin-like protein
  misc_feature (225)..(369): Homolog of NCBI NO: 11358354 NR Description: hypothetical protein T4D2.140 - Arabidopsis
  misc_feature (1)..(190): Homolog of NCBI NO: 11358354 NR Description: hypothetical protein T4D2.140 - Arabidopsis
  misc_feature (14)..(369): Homolog of NCBI NO: 21593130 NR Description: nodulin-like protein [Arabidopsis thaliana]
  misc_feature (1)..(369): Homolog of NCBI NO: 18409794 NR Description: putative protein
MSLIPERAKLHIAMVVFQTGYAGNHVIMRYALNLGVSKLVFPLYRTIVAFSVLAPSAYFLEKKERPAMKISFLIQFFLLGLVGITLNQGFYIFGLDNTSPTFASATENVVPAVSFLMAALLGIEKVEWKRKDGIAKVVGTIVSVAGSLVITLYKGPTIYQPSLNIVNQTIKPEEAEEENKNWTLGCLCLMGHCLCWSSWIVLQSPLLKKYPARFSFVSYSCFFAVIQFFGISAYFERDLERWKIISGGELYALLYTGLVGSAMVFAIQIYVVERGGPLFVSAYLPLQTLIAAVLATLALGEHFYLGGLIGAILIMSGLYLVVMGKSWENQALCQQQQHMISSAASDFGDEEDYHNNKPRSPISQPLISS

SEQ ID NO: 23462 - protein, 356 aa, Arabidopsis thaliana
  peptide (1)..(356): Ceres Seq. ID no. 12337505
  misc_feature (6)..(139): Pfam Name: Integral membrane protein DUF6 Pfam Description: Integral membrane protein DUF6
  misc_feature (1)..(70): Homolog of NCBI NO: 25404978 NR Description: protein F10A5.28 [imported] - Arabidopsis
  misc_feature (131)..(354): Homolog of NCBI NO: 25404978 NR Description: protein F10A5.28 [imported] - Arabidopsis
  misc_feature (1)..(324): Homolog of NCBI NO: 15229596 NR Description: integral membrane protein, putative; protein id:
  misc_feature (1)..(324): Homolog of NCBI NO: 9294076 NR Description: nodulin-like protein [Arabidopsis thaliana]
  misc_feature (1)..(318): Homolog of NCBI NO: 34895316 NR Description: putative nodulin [Oryza sativa (japonica
  misc_feature (1)..(354): Homolog of NCBI NO: 18410867 NR Description: nodulin-like protein
  misc_feature (212)..(356): Homolog of NCBI NO: 11358354 NR Description: hypothetical protein T4D2.140 - Arabidopsis
  misc_feature (1)..(177): Homolog of NCBI NO: 11358354 NR Description: hypothetical protein T4D2.140 - Arabidopsis
  misc_feature (1)..(356): Homolog of NCBI NO: 21593130 NR Description: nodulin-like protein [Arabidopsis thaliana]
  misc_feature (1)..(356): Homolog of NCBI NO: 18409794 NR Description: putative protein
MVVFQTGYAGNHVIMRYALNLGVSKLVFPLYRTIVAFSVLAPSAYFLEKKERPAMKISFLIQFFLLGLVGITLNQGFYIFGLDNTSPTFASATENVVPAVSFLMAALLGIEKVEWKRKDGIAKVVGTIVSVAGSLVITLYKGPTIYQPSLNIVNQTIKPEEAEEENKNWTLGCLCLMGHCLCWSSWIVLQSPLLKKYPARFSFVSYSCFFAVIQFFGISAYFERDLERWKIISGGELYALLYTGLVGSAMVFAIQIYVVERGGPLFVSAYLPLQTLIAAVLATLALGEHFYLGGLIGAILIMSGLYLVVMGKSWENQALCQQQQHMISSAASDFGDEEDYHNNKPRSPISQPLISS

SEQ ID NO: 23463 - DNA, 1263 bp, Arabidopsis thaliana
  misc_feature (1)..(1263): Ceres Seq. ID no. 12396398
  misc_feature: MA Experiment ID: 108462 Result: Down-regulated in Transcription
  misc_feature: MA Experiment 108462 PARAMETER Experiment Name: At_Germinating_Seeds_cDNA_P Parameter: Age (day) Value: 2 vs. 0
  misc_feature: MA Experiment 108462 PARAMETER Experiment Name: At_Germinating_Seeds_cDNA_P Parameter: Tissue Value: Germinating Seeds
  misc_feature: MA Experiment ID: 108488 Result: Down-regulated in Transcription
  misc_feature: MA Experiment ID: 108585 Result: Up-regulated in Transcription
  misc_feature: MA Experiment 108585 PARAMETER Experiment Name: At_5mM_NaNP_cDNA_P Parameter: Timepoint (hr) Value: 6
  misc_feature: MA Experiment 108585 PARAMETER Experiment Name: At_5mM_NaNP_cDNA_P Parameter: Tissue Value: Aerial
  misc_feature: MA Experiment 108585 PARAMETER Experiment Name: At_5mM_NaNP_cDNA_P Parameter: Treatment Value: null
  misc_feature: MA Experiment ID: 20000117 Result: Up-regulated in Transcription
  misc_feature: MA Experiment 20000117 PARAMETER Experiment Name: At_100uM_ABA_Mutants_cDNA_P Parameter: Plant Line Value: Columbia
  misc_feature: MA Experiment 20000117 PARAMETER Experiment Name: At_100uM_ABA_Mutants_cDNA_P Parameter: Timepoint (hr) Value: 6
  misc_feature: MA Experiment 20000117 PARAMETER Experiment Name: At_100uM_ABA_Mutants_cDNA_P Parameter: Tissue Value: Aerial
  misc_feature: MA Experiment 20000117 PARAMETER Experiment Name: At_100uM_ABA_Mutants_cDNA_P Parameter: Treatment Value: 100uM ABA vs. No Treatment
  misc_feature: MA Experiment ID: 20000144 Result: Up-regulated in Transcription
  misc_feature: MA Experiment 20000144 PARAMETER Experiment Name: At_42deg_Heat_cDNA_P Parameter: Temperature (deg C) Value: 42 vs. 22
  misc_feature: MA Experiment 20000144 PARAMETER Experiment Name: At_42deg_Heat_cDNA_P Parameter: Timepoint (hr) Value: 1
  misc_feature: MA Experiment 20000144 PARAMETER Experiment Name: At_42deg_Heat_cDNA_P Parameter: Tissue Value: Aerial
  misc_feature: MA Experiment ID: 20000437 Result: Up-regulated in Transcription
  misc_feature: MA Experiment 20000437 PARAMETER Experiment Name: At_Drought_P Parameter: Age (day) Value: 8
  misc_feature: MA Experiment 20000437 PARAMETER Experiment Name: At_Drought_P Parameter: Organism Value: A. thaliana
  misc_feature: MA Experiment 20000437 PARAMETER Experiment Name: At_Drought_P Parameter: Plant Line Value: WS
  misc_feature: MA Experiment 20000437 PARAMETER Experiment Name: At_Drought_P Parameter: Timepoint (hr) Value: 24
  misc_feature: MA Experiment 20000437 PARAMETER Experiment Name: At_Drought_P Parameter: Tissue Value: Whole Plant
  misc_feature: MA Experiment 20000437 PARAMETER Experiment Name: At_Drought_P Parameter: Treatment Value: Drought vs. No Drought
  misc_feature: MA Experiment ID: 20000439 Result: Up-regulated in Transcription
  misc_feature: MA Experiment 20000439 PARAMETER Experiment Name: At_Roots__P Parameter: Age (day) Value: 14 vs. 21
  misc_feature: MA Experiment 20000439 PARAMETER Experiment Name: At_Roots__P Parameter: Organism Value: A. thaliana
  misc_feature: MA Experiment 20000439 PARAMETER Experiment Name: At_Roots__P Parameter: Tissue Value: Roots vs. Whole Plant
  misc_feature: MA Experiment ID: 20001905 Result: Up-regulated in Transcription
  misc_feature: MA Experiment 20001905 PARAMETER Experiment Name: At_Drought_Reproduction_P Parameter: Age (day) Value: 40
  misc_feature: MA Experiment 20001905 PARAMETER Experiment Name: At_Drought_Reproduction_P Parameter: Organism Value: A. thaliana
  misc_feature: MA Experiment 20001905 PARAMETER Experiment Name: At_Drought_Reproduction_P Parameter: Plant Line Value: WS
  misc_feature: MA Experiment 20001905 PARAMETER Experiment Name: At_Drought_Reproduction_P Parameter: Timepoint (day) Value: 10
  misc_feature: MA Experiment 20001905 PARAMETER Experiment Name: At_Drought_Reproduction_P Parameter: Tissue Value: Rosettes
  misc_feature: MA Experiment 20001905 PARAMETER Experiment Name: At_Drought_Reproduction_P Parameter: Treatment Value: Drought vs. No Drought
  misc_feature: MA Experiment ID: 20001911 Result: Up-regulated in Transcription
  misc_feature: MA Experiment 20001911 PARAMETER Experiment Name: At_Drought_Reproduction_P Parameter: Age (day) Value: 40
  misc_feature: MA Experiment 20001911 PARAMETER Experiment Name: At_Drought_Reproduction_P Parameter: Organism Value: A. thaliana
  misc_feature: MA Experiment 20001911 PARAMETER Experiment Name: At_Drought_Reproduction_P Parameter: Plant Line Value: WS
  misc_feature: MA Experiment 20001911 PARAMETER Experiment Name: At_Drought_Reproduction_P Parameter: Timepoint (day) Value: 10
  misc_feature: MA Experiment 20001911 PARAMETER Experiment Name: At_Drought_Reproduction_P Parameter: Tissue Value: Flowers
  misc_feature: MA Experiment 20001911 PARAMETER Experiment Name: At_Drought_Reproduction_P Parameter: Treatment Value: Drought vs. No Drought
atcatcttcgtcttctccattatctctctacccaaatctggcagagaaaaacaaaagaagaagaagaagaaaaactttcgatatggataagagctgtaactcctccggcgattcctccgccgtatccgcctctgcaacgagtagtaccggtaacaatacaacgaacagagatcattacctgagacaactcaataagctgtctcataagatatcaaaaccgacgaactcttcctcctccgtctccgtcgcgaatcgtgaaattgatcttccacctcctccaccgctgcaaatcaatcaagggaatctccatcaacatcaacctcctgtttacaatatcaacaagaacgatttcagagatgttgttcagaaactaaccggttcacctgcacatgaacggatctctgctccgccgcaacaaccgattcatcaccctaaacctcaacagagttcgcgtctacataggatccgtcctcctcctttggttcacgttatcaatcgtcctcctggtttgctaaatgacgcacttatccctcaaggttctcatcacatgaatcaaaactggactggcgttggatttaaccttcgaccaacggcgccgctttctcctctcccgccgttaccaccggttcacgcggcggcggaatcaccggtctcttcgtacatgcggtatctccagaactcgatgttcgcaatcgattcgaatcggaaagagttctctggattatctccgttagctcctttggtctcacctcgttggtaccaacaacaggaaaacgctccaccatcgcagcataacagttttccaccaccacatcctcctcctccttcctctgctgtttcgcagacggtgccgacatcgattccggcgcctccactgtttggatgttcaagttcgcctaaatctccgtacggattactctcaccgagcatacttttatcgccatcgtcaggtcaattagggttccctgtatctccgacgacggtgccgcttcctagccctaaatacaaaggtcattgatcagaaaatcggaaacccttgtcggtcaaagtgagaaaacgtcgtcgttttgaccgtcgcgacaaaattccctttgttctttttgtacatcattagtggagagtggtgggatcatttgtttttttttttgttaattaactcaaagattacttaaatccgtttttttttttactttcttttgttttcatggtttgttcatgttagaaacaaagaagactaggaaaaagaaaggaatacacttttgc

SEQ ID NO: 23464 - protein, 338 aa, Arabidopsis thaliana
  peptide (1)..(338): Ceres Seq. ID no. 12396399
  misc_feature (103)..(133): Pfam Name: VQ motif Pfam Description: VQ motif
  misc_feature (93)..(168): Homolog of NCBI NO: 21554391 NR Description: unknown [Arabidopsis thaliana]
  misc_feature (93)..(168): Homolog of NCBI NO: 15237506 NR Description: expressed protein
  misc_feature (100)..(332): Homolog of NCBI NO: 37537138 NR Description: putative hydroxyproline-rich glycoprotein
  misc_feature (104)..(335): Homolog of NCBI NO: 15226932 NR Description: hypothetical protein; protein id: At2g35230.1
  misc_feature (28)..(338): Homolog of NCBI NO: 21593131 NR Description: unknown [Arabidopsis thaliana]
  misc_feature (28)..(338): Homolog of NCBI NO: 18411903 NR Description: expressed protein
SSSSSPLSLYPNLAEKNKRRRRRKTFDMDKSCNSSGDSSAVSASATSSTGNNTTNRDHYLRQLNKLSHKISKPTNSSSSVSVANREIDLPPPPPLQINQGNLHQHQPPVYNINKNDFRDVVQKLTGSPAHERISAPPQQPIHHPKPQQSSRLHRIRPPPLVHVINRPPGLLNDALIPQGSHHMNQNWTGVGFNLRPTAPLSPLPPLPPVHAAAESPVSSYMRYLQNSMFAIDSNRKEFSGLSPLAPLVSPRWYQQQENAPPSQHNSFPPPHPPPPSSAVSQTVPTSIPAPPLFGCSSSPKSPYGLLSPSILLSPSSGQLGFPVSPTTVPLPSPKYKGH

SEQ ID NO: 23465 - protein, 311 aa, Arabidopsis thaliana
  peptide (1)..(311): Ceres Seq. ID no. 12396400
  misc_feature (76)..(106): Pfam Name: VQ motif Pfam Description: VQ motif
  misc_feature (66)..(141): Homolog of NCBI NO: 21554391 NR Description: unknown [Arabidopsis thaliana]
  misc_feature (66)..(141): Homolog of NCBI NO: 15237506 NR Description: expressed protein
  misc_feature (73)..(305): Homolog of NCBI NO: 37537138 NR Description: putative hydroxyproline-rich glycoprotein
  misc_feature (77)..(308): Homolog of NCBI NO: 15226932 NR Description: hypothetical protein; protein id: At2g35230.1
  misc_feature (1)..(311): Homolog of NCBI NO: 21593131 NR Description: unknown [Arabidopsis thaliana]
  misc_feature (1)..(311): Homolog of NCBI NO: 18411903 NR Description: expressed protein
MDKSCNSSGDSSAVSASATSSTGNNTTNRDHYLRQLNKLSHKISKPTNSSSSVSVANREIDLPPPPPLQINQGNLHQHQPPVYNINKNDFRDVVQKLTGSPAHERISAPPQQPIHHPKPQQSSRLHRIRPPPLVHVINRPPGLLNDALIPQGSHHMNQNWTGVGFNLRPTAPLSPLPPLPPVHAAAESPVSSYMRYLQNSMFAIDSNRKEFSGLSPLAPLVSPRWYQQQENAPPSQHNSFPPPHPPPPSSAVSQTVPTSIPAPPLFGCSSSPKSPYGLLSPSILLSPSSGQLGFPVSPTTVPLPSPKYKGH

SEQ ID NO: 23466 - DNA, 1301 bp, Arabidopsis thaliana
  misc_feature (1)..(1301): Ceres Seq. ID no. 12338490
  misc_feature: MA Experiment ID: 108462 Result: Down-regulated in Transcription
  misc_feature: MA Experiment 108462 PARAMETER Experiment Name: At_Germinating_Seeds_cDNA_P Parameter: Age (day) Value: 2 vs. 0
  misc_feature: MA Experiment 108462 PARAMETER Experiment Name: At_Germinating_Seeds_cDNA_P Parameter: Tissue Value: Germinating Seeds
  misc_feature: MA Experiment ID: 108464 Result: Down-regulated in Transcription
  misc_feature: MA Experiment 108464 PARAMETER Experiment Name: At_Germinating_Seeds_cDNA_P Parameter: Age (day) Value: 4 vs. 0
  misc_feature: MA Experiment 108464 PARAMETER Experiment Name: At_Germinating_Seeds_cDNA_P Parameter: Tissue Value: Germinating Seeds
  misc_feature: MA Experiment ID: 108561 Result: Down-regulated in Transcription
  misc_feature: MA Experiment 108561 PARAMETER Experiment Name: At_100uM_ABA_cDNA_P Parameter: Timepoint (hr) Value: 6
  misc_feature: MA Experiment 108561 PARAMETER Experiment Name: At_100uM_ABA_cDNA_P Parameter: Tissue Value: Aerial
  misc_feature: MA Experiment 108561 PARAMETER Experiment Name: At_100uM_ABA_cDNA_P Parameter: Treatment Value: 100uM ABA vs. No Treatment
  misc_feature: MA Experiment ID: 108572 Result: Down-regulated in Transcription
  misc_feature: MA Experiment 108572 PARAMETER Experiment Name: At_Drought_cDNA_P Parameter: Timepoint (hr) Value: 1
  misc_feature: MA Experiment 108572 PARAMETER Experiment Name: At_Drought_cDNA_P Parameter: Tissue Value: Aerial
  misc_feature: MA Experiment 108572 PARAMETER Experiment Name: At_Drought_cDNA_P Parameter: Treatment Value: Drought vs. No Drought
  misc_feature: MA Experiment ID: 108576 Result: Down-regulated in Transcription
  misc_feature: MA Experiment 108576 PARAMETER Experiment Name: At_42deg_Heat_cDNA_P Parameter: Temperature (deg C) Value: 42 vs. 22
  misc_feature: MA Experiment 108576 PARAMETER Experiment Name: At_42deg_Heat_cDNA_P Parameter: Timepoint (hr) Value: 1
  misc_feature: MA Experiment 108576 PARAMETER Experiment Name: At_42deg_Heat_cDNA_P Parameter: Tissue Value: Aerial
  misc_feature: MA Experiment ID: 108579 Result: Down-regulated in Transcription
  misc_feature: MA Experiment 108579 PARAMETER Experiment Name: At_4deg_Cold_cDNA_P Parameter: Temperature (deg C) Value: 4 vs. 22
  misc_feature: MA Experiment 108579 PARAMETER Experiment Name: At_4deg_Cold_cDNA_P Parameter: Timepoint (hr) Value: 6
  misc_feature: MA Experiment 108579 PARAMETER Experiment Name: At_4deg_Cold_cDNA_P Parameter: Tissue Value: Aerial
  misc_feature: MA Experiment ID: 108585 Result: Down-regulated in Transcription
  misc_feature: MA Experiment 108585 PARAMETER Experiment Name: At_5mM_NaNP_cDNA_P Parameter: Timepoint (hr) Value: 6
  misc_feature: MA Experiment 108585 PARAMETER Experiment Name: At_5mM_NaNP_cDNA_P Parameter: Tissue Value: Aerial
  misc_feature: MA Experiment 108585 PARAMETER Experiment Name: At_5mM_NaNP_cDNA_P Parameter: Treatment Value: null
  misc_feature: MA Experiment ID: 108595 Result: Down-regulated in Transcription
  misc_feature: MA Experiment 108595 PARAMETER Experiment Name: At_Ler-pi_Ovule_cDNA_P Parameter: Plant Line Value: null
  misc_feature: MA Experiment ID: 108607 Result: Down-regulated in Transcription
  misc_feature: MA Experiment 108607 PARAMETER Experiment Name: At_100uM_ABA_cDNA_P Parameter: Timepoint (hr) Value: 4
  misc_feature: MA Experiment 108607 PARAMETER Experiment Name: At_100uM_ABA_cDNA_P Parameter: Tissue Value: Aerial
  misc_feature: MA Experiment 108607 PARAMETER Experiment Name: At_100uM_ABA_cDNA_P Parameter: Treatment Value: 100uM ABA vs. No Treatment
  misc_feature: MA Experiment ID: 20000071 Result: Down-regulated in Transcription
  misc_feature: MA Experiment 20000071 PARAMETER Experiment Name: At_100uM_ABA_Mutants_cDNA_P Parameter: Plant Line Value: CS8104
  misc_feature: MA Experiment 20000071 PARAMETER Experiment Name: At_100uM_ABA_Mutants_cDNA_P Parameter: Timepoint (hr) Value: 6
  misc_feature: MA Experiment 20000071 PARAMETER Experiment Name: At_100uM_ABA_Mutants_cDNA_P Parameter: Tissue Value: Aerial
  misc_feature: MA Experiment 20000071 PARAMETER Experiment Name: At_100uM_ABA_Mutants_cDNA_P Parameter: Treatment Value: 100uM ABA vs. No Treatment
  misc_feature: MA Experiment ID: 20000112 Result: Down-regulated in Transcription
  misc_feature: MA Experiment 20000112 PARAMETER Experiment Name: At_42deg_Heat_cDNA_P Parameter: Temperature (deg C) Value: 42 vs. 22
  misc_feature: MA Experiment 20000112 PARAMETER Experiment Name: At_42deg_Heat_cDNA_P Parameter: Timepoint (hr) Value: 2
  misc_feature: MA Experiment 20000112 PARAMETER Experiment Name: At_42deg_Heat_cDNA_P Parameter: Tissue Value: Aerial
  misc_feature: MA Experiment ID: 20000117 Result: Down-regulated in Transcription
  misc_feature: MA Experiment 20000117 PARAMETER Experiment Name: At_100uM_ABA_Mutants_cDNA_P Parameter: Plant Line Value: Columbia
  misc_feature: MA Experiment 20000117 PARAMETER Experiment Name: At_100uM_ABA_Mutants_cDNA_P Parameter: Timepoint (hr) Value: 6
  misc_feature: MA Experiment 20000117 PARAMETER Experiment Name: At_100uM_ABA_Mutants_cDNA_P Parameter: Tissue Value: Aerial
  misc_feature: MA Experiment 20000117 PARAMETER Experiment Name: At_100uM_ABA_Mutants_cDNA_P Parameter: Treatment Value: 100uM ABA vs. No Treatment
  misc_feature: MA Experiment ID: 20000169 Result: Down-regulated in Transcription
  misc_feature: MA Experiment 20000169 PARAMETER Experiment Name: At_100uM_ABA_P Parameter: Age (day) Value: 14
  misc_feature: MA Experiment 20000169 PARAMETER Experiment Name: At_100uM_ABA_P Parameter: Organism Value: A. thaliana
  misc_feature: MA Experiment 20000169 PARAMETER Experiment Name: At_100uM_ABA_P Parameter: Plant Line Value: WS
  misc_feature: MA Experiment 20000169 PARAMETER Experiment Name: At_100uM_ABA_P Parameter: Timepoint (hr) Value: 6
  misc_feature: MA Experiment 20000169 PARAMETER Experiment Name: At_100uM_ABA_P Parameter: Tissue Value: Aerial
  misc_feature: MA Experiment 20000169 PARAMETER Experiment Name: At_100uM_ABA_P Parameter: Treatment Value: 100uM ABA vs. No Treatment
  misc_feature: MA Experiment ID: 20000180 Result: Down-regulated in Transcription
  misc_feature: MA Experiment 20000180 PARAMETER Experiment Name: At_Germinating_Seeds_P Parameter: Age (hr) Value: 24 vs. 0
  misc_feature: MA Experiment 20000180 PARAMETER Experiment Name: At_Germinating_Seeds_P Parameter: Tissue Value: Germinating Seeds
  misc_feature: MA Experiment ID: 20000184 Result: Up-regulated in Transcription
  misc_feature: MA Experiment 20000184 PARAMETER Experiment Name: At_Shoots__P Parameter: Age (day) Value: 7
  misc_feature: MA Experiment 20000184 PARAMETER Experiment Name: At_Shoots__P Parameter: Tissue Value: Shoots vs. Whole Plant
  misc_feature: MA Experiment ID: 20000267 Result: Down-regulated in Transcription
  misc_feature: MA Experiment 20000267 PARAMETER Experiment Name: At_Drought_P Parameter: Age (day) Value: 7
  misc_feature: MA Experiment 20000267 PARAMETER Experiment Name: At_Drought_P Parameter: Organism Value: A. thaliana
  misc_feature: MA Experiment 20000267 PARAMETER Experiment Name: At_Drought_P Parameter: Plant Line Value: WS
  misc_feature: MA Experiment 20000267 PARAMETER Experiment Name: At_Drought_P Parameter: Timepoint (hr) Value: 6
  misc_feature: MA Experiment 20000267 PARAMETER Experiment Name: At_Drought_P Parameter: Tissue Value: Whole Plant
  misc_feature: MA Experiment 20000267 PARAMETER Experiment Name: At_Drought_P Parameter: Treatment Value: Drought vs. No Drought
  misc_feature: MA Experiment ID: 20000286 Result: Up-regulated in Transcription
  misc_feature: MA Experiment 20000286 PARAMETER Experiment Name: At_Open_Flower_P Parameter: Age (day) Value: 21
  misc_feature: MA Experiment 20000286 PARAMETER Experiment Name: At_Open_Flower_P Parameter: Plant Line Value: WS
  misc_feature: MA Experiment 20000286 PARAMETER Experiment Name: At_Open_Flower_P Parameter: Tissue Value: Half Open vs. Whole Plant
  misc_feature: MA Experiment ID: 20000436 Result: Down-regulated in Transcription
  misc_feature: MA Experiment 20000436 PARAMETER Experiment Name: At_Drought_P Parameter: Age (day) Value: 7
  misc_feature: MA Experiment 20000436 PARAMETER Experiment Name: At_Drought_P Parameter: Organism Value: A. thaliana
  misc_feature: MA Experiment 20000436 PARAMETER Experiment Name: At_Drought_P Parameter: Plant Line Value: WS
  misc_feature: MA Experiment 20000436 PARAMETER Experiment Name: At_Drought_P Parameter: Timepoint (hr) Value: 12
  misc_feature: MA Experiment 20000436 PARAMETER Experiment Name: At_Drought_P Parameter: Tissue Value: Whole Plant
  misc_feature: MA Experiment 20000436 PARAMETER Experiment Name: At_Drought_P Parameter: Treatment Value: Drought vs. No Drought
  misc_feature: MA Experiment ID: 20000437 Result: Down-regulated in Transcription
  misc_feature: MA Experiment 20000437 PARAMETER Experiment Name: At_Drought_P Parameter: Age (day) Value: 8
  misc_feature: MA Experiment 20000437 PARAMETER Experiment Name: At_Drought_P Parameter: Organism Value: A. thaliana
  misc_feature: MA Experiment 20000437 PARAMETER Experiment Name: At_Drought_P Parameter: Plant Line Value: WS
  misc_feature: MA Experiment 20000437 PARAMETER Experiment Name: At_Drought_P Parameter: Timepoint (hr) Value: 24
  misc_feature: MA Experiment 20000437 PARAMETER Experiment Name: At_Drought_P Parameter: Tissue Value: Whole Plant
  misc_feature: MA Experiment 20000437 PARAMETER Experiment Name: At_Drought_P Parameter: Treatment Value: Drought vs. No Drought
  misc_feature: MA Experiment ID: 20000438 Result: Up-regulated in Transcription
  misc_feature: MA Experiment 20000438 PARAMETER Experiment Name: At_Shoots__P Parameter: Age (day) Value: 14
  misc_feature: MA Experiment 20000438 PARAMETER Experiment Name: At_Shoots__P Parameter: Tissue Value: Shoots vs. Whole Plant
  misc_feature: MA Experiment ID: 20000451 Result: Up-regulated in Transcription
  misc_feature: MA Experiment 20000451 PARAMETER Experiment Name: At_CS6879_Shoots-Roots_P Parameter: Age (day) Value: 14
  misc_feature: MA Experiment 20000451 PARAMETER Experiment Name: At_CS6879_Shoots-Roots_P Parameter: Organism Value: A. thaliana
  misc_feature: MA Experiment 20000451 PARAMETER Experiment Name: At_CS6879_Shoots-Roots_P Parameter: Plant Line Value: CS6879 vs. WS
  misc_feature: MA Experiment 20000451 PARAMETER Experiment Name: At_CS6879_Shoots-Roots_P Parameter: Tissue Value: Roots
  misc_feature: MA Experiment ID: 20000453 Result: Down-regulated in Transcription
  misc_feature: MA Experiment 20000453 PARAMETER Experiment Name: At_100uM_ABA_P Parameter: Age (day) Value: 15
  misc_feature: MA Experiment 20000453 PARAMETER Experiment Name: At_100uM_ABA_P Parameter: Organism Value: A. thaliana
  misc_feature: MA Experiment 20000453 PARAMETER Experiment Name: At_100uM_ABA_P Parameter: Plant Line Value: WS
  misc_feature: MA Experiment 20000453 PARAMETER Experiment Name: At_100uM_ABA_P Parameter: Timepoint (hr) Value: 24
  misc_feature: MA Experiment 20000453 PARAMETER Experiment Name: At_100uM_ABA_P Parameter: Tissue Value: Aerial
  misc_feature: MA Experiment 20000453 PARAMETER Experiment Name: At_100uM_ABA_P Parameter: Treatment Value: 100uM ABA vs. No Treatment
  misc_feature: MA Experiment ID: 20000573 Result: Down-regulated in Transcription
  misc_feature: MA Experiment 20000573 PARAMETER Experiment Name: At_100uM_ABA_Mutants__P Parameter: Organism Value: A. thaliana
  misc_feature: MA Experiment 20000573 PARAMETER Experiment Name: At_100uM_ABA_Mutants__P Parameter: Plant Line Value: CS22 vs. Ler wt
  misc_feature: MA Experiment 20000573 PARAMETER Experiment Name: At_100uM_ABA_Mutants__P Parameter: Timepoint (hr) Value: N/A
  misc_feature: MA Experiment 20000573 PARAMETER Experiment Name: At_100uM_ABA_Mutants__P Parameter: Tissue Value: Whole Plant
  misc_feature: MA Experiment 20000573 PARAMETER Experiment Name: At_100uM_ABA_Mutants__P Parameter: Treatment Value: None
  misc_feature: MA Experiment ID: 20001248 Result: Up-regulated in Transcription
  misc_feature: MA Experiment 20001248 PARAMETER Experiment Name: At_Far-red-induction_P Parameter: Age (day) Value: 7
  misc_feature: MA Experiment 20001248 PARAMETER Experiment Name: At_Far-red-induction_P Parameter: Light Value: Far-red vs. White
  misc_feature: MA Experiment 20001248 PARAMETER Experiment Name: At_Far-red-induction_P Parameter: Organism Value: A. thaliana
  misc_feature: MA Experiment 20001248 PARAMETER Experiment Name: At_Far-red-induction_P Parameter: Plant Line Value: Columbia
  misc_feature: MA Experiment 20001248 PARAMETER Experiment Name: At_Far-red-induction_P Parameter: Timepoint (hr) Value: 4
  misc_feature: MA Experiment 20001248 PARAMETER Experiment Name: At_Far-red-induction_P Parameter: Tissue Value: Whole Plant
  misc_feature: MA Experiment ID: 20001450 Result: Up-regulated in Transcription
  misc_feature: MA Experiment 20001450 PARAMETER Experiment Name: At_Far-red-induction_P Parameter: Age (day) Value: 7
  misc_feature: MA Experiment 20001450 PARAMETER Experiment Name: At_Far-red-induction_P Parameter: Light Value: Far-red vs. White
  misc_feature: MA Experiment 20001450 PARAMETER Experiment Name: At_Far-red-induction_P Parameter: Organism Value: A. thaliana
  misc_feature: MA Experiment 20001450 PARAMETER Experiment Name: At_Far-red-induction_P Parameter: Plant Line Value: Columbia
  misc_feature: MA Experiment 20001450 PARAMETER Experiment Name: At_Far-red-induction_P Parameter: Timepoint (hr) Value: 8
  misc_feature: MA Experiment 20001450 PARAMETER Experiment Name: At_Far-red-induction_P Parameter: Tissue Value: Whole Plant
  misc_feature: MA Experiment ID: 20001554 Result: Down-regulated in Transcription
  misc_feature: MA Experiment 20001554 PARAMETER Experiment Name: At_Drought_Soil_Dry_P Parameter: Age (day) Value: 21
  misc_feature: MA Experiment 20001554 PARAMETER Experiment Name: At_Drought_Soil_Dry_P Parameter: Organism Value: A. thaliana
  misc_feature: MA Experiment 20001554 PARAMETER Experiment Name: At_Drought_Soil_Dry_P Parameter: Plant Line Value: WS
  misc_feature: MA Experiment 20001554 PARAMETER Experiment Name: At_Drought_Soil_Dry_P Parameter: Post Timepoint (hr) Value: None
  misc_feature: MA Experiment 20001554 PARAMETER Experiment Name: At_Drought_Soil_Dry_P Parameter: Post-Treatment Value: None
  misc_feature: MA Experiment 20001554 PARAMETER Experiment Name: At_Drought_Soil_Dry_P Parameter: Timepoint (day) Value: 7
  misc_feature: MA Experiment 20001554 PARAMETER Experiment Name: At_Drought_Soil_Dry_P Parameter: Treatment Value: Drought vs. No Drought
  misc_feature: MA Experiment ID: 20001555 Result: Down-regulated in Transcription
  misc_feature: MA Experiment 20001555 PARAMETER Experiment Name: At_Drought_Soil_Dry_P Parameter: Age (day) Value: 24
  misc_feature: MA Experiment 20001555 PARAMETER Experiment Name: At_Drought_Soil_Dry_P Parameter: Organism Value: A. thaliana
  misc_feature: MA Experiment 20001555 PARAMETER Experiment Name: At_Drought_Soil_Dry_P Parameter: Plant Line Value: WS
  misc_feature: MA Experiment 20001555 PARAMETER Experiment Name: At_Drought_Soil_Dry_P Parameter: Post Timepoint (hr) Value: None
  misc_feature: MA Experiment 20001555 PARAMETER Experiment Name: At_Drought_Soil_Dry_P Parameter: Post-Treatment Value: None
  misc_feature: MA Experiment 20001555 PARAMETER Experiment Name: At_Drought_Soil_Dry_P Parameter: Timepoint (day) Value: 10
  misc_feature: MA Experiment 20001555 PARAMETER Experiment Name: At_Drought_Soil_Dry_P Parameter: Treatment Value: Drought vs. No Drought
  misc_feature: MA Experiment ID: 20001556 Result: Down-regulated in Transcription
  misc_feature: MA Experiment 20001556 PARAMETER Experiment Name: At_Drought_Soil_Dry_P Parameter: Age (day) Value: 26
  misc_feature: MA Experiment 20001556 PARAMETER Experiment Name: At_Drought_Soil_Dry_P Parameter: Organism Value: A. thaliana
  misc_feature: MA Experiment 20001556 PARAMETER Experiment Name: At_Drought_Soil_Dry_P Parameter: Plant Line Value: WS
  misc_feature: MA Experiment 20001556 PARAMETER Experiment Name: At_Drought_Soil_Dry_P Parameter: Post Timepoint (hr) Value: None
  misc_feature: MA Experiment 20001556 PARAMETER Experiment Name: At_Drought_Soil_Dry_P Parameter: Post-Treatment Value: None
  misc_feature: MA Experiment 20001556 PARAMETER Experiment Name: At_Drought_Soil_Dry_P Parameter: Timepoint (day) Value: 12
  misc_feature: MA Experiment 20001556 PARAMETER Experiment Name: At_Drought_Soil_Dry_P Parameter: Treatment Value: Drought vs. No Drought
  misc_feature: MA Experiment ID: 20001557 Result: Up-regulated in Transcription
  misc_feature: MA Experiment 20001557 PARAMETER Experiment Name: At_Drought_Soil_Dry_P Parameter: Age (day) Value: 27
  misc_feature: MA Experiment 20001557 PARAMETER Experiment Name: At_Drought_Soil_Dry_P Parameter: Organism Value: A. thaliana
  misc_feature: MA Experiment 20001557 PARAMETER Experiment Name: At_Drought_Soil_Dry_P Parameter: Plant Line Value: WS
  misc_feature: MA Experiment 20001557 PARAMETER Experiment Name: At_Drought_Soil_Dry_P Parameter: Post Timepoint (hr) Value: 3
  misc_feature: MA Experiment 20001557 PARAMETER Experiment Name: At_Drought_Soil_Dry_P Parameter: Post-Treatment Value: Re-Water vs. No Drought
  misc_feature: MA Experiment 20001557 PARAMETER Experiment Name: At_Drought_Soil_Dry_P Parameter: Timepoint (day) Value: 13
  misc_feature: MA Experiment 20001557 PARAMETER Experiment Name: At_Drought_Soil_Dry_P Parameter: Treatment Value: Drought vs. No Drought
  misc_feature: MA Experiment ID: 20001558 Result: Up-regulated in Transcription
  misc_feature: MA Experiment 20001558 PARAMETER Experiment Name: At_Drought_Soil_Dry_P Parameter: Age (day) Value: 27
  misc_feature: MA Experiment 20001558 PARAMETER Experiment Name: At_Drought_Soil_Dry_P Parameter: Organism Value: A. thaliana
  misc_feature: MA Experiment 20001558 PARAMETER Experiment Name: At_Drought_Soil_Dry_P Parameter: Plant Line Value: WS
  misc_feature: MA Experiment 20001558 PARAMETER Experiment Name: At_Drought_Soil_Dry_P Parameter: Post Timepoint (hr) Value: 6
  misc_feature: MA Experiment 20001558 PARAMETER Experiment Name: At_Drought_Soil_Dry_P Parameter: Post-Treatment Value: Re-Water vs. No Drought
  misc_feature: MA Experiment 20001558 PARAMETER Experiment Name: At_Drought_Soil_Dry_P Parameter: Timepoint (day) Value: 13
  misc_feature: MA Experiment 20001558 PARAMETER Experiment Name: At_Drought_Soil_Dry_P Parameter: Treatment Value: Drought vs. No Drought
  misc_feature: MA Experiment ID: 20001559 Result: Down-regulated in Transcription
  misc_feature: MA Experiment 20001559 PARAMETER Experiment Name: At_Drought_Soil_Dry_P Parameter: Age (day) Value: 28
  misc_feature: MA Experiment 20001559 PARAMETER Experiment Name: At_Drought_Soil_Dry_P Parameter: Organism Value: A. thaliana
  misc_feature: MA Experiment 20001559 PARAMETER Experiment Name: At_Drought_Soil_Dry_P Parameter: Plant Line Value: WS
  misc_feature: MA Experiment 20001559 PARAMETER Experiment Name: At_Drought_Soil_Dry_P Parameter: Post Timepoint (hr) Value: 29
  misc_feature: MA Experiment 20001559 PARAMETER Experiment Name: At_Drought_Soil_Dry_P Parameter: Post-Treatment Value: Re-Water vs. No Drought
  misc_feature: MA Experiment 20001559 PARAMETER Experiment Name: At_Drought_Soil_Dry_P Parameter: Timepoint (day) Value: 14
  misc_feature: MA Experiment 20001559 PARAMETER Experiment Name: At_Drought_Soil_Dry_P Parameter: Treatment Value: Drought vs. No Drought
  misc_feature: MA Experiment ID: 20001757 Result: Up-regulated in Transcription
  misc_feature: MA Experiment 20001757 PARAMETER Experiment Name: At_50mM_NH4NO3_L-to-H_P Parameter: Timepoint (hr) Value: 6
  misc_feature: MA Experiment 20001757 PARAMETER Experiment Name: At_50mM_NH4NO3_L-to-H_P Parameter: Tissue Value: Leaf
  misc_feature: MA Experiment 20001757 PARAMETER Experiment Name: At_50mM_NH4NO3_L-to-H_P Parameter: Treatment Value: 50mM NH4NO3 vs 100mM Mannitol
  misc_feature: MA Experiment ID: 20001905 Result: Down-regulated in Transcription
  misc_feature: MA Experiment 20001905 PARAMETER Experiment Name: At_Drought_Reproduction_P Parameter: Age (day) Value: 40
  misc_feature: MA Experiment 20001905 PARAMETER Experiment Name: At_Drought_Reproduction_P Parameter: Organism Value: A. thaliana
  misc_feature: MA Experiment 20001905 PARAMETER Experiment Name: At_Drought_Reproduction_P Parameter: Plant Line Value: WS
  misc_feature: MA Experiment 20001905 PARAMETER Experiment Name: At_Drought_Reproduction_P Parameter: Timepoint (day) Value: 10
  misc_feature: MA Experiment 20001905 PARAMETER Experiment Name: At_Drought_Reproduction_P Parameter: Tissue Value: Rosettes
  misc_feature: MA Experiment 20001905 PARAMETER Experiment Name: At_Drought_Reproduction_P Parameter: Treatment Value: Drought vs. No Drought
  misc_feature: MA Experiment ID: 20001906 Result: Down-regulated in Transcription
  misc_feature: MA Experiment 20001906 PARAMETER Experiment Name: At_Drought_Reproduction_P Parameter: Age (day) Value: 35
  misc_feature: MA Experiment 20001906 PARAMETER Experiment Name: At_Drought_Reproduction_P Parameter: Organism Value: A. thaliana
  misc_feature: MA Experiment 20001906 PARAMETER Experiment Name: At_Drought_Reproduction_P Parameter: Plant Line Value: WS
  misc_feature: MA Experiment 20001906 PARAMETER Experiment Name: At_Drought_Reproduction_P Parameter: Timepoint (day) Value: 5
  misc_feature: MA Experiment 20001906 PARAMETER Experiment Name: At_Drought_Reproduction_P Parameter: Tissue Value: Siliques
  misc_feature: MA Experiment 20001906 PARAMETER Experiment Name: At_Drought_Reproduction_P Parameter: Treatment Value: Drought vs. No Drought
  misc_feature: MA Experiment ID: 20001908 Result: Down-regulated in Transcription
  misc_feature: MA Experiment 20001908 PARAMETER Experiment Name: At_Drought_Reproduction_P Parameter: Age (day) Value: 40
  misc_feature: MA Experiment 20001908 PARAMETER Experiment Name: At_Drought_Reproduction_P Parameter: Organism Value: A. thaliana
  misc_feature: MA Experiment 20001908 PARAMETER Experiment Name: At_Drought_Reproduction_P Parameter: Plant Line Value: WS
  misc_feature: MA Experiment 20001908 PARAMETER Experiment Name: At_Drought_Reproduction_P Parameter: Timepoint (day) Value: 10
  misc_feature: MA Experiment 20001908 PARAMETER Experiment Name: At_Drought_Reproduction_P Parameter: Tissue Value: Siliques
  misc_feature: MA Experiment 20001908 PARAMETER Experiment Name: At_Drought_Reproduction_P Parameter: Treatment Value: Drought vs. No Drought
  misc_feature: MA Experiment ID: 20001911 Result: Down-regulated in Transcription
  misc_feature: MA Experiment 20001911 PARAMETER Experiment Name: At_Drought_Reproduction_P Parameter: Age (day) Value: 40
  misc_feature: MA Experiment 20001911 PARAMETER Experiment Name: At_Drought_Reproduction_P Parameter: Organism Value: A. thaliana
  misc_feature: MA Experiment 20001911 PARAMETER Experiment Name: At_Drought_Reproduction_P Parameter: Plant Line Value: WS
  misc_feature: MA Experiment 20001911 PARAMETER Experiment Name: At_Drought_Reproduction_P Parameter: Timepoint (day) Value: 10
  misc_feature: MA Experiment 20001911 PARAMETER Experiment Name: At_Drought_Reproduction_P Parameter: Tissue Value: Flowers
  misc_feature: MA Experiment 20001911 PARAMETER Experiment Name: At_Drought_Reproduction_P Parameter: Treatment Value: Drought vs. No Drought
acaaggacattttgataatatccacaggcatgttaccaaacggagacttcgagctaggaccaaaaccatcagacatgaaaggaacagaaatactaaacaaactagcaataccaaactgggaagtcacaggattcgtcgaatacattaaatcaggacataaacaaggagacatgcttctcgttgttcccgccggtaaattcgctgtaagacttgggaacgaagcatcgatcaaacaaagacttaaagtggttaaaggaatgtattactcactcacttttagtgctgctagaacttgtgcacaagacgagagacttaacatatctgtagcacctgactccggtgtgattccgattcagacggtttatagtagtagtggttgggatttatatgcttgggcgtttcaagctgagagtgatgttgctgaagttgtgattcataatcctggtgttgaggaagatccagcttgtggtccacttattgatggtgttgctatgagatctctttaccctcctagaccaactaataagaacattttgaaaaacggaggatttgaagaaggtccattagtattacccggctcgacaactggagttttgatcccaccgtttatagaagacgaccactctcctttacctggatggatggtggagtctctcaaagctgtcaagtacgtagacgttgaacatttctcagtcccacagggtcgcagagctattgagcttgtagcgggtaaagagagtgccatcgctcaagtggttcggactgtcattgggaagacttacgtgctgtcttttgcggttggagacgccaacaatgcttgcaaaggatcaatggtggttgaggcttttgcaggaaaagatacacttaaggtcccttacgagtcgaaaggcacaggagggtttaaacgagcttctattcgatttgtggcggtttcgacccgatcaagaattatgttctacagcactttctatgccatgaggagcgatgatttcgtcattgtgtgggcctgtgatcgatgatgtcaagcttataagcgttcgtaaaccatagatgaatcaccaatcctattacaagaaaatgcatcgtgtggtcttcttttattttccttaaactgtctttggtgtgtgttggattttattggaacgagaaggtgaaaaaaacagagttttatttacgagagttagggttttatataggcagatgggcctttgcttatattgtattttcttgtatgagaaggcaaaagaaacgttgcctatatcttatgtatctaggccttttaatttttatggaagagttac

SEQ ID NO: 23467 - protein, 338 aa, Arabidopsis thaliana
  peptide (1)..(338): Ceres Seq. ID no. 12338491
  misc_feature (25)..(330): Pfam Name: Protein of unknown function, DUF642 Pfam Description: Protein of unknown function, DUF642
  misc_feature (4)..(329): Homolog of NCBI NO: 7488741 NR Description: hypothetical protein precursor - alfalfa
  misc_feature (25)..(330): Homolog of NCBI NO: 7486632 NR Description: hypothetical protein F8B4.160 - Arabidopsis
  misc_feature (4)..(330): Homolog of NCBI NO: 7488898 NR Description: hypothetical protein - castor bean
  misc_feature (9)..(330): Homolog of NCBI NO: 18418018 NR Description: putative protein
  misc_feature (3)..(330): Homolog of NCBI NO: 21554402 NR Description: unknown [Arabidopsis thaliana]
  misc_feature (3)..(330): Homolog of NCBI NO: 23397043 NR Description: unknown protein [Arabidopsis thaliana]
  misc_feature (3)..(330): Homolog of NCBI NO: 15239049 NR Description: putative protein
  misc_feature (1)..(330): Homolog of NCBI NO: 21537379 NR Description: unknown [Arabidopsis thaliana]
  misc_feature (1)..(330): Homolog of NCBI NO: 15809822 NR Description: AT5g25460/F18G18_200 [Arabidopsis thaliana]
  misc_feature (1)..(330): Homolog of NCBI NO: 15239438 NR Description: putative protein
KDILIISTGMLPNGDFELGPKPSDMKGTEILNKLAIPNWEVTGFVEYIKSGHKQGDMLLVVPAGKFAVRLGNEASIKQRLKVVKGMYYSLTFSAARTCAQDERLNISVAPDSGVIPIQTVYSSSGWDLYAWAFQAESDVAEVVIHNPGVEEDPACGPLIDGVAMRSLYPPRPTNKNILKNGGFEEGPLVLPGSTTGVLIPPFIEDDHSPLPGWMVESLKAVKYVDVEHFSVPQGRRAIELVAGKESAIAQVVRTVIGKTYVLSFAVGDANNACKGSMVVEAFAGKDTLKVPYESKGTGGFKRASIRFVAVSTRSRIMFYSTFYAMRSDDFVIVWACDR

SEQ ID NO: 23468 - protein, 329 aa, Arabidopsis thaliana
  peptide (1)..(329): Ceres Seq. ID no. 12338493
  misc_feature (16)..(321): Pfam Name: Protein of unknown function, DUF642 Pfam Description: Protein of unknown function, DUF642
  misc_feature (1)..(320): Homolog of NCBI NO: 7488741 NR Description: hypothetical protein precursor - alfalfa
  misc_feature (16)..(321): Homolog of NCBI NO: 7486632 NR Description: hypothetical protein F8B4.160 - Arabidopsis
  misc_feature (1)..(321): Homolog of NCBI NO: 7488898 NR Description: hypothetical protein - castor bean
  misc_feature (1)..(321): Homolog of NCBI NO: 18418018 NR Description: putative protein
  misc_feature (1)..(321): Homolog of NCBI NO: 21554402 NR Description: unknown [Arabidopsis thaliana]
  misc_feature (1)..(321): Homolog of NCBI NO: 23397043 NR Description: unknown protein [Arabidopsis thaliana]
  misc_feature (1)..(321): Homolog of NCBI NO: 15239049 NR Description: putative protein
  misc_feature (1)..(321): Homolog of NCBI NO: 21537379 NR Description: unknown [Arabidopsis thaliana]
  misc_feature (1)..(321): Homolog of NCBI NO: 15809822 NR Description: AT5g25460/F18G18_200 [Arabidopsis thaliana]
  misc_feature (1)..(321): Homolog of NCBI NO: 15239438 NR Description: putative protein
MLPNGDFELGPKPSDMKGTEILNKLAIPNWEVTGFVEYIKSGHKQGDMLLVVPAGKFAVRLGNEASIKQRLKVVKGMYYSLTFSAARTCAQDERLNISVAPDSGVIPIQTVYSSSGWDLYAWAFQAESDVAEVVIHNPGVEEDPACGPLIDGVAMRSLYPPRPTNKNILKNGGFEEGPLVLPGSTTGVLIPPFIEDDHSPLPGWMVESLKAVKYVDVEHFSVPQGRRAIELVAGKESAIAQVVRTVIGKTYVLSFAVGDANNACKGSMVVEAFAGKDTLKVPYESKGTGGFKRASIRFVAVSTRSRIMFYSTFYAMRSDDFVIVWACDR

SEQ ID NO: 23469 - protein, 314 aa, Arabidopsis thaliana
  peptide (1)..(314): Ceres Seq. ID no. 12338494
  misc_feature (1)..(306): Pfam Name: Protein of unknown function, DUF642 Pfam Description: Protein of unknown function, DUF642
  misc_feature (1)..(305): Homolog of NCBI NO: 7488741 NR Description: hypothetical protein precursor - alfalfa
  misc_feature (1)..(306): Homolog of NCBI NO: 7486632 NR Description: hypothetical protein F8B4.160 - Arabidopsis
  misc_feature (1)..(306): Homolog of NCBI NO: 7488898 NR Description: hypothetical protein - castor bean
  misc_feature (1)..(306): Homolog of NCBI NO: 18418018 NR Description: putative protein
  misc_feature (1)..(306): Homolog of NCBI NO: 21554402 NR Description: unknown [Arabidopsis thaliana]
  misc_feature (1)..(306): Homolog of NCBI NO: 23397043 NR Description: unknown protein [Arabidopsis thaliana]
  misc_feature (1)..(306): Homolog of NCBI NO: 15239049 NR Description: putative protein
  misc_feature (1)..(306): Homolog of NCBI NO: 21537379 NR Description: unknown [Arabidopsis thaliana]
  misc_feature (1)..(306): Homolog of NCBI NO: 15809822 NR Description: AT5g25460/F18G18_200 [Arabidopsis thaliana]
  misc_feature (1)..(306): Homolog of NCBI NO: 15239438 NR Description: putative protein
MKGTEILNKLAIPNWEVTGFVEYIKSGHKQGDMLLVVPAGKFAVRLGNEASIKQRLKVVKGMYYSLTFSAARTCAQDERLNISVAPDSGVIPIQTVYSSSGWDLYAWAFQAESDVAEVVIHNPGVEEDPACGPLIDGVAMRSLYPPRPTNKNILKNGGFEEGPLVLPGSTTGVLIPPFIEDDHSPLPGWMVESLKAVKYVDVEHFSVPQGRRAIELVAGKESAIAQVVRTVIGKTYVLSFAVGDANNACKGSMVVEAFAGKDTLKVPYESKGTGGFKRASIRFVAVSTRSRIMFYSTFYAMRSDDFVIVWACDR

SEQ ID NO: 23470 - DNA, 1414 bp, Arabidopsis thaliana
  misc_feature (1)..(1414): Ceres Seq. ID no. 12385350
  misc_feature: MA Experiment ID: 108434 Result: Up-regulated in Transcription
  misc_feature: MA Experiment 108434 PARAMETER Experiment Name: At_Root_Tips_cDNA_P Parameter: Tissue Value: Root Tips
  misc_feature: MA Experiment ID: 108435 Result: Up-regulated in Transcription
  misc_feature: MA Experiment 108435 PARAMETER Experiment Name: At_stm_Mutants_cDNA_P Parameter: Plant Line Value: wt Landsburg vs stm
  misc_feature: MA Experiment 108435 PARAMETER Experiment Name: At_stm_Mutants_cDNA_P Parameter: Tissue Value: Shoot Apical Meristem Region
  misc_feature: MA Experiment ID: 108463 Result: Down-regulated in Transcription
  misc_feature: MA Experiment 108463 PARAMETER Experiment Name: At_Germinating_Seeds_cDNA_P Parameter: Age (day) Value: 3 vs. 0
  misc_feature: MA Experiment 108463 PARAMETER Experiment Name: At_Germinating_Seeds_cDNA_P Parameter: Tissue Value: Germinating Seeds
  misc_feature: MA Experiment ID: 108464 Result: Down-regulated in Transcription
  misc_feature: MA Experiment 108464 PARAMETER Experiment Name: At_Germinating_Seeds_cDNA_P Parameter: Age (day) Value: 4 vs. 0
  misc_feature: MA Experiment 108464 PARAMETER Experiment Name: At_Germinating_Seeds_cDNA_P Parameter: Tissue Value: Germinating Seeds
  misc_feature: MA Experiment ID: 108595 Result: Down-regulated in Transcription
  misc_feature: MA Experiment 108595 PARAMETER Experiment Name: At_Ler-pi_Ovule_cDNA_P Parameter: Plant Line Value: null
  misc_feature: MA Experiment ID: 20000069 Result: Down-regulated in Transcription
  misc_feature: MA Experiment 20000069 PARAMETER Experiment Name: At_100uM_ABA_Mutants_cDNA_P Parameter: Plant Line Value: CS23
  misc_feature: MA Experiment 20000069 PARAMETER Experiment Name: At_100uM_ABA_Mutants_cDNA_P Parameter: Timepoint (hr) Value: 6
  misc_feature: MA Experiment 20000069 PARAMETER Experiment Name: At_100uM_ABA_Mutants_cDNA_P Parameter: Tissue Value: Aerial
  misc_feature: MA Experiment 20000069 PARAMETER Experiment Name: At_100uM_ABA_Mutants_cDNA_P Parameter: Treatment Value: 100uM ABA vs. No Treatment
  misc_feature: MA Experiment ID: 20000070 Result: Down-regulated in Transcription
  misc_feature: MA Experiment 20000070 PARAMETER Experiment Name: At_100uM_ABA_Mutants_cDNA_P Parameter: Plant Line Value: CS24
  misc_feature: MA Experiment 20000070 PARAMETER Experiment Name: At_100uM_ABA_Mutants_cDNA_P Parameter: Timepoint (hr) Value: 6
  misc_feature: MA Experiment 20000070 PARAMETER Experiment Name: At_100uM_ABA_Mutants_cDNA_P Parameter: Tissue Value: Aerial
  misc_feature: MA Experiment 20000070 PARAMETER Experiment Name: At_100uM_ABA_Mutants_cDNA_P Parameter: Treatment Value: 100uM ABA vs. No Treatment
  misc_feature: MA Experiment ID: 20000117 Result: Down-regulated in Transcription
  misc_feature: MA Experiment 20000117 PARAMETER Experiment Name: At_100uM_ABA_Mutants_cDNA_P Parameter: Plant Line Value: Columbia
  misc_feature: MA Experiment 20000117 PARAMETER Experiment Name: At_100uM_ABA_Mutants_cDNA_P Parameter: Timepoint (hr) Value: 6
  misc_feature: MA Experiment 20000117 PARAMETER Experiment Name: At_100uM_ABA_Mutants_cDNA_P Parameter: Tissue Value: Aerial
  misc_feature: MA Experiment 20000117 PARAMETER Experiment Name: At_100uM_ABA_Mutants_cDNA_P Parameter: Treatment Value: 100uM ABA vs. No Treatment
  misc_feature: MA Experiment ID: 20000180 Result: Up-regulated in Transcription
  misc_feature: MA Experiment 20000180 PARAMETER Experiment Name: At_Germinating_Seeds_P Parameter: Age (hr) Value: 24 vs. 0
  misc_feature: MA Experiment 20000180 PARAMETER Experiment Name: At_Germinating_Seeds_P Parameter: Tissue Value: Germinating Seeds
  misc_feature: MA Experiment ID: 20000437 Result: Down-regulated in Transcription
  misc_feature: MA Experiment 20000437 PARAMETER Experiment Name: At_Drought_P Parameter: Age (day) Value: 8
  misc_feature: MA Experiment 20000437 PARAMETER Experiment Name: At_Drought_P Parameter: Organism Value: A. thaliana
  misc_feature: MA Experiment 20000437 PARAMETER Experiment Name: At_Drought_P Parameter: Plant Line Value: WS
  misc_feature: MA Experiment 20000437 PARAMETER Experiment Name: At_Drought_P Parameter: Timepoint (hr) Value: 24
  misc_feature: MA Experiment 20000437 PARAMETER Experiment Name: At_Drought_P Parameter: Tissue Value: Whole Plant
  misc_feature: MA Experiment 20000437 PARAMETER Experiment Name: At_Drought_P Parameter: Treatment Value: Drought vs. No Drought
  misc_feature: MA Experiment ID: 20000452 Result: Down-regulated in Transcription
  misc_feature: MA Experiment 20000452 PARAMETER Experiment Name: At_CS6879_Shoots-Roots_P Parameter: Age (day) Value: 14
  misc_feature: MA Experiment 20000452 PARAMETER Experiment Name: At_CS6879_Shoots-Roots_P Parameter: Organism Value: A. thaliana
  misc_feature: MA Experiment 20000452 PARAMETER Experiment Name: At_CS6879_Shoots-Roots_P Parameter: Plant Line Value: CS6879 vs. WS
  misc_feature: MA Experiment 20000452 PARAMETER Experiment Name: At_CS6879_Shoots-Roots_P Parameter: Tissue Value: Shoots
aaggcgtgagataataaaaccctttggctttctcatagagatttgtccggtctcttgttcctctttctcctttcttcactgtagaatccgtcgaccaaacaactagctccaatggcataatgagcattgtagtttgcaatttcttcttccgtgaagaagaagaagatggctttggagaaagaggaagaagcgtcacaaaacggtgcgttttgtgtccttgatgggctctattgcgaggaagaaaccgggtttgtggaggacgatcttgatgacgatggagatttagattttctcgagaaatctgatgagagtgttgtaaagtttcagtttttacctcttttggatatgttcttatgggatgacgatgagattctgagtttgatttcaaaggaaaacgaaacgaatccatgttttggggaacaaatcttagatggctttttggtttcttgtaggaaagaggctttagattgggttcttagggttaaatctcattatgggtttacttcattgacggctatacttgctgtgaactacttcgataggtttatgacaagtataaagcttcagactgataagccatggatgtctcagcttgttgctgtggcttctttgtctttagctgctaaagttgaagagattcaagttccattgctcttagacctccaagtggaagaagcaagatatctctttgaagctaagacgattcaaagaatggagcttttgattctttctactcttcaatggagaatgcaccctgtgactccaatctctttctttgatcacattatccggcgatttggctctaaatggcaccagcaattagacttctgtaggaagtgtgagcgtcttctgatctctgttattgctgatacgaggtttatgaggtacttcccttctgtcttagctactgcaataatgatccttgtcttcgaggaattgaagccatgtgatgaagttgaataccaatctcaaataacgactctactcaaagtcaatcaggagaaagtaaatgaatgctatgaactgttgttggagcacaatccaagcaagaagaggatgatgaatttggttgatcaggacagtccaagtggtgtattagactttgatgacagctcaaatagctcctggaatgtctccactactgcttcagtgtcctcatcatcttcgtctccagagcctctgctcaagagaagaagagttcaggagcagcaaatgagattgccctcaataaaccgtatgtttctcgatgtgcttagtagtcctcgctagtacctttctttgatcaaatgtgtcaaaacataaattcaatctctcttttgcttattattatcggccatcggctacaatttgaaggcagaacattttgtgataactctaagttaattctgcctcttaaatcataatattcattgat

SEQ ID NO: 23471 - protein, 367 aa, Arabidopsis thaliana
  peptide (1)..(367): Ceres Seq. ID no. 12385351
  misc_feature (67)..(196): Pfam Name: Cyclin, N-terminal domain Pfam Description: Cyclin, N-terminal domain
  misc_feature (17)..(344): Homolog of NCBI NO: 6448484 NR Description: cyclin D3b [Antirrhinum majus]
  misc_feature (18)..(366): Homolog of NCBI NO: 6434199 NR Description: CycD3;2 [Lycopersicon esculentum]
  misc_feature (11)..(352): Homolog of NCBI NO: 5679622 NR Description: cyclin D3.1 [Lycopersicon esculentum]
  misc_feature (1)..(366): Homolog of NCBI NO: 4160300 NR Description: cyclin D3.1 protein [Nicotiana tabacum]
  misc_feature (17)..(367): Homolog of NCBI NO: 4160302 NR Description: cyclin D3.2 protein [Nicotiana tabacum]
  misc_feature (6)..(367): Homolog of NCBI NO: 4586801 NR Description: NtcycD3-1 [Nicotiana tabacum]
  misc_feature (3)..(366): Homolog of NCBI NO: 29374148 NR Description: cyclin D [Populus alba]
  misc_feature (17)..(366): Homolog of NCBI NO: 33517432 NR Description: cyclin D3-2 [Euphorbia esula]
  misc_feature (1)..(367): Homolog of NCBI NO: 15229665 NR Description: Cyclin D3
  misc_feature (1)..(367): Homolog of NCBI NO: 15240257 NR Description: Cyclin D3
MALEKEEEASQNGAFCVLDGLYCEEETGFVEDDLDDDGDLDFLEKSDESVVKFQFLPLLDMFLWDDDEILSLISKENETNPCFGEQILDGFLVSCRKEALDWVLRVKSHYGFTSLTAILAVNYFDRFMTSIKLQTDKPWMSQLVAVASLSLAAKVEEIQVPLLLDLQVEEARYLFEAKTIQRMELLILSTLQWRMHPVTPISFFDHIIRRFGSKWHQQLDFCRKCERLLISVIADTRFMRYFPSVLATAIMILVFEELKPCDEVEYQSQITTLLKVNQEKVNECYELLLEHNPSKKRMMNLVDQDSPSGVLDFDDSSNSSWNVSTTASVSSSSSSPEPLLKRRRVQEQQMRLPSINRMFLDVLSSPR

SEQ ID NO: 23472 - protein, 307 aa, Arabidopsis thaliana
  peptide (1)..(307): Ceres Seq. ID no. 12385352
  misc_feature (7)..(136): Pfam Name: Cyclin, N-terminal domain Pfam Description: Cyclin, N-terminal domain
  misc_feature (1)..(284): Homolog of NCBI NO: 6448484 NR Description: cyclin D3b [Antirrhinum majus]
  misc_feature (1)..(306): Homolog of NCBI NO: 6434199 NR Description: CycD3;2 [Lycopersicon esculentum]
  misc_feature (1)..(292): Homolog of NCBI NO: 5679622 NR Description: cyclin D3.1 [Lycopersicon esculentum]
  misc_feature (1)..(306): Homolog of NCBI NO: 4160300 NR Description: cyclin D3.1 protein [Nicotiana tabacum]
  misc_feature (1)..(307): Homolog of NCBI NO: 4160302 NR Description: cyclin D3.2 protein [Nicotiana tabacum]
  misc_feature (1)..(307): Homolog of NCBI NO: 4586801 NR Description: NtcycD3-1 [Nicotiana tabacum]
  misc_feature (1)..(306): Homolog of NCBI NO: 29374148 NR Description: cyclin D [Populus alba]
  misc_feature (1)..(306): Homolog of NCBI NO: 33517432 NR Description: cyclin D3-2 [Euphorbia esula]
  misc_feature (1)..(307): Homolog of NCBI NO: 15229665 NR Description: Cyclin D3
  misc_feature (1)..(307): Homolog of NCBI NO: 15240257 NR Description: Cyclin D3
MFLWDDDEILSLISKENETNPCFGEQILDGFLVSCRKEALDWVLRVKSHYGFTSLTAILAVNYFDRFMTSIKLQTDKPWMSQLVAVASLSLAAKVEEIQVPLLLDLQVEEARYLFEAKTIQRMELLILSTLQWRMHPVTPISFFDHIIRRFGSKWHQQLDFCRKCERLLISVIADTRFMRYFPSVLATAIMILVFEELKPCDEVEYQSQITTLLKVNQEKVNECYELLLEHNPSKKRMMNLVDQDSPSGVLDFDDSSNSSWNVSTTASVSSSSSSPEPLLKRRRVQEQQMRLPSINRMFLDVLSSPR

SEQ ID NO: 23473 - protein, 240 aa, Arabidopsis thaliana
  peptide (1)..(240): Ceres Seq. ID no. 12385353
  misc_feature (1)..(69): Pfam Name: Cyclin, N-terminal domain Pfam Description: Cyclin, N-terminal domain
  misc_feature (1)..(217): Homolog of NCBI NO: 6448484 NR Description: cyclin D3b [Antirrhinum majus]
  misc_feature (1)..(239): Homolog of NCBI NO: 6434199 NR Description: CycD3;2 [Lycopersicon esculentum]
  misc_feature (1)..(225): Homolog of NCBI NO: 5679622 NR Description: cyclin D3.1 [Lycopersicon esculentum]
  misc_feature (1)..(239): Homolog of NCBI NO: 4160300 NR Description: cyclin D3.1 protein [Nicotiana tabacum]
  misc_feature (1)..(240): Homolog of NCBI NO: 4160302 NR Description: cyclin D3.2 protein [Nicotiana tabacum]
  misc_feature (1)..(240): Homolog of NCBI NO: 4586801 NR Description: NtcycD3-1 [Nicotiana tabacum]
  misc_feature (1)..(239): Homolog of NCBI NO: 29374148 NR Description: cyclin D [Populus alba]
  misc_feature (1)..(239): Homolog of NCBI NO: 33517432 NR Description: cyclin D3-2 [Euphorbia esula]
  misc_feature (1)..(240): Homolog of NCBI NO: 15229665 NR Description: Cyclin D3
  misc_feature (1)..(240): Homolog of NCBI NO: 15240257 NR Description: Cyclin D3
MTSIKLQTDKPWMSQLVAVASLSLAAKVEEIQVPLLLDLQVEEARYLFEAKTIQRMELLILSTLQWRMHPVTPISFFDHIIRRFGSKWHQQLDFCRKCERLLISVIADTRFMRYFPSVLATAIMILVFEELKPCDEVEYQSQITTLLKVNQEKVNECYELLLEHNPSKKRMMNLVDQDSPSGVLDFDDSSNSSWNVSTTASVSSSSSSPEPLLKRRRVQEQQMRLPSINRMFLDVLSSPR

SEQ ID NO: 23474 - DNA, 1340 bp, Arabidopsis thaliana
  misc_feature (1)..(1340): Ceres Seq. ID no. 12339897
  misc_feature: MA Experiment ID: 108595 Result: Up-regulated in Transcription
  misc_feature: MA Experiment 108595 PARAMETER Experiment Name: At_Ler-pi_Ovule_cDNA_P Parameter: Plant Line Value: null
  misc_feature: MA Experiment ID: 20000495 Result: Up-regulated in Transcription
  misc_feature: MA Experiment 20000495 PARAMETER Experiment Name: At_Guard_Cells_P Parameter: Harvest Date Value: 8/2/2002
  misc_feature: MA Experiment 20000495 PARAMETER Experiment Name: At_Guard_Cells_P Parameter: Organism Value: A. thaliana
  misc_feature: MA Experiment 20000495 PARAMETER Experiment Name: At_Guard_Cells_P Parameter: Tissue Value: Guard Cells vs. Leaves
gccgcagagtgttgatgctgttacgtttagtactttgatgaatgggtatcttcaggtttctaagaaagcgttggctttggatttgtttaggattatgagaaaaagtgaggtggtcgttaatgtcagtacgttgcttagctttctttcggctattagtgatctaggagatttgtctggagcagaatctgctcatgtgttatgcatcaagattggccttgatttagacttgcatttaatcacagctttgatagggatgtacggcaaaactgggggtatcagttcagcacgcaggatctttgattgcgccattcgaaaggatgttgttacatggaactgtatgatagaccaatatgccaaaacgggtctccttgaagagtgtgtatggctactgaggcagatgaagtatgaaaaaatgaaaccgaattcatctacgtttgttgggctgttgtcttcctgtgcgtacagtgaagcagcattcgtaggacgtactgtttgctgatctattggaagaggaaagaatagctttggatgcaatacttggaactgcactcgttgatatgtatgcaaaagtaggattgcttgaaaaagctgttgagattttcaatagaatgaaggataaggatgtaaagtcctggaccgcgatgatctcgggttatggagctcatggactagcaagagaagcagtaacactattcaataagatggaggaagagaactgcaaagtgagacccaatgagattaccttcttggttgtgctgaatgcttgtagccatggagggttggtaatggaaggaatcagatgctttaagaggatggttgaggcttacagcttcacgcccaaagttgaacattatggttgtgtggttgatcttttaggtcgagcggggcagttagaggaagcgtatgagttaataaggaacttaccgatcacaagtgattcaacggcttggcgtgctctgctagctgcttgtagagtatacgggaatgcagatttgggggaaagtgtgatgatgagattggctgaaatgggtgagacacatccggcagatgcaattcttctagctgggacacacgctgttgcagggaacccacaaaaatcattagataatgagttgaataaagggagaaaagaagctggatacagcgccattgaaatagaatagagtagacaatctctggcgttcattcacctctgacctttttgttgaaaactatatcagcaaaatgttgttcaataaggtaaacccctgtatttactctttctttatgctttaaaacagtaacttatgtataaagaaaggagacaattgatcttaatgaaacagttttgatggattgtg

SEQ ID NO: 23475 - protein, 201 aa, Arabidopsis thaliana
  peptide (1)..(201): Ceres Seq. ID no. 12339898
  misc_feature (1)..(200): Homolog of NCBI NO: 15230593 NR Description: unknown protein; protein id: At3g12770.1
  misc_feature (1)..(200): Homolog of NCBI NO: 11994419 NR Description: selenium-binding protein-like [Arabidopsis
  misc_feature (1)..(201): Homolog of NCBI NO: 15222917 NR Description: hypothetical protein; protein id: At1g50270.1
  misc_feature (1)..(200): Homolog of NCBI NO: 34906110 NR Description: P0020E09.15 [Oryza sativa (japonica
  misc_feature (1)..(201): Homolog of NCBI NO: 38175558 NR Description: putative pentatricopeptide (PPR)
  misc_feature (1)..(200): Homolog of NCBI NO: 15241714 NR Description: putative protein; protein id: At5g39350.1
  misc_feature (1)..(200): Homolog of NCBI NO: 21780142 NR Description: hypothetical protein [Arabidopsis thaliana]
  misc_feature (1)..(200): Homolog of NCBI NO: 15227067 NR Description: hypothetical protein; protein id: At2g02980.1
  misc_feature (1)..(201): Homolog of NCBI NO: 15226158 NR Description: hypothetical protein; protein id: At2g33760.1
  misc_feature (1)..(201): Homolog of NCBI NO: 15223380 NR Description: hypothetical protein; protein id: At1g26900.1
MYAKVGLLEKAVEIFNRMKDKDVKSWTAMISGYGAHGLAREAVTLFNKMEEENCKVRPNEITFLVVLNACSHGGLVMEGIRCFKRMVEAYSFTPKVEHYGCVVDLLGRAGQLEEAYELIRNLPITSDSTAWRALLAACRVYGNADLGESVMMRLAEMGETHPADAILLAGTHAVAGNPQKSLDNELNKGRKEAGYSAIEIE

SEQ ID NO: 23476 - protein, 184 aa, Arabidopsis thaliana
  peptide (1)..(184): Ceres Seq. ID no. 12339899
  misc_feature (1)..(183): Homolog of NCBI NO: 15230593 NR Description: unknown protein; protein id: At3g12770.1
  misc_feature (1)..(183): Homolog of NCBI NO: 11994419 NR Description: selenium-binding protein-like [Arabidopsis
  misc_feature (1)..(184): Homolog of NCBI NO: 15222917 NR Description: hypothetical protein; protein id: At1g50270.1
  misc_feature (1)..(183): Homolog of NCBI NO: 34906110 NR Description: P0020E09.15 [Oryza sativa (japonica
  misc_feature (1)..(184): Homolog of NCBI NO: 38175558 NR Description: putative pentatricopeptide (PPR)
  misc_feature (1)..(183): Homolog of NCBI NO: 15241714 NR Description: putative protein; protein id: At5g39350.1
  misc_feature (1)..(183): Homolog of NCBI NO: 21780142 NR Description: hypothetical protein [Arabidopsis thaliana]
  misc_feature (1)..(183): Homolog of NCBI NO: 15227067 NR Description: hypothetical protein; protein id: At2g02980.1
  misc_feature (1)..(184): Homolog of NCBI NO: 15226158 NR Description: hypothetical protein; protein id: At2g33760.1
  misc_feature (1)..(184): Homolog of NCBI NO: 15223380 NR Description: hypothetical protein; protein id: At1g26900.1
MKDKDVKSWTAMISGYGAHGLAREAVTLFNKMEEENCKVRPNEITFLVVLNACSHGGLVMEGIRCFKRMVEAYSFTPKVEHYGCVVDLLGRAGQLEEAYELIRNLPITSDSTAWRALLAACRVYGNADLGESVMMRLAEMGETHPADAILLAGTHAVAGNPQKSLDNELNKGRKEAGYSAIEIE

SEQ ID NO: 23477 - protein, 173 aa, Arabidopsis thaliana
  peptide (1)..(173): Ceres Seq. ID no. 12339900
  misc_feature (1)..(172): Homolog of NCBI NO: 15230593 NR Description: unknown protein; protein id: At3g12770.1
  misc_feature (1)..(172): Homolog of NCBI NO: 11994419 NR Description: selenium-binding protein-like [Arabidopsis
  misc_feature (1)..(173): Homolog of NCBI NO: 15222917 NR Description: hypothetical protein; protein id: At1g50270.1
  misc_feature (1)..(172): Homolog of NCBI NO: 34906110 NR Description: P0020E09.15 [Oryza sativa (japonica
  misc_feature (1)..(173): Homolog of NCBI NO: 38175558 NR Description: putative pentatricopeptide (PPR)
  misc_feature (1)..(172): Homolog of NCBI NO: 15241714 NR Description: putative protein; protein id: At5g39350.1
  misc_feature (1)..(172): Homolog of NCBI NO: 21780142 NR Description: hypothetical protein [Arabidopsis thaliana]
  misc_feature (1)..(172): Homolog of NCBI NO: 15227067 NR Description: hypothetical protein; protein id: At2g02980.1
  misc_feature (1)..(173): Homolog of NCBI NO: 15226158 NR Description: hypothetical protein; protein id: At2g33760.1
  misc_feature (1)..(173): Homolog of NCBI NO: 15223380 NR Description: hypothetical protein; protein id: At1g26900.1
MISGYGAHGLAREAVTLFNKMEEENCKVRPNEITFLVVLNACSHGGLVMEGIRCFKRMVEAYSFTPKVEHYGCVVDLLGRAGQLEEAYELIRNLPITSDSTAWRALLAACRVYGNADLGESVMMRLAEMGETHPADAILLAGTHAVAGNPQKSLDNELNKGRKEAGYSAIEIE

SEQ ID NO: 23478 - DNA, 1057 bp, Arabidopsis thaliana
  misc_feature (1)..(1057): Ceres Seq. ID no. 13490842
  misc_feature: MA Experiment ID: 108434 Result: Down-regulated in Transcription
  misc_feature: MA Experiment 108434 PARAMETER Experiment Name: At_Root_Tips_cDNA_P Parameter: Tissue Value: Root Tips
  misc_feature: MA Experiment ID: 108461 Result: Down-regulated in Transcription
  misc_feature: MA Experiment 108461 PARAMETER Experiment Name: At_Germinating_Seeds_cDNA_P Parameter: Age (day) Value: 1 vs. 0
  misc_feature: MA Experiment 108461 PARAMETER Experiment Name: At_Germinating_Seeds_cDNA_P Parameter: Tissue Value: Germinating Seeds
  misc_feature: MA Experiment ID: 108462 Result: Up-regulated in Transcription
  misc_feature: MA Experiment 108462 PARAMETER Experiment Name: At_Germinating_Seeds_cDNA_P Parameter: Age (day) Value: 2 vs. 0
  misc_feature: MA Experiment 108462 PARAMETER Experiment Name: At_Germinating_Seeds_cDNA_P Parameter: Tissue Value: Germinating Seeds
  misc_feature: MA Experiment ID: 108463 Result: Up-regulated in Transcription
  misc_feature: MA Experiment 108463 PARAMETER Experiment Name: At_Germinating_Seeds_cDNA_P Parameter: Age (day) Value: 3 vs. 0
  misc_feature: MA Experiment 108463 PARAMETER Experiment Name: At_Germinating_Seeds_cDNA_P Parameter: Tissue Value: Germinating Seeds
  misc_feature: MA Experiment ID: 108464 Result: Up-regulated in Transcription
  misc_feature: MA Experiment 108464 PARAMETER Experiment Name: At_Germinating_Seeds_cDNA_P Parameter: Age (day) Value: 4 vs. 0
  misc_feature: MA Experiment 108464 PARAMETER Experiment Name: At_Germinating_Seeds_cDNA_P Parameter: Tissue Value: Germinating Seeds
  misc_feature: MA Experiment ID: 108469 Result: Up-regulated in Transcription
  misc_feature: MA Experiment ID: 108473 Result: Up-regulated in Transcription
  misc_feature: MA Experiment 108473 PARAMETER Experiment Name: At_Drought_Flowers_cDNA_P Parameter: Timepoint (hr) Value: 7 d
  misc_feature: MA Experiment 108473 PARAMETER Experiment Name: At_Drought_Flowers_cDNA_P Parameter: Tissue Value: Flower
  misc_feature: MA Experiment 108473 PARAMETER Experiment Name: At_Drought_Flowers_cDNA_P Parameter: Treatment Value: Drought vs. No Drought
  misc_feature: MA Experiment ID: 108488 Result: Down-regulated in Transcription
  misc_feature: MA Experiment ID: 108585 Result: Up-regulated in Transcription
  misc_feature: MA Experiment 108585 PARAMETER Experiment Name: At_5mM_NaNP_cDNA_P Parameter: Timepoint (hr) Value: 6
  misc_feature: MA Experiment 108585 PARAMETER Experiment Name: At_5mM_NaNP_cDNA_P Parameter: Tissue Value: Aerial
  misc_feature: MA Experiment 108585 PARAMETER Experiment Name: At_5mM_NaNP_cDNA_P Parameter: Treatment Value: null
  misc_feature: MA Experiment ID: 108605 Result: Up-regulated in Transcription
  misc_feature: MA Experiment 108605 PARAMETER Experiment Name: At_100uM_ABA_cDNA_P Parameter: Timepoint (hr) Value: 6
  misc_feature: MA Experiment 108605 PARAMETER Experiment Name: At_100uM_ABA_cDNA_P Parameter: Tissue Value: Aerial
  misc_feature: MA Experiment 108605 PARAMETER Experiment Name: At_100uM_ABA_cDNA_P Parameter: Treatment Value: 100uM ABA vs. No Treatment
  misc_feature: MA Experiment ID: 108607 Result: Up-regulated in Transcription
  misc_feature: MA Experiment 108607 PARAMETER Experiment Name: At_100uM_ABA_cDNA_P Parameter: Timepoint (hr) Value: 4
  misc_feature: MA Experiment 108607 PARAMETER Experiment Name: At_100uM_ABA_cDNA_P Parameter: Tissue Value: Aerial
  misc_feature: MA Experiment 108607 PARAMETER Experiment Name: At_100uM_ABA_cDNA_P Parameter: Treatment Value: 100uM ABA vs. No Treatment
  misc_feature: MA Experiment ID: 108608 Result: Up-regulated in Transcription
  misc_feature: MA Experiment 108608 PARAMETER Experiment Name: At_100uM_ABA_cDNA_P Parameter: Timepoint (hr) Value: 1
  misc_feature: MA Experiment 108608 PARAMETER Experiment Name: At_100uM_ABA_cDNA_P Parameter: Tissue Value: Aerial
  misc_feature: MA Experiment 108608 PARAMETER Experiment Name: At_100uM_ABA_cDNA_P Parameter: Treatment Value: 100uM ABA vs. No Treatment
  misc_feature: MA Experiment ID: 108609 Result: Up-regulated in Transcription
  misc_feature: MA Experiment 108609 PARAMETER Experiment Name: At_100uM_ABA_cDNA_P Parameter: Timepoint (hr) Value: 24
  misc_feature: MA Experiment 108609 PARAMETER Experiment Name: At_100uM_ABA_cDNA_P Parameter: Tissue Value: Aerial
  misc_feature: MA Experiment 108609 PARAMETER Experiment Name: At_100uM_ABA_cDNA_P Parameter: Treatment Value: 100uM ABA vs. No Treatment
  misc_feature: MA Experiment ID: 108668 Result: Up-regulated in Transcription
  misc_feature: MA Experiment 108668 PARAMETER Experiment Name: At_2mM_SA_cDNA_P Parameter: Plant Line Value: WS
  misc_feature: MA Experiment 108668 PARAMETER Experiment Name: At_2mM_SA_cDNA_P Parameter: Timepoint (hr) Value: 6
  misc_feature: MA Experiment 108668 PARAMETER Experiment Name: At_2mM_SA_cDNA_P Parameter: Treatment Value: 2mM SA vs. No Treatment
  misc_feature: MA Experiment ID: 20000069 Result: Up-regulated in Transcription
  misc_feature: MA Experiment 20000069 PARAMETER Experiment Name: At_100uM_ABA_Mutants_cDNA_P Parameter: Plant Line Value: CS23
  misc_feature: MA Experiment 20000069 PARAMETER Experiment Name: At_100uM_ABA_Mutants_cDNA_P Parameter: Timepoint (hr) Value: 6
  misc_feature: MA Experiment 20000069 PARAMETER Experiment Name: At_100uM_ABA_Mutants_cDNA_P Parameter: Tissue Value: Aerial
  misc_feature: MA Experiment 20000069 PARAMETER Experiment Name: At_100uM_ABA_Mutants_cDNA_P Parameter: Treatment Value: 100uM ABA vs. No Treatment
  misc_feature: MA Experiment ID: 20000070 Result: Up-regulated in Transcription
  misc_feature: MA Experiment 20000070 PARAMETER Experiment Name: At_100uM_ABA_Mutants_cDNA_P Parameter: Plant Line Value: CS24
  misc_feature: MA Experiment 20000070 PARAMETER Experiment Name: At_100uM_ABA_Mutants_cDNA_P Parameter: Timepoint (hr) Value: 6
  misc_feature: MA Experiment 20000070 PARAMETER Experiment Name: At_100uM_ABA_Mutants_cDNA_P Parameter: Tissue Value: Aerial
  misc_feature: MA Experiment 20000070 PARAMETER Experiment Name: At_100uM_ABA_Mutants_cDNA_P Parameter: Treatment Value: 100uM ABA vs. No Treatment
  misc_feature: MA Experiment ID: 20000071 Result: Up-regulated in Transcription
  misc_feature: MA Experiment 20000071 PARAMETER Experiment Name: At_100uM_ABA_Mutants_cDNA_P Parameter: Plant Line Value: CS8104
  misc_feature: MA Experiment 20000071 PARAMETER Experiment Name: At_100uM_ABA_Mutants_cDNA_P Parameter: Timepoint (hr) Value: 6
  misc_feature: MA Experiment 20000071 PARAMETER Experiment Name: At_100uM_ABA_Mutants_cDNA_P Parameter: Tissue Value: Aerial
  misc_feature: MA Experiment 20000071 PARAMETER Experiment Name: At_100uM_ABA_Mutants_cDNA_P Parameter: Treatment Value: 100uM ABA vs. No Treatment
  misc_feature: MA Experiment ID: 20000072 Result: Up-regulated in Transcription
  misc_feature: MA Experiment 20000072 PARAMETER Experiment Name: At_100uM_ABA_Mutants_cDNA_P Parameter: Plant Line Value: CS8105
  misc_feature: MA Experiment 20000072 PARAMETER Experiment Name: At_100uM_ABA_Mutants_cDNA_P Parameter: Timepoint (hr) Value: 6
  misc_feature: MA Experiment 20000072 PARAMETER Experiment Name: At_100uM_ABA_Mutants_cDNA_P Parameter: Tissue Value: Aerial
  misc_feature: MA Experiment 20000072 PARAMETER Experiment Name: At_100uM_ABA_Mutants_cDNA_P Parameter: Treatment Value: 100uM ABA vs. No Treatment
  misc_feature: MA Experiment ID: 20000086 Result: Up-regulated in Transcription
  misc_feature: MA Experiment 20000086 PARAMETER Experiment Name: At_100uM_ABA_Mutants_cDNA_P Parameter: Plant Line Value: CS22
  misc_feature: MA Experiment 20000086 PARAMETER Experiment Name: At_100uM_ABA_Mutants_cDNA_P Parameter: Timepoint (hr) Value: 6
  misc_feature: MA Experiment 20000086 PARAMETER Experiment Name: At_100uM_ABA_Mutants_cDNA_P Parameter: Tissue Value: Aerial
  misc_feature: MA Experiment 20000086 PARAMETER Experiment Name: At_100uM_ABA_Mutants_cDNA_P Parameter: Treatment Value: 100uM ABA vs. No Treatment
  misc_feature: MA Experiment ID: 20000087 Result: Up-regulated in Transcription
  misc_feature: MA Experiment 20000087 PARAMETER Experiment Name: At_100uM_ABA_Mutants_cDNA_P Parameter: Plant Line Value: WS
  misc_feature: MA Experiment 20000087 PARAMETER Experiment Name: At_100uM_ABA_Mutants_cDNA_P Parameter: Timepoint (hr) Value: 6
  misc_feature: MA Experiment 20000087 PARAMETER Experiment Name: At_100uM_ABA_Mutants_cDNA_P Parameter: Tissue Value: Aerial
  misc_feature: MA Experiment 20000087 PARAMETER Experiment Name: At_100uM_ABA_Mutants_cDNA_P Parameter: Treatment Value: 100uM ABA vs. No Treatment
  misc_feature: MA Experiment ID: 20000088 Result: Up-regulated in Transcription
  misc_feature: MA Experiment 20000088 PARAMETER Experiment Name: At_100uM_ABA_Mutants_cDNA_P Parameter: Plant Line Value: Landsberg
  misc_feature: MA Experiment 20000088 PARAMETER Experiment Name: At_100uM_ABA_Mutants_cDNA_P Parameter: Timepoint (hr) Value: 6
  misc_feature: MA Experiment 20000088 PARAMETER Experiment Name: At_100uM_ABA_Mutants_cDNA_P Parameter: Tissue Value: Aerial
  misc_feature: MA Experiment 20000088 PARAMETER Experiment Name: At_100uM_ABA_Mutants_cDNA_P Parameter: Treatment Value: 100uM ABA vs. No Treatment
  misc_feature: MA Experiment ID: 20000089 Result: Up-regulated in Transcription
  misc_feature: MA Experiment ID: 20000117 Result: Up-regulated in Transcription
  misc_feature: MA Experiment 20000117 PARAMETER Experiment Name: At_100uM_ABA_Mutants_cDNA_P Parameter: Plant Line Value: Columbia
  misc_feature: MA Experiment 20000117 PARAMETER Experiment Name: At_100uM_ABA_Mutants_cDNA_P Parameter: Timepoint (hr) Value: 6
  misc_feature: MA Experiment 20000117 PARAMETER Experiment Name: At_100uM_ABA_Mutants_cDNA_P Parameter: Tissue Value: Aerial
  misc_feature: MA Experiment 20000117 PARAMETER Experiment Name: At_100uM_ABA_Mutants_cDNA_P Parameter: Treatment Value: 100uM ABA vs. No Treatment
  misc_feature: MA Experiment ID: 20000166 Result: Up-regulated in Transcription
  misc_feature: MA Experiment 20000166 PARAMETER Experiment Name: At_100uM_ABA_P Parameter: Age (day) Value: 14
  misc_feature: MA Experiment 20000166 PARAMETER Experiment Name: At_100uM_ABA_P Parameter: Organism Value: A. thaliana
  misc_feature: MA Experiment 20000166 PARAMETER Experiment Name: At_100uM_ABA_P Parameter: Plant Line Value: WS
  misc_feature: MA Experiment 20000166 PARAMETER Experiment Name: At_100uM_ABA_P Parameter: Timepoint (hr) Value: 1
  misc_feature: MA Experiment 20000166 PARAMETER Experiment Name: At_100uM_ABA_P Parameter: Tissue Value: Aerial
  misc_feature: MA Experiment 20000166 PARAMETER Experiment Name: At_100uM_ABA_P Parameter: Treatment Value: 100uM ABA vs. No Treatment
  misc_feature: MA Experiment ID: 20000169 Result: Up-regulated in Transcription
  misc_feature: MA Experiment 20000169 PARAMETER Experiment Name: At_100uM_ABA_P Parameter: Age (day) Value: 14
  misc_feature: MA Experiment 20000169 PARAMETER Experiment Name: At_100uM_ABA_P Parameter: Organism Value: A. thaliana
  misc_feature: MA Experiment 20000169 PARAMETER Experiment Name: At_100uM_ABA_P Parameter: Plant Line Value: WS
  misc_feature: MA Experiment 20000169 PARAMETER Experiment Name: At_100uM_ABA_P Parameter: Timepoint (hr) Value: 6
  misc_feature: MA Experiment 20000169 PARAMETER Experiment Name: At_100uM_ABA_P Parameter: Tissue Value: Aerial
  misc_feature: MA Experiment 20000169 PARAMETER Experiment Name: At_100uM_ABA_P Parameter: Treatment Value: 100uM ABA vs. No Treatment
  misc_feature: MA Experiment ID: 20000179 Result: Down-regulated in Transcription
  misc_feature: MA Experiment 20000179 PARAMETER Experiment Name: At_Germinating_Seeds_P Parameter: Age (hr) Value: 6 vs. 0
  misc_feature: MA Experiment 20000179 PARAMETER Experiment Name: At_Germinating_Seeds_P Parameter: Tissue Value: Germinating Seeds
  misc_feature: MA Experiment ID: 20000182 Result: Up-regulated in Transcription
  misc_feature: MA Experiment 20000182 PARAMETER Experiment Name: At_2mM_SA_P Parameter: Age (day) Value: 14
  misc_feature: MA Experiment 20000182 PARAMETER Experiment Name: At_2mM_SA_P Parameter: Organism Value: A. thaliana
  misc_feature: MA Experiment 20000182 PARAMETER Experiment Name: At_2mM_SA_P Parameter: Plant Line Value: WS
  misc_feature: MA Experiment 20000182 PARAMETER Experiment Name: At_2mM_SA_P Parameter: Timepoint (hr) Value: 6
  misc_feature: MA Experiment 20000182 PARAMETER Experiment Name: At_2mM_SA_P Parameter: Tissue Value: Aerial
  misc_feature: MA Experiment 20000182 PARAMETER Experiment Name: At_2mM_SA_P Parameter: Treatment Value: 2mM SA vs. No Treatment
  misc_feature: MA Experiment ID: 20000185 Result: Up-regulated in Transcription
  misc_feature: MA Experiment 20000185 PARAMETER Experiment Name: At_Roots__P Parameter: Age (day) Value: 7 vs. 21
  misc_feature: MA Experiment 20000185 PARAMETER Experiment Name: At_Roots__P Parameter: Organism Value: A. thaliana
  misc_feature: MA Experiment 20000185 PARAMETER Experiment Name: At_Roots__P Parameter: Tissue Value: Roots vs. Whole Plant
  misc_feature: MA Experiment ID: 20000234 Result: Down-regulated in Transcription
  misc_feature: MA Experiment 20000234 PARAMETER Experiment Name: At_Siliques_P Parameter: Age (day) Value: 21
  misc_feature: MA Experiment 20000234 PARAMETER Experiment Name: At_Siliques_P Parameter: Organism Value: A. thaliana
  misc_feature: MA Experiment 20000234 PARAMETER Experiment Name: At_Siliques_P Parameter: Plant Line Value: WS
  misc_feature: MA Experiment 20000234 PARAMETER Experiment Name: At_Siliques_P Parameter: Tissue Value: Less Than 5mm Siliques vs. Whole Plant
  misc_feature: MA Experiment ID: 20000267 Result: Up-regulated in Transcription
  misc_feature: MA Experiment 20000267 PARAMETER Experiment Name: At_Drought_P Parameter: Age (day) Value: 7
  misc_feature: MA Experiment 20000267 PARAMETER Experiment Name: At_Drought_P Parameter: Organism Value: A. thaliana
  misc_feature: MA Experiment 20000267 PARAMETER Experiment Name: At_Drought_P Parameter: Plant Line Value: WS
  misc_feature: MA Experiment 20000267 PARAMETER Experiment Name: At_Drought_P Parameter: Timepoint (hr) Value: 6
  misc_feature: MA Experiment 20000267 PARAMETER Experiment Name: At_Drought_P Parameter: Tissue Value: Whole Plant
  misc_feature: MA Experiment 20000267 PARAMETER Experiment Name: At_Drought_P Parameter: Treatment Value: Drought vs. No Drought
  misc_feature: MA Experiment ID: 20000268 Result: Up-regulated in Transcription
  misc_feature: MA Experiment 20000268 PARAMETER Experiment Name: At_100mM_NaCl__P Parameter: Age (day) Value: 14
  misc_feature: MA Experiment 20000268 PARAMETER Experiment Name: At_100mM_NaCl__P Parameter: Organism Value: A. thaliana
  misc_feature: MA Experiment 20000268 PARAMETER Experiment Name: At_100mM_NaCl__P Parameter: Plant Line Value: WS
  misc_feature: MA Experiment 20000268 PARAMETER Experiment Name: At_100mM_NaCl__P Parameter: Timepoint (hr) Value: 6
  misc_feature: MA Experiment 20000268 PARAMETER Experiment Name: At_100mM_NaCl__P Parameter: Tissue Value: Whole Plant
  misc_feature: MA Experiment 20000268 PARAMETER Experiment Name: At_100mM_NaCl__P Parameter: Treatment Value: 100mM NaCl vs. No Treatment
  misc_feature: MA Experiment ID: 20000286 Result: Down-regulated in Transcription
  misc_feature: MA Experiment 20000286 PARAMETER Experiment Name: At_Open_Flower_P Parameter: Age (day) Value: 21
  misc_feature: MA Experiment 20000286 PARAMETER Experiment Name: At_Open_Flower_P Parameter: Plant Line Value: WS
  misc_feature: MA Experiment 20000286 PARAMETER Experiment Name: At_Open_Flower_P Parameter: Tissue Value: Half Open vs. Whole Plant
  misc_feature: MA Experiment ID: 20000436 Result: Up-regulated in Transcription
  misc_feature: MA Experiment 20000436 PARAMETER Experiment Name: At_Drought_P Parameter: Age (day) Value: 7
  misc_feature: MA Experiment 20000436 PARAMETER Experiment Name: At_Drought_P Parameter: Organism Value: A. thaliana
  misc_feature: MA Experiment 20000436 PARAMETER Experiment Name: At_Drought_P Parameter: Plant Line Value: WS
  misc_feature: MA Experiment 20000436 PARAMETER Experiment Name: At_Drought_P Parameter: Timepoint (hr) Value: 12
  misc_feature: MA Experiment 20000436 PARAMETER Experiment Name: At_Drought_P Parameter: Tissue Value: Whole Plant
  misc_feature: MA Experiment 20000436 PARAMETER Experiment Name: At_Drought_P Parameter: Treatment Value: Drought vs. No Drought
  misc_feature: MA Experiment ID: 20000437 Result: Up-regulated in Transcription
  misc_feature: MA Experiment 20000437 PARAMETER Experiment Name: At_Drought_P Parameter: Age (day) Value: 8
  misc_feature: MA Experiment 20000437 PARAMETER Experiment Name: At_Drought_P Parameter: Organism Value: A. thaliana
  misc_feature: MA Experiment 20000437 PARAMETER Experiment Name: At_Drought_P Parameter: Plant Line Value: WS
  misc_feature: MA Experiment 20000437 PARAMETER Experiment Name: At_Drought_P Parameter: Timepoint (hr) Value: 24
  misc_feature: MA Experiment 20000437 PARAMETER Experiment Name: At_Drought_P Parameter: Tissue Value: Whole Plant
  misc_feature: MA Experiment 20000437 PARAMETER Experiment Name: At_Drought_P Parameter: Treatment Value: Drought vs. No Drought
  misc_feature: MA Experiment ID: 20000439 Result: Up-regulated in Transcription
  misc_feature: MA Experiment 20000439 PARAMETER Experiment Name: At_Roots__P Parameter: Age (day) Value: 14 vs. 21
  misc_feature: MA Experiment 20000439 PARAMETER Experiment Name: At_Roots__P Parameter: Organism Value: A. thaliana
  misc_feature: MA Experiment 20000439 PARAMETER Experiment Name: At_Roots__P Parameter: Tissue Value: Roots vs. Whole Plant
  misc_feature: MA Experiment ID: 20000453 Result: Up-regulated in Transcription
  misc_feature: MA Experiment 20000453 PARAMETER Experiment Name: At_100uM_ABA_P Parameter: Age (day) Value: 15
  misc_feature: MA Experiment 20000453 PARAMETER Experiment Name: At_100uM_ABA_P Parameter: Organism Value: A. thaliana
  misc_feature: MA Experiment 20000453 PARAMETER Experiment Name: At_100uM_ABA_P Parameter: Plant Line Value: WS
  misc_feature: MA Experiment 20000453 PARAMETER Experiment Name: At_100uM_ABA_P Parameter: Timepoint (hr) Value: 24
  misc_feature: MA Experiment 20000453 PARAMETER Experiment Name: At_100uM_ABA_P Parameter: Tissue Value: Aerial
  misc_feature: MA Experiment 20000453 PARAMETER Experiment Name: At_100uM_ABA_P Parameter: Treatment Value: 100uM ABA vs. No Treatment
  misc_feature: MA Experiment ID: 20000709 Result: Up-regulated in Transcription
  misc_feature: MA Experiment 20000709 PARAMETER Experiment Name: At_15mM_NH4NO3_L-to-H_P Parameter: Age (hr) Value: 14
  misc_feature: MA Experiment 20000709 PARAMETER Experiment Name: At_15mM_NH4NO3_L-to-H_P Parameter: Organism Value: A. thaliana
  misc_feature: MA Experiment 20000709 PARAMETER Experiment Name: At_15mM_NH4NO3_L-to-H_P Parameter: Plant Line Value: WS
  misc_feature: MA Experiment 20000709 PARAMETER Experiment Name: At_15mM_NH4NO3_L-to-H_P Parameter: Timepoint (hr) Value: 4
  misc_feature: MA Experiment 20000709 PARAMETER Experiment Name: At_15mM_NH4NO3_L-to-H_P Parameter: Tissue Value: Aerial
  misc_feature: MA Experiment 20000709 PARAMETER Experiment Name: At_15mM_NH4NO3_L-to-H_P Parameter: Treatment Value: 15mM NH4NO3 vs. 30mM Mannitol
  misc_feature: MA Experiment ID: 20001555 Result: Up-regulated in Transcription
  misc_feature: MA Experiment 20001555 PARAMETER Experiment Name: At_Drought_Soil_Dry_P Parameter: Age (day) Value: 24
  misc_feature: MA Experiment 20001555 PARAMETER Experiment Name: At_Drought_Soil_Dry_P Parameter: Organism Value: A. thaliana
  misc_feature: MA Experiment 20001555 PARAMETER Experiment Name: At_Drought_Soil_Dry_P Parameter: Plant Line Value: WS
  misc_feature: MA Experiment 20001555 PARAMETER Experiment Name: At_Drought_Soil_Dry_P Parameter: Post Timepoint (hr) Value: None
  misc_feature: MA Experiment 20001555 PARAMETER Experiment Name: At_Drought_Soil_Dry_P Parameter: Post-Treatment Value: None
  misc_feature: MA Experiment 20001555 PARAMETER Experiment Name: At_Drought_Soil_Dry_P Parameter: Timepoint (day) Value: 10
  misc_feature: MA Experiment 20001555 PARAMETER Experiment Name: At_Drought_Soil_Dry_P Parameter: Treatment Value: Drought vs. No Drought
  misc_feature: MA Experiment ID: 20001557 Result: Up-regulated in Transcription
  misc_feature: MA Experiment 20001557 PARAMETER Experiment Name: At_Drought_Soil_Dry_P Parameter: Age (day) Value: 27
  misc_feature: MA Experiment 20001557 PARAMETER Experiment Name: At_Drought_Soil_Dry_P Parameter: Organism Value: A. thaliana
  misc_feature: MA Experiment 20001557 PARAMETER Experiment Name: At_Drought_Soil_Dry_P Parameter: Plant Line Value: WS
  misc_feature: MA Experiment 20001557 PARAMETER Experiment Name: At_Drought_Soil_Dry_P Parameter: Post Timepoint (hr) Value: 3
  misc_feature: MA Experiment 20001557 PARAMETER Experiment Name: At_Drought_Soil_Dry_P Parameter: Post-Treatment Value: Re-Water vs. No Drought
  misc_feature: MA Experiment 20001557 PARAMETER Experiment Name: At_Drought_Soil_Dry_P Parameter: Timepoint (day) Value: 13
  misc_feature: MA Experiment 20001557 PARAMETER Experiment Name: At_Drought_Soil_Dry_P Parameter: Treatment Value: Drought vs. No Drought
  misc_feature: MA Experiment ID: 20001560 Result: Up-regulated in Transcription
  misc_feature: MA Experiment 20001560 PARAMETER Experiment Name: At_Drought_Soil_Dry_P Parameter: Age (day) Value: 28
  misc_feature: MA Experiment 20001560 PARAMETER Experiment Name: At_Drought_Soil_Dry_P Parameter: Organism Value: A. thaliana
  misc_feature: MA Experiment 20001560 PARAMETER Experiment Name: At_Drought_Soil_Dry_P Parameter: Plant Line Value: WS
  misc_feature: MA Experiment 20001560 PARAMETER Experiment Name: At_Drought_Soil_Dry_P Parameter: Post Timepoint (hr) Value: None
  misc_feature: MA Experiment 20001560 PARAMETER Experiment Name: At_Drought_Soil_Dry_P Parameter: Post-Treatment Value: None
  misc_feature: MA Experiment 20001560 PARAMETER Experiment Name: At_Drought_Soil_Dry_P Parameter: Timepoint (day) Value: 14
  misc_feature: MA Experiment 20001560 PARAMETER Experiment Name: At_Drought_Soil_Dry_P Parameter: Treatment Value: Drought vs. No Drought
  misc_feature: MA Experiment ID: 20001904 Result: Up-regulated in Transcription
  misc_feature: MA Experiment 20001904 PARAMETER Experiment Name: At_Drought_Reproduction_P Parameter: Age (day) Value: 37
  misc_feature: MA Experiment 20001904 PARAMETER Experiment Name: At_Drought_Reproduction_P Parameter: Organism Value: A. thaliana
  misc_feature: MA Experiment 20001904 PARAMETER Experiment Name: At_Drought_Reproduction_P Parameter: Plant Line Value: WS
  misc_feature: MA Experiment 20001904 PARAMETER Experiment Name: At_Drought_Reproduction_P Parameter: Timepoint (day) Value: 7
  misc_feature: MA Experiment 20001904 PARAMETER Experiment Name: At_Drought_Reproduction_P Parameter: Tissue Value: Rosettes
  misc_feature: MA Experiment 20001904 PARAMETER Experiment Name: At_Drought_Reproduction_P Parameter: Treatment Value: Drought vs. No Drought
  misc_feature: MA Experiment ID: 20001905 Result: Up-regulated in Transcription
  misc_feature: MA Experiment 20001905 PARAMETER Experiment Name: At_Drought_Reproduction_P Parameter: Age (day) Value: 40
  misc_feature: MA Experiment 20001905 PARAMETER Experiment Name: At_Drought_Reproduction_P Parameter: Organism Value: A. thaliana
  misc_feature: MA Experiment 20001905 PARAMETER Experiment Name: At_Drought_Reproduction_P Parameter: Plant Line Value: WS
  misc_feature: MA Experiment 20001905 PARAMETER Experiment Name: At_Drought_Reproduction_P Parameter: Timepoint (day) Value: 10
  misc_feature: MA Experiment 20001905 PARAMETER Experiment Name: At_Drought_Reproduction_P Parameter: Tissue Value: Rosettes
  misc_feature: MA Experiment 20001905 PARAMETER Experiment Name: At_Drought_Reproduction_P Parameter: Treatment Value: Drought vs. No Drought
  misc_feature: MA Experiment ID: 20001906 Result: Up-regulated in Transcription
  misc_feature: MA Experiment 20001906 PARAMETER Experiment Name: At_Drought_Reproduction_P Parameter: Age (day) Value: 35
  misc_feature: MA Experiment 20001906 PARAMETER Experiment Name: At_Drought_Reproduction_P Parameter: Organism Value: A. thaliana
  misc_feature: MA Experiment 20001906 PARAMETER Experiment Name: At_Drought_Reproduction_P Parameter: Plant Line Value: WS
  misc_feature: MA Experiment 20001906 PARAMETER Experiment Name: At_Drought_Reproduction_P Parameter: Timepoint (day) Value: 5
  misc_feature: MA Experiment 20001906 PARAMETER Experiment Name: At_Drought_Reproduction_P Parameter: Tissue Value: Siliques
  misc_feature: MA Experiment 20001906 PARAMETER Experiment Name: At_Drought_Reproduction_P Parameter: Treatment Value: Drought vs. No Drought
  misc_feature: MA Experiment ID: 20001908 Result: Up-regulated in Transcription
  misc_feature: MA Experiment 20001908 PARAMETER Experiment Name: At_Drought_Reproduction_P Parameter: Age (day) Value: 40
  misc_feature: MA Experiment 20001908 PARAMETER Experiment Name: At_Drought_Reproduction_P Parameter: Organism Value: A. thaliana
  misc_feature: MA Experiment 20001908 PARAMETER Experiment Name: At_Drought_Reproduction_P Parameter: Plant Line Value: WS
  misc_feature: MA Experiment 20001908 PARAMETER Experiment Name: At_Drought_Reproduction_P Parameter: Timepoint (day) Value: 10
  misc_feature: MA Experiment 20001908 PARAMETER Experiment Name: At_Drought_Reproduction_P Parameter: Tissue Value: Siliques
  misc_feature: MA Experiment 20001908 PARAMETER Experiment Name: At_Drought_Reproduction_P Parameter: Treatment Value: Drought vs. No Drought
  misc_feature: MA Experiment ID: 20001910 Result: Up-regulated in Transcription
  misc_feature: MA Experiment 20001910 PARAMETER Experiment Name: At_Drought_Reproduction_P Parameter: Age (day) Value: 37
  misc_feature: MA Experiment 20001910 PARAMETER Experiment Name: At_Drought_Reproduction_P Parameter: Organism Value: A. thaliana
  misc_feature: MA Experiment 20001910 PARAMETER Experiment Name: At_Drought_Reproduction_P Parameter: Plant Line Value: WS
  misc_feature: MA Experiment 20001910 PARAMETER Experiment Name: At_Drought_Reproduction_P Parameter: Timepoint (day) Value: 7
  misc_feature: MA Experiment 20001910 PARAMETER Experiment Name: At_Drought_Reproduction_P Parameter: Tissue Value: Flowers
  misc_feature: MA Experiment 20001910 PARAMETER Experiment Name: At_Drought_Reproduction_P Parameter: Treatment Value: Drought vs. No Drought
  misc_feature: MA Experiment ID: 20001911 Result: Up-regulated in Transcription
  misc_feature: MA Experiment 20001911 PARAMETER Experiment Name: At_Drought_Reproduction_P Parameter: Age (day) Value: 40
  misc_feature: MA Experiment 20001911 PARAMETER Experiment Name: At_Drought_Reproduction_P Parameter: Organism Value: A. thaliana
  misc_feature: MA Experiment 20001911 PARAMETER Experiment Name: At_Drought_Reproduction_P Parameter: Plant Line Value: WS
  misc_feature: MA Experiment 20001911 PARAMETER Experiment Name: At_Drought_Reproduction_P Parameter: Timepoint (day) Value: 10
  misc_feature: MA Experiment 20001911 PARAMETER Experiment Name: At_Drought_Reproduction_P Parameter: Tissue Value: Flowers
  misc_feature: MA Experiment 20001911 PARAMETER Experiment Name: At_Drought_Reproduction_P Parameter: Treatment Value: Drought vs. No Drought
agaagtttcaactttcaaacatatctttacagttctttcttgctaaacaacaataaaggggaaaataggttaattatgatgaaatctggggctgatttgcaatttccaccaggatttagatttcatcctacggatgaggagctagtcctcatgtatctctgtcgtaaatgcgcgtcgcagccgatccctgctccgattatcaccgaactcgatttgtaccgatatgatccttgggaccttcccgacatggctttgtacggtgaaaaggagtggtattttttctcaccaagagatcgaaagtatccaaacggttcaagacccaaccgtgcagctggtactggatattggaaagctaccggagctgataaaccaataggtcgtcctaaaccggttggtattaagaaggctctagtgttttactcgggaaaacctccaaatggagagaaaaccaattggattatgcacgaataccggctcgctgacgttgaccggtcggttcgtaagaaaaacagtctaagattggacgattgggtattgtgtcgtatatataacaagaaaggtgtcatcgagaagcgacgaagcgatatcgaggacgggttaaagcctgtgactgacacgtgtccaccggaatctgtggcgagattgatctccggctcggagcaagcggtgtcaccggaattcacgtgtagcaacggtcggttgagtaatgcccttgattttccgtttaattacgtagatgccatcgccgataacgagattgtgtcacggctattgggcgggaatcagatgtggtcgacgacgcttgatccacttgtggttaggcagggaactttctgagttgtcacgtgcgattagagttagtggaaagtggaaactatcactgtctgttttcgcacgtgtcgggtagccgtcttgaaacccgctagctgatccagaagtgacctcattgggcttttcaacaacaattgggccttagcctttcttctcccttagtaagacaagctactgtattgtgttgttattttcaggaagcaatataaattcattttaatcactc

SEQ ID NO: 23479 - protein, 278 aa, Arabidopsis thaliana
  peptide (1)..(278): Ceres Seq. ID no. 13490843
  misc_feature (35)..(160): Pfam Name: No apical meristem (NAM) protein Pfam Description: No apical meristem (NAM) protein
  misc_feature (33)..(191): Homolog of NCBI NO: 14485513 NR Description: putative NAC domain protein [Solanum tuberosum]
  misc_feature (14)..(231): Homolog of NCBI NO: 23397338 NR Description: unknown protein [Arabidopsis thaliana]
  misc_feature (27)..(211): Homolog of NCBI NO: 22326685 NR Description: No apical meristem (NAM) protein family
  misc_feature (31)..(231): Homolog of NCBI NO: 10177060 NR Description: contains similarity to NAC-domain
  misc_feature (14)..(231): Homolog of NCBI NO: 30697896 NR Description: No apical meristem (NAM) protein family
  misc_feature (33)..(192): Homolog of NCBI NO: 15223456 NR Description: No apical meristem (NAM) protein family
  misc_feature (27)..(191): Homolog of NCBI NO: 25458553 NR Description: OsNAC6 protein [imported] - rice
  misc_feature (31)..(193): Homolog of NCBI NO: 21105748 NR Description: nam-like protein 10 [Petunia x hybrida]
  misc_feature (27)..(278): Homolog of NCBI NO: 21593134 NR Description: GRAB1-like protein [Arabidopsis thaliana]
  misc_feature (26)..(278): Homolog of NCBI NO: 15223963 NR Description: No apical meristem (NAM) protein family
RSFNFQTYLYSSFLLNNNKGENRLIMMKSGADLQFPPGFRFHPTDEELVLMYLCRKCASQPIPAPIITELDLYRYDPWDLPDMALYGEKEWYFFSPRDRKYPNGSRPNRAAGTGYWKATGADKPIGRPKPVGIKKALVFYSGKPPNGEKTNWIMHEYRLADVDRSVRKKNSLRLDDWVLCRIYNKKGVIEKRRSDIEDGLKPVTDTCPPESVARLISGSEQAVSPEFTCSNGRLSNALDFPFNYVDAIADNEIVSRLLGGNQMWSTTLDPLVVRQGTF

SEQ ID NO: 23480 - protein, 253 aa, Arabidopsis thaliana
  peptide (1)..(253): Ceres Seq. ID no. 13490844
  misc_feature (10)..(135): Pfam Name: No apical meristem (NAM) protein Pfam Description: No apical meristem (NAM) protein
  misc_feature (6)..(168): Homolog of NCBI NO: 21105748 NR Description: nam-like protein 10 [Petunia x hybrida]
  misc_feature (2)..(253): Homolog of NCBI NO: 21593134 NR Description: GRAB1-like protein [Arabidopsis thaliana]
  misc_feature (1)..(206): Homolog of NCBI NO: 23397338 NR Description: unknown protein [Arabidopsis thaliana]
  misc_feature (6)..(206): Homolog of NCBI NO: 10177060 NR Description: contains similarity to NAC-domain
  misc_feature (8)..(167): Homolog of NCBI NO: 15223456 NR Description: No apical meristem (NAM) protein family
  misc_feature (2)..(166): Homolog of NCBI NO: 25458553 NR Description: OsNAC6 protein [imported] - rice
  misc_feature (1)..(206): Homolog of NCBI NO: 30697896 NR Description: No apical meristem (NAM) protein family
  misc_feature (2)..(186): Homolog of NCBI NO: 22326685 NR Description: No apical meristem (NAM) protein family
  misc_feature (8)..(166): Homolog of NCBI NO: 14485513 NR Description: putative NAC domain protein [Solanum tuberosum]
  misc_feature (1)..(253): Homolog of NCBI NO: 15223963 NR Description: No apical meristem (NAM) protein family
MMKSGADLQFPPGFRFHPTDEELVLMYLCRKCASQPIPAPIITELDLYRYDPWDLPDMALYGEKEWYFFSPRDRKYPNGSRPNRAAGTGYWKATGADKPIGRPKPVGIKKALVFYSGKPPNGEKTNWIMHEYRLADVDRSVRKKNSLRLDDWVLCRIYNKKGVIEKRRSDIEDGLKPVTDTCPPESVARLISGSEQAVSPEFTCSNGRLSNALDFPFNYVDAIADNEIVSRLLGGNQMWSTTLDPLVVRQGTF

SEQ ID NO: 23481 - protein, 252 aa, Arabidopsis thaliana
  peptide (1)..(252): Ceres Seq. ID no. 13490845
  misc_feature (9)..(134): Pfam Name: No apical meristem (NAM) protein Pfam Description: No apical meristem (NAM) protein
  misc_feature (7)..(165): Homolog of NCBI NO: 14485513 NR Description: putative NAC domain protein [Solanum tuberosum]
  misc_feature (1)..(205): Homolog of NCBI NO: 23397338 NR Description: unknown protein [Arabidopsis thaliana]
  misc_feature (1)..(185): Homolog of NCBI NO: 22326685 NR Description: No apical meristem (NAM) protein family
  misc_feature (5)..(205): Homolog of NCBI NO: 10177060 NR Description: contains similarity to NAC-domain
  misc_feature (1)..(205): Homolog of NCBI NO: 30697896 NR Description: No apical meristem (NAM) protein family
  misc_feature (7)..(166): Homolog of NCBI NO: 15223456 NR Description: No apical meristem (NAM) protein family
  misc_feature (1)..(165): Homolog of NCBI NO: 25458553 NR Description: OsNAC6 protein [imported] - rice
  misc_feature (5)..(167): Homolog of NCBI NO: 21105748 NR Description: nam-like protein 10 [Petunia x hybrida]
  misc_feature (1)..(252): Homolog of NCBI NO: 21593134 NR Description: GRAB1-like protein [Arabidopsis thaliana]
  misc_feature (1)..(252): Homolog of NCBI NO: 15223963 NR Description: No apical meristem (NAM) protein family
MKSGADLQFPPGFRFHPTDEELVLMYLCRKCASQPIPAPIITELDLYRYDPWDLPDMALYGEKEWYFFSPRDRKYPNGSRPNRAAGTGYWKATGADKPIGRPKPVGIKKALVFYSGKPPNGEKTNWIMHEYRLADVDRSVRKKNSLRLDDWVLCRIYNKKGVIEKRRSDIEDGLKPVTDTCPPESVARLISGSEQAVSPEFTCSNGRLSNALDFPFNYVDAIADNEIVSRLLGGNQMWSTTLDPLVVRQGTF

SEQ ID NO: 23482 - DNA, 1592 bp, Arabidopsis thaliana
  misc_feature (1)..(1592): Ceres Seq. ID no. 12737291
  misc_feature: MA Experiment ID: 108434 Result: Up-regulated in Transcription
  misc_feature: MA Experiment 108434 PARAMETER Experiment Name: At_Root_Tips_cDNA_P Parameter: Tissue Value: Root Tips
  misc_feature: MA Experiment ID: 108569 Result: Up-regulated in Transcription
  misc_feature: MA Experiment 108569 PARAMETER Experiment Name: At_0.001%_MeJA__cDNA_P Parameter: Timepoint (hr) Value: 6
  misc_feature: MA Experiment 108569 PARAMETER Experiment Name: At_0.001%_MeJA__cDNA_P Parameter: Tissue Value: Aerial
  misc_feature: MA Experiment 108569 PARAMETER Experiment Name: At_0.001%_MeJA__cDNA_P Parameter: Treatment Value: 0.001% MeJA vs. No Treatment
  misc_feature: MA Experiment ID: 108573 Result: Up-regulated in Transcription
  misc_feature: MA Experiment 108573 PARAMETER Experiment Name: At_Drought_cDNA_P Parameter: Timepoint (hr) Value: 6
  misc_feature: MA Experiment 108573 PARAMETER Experiment Name: At_Drought_cDNA_P Parameter: Tissue Value: Aerial
  misc_feature: MA Experiment 108573 PARAMETER Experiment Name: At_Drought_cDNA_P Parameter: Treatment Value: Drought vs. No Drought
  misc_feature: MA Experiment ID: 108576 Result: Down-regulated in Transcription
  misc_feature: MA Experiment 108576 PARAMETER Experiment Name: At_42deg_Heat_cDNA_P Parameter: Temperature (deg C) Value: 42 vs. 22
  misc_feature: MA Experiment 108576 PARAMETER Experiment Name: At_42deg_Heat_cDNA_P Parameter: Timepoint (hr) Value: 1
  misc_feature: MA Experiment 108576 PARAMETER Experiment Name: At_42deg_Heat_cDNA_P Parameter: Tissue Value: Aerial
  misc_feature: MA Experiment ID: 108595 Result: Down-regulated in Transcription
  misc_feature: MA Experiment 108595 PARAMETER Experiment Name: At_Ler-pi_Ovule_cDNA_P Parameter: Plant Line Value: null
  misc_feature: MA Experiment ID: 20000087 Result: Down-regulated in Transcription
  misc_feature: MA Experiment 20000087 PARAMETER Experiment Name: At_100uM_ABA_Mutants_cDNA_P Parameter: Plant Line Value: WS
  misc_feature: MA Experiment 20000087 PARAMETER Experiment Name: At_100uM_ABA_Mutants_cDNA_P Parameter: Timepoint (hr) Value: 6
  misc_feature: MA Experiment 20000087 PARAMETER Experiment Name: At_100uM_ABA_Mutants_cDNA_P Parameter: Tissue Value: Aerial
  misc_feature: MA Experiment 20000087 PARAMETER Experiment Name: At_100uM_ABA_Mutants_cDNA_P Parameter: Treatment Value: 100uM ABA vs. No Treatment
  misc_feature: MA Experiment ID: 20000111 Result: Down-regulated in Transcription
  misc_feature: MA Experiment 20000111 PARAMETER Experiment Name: At_42deg_Heat_cDNA_P Parameter: Temperature (deg C) Value: 42 vs. 22
  misc_feature: MA Experiment 20000111 PARAMETER Experiment Name: At_42deg_Heat_cDNA_P Parameter: Timepoint (hr) Value: 6
  misc_feature: MA Experiment 20000111 PARAMETER Experiment Name: At_42deg_Heat_cDNA_P Parameter: Tissue Value: Aerial
  misc_feature: MA Experiment ID: 20000328 Result: Down-regulated in Transcription
  misc_feature: MA Experiment 20000328 PARAMETER Experiment Name: At_42deg_Heat_Sub_P Parameter: Age (day) Value: 14
  misc_feature: MA Experiment 20000328 PARAMETER Experiment Name: At_42deg_Heat_Sub_P Parameter: Organism Value: A. thaliana
  misc_feature: MA Experiment 20000328 PARAMETER Experiment Name: At_42deg_Heat_Sub_P Parameter: Plant Line Value: WS
  misc_feature: MA Experiment 20000328 PARAMETER Experiment Name: At_42deg_Heat_Sub_P Parameter: Temperature (deg C) Value: 42 vs. 22
  misc_feature: MA Experiment 20000328 PARAMETER Experiment Name: At_42deg_Heat_Sub_P Parameter: Timepoint (hr) Value: 6
  misc_feature: MA Experiment 20000328 PARAMETER Experiment Name: At_42deg_Heat_Sub_P Parameter: Tissue Value: Aerial
agaacaccaggtaatagagagagaacaaaatagtctttactctttcagtgagagagagaagttagagctgtaaaagcacatgacttcgataccattggggcctcctcagcctccgtctttagctcctcagccgccgcatcttcacggcggagattctttgaaacgtcgtcccgatatagacaacgacaaggaaatgtctgctgctgttatagaaggaaatgatgctgttaccggtcacataatttctactacaattggaggcaaaaatggtgaacctaaacagaccattagttacatggccgaacgtgttgttggaacaggatcattcggaattgtattccaggcaaaatgcttggaaactggagaatcagtagccattaagaaggttttgcaagatcgccgttataaaaaccgagagttgcaattaatgcgactaatggaccatccaaatgtggtttccttgaagcattgtttcttctctacaacgactagagatgagctcttcctcaatctcgttatggagtatgtaccagagacattgtaccgggttttgaagcactatactagttcaaaccagcggatgcctatcttctatgtcaaactttacacataccaaatcttcagaggcttggcttatatccatactgctcctggtgtctgccacagagatgtgaaaccacaaaatcttttggttgatcccctcacccatcagtgtaagctctgtgattttggaagtgcaaaagtactggtgaaaggtgaagcaaacatatcatatatctgctctcggtattaccgagctccagaactcatctttggtgccacagagtatacatcatccattgatatatggtctgctggttgtgttctggcagagctacttcttgggcagccgttattcccgggagaaaattctgtggaccagctagtggagatcataaaggttcttggtactccaactcgcgaagaaatccggtgcatgaacccaaactacacagacttcagattcccacaaatcaaagcccacccttggcataaggttttccacaagcggatgcctccggaagccattgaccttgcatctcggcttcttcaatactcaccaagtctacgttgcactgcgctcgaggcatgtgcgcatccgtttttcaatgaactccgtgagccaaatgctcgtcttccaaatggccgacctctaccaccgttgttcaacttcaaacaagagttgtctggggcttcaccggagcttatcaacaggctaataccagagcatgtgaggcgacagatgaatggtggctttccatttcaagctggaccctagaaaagcgatctcgagatgcttttccagagcaaaatgccgccttatggaatgaaggagagggagatttacttctctctgattaactaagtatcagcttctgagaagagatgatgtctcctccttagacgtggccaattcagctttttgagaaatcaggaggcgatgattgtgtcctattatattctttttgttcactgacttgtagagagatacttttctcctgtatcagtatttgtatatgtttttgtccttgaaatgaaacaaaatcgattcc

SEQ ID NO: 23483 - protein, 412 aa, Arabidopsis thaliana
  peptide (1)..(412): Ceres Seq. ID no. 12737292
  misc_feature (72)..(356): Pfam Name: Protein kinase domain Pfam Description: Protein kinase domain
  misc_feature (34)..(400): Homolog of NCBI NO: 7434282 NR Description: shaggy protein kinase (EC 2.7.1.-) 6 - common
  misc_feature (33)..(401): Homolog of NCBI NO: 22326813 NR Description: protein kinase MSK-3 - like
  misc_feature (31)..(406): Homolog of NCBI NO: 7434281 NR Description: probable shaggy-like protein kinase etha (EC
  misc_feature (35)..(411): Homolog of NCBI NO: 18700188 NR Description: AT4g18710/F28A21_120 [Arabidopsis thaliana]
  misc_feature (35)..(411): Homolog of NCBI NO: 15233984 NR Description: shaggy-like protein kinase etha (EC 2.7.1.-)
  misc_feature (35)..(411): Homolog of NCBI NO: 12643751 NR Description: Shaggy-related protein kinase eta (ASK-eta)
  misc_feature (1)..(405): Homolog of NCBI NO: 15221476 NR Description: shaggy-like kinase, putative
  misc_feature (1)..(412): Homolog of NCBI NO: 12643750 NR Description: Shaggy-related protein kinase delta (ASK-delta)
  misc_feature (1)..(412): Homolog of NCBI NO: 21593135 NR Description: putative shaggy-like protein kinase dzeta
  misc_feature (1)..(412): Homolog of NCBI NO: 15224593 NR Description: putative shaggy-like protein kinase dzeta
MTSIPLGPPQPPSLAPQPPHLHGGDSLKRRPDIDNDKEMSAAVIEGNDAVTGHIISTTIGGKNGEPKQTISYMAERVVGTGSFGIVFQAKCLETGESVAIKKVLQDRRYKNRELQLMRLMDHPNVVSLKHCFFSTTTRDELFLNLVMEYVPETLYRVLKHYTSSNQRMPIFYVKLYTYQIFRGLAYIHTAPGVCHRDVKPQNLLVDPLTHQCKLCDFGSAKVLVKGEANISYICSRYYRAPELIFGATEYTSSIDIWSAGCVLAELLLGQPLFPGENSVDQLVEIIKVLGTPTREEIRCMNPNYTDFRFPQIKAHPWHKVFHKRMPPEAIDLASRLLQYSPSLRCTALEACAHPFFNELREPNARLPNGRPLPPLFNFKQELSGASPELINRLIPEHVRRQMNGGFPFQAGP

SEQ ID NO: 23484 - protein, 374 aa, Arabidopsis thaliana
  peptide (1)..(374): Ceres Seq. ID no. 12737293
  misc_feature (34)..(318): Pfam Name: Protein kinase domain Pfam Description: Protein kinase domain
  misc_feature (1)..(362): Homolog of NCBI NO: 7434282 NR Description: shaggy protein kinase (EC 2.7.1.-) 6 - common
  misc_feature (1)..(363): Homolog of NCBI NO: 22326813 NR Description: protein kinase MSK-3 - like
  misc_feature (1)..(368): Homolog of NCBI NO: 7434281 NR Description: probable shaggy-like protein kinase etha (EC
  misc_feature (1)..(373): Homolog of NCBI NO: 18700188 NR Description: AT4g18710/F28A21_120 [Arabidopsis thaliana]
  misc_feature (1)..(373): Homolog of NCBI NO: 15233984 NR Description: shaggy-like protein kinase etha (EC 2.7.1.-)
  misc_feature (1)..(373): Homolog of NCBI NO: 12643751 NR Description: Shaggy-related protein kinase eta (ASK-eta)
  misc_feature (1)..(367): Homolog of NCBI NO: 15221476 NR Description: shaggy-like kinase, putative
  misc_feature (1)..(374): Homolog of NCBI NO: 12643750 NR Description: Shaggy-related protein kinase delta (ASK-delta)
  misc_feature (1)..(374): Homolog of NCBI NO: 21593135 NR Description: putative shaggy-like protein kinase dzeta
  misc_feature (1)..(374): Homolog of NCBI NO: 15224593 NR Description: putative shaggy-like protein kinase dzeta
MSAAVIEGNDAVTGHIISTTIGGKNGEPKQTISYMAERVVGTGSFGIVFQAKCLETGESVAIKKVLQDRRYKNRELQLMRLMDHPNVVSLKHCFFSTTTRDELFLNLVMEYVPETLYRVLKHYTSSNQRMPIFYVKLYTYQIFRGLAYIHTAPGVCHRDVKPQNLLVDPLTHQCKLCDFGSAKVLVKGEANISYICSRYYRAPELIFGATEYTSSIDIWSAGCVLAELLLGQPLFPGENSVDQLVEIIKVLGTPTREEIRCMNPNYTDFRFPQIKAHPWHKVFHKRMPPEAIDLASRLLQYSPSLRCTALEACAHPFFNELREPNARLPNGRPLPPLFNFKQELSGASPELINRLIPEHVRRQMNGGFPFQAGP

SEQ ID NO: 23485 - protein, 340 aa, Arabidopsis thaliana
  peptide (1)..(340): Ceres Seq. ID no. 12737294
  misc_feature (1)..(284): Pfam Name: Protein kinase domain Pfam Description: Protein kinase domain
  misc_feature (1)..(328): Homolog of NCBI NO: 7434282 NR Description: shaggy protein kinase (EC 2.7.1.-) 6 - common
  misc_feature (1)..(329): Homolog of NCBI NO: 22326813 NR Description: protein kinase MSK-3 - like
  misc_feature (1)..(334): Homolog of NCBI NO: 7434281 NR Description: probable shaggy-like protein kinase etha (EC
  misc_feature (1)..(339): Homolog of NCBI NO: 18700188 NR Description: AT4g18710/F28A21_120 [Arabidopsis thaliana]
  misc_feature (1)..(339): Homolog of NCBI NO: 15233984 NR Description: shaggy-like protein kinase etha (EC 2.7.1.-)
  misc_feature (1)..(339): Homolog of NCBI NO: 12643751 NR Description: Shaggy-related protein kinase eta (ASK-eta)
  misc_feature (1)..(333): Homolog of NCBI NO: 15221476 NR Description: shaggy-like kinase, putative
  misc_feature (1)..(340): Homolog of NCBI NO: 12643750 NR Description: Shaggy-related protein kinase delta (ASK-delta)
  misc_feature (1)..(340): Homolog of NCBI NO: 21593135 NR Description: putative shaggy-like protein kinase dzeta
  misc_feature (1)..(340): Homolog of NCBI NO: 15224593 NR Description: putative shaggy-like protein kinase dzeta
MAERVVGTGSFGIVFQAKCLETGESVAIKKVLQDRRYKNRELQLMRLMDHPNVVSLKHCFFSTTTRDELFLNLVMEYVPETLYRVLKHYTSSNQRMPIFYVKLYTYQIFRGLAYIHTAPGVCHRDVKPQNLLVDPLTHQCKLCDFGSAKVLVKGEANISYICSRYYRAPELIFGATEYTSSIDIWSAGCVLAELLLGQPLFPGENSVDQLVEIIKVLGTPTREEIRCMNPNYTDFRFPQIKAHPWHKVFHKRMPPEAIDLASRLLQYSPSLRCTALEACAHPFFNELREPNARLPNGRPLPPLFNFKQELSGASPELINRLIPEHVRRQMNGGFPFQAGP

SEQ ID NO: 23486 - DNA, 909 bp, Arabidopsis thaliana
  misc_feature (1)..(909): Ceres Seq. ID no. 12488344
gttttgttctttcatagtcttctagatctgtagtttttttccgcgaccgcccaaaaaattctctgatcagacggtcgattggatcggagatttaaggtaaagaaaaaatggcgcaacaatcgttgatctacagttttgtagctcgcggcacggtgatcctcgttgagttcactgatttcaaaggtaatttcacctcaatcgctgctcagtgcctccagaagcttccgtcttcgaacaacaagttcacctacaactgcgacggtcataccttcaattaccttgtcgaagatggattcacctattgtgttgttgcggttgattctgctgggaggcaaattcccatgtcctttttggaaagagtaaaagaagattttaacaagcgatatggtggtggaaaagctgcaactgctcaagcaaacagcttgaataaggagtttggctctaaactgaaagagcatatgcagtattgcatggatcatcctgatgagattagcaagcttgctaaggtgaaggcgcaagtgtcagaagttaagggtgtaatgatggaaaacattgagaaggttcttgaccgtggtgagaaaattgagcttttggtggacaaaaccgaaaatcttcgctcacaggcacaagatttcagaacaacaggaacgcagatgagaagaaagatgtggcttcagaacatgaagataaaactcatagtgctcgccatcattatcgcactgattctcatcatcgtgctctcagtttgccatgggtttaagtgttaagcccagaaaattcaaaacttctgagatctttctcactcggtacatcgtagtgccttctcttttattgttcgatcttcaatctaatgtttctgcttgaattggttttgtatagatagacatatatgtatgctactcatttgct

SEQ ID NO: 23487 - protein, 219 aa, Arabidopsis thaliana
  peptide (1)..(219): Ceres Seq. ID no. 12488345
  misc_feature (1)..(219): Homolog of NCBI NO: 30685571 NR Description: synaptobrevin -related [Arabidopsis thaliana]
  misc_feature (1)..(194): Homolog of NCBI NO: 33347409 NR Description: synptobrevin-related protein [Pyrus pyrifolia]
  misc_feature (1)..(219): Homolog of NCBI NO: 27805765 NR Description: Putative vesicle-associated membrane protein 726
  misc_feature (1)..(219): Homolog of NCBI NO: 29150380 NR Description: synaptobrevin-like protein
  misc_feature (1)..(219): Homolog of NCBI NO: 15220315 NR Description: synaptobrevin 7B, putative; protein id:
  misc_feature (1)..(219): Homolog of NCBI NO: 30685375 NR Description: synaptobrevin -related [Arabidopsis thaliana]
  misc_feature (1)..(219): Homolog of NCBI NO: 27805753 NR Description: Vesicle-associated membrane protein 725
  misc_feature (1)..(219): Homolog of NCBI NO: 600710 NR Description: formerly called HAT24; synaptobrevin-related
  misc_feature (1)..(219): Homolog of NCBI NO: 15225796 NR Description: putative synaptobrevin
  misc_feature (1)..(219): Homolog of NCBI NO: 15220943 NR Description: synaptobrevin 7B, putative; protein id:
MAQQSLIYSFVARGTVILVEFTDFKGNFTSIAAQCLQKLPSSNNKFTYNCDGHTFNYLVEDGFTYCVVAVDSAGRQIPMSFLERVKEDFNKRYGGGKAATAQANSLNKEFGSKLKEHMQYCMDHPDEISKLAKVKAQVSEVKGVMMENIEKVLDRGEKIELLVDKTENLRSQAQDFRTTGTQMRRKMWLQNMKIKLIVLAIIIALILIIVLSVCHGFKC

SEQ ID NO: 23488 - protein, 141 aa, Arabidopsis thaliana
  peptide (1)..(141): Ceres Seq. ID no. 12488346
  misc_feature (1)..(141): Homolog of NCBI NO: 30685571 NR Description: synaptobrevin -related [Arabidopsis thaliana]
  misc_feature (1)..(116): Homolog of NCBI NO: 33347409 NR Description: synptobrevin-related protein [Pyrus pyrifolia]
  misc_feature (1)..(141): Homolog of NCBI NO: 27805765 NR Description: Putative vesicle-associated membrane protein 726
  misc_feature (1)..(141): Homolog of NCBI NO: 29150380 NR Description: synaptobrevin-like protein
  misc_feature (1)..(141): Homolog of NCBI NO: 15220315 NR Description: synaptobrevin 7B, putative; protein id:
  misc_feature (1)..(141): Homolog of NCBI NO: 30685375 NR Description: synaptobrevin -related [Arabidopsis thaliana]
  misc_feature (1)..(141): Homolog of NCBI NO: 27805753 NR Description: Vesicle-associated membrane protein 725
  misc_feature (1)..(141): Homolog of NCBI NO: 600710 NR Description: formerly called HAT24; synaptobrevin-related
  misc_feature (1)..(141): Homolog of NCBI NO: 15225796 NR Description: putative synaptobrevin
  misc_feature (1)..(141): Homolog of NCBI NO: 15220943 NR Description: synaptobrevin 7B, putative; protein id:
MSFLERVKEDFNKRYGGGKAATAQANSLNKEFGSKLKEHMQYCMDHPDEISKLAKVKAQVSEVKGVMMENIEKVLDRGEKIELLVDKTENLRSQAQDFRTTGTQMRRKMWLQNMKIKLIVLAIIIALILIIVLSVCHGFKC

SEQ ID NO: 23489 - DNA, 1325 bp, Arabidopsis thaliana
  misc_feature (1)..(1325): Ceres Seq. ID no. 12335232
  misc_feature: MA Experiment ID: 108462 Result: Up-regulated in Transcription
  misc_feature: MA Experiment 108462 PARAMETER Experiment Name: At_Germinating_Seeds_cDNA_P Parameter: Age (day) Value: 2 vs. 0
  misc_feature: MA Experiment 108462 PARAMETER Experiment Name: At_Germinating_Seeds_cDNA_P Parameter: Tissue Value: Germinating Seeds
  misc_feature: MA Experiment ID: 108463 Result: Up-regulated in Transcription
  misc_feature: MA Experiment 108463 PARAMETER Experiment Name: At_Germinating_Seeds_cDNA_P Parameter: Age (day) Value: 3 vs. 0
  misc_feature: MA Experiment 108463 PARAMETER Experiment Name: At_Germinating_Seeds_cDNA_P Parameter: Tissue Value: Germinating Seeds
  misc_feature: MA Experiment ID: 108464 Result: Up-regulated in Transcription
  misc_feature: MA Experiment 108464 PARAMETER Experiment Name: At_Germinating_Seeds_cDNA_P Parameter: Age (day) Value: 4 vs. 0
  misc_feature: MA Experiment 108464 PARAMETER Experiment Name: At_Germinating_Seeds_cDNA_P Parameter: Tissue Value: Germinating Seeds
  misc_feature: MA Experiment ID: 108473 Result: Down-regulated in Transcription
  misc_feature: MA Experiment 108473 PARAMETER Experiment Name: At_Drought_Flowers_cDNA_P Parameter: Timepoint (hr) Value: 7 d
  misc_feature: MA Experiment 108473 PARAMETER Experiment Name: At_Drought_Flowers_cDNA_P Parameter: Tissue Value: Flower
  misc_feature: MA Experiment 108473 PARAMETER Experiment Name: At_Drought_Flowers_cDNA_P Parameter: Treatment Value: Drought vs. No Drought
  misc_feature: MA Experiment ID: 108501 Result: Up-regulated in Transcription
  misc_feature: MA Experiment 108501 PARAMETER Experiment Name: At_ap2_floral_buds_cDNA_P Parameter: Plant Line Value: ap2 (Ler.)
  misc_feature: MA Experiment 108501 PARAMETER Experiment Name: At_ap2_floral_buds_cDNA_P Parameter: Tissue Value: Closed Flower
  misc_feature: MA Experiment ID: 108572 Result: Down-regulated in Transcription
  misc_feature: MA Experiment 108572 PARAMETER Experiment Name: At_Drought_cDNA_P Parameter: Timepoint (hr) Value: 1
  misc_feature: MA Experiment 108572 PARAMETER Experiment Name: At_Drought_cDNA_P Parameter: Tissue Value: Aerial
  misc_feature: MA Experiment 108572 PARAMETER Experiment Name: At_Drought_cDNA_P Parameter: Treatment Value: Drought vs. No Drought
  misc_feature: MA Experiment ID: 108573 Result: Down-regulated in Transcription
  misc_feature: MA Experiment 108573 PARAMETER Experiment Name: At_Drought_cDNA_P Parameter: Timepoint (hr) Value: 6
  misc_feature: MA Experiment 108573 PARAMETER Experiment Name: At_Drought_cDNA_P Parameter: Tissue Value: Aerial
  misc_feature: MA Experiment 108573 PARAMETER Experiment Name: At_Drought_cDNA_P Parameter: Treatment Value: Drought vs. No Drought
  misc_feature: MA Experiment ID: 108576 Result: Down-regulated in Transcription
  misc_feature: MA Experiment 108576 PARAMETER Experiment Name: At_42deg_Heat_cDNA_P Parameter: Temperature (deg C) Value: 42 vs. 22
  misc_feature: MA Experiment 108576 PARAMETER Experiment Name: At_42deg_Heat_cDNA_P Parameter: Timepoint (hr) Value: 1
  misc_feature: MA Experiment 108576 PARAMETER Experiment Name: At_42deg_Heat_cDNA_P Parameter: Tissue Value: Aerial
  misc_feature: MA Experiment ID: 108579 Result: Up-regulated in Transcription
  misc_feature: MA Experiment 108579 PARAMETER Experiment Name: At_4deg_Cold_cDNA_P Parameter: Temperature (deg C) Value: 4 vs. 22
  misc_feature: MA Experiment 108579 PARAMETER Experiment Name: At_4deg_Cold_cDNA_P Parameter: Timepoint (hr) Value: 6
  misc_feature: MA Experiment 108579 PARAMETER Experiment Name: At_4deg_Cold_cDNA_P Parameter: Tissue Value: Aerial
  misc_feature: MA Experiment ID: 108668 Result: Down-regulated in Transcription
  misc_feature: MA Experiment 108668 PARAMETER Experiment Name: At_2mM_SA_cDNA_P Parameter: Plant Line Value: WS
  misc_feature: MA Experiment 108668 PARAMETER Experiment Name: At_2mM_SA_cDNA_P Parameter: Timepoint (hr) Value: 6
  misc_feature: MA Experiment 108668 PARAMETER Experiment Name: At_2mM_SA_cDNA_P Parameter: Treatment Value: 2mM SA vs. No Treatment
  misc_feature: MA Experiment ID: 20000069 Result: Down-regulated in Transcription
  misc_feature: MA Experiment 20000069 PARAMETER Experiment Name: At_100uM_ABA_Mutants_cDNA_P Parameter: Plant Line Value: CS23
  misc_feature: MA Experiment 20000069 PARAMETER Experiment Name: At_100uM_ABA_Mutants_cDNA_P Parameter: Timepoint (hr) Value: 6
  misc_feature: MA Experiment 20000069 PARAMETER Experiment Name: At_100uM_ABA_Mutants_cDNA_P Parameter: Tissue Value: Aerial
  misc_feature: MA Experiment 20000069 PARAMETER Experiment Name: At_100uM_ABA_Mutants_cDNA_P Parameter: Treatment Value: 100uM ABA vs. No Treatment
  misc_feature: MA Experiment ID: 20000072 Result: Down-regulated in Transcription
  misc_feature: MA Experiment 20000072 PARAMETER Experiment Name: At_100uM_ABA_Mutants_cDNA_P Parameter: Plant Line Value: CS8105
  misc_feature: MA Experiment 20000072 PARAMETER Experiment Name: At_100uM_ABA_Mutants_cDNA_P Parameter: Timepoint (hr) Value: 6
  misc_feature: MA Experiment 20000072 PARAMETER Experiment Name: At_100uM_ABA_Mutants_cDNA_P Parameter: Tissue Value: Aerial
  misc_feature: MA Experiment 20000072 PARAMETER Experiment Name: At_100uM_ABA_Mutants_cDNA_P Parameter: Treatment Value: 100uM ABA vs. No Treatment
  misc_feature: MA Experiment ID: 20000086 Result: Down-regulated in Transcription
  misc_feature: MA Experiment 20000086 PARAMETER Experiment Name: At_100uM_ABA_Mutants_cDNA_P Parameter: Plant Line Value: CS22
  misc_feature: MA Experiment 20000086 PARAMETER Experiment Name: At_100uM_ABA_Mutants_cDNA_P Parameter: Timepoint (hr) Value: 6
  misc_feature: MA Experiment 20000086 PARAMETER Experiment Name: At_100uM_ABA_Mutants_cDNA_P Parameter: Tissue Value: Aerial
  misc_feature: MA Experiment 20000086 PARAMETER Experiment Name: At_100uM_ABA_Mutants_cDNA_P Parameter: Treatment Value: 100uM ABA vs. No Treatment
  misc_feature: MA Experiment ID: 20000090 Result: Down-regulated in Transcription
  misc_feature: MA Experiment ID: 20000112 Result: Down-regulated in Transcription
  misc_feature: MA Experiment 20000112 PARAMETER Experiment Name: At_42deg_Heat_cDNA_P Parameter: Temperature (deg C) Value: 42 vs. 22
  misc_feature: MA Experiment 20000112 PARAMETER Experiment Name: At_42deg_Heat_cDNA_P Parameter: Timepoint (hr) Value: 2
  misc_feature: MA Experiment 20000112 PARAMETER Experiment Name: At_42deg_Heat_cDNA_P Parameter: Tissue Value: Aerial
  misc_feature: MA Experiment ID: 20000113 Result: Down-regulated in Transcription
  misc_feature: MA Experiment 20000113 PARAMETER Experiment Name: At_42deg_Heat_cDNA_P Parameter: Temperature (deg C) Value: 42 vs. 22
  misc_feature: MA Experiment 20000113 PARAMETER Experiment Name: At_42deg_Heat_cDNA_P Parameter: Timepoint (hr) Value: 8
  misc_feature: MA Experiment 20000113 PARAMETER Experiment Name: At_42deg_Heat_cDNA_P Parameter: Tissue Value: Aerial
  misc_feature: MA Experiment ID: 20000117 Result: Down-regulated in Transcription
  misc_feature: MA Experiment 20000117 PARAMETER Experiment Name: At_100uM_ABA_Mutants_cDNA_P Parameter: Plant Line Value: Columbia
  misc_feature: MA Experiment 20000117 PARAMETER Experiment Name: At_100uM_ABA_Mutants_cDNA_P Parameter: Timepoint (hr) Value: 6
  misc_feature: MA Experiment 20000117 PARAMETER Experiment Name: At_100uM_ABA_Mutants_cDNA_P Parameter: Tissue Value: Aerial
  misc_feature: MA Experiment 20000117 PARAMETER Experiment Name: At_100uM_ABA_Mutants_cDNA_P Parameter: Treatment Value: 100uM ABA vs. No Treatment
  misc_feature: MA Experiment ID: 20000144 Result: Down-regulated in Transcription
  misc_feature: MA Experiment 20000144 PARAMETER Experiment Name: At_42deg_Heat_cDNA_P Parameter: Temperature (deg C) Value: 42 vs. 22
  misc_feature: MA Experiment 20000144 PARAMETER Experiment Name: At_42deg_Heat_cDNA_P Parameter: Timepoint (hr) Value: 1
  misc_feature: MA Experiment 20000144 PARAMETER Experiment Name: At_42deg_Heat_cDNA_P Parameter: Tissue Value: Aerial
  misc_feature: MA Experiment ID: 20000180 Result: Up-regulated in Transcription
  misc_feature: MA Experiment 20000180 PARAMETER Experiment Name: At_Germinating_Seeds_P Parameter: Age (hr) Value: 24 vs. 0
  misc_feature: MA Experiment 20000180 PARAMETER Experiment Name: At_Germinating_Seeds_P Parameter: Tissue Value: Germinating Seeds
  misc_feature: MA Experiment ID: 20000182 Result: Down-regulated in Transcription
  misc_feature: MA Experiment 20000182 PARAMETER Experiment Name: At_2mM_SA_P Parameter: Age (day) Value: 14
  misc_feature: MA Experiment 20000182 PARAMETER Experiment Name: At_2mM_SA_P Parameter: Organism Value: A. thaliana
  misc_feature: MA Experiment 20000182 PARAMETER Experiment Name: At_2mM_SA_P Parameter: Plant Line Value: WS
  misc_feature: MA Experiment 20000182 PARAMETER Experiment Name: At_2mM_SA_P Parameter: Timepoint (hr) Value: 6
  misc_feature: MA Experiment 20000182 PARAMETER Experiment Name: At_2mM_SA_P Parameter: Tissue Value: Aerial
  misc_feature: MA Experiment 20000182 PARAMETER Experiment Name: At_2mM_SA_P Parameter: Treatment Value: 2mM SA vs. No Treatment
  misc_feature: MA Experiment ID: 20000184 Result: Up-regulated in Transcription
  misc_feature: MA Experiment 20000184 PARAMETER Experiment Name: At_Shoots__P Parameter: Age (day) Value: 7
  misc_feature: MA Experiment 20000184 PARAMETER Experiment Name: At_Shoots__P Parameter: Tissue Value: Shoots vs. Whole Plant
  misc_feature: MA Experiment ID: 20000224 Result: Down-regulated in Transcription
  misc_feature: MA Experiment ID: 20000227 Result: Up-regulated in Transcription
  misc_feature: MA Experiment 20000227 PARAMETER Experiment Name: At_Root-Tips-vs-Tops_P Parameter: Tissue Value: Root Tips vs. Root Tops
  misc_feature: MA Experiment ID: 20000234 Result: Up-regulated in Transcription
  misc_feature: MA Experiment 20000234 PARAMETER Experiment Name: At_Siliques_P Parameter: Age (day) Value: 21
  misc_feature: MA Experiment 20000234 PARAMETER Experiment Name: At_Siliques_P Parameter: Organism Value: A. thaliana
  misc_feature: MA Experiment 20000234 PARAMETER Experiment Name: At_Siliques_P Parameter: Plant Line Value: WS
  misc_feature: MA Experiment 20000234 PARAMETER Experiment Name: At_Siliques_P Parameter: Tissue Value: Less Than 5mm Siliques vs. Whole Plant
  misc_feature: MA Experiment ID: 20000437 Result: Down-regulated in Transcription
  misc_feature: MA Experiment 20000437 PARAMETER Experiment Name: At_Drought_P Parameter: Age (day) Value: 8
  misc_feature: MA Experiment 20000437 PARAMETER Experiment Name: At_Drought_P Parameter: Organism Value: A. thaliana
  misc_feature: MA Experiment 20000437 PARAMETER Experiment Name: At_Drought_P Parameter: Plant Line Value: WS
  misc_feature: MA Experiment 20000437 PARAMETER Experiment Name: At_Drought_P Parameter: Timepoint (hr) Value: 24
  misc_feature: MA Experiment 20000437 PARAMETER Experiment Name: At_Drought_P Parameter: Tissue Value: Whole Plant
  misc_feature: MA Experiment 20000437 PARAMETER Experiment Name: At_Drought_P Parameter: Treatment Value: Drought vs. No Drought
  misc_feature: MA Experiment ID: 20000527 Result: Down-regulated in Transcription
  misc_feature: MA Experiment 20000527 PARAMETER Experiment Name: At_10percent_PEG_P Parameter: Age (day) Value: 20
  misc_feature: MA Experiment 20000527 PARAMETER Experiment Name: At_10percent_PEG_P Parameter: Organism Value: A. thaliana
  misc_feature: MA Experiment 20000527 PARAMETER Experiment Name: At_10percent_PEG_P Parameter: Plant Line Value: WS
  misc_feature: MA Experiment 20000527 PARAMETER Experiment Name: At_10percent_PEG_P Parameter: Timepoint (day) Value: 20
  misc_feature: MA Experiment 20000527 PARAMETER Experiment Name: At_10percent_PEG_P Parameter: Tissue Value: Whole Plant
  misc_feature: MA Experiment 20000527 PARAMETER Experiment Name: At_10percent_PEG_P Parameter: Treatment Value: 10percent PEG vs. No Treatment
  misc_feature: MA Experiment ID: 20001450 Result: Up-regulated in Transcription
  misc_feature: MA Experiment 20001450 PARAMETER Experiment Name: At_Far-red-induction_P Parameter: Age (day) Value: 7
  misc_feature: MA Experiment 20001450 PARAMETER Experiment Name: At_Far-red-induction_P Parameter: Light Value: Far-red vs. White
  misc_feature: MA Experiment 20001450 PARAMETER Experiment Name: At_Far-red-induction_P Parameter: Organism Value: A. thaliana
  misc_feature: MA Experiment 20001450 PARAMETER Experiment Name: At_Far-red-induction_P Parameter: Plant Line Value: Columbia
  misc_feature: MA Experiment 20001450 PARAMETER Experiment Name: At_Far-red-induction_P Parameter: Timepoint (hr) Value: 8
  misc_feature: MA Experiment 20001450 PARAMETER Experiment Name: At_Far-red-induction_P Parameter: Tissue Value: Whole Plant
  misc_feature: MA Experiment ID: 20001451 Result: Up-regulated in Transcription
  misc_feature: MA Experiment 20001451 PARAMETER Experiment Name: At_Far-red-induction_P Parameter: Age (day) Value: 7
  misc_feature: MA Experiment 20001451 PARAMETER Experiment Name: At_Far-red-induction_P Parameter: Light Value: Far-red vs. White
  misc_feature: MA Experiment 20001451 PARAMETER Experiment Name: At_Far-red-induction_P Parameter: Organism Value: A. thaliana
  misc_feature: MA Experiment 20001451 PARAMETER Experiment Name: At_Far-red-induction_P Parameter: Plant Line Value: Columbia
  misc_feature: MA Experiment 20001451 PARAMETER Experiment Name: At_Far-red-induction_P Parameter: Timepoint (hr) Value: 24
  misc_feature: MA Experiment 20001451 PARAMETER Experiment Name: At_Far-red-induction_P Parameter: Tissue Value: Whole Plant
  misc_feature: MA Experiment ID: 20001554 Result: Down-regulated in Transcription
  misc_feature: MA Experiment 20001554 PARAMETER Experiment Name: At_Drought_Soil_Dry_P Parameter: Age (day) Value: 21
  misc_feature: MA Experiment 20001554 PARAMETER Experiment Name: At_Drought_Soil_Dry_P Parameter: Organism Value: A. thaliana
  misc_feature: MA Experiment 20001554 PARAMETER Experiment Name: At_Drought_Soil_Dry_P Parameter: Plant Line Value: WS
  misc_feature: MA Experiment 20001554 PARAMETER Experiment Name: At_Drought_Soil_Dry_P Parameter: Post Timepoint (hr) Value: None
  misc_feature: MA Experiment 20001554 PARAMETER Experiment Name: At_Drought_Soil_Dry_P Parameter: Post-Treatment Value: None
  misc_feature: MA Experiment 20001554 PARAMETER Experiment Name: At_Drought_Soil_Dry_P Parameter: Timepoint (day) Value: 7
  misc_feature: MA Experiment 20001554 PARAMETER Experiment Name: At_Drought_Soil_Dry_P Parameter: Treatment Value: Drought vs. No Drought
  misc_feature: MA Experiment ID: 20001555 Result: Down-regulated in Transcription
  misc_feature: MA Experiment 20001555 PARAMETER Experiment Name: At_Drought_Soil_Dry_P Parameter: Age (day) Value: 24
  misc_feature: MA Experiment 20001555 PARAMETER Experiment Name: At_Drought_Soil_Dry_P Parameter: Organism Value: A. thaliana
  misc_feature: MA Experiment 20001555 PARAMETER Experiment Name: At_Drought_Soil_Dry_P Parameter: Plant Line Value: WS
  misc_feature: MA Experiment 20001555 PARAMETER Experiment Name: At_Drought_Soil_Dry_P Parameter: Post Timepoint (hr) Value: None
  misc_feature: MA Experiment 20001555 PARAMETER Experiment Name: At_Drought_Soil_Dry_P Parameter: Post-Treatment Value: None
  misc_feature: MA Experiment 20001555 PARAMETER Experiment Name: At_Drought_Soil_Dry_P Parameter: Timepoint (day) Value: 10
  misc_feature: MA Experiment 20001555 PARAMETER Experiment Name: At_Drought_Soil_Dry_P Parameter: Treatment Value: Drought vs. No Drought
  misc_feature: MA Experiment ID: 20001556 Result: Down-regulated in Transcription
  misc_feature: MA Experiment 20001556 PARAMETER Experiment Name: At_Drought_Soil_Dry_P Parameter: Age (day) Value: 26
  misc_feature: MA Experiment 20001556 PARAMETER Experiment Name: At_Drought_Soil_Dry_P Parameter: Organism Value: A. thaliana
  misc_feature: MA Experiment 20001556 PARAMETER Experiment Name: At_Drought_Soil_Dry_P Parameter: Plant Line Value: WS
  misc_feature: MA Experiment 20001556 PARAMETER Experiment Name: At_Drought_Soil_Dry_P Parameter: Post Timepoint (hr) Value: None
  misc_feature: MA Experiment 20001556 PARAMETER Experiment Name: At_Drought_Soil_Dry_P Parameter: Post-Treatment Value: None
  misc_feature: MA Experiment 20001556 PARAMETER Experiment Name: At_Drought_Soil_Dry_P Parameter: Timepoint (day) Value: 12
  misc_feature: MA Experiment 20001556 PARAMETER Experiment Name: At_Drought_Soil_Dry_P Parameter: Treatment Value: Drought vs. No Drought
  misc_feature: MA Experiment ID: 20001558 Result: Up-regulated in Transcription
  misc_feature: MA Experiment 20001558 PARAMETER Experiment Name: At_Drought_Soil_Dry_P Parameter: Age (day) Value: 27
  misc_feature: MA Experiment 20001558 PARAMETER Experiment Name: At_Drought_Soil_Dry_P Parameter: Organism Value: A. thaliana
  misc_feature: MA Experiment 20001558 PARAMETER Experiment Name: At_Drought_Soil_Dry_P Parameter: Plant Line Value: WS
  misc_feature: MA Experiment 20001558 PARAMETER Experiment Name: At_Drought_Soil_Dry_P Parameter: Post Timepoint (hr) Value: 6
  misc_feature: MA Experiment 20001558 PARAMETER Experiment Name: At_Drought_Soil_Dry_P Parameter: Post-Treatment Value: Re-Water vs. No Drought
  misc_feature: MA Experiment 20001558 PARAMETER Experiment Name: At_Drought_Soil_Dry_P Parameter: Timepoint (day) Value: 13
  misc_feature: MA Experiment 20001558 PARAMETER Experiment Name: At_Drought_Soil_Dry_P Parameter: Treatment Value: Drought vs. No Drought
  misc_feature: MA Experiment ID: 20001559 Result: Down-regulated in Transcription
  misc_feature: MA Experiment 20001559 PARAMETER Experiment Name: At_Drought_Soil_Dry_P Parameter: Age (day) Value: 28
  misc_feature: MA Experiment 20001559 PARAMETER Experiment Name: At_Drought_Soil_Dry_P Parameter: Organism Value: A. thaliana
  misc_feature: MA Experiment 20001559 PARAMETER Experiment Name: At_Drought_Soil_Dry_P Parameter: Plant Line Value: WS
  misc_feature: MA Experiment 20001559 PARAMETER Experiment Name: At_Drought_Soil_Dry_P Parameter: Post Timepoint (hr) Value: 29
  misc_feature: MA Experiment 20001559 PARAMETER Experiment Name: At_Drought_Soil_Dry_P Parameter: Post-Treatment Value: Re-Water vs. No Drought
  misc_feature: MA Experiment 20001559 PARAMETER Experiment Name: At_Drought_Soil_Dry_P Parameter: Timepoint (day) Value: 14
  misc_feature: MA Experiment 20001559 PARAMETER Experiment Name: At_Drought_Soil_Dry_P Parameter: Treatment Value: Drought vs. No Drought
  misc_feature: MA Experiment ID: 20001560 Result: Up-regulated in Transcription
  misc_feature: MA Experiment 20001560 PARAMETER Experiment Name: At_Drought_Soil_Dry_P Parameter: Age (day) Value: 28
  misc_feature: MA Experiment 20001560 PARAMETER Experiment Name: At_Drought_Soil_Dry_P Parameter: Organism Value: A. thaliana
  misc_feature: MA Experiment 20001560 PARAMETER Experiment Name: At_Drought_Soil_Dry_P Parameter: Plant Line Value: WS
  misc_feature: MA Experiment 20001560 PARAMETER Experiment Name: At_Drought_Soil_Dry_P Parameter: Post Timepoint (hr) Value: None
  misc_feature: MA Experiment 20001560 PARAMETER Experiment Name: At_Drought_Soil_Dry_P Parameter: Post-Treatment Value: None
  misc_feature: MA Experiment 20001560 PARAMETER Experiment Name: At_Drought_Soil_Dry_P Parameter: Timepoint (day) Value: 14
  misc_feature: MA Experiment 20001560 PARAMETER Experiment Name: At_Drought_Soil_Dry_P Parameter: Treatment Value: Drought vs. No Drought
  misc_feature: MA Experiment ID: 20001906 Result: Down-regulated in Transcription
  misc_feature: MA Experiment 20001906 PARAMETER Experiment Name: At_Drought_Reproduction_P Parameter: Age (day) Value: 35
  misc_feature: MA Experiment 20001906 PARAMETER Experiment Name: At_Drought_Reproduction_P Parameter: Organism Value: A. thaliana
  misc_feature: MA Experiment 20001906 PARAMETER Experiment Name: At_Drought_Reproduction_P Parameter: Plant Line Value: WS
  misc_feature: MA Experiment 20001906 PARAMETER Experiment Name: At_Drought_Reproduction_P Parameter: Timepoint (day) Value: 5
  misc_feature: MA Experiment 20001906 PARAMETER Experiment Name: At_Drought_Reproduction_P Parameter: Tissue Value: Siliques
  misc_feature: MA Experiment 20001906 PARAMETER Experiment Name: At_Drought_Reproduction_P Parameter: Treatment Value: Drought vs. No Drought
  misc_feature: MA Experiment ID: 20001907 Result: Down-regulated in Transcription
  misc_feature: MA Experiment 20001907 PARAMETER Experiment Name: At_Drought_Reproduction_P Parameter: Age (day) Value: 37
  misc_feature: MA Experiment 20001907 PARAMETER Experiment Name: At_Drought_Reproduction_P Parameter: Organism Value: A. thaliana
  misc_feature: MA Experiment 20001907 PARAMETER Experiment Name: At_Drought_Reproduction_P Parameter: Plant Line Value: WS
  misc_feature: MA Experiment 20001907 PARAMETER Experiment Name: At_Drought_Reproduction_P Parameter: Timepoint (day) Value: 7
  misc_feature: MA Experiment 20001907 PARAMETER Experiment Name: At_Drought_Reproduction_P Parameter: Tissue Value: Siliques
  misc_feature: MA Experiment 20001907 PARAMETER Experiment Name: At_Drought_Reproduction_P Parameter: Treatment Value: Drought vs. No Drought
  misc_feature: MA Experiment ID: 20001911 Result: Down-regulated in Transcription
  misc_feature: MA Experiment 20001911 PARAMETER Experiment Name: At_Drought_Reproduction_P Parameter: Age (day) Value: 40
  misc_feature: MA Experiment 20001911 PARAMETER Experiment Name: At_Drought_Reproduction_P Parameter: Organism Value: A. thaliana
  misc_feature: MA Experiment 20001911 PARAMETER Experiment Name: At_Drought_Reproduction_P Parameter: Plant Line Value: WS
  misc_feature: MA Experiment 20001911 PARAMETER Experiment Name: At_Drought_Reproduction_P Parameter: Timepoint (day) Value: 10
  misc_feature: MA Experiment 20001911 PARAMETER Experiment Name: At_Drought_Reproduction_P Parameter: Tissue Value: Flowers
  misc_feature: MA Experiment 20001911 PARAMETER Experiment Name: At_Drought_Reproduction_P Parameter: Treatment Value: Drought vs. No Drought
ataagactcctctccaaatgctaccacacaattcctctatcacagccgcccaatcctccatccaaaaatggcttatttccggcgagcagccaccgcattggttctcattttccagctccacctctttctctccctctcaaatgcacataacataacccgtcgataactcagcaatgtcctccatcctctctaacggatactcactctaccaaatccgcaacattctctctctccacgtcctggtcgattacttcggcaccaagaaacttcaccagatcaccgacggctccacctccactgcctccatgtttcaatccaccggatccgccaccggaacttctggatacatcaacatcaccgatataaaaggcggtaaagtcgcttttggtgtccaagacgacgatagcaagctcacagctcactacgtcaaatccgtctttgaaaagccttacaacatctctgttcttcacatcagccaagtcttaacctcgccggaagcagaagctcccacggcgagtcccagcgacctcatcctcaccacaatcctcgaaaaacaagggtgcaaagctttctccgacatcttgaagtcaaccggcgccgacaaaacgttccaagataccgtagacggaggcttaacggtgttctgtccctccgacagcgctgtcggtaagttcatgccgaaattcaaatccctttctccggcgaacaagactgcgttagtgctttaccacggcatgccggtttaccagtcgttacaaatgcttagatcaggtaacggcgccgttaacacgttagcgacggaaggtaacaacaagtttgatttcaccgttcaaaataacggagaagacgtgacgctggagacggacgttgtgacggcgaaggtaatggggacgttaaaggatcaagagcctttgatagtttacaagattgataaagtgttgttgcctagagaaatctataaggccgttaagacgtccgctccagctcctaagtcgagtaagaaaaagcctaagaacgcggaggctgacgccgacggacctagcgccgatgctccgtcagatgatgatggtgaggtggctgacgataaaaacggcgccgtatcagcgatgattactcgaacaagtagtgtcgtaacggccattgtcgggctctgtttcggagtttggcttatgtgaagtgacgtggcatttacctcgctttgggaatcttgtttttctttttttctttgtgatctgtcggtttaatttattttacatattcttttttttgttcacgttgatacttggtgtggagatttggaataattaattgttccacttgtgttg

SEQ ID NO: 23490 - protein, 333 aa, Arabidopsis thaliana
  peptide (1)..(333): Ceres Seq. ID no. 12335233
  misc_feature (117)..(258): Pfam Name: Fasciclin domain Pfam Description: Fasciclin domain
  misc_feature (1)..(326): Homolog of NCBI NO: 38424037 NR Description: putative fasciclin-like arabinogalactan-protein
  misc_feature (1)..(308): Homolog of NCBI NO: 15240570 NR Description: fasciclin-like arabinogalactan-protein (FLA1)
  misc_feature (1)..(333): Homolog of NCBI NO: 15235459 NR Description: fasciclin-like arabinogalactan-protein (FLA2)
  misc_feature (1)..(294): Homolog of NCBI NO: 15232973 NR Description: fasciclin-like arabinogalactan-protein (FLA10)
  misc_feature (1)..(324): Homolog of NCBI NO: 21595125 NR Description: endosperm-specific protein-like protein
  misc_feature (1)..(324): Homolog of NCBI NO: 18406799 NR Description: fasciclin-like arabinogalactan-protein (FLA8)
  misc_feature (1)..(294): Homolog of NCBI NO: 14190409 NR Description: AT3g60900/T4C21_310 [Arabidopsis thaliana]
  misc_feature (1)..(295): Homolog of NCBI NO: 38605955 NR Description: OSJNBa0019K04.16 [Oryza sativa (japonica
  misc_feature (1)..(333): Homolog of NCBI NO: 13377778 NR Description: fasciclin-like arabinogalactan-protein 2
  misc_feature (1)..(333): Homolog of NCBI NO: 21593810 NR Description: putative pollen surface protein [Arabidopsis
MSSILSNGYSLYQIRNILSLHVLVDYFGTKKLHQITDGSTSTASMFQSTGSATGTSGYINITDIKGGKVAFGVQDDDSKLTAHYVKSVFEKPYNISVLHISQVLTSPEAEAPTASPSDLILTTILEKQGCKAFSDILKSTGADKTFQDTVDGGLTVFCPSDSAVGKFMPKFKSLSPANKTALVLYHGMPVYQSLQMLRSGNGAVNTLATEGNNKFDFTVQNNGEDVTLETDVVTAKVMGTLKDQEPLIVYKIDKVLLPREIYKAVKTSAPAPKSSKKKPKNAEADADGPSADAPSDDDGEVADDKNGAVSAMITRTSSVVTAIVGLCFGVWLM

SEQ ID NO: 23491 - protein, 289 aa, Arabidopsis thaliana
  peptide (1)..(289): Ceres Seq. ID no. 12335234
  misc_feature (73)..(214): Pfam Name: Fasciclin domain Pfam Description: Fasciclin domain
  misc_feature (1)..(251): Homolog of NCBI NO: 38605955 NR Description: OSJNBa0019K04.16 [Oryza sativa (japonica
  misc_feature (1)..(250): Homolog of NCBI NO: 15232973 NR Description: fasciclin-like arabinogalactan-protein (FLA10)
  misc_feature (1)..(250): Homolog of NCBI NO: 14190409 NR Description: AT3g60900/T4C21_310 [Arabidopsis thaliana]
  misc_feature (1)..(280): Homolog of NCBI NO: 21595125 NR Description: endosperm-specific protein-like protein
  misc_feature (1)..(280): Homolog of NCBI NO: 18406799 NR Description: fasciclin-like arabinogalactan-protein (FLA8)
  misc_feature (1)..(282): Homolog of NCBI NO: 38424037 NR Description: putative fasciclin-like arabinogalactan-protein
  misc_feature (1)..(264): Homolog of NCBI NO: 15240570 NR Description: fasciclin-like arabinogalactan-protein (FLA1)
  misc_feature (1)..(289): Homolog of NCBI NO: 15235459 NR Description: fasciclin-like arabinogalactan-protein (FLA2)
  misc_feature (1)..(289): Homolog of NCBI NO: 13377778 NR Description: fasciclin-like arabinogalactan-protein 2
  misc_feature (1)..(289): Homolog of NCBI NO: 21593810 NR Description: putative pollen surface protein [Arabidopsis
MFQSTGSATGTSGYINITDIKGGKVAFGVQDDDSKLTAHYVKSVFEKPYNISVLHISQVLTSPEAEAPTASPSDLILTTILEKQGCKAFSDILKSTGADKTFQDTVDGGLTVFCPSDSAVGKFMPKFKSLSPANKTALVLYHGMPVYQSLQMLRSGNGAVNTLATEGNNKFDFTVQNNGEDVTLETDVVTAKVMGTLKDQEPLIVYKIDKVLLPREIYKAVKTSAPAPKSSKKKPKNAEADADGPSADAPSDDDGEVADDKNGAVSAMITRTSSVVTAIVGLCFGVWLM

SEQ ID NO: 23492 - protein, 166 aa, Arabidopsis thaliana
  peptide (1)..(166): Ceres Seq. ID no. 12335235
  misc_feature (1)..(91): Pfam Name: Fasciclin domain Pfam Description: Fasciclin domain
  misc_feature (1)..(128): Homolog of NCBI NO: 38605955 NR Description: OSJNBa0019K04.16 [Oryza sativa (japonica
  misc_feature (1)..(127): Homolog of NCBI NO: 15232973 NR Description: fasciclin-like arabinogalactan-protein (FLA10)
  misc_feature (1)..(127): Homolog of NCBI NO: 14190409 NR Description: AT3g60900/T4C21_310 [Arabidopsis thaliana]
  misc_feature (1)..(157): Homolog of NCBI NO: 21595125 NR Description: endosperm-specific protein-like protein
  misc_feature (1)..(157): Homolog of NCBI NO: 18406799 NR Description: fasciclin-like arabinogalactan-protein (FLA8)
  misc_feature (1)..(159): Homolog of NCBI NO: 38424037 NR Description: putative fasciclin-like arabinogalactan-protein
  misc_feature (1)..(141): Homolog of NCBI NO: 15240570 NR Description: fasciclin-like arabinogalactan-protein (FLA1)
  misc_feature (1)..(166): Homolog of NCBI NO: 15235459 NR Description: fasciclin-like arabinogalactan-protein (FLA2)
  misc_feature (1)..(166): Homolog of NCBI NO: 13377778 NR Description: fasciclin-like arabinogalactan-protein 2
  misc_feature (1)..(166): Homolog of NCBI NO: 21593810 NR Description: putative pollen surface protein [Arabidopsis
MPKFKSLSPANKTALVLYHGMPVYQSLQMLRSGNGAVNTLATEGNNKFDFTVQNNGEDVTLETDVVTAKVMGTLKDQEPLIVYKIDKVLLPREIYKAVKTSAPAPKSSKKKPKNAEADADGPSADAPSDDDGEVADDKNGAVSAMITRTSSVVTAIVGLCFGVWLM

SEQ ID NO: 23493 - DNA, 1783 bp, Arabidopsis thaliana
  misc_feature (1)..(1783): Ceres Seq. ID no. 12335228
  misc_feature: MA Experiment ID: 20000169 Result: Up-regulated in Transcription
  misc_feature: MA Experiment 20000169 PARAMETER Experiment Name: At_100uM_ABA_P Parameter: Age (day) Value: 14
  misc_feature: MA Experiment 20000169 PARAMETER Experiment Name: At_100uM_ABA_P Parameter: Organism Value: A. thaliana
  misc_feature: MA Experiment 20000169 PARAMETER Experiment Name: At_100uM_ABA_P Parameter: Plant Line Value: WS
  misc_feature: MA Experiment 20000169 PARAMETER Experiment Name: At_100uM_ABA_P Parameter: Timepoint (hr) Value: 6
  misc_feature: MA Experiment 20000169 PARAMETER Experiment Name: At_100uM_ABA_P Parameter: Tissue Value: Aerial
  misc_feature: MA Experiment 20000169 PARAMETER Experiment Name: At_100uM_ABA_P Parameter: Treatment Value: 100uM ABA vs. No Treatment
  misc_feature: MA Experiment ID: 20000179 Result: Up-regulated in Transcription
  misc_feature: MA Experiment 20000179 PARAMETER Experiment Name: At_Germinating_Seeds_P Parameter: Age (hr) Value: 6 vs. 0
  misc_feature: MA Experiment 20000179 PARAMETER Experiment Name: At_Germinating_Seeds_P Parameter: Tissue Value: Germinating Seeds
  misc_feature: MA Experiment ID: 20000185 Result: Down-regulated in Transcription
  misc_feature: MA Experiment 20000185 PARAMETER Experiment Name: At_Roots__P Parameter: Age (day) Value: 7 vs. 21
  misc_feature: MA Experiment 20000185 PARAMETER Experiment Name: At_Roots__P Parameter: Organism Value: A. thaliana
  misc_feature: MA Experiment 20000185 PARAMETER Experiment Name: At_Roots__P Parameter: Tissue Value: Roots vs. Whole Plant
  misc_feature: MA Experiment ID: 20000227 Result: Down-regulated in Transcription
  misc_feature: MA Experiment 20000227 PARAMETER Experiment Name: At_Root-Tips-vs-Tops_P Parameter: Tissue Value: Root Tips vs. Root Tops
  misc_feature: MA Experiment ID: 20000234 Result: Down-regulated in Transcription
  misc_feature: MA Experiment 20000234 PARAMETER Experiment Name: At_Siliques_P Parameter: Age (day) Value: 21
  misc_feature: MA Experiment 20000234 PARAMETER Experiment Name: At_Siliques_P Parameter: Organism Value: A. thaliana
  misc_feature: MA Experiment 20000234 PARAMETER Experiment Name: At_Siliques_P Parameter: Plant Line Value: WS
  misc_feature: MA Experiment 20000234 PARAMETER Experiment Name: At_Siliques_P Parameter: Tissue Value: Less Than 5mm Siliques vs. Whole Plant
  misc_feature: MA Experiment ID: 20000265 Result: Down-regulated in Transcription
  misc_feature: MA Experiment 20000265 PARAMETER Experiment Name: At_Open_Flower_P Parameter: Age (day) Value: 21
  misc_feature: MA Experiment 20000265 PARAMETER Experiment Name: At_Open_Flower_P Parameter: Plant Line Value: WS
  misc_feature: MA Experiment 20000265 PARAMETER Experiment Name: At_Open_Flower_P Parameter: Tissue Value: Closed Flower vs. Whole Plant
  misc_feature: MA Experiment ID: 20000437 Result: Up-regulated in Transcription
  misc_feature: MA Experiment 20000437 PARAMETER Experiment Name: At_Drought_P Parameter: Age (day) Value: 8
  misc_feature: MA Experiment 20000437 PARAMETER Experiment Name: At_Drought_P Parameter: Organism Value: A. thaliana
  misc_feature: MA Experiment 20000437 PARAMETER Experiment Name: At_Drought_P Parameter: Plant Line Value: WS
  misc_feature: MA Experiment 20000437 PARAMETER Experiment Name: At_Drought_P Parameter: Timepoint (hr) Value: 24
  misc_feature: MA Experiment 20000437 PARAMETER Experiment Name: At_Drought_P Parameter: Tissue Value: Whole Plant
  misc_feature: MA Experiment 20000437 PARAMETER Experiment Name: At_Drought_P Parameter: Treatment Value: Drought vs. No Drought
  misc_feature: MA Experiment ID: 20000438 Result: Down-regulated in Transcription
  misc_feature: MA Experiment 20000438 PARAMETER Experiment Name: At_Shoots__P Parameter: Age (day) Value: 14
  misc_feature: MA Experiment 20000438 PARAMETER Experiment Name: At_Shoots__P Parameter: Tissue Value: Shoots vs. Whole Plant
  misc_feature: MA Experiment ID: 20000439 Result: Down-regulated in Transcription
  misc_feature: MA Experiment 20000439 PARAMETER Experiment Name: At_Roots__P Parameter: Age (day) Value: 14 vs. 21
  misc_feature: MA Experiment 20000439 PARAMETER Experiment Name: At_Roots__P Parameter: Organism Value: A. thaliana
  misc_feature: MA Experiment 20000439 PARAMETER Experiment Name: At_Roots__P Parameter: Tissue Value: Roots vs. Whole Plant
  misc_feature: MA Experiment ID: 20000455 Result: Up-regulated in Transcription
  misc_feature: MA Experiment 20000455 PARAMETER Experiment Name: At_100uM_ABA_P Parameter: Age (day) Value: 16
  misc_feature: MA Experiment 20000455 PARAMETER Experiment Name: At_100uM_ABA_P Parameter: Organism Value: A. thaliana
  misc_feature: MA Experiment 20000455 PARAMETER Experiment Name: At_100uM_ABA_P Parameter: Plant Line Value: WS
  misc_feature: MA Experiment 20000455 PARAMETER Experiment Name: At_100uM_ABA_P Parameter: Timepoint (hr) Value: 48
  misc_feature: MA Experiment 20000455 PARAMETER Experiment Name: At_100uM_ABA_P Parameter: Tissue Value: Aerial
  misc_feature: MA Experiment 20000455 PARAMETER Experiment Name: At_100uM_ABA_P Parameter: Treatment Value: 100uM ABA vs. No Treatment
  misc_feature: MA Experiment ID: 20000495 Result: Down-regulated in Transcription
  misc_feature: MA Experiment 20000495 PARAMETER Experiment Name: At_Guard_Cells_P Parameter: Harvest Date Value: 8/2/2002
  misc_feature: MA Experiment 20000495 PARAMETER Experiment Name: At_Guard_Cells_P Parameter: Organism Value: A. thaliana
  misc_feature: MA Experiment 20000495 PARAMETER Experiment Name: At_Guard_Cells_P Parameter: Tissue Value: Guard Cells vs. Leaves
  misc_feature: MA Experiment ID: 20000496 Result: Down-regulated in Transcription
  misc_feature: MA Experiment 20000496 PARAMETER Experiment Name: At_Guard_Cells_P Parameter: Harvest Date Value: 7/19/2002
  misc_feature: MA Experiment 20000496 PARAMETER Experiment Name: At_Guard_Cells_P Parameter: Organism Value: Canola
  misc_feature: MA Experiment 20000496 PARAMETER Experiment Name: At_Guard_Cells_P Parameter: Tissue Value: Guard Cells vs. Leaves
  misc_feature: MA Experiment ID: 20001451 Result: Down-regulated in Transcription
  misc_feature: MA Experiment 20001451 PARAMETER Experiment Name: At_Far-red-induction_P Parameter: Age (day) Value: 7
  misc_feature: MA Experiment 20001451 PARAMETER Experiment Name: At_Far-red-induction_P Parameter: Light Value: Far-red vs. White
  misc_feature: MA Experiment 20001451 PARAMETER Experiment Name: At_Far-red-induction_P Parameter: Organism Value: A. thaliana
  misc_feature: MA Experiment 20001451 PARAMETER Experiment Name: At_Far-red-induction_P Parameter: Plant Line Value: Columbia
  misc_feature: MA Experiment 20001451 PARAMETER Experiment Name: At_Far-red-induction_P Parameter: Timepoint (hr) Value: 24
  misc_feature: MA Experiment 20001451 PARAMETER Experiment Name: At_Far-red-induction_P Parameter: Tissue Value: Whole Plant
  misc_feature: MA Experiment ID: 20001560 Result: Down-regulated in Transcription
  misc_feature: MA Experiment 20001560 PARAMETER Experiment Name: At_Drought_Soil_Dry_P Parameter: Age (day) Value: 28
  misc_feature: MA Experiment 20001560 PARAMETER Experiment Name: At_Drought_Soil_Dry_P Parameter: Organism Value: A. thaliana
  misc_feature: MA Experiment 20001560 PARAMETER Experiment Name: At_Drought_Soil_Dry_P Parameter: Plant Line Value: WS
  misc_feature: MA Experiment 20001560 PARAMETER Experiment Name: At_Drought_Soil_Dry_P Parameter: Post Timepoint (hr) Value: None
  misc_feature: MA Experiment 20001560 PARAMETER Experiment Name: At_Drought_Soil_Dry_P Parameter: Post-Treatment Value: None
  misc_feature: MA Experiment 20001560 PARAMETER Experiment Name: At_Drought_Soil_Dry_P Parameter: Timepoint (day) Value: 14
  misc_feature: MA Experiment 20001560 PARAMETER Experiment Name: At_Drought_Soil_Dry_P Parameter: Treatment Value: Drought vs. No Drought
aaagcggtgagtcatcttaccttataaatgatcacaaacccgaggactgtgagttttcgtgtagaacaaatccttctctgagaaaaaacaacagatccgaattttatctttaatcagccggaaaaaatggagaaagcgatcgagagacaacgcgttcttcttgagcatctccgaccttcttcttcttcttcgcacaattacgaggcttctctatctgcttctgcttgcttggctggggacagtgctgcatatcagaggacctctctctatggagatgatgttgtcattgtcgcggcacataggactccactatgcaagtccaaacgtggcaatttcaaggatacatatcccgatgatttgctcgcacctgttttgagggcattgatagagaagacgaatctaaacccaagtgaagtaggtgacattgttgtgggtactgttttggcacctggatctcagagagccagtgaatgcaggatggctgcgttctatgctggtttccctgaaaccgtggctgtcagaactgtgaatagacagtgctcatctgggcttcaggctgttgctgatgtagccgctgccattaaagcgggattttatgacattggtatcggggctggtttggagtccatgactaccaatccaatggcatgggaagggtcagtcaacccagcggtgaagaagtttgcacaagcgcagaattgtcttcttcctatgggtgttacgtcagaaaatgtagcacaacgctttggtgtctcaaggcaggagcaagatcaagctgctgttgactcgcacagaaaggcagctgctgctactgctgctggtaaattcaaggatgagatcattcctgttaagaccaagcttgttgacccgaagactggtgatgagaaacccattacagtttctgttgatgatggtatccgaccaaccacaactcttgcttctcttgggaagctgaagccagtgtttaagaaggatggcaccactactgctggaaattccagccaagtaagtgatggtgcaggagcggttctcctaatgaagagaagtgttgcaatgcaaaaaggacttcccgttcttggtgtattcaggacatttgctgcagttggtgttgaccctgcaatcatgggtatcggtccagcagttgccattcctgctgcagttaaggcggctggtttagaacttgatgacatcgacttgtttgagatcaatgaggcatttgcatctcagtttgtttattgccgtaacaaattgggacttgacccagagaaaatcaatgtcaacggaggtgcaatggccataggccatcctttgggcgctacaggagcgcgttgtgttgctacattgttgcacgagatgaaacgccgtggtaaagactgccgttttggagtagtgtcaatgtgcattgggacggggatgggtgcagcagctgtgtttgagagaggagatggagttgatgagcttcgcaacgcaaggaaagttgaagcgcaaggtcttttgtccaaggacgctcgctagagaggaccatgcaccaaaaccgtttttcacctcacctctctcttttctggtcttcttgtcactttcttcagatattattatagtttcgaataaagcacacaaccaatgtttgcctgagtcttgtgttgttcttgaccaggtcatgtgtttagtattttttttaagtgaagggggataatctttaaatcttttatatgtaagaatattgttcttctcgaatttcatcagttgttgcttctagaaattttagattttttgggtggcagcc

SEQ ID NO: 23494 - protein, 462 aa, Arabidopsis thaliana
  peptide (1)..(462): Ceres Seq. ID no. 12335229
  misc_feature (49)..(307): Pfam Name: Thiolase, N-terminal domain Pfam Description: Thiolase, N-terminal domain
  misc_feature (49)..(307): Pfam Name: Thiolase, N-terminal domain Pfam Description: Thiolase, N-terminal domain
  misc_feature (1)..(381): Homolog of NCBI NO: 16648799 NR Description: At2g33150/F25I18.11 [Arabidopsis thaliana]
  misc_feature (1)..(426): Homolog of NCBI NO: 7433645 NR Description: acetyl-CoA C-acyltransferase (EC 2.3.1.16) B
  misc_feature (1)..(451): Homolog of NCBI NO: 21537268 NR Description: putative acetyl-CoA acyltransferase [Arabidopsis
  misc_feature (1)..(426): Homolog of NCBI NO: 1129145 NR Description: 3-ketoacyl-CoA thiolase B; acetyl-CoA
  misc_feature (1)..(451): Homolog of NCBI NO: 15219797 NR Description: putative acetyl-CoA acyltransferase
  misc_feature (1)..(381): Homolog of NCBI NO: 16648799 NR Description: At2g33150/F25I18.11 [Arabidopsis thaliana]
  misc_feature (1)..(451): Homolog of NCBI NO: 21537268 NR Description: putative acetyl-CoA acyltransferase [Arabidopsis
  misc_feature (1)..(451): Homolog of NCBI NO: 15219797 NR Description: putative acetyl-CoA acyltransferase
  misc_feature (1)..(462): Homolog of NCBI NO: 15225798 NR Description: 3-ketoacyl-CoA thiolase
  misc_feature (1)..(462): Homolog of NCBI NO: 7433644 NR Description: acetyl-CoA C-acyltransferase (EC 2.3.1.16)
  misc_feature (1)..(462): Homolog of NCBI NO: 7433647 NR Description: acetyl-CoA C-acyltransferase (EC 2.3.1.16)
  misc_feature (1)..(462): Homolog of NCBI NO: 393707 NR Description: 3-ketoacyl-CoA thiolase; acetyl-CoA
  misc_feature (1)..(462): Homolog of NCBI NO: 421810 NR Description: acetyl-CoA C-acyltransferase (EC 2.3.1.16)
  misc_feature (1)..(426): Homolog of NCBI NO: 1129145 NR Description: 3-ketoacyl-CoA thiolase B; acetyl-CoA
  misc_feature (1)..(426): Homolog of NCBI NO: 7433645 NR Description: acetyl-CoA C-acyltransferase (EC 2.3.1.16) B
  misc_feature (1)..(462): Homolog of NCBI NO: 421810 NR Description: acetyl-CoA C-acyltransferase (EC 2.3.1.16)
  misc_feature (1)..(462): Homolog of NCBI NO: 393707 NR Description: 3-ketoacyl-CoA thiolase; acetyl-CoA
  misc_feature (1)..(462): Homolog of NCBI NO: 7433647 NR Description: acetyl-CoA C-acyltransferase (EC 2.3.1.16)
  misc_feature (1)..(462): Homolog of NCBI NO: 7433644 NR Description: acetyl-CoA C-acyltransferase (EC 2.3.1.16)
  misc_feature (1)..(462): Homolog of NCBI NO: 15225798 NR Description: 3-ketoacyl-CoA thiolase
MEKAIERQRVLLEHLRPSSSSSHNYEASLSASACLAGDSAAYQRTSLYGDDVVIVAAHRTPLCKSKRGNFKDTYPDDLLAPVLRALIEKTNLNPSEVGDIVVGTVLAPGSQRASECRMAAFYAGFPETVAVRTVNRQCSSGLQAVADVAAAIKAGFYDIGIGAGLESMTTNPMAWEGSVNPAVKKFAQAQNCLLPMGVTSENVAQRFGVSRQEQDQAAVDSHRKAAAATAAGKFKDEIIPVKTKLVDPKTGDEKPITVSVDDGIRPTTTLASLGKLKPVFKKDGTTTAGNSSQVSDGAGAVLLMKRSVAMQKGLPVLGVFRTFAAVGVDPAIMGIGPAVAIPAAVKAAGLELDDIDLFEINEAFASQFVYCRNKLGLDPEKINVNGGAMAIGHPLGATGARCVATLLHEMKRRGKDCRFGVVSMCIGTGMGAAAVFERGDGVDELRNARKVEAQGLLSKDAR

SEQ ID NO: 23495 - protein, 345 aa, Arabidopsis thaliana
  peptide (1)..(345): Ceres Seq. ID no. 12335230
  misc_feature (1)..(190): Pfam Name: Thiolase, N-terminal domain Pfam Description: Thiolase, N-terminal domain
  misc_feature (1)..(190): Pfam Name: Thiolase, N-terminal domain Pfam Description: Thiolase, N-terminal domain
  misc_feature (1)..(264): Homolog of NCBI NO: 16648799 NR Description: At2g33150/F25I18.11 [Arabidopsis thaliana]
  misc_feature (1)..(309): Homolog of NCBI NO: 7433645 NR Description: acetyl-CoA C-acyltransferase (EC 2.3.1.16) B
  misc_feature (1)..(334): Homolog of NCBI NO: 21537268 NR Description: putative acetyl-CoA acyltransferase [Arabidopsis
  misc_feature (1)..(309): Homolog of NCBI NO: 1129145 NR Description: 3-ketoacyl-CoA thiolase B; acetyl-CoA
  misc_feature (1)..(334): Homolog of NCBI NO: 15219797 NR Description: putative acetyl-CoA acyltransferase
  misc_feature (1)..(264): Homolog of NCBI NO: 16648799 NR Description: At2g33150/F25I18.11 [Arabidopsis thaliana]
  misc_feature (1)..(334): Homolog of NCBI NO: 21537268 NR Description: putative acetyl-CoA acyltransferase [Arabidopsis
  misc_feature (1)..(334): Homolog of NCBI NO: 15219797 NR Description: putative acetyl-CoA acyltransferase
  misc_feature (1)..(345): Homolog of NCBI NO: 15225798 NR Description: 3-ketoacyl-CoA thiolase
  misc_feature (1)..(345): Homolog of NCBI NO: 7433644 NR Description: acetyl-CoA C-acyltransferase (EC 2.3.1.16)
  misc_feature (1)..(345): Homolog of NCBI NO: 7433647 NR Description: acetyl-CoA C-acyltransferase (EC 2.3.1.16)
  misc_feature (1)..(345): Homolog of NCBI NO: 393707 NR Description: 3-ketoacyl-CoA thiolase; acetyl-CoA
  misc_feature (1)..(345): Homolog of NCBI NO: 421810 NR Description: acetyl-CoA C-acyltransferase (EC 2.3.1.16)
  misc_feature (1)..(309): Homolog of NCBI NO: 1129145 NR Description: 3-ketoacyl-CoA thiolase B; acetyl-CoA
  misc_feature (1)..(309): Homolog of NCBI NO: 7433645 NR Description: acetyl-CoA C-acyltransferase (EC 2.3.1.16) B
  misc_feature (1)..(345): Homolog of NCBI NO: 421810 NR Description: acetyl-CoA C-acyltransferase (EC 2.3.1.16)
  misc_feature (1)..(345): Homolog of NCBI NO: 393707 NR Description: 3-ketoacyl-CoA thiolase; acetyl-CoA
  misc_feature (1)..(345): Homolog of NCBI NO: 7433647 NR Description: acetyl-CoA C-acyltransferase (EC 2.3.1.16)
  misc_feature (1)..(345): Homolog of NCBI NO: 7433644 NR Description: acetyl-CoA C-acyltransferase (EC 2.3.1.16)
  misc_feature (1)..(345): Homolog of NCBI NO: 15225798 NR Description: 3-ketoacyl-CoA thiolase
MAAFYAGFPETVAVRTVNRQCSSGLQAVADVAAAIKAGFYDIGIGAGLESMTTNPMAWEGSVNPAVKKFAQAQNCLLPMGVTSENVAQRFGVSRQEQDQAAVDSHRKAAAATAAGKFKDEIIPVKTKLVDPKTGDEKPITVSVDDGIRPTTTLASLGKLKPVFKKDGTTTAGNSSQVSDGAGAVLLMKRSVAMQKGLPVLGVFRTFAAVGVDPAIMGIGPAVAIPAAVKAAGLELDDIDLFEINEAFASQFVYCRNKLGLDPEKINVNGGAMAIGHPLGATGARCVATLLHEMKRRGKDCRFGVVSMCIGTGMGAAAVFERGDGVDELRNARKVEAQGLLSKDAR

SEQ ID NO: 23496 - protein, 295 aa, Arabidopsis thaliana
  peptide (1)..(295): Ceres Seq. ID no. 12335231
  misc_feature (1)..(140): Pfam Name: Thiolase, N-terminal domain Pfam Description: Thiolase, N-terminal domain
  misc_feature (1)..(140): Pfam Name: Thiolase, N-terminal domain Pfam Description: Thiolase, N-terminal domain
  misc_feature (1)..(214): Homolog of NCBI NO: 16648799 NR Description: At2g33150/F25I18.11 [Arabidopsis thaliana]
  misc_feature (1)..(259): Homolog of NCBI NO: 7433645 NR Description: acetyl-CoA C-acyltransferase (EC 2.3.1.16) B
  misc_feature (1)..(284): Homolog of NCBI NO: 21537268 NR Description: putative acetyl-CoA acyltransferase [Arabidopsis
  misc_feature (1)..(259): Homolog of NCBI NO: 1129145 NR Description: 3-ketoacyl-CoA thiolase B; acetyl-CoA
  misc_feature (1)..(284): Homolog of NCBI NO: 15219797 NR Description: putative acetyl-CoA acyltransferase
  misc_feature (1)..(214): Homolog of NCBI NO: 16648799 NR Description: At2g33150/F25I18.11 [Arabidopsis thaliana]
  misc_feature (1)..(284): Homolog of NCBI NO: 21537268 NR Description: putative acetyl-CoA acyltransferase [Arabidopsis
  misc_feature (1)..(284): Homolog of NCBI NO: 15219797 NR Description: putative acetyl-CoA acyltransferase
  misc_feature (1)..(295): Homolog of NCBI NO: 15225798 NR Description: 3-ketoacyl-CoA thiolase
  misc_feature (1)..(295): Homolog of NCBI NO: 7433644 NR Description: acetyl-CoA C-acyltransferase (EC 2.3.1.16)
  misc_feature (1)..(295): Homolog of NCBI NO: 7433647 NR Description: acetyl-CoA C-acyltransferase (EC 2.3.1.16)
  misc_feature (1)..(295): Homolog of NCBI NO: 393707 NR Description: 3-ketoacyl-CoA thiolase; acetyl-CoA
  misc_feature (1)..(295): Homolog of NCBI NO: 421810 NR Description: acetyl-CoA C-acyltransferase (EC 2.3.1.16)
  misc_feature (1)..(259): Homolog of NCBI NO: 1129145 NR Description: 3-ketoacyl-CoA thiolase B; acetyl-CoA
  misc_feature (1)..(259): Homolog of NCBI NO: 7433645 NR Description: acetyl-CoA C-acyltransferase (EC 2.3.1.16) B
  misc_feature (1)..(295): Homolog of NCBI NO: 421810 NR Description: acetyl-CoA C-acyltransferase (EC 2.3.1.16)
  misc_feature (1)..(295): Homolog of NCBI NO: 393707 NR Description: 3-ketoacyl-CoA thiolase; acetyl-CoA
  misc_feature (1)..(295): Homolog of NCBI NO: 7433647 NR Description: acetyl-CoA C-acyltransferase (EC 2.3.1.16)
  misc_feature (1)..(295): Homolog of NCBI NO: 7433644 NR Description: acetyl-CoA C-acyltransferase (EC 2.3.1.16)
  misc_feature (1)..(295): Homolog of NCBI NO: 15225798 NR Description: 3-ketoacyl-CoA thiolase
MTTNPMAWEGSVNPAVKKFAQAQNCLLPMGVTSENVAQRFGVSRQEQDQAAVDSHRKAAAATAAGKFKDEIIPVKTKLVDPKTGDEKPITVSVDDGIRPTTTLASLGKLKPVFKKDGTTTAGNSSQVSDGAGAVLLMKRSVAMQKGLPVLGVFRTFAAVGVDPAIMGIGPAVAIPAAVKAAGLELDDIDLFEINEAFASQFVYCRNKLGLDPEKINVNGGAMAIGHPLGATGARCVATLLHEMKRRGKDCRFGVVSMCIGTGMGAAAVFERGDGVDELRNARKVEAQGLLSKDAR

SEQ ID NO: 23497 - DNA, 815 bp, Arabidopsis thaliana
  misc_feature (1)..(815): Ceres Seq. ID no. 12421912
  misc_feature: MA Experiment ID: 108585 Result: Up-regulated in Transcription
  misc_feature: MA Experiment 108585 PARAMETER Experiment Name: At_5mM_NaNP_cDNA_P Parameter: Timepoint (hr) Value: 6
  misc_feature: MA Experiment 108585 PARAMETER Experiment Name: At_5mM_NaNP_cDNA_P Parameter: Tissue Value: Aerial
  misc_feature: MA Experiment 108585 PARAMETER Experiment Name: At_5mM_NaNP_cDNA_P Parameter: Treatment Value: null
  misc_feature: MA Experiment ID: 20000069 Result: Up-regulated in Transcription
  misc_feature: MA Experiment 20000069 PARAMETER Experiment Name: At_100uM_ABA_Mutants_cDNA_P Parameter: Plant Line Value: CS23
  misc_feature: MA Experiment 20000069 PARAMETER Experiment Name: At_100uM_ABA_Mutants_cDNA_P Parameter: Timepoint (hr) Value: 6
  misc_feature: MA Experiment 20000069 PARAMETER Experiment Name: At_100uM_ABA_Mutants_cDNA_P Parameter: Tissue Value: Aerial
  misc_feature: MA Experiment 20000069 PARAMETER Experiment Name: At_100uM_ABA_Mutants_cDNA_P Parameter: Treatment Value: 100uM ABA vs. No Treatment
  misc_feature: MA Experiment ID: 20000184 Result: Down-regulated in Transcription
  misc_feature: MA Experiment 20000184 PARAMETER Experiment Name: At_Shoots__P Parameter: Age (day) Value: 7
  misc_feature: MA Experiment 20000184 PARAMETER Experiment Name: At_Shoots__P Parameter: Tissue Value: Shoots vs. Whole Plant
  misc_feature: MA Experiment ID: 20000234 Result: Down-regulated in Transcription
  misc_feature: MA Experiment 20000234 PARAMETER Experiment Name: At_Siliques_P Parameter: Age (day) Value: 21
  misc_feature: MA Experiment 20000234 PARAMETER Experiment Name: At_Siliques_P Parameter: Organism Value: A. thaliana
  misc_feature: MA Experiment 20000234 PARAMETER Experiment Name: At_Siliques_P Parameter: Plant Line Value: WS
  misc_feature: MA Experiment 20000234 PARAMETER Experiment Name: At_Siliques_P Parameter: Tissue Value: Less Than 5mm Siliques vs. Whole Plant
  misc_feature: MA Experiment ID: 20000235 Result: Down-regulated in Transcription
  misc_feature: MA Experiment 20000235 PARAMETER Experiment Name: At_Siliques_P Parameter: Age (day) Value: 21
  misc_feature: MA Experiment 20000235 PARAMETER Experiment Name: At_Siliques_P Parameter: Organism Value: A. thaliana
  misc_feature: MA Experiment 20000235 PARAMETER Experiment Name: At_Siliques_P Parameter: Plant Line Value: WS
  misc_feature: MA Experiment 20000235 PARAMETER Experiment Name: At_Siliques_P Parameter: Tissue Value: 5-10mm Siliques vs. Whole Plant
  misc_feature: MA Experiment ID: 20000265 Result: Down-regulated in Transcription
  misc_feature: MA Experiment 20000265 PARAMETER Experiment Name: At_Open_Flower_P Parameter: Age (day) Value: 21
  misc_feature: MA Experiment 20000265 PARAMETER Experiment Name: At_Open_Flower_P Parameter: Plant Line Value: WS
  misc_feature: MA Experiment 20000265 PARAMETER Experiment Name: At_Open_Flower_P Parameter: Tissue Value: Closed Flower vs. Whole Plant
  misc_feature: MA Experiment ID: 20000286 Result: Down-regulated in Transcription
  misc_feature: MA Experiment 20000286 PARAMETER Experiment Name: At_Open_Flower_P Parameter: Age (day) Value: 21
  misc_feature: MA Experiment 20000286 PARAMETER Experiment Name: At_Open_Flower_P Parameter: Plant Line Value: WS
  misc_feature: MA Experiment 20000286 PARAMETER Experiment Name: At_Open_Flower_P Parameter: Tissue Value: Half Open vs. Whole Plant
  misc_feature: MA Experiment ID: 20000437 Result: Up-regulated in Transcription
  misc_feature: MA Experiment 20000437 PARAMETER Experiment Name: At_Drought_P Parameter: Age (day) Value: 8
  misc_feature: MA Experiment 20000437 PARAMETER Experiment Name: At_Drought_P Parameter: Organism Value: A. thaliana
  misc_feature: MA Experiment 20000437 PARAMETER Experiment Name: At_Drought_P Parameter: Plant Line Value: WS
  misc_feature: MA Experiment 20000437 PARAMETER Experiment Name: At_Drought_P Parameter: Timepoint (hr) Value: 24
  misc_feature: MA Experiment 20000437 PARAMETER Experiment Name: At_Drought_P Parameter: Tissue Value: Whole Plant
  misc_feature: MA Experiment 20000437 PARAMETER Experiment Name: At_Drought_P Parameter: Treatment Value: Drought vs. No Drought
  misc_feature: MA Experiment ID: 20000573 Result: Down-regulated in Transcription
  misc_feature: MA Experiment 20000573 PARAMETER Experiment Name: At_100uM_ABA_Mutants__P Parameter: Organism Value: A. thaliana
  misc_feature: MA Experiment 20000573 PARAMETER Experiment Name: At_100uM_ABA_Mutants__P Parameter: Plant Line Value: CS22 vs. Ler wt
  misc_feature: MA Experiment 20000573 PARAMETER Experiment Name: At_100uM_ABA_Mutants__P Parameter: Timepoint (hr) Value: N/A
  misc_feature: MA Experiment 20000573 PARAMETER Experiment Name: At_100uM_ABA_Mutants__P Parameter: Tissue Value: Whole Plant
  misc_feature: MA Experiment 20000573 PARAMETER Experiment Name: At_100uM_ABA_Mutants__P Parameter: Treatment Value: None
  misc_feature: MA Experiment ID: 20000574 Result: Down-regulated in Transcription
  misc_feature: MA Experiment 20000574 PARAMETER Experiment Name: At_100uM_ABA_Mutants__P Parameter: Organism Value: A. thaliana
  misc_feature: MA Experiment 20000574 PARAMETER Experiment Name: At_100uM_ABA_Mutants__P Parameter: Plant Line Value: CS23 vs. Ler wt
  misc_feature: MA Experiment 20000574 PARAMETER Experiment Name: At_100uM_ABA_Mutants__P Parameter: Timepoint (hr) Value: N/A
  misc_feature: MA Experiment 20000574 PARAMETER Experiment Name: At_100uM_ABA_Mutants__P Parameter: Tissue Value: Whole Plant
  misc_feature: MA Experiment 20000574 PARAMETER Experiment Name: At_100uM_ABA_Mutants__P Parameter: Treatment Value: None
aacaagtccaacttctctccttaagaaactctccttaagaattaagaaagagaccagaaacgaaaacctcatcaatcaaagctcaaaatcgccttcaatggatgctaagatcggacaattctttgactccgtcggtactttcttcagcggcagcgataagatcccatggtgcgacggagatgtcatcgctggatgtgaaagagaggttcgagaggccacagattctggcactgaagatcttaagaaagagtgcttgatgcgattgtcatgggcccttgttcattcccgtcaaacggaagatgttcaacgtggaatagccatgcttgaagcatctctggaaagcagtgcccctccattggaggaccgagagaagctctatcttcttgctgttgggtattacagaagtgggaattactcaaggagcaggcagctcgtggaccgctgtatcgagatgcaagctgattggagacaagctttggtcctaaagaagaccatcgaagacaaaatcacaaaggatggtgttatagggatagggatcacggctacagcctttggagctgtgggtctcatagccggtggtatcgtagcagcgatgtctcgcaagaaatgaaaaccacaaccatgacttcttctctgtgtatacaatggcagtttactttttttcacatttttttcttcttctttgagtgtgttctccactgcttacttcacaatctatgatatagaaaagtcgaagctatttgcttcgaattaacattttgcttcgaattaacattgtgccatgtcattaattagcatttttacataccattttt

SEQ ID NO: 23498 - protein, 202 aa, Arabidopsis thaliana
  peptide (1)..(202): Ceres Seq. ID no. 12421913
  misc_feature (68)..(192): Homolog of NCBI NO: 40889302 NR Description: Chain A, Solution Structure Of Human Mitochondria
  misc_feature (68)..(192): Homolog of NCBI NO: 19112511 NR Description: conserved hypothetical protein
  misc_feature (89)..(202): Homolog of NCBI NO: 33391189 NR Description: putative mitochondrial fission protein Tbfis1p
  misc_feature (68)..(202): Homolog of NCBI NO: 33112470 NR Description: Tetratricopeptide repeat protein 11 (TPR repeat
  misc_feature (68)..(202): Homolog of NCBI NO: 7705632 NR Description: CGI-135 protein [Homo sapiens]
  misc_feature (66)..(202): Homolog of NCBI NO: 27664028 NR Description: similar to RIKEN cDNA 2010003O14
  misc_feature (66)..(202): Homolog of NCBI NO: 13384998 NR Description: RIKEN cDNA 2010003O14 [Mus musculus]
  misc_feature (1)..(201): Homolog of NCBI NO: 19386833 NR Description: B1147A04.28 [Oryza sativa (japonica
  misc_feature (33)..(195): Homolog of NCBI NO: 18416852 NR Description: putative protein; protein id: At5g12390.1
  misc_feature (33)..(202): Homolog of NCBI NO: 18410639 NR Description: expressed protein
TSPTSLLKKLSLRIKKETRNENLINQSSKSPSMDAKIGQFFDSVGTFFSGSDKIPWCDGDVIAGCEREVREATDSGTEDLKKECLMRLSWALVHSRQTEDVQRGIAMLEASLESSAPPLEDREKLYLLAVGYYRSGNYSRSRQLVDRCIEMQADWRQALVLKKTIEDKITKDGVIGIGITATAFGAVGLIAGGIVAAMSRKK

SEQ ID NO: 23499 - protein, 170 aa, Arabidopsis thaliana
  peptide (1)..(170): Ceres Seq. ID no. 12421914
  misc_feature (36)..(160): Homolog of NCBI NO: 40889302 NR Description: Chain A, Solution Structure Of Human Mitochondria
  misc_feature (36)..(160): Homolog of NCBI NO: 19112511 NR Description: conserved hypothetical protein
  misc_feature (57)..(170): Homolog of NCBI NO: 33391189 NR Description: putative mitochondrial fission protein Tbfis1p
  misc_feature (36)..(170): Homolog of NCBI NO: 33112470 NR Description: Tetratricopeptide repeat protein 11 (TPR repeat
  misc_feature (36)..(170): Homolog of NCBI NO: 7705632 NR Description: CGI-135 protein [Homo sapiens]
  misc_feature (34)..(170): Homolog of NCBI NO: 27664028 NR Description: similar to RIKEN cDNA 2010003O14
  misc_feature (34)..(170): Homolog of NCBI NO: 13384998 NR Description: RIKEN cDNA 2010003O14 [Mus musculus]
  misc_feature (1)..(169): Homolog of NCBI NO: 19386833 NR Description: B1147A04.28 [Oryza sativa (japonica
  misc_feature (1)..(163): Homolog of NCBI NO: 18416852 NR Description: putative protein; protein id: At5g12390.1
  misc_feature (1)..(170): Homolog of NCBI NO: 18410639 NR Description: expressed protein
MDAKIGQFFDSVGTFFSGSDKIPWCDGDVIAGCEREVREATDSGTEDLKKECLMRLSWALVHSRQTEDVQRGIAMLEASLESSAPPLEDREKLYLLAVGYYRSGNYSRSRQLVDRCIEMQADWRQALVLKKTIEDKITKDGVIGIGITATAFGAVGLIAGGIVAAMSRKK

SEQ ID NO: 23500 - protein, 117 aa, Arabidopsis thaliana
  peptide (1)..(117): Ceres Seq. ID no. 12421915
  misc_feature (4)..(117): Homolog of NCBI NO: 33391189 NR Description: putative mitochondrial fission protein Tbfis1p
  misc_feature (1)..(117): Homolog of NCBI NO: 33112470 NR Description: Tetratricopeptide repeat protein 11 (TPR repeat
  misc_feature (1)..(117): Homolog of NCBI NO: 7705632 NR Description: CGI-135 protein [Homo sapiens]
  misc_feature (1)..(117): Homolog of NCBI NO: 27664028 NR Description: similar to RIKEN cDNA 2010003O14
  misc_feature (1)..(117): Homolog of NCBI NO: 13384998 NR Description: RIKEN cDNA 2010003O14 [Mus musculus]
  misc_feature (1)..(116): Homolog of NCBI NO: 19386833 NR Description: B1147A04.28 [Oryza sativa (japonica
  misc_feature (1)..(110): Homolog of NCBI NO: 18416852 NR Description: putative protein; protein id: At5g12390.1
  misc_feature (1)..(117): Homolog of NCBI NO: 18410639 NR Description: expressed protein
  misc_feature (1)..(107): Homolog of NCBI NO: 40889302 NR Description: Chain A, Solution Structure Of Human Mitochondria
  misc_feature (1)..(107): Homolog of NCBI NO: 19112511 NR Description: conserved hypothetical protein
MRLSWALVHSRQTEDVQRGIAMLEASLESSAPPLEDREKLYLLAVGYYRSGNYSRSRQLVDRCIEMQADWRQALVLKKTIEDKITKDGVIGIGITATAFGAVGLIAGGIVAAMSRKK

SEQ ID NO: 23501 - DNA, 1443 bp, Arabidopsis thaliana
  misc_feature (1)..(1443): Ceres Seq. ID no. 12601407
  misc_feature: MA Experiment ID: 108434 Result: Up-regulated in Transcription
  misc_feature: MA Experiment 108434 PARAMETER Experiment Name: At_Root_Tips_cDNA_P Parameter: Tissue Value: Root Tips
  misc_feature: MA Experiment ID: 108463 Result: Up-regulated in Transcription
  misc_feature: MA Experiment 108463 PARAMETER Experiment Name: At_Germinating_Seeds_cDNA_P Parameter: Age (day) Value: 3 vs. 0
  misc_feature: MA Experiment 108463 PARAMETER Experiment Name: At_Germinating_Seeds_cDNA_P Parameter: Tissue Value: Germinating Seeds
  misc_feature: MA Experiment ID: 108464 Result: Up-regulated in Transcription
  misc_feature: MA Experiment 108464 PARAMETER Experiment Name: At_Germinating_Seeds_cDNA_P Parameter: Age (day) Value: 4 vs. 0
  misc_feature: MA Experiment 108464 PARAMETER Experiment Name: At_Germinating_Seeds_cDNA_P Parameter: Tissue Value: Germinating Seeds
  misc_feature: MA Experiment ID: 108573 Result: Up-regulated in Transcription
  misc_feature: MA Experiment 108573 PARAMETER Experiment Name: At_Drought_cDNA_P Parameter: Timepoint (hr) Value: 6
  misc_feature: MA Experiment 108573 PARAMETER Experiment Name: At_Drought_cDNA_P Parameter: Tissue Value: Aerial
  misc_feature: MA Experiment 108573 PARAMETER Experiment Name: At_Drought_cDNA_P Parameter: Treatment Value: Drought vs. No Drought
  misc_feature: MA Experiment ID: 20000087 Result: Down-regulated in Transcription
  misc_feature: MA Experiment 20000087 PARAMETER Experiment Name: At_100uM_ABA_Mutants_cDNA_P Parameter: Plant Line Value: WS
  misc_feature: MA Experiment 20000087 PARAMETER Experiment Name: At_100uM_ABA_Mutants_cDNA_P Parameter: Timepoint (hr) Value: 6
  misc_feature: MA Experiment 20000087 PARAMETER Experiment Name: At_100uM_ABA_Mutants_cDNA_P Parameter: Tissue Value: Aerial
  misc_feature: MA Experiment 20000087 PARAMETER Experiment Name: At_100uM_ABA_Mutants_cDNA_P Parameter: Treatment Value: 100uM ABA vs. No Treatment
  misc_feature: MA Experiment ID: 20000111 Result: Up-regulated in Transcription
  misc_feature: MA Experiment 20000111 PARAMETER Experiment Name: At_42deg_Heat_cDNA_P Parameter: Temperature (deg C) Value: 42 vs. 22
  misc_feature: MA Experiment 20000111 PARAMETER Experiment Name: At_42deg_Heat_cDNA_P Parameter: Timepoint (hr) Value: 6
  misc_feature: MA Experiment 20000111 PARAMETER Experiment Name: At_42deg_Heat_cDNA_P Parameter: Tissue Value: Aerial
  misc_feature: MA Experiment ID: 20000113 Result: Up-regulated in Transcription
  misc_feature: MA Experiment 20000113 PARAMETER Experiment Name: At_42deg_Heat_cDNA_P Parameter: Temperature (deg C) Value: 42 vs. 22
  misc_feature: MA Experiment 20000113 PARAMETER Experiment Name: At_42deg_Heat_cDNA_P Parameter: Timepoint (hr) Value: 8
  misc_feature: MA Experiment 20000113 PARAMETER Experiment Name: At_42deg_Heat_cDNA_P Parameter: Tissue Value: Aerial
  misc_feature: MA Experiment ID: 20000224 Result: Down-regulated in Transcription
  misc_feature: MA Experiment ID: 20000307 Result: Up-regulated in Transcription
  misc_feature: MA Experiment 20000307 PARAMETER Experiment Name: At_Germinating_Seeds_Sub_P Parameter: Age (hr) Value: 24 vs. 0
  misc_feature: MA Experiment 20000307 PARAMETER Experiment Name: At_Germinating_Seeds_Sub_P Parameter: Organism Value: A. thaliana
  misc_feature: MA Experiment 20000307 PARAMETER Experiment Name: At_Germinating_Seeds_Sub_P Parameter: Plant Line Value: WS
  misc_feature: MA Experiment 20000307 PARAMETER Experiment Name: At_Germinating_Seeds_Sub_P Parameter: Tissue Value: Germinating Seeds
  misc_feature: MA Experiment ID: 20000328 Result: Up-regulated in Transcription
  misc_feature: MA Experiment 20000328 PARAMETER Experiment Name: At_42deg_Heat_Sub_P Parameter: Age (day) Value: 14
  misc_feature: MA Experiment 20000328 PARAMETER Experiment Name: At_42deg_Heat_Sub_P Parameter: Organism Value: A. thaliana
  misc_feature: MA Experiment 20000328 PARAMETER Experiment Name: At_42deg_Heat_Sub_P Parameter: Plant Line Value: WS
  misc_feature: MA Experiment 20000328 PARAMETER Experiment Name: At_42deg_Heat_Sub_P Parameter: Temperature (deg C) Value: 42 vs. 22
  misc_feature: MA Experiment 20000328 PARAMETER Experiment Name: At_42deg_Heat_Sub_P Parameter: Timepoint (hr) Value: 6
  misc_feature: MA Experiment 20000328 PARAMETER Experiment Name: At_42deg_Heat_Sub_P Parameter: Tissue Value: Aerial
  misc_feature: MA Experiment ID: 20000355 Result: Up-regulated in Transcription
  misc_feature: MA Experiment 20000355 PARAMETER Experiment Name: At_Siliques_Sub_P Parameter: Age (day) Value: 21
  misc_feature: MA Experiment 20000355 PARAMETER Experiment Name: At_Siliques_Sub_P Parameter: Organism Value: A. thaliana
  misc_feature: MA Experiment 20000355 PARAMETER Experiment Name: At_Siliques_Sub_P Parameter: Plant Line Value: WS
  misc_feature: MA Experiment 20000355 PARAMETER Experiment Name: At_Siliques_Sub_P Parameter: Tissue Value: Less Than 5mm Siliques vs. Whole Plant
  misc_feature: Phenotype: ROSETTE LEAVES Petiole Length-Short Petioles
  misc_feature: Phenotype: ROSETTE LEAVES Shape-Serrate
  misc_feature: Phenotype: WHOLE PLANT Size-Small
  misc_feature: Phenotype: WHOLE PLANT Other
  misc_feature: Phenotype: ROSETTE LEAVES Petiole Length-Short Petioles
  misc_feature: Phenotype: ROSETTE LEAVES Shape-Serrate
  misc_feature: Phenotype: WHOLE PLANT Size-Small
  misc_feature: Phenotype: WHOLE PLANT Other
  misc_feature: Phenotype: INFLORESCENCE Flowering Time-Late Flowering
  misc_feature: Phenotype: ROSETTE LEAVES Petiole Length-Short Petioles
  misc_feature: Phenotype: ROSETTE LEAVES Shape-Serrate
  misc_feature: Phenotype: WHOLE PLANT Size-Small
  misc_feature: Phenotype: WHOLE PLANT Other
  misc_feature: Phenotype: INFLORESCENCE Flowering Time-Late Flowering
aaatcgtccccgtctcgtttccttcttcgctcgctgttcagattttgctttgaggctttaggctccccagatctctaatcgccgcagctttaagaaatggagactttcctattcacatctgagtctgtgaacgaaggacaccctgacaagctttgcgaccagatctctgatgcagtccttgatgcctgccttgagcaagaccctgatagcaaagttgcttgtgagacatgcaccaagaccaacatggtcatggttttcggtgagatcaccaccaaggctacgattgactacgagaagattgtccgtgacacttgccgttccattggattcatctctgacgatgttggtcttgatgctgacaaatgcaaagtccttgttaacattgaacaacagagcccagacattgctcaaggtgttcacggtcacttcaccaaacgtccagaagacattggagctggtgaccaaggacacatgtttggttatgccactgatgaaacccctgagctcatgcctttgagtcatgtccttgcaaccaagattggtgctcgtctcactgaagtcaggaagaatggaacttgccgttggttaagaccagatggcaagacccaagtcactgttgagtactacaatgacaatggcgctatggttccagtccgtgtccacaccgtcctgatctcaacccagcacgatgaaaccgttaccaatgacgagattgcgcgtgacctcaaggagcatgtgatcaaaccaatcatcccagagaaataccttgacgacaaaaccatcttccacctcaacccatcaggccggtttgtgatcgggggaccacacggtgatgctggtttaactggacgtaagatcatcattgacacatacggaggatggggagctcatggaggtggtgctttctcaggcaaagacccaaccaaagtcgacagaagtggagcttacatcgtgaggcaagcagcaaagagtgtggtggctaatggcatggctcgcagggctcttgtccaggtctcatacgccattggagtacccgagccattgtctgtcttcgttgacacttacggaacagggttgattccagacaaggagatcctgaagatcgtgaaagagacattcgatttcagaccaggaatgatgacaatcaacttggacttgaagagaggaggaaatggaaggtttcagaaaacggcagcgtatggacatttcggaagagacgaccctgacttcacctgggaggtcgtgaagccactcaagtgggacaaacctcaagcttaaacttgattttatgtttcttctgtctttttactttaaacatctaccatggaccaataatcaaatccctctgtttcttttttcttgtattattgatatgaaagtttctggtttgtttaaacaactaccatagaccaattttctctttcactataaattgtagtagtt

SEQ ID NO: 23502 - protein, 393 aa, Arabidopsis thaliana
  peptide (1)..(393): Ceres Seq. ID no. 12601408
  misc_feature (116)..(238): Pfam Name: S-adenosylmethionine synthetase, central domain Pfam Description: S-adenosylmethionine synthetase, central domain
  misc_feature (116)..(238): Pfam Name: S-adenosylmethionine synthetase, central domain Pfam Description: S-adenosylmethionine synthetase, central domain
  misc_feature (1)..(393): Homolog of NCBI NO: 16226059 NR Description: S-adenosyl-L-methionine synthetase [Dendrobium
  misc_feature (1)..(390): Homolog of NCBI NO: 3024126 NR Description: S-adenosylmethionine synthetase 1 (Methionine
  misc_feature (1)..(393): Homolog of NCBI NO: 13540318 NR Description: S-adenosyl-L-methionine synthetase [Elaeagnus
  misc_feature (1)..(393): Homolog of NCBI NO: 13540316 NR Description: S-adenosyl-L-methionine synthetase [Elaeagnus
  misc_feature (1)..(393): Homolog of NCBI NO: 15217781 NR Description: s-adenosylmethionine synthetase
  misc_feature (1)..(393): Homolog of NCBI NO: 16226059 NR Description: S-adenosyl-L-methionine synthetase [Dendrobium
  misc_feature (1)..(393): Homolog of NCBI NO: 13540318 NR Description: S-adenosyl-L-methionine synthetase [Elaeagnus
  misc_feature (1)..(393): Homolog of NCBI NO: 15217781 NR Description: s-adenosylmethionine synthetase
  misc_feature (1)..(393): Homolog of NCBI NO: 15234354 NR Description: S-adenosylmethionine synthase 2
  misc_feature (1)..(393): Homolog of NCBI NO: 14600072 NR Description: S-adenosylmethionine synthetase [Brassica juncea]
  misc_feature (1)..(393): Homolog of NCBI NO: 14600068 NR Description: S-adenosylmethionine synthetase [Brassica juncea]
  misc_feature (1)..(393): Homolog of NCBI NO: 1346520 NR Description: S-adenosylmethionine synthetase (Methionine
  misc_feature (1)..(393): Homolog of NCBI NO: 81647 NR Description: methionine adenosyltransferase (EC 2.5.1.6) -
  misc_feature (1)..(393): Homolog of NCBI NO: 13540316 NR Description: S-adenosyl-L-methionine synthetase [Elaeagnus
  misc_feature (1)..(390): Homolog of NCBI NO: 3024126 NR Description: S-adenosylmethionine synthetase 1 (Methionine
  misc_feature (1)..(393): Homolog of NCBI NO: 81647 NR Description: methionine adenosyltransferase (EC 2.5.1.6) -
  misc_feature (1)..(393): Homolog of NCBI NO: 1346520 NR Description: S-adenosylmethionine synthetase (Methionine
  misc_feature (1)..(393): Homolog of NCBI NO: 14600068 NR Description: S-adenosylmethionine synthetase [Brassica juncea]
  misc_feature (1)..(393): Homolog of NCBI NO: 14600072 NR Description: S-adenosylmethionine synthetase [Brassica juncea]
  misc_feature (1)..(393): Homolog of NCBI NO: 15234354 NR Description: S-adenosylmethionine synthase 2
METFLFTSESVNEGHPDKLCDQISDAVLDACLEQDPDSKVACETCTKTNMVMVFGEITTKATIDYEKIVRDTCRSIGFISDDVGLDADKCKVLVNIEQQSPDIAQGVHGHFTKRPEDIGAGDQGHMFGYATDETPELMPLSHVLATKIGARLTEVRKNGTCRWLRPDGKTQVTVEYYNDNGAMVPVRVHTVLISTQHDETVTNDEIARDLKEHVIKPIIPEKYLDDKTIFHLNPSGRFVIGGPHGDAGLTGRKIIIDTYGGWGAHGGGAFSGKDPTKVDRSGAYIVRQAAKSVVANGMARRALVQVSYAIGVPEPLSVFVDTYGTGLIPDKEILKIVKETFDFRPGMMTINLDLKRGGNGRFQKTAAYGHFGRDDPDFTWEVVKPLKWDKPQA

SEQ ID NO: 23503 - protein, 344 aa, Arabidopsis thaliana
  peptide (1)..(344): Ceres Seq. ID no. 12601409
  misc_feature (67)..(189): Pfam Name: S-adenosylmethionine synthetase, central domain Pfam Description: S-adenosylmethionine synthetase, central domain
  misc_feature (67)..(189): Pfam Name: S-adenosylmethionine synthetase, central domain Pfam Description: S-adenosylmethionine synthetase, central domain
  misc_feature (1)..(344): Homolog of NCBI NO: 16226059 NR Description: S-adenosyl-L-methionine synthetase [Dendrobium
  misc_feature (1)..(341): Homolog of NCBI NO: 3024126 NR Description: S-adenosylmethionine synthetase 1 (Methionine
  misc_feature (1)..(344): Homolog of NCBI NO: 13540318 NR Description: S-adenosyl-L-methionine synthetase [Elaeagnus
  misc_feature (1)..(344): Homolog of NCBI NO: 13540316 NR Description: S-adenosyl-L-methionine synthetase [Elaeagnus
  misc_feature (1)..(344): Homolog of NCBI NO: 15217781 NR Description: s-adenosylmethionine synthetase
  misc_feature (1)..(344): Homolog of NCBI NO: 16226059 NR Description: S-adenosyl-L-methionine synthetase [Dendrobium
  misc_feature (1)..(344): Homolog of NCBI NO: 13540318 NR Description: S-adenosyl-L-methionine synthetase [Elaeagnus
  misc_feature (1)..(344): Homolog of NCBI NO: 15217781 NR Description: s-adenosylmethionine synthetase
  misc_feature (1)..(344): Homolog of NCBI NO: 15234354 NR Description: S-adenosylmethionine synthase 2
  misc_feature (1)..(344): Homolog of NCBI NO: 14600072 NR Description: S-adenosylmethionine synthetase [Brassica juncea]
  misc_feature (1)..(344): Homolog of NCBI NO: 14600068 NR Description: S-adenosylmethionine synthetase [Brassica juncea]
  misc_feature (1)..(344): Homolog of NCBI NO: 1346520 NR Description: S-adenosylmethionine synthetase (Methionine
  misc_feature (1)..(344): Homolog of NCBI NO: 81647 NR Description: methionine adenosyltransferase (EC 2.5.1.6) -
  misc_feature (1)..(344): Homolog of NCBI NO: 13540316 NR Description: S-adenosyl-L-methionine synthetase [Elaeagnus
  misc_feature (1)..(341): Homolog of NCBI NO: 3024126 NR Description: S-adenosylmethionine synthetase 1 (Methionine
  misc_feature (1)..(344): Homolog of NCBI NO: 81647 NR Description: methionine adenosyltransferase (EC 2.5.1.6) -
  misc_feature (1)..(344): Homolog of NCBI NO: 1346520 NR Description: S-adenosylmethionine synthetase (Methionine
  misc_feature (1)..(344): Homolog of NCBI NO: 14600068 NR Description: S-adenosylmethionine synthetase [Brassica juncea]
  misc_feature (1)..(344): Homolog of NCBI NO: 14600072 NR Description: S-adenosylmethionine synthetase [Brassica juncea]
  misc_feature (1)..(344): Homolog of NCBI NO: 15234354 NR Description: S-adenosylmethionine synthase 2
MVMVFGEITTKATIDYEKIVRDTCRSIGFISDDVGLDADKCKVLVNIEQQSPDIAQGVHGHFTKRPEDIGAGDQGHMFGYATDETPELMPLSHVLATKIGARLTEVRKNGTCRWLRPDGKTQVTVEYYNDNGAMVPVRVHTVLISTQHDETVTNDEIARDLKEHVIKPIIPEKYLDDKTIFHLNPSGRFVIGGPHGDAGLTGRKIIIDTYGGWGAHGGGAFSGKDPTKVDRSGAYIVRQAAKSVVANGMARRALVQVSYAIGVPEPLSVFVDTYGTGLIPDKEILKIVKETFDFRPGMMTINLDLKRGGNGRFQKTAAYGHFGRDDPDFTWEVVKPLKWDKPQA

SEQ ID NO: 23504 - protein, 342 aa, Arabidopsis thaliana
  peptide (1)..(342): Ceres Seq. ID no. 12601410
  misc_feature (65)..(187): Pfam Name: S-adenosylmethionine synthetase, central domain Pfam Description: S-adenosylmethionine synthetase, central domain
  misc_feature (65)..(187): Pfam Name: S-adenosylmethionine synthetase, central domain Pfam Description: S-adenosylmethionine synthetase, central domain
  misc_feature (1)..(342): Homolog of NCBI NO: 16226059 NR Description: S-adenosyl-L-methionine synthetase [Dendrobium
  misc_feature (1)..(339): Homolog of NCBI NO: 3024126 NR Description: S-adenosylmethionine synthetase 1 (Methionine
  misc_feature (1)..(342): Homolog of NCBI NO: 13540318 NR Description: S-adenosyl-L-methionine synthetase [Elaeagnus
  misc_feature (1)..(342): Homolog of NCBI NO: 13540316 NR Description: S-adenosyl-L-methionine synthetase [Elaeagnus
  misc_feature (1)..(342): Homolog of NCBI NO: 15217781 NR Description: s-adenosylmethionine synthetase
  misc_feature (1)..(342): Homolog of NCBI NO: 16226059 NR Description: S-adenosyl-L-methionine synthetase [Dendrobium
  misc_feature (1)..(342): Homolog of NCBI NO: 13540318 NR Description: S-adenosyl-L-methionine synthetase [Elaeagnus
  misc_feature (1)..(342): Homolog of NCBI NO: 15217781 NR Description: s-adenosylmethionine synthetase
  misc_feature (1)..(342): Homolog of NCBI NO: 15234354 NR Description: S-adenosylmethionine synthase 2
  misc_feature (1)..(342): Homolog of NCBI NO: 14600072 NR Description: S-adenosylmethionine synthetase [Brassica juncea]
  misc_feature (1)..(342): Homolog of NCBI NO: 14600068 NR Description: S-adenosylmethionine synthetase [Brassica juncea]
  misc_feature (1)..(342): Homolog of NCBI NO: 1346520 NR Description: S-adenosylmethionine synthetase (Methionine
  misc_feature (1)..(342): Homolog of NCBI NO: 81647 NR Description: methionine adenosyltransferase (EC 2.5.1.6) -
  misc_feature (1)..(342): Homolog of NCBI NO: 13540316 NR Description: S-adenosyl-L-methionine synthetase [Elaeagnus
  misc_feature (1)..(339): Homolog of NCBI NO: 3024126 NR Description: S-adenosylmethionine synthetase 1 (Methionine
  misc_feature (1)..(342): Homolog of NCBI NO: 81647 NR Description: methionine adenosyltransferase (EC 2.5.1.6) -
  misc_feature (1)..(342): Homolog of NCBI NO: 1346520 NR Description: S-adenosylmethionine synthetase (Methionine
  misc_feature (1)..(342): Homolog of NCBI NO: 14600068 NR Description: S-adenosylmethionine synthetase [Brassica juncea]
  misc_feature (1)..(342): Homolog of NCBI NO: 14600072 NR Description: S-adenosylmethionine synthetase [Brassica juncea]
  misc_feature (1)..(342): Homolog of NCBI NO: 15234354 NR Description: S-adenosylmethionine synthase 2
MVFGEITTKATIDYEKIVRDTCRSIGFISDDVGLDADKCKVLVNIEQQSPDIAQGVHGHFTKRPEDIGAGDQGHMFGYATDETPELMPLSHVLATKIGARLTEVRKNGTCRWLRPDGKTQVTVEYYNDNGAMVPVRVHTVLISTQHDETVTNDEIARDLKEHVIKPIIPEKYLDDKTIFHLNPSGRFVIGGPHGDAGLTGRKIIIDTYGGWGAHGGGAFSGKDPTKVDRSGAYIVRQAAKSVVANGMARRALVQVSYAIGVPEPLSVFVDTYGTGLIPDKEILKIVKETFDFRPGMMTINLDLKRGGNGRFQKTAAYGHFGRDDPDFTWEVVKPLKWDKPQA

SEQ ID NO: 23505 - DNA, 753 bp, Arabidopsis thaliana
  misc_feature (1)..(753): Ceres Seq. ID no. 12338232
  misc_feature: MA Experiment ID: 108434 Result: Down-regulated in Transcription
  misc_feature: MA Experiment 108434 PARAMETER Experiment Name: At_Root_Tips_cDNA_P Parameter: Tissue Value: Root Tips
  misc_feature: MA Experiment ID: 108462 Result: Up-regulated in Transcription
  misc_feature: MA Experiment 108462 PARAMETER Experiment Name: At_Germinating_Seeds_cDNA_P Parameter: Age (day) Value: 2 vs. 0
  misc_feature: MA Experiment 108462 PARAMETER Experiment Name: At_Germinating_Seeds_cDNA_P Parameter: Tissue Value: Germinating Seeds
  misc_feature: MA Experiment ID: 108464 Result: Up-regulated in Transcription
  misc_feature: MA Experiment 108464 PARAMETER Experiment Name: At_Germinating_Seeds_cDNA_P Parameter: Age (day) Value: 4 vs. 0
  misc_feature: MA Experiment 108464 PARAMETER Experiment Name: At_Germinating_Seeds_cDNA_P Parameter: Tissue Value: Germinating Seeds
  misc_feature: MA Experiment ID: 108607 Result: Up-regulated in Transcription
  misc_feature: MA Experiment 108607 PARAMETER Experiment Name: At_100uM_ABA_cDNA_P Parameter: Timepoint (hr) Value: 4
  misc_feature: MA Experiment 108607 PARAMETER Experiment Name: At_100uM_ABA_cDNA_P Parameter: Tissue Value: Aerial
  misc_feature: MA Experiment 108607 PARAMETER Experiment Name: At_100uM_ABA_cDNA_P Parameter: Treatment Value: 100uM ABA vs. No Treatment
  misc_feature: MA Experiment ID: 20000068 Result: Down-regulated in Transcription
  misc_feature: MA Experiment ID: 20000224 Result: Up-regulated in Transcription
  misc_feature: MA Experiment ID: 20000269 Result: Up-regulated in Transcription
  misc_feature: MA Experiment 20000269 PARAMETER Experiment Name: At_1mM_KNO3_L-vs-H_Roots_P Parameter: Age (day) Value: 7,10,12
  misc_feature: MA Experiment 20000269 PARAMETER Experiment Name: At_1mM_KNO3_L-vs-H_Roots_P Parameter: Organism Value: A. thaliana
  misc_feature: MA Experiment 20000269 PARAMETER Experiment Name: At_1mM_KNO3_L-vs-H_Roots_P Parameter: Plant Line Value: WS
  misc_feature: MA Experiment 20000269 PARAMETER Experiment Name: At_1mM_KNO3_L-vs-H_Roots_P Parameter: Timepoint (day) Value: 7,10,12
  misc_feature: MA Experiment 20000269 PARAMETER Experiment Name: At_1mM_KNO3_L-vs-H_Roots_P Parameter: Tissue Value: Roots
  misc_feature: MA Experiment 20000269 PARAMETER Experiment Name: At_1mM_KNO3_L-vs-H_Roots_P Parameter: Treatment Value: 1mM KNO3 vs. 50mM KNO3
  misc_feature: MA Experiment ID: 20000286 Result: Down-regulated in Transcription
  misc_feature: MA Experiment 20000286 PARAMETER Experiment Name: At_Open_Flower_P Parameter: Age (day) Value: 21
  misc_feature: MA Experiment 20000286 PARAMETER Experiment Name: At_Open_Flower_P Parameter: Plant Line Value: WS
  misc_feature: MA Experiment 20000286 PARAMETER Experiment Name: At_Open_Flower_P Parameter: Tissue Value: Half Open vs. Whole Plant
  misc_feature: MA Experiment ID: 20000445 Result: Down-regulated in Transcription
  misc_feature: MA Experiment 20000445 PARAMETER Experiment Name: At_100uM_NAA__P Parameter: Age (day) Value: 14
  misc_feature: MA Experiment 20000445 PARAMETER Experiment Name: At_100uM_NAA__P Parameter: Organism Value: A. thaliana
  misc_feature: MA Experiment 20000445 PARAMETER Experiment Name: At_100uM_NAA__P Parameter: Plant Line Value: WS
  misc_feature: MA Experiment 20000445 PARAMETER Experiment Name: At_100uM_NAA__P Parameter: Timepoint (hr) Value: 6
  misc_feature: MA Experiment 20000445 PARAMETER Experiment Name: At_100uM_NAA__P Parameter: Tissue Value: Aerial
  misc_feature: MA Experiment 20000445 PARAMETER Experiment Name: At_100uM_NAA__P Parameter: Treatment Value: 100uM NAA vs. No Treatment
  misc_feature: MA Experiment ID: 20000573 Result: Up-regulated in Transcription
  misc_feature: MA Experiment 20000573 PARAMETER Experiment Name: At_100uM_ABA_Mutants__P Parameter: Organism Value: A. thaliana
  misc_feature: MA Experiment 20000573 PARAMETER Experiment Name: At_100uM_ABA_Mutants__P Parameter: Plant Line Value: CS22 vs. Ler wt
  misc_feature: MA Experiment 20000573 PARAMETER Experiment Name: At_100uM_ABA_Mutants__P Parameter: Timepoint (hr) Value: N/A
  misc_feature: MA Experiment 20000573 PARAMETER Experiment Name: At_100uM_ABA_Mutants__P Parameter: Tissue Value: Whole Plant
  misc_feature: MA Experiment 20000573 PARAMETER Experiment Name: At_100uM_ABA_Mutants__P Parameter: Treatment Value: None
  misc_feature: MA Experiment ID: 20000574 Result: Up-regulated in Transcription
  misc_feature: MA Experiment 20000574 PARAMETER Experiment Name: At_100uM_ABA_Mutants__P Parameter: Organism Value: A. thaliana
  misc_feature: MA Experiment 20000574 PARAMETER Experiment Name: At_100uM_ABA_Mutants__P Parameter: Plant Line Value: CS23 vs. Ler wt
  misc_feature: MA Experiment 20000574 PARAMETER Experiment Name: At_100uM_ABA_Mutants__P Parameter: Timepoint (hr) Value: N/A
  misc_feature: MA Experiment 20000574 PARAMETER Experiment Name: At_100uM_ABA_Mutants__P Parameter: Tissue Value: Whole Plant
  misc_feature: MA Experiment 20000574 PARAMETER Experiment Name: At_100uM_ABA_Mutants__P Parameter: Treatment Value: None
aaaaacattcagagagaaaattcagcatttttgatagctcaagcacttgattctttccaaaggggtttcctgagatcacaaaggccaagtaacaatggcgaaaggagttgcagttttgaacagcagtgagggtgttacggggactatctttttcacccaggaaggcgatggtgtgaccactgtgagtggaacagtttctggccttaagcctggtcttcatggtttccatgtccatgctcttggtgacaccactaacggttgcatgtctactggtccacatttcaaccccgatggtaaaacacacggtgcccctgaggatgctaatcgacatgctggtgatctaggaaacatcactgttggagatgatggaactgccaccttcacaatcactgattgccagattcctcttactggaccaaactctattgttggtagggctattgttgtccatgcagaccctgatgacctcggaaagggaggccatgaactcagcctggctactggaaacgcaggcggccgtgttgcttgcggcatcattggtctccagggctaaagctgctacgtttccaaagaagagattgatgtaataaggaggtccaaccttagacctgggtttggtagttgtgtgtatcttctggtgtgtggctaaaaacctttgagcttagtgtggctcaaagcatctttaattcagacagaaaacagagaaaattccgtacttttattatttcatgaataaaaaagagttggtttact

SEQ ID NO: 23506 - protein, 152 aa, Arabidopsis thaliana
  peptide (1)..(152): Ceres Seq. ID no. 12338233
  misc_feature (2)..(152): Pfam Name: Copper/zinc superoxide dismutase (SODC) Pfam Description: Copper/zinc superoxide dismutase (SODC)
  misc_feature (1)..(152): Homolog of NCBI NO: 4102859 NR Description: cytoplasmic superoxide dismutase 1 [Populus
  misc_feature (1)..(152): Homolog of NCBI NO: 4102861 NR Description: copper/zinc-superoxide dismutase [Populus
  misc_feature (1)..(152): Homolog of NCBI NO: 12230587 NR Description: Superoxide dismutase [Cu-Zn] 2
  misc_feature (2)..(152): Homolog of NCBI NO: 134602 NR Description: SUPEROXIDE DISMUTASE [CU-ZN]
  misc_feature (1)..(152): Homolog of NCBI NO: 12230586 NR Description: Superoxide dismutase [Cu-Zn] 1
  misc_feature (1)..(152): Homolog of NCBI NO: 24421235 NR Description: superoxide dismutase [Brassica juncea]
  misc_feature (1)..(152): Homolog of NCBI NO: 3288850 NR Description: cytosolic Cu/Zn superoxide dismutase
  misc_feature (1)..(152): Homolog of NCBI NO: 2305111 NR Description: Cu/Zn superoxide dismutase [Raphanus sativus]
  misc_feature (1)..(146): Homolog of NCBI NO: 9802567 NR Description: F22O13.32 [Arabidopsis thaliana]
  misc_feature (1)..(152): Homolog of NCBI NO: 15223944 NR Description: copper/zinc superoxidase dismutase (CSD1)
MAKGVAVLNSSEGVTGTIFFTQEGDGVTTVSGTVSGLKPGLHGFHVHALGDTTNGCMSTGPHFNPDGKTHGAPEDANRHAGDLGNITVGDDGTATFTITDCQIPLTGPNSIVGRAIVVHADPDDLGKGGHELSLATGNAGGRVACGIIGLQG

SEQ ID NO: 23507 - protein, 96 aa, Arabidopsis thaliana
  peptide (1)..(96): Ceres Seq. ID no. 12338234
  misc_feature (1)..(96): Pfam Name: Copper/zinc superoxide dismutase (SODC) Pfam Description: Copper/zinc superoxide dismutase (SODC)
  misc_feature (1)..(96): Homolog of NCBI NO: 4102859 NR Description: cytoplasmic superoxide dismutase 1 [Populus
  misc_feature (1)..(96): Homolog of NCBI NO: 4102861 NR Description: copper/zinc-superoxide dismutase [Populus
  misc_feature (1)..(96): Homolog of NCBI NO: 12230587 NR Description: Superoxide dismutase [Cu-Zn] 2
  misc_feature (1)..(96): Homolog of NCBI NO: 134602 NR Description: SUPEROXIDE DISMUTASE [CU-ZN]
  misc_feature (1)..(96): Homolog of NCBI NO: 12230586 NR Description: Superoxide dismutase [Cu-Zn] 1
  misc_feature (1)..(96): Homolog of NCBI NO: 24421235 NR Description: superoxide dismutase [Brassica juncea]
  misc_feature (1)..(96): Homolog of NCBI NO: 3288850 NR Description: cytosolic Cu/Zn superoxide dismutase
  misc_feature (1)..(96): Homolog of NCBI NO: 2305111 NR Description: Cu/Zn superoxide dismutase [Raphanus sativus]
  misc_feature (1)..(90): Homolog of NCBI NO: 9802567 NR Description: F22O13.32 [Arabidopsis thaliana]
  misc_feature (1)..(96): Homolog of NCBI NO: 15223944 NR Description: copper/zinc superoxidase dismutase (CSD1)
MSTGPHFNPDGKTHGAPEDANRHAGDLGNITVGDDGTATFTITDCQIPLTGPNSIVGRAIVVHADPDDLGKGGHELSLATGNAGGRVACGIIGLQG

SEQ ID NO: 23508 - DNA, 1719 bp, Arabidopsis thaliana
  misc_feature (1)..(1719): Ceres Seq. ID no. 12723533
  misc_feature: MA Experiment ID: 20000069 Result: Up-regulated in Transcription
  misc_feature: MA Experiment 20000069 PARAMETER Experiment Name: At_100uM_ABA_Mutants_cDNA_P Parameter: Plant Line Value: CS23
  misc_feature: MA Experiment 20000069 PARAMETER Experiment Name: At_100uM_ABA_Mutants_cDNA_P Parameter: Timepoint (hr) Value: 6
  misc_feature: MA Experiment 20000069 PARAMETER Experiment Name: At_100uM_ABA_Mutants_cDNA_P Parameter: Tissue Value: Aerial
  misc_feature: MA Experiment 20000069 PARAMETER Experiment Name: At_100uM_ABA_Mutants_cDNA_P Parameter: Treatment Value: 100uM ABA vs. No Treatment
  misc_feature: MA Experiment ID: 20000070 Result: Up-regulated in Transcription
  misc_feature: MA Experiment 20000070 PARAMETER Experiment Name: At_100uM_ABA_Mutants_cDNA_P Parameter: Plant Line Value: CS24
  misc_feature: MA Experiment 20000070 PARAMETER Experiment Name: At_100uM_ABA_Mutants_cDNA_P Parameter: Timepoint (hr) Value: 6
  misc_feature: MA Experiment 20000070 PARAMETER Experiment Name: At_100uM_ABA_Mutants_cDNA_P Parameter: Tissue Value: Aerial
  misc_feature: MA Experiment 20000070 PARAMETER Experiment Name: At_100uM_ABA_Mutants_cDNA_P Parameter: Treatment Value: 100uM ABA vs. No Treatment
  misc_feature: MA Experiment ID: 20000072 Result: Up-regulated in Transcription
  misc_feature: MA Experiment 20000072 PARAMETER Experiment Name: At_100uM_ABA_Mutants_cDNA_P Parameter: Plant Line Value: CS8105
  misc_feature: MA Experiment 20000072 PARAMETER Experiment Name: At_100uM_ABA_Mutants_cDNA_P Parameter: Timepoint (hr) Value: 6
  misc_feature: MA Experiment 20000072 PARAMETER Experiment Name: At_100uM_ABA_Mutants_cDNA_P Parameter: Tissue Value: Aerial
  misc_feature: MA Experiment 20000072 PARAMETER Experiment Name: At_100uM_ABA_Mutants_cDNA_P Parameter: Treatment Value: 100uM ABA vs. No Treatment
  misc_feature: MA Experiment ID: 20000087 Result: Up-regulated in Transcription
  misc_feature: MA Experiment 20000087 PARAMETER Experiment Name: At_100uM_ABA_Mutants_cDNA_P Parameter: Plant Line Value: WS
  misc_feature: MA Experiment 20000087 PARAMETER Experiment Name: At_100uM_ABA_Mutants_cDNA_P Parameter: Timepoint (hr) Value: 6
  misc_feature: MA Experiment 20000087 PARAMETER Experiment Name: At_100uM_ABA_Mutants_cDNA_P Parameter: Tissue Value: Aerial
  misc_feature: MA Experiment 20000087 PARAMETER Experiment Name: At_100uM_ABA_Mutants_cDNA_P Parameter: Treatment Value: 100uM ABA vs. No Treatment
  misc_feature: MA Experiment ID: 20000117 Result: Up-regulated in Transcription
  misc_feature: MA Experiment 20000117 PARAMETER Experiment Name: At_100uM_ABA_Mutants_cDNA_P Parameter: Plant Line Value: Columbia
  misc_feature: MA Experiment 20000117 PARAMETER Experiment Name: At_100uM_ABA_Mutants_cDNA_P Parameter: Timepoint (hr) Value: 6
  misc_feature: MA Experiment 20000117 PARAMETER Experiment Name: At_100uM_ABA_Mutants_cDNA_P Parameter: Tissue Value: Aerial
  misc_feature: MA Experiment 20000117 PARAMETER Experiment Name: At_100uM_ABA_Mutants_cDNA_P Parameter: Treatment Value: 100uM ABA vs. No Treatment
  misc_feature: MA Experiment ID: 20001557 Result: Up-regulated in Transcription
  misc_feature: MA Experiment 20001557 PARAMETER Experiment Name: At_Drought_Soil_Dry_P Parameter: Age (day) Value: 27
  misc_feature: MA Experiment 20001557 PARAMETER Experiment Name: At_Drought_Soil_Dry_P Parameter: Organism Value: A. thaliana
  misc_feature: MA Experiment 20001557 PARAMETER Experiment Name: At_Drought_Soil_Dry_P Parameter: Plant Line Value: WS
  misc_feature: MA Experiment 20001557 PARAMETER Experiment Name: At_Drought_Soil_Dry_P Parameter: Post Timepoint (hr) Value: 3
  misc_feature: MA Experiment 20001557 PARAMETER Experiment Name: At_Drought_Soil_Dry_P Parameter: Post-Treatment Value: Re-Water vs. No Drought
  misc_feature: MA Experiment 20001557 PARAMETER Experiment Name: At_Drought_Soil_Dry_P Parameter: Timepoint (day) Value: 13
  misc_feature: MA Experiment 20001557 PARAMETER Experiment Name: At_Drought_Soil_Dry_P Parameter: Treatment Value: Drought vs. No Drought
ggtcaaattaatagaagaagtaatataaagggggcaaaatgcaatacacatgaagtattaagattttatccattacttcacacatgacgcccttcgtctttttccttattctttctcctctcagaagagtttacttgttctggaaccctaaatctcgaatctggtaactcggatccgataaatcgttccagagatctgttacttctctattcaaggatctgttatcggtgcgaggatctacggattcttctgttcgcgcataatcggaaatggcagataacaattcaccacctggctctgtagaacagaaagcagatcaaattgttgaagctaatccattggtgaaggatgatacttcgctggaaaccatagttcgaaggttccaggattcaatgtcagaggcaaagactcataagttctgggagactcaacctgttgggcagtttaaggatattggggatacgagtttgcctgaaggtccgattgagcctgcaactccattatctgaggttaagcaagagccgtacaaccttccttctgtttacgagtggacgacatgtgatatgaactctgatgatatgtgttcagaggtatacaaccttctcaagaacaactatgttgaggatgatgagaatatgttcaggttcaattactccaaggagtttctaaggtgggcactacgtccaccgggttattaccagagctggcatattggagttcgagccaagacttcgaagaaactcgttgctttcatcagcggcgtgccagcaagaatcagggtgcgtgatgaggttgttaaaatggcagagatcaatttcttgtgtgttcacaagaagctcaggtctaagaggctcgctcctgtcatgatcaaggaggtgactagaagggttcacttggagaacatatggcaagcagcttatactgcaggagttatccttcctacaccaatcaccacctgtcaatactggcacaggtcattgaacccgaagaagctaattgatgttgggttttcaaggcttggtgcgagaatgacaatgagcagaaccatcaaactctacaagttaccagatgcaccgatcactcctggattcaggaaaatggaaccacgcgatgtccctgctgttacacggttgcttaggaactacctcagccagtttggagtcgcgactgactttgatgagaatgatgtcgagcattggctactcccaagagaagatgtcgtggacagttacctagtagaaagccctgaaactcacgatgtcactgacttctgcagcttctacactctcccttcaaccatcctcggtaacccgaactacactacattgaaagctgcgtattcttactacaatgtggccacacagacctcgtttcttcagctgatgaatgatgcgctaattgtctcaaagcaaaagggtttcgatgtgttcaacgcgttggatgtgatgcacaatgagagtttcttgaaagaactgaagtttgggccaggagatggacaacttcattactatctctacaattaccgtttgaaaagtgccttgaagccagcggaactcgggcttgttctcttataagctcaacaacttgatttgatggtatcaacaaacttgaaatttgtctctctttttttttcttcagtctgaactacttctcccatggtttactgaaactgagtttaattattttggcaatgcaattttggattttgcttttagtttc

SEQ ID NO: 23509 - protein, 434 aa, Arabidopsis thaliana
  peptide (1)..(434): Ceres Seq. ID no. 12723534
  misc_feature (244)..(433): Pfam Name: Myristoyl-CoA:protein N-myristoyltransferase, Pfam Description: Myristoyl-CoA:protein N-myristoyltransferase,
  misc_feature (41)..(433): Homolog of NCBI NO: 27735395 NR Description: Similar to N-myristoyltransferase 1 [Xenopus
  misc_feature (41)..(433): Homolog of NCBI NO: 30584349 NR Description: Homo sapiens N-myristoyltransferase 2 [synthetic
  misc_feature (41)..(433): Homolog of NCBI NO: 13623535 NR Description: N-myristoyltransferase 2 [Homo sapiens]
  misc_feature (1)..(80): Homolog of NCBI NO: 7484992 NR Description: glycylpeptide N-tetradecanoyltransferase homolog
  misc_feature (144)..(433): Homolog of NCBI NO: 7484992 NR Description: glycylpeptide N-tetradecanoyltransferase homolog
  misc_feature (24)..(433): Homolog of NCBI NO: 13924516 NR Description: N-myristoyltransferase-like protein 2
  misc_feature (2)..(434): Homolog of NCBI NO: 34910442 NR Description: putative N-myristoyl transferase
  misc_feature (1)..(80): Homolog of NCBI NO: 8777442 NR Description: N-myristoyl transferase [Arabidopsis thaliana]
  misc_feature (144)..(434): Homolog of NCBI NO: 8777442 NR Description: N-myristoyl transferase [Arabidopsis thaliana]
  misc_feature (1)..(434): Homolog of NCBI NO: 18423927 NR Description: N-myristoyl transferase
MADNNSPPGSVEQKADQIVEANPLVKDDTSLETIVRRFQDSMSEAKTHKFWETQPVGQFKDIGDTSLPEGPIEPATPLSEVKQEPYNLPSVYEWTTCDMNSDDMCSEVYNLLKNNYVEDDENMFRFNYSKEFLRWALRPPGYYQSWHIGVRAKTSKKLVAFISGVPARIRVRDEVVKMAEINFLCVHKKLRSKRLAPVMIKEVTRRVHLENIWQAAYTAGVILPTPITTCQYWHRSLNPKKLIDVGFSRLGARMTMSRTIKLYKLPDAPITPGFRKMEPRDVPAVTRLLRNYLSQFGVATDFDENDVEHWLLPREDVVDSYLVESPETHDVTDFCSFYTLPSTILGNPNYTTLKAAYSYYNVATQTSFLQLMNDALIVSKQKGFDVFNALDVMHNESFLKELKFGPGDGQLHYYLYNYRLKSALKPAELGLVLL

SEQ ID NO: 23510 - protein, 393 aa, Arabidopsis thaliana
  peptide (1)..(393): Ceres Seq. ID no. 12723535
  misc_feature (203)..(392): Pfam Name: Myristoyl-CoA:protein N-myristoyltransferase, Pfam Description: Myristoyl-CoA:protein N-myristoyltransferase,
  misc_feature (1)..(392): Homolog of NCBI NO: 27735395 NR Description: Similar to N-myristoyltransferase 1 [Xenopus
  misc_feature (1)..(392): Homolog of NCBI NO: 30584349 NR Description: Homo sapiens N-myristoyltransferase 2 [synthetic
  misc_feature (1)..(392): Homolog of NCBI NO: 13623535 NR Description: N-myristoyltransferase 2 [Homo sapiens]
  misc_feature (1)..(39): Homolog of NCBI NO: 7484992 NR Description: glycylpeptide N-tetradecanoyltransferase homolog
  misc_feature (103)..(392): Homolog of NCBI NO: 7484992 NR Description: glycylpeptide N-tetradecanoyltransferase homolog
  misc_feature (1)..(392): Homolog of NCBI NO: 13924516 NR Description: N-myristoyltransferase-like protein 2
  misc_feature (1)..(393): Homolog of NCBI NO: 34910442 NR Description: putative N-myristoyl transferase
  misc_feature (1)..(39): Homolog of NCBI NO: 8777442 NR Description: N-myristoyl transferase [Arabidopsis thaliana]
  misc_feature (103)..(393): Homolog of NCBI NO: 8777442 NR Description: N-myristoyl transferase [Arabidopsis thaliana]
  misc_feature (1)..(393): Homolog of NCBI NO: 18423927 NR Description: N-myristoyl transferase
MSEAKTHKFWETQPVGQFKDIGDTSLPEGPIEPATPLSEVKQEPYNLPSVYEWTTCDMNSDDMCSEVYNLLKNNYVEDDENMFRFNYSKEFLRWALRPPGYYQSWHIGVRAKTSKKLVAFISGVPARIRVRDEVVKMAEINFLCVHKKLRSKRLAPVMIKEVTRRVHLENIWQAAYTAGVILPTPITTCQYWHRSLNPKKLIDVGFSRLGARMTMSRTIKLYKLPDAPITPGFRKMEPRDVPAVTRLLRNYLSQFGVATDFDENDVEHWLLPREDVVDSYLVESPETHDVTDFCSFYTLPSTILGNPNYTTLKAAYSYYNVATQTSFLQLMNDALIVSKQKGFDVFNALDVMHNESFLKELKFGPGDGQLHYYLYNYRLKSALKPAELGLVLL

SEQ ID NO: 23511 - protein, 336 aa, Arabidopsis thaliana
  peptide (1)..(336): Ceres Seq. ID no. 12723536
  misc_feature (146)..(335): Pfam Name: Myristoyl-CoA:protein N-myristoyltransferase, Pfam Description: Myristoyl-CoA:protein N-myristoyltransferase,
  misc_feature (1)..(335): Homolog of NCBI NO: 22507314 NR Description: N-myristoyltransferase 1 [Rattus norvegicus]
  misc_feature (1)..(335): Homolog of NCBI NO: 4758816 NR Description: glycylpeptide N-tetradecanoyltransferase 2 [Homo
  misc_feature (1)..(335): Homolog of NCBI NO: 27735395 NR Description: Similar to N-myristoyltransferase 1 [Xenopus
  misc_feature (1)..(335): Homolog of NCBI NO: 30584349 NR Description: Homo sapiens N-myristoyltransferase 2 [synthetic
  misc_feature (1)..(335): Homolog of NCBI NO: 13623535 NR Description: N-myristoyltransferase 2 [Homo sapiens]
  misc_feature (46)..(335): Homolog of NCBI NO: 7484992 NR Description: glycylpeptide N-tetradecanoyltransferase homolog
  misc_feature (1)..(335): Homolog of NCBI NO: 13924516 NR Description: N-myristoyltransferase-like protein 2
  misc_feature (1)..(336): Homolog of NCBI NO: 34910442 NR Description: putative N-myristoyl transferase
  misc_feature (46)..(336): Homolog of NCBI NO: 8777442 NR Description: N-myristoyl transferase [Arabidopsis thaliana]
  misc_feature (1)..(336): Homolog of NCBI NO: 18423927 NR Description: N-myristoyl transferase
MNSDDMCSEVYNLLKNNYVEDDENMFRFNYSKEFLRWALRPPGYYQSWHIGVRAKTSKKLVAFISGVPARIRVRDEVVKMAEINFLCVHKKLRSKRLAPVMIKEVTRRVHLENIWQAAYTAGVILPTPITTCQYWHRSLNPKKLIDVGFSRLGARMTMSRTIKLYKLPDAPITPGFRKMEPRDVPAVTRLLRNYLSQFGVATDFDENDVEHWLLPREDVVDSYLVESPETHDVTDFCSFYTLPSTILGNPNYTTLKAAYSYYNVATQTSFLQLMNDALIVSKQKGFDVFNALDVMHNESFLKELKFGPGDGQLHYYLYNYRLKSALKPAELGLVLL

SEQ ID NO: 23512 - DNA, 1154 bp, Arabidopsis thaliana
  misc_feature (1)..(1154): Ceres Seq. ID no. 12321570
  misc_feature: MA Experiment ID: 108435 Result: Down-regulated in Transcription
  misc_feature: MA Experiment 108435 PARAMETER Experiment Name: At_stm_Mutants_cDNA_P Parameter: Plant Line Value: wt Landsburg vs stm
  misc_feature: MA Experiment 108435 PARAMETER Experiment Name: At_stm_Mutants_cDNA_P Parameter: Tissue Value: Shoot Apical Meristem Region
  misc_feature: MA Experiment ID: 108668 Result: Down-regulated in Transcription
  misc_feature: MA Experiment 108668 PARAMETER Experiment Name: At_2mM_SA_cDNA_P Parameter: Plant Line Value: WS
  misc_feature: MA Experiment 108668 PARAMETER Experiment Name: At_2mM_SA_cDNA_P Parameter: Timepoint (hr) Value: 6
  misc_feature: MA Experiment 108668 PARAMETER Experiment Name: At_2mM_SA_cDNA_P Parameter: Treatment Value: 2mM SA vs. No Treatment
  misc_feature: MA Experiment ID: 20000111 Result: Down-regulated in Transcription
  misc_feature: MA Experiment 20000111 PARAMETER Experiment Name: At_42deg_Heat_cDNA_P Parameter: Temperature (deg C) Value: 42 vs. 22
  misc_feature: MA Experiment 20000111 PARAMETER Experiment Name: At_42deg_Heat_cDNA_P Parameter: Timepoint (hr) Value: 6
  misc_feature: MA Experiment 20000111 PARAMETER Experiment Name: At_42deg_Heat_cDNA_P Parameter: Tissue Value: Aerial
  misc_feature: MA Experiment ID: 20000214 Result: Down-regulated in Transcription
  misc_feature: MA Experiment 20000214 PARAMETER Experiment Name: At_4deg_Cold_P Parameter: Timepoint (hr) Value: 6
  misc_feature: MA Experiment ID: 20000437 Result: Up-regulated in Transcription
  misc_feature: MA Experiment 20000437 PARAMETER Experiment Name: At_Drought_P Parameter: Age (day) Value: 8
  misc_feature: MA Experiment 20000437 PARAMETER Experiment Name: At_Drought_P Parameter: Organism Value: A. thaliana
  misc_feature: MA Experiment 20000437 PARAMETER Experiment Name: At_Drought_P Parameter: Plant Line Value: WS
  misc_feature: MA Experiment 20000437 PARAMETER Experiment Name: At_Drought_P Parameter: Timepoint (hr) Value: 24
  misc_feature: MA Experiment 20000437 PARAMETER Experiment Name: At_Drought_P Parameter: Tissue Value: Whole Plant
  misc_feature: MA Experiment 20000437 PARAMETER Experiment Name: At_Drought_P Parameter: Treatment Value: Drought vs. No Drought
  misc_feature: MA Experiment ID: 20001451 Result: Up-regulated in Transcription
  misc_feature: MA Experiment 20001451 PARAMETER Experiment Name: At_Far-red-induction_P Parameter: Age (day) Value: 7
  misc_feature: MA Experiment 20001451 PARAMETER Experiment Name: At_Far-red-induction_P Parameter: Light Value: Far-red vs. White
  misc_feature: MA Experiment 20001451 PARAMETER Experiment Name: At_Far-red-induction_P Parameter: Organism Value: A. thaliana
  misc_feature: MA Experiment 20001451 PARAMETER Experiment Name: At_Far-red-induction_P Parameter: Plant Line Value: Columbia
  misc_feature: MA Experiment 20001451 PARAMETER Experiment Name: At_Far-red-induction_P Parameter: Timepoint (hr) Value: 24
  misc_feature: MA Experiment 20001451 PARAMETER Experiment Name: At_Far-red-induction_P Parameter: Tissue Value: Whole Plant
  misc_feature: MA Experiment ID: 20001558 Result: Down-regulated in Transcription
  misc_feature: MA Experiment 20001558 PARAMETER Experiment Name: At_Drought_Soil_Dry_P Parameter: Age (day) Value: 27
  misc_feature: MA Experiment 20001558 PARAMETER Experiment Name: At_Drought_Soil_Dry_P Parameter: Organism Value: A. thaliana
  misc_feature: MA Experiment 20001558 PARAMETER Experiment Name: At_Drought_Soil_Dry_P Parameter: Plant Line Value: WS
  misc_feature: MA Experiment 20001558 PARAMETER Experiment Name: At_Drought_Soil_Dry_P Parameter: Post Timepoint (hr) Value: 6
  misc_feature: MA Experiment 20001558 PARAMETER Experiment Name: At_Drought_Soil_Dry_P Parameter: Post-Treatment Value: Re-Water vs. No Drought
  misc_feature: MA Experiment 20001558 PARAMETER Experiment Name: At_Drought_Soil_Dry_P Parameter: Timepoint (day) Value: 13
  misc_feature: MA Experiment 20001558 PARAMETER Experiment Name: At_Drought_Soil_Dry_P Parameter: Treatment Value: Drought vs. No Drought
aaaaaaggaagtcaaaacttcagagagaaagtggatgggggacacgaaggtggagacaatctcgaggttagctcaatggaggattgaaaattttggaccttgttctttcaaaaagtccgatcctttcaaagtcggaatttggaattggcatctgtcaatagagaggaatcgttatctatcagtgaggctattcccagaactttctcgagtatctaaagagcaacctcctgttgccaaatttgttcttcgtgtctccaacgttggccccaatcgtagattctacatctctcctgtttatgagaagctgctgcgtacaactgatgattgtgtgtggcatgttgactccagtttccacggtcgattcaccattgatgttgagtttcttgatctcaaaatctgccctgtgaatggtggtgaagcttctcctgtttggccaaccgatgcaacaatgcaatcaatctctactcaaaccactctcaaatgcttatcccggatgctagaggaaagcatactaaccgatgtaatcatccacacagccgatggaacactctctgctcacaaagctatcctctcagctagctcaactgttttcaaaagcatgttccaccacgacctcatggaaaaggaatcatccacaatccacatagacgacatgtcgagagaatcttgcatggctctactaagttacctctacggaaacataacccaagaagagttctggaaacacaggctcgccctcctcggcgctgcaaacaagtacgacataacggatttgaaagcagcctgcgaggagagcctaatggaagatataaactcgagtaatgtgctcgagaggctacaagaagcttggctttatcagctggagaaactgaagaaaggatgtttgatgtatttgtttgatttcggaaagatttatgatgtcagagaagaaatcagcagtttcttcaggcaagctgatcgagaactgatgctggagatgtttcaagaggttttgtctgtgtggaaaccggtctaatatacacttacacacatactttgaacatttcagcttgatggtgttttgtttatagtcttcttgttctcttctgtgtgtgtaactaacaacaactctggattttgttgtatcactctgtctaatgtatagtattgagtgg

SEQ ID NO: 23513 - protein, 337 aa, Arabidopsis thaliana
  peptide (1)..(337): Ceres Seq. ID no. 12321571
  misc_feature (162)..(270): Pfam Name: BTB/POZ domain Pfam Description: BTB/POZ domain
  misc_feature (165)..(332): Homolog of NCBI NO: 39594087 NR Description: Hypothetical protein CBG16671 [Caenorhabditis
  misc_feature (165)..(332): Homolog of NCBI NO: 17552682 NR Description: MATH domain and BTB/POZ domain containing protein
  misc_feature (154)..(333): Homolog of NCBI NO: 34858214 NR Description: similar to speckle-type POZ protein-like 1; POZ
  misc_feature (154)..(333): Homolog of NCBI NO: 27661061 NR Description: similar to speckle-type POZ protein
  misc_feature (155)..(298): Homolog of NCBI NO: 34858187 NR Description: similar to speckle-type POZ protein-like 1; POZ
  misc_feature (154)..(298): Homolog of NCBI NO: 25150010 NR Description: Maternal Effect embryonic Lethal MEL-26, POZ protein Spop, postmeiotic negative regulator of
  misc_feature (16)..(298): Homolog of NCBI NO: 8778495 NR Description: F20N2.15 [Arabidopsis thaliana]
  misc_feature (16)..(335): Homolog of NCBI NO: 15222771 NR Description: hypothetical protein; protein id: At1g55760.1
  misc_feature (50)..(337): Homolog of NCBI NO: 38637050 NR Description: POZ domain protein family-like
  misc_feature (12)..(337): Homolog of NCBI NO: 15219092 NR Description: unknown protein
KKEVKTSERKWMGDTKVETISRLAQWRIENFGPCSFKKSDPFKVGIWNWHLSIERNRYLSVRLFPELSRVSKEQPPVAKFVLRVSNVGPNRRFYISPVYEKLLRTTDDCVWHVDSSFHGRFTIDVEFLDLKICPVNGGEASPVWPTDATMQSISTQTTLKCLSRMLEESILTDVIIHTADGTLSAHKAILSASSTVFKSMFHHDLMEKESSTIHIDDMSRESCMALLSYLYGNITQEEFWKHRLALLGAANKYDITDLKAACEESLMEDINSSNVLERLQEAWLYQLEKLKKGCLMYLFDFGKIYDVREEISSFFRQADRELMLEMFQEVLSVWKPV

SEQ ID NO: 23514 - protein, 326 aa, Arabidopsis thaliana
  peptide (1)..(326): Ceres Seq. ID no. 12321572
  misc_feature (151)..(259): Pfam Name: BTB/POZ domain Pfam Description: BTB/POZ domain
  misc_feature (1)..(326): Homolog of NCBI NO: 15219092 NR Description: unknown protein
  misc_feature (154)..(321): Homolog of NCBI NO: 39594087 NR Description: Hypothetical protein CBG16671 [Caenorhabditis
  misc_feature (154)..(321): Homolog of NCBI NO: 17552682 NR Description: MATH domain and BTB/POZ domain containing protein
  misc_feature (143)..(322): Homolog of NCBI NO: 34858214 NR Description: similar to speckle-type POZ protein-like 1; POZ
  misc_feature (143)..(322): Homolog of NCBI NO: 27661061 NR Description: similar to speckle-type POZ protein
  misc_feature (144)..(287): Homolog of NCBI NO: 34858187 NR Description: similar to speckle-type POZ protein-like 1; POZ
  misc_feature (143)..(287): Homolog of NCBI NO: 25150010 NR Description: Maternal Effect embryonic Lethal MEL-26, POZ protein Spop, postmeiotic negative regulator of
  misc_feature (5)..(287): Homolog of NCBI NO: 8778495 NR Description: F20N2.15 [Arabidopsis thaliana]
  misc_feature (5)..(324): Homolog of NCBI NO: 15222771 NR Description: hypothetical protein; protein id: At1g55760.1
  misc_feature (39)..(326): Homolog of NCBI NO: 38637050 NR Description: POZ domain protein family-like
MGDTKVETISRLAQWRIENFGPCSFKKSDPFKVGIWNWHLSIERNRYLSVRLFPELSRVSKEQPPVAKFVLRVSNVGPNRRFYISPVYEKLLRTTDDCVWHVDSSFHGRFTIDVEFLDLKICPVNGGEASPVWPTDATMQSISTQTTLKCLSRMLEESILTDVIIHTADGTLSAHKAILSASSTVFKSMFHHDLMEKESSTIHIDDMSRESCMALLSYLYGNITQEEFWKHRLALLGAANKYDITDLKAACEESLMEDINSSNVLERLQEAWLYQLEKLKKGCLMYLFDFGKIYDVREEISSFFRQADRELMLEMFQEVLSVWKPV

SEQ ID NO: 23515 - protein, 188 aa, Arabidopsis thaliana
  peptide (1)..(188): Ceres Seq. ID no. 12321573
  misc_feature (13)..(121): Pfam Name: BTB/POZ domain Pfam Description: BTB/POZ domain
  misc_feature (16)..(183): Homolog of NCBI NO: 39594087 NR Description: Hypothetical protein CBG16671 [Caenorhabditis
  misc_feature (16)..(183): Homolog of NCBI NO: 17552682 NR Description: MATH domain and BTB/POZ domain containing protein
  misc_feature (5)..(184): Homolog of NCBI NO: 34858214 NR Description: similar to speckle-type POZ protein-like 1; POZ
  misc_feature (5)..(184): Homolog of NCBI NO: 27661061 NR Description: similar to speckle-type POZ protein
  misc_feature (6)..(149): Homolog of NCBI NO: 34858187 NR Description: similar to speckle-type POZ protein-like 1; POZ
  misc_feature (5)..(149): Homolog of NCBI NO: 25150010 NR Description: Maternal Effect embryonic Lethal MEL-26, POZ protein Spop, postmeiotic negative regulator of
  misc_feature (1)..(149): Homolog of NCBI NO: 8778495 NR Description: F20N2.15 [Arabidopsis thaliana]
  misc_feature (1)..(186): Homolog of NCBI NO: 15222771 NR Description: hypothetical protein; protein id: At1g55760.1
  misc_feature (1)..(188): Homolog of NCBI NO: 38637050 NR Description: POZ domain protein family-like
  misc_feature (1)..(188): Homolog of NCBI NO: 15219092 NR Description: unknown protein
MQSISTQTTLKCLSRMLEESILTDVIIHTADGTLSAHKAILSASSTVFKSMFHHDLMEKESSTIHIDDMSRESCMALLSYLYGNITQEEFWKHRLALLGAANKYDITDLKAACEESLMEDINSSNVLERLQEAWLYQLEKLKKGCLMYLFDFGKIYDVREEISSFFRQADRELMLEMFQEVLSVWKPV

SEQ ID NO: 23516 - DNA, 1272 bp, Arabidopsis thaliana
  misc_feature (1)..(1272): Ceres Seq. ID no. 13487849
  misc_feature: MA Experiment ID: 108434 Result: Down-regulated in Transcription
  misc_feature: MA Experiment 108434 PARAMETER Experiment Name: At_Root_Tips_cDNA_P Parameter: Tissue Value: Root Tips
  misc_feature: MA Experiment ID: 108462 Result: Up-regulated in Transcription
  misc_feature: MA Experiment 108462 PARAMETER Experiment Name: At_Germinating_Seeds_cDNA_P Parameter: Age (day) Value: 2 vs. 0
  misc_feature: MA Experiment 108462 PARAMETER Experiment Name: At_Germinating_Seeds_cDNA_P Parameter: Tissue Value: Germinating Seeds
  misc_feature: MA Experiment ID: 108463 Result: Up-regulated in Transcription
  misc_feature: MA Experiment 108463 PARAMETER Experiment Name: At_Germinating_Seeds_cDNA_P Parameter: Age (day) Value: 3 vs. 0
  misc_feature: MA Experiment 108463 PARAMETER Experiment Name: At_Germinating_Seeds_cDNA_P Parameter: Tissue Value: Germinating Seeds
  misc_feature: MA Experiment ID: 20000089 Result: Down-regulated in Transcription
  misc_feature: MA Experiment ID: 20000090 Result: Down-regulated in Transcription
  misc_feature: MA Experiment ID: 20000180 Result: Up-regulated in Transcription
  misc_feature: MA Experiment 20000180 PARAMETER Experiment Name: At_Germinating_Seeds_P Parameter: Age (hr) Value: 24 vs. 0
  misc_feature: MA Experiment 20000180 PARAMETER Experiment Name: At_Germinating_Seeds_P Parameter: Tissue Value: Germinating Seeds
  misc_feature: MA Experiment ID: 20000185 Result: Down-regulated in Transcription
  misc_feature: MA Experiment 20000185 PARAMETER Experiment Name: At_Roots__P Parameter: Age (day) Value: 7 vs. 21
  misc_feature: MA Experiment 20000185 PARAMETER Experiment Name: At_Roots__P Parameter: Organism Value: A. thaliana
  misc_feature: MA Experiment 20000185 PARAMETER Experiment Name: At_Roots__P Parameter: Tissue Value: Roots vs. Whole Plant
  misc_feature: MA Experiment ID: 20000224 Result: Down-regulated in Transcription
  misc_feature: MA Experiment ID: 20000438 Result: Down-regulated in Transcription
  misc_feature: MA Experiment 20000438 PARAMETER Experiment Name: At_Shoots__P Parameter: Age (day) Value: 14
  misc_feature: MA Experiment 20000438 PARAMETER Experiment Name: At_Shoots__P Parameter: Tissue Value: Shoots vs. Whole Plant
  misc_feature: MA Experiment ID: 20000495 Result: Up-regulated in Transcription
  misc_feature: MA Experiment 20000495 PARAMETER Experiment Name: At_Guard_Cells_P Parameter: Harvest Date Value: 8/2/2002
  misc_feature: MA Experiment 20000495 PARAMETER Experiment Name: At_Guard_Cells_P Parameter: Organism Value: A. thaliana
  misc_feature: MA Experiment 20000495 PARAMETER Experiment Name: At_Guard_Cells_P Parameter: Tissue Value: Guard Cells vs. Leaves
  misc_feature: MA Experiment ID: 20001773 Result: Up-regulated in Transcription
  misc_feature: MA Experiment 20001773 PARAMETER Experiment Name: At_Far-red-enriched-adult_P Parameter: Age (day) Value: 30
  misc_feature: MA Experiment 20001773 PARAMETER Experiment Name: At_Far-red-enriched-adult_P Parameter: Light Value: Far-red enriched vs. White
  misc_feature: MA Experiment 20001773 PARAMETER Experiment Name: At_Far-red-enriched-adult_P Parameter: Organism Value: A. thaliana
  misc_feature: MA Experiment 20001773 PARAMETER Experiment Name: At_Far-red-enriched-adult_P Parameter: Plant Line Value: Columbia
  misc_feature: MA Experiment 20001773 PARAMETER Experiment Name: At_Far-red-enriched-adult_P Parameter: Timepoint (hr) Value: 48
  misc_feature: MA Experiment 20001773 PARAMETER Experiment Name: At_Far-red-enriched-adult_P Parameter: Tissue Value: Aerial
  misc_feature: MA Experiment ID: 20001905 Result: Down-regulated in Transcription
  misc_feature: MA Experiment 20001905 PARAMETER Experiment Name: At_Drought_Reproduction_P Parameter: Age (day) Value: 40
  misc_feature: MA Experiment 20001905 PARAMETER Experiment Name: At_Drought_Reproduction_P Parameter: Organism Value: A. thaliana
  misc_feature: MA Experiment 20001905 PARAMETER Experiment Name: At_Drought_Reproduction_P Parameter: Plant Line Value: WS
  misc_feature: MA Experiment 20001905 PARAMETER Experiment Name: At_Drought_Reproduction_P Parameter: Timepoint (day) Value: 10
  misc_feature: MA Experiment 20001905 PARAMETER Experiment Name: At_Drought_Reproduction_P Parameter: Tissue Value: Rosettes
  misc_feature: MA Experiment 20001905 PARAMETER Experiment Name: At_Drought_Reproduction_P Parameter: Treatment Value: Drought vs. No Drought
  misc_feature: MA Experiment ID: 20001906 Result: Down-regulated in Transcription
  misc_feature: MA Experiment 20001906 PARAMETER Experiment Name: At_Drought_Reproduction_P Parameter: Age (day) Value: 35
  misc_feature: MA Experiment 20001906 PARAMETER Experiment Name: At_Drought_Reproduction_P Parameter: Organism Value: A. thaliana
  misc_feature: MA Experiment 20001906 PARAMETER Experiment Name: At_Drought_Reproduction_P Parameter: Plant Line Value: WS
  misc_feature: MA Experiment 20001906 PARAMETER Experiment Name: At_Drought_Reproduction_P Parameter: Timepoint (day) Value: 5
  misc_feature: MA Experiment 20001906 PARAMETER Experiment Name: At_Drought_Reproduction_P Parameter: Tissue Value: Siliques
  misc_feature: MA Experiment 20001906 PARAMETER Experiment Name: At_Drought_Reproduction_P Parameter: Treatment Value: Drought vs. No Drought
  misc_feature: MA Experiment ID: 20001908 Result: Down-regulated in Transcription
  misc_feature: MA Experiment 20001908 PARAMETER Experiment Name: At_Drought_Reproduction_P Parameter: Age (day) Value: 40
  misc_feature: MA Experiment 20001908 PARAMETER Experiment Name: At_Drought_Reproduction_P Parameter: Organism Value: A. thaliana
  misc_feature: MA Experiment 20001908 PARAMETER Experiment Name: At_Drought_Reproduction_P Parameter: Plant Line Value: WS
  misc_feature: MA Experiment 20001908 PARAMETER Experiment Name: At_Drought_Reproduction_P Parameter: Timepoint (day) Value: 10
  misc_feature: MA Experiment 20001908 PARAMETER Experiment Name: At_Drought_Reproduction_P Parameter: Tissue Value: Siliques
  misc_feature: MA Experiment 20001908 PARAMETER Experiment Name: At_Drought_Reproduction_P Parameter: Treatment Value: Drought vs. No Drought
  misc_feature: MA Experiment ID: 20001911 Result: Down-regulated in Transcription
  misc_feature: MA Experiment 20001911 PARAMETER Experiment Name: At_Drought_Reproduction_P Parameter: Age (day) Value: 40
  misc_feature: MA Experiment 20001911 PARAMETER Experiment Name: At_Drought_Reproduction_P Parameter: Organism Value: A. thaliana
  misc_feature: MA Experiment 20001911 PARAMETER Experiment Name: At_Drought_Reproduction_P Parameter: Plant Line Value: WS
  misc_feature: MA Experiment 20001911 PARAMETER Experiment Name: At_Drought_Reproduction_P Parameter: Timepoint (day) Value: 10
  misc_feature: MA Experiment 20001911 PARAMETER Experiment Name: At_Drought_Reproduction_P Parameter: Tissue Value: Flowers
  misc_feature: MA Experiment 20001911 PARAMETER Experiment Name: At_Drought_Reproduction_P Parameter: Treatment Value: Drought vs. No Drought
cttggcgaccttaaatacaaaatggtactctgtttccaactcaacttagcctctctgtctctcatactcttctcttcattccctggacttttagcacaatctcaacaacatttcttgggacaaaacaacacaagcttgttgagtggagggagatgcaatttggctagaggcaaatgggtctatgattcttcatatcctctctatagtgcttttagttgtcccttcatcgattccgaattcaactgccagaaagcgggtcgtccggacactaactatcaacacttccgttggcagcctttctcctgtcctctccctagattcgatggggcgaattttatgaggagaatgagagggaagaagataatgatggtaggtgactcactgagtcttaacatgttcgaatcgttggcctgcttgcttcatgcttctctccctaatgctaagtactctcttcgtcgaagccaacctctcacttccctcactttccaggattatggagtgacgataaatttgtatagaacacagtttctagtagatgtggttcaagaaaaggcaggacgagtgcttgtgcttgactccatcaaacaagccgatgcttggcttggcatggatgttcttatcttcaactcgtggcactggtggactcacacctccggacttcagccctgggattatatgagggaaggaaaccaattgtacaaagacatgaacaggcttgtggcttattacaaaggacttaacacatgggctcgttggattaacaataacattgtcccttcacgtactcaagtcttctttcaaggtgtttctcctgtccactatgacggaagagagtggaacgaaccattgaagtcgtgcaatggtcaaactcagccgttcatgggacaaagatatccaggaggattgcccttaggttgggttgtggttaacaaagtgttgagccgaattagaaaaccggtccatcttctcgatctcactactctctcggagtatcgcaaagacgcacatccaagtctctacaatggtatctcaaaggatctagactgtagccattggtgcctccctggactccctgatacttggaacttacttctctactcatctcttacttcctagtccttgttttacatatttgtttgtttctaccattttataaatagtttgtgatgatcctgtgtgattgtgattgatatttttccttcgttaatttaatcttaaatgtaattaacattgttactagtttacttgcagcatcgatcagcttaaattctc

SEQ ID NO: 23517 - protein, 371 aa, Arabidopsis thaliana
  peptide (1)..(371): Ceres Seq. ID no. 13487850
  misc_feature (161)..(370): Homolog of NCBI NO: 34904010 NR Description: unnamed protein product [Oryza sativa (japonica
  misc_feature (203)..(371): Homolog of NCBI NO: 15224614 NR Description: expressed protein [Arabidopsis thaliana]
  misc_feature (41)..(371): Homolog of NCBI NO: 15219157 NR Description: hypothetical protein [Arabidopsis thaliana]
  misc_feature (36)..(369): Homolog of NCBI NO: 34911864 NR Description: OSJNBb0032K15.9 [Oryza sativa (japonica
  misc_feature (52)..(370): Homolog of NCBI NO: 25366741 NR Description: F28N24.24 protein - Arabidopsis thaliana
  misc_feature (52)..(370): Homolog of NCBI NO: 18403435 NR Description: expressed protein [Arabidopsis thaliana]
  misc_feature (52)..(370): Homolog of NCBI NO: 18396930 NR Description: expressed protein [Arabidopsis thaliana]
  misc_feature (47)..(371): Homolog of NCBI NO: 18406003 NR Description: expressed protein [Arabidopsis thaliana]
  misc_feature (15)..(371): Homolog of NCBI NO: 28393769 NR Description: unknown protein [Arabidopsis thaliana]
  misc_feature (8)..(371): Homolog of NCBI NO: 21593142 NR Description: unknown [Arabidopsis thaliana]
LGDLKYKMVLCFQLNLASLSLILFSSFPGLLAQSQQHFLGQNNTSLLSGGRCNLARGKWVYDSSYPLYSAFSCPFIDSEFNCQKAGRPDTNYQHFRWQPFSCPLPRFDGANFMRRMRGKKIMMVGDSLSLNMFESLACLLHASLPNAKYSLRRSQPLTSLTFQDYGVTINLYRTQFLVDVVQEKAGRVLVLDSIKQADAWLGMDVLIFNSWHWWTHTSGLQPWDYMREGNQLYKDMNRLVAYYKGLNTWARWINNNIVPSRTQVFFQGVSPVHYDGREWNEPLKSCNGQTQPFMGQRYPGGLPLGWVVVNKVLSRIRKPVHLLDLTTLSEYRKDAHPSLYNGISKDLDCSHWCLPGLPDTWNLLLYSSLTS

SEQ ID NO: 23518 - protein, 364 aa, Arabidopsis thaliana
  peptide (1)..(364): Ceres Seq. ID no. 13487851
  misc_feature (154)..(363): Homolog of NCBI NO: 34904010 NR Description: unnamed protein product [Oryza sativa (japonica
  misc_feature (196)..(364): Homolog of NCBI NO: 15224614 NR Description: expressed protein [Arabidopsis thaliana]
  misc_feature (34)..(364): Homolog of NCBI NO: 15219157 NR Description: hypothetical protein [Arabidopsis thaliana]
  misc_feature (29)..(362): Homolog of NCBI NO: 34911864 NR Description: OSJNBb0032K15.9 [Oryza sativa (japonica
  misc_feature (45)..(363): Homolog of NCBI NO: 25366741 NR Description: F28N24.24 protein - Arabidopsis thaliana
  misc_feature (45)..(363): Homolog of NCBI NO: 18403435 NR Description: expressed protein [Arabidopsis thaliana]
  misc_feature (45)..(363): Homolog of NCBI NO: 18396930 NR Description: expressed protein [Arabidopsis thaliana]
  misc_feature (40)..(364): Homolog of NCBI NO: 18406003 NR Description: expressed protein [Arabidopsis thaliana]
  misc_feature (8)..(364): Homolog of NCBI NO: 28393769 NR Description: unknown protein [Arabidopsis thaliana]
  misc_feature (1)..(364): Homolog of NCBI NO: 21593142 NR Description: unknown [Arabidopsis thaliana]
MVLCFQLNLASLSLILFSSFPGLLAQSQQHFLGQNNTSLLSGGRCNLARGKWVYDSSYPLYSAFSCPFIDSEFNCQKAGRPDTNYQHFRWQPFSCPLPRFDGANFMRRMRGKKIMMVGDSLSLNMFESLACLLHASLPNAKYSLRRSQPLTSLTFQDYGVTINLYRTQFLVDVVQEKAGRVLVLDSIKQADAWLGMDVLIFNSWHWWTHTSGLQPWDYMREGNQLYKDMNRLVAYYKGLNTWARWINNNIVPSRTQVFFQGVSPVHYDGREWNEPLKSCNGQTQPFMGQRYPGGLPLGWVVVNKVLSRIRKPVHLLDLTTLSEYRKDAHPSLYNGISKDLDCSHWCLPGLPDTWNLLLYSSLTS

SEQ ID NO: 23519 - protein, 259 aa, Arabidopsis thaliana
  peptide (1)..(259): Ceres Seq. ID no. 13487852
  misc_feature (49)..(258): Homolog of NCBI NO: 34904010 NR Description: unnamed protein product [Oryza sativa (japonica
  misc_feature (91)..(259): Homolog of NCBI NO: 15224614 NR Description: expressed protein [Arabidopsis thaliana]
  misc_feature (1)..(259): Homolog of NCBI NO: 15219157 NR Description: hypothetical protein [Arabidopsis thaliana]
  misc_feature (1)..(257): Homolog of NCBI NO: 34911864 NR Description: OSJNBb0032K15.9 [Oryza sativa (japonica
  misc_feature (1)..(258): Homolog of NCBI NO: 25366741 NR Description: F28N24.24 protein - Arabidopsis thaliana
  misc_feature (1)..(258): Homolog of NCBI NO: 18403435 NR Description: expressed protein [Arabidopsis thaliana]
  misc_feature (1)..(258): Homolog of NCBI NO: 18396930 NR Description: expressed protein [Arabidopsis thaliana]
  misc_feature (1)..(259): Homolog of NCBI NO: 18406003 NR Description: expressed protein [Arabidopsis thaliana]
  misc_feature (1)..(259): Homolog of NCBI NO: 28393769 NR Description: unknown protein [Arabidopsis thaliana]
  misc_feature (1)..(259): Homolog of NCBI NO: 21593142 NR Description: unknown [Arabidopsis thaliana]
MRRMRGKKIMMVGDSLSLNMFESLACLLHASLPNAKYSLRRSQPLTSLTFQDYGVTINLYRTQFLVDVVQEKAGRVLVLDSIKQADAWLGMDVLIFNSWHWWTHTSGLQPWDYMREGNQLYKDMNRLVAYYKGLNTWARWINNNIVPSRTQVFFQGVSPVHYDGREWNEPLKSCNGQTQPFMGQRYPGGLPLGWVVVNKVLSRIRKPVHLLDLTTLSEYRKDAHPSLYNGISKDLDCSHWCLPGLPDTWNLLLYSSLTS

SEQ ID NO: 23520 - DNA, 1050 bp, Arabidopsis thaliana
  misc_feature (1)..(1050): Ceres Seq. ID no. 12323038
  misc_feature: MA Experiment ID: 108435 Result: Down-regulated in Transcription
  misc_feature: MA Experiment 108435 PARAMETER Experiment Name: At_stm_Mutants_cDNA_P Parameter: Plant Line Value: wt Landsburg vs stm
  misc_feature: MA Experiment 108435 PARAMETER Experiment Name: At_stm_Mutants_cDNA_P Parameter: Tissue Value: Shoot Apical Meristem Region
  misc_feature: MA Experiment ID: 108462 Result: Up-regulated in Transcription
  misc_feature: MA Experiment 108462 PARAMETER Experiment Name: At_Germinating_Seeds_cDNA_P Parameter: Age (day) Value: 2 vs. 0
  misc_feature: MA Experiment 108462 PARAMETER Experiment Name: At_Germinating_Seeds_cDNA_P Parameter: Tissue Value: Germinating Seeds
  misc_feature: MA Experiment ID: 108576 Result: Up-regulated in Transcription
  misc_feature: MA Experiment 108576 PARAMETER Experiment Name: At_42deg_Heat_cDNA_P Parameter: Temperature (deg C) Value: 42 vs. 22
  misc_feature: MA Experiment 108576 PARAMETER Experiment Name: At_42deg_Heat_cDNA_P Parameter: Timepoint (hr) Value: 1
  misc_feature: MA Experiment 108576 PARAMETER Experiment Name: At_42deg_Heat_cDNA_P Parameter: Tissue Value: Aerial
  misc_feature: MA Experiment ID: 108577 Result: Up-regulated in Transcription
  misc_feature: MA Experiment 108577 PARAMETER Experiment Name: At_42deg_Heat_cDNA_P Parameter: Temperature (deg C) Value: 42 vs. 22
  misc_feature: MA Experiment 108577 PARAMETER Experiment Name: At_42deg_Heat_cDNA_P Parameter: Timepoint (hr) Value: 6
  misc_feature: MA Experiment 108577 PARAMETER Experiment Name: At_42deg_Heat_cDNA_P Parameter: Tissue Value: Aerial
  misc_feature: MA Experiment ID: 108595 Result: Down-regulated in Transcription
  misc_feature: MA Experiment 108595 PARAMETER Experiment Name: At_Ler-pi_Ovule_cDNA_P Parameter: Plant Line Value: null
  misc_feature: MA Experiment ID: 20000093 Result: Up-regulated in Transcription
  misc_feature: MA Experiment 20000093 PARAMETER Experiment Name: At_42deg_Heat_cDNA_P Parameter: Temperature (deg C) Value: 42 vs. 22
  misc_feature: MA Experiment 20000093 PARAMETER Experiment Name: At_42deg_Heat_cDNA_P Parameter: Timepoint (hr) Value: 0.5
  misc_feature: MA Experiment 20000093 PARAMETER Experiment Name: At_42deg_Heat_cDNA_P Parameter: Tissue Value: Aerial
  misc_feature: MA Experiment ID: 20000111 Result: Up-regulated in Transcription
  misc_feature: MA Experiment 20000111 PARAMETER Experiment Name: At_42deg_Heat_cDNA_P Parameter: Temperature (deg C) Value: 42 vs. 22
  misc_feature: MA Experiment 20000111 PARAMETER Experiment Name: At_42deg_Heat_cDNA_P Parameter: Timepoint (hr) Value: 6
  misc_feature: MA Experiment 20000111 PARAMETER Experiment Name: At_42deg_Heat_cDNA_P Parameter: Tissue Value: Aerial
  misc_feature: MA Experiment ID: 20000112 Result: Up-regulated in Transcription
  misc_feature: MA Experiment 20000112 PARAMETER Experiment Name: At_42deg_Heat_cDNA_P Parameter: Temperature (deg C) Value: 42 vs. 22
  misc_feature: MA Experiment 20000112 PARAMETER Experiment Name: At_42deg_Heat_cDNA_P Parameter: Timepoint (hr) Value: 2
  misc_feature: MA Experiment 20000112 PARAMETER Experiment Name: At_42deg_Heat_cDNA_P Parameter: Tissue Value: Aerial
  misc_feature: MA Experiment ID: 20000113 Result: Up-regulated in Transcription
  misc_feature: MA Experiment 20000113 PARAMETER Experiment Name: At_42deg_Heat_cDNA_P Parameter: Temperature (deg C) Value: 42 vs. 22
  misc_feature: MA Experiment 20000113 PARAMETER Experiment Name: At_42deg_Heat_cDNA_P Parameter: Timepoint (hr) Value: 8
  misc_feature: MA Experiment 20000113 PARAMETER Experiment Name: At_42deg_Heat_cDNA_P Parameter: Tissue Value: Aerial
  misc_feature: MA Experiment ID: 20000171 Result: Up-regulated in Transcription
  misc_feature: MA Experiment 20000171 PARAMETER Experiment Name: At_42deg_Heat_P Parameter: Age (day) Value: 14
  misc_feature: MA Experiment 20000171 PARAMETER Experiment Name: At_42deg_Heat_P Parameter: Organism Value: A. thaliana
  misc_feature: MA Experiment 20000171 PARAMETER Experiment Name: At_42deg_Heat_P Parameter: Plant Line Value: WS
  misc_feature: MA Experiment 20000171 PARAMETER Experiment Name: At_42deg_Heat_P Parameter: Temperature (deg C) Value: 42 vs. 22
  misc_feature: MA Experiment 20000171 PARAMETER Experiment Name: At_42deg_Heat_P Parameter: Timepoint (hr) Value: 1
  misc_feature: MA Experiment 20000171 PARAMETER Experiment Name: At_42deg_Heat_P Parameter: Tissue Value: Aerial
  misc_feature: MA Experiment ID: 20000173 Result: Up-regulated in Transcription
  misc_feature: MA Experiment 20000173 PARAMETER Experiment Name: At_42deg_Heat_P Parameter: Age (day) Value: 14
  misc_feature: MA Experiment 20000173 PARAMETER Experiment Name: At_42deg_Heat_P Parameter: Organism Value: A. thaliana
  misc_feature: MA Experiment 20000173 PARAMETER Experiment Name: At_42deg_Heat_P Parameter: Plant Line Value: WS
  misc_feature: MA Experiment 20000173 PARAMETER Experiment Name: At_42deg_Heat_P Parameter: Temperature (deg C) Value: 42 vs. 22
  misc_feature: MA Experiment 20000173 PARAMETER Experiment Name: At_42deg_Heat_P Parameter: Timepoint (hr) Value: 6
  misc_feature: MA Experiment 20000173 PARAMETER Experiment Name: At_42deg_Heat_P Parameter: Tissue Value: Aerial
  misc_feature: MA Experiment ID: 20000180 Result: Up-regulated in Transcription
  misc_feature: MA Experiment 20000180 PARAMETER Experiment Name: At_Germinating_Seeds_P Parameter: Age (hr) Value: 24 vs. 0
  misc_feature: MA Experiment 20000180 PARAMETER Experiment Name: At_Germinating_Seeds_P Parameter: Tissue Value: Germinating Seeds
  misc_feature: MA Experiment ID: 20000184 Result: Up-regulated in Transcription
  misc_feature: MA Experiment 20000184 PARAMETER Experiment Name: At_Shoots__P Parameter: Age (day) Value: 7
  misc_feature: MA Experiment 20000184 PARAMETER Experiment Name: At_Shoots__P Parameter: Tissue Value: Shoots vs. Whole Plant
  misc_feature: MA Experiment ID: 20000227 Result: Up-regulated in Transcription
  misc_feature: MA Experiment 20000227 PARAMETER Experiment Name: At_Root-Tips-vs-Tops_P Parameter: Tissue Value: Root Tips vs. Root Tops
  misc_feature: MA Experiment ID: 20001248 Result: Down-regulated in Transcription
  misc_feature: MA Experiment 20001248 PARAMETER Experiment Name: At_Far-red-induction_P Parameter: Age (day) Value: 7
  misc_feature: MA Experiment 20001248 PARAMETER Experiment Name: At_Far-red-induction_P Parameter: Light Value: Far-red vs. White
  misc_feature: MA Experiment 20001248 PARAMETER Experiment Name: At_Far-red-induction_P Parameter: Organism Value: A. thaliana
  misc_feature: MA Experiment 20001248 PARAMETER Experiment Name: At_Far-red-induction_P Parameter: Plant Line Value: Columbia
  misc_feature: MA Experiment 20001248 PARAMETER Experiment Name: At_Far-red-induction_P Parameter: Timepoint (hr) Value: 4
  misc_feature: MA Experiment 20001248 PARAMETER Experiment Name: At_Far-red-induction_P Parameter: Tissue Value: Whole Plant
  misc_feature: MA Experiment ID: 20001450 Result: Down-regulated in Transcription
  misc_feature: MA Experiment 20001450 PARAMETER Experiment Name: At_Far-red-induction_P Parameter: Age (day) Value: 7
  misc_feature: MA Experiment 20001450 PARAMETER Experiment Name: At_Far-red-induction_P Parameter: Light Value: Far-red vs. White
  misc_feature: MA Experiment 20001450 PARAMETER Experiment Name: At_Far-red-induction_P Parameter: Organism Value: A. thaliana
  misc_feature: MA Experiment 20001450 PARAMETER Experiment Name: At_Far-red-induction_P Parameter: Plant Line Value: Columbia
  misc_feature: MA Experiment 20001450 PARAMETER Experiment Name: At_Far-red-induction_P Parameter: Timepoint (hr) Value: 8
  misc_feature: MA Experiment 20001450 PARAMETER Experiment Name: At_Far-red-induction_P Parameter: Tissue Value: Whole Plant
  misc_feature: MA Experiment ID: 20001451 Result: Down-regulated in Transcription
  misc_feature: MA Experiment 20001451 PARAMETER Experiment Name: At_Far-red-induction_P Parameter: Age (day) Value: 7
  misc_feature: MA Experiment 20001451 PARAMETER Experiment Name: At_Far-red-induction_P Parameter: Light Value: Far-red vs. White
  misc_feature: MA Experiment 20001451 PARAMETER Experiment Name: At_Far-red-induction_P Parameter: Organism Value: A. thaliana
  misc_feature: MA Experiment 20001451 PARAMETER Experiment Name: At_Far-red-induction_P Parameter: Plant Line Value: Columbia
  misc_feature: MA Experiment 20001451 PARAMETER Experiment Name: At_Far-red-induction_P Parameter: Timepoint (hr) Value: 24
  misc_feature: MA Experiment 20001451 PARAMETER Experiment Name: At_Far-red-induction_P Parameter: Tissue Value: Whole Plant
aggatacaaataataaatctatctgcctcttaaaagttccaaatttcaccacgtcactgctttgataatgcaggtcctcgtcgtctctcctccgctcatcgccgccgcatctctctctaaacctctcaattctctctctaaagccgcactctctttctccagagccaaacccatttgtcctttccctcaaacctctcgacgaccaatctccgtatacaaatccccaatgaacaaccttttcaacagactcggattcgggtctcgtcctcaagcccaagctgacccatcttccgccgcaatcgcccaaggacccgacgatgatgttccgtcttcaggtcagcaattcgcgcaatttggcgccggttgtttctggggagtggagctagcttaccagagagttcctggtgtgaccaagaccgaggttgggtatagccatggcatcgtgcacaatccgagttacgaggatgtctgtactggcactacgggacataacgaggttgttagagttcagtatgatcccaaagagtgtagctttgagagcttgcttgatgttttctggaatcgtcatgatccaaccaccttgaatcgtcagggtggggatgtgggaacgcagtatcgatcaggtatatactactacacagacgagcaagaccgcatagctcgtgaagctgttgagaaacagcagaagatattgaacaagaggattgtcacagagatacttcccgctacgaaattctacaaagcagaaaattaccaccagcaatacctggcaaaagggggtcgcatgggtttaagacaatcagctgagaaaggttgcaaggatccaatccgatgctatggctaagaaactaagtcagtcttccctcaagcacataaaaagaagtgagttgtctcatgaaaaatacaataatctgtagatcacatttgtttcttgtctttgttatgcaaccaatggttatgatgcatcctatgcttatatgaatcaaggctttgtccaaatcaatttcaatttgatactacagtactggtaatacaatttgggaagttctc

SEQ ID NO: 23521 - protein, 258 aa, Arabidopsis thaliana
  peptide (1)..(258): Ceres Seq. ID no. 12323039
  misc_feature (92)..(245): Pfam Name: Peptide methionine sulfoxide reductase Pfam Description: Peptide methionine sulfoxide reductase
  misc_feature (56)..(258): Homolog of NCBI NO: 18424492 NR Description: peptide methionine sulfoxide reductase - like
  misc_feature (62)..(258): Homolog of NCBI NO: 37536896 NR Description: putative peptide methionine sulfoxide reductase
  misc_feature (14)..(258): Homolog of NCBI NO: 12230349 NR Description: Peptide methionine sulfoxide reductase
  misc_feature (12)..(258): Homolog of NCBI NO: 29469000 NR Description: peptide methionine sulfoxide reductase; cPMSR
  misc_feature (1)..(258): Homolog of NCBI NO: 1709690 NR Description: Peptide methionine sulfoxide reductase
  misc_feature (1)..(258): Homolog of NCBI NO: 11278974 NR Description: protein-methionine-S-oxide reductase (EC 1.8.4.6)
  misc_feature (1)..(258): Homolog of NCBI NO: 1279212 NR Description: methionine sulfoxide reductase [Arabidopsis
  misc_feature (1)..(258): Homolog of NCBI NO: 21593143 NR Description: protein-methionine-S-oxide reductase [Arabidopsis
  misc_feature (1)..(258): Homolog of NCBI NO: 15234942 NR Description: protein-methionine-S-oxide reductase
  misc_feature (1)..(258): Homolog of NCBI NO: 15146324 NR Description: AT4g25130/F13M23_270 [Arabidopsis thaliana]
MQVLVVSPPLIAAASLSKPLNSLSKAALSFSRAKPICPFPQTSRRPISVYKSPMNNLFNRLGFGSRPQAQADPSSAAIAQGPDDDVPSSGQQFAQFGAGCFWGVELAYQRVPGVTKTEVGYSHGIVHNPSYEDVCTGTTGHNEVVRVQYDPKECSFESLLDVFWNRHDPTTLNRQGGDVGTQYRSGIYYYTDEQDRIAREAVEKQQKILNKRIVTEILPATKFYKAENYHQQYLAKGGRMGLRQSAEKGCKDPIRCYG

SEQ ID NO: 23522 - protein, 205 aa, Arabidopsis thaliana
  peptide (1)..(205): Ceres Seq. ID no. 12323040
  misc_feature (39)..(192): Pfam Name: Peptide methionine sulfoxide reductase Pfam Description: Peptide methionine sulfoxide reductase
  misc_feature (3)..(205): Homolog of NCBI NO: 18424492 NR Description: peptide methionine sulfoxide reductase - like
  misc_feature (9)..(205): Homolog of NCBI NO: 37536896 NR Description: putative peptide methionine sulfoxide reductase
  misc_feature (1)..(205): Homolog of NCBI NO: 12230349 NR Description: Peptide methionine sulfoxide reductase
  misc_feature (1)..(205): Homolog of NCBI NO: 29469000 NR Description: peptide methionine sulfoxide reductase; cPMSR
  misc_feature (1)..(205): Homolog of NCBI NO: 1709690 NR Description: Peptide methionine sulfoxide reductase
  misc_feature (1)..(205): Homolog of NCBI NO: 11278974 NR Description: protein-methionine-S-oxide reductase (EC 1.8.4.6)
  misc_feature (1)..(205): Homolog of NCBI NO: 1279212 NR Description: methionine sulfoxide reductase [Arabidopsis
  misc_feature (1)..(205): Homolog of NCBI NO: 21593143 NR Description: protein-methionine-S-oxide reductase [Arabidopsis
  misc_feature (1)..(205): Homolog of NCBI NO: 15234942 NR Description: protein-methionine-S-oxide reductase
  misc_feature (1)..(205): Homolog of NCBI NO: 15146324 NR Description: AT4g25130/F13M23_270 [Arabidopsis thaliana]
MNNLFNRLGFGSRPQAQADPSSAAIAQGPDDDVPSSGQQFAQFGAGCFWGVELAYQRVPGVTKTEVGYSHGIVHNPSYEDVCTGTTGHNEVVRVQYDPKECSFESLLDVFWNRHDPTTLNRQGGDVGTQYRSGIYYYTDEQDRIAREAVEKQQKILNKRIVTEILPATKFYKAENYHQQYLAKGGRMGLRQSAEKGCKDPIRCYG

SEQ ID NO: 23523 - DNA, 1489 bp, Arabidopsis thaliana
  misc_feature (1)..(1489): Ceres Seq. ID no. 12345016
  misc_feature: MA Experiment ID: 108576 Result: Up-regulated in Transcription
  misc_feature: MA Experiment 108576 PARAMETER Experiment Name: At_42deg_Heat_cDNA_P Parameter: Temperature (deg C) Value: 42 vs. 22
  misc_feature: MA Experiment 108576 PARAMETER Experiment Name: At_42deg_Heat_cDNA_P Parameter: Timepoint (hr) Value: 1
  misc_feature: MA Experiment 108576 PARAMETER Experiment Name: At_42deg_Heat_cDNA_P Parameter: Tissue Value: Aerial
  misc_feature: MA Experiment ID: 108577 Result: Up-regulated in Transcription
  misc_feature: MA Experiment 108577 PARAMETER Experiment Name: At_42deg_Heat_cDNA_P Parameter: Temperature (deg C) Value: 42 vs. 22
  misc_feature: MA Experiment 108577 PARAMETER Experiment Name: At_42deg_Heat_cDNA_P Parameter: Timepoint (hr) Value: 6
  misc_feature: MA Experiment 108577 PARAMETER Experiment Name: At_42deg_Heat_cDNA_P Parameter: Tissue Value: Aerial
  misc_feature: MA Experiment ID: 20000111 Result: Up-regulated in Transcription
  misc_feature: MA Experiment 20000111 PARAMETER Experiment Name: At_42deg_Heat_cDNA_P Parameter: Temperature (deg C) Value: 42 vs. 22
  misc_feature: MA Experiment 20000111 PARAMETER Experiment Name: At_42deg_Heat_cDNA_P Parameter: Timepoint (hr) Value: 6
  misc_feature: MA Experiment 20000111 PARAMETER Experiment Name: At_42deg_Heat_cDNA_P Parameter: Tissue Value: Aerial
  misc_feature: MA Experiment ID: 20000171 Result: Up-regulated in Transcription
  misc_feature: MA Experiment 20000171 PARAMETER Experiment Name: At_42deg_Heat_P Parameter: Age (day) Value: 14
  misc_feature: MA Experiment 20000171 PARAMETER Experiment Name: At_42deg_Heat_P Parameter: Organism Value: A. thaliana
  misc_feature: MA Experiment 20000171 PARAMETER Experiment Name: At_42deg_Heat_P Parameter: Plant Line Value: WS
  misc_feature: MA Experiment 20000171 PARAMETER Experiment Name: At_42deg_Heat_P Parameter: Temperature (deg C) Value: 42 vs. 22
  misc_feature: MA Experiment 20000171 PARAMETER Experiment Name: At_42deg_Heat_P Parameter: Timepoint (hr) Value: 1
  misc_feature: MA Experiment 20000171 PARAMETER Experiment Name: At_42deg_Heat_P Parameter: Tissue Value: Aerial
  misc_feature: MA Experiment ID: 20000173 Result: Up-regulated in Transcription
  misc_feature: MA Experiment 20000173 PARAMETER Experiment Name: At_42deg_Heat_P Parameter: Age (day) Value: 14
  misc_feature: MA Experiment 20000173 PARAMETER Experiment Name: At_42deg_Heat_P Parameter: Organism Value: A. thaliana
  misc_feature: MA Experiment 20000173 PARAMETER Experiment Name: At_42deg_Heat_P Parameter: Plant Line Value: WS
  misc_feature: MA Experiment 20000173 PARAMETER Experiment Name: At_42deg_Heat_P Parameter: Temperature (deg C) Value: 42 vs. 22
  misc_feature: MA Experiment 20000173 PARAMETER Experiment Name: At_42deg_Heat_P Parameter: Timepoint (hr) Value: 6
  misc_feature: MA Experiment 20000173 PARAMETER Experiment Name: At_42deg_Heat_P Parameter: Tissue Value: Aerial
gaaaacgaaaaccctcgggattcctctgcttctgtctcgtccgtcgtcgtcaatttctctgcatcagagattccggtgtccttcttcctttcactcgcgtataacctcttttccttgacgttgtctccgtgagctttctgtgctttgactgcaaccatgtcgactattatgcagaagatcaaagaaattgaagatgagatggctaaaacacagaagaataaagctacttctcatcatctgggtttgttaaaggccaagcttgctaagcttcggagggaccttcttgcaccgcctaccaaaggtggcggtggtggtgctggagaaggttttgatgtgactaaaagtggagattctagagttggactggtcggatttccttcggttggaaaatctacgctattaaacaagctgactgggacattttccgaggttgcttcttatgagttcacgactttgacatgcattcctggtgttatcacatatcgtggagctaaaatccagttattagatcttcctggtattattgagggtgctaaagatggaaaaggtagaggaagacaggttataagtacggctaggacatgcaactgcatcttaatagttcttgatgccataaaaccaattactcacaagcgtctcattgaaaaagagctcgaaggattcggaataaggttgaacaaggagccaccaaatttaacatttaggaaaaaagacaaaggtggtatcaatctaacttctacagtcgctgtcacacaccttgaccttgacaccgtcaaggcgatttgcggtgagtacaggatgcacaatgctgacatcaccctgcgctacgatgcaacctctgatgacctcattgatgtcatcgagggcagtcggatttatatgccctgtatctatgctgtcaacaagatcgattcaatcacacttgaggaacttgaaattttggacaaacttcctcattactgtcctgtcagtgcgcatctggagtggaatcttgatggacttctggacaagatatgggaatacttggatctaactcgaatctacacaaaaccaaaggcaatgaatccggattatgatgatcccgtaatcttatcatccaagaagagaacagtagaggacttctgcatccggattcacaaagacatgcttaaacaattcaagtacgctctggtttggggttcaagtgccaaacacaagccacaaagagttggaaaggaacacgagcttgaggacgaggatgttgttcagatcgttaaaaagatatgatttttgcagataatggagagcagtcaagagaccaaccaaagtagccataatgagatctcctataggaaggtcaggatttcttttggtttctcagctttatctttcttttgtaattgtattattatatccagacgaaatctgtgtctacacccttttttatgtcttattagatacttttgtcttcttccaataatactattaagcatgtgattgatgttgtcgg

SEQ ID NO: 23524 - protein, 369 aa, Arabidopsis thaliana
  peptide (1)..(369): Ceres Seq. ID no. 12345017
  misc_feature (2)..(270): Pfam Name: GTP1/OBG family Pfam Description: GTP1/OBG family
  misc_feature (3)..(368): Homolog of NCBI NO: 23613265 NR Description: developmentally regulated GTP-binding protein 1,
  misc_feature (1)..(368): Homolog of NCBI NO: 26348781 NR Description: unnamed protein product [Mus musculus]
  misc_feature (1)..(368): Homolog of NCBI NO: 346685 NR Description: GTP-binding protein DRG [validated] - mouse
  misc_feature (1)..(368): Homolog of NCBI NO: 1169421 NR Description: Developmentally regulated GTP-binding protein 1
  misc_feature (1)..(368): Homolog of NCBI NO: 18089152 NR Description: developmentally regulated GTP binding protein 1
  misc_feature (1)..(368): Homolog of NCBI NO: 6681225 NR Description: developmentally regulated GTP binding protein 1
  misc_feature (1)..(368): Homolog of NCBI NO: 24586704 NR Description: developmentally regulated GTP binding protein 1
  misc_feature (1)..(368): Homolog of NCBI NO: 4758796 NR Description: developmentally regulated GTP binding protein 1
  misc_feature (1)..(369): Homolog of NCBI NO: 30585289 NR Description: Homo sapiens developmentally regulated GTP
  misc_feature (1)..(369): Homolog of NCBI NO: 15235111 NR Description: GTP-binding - like protein; protein id:
MSTIMQKIKEIEDEMAKTQKNKATSHHLGLLKAKLAKLRRDLLAPPTKGGGGGAGEGFDVTKSGDSRVGLVGFPSVGKSTLLNKLTGTFSEVASYEFTTLTCIPGVITYRGAKIQLLDLPGIIEGAKDGKGRGRQVISTARTCNCILIVLDAIKPITHKRLIEKELEGFGIRLNKEPPNLTFRKKDKGGINLTSTVAVTHLDLDTVKAICGEYRMHNADITLRYDATSDDLIDVIEGSRIYMPCIYAVNKIDSITLEELEILDKLPHYCPVSAHLEWNLDGLLDKIWEYLDLTRIYTKPKAMNPDYDDPVILSSKKRTVEDFCIRIHKDMLKQFKYALVWGSSAKHKPQRVGKEHELEDEDVVQIVKKI

SEQ ID NO: 23525 - protein, 365 aa, Arabidopsis thaliana
  peptide (1)..(365): Ceres Seq. ID no. 12345018
  misc_feature (1)..(266): Pfam Name: GTP1/OBG family Pfam Description: GTP1/OBG family
  misc_feature (1)..(365): Homolog of NCBI NO: 15235111 NR Description: GTP-binding - like protein; protein id:
  misc_feature (1)..(364): Homolog of NCBI NO: 23613265 NR Description: developmentally regulated GTP-binding protein 1,
  misc_feature (1)..(364): Homolog of NCBI NO: 26348781 NR Description: unnamed protein product [Mus musculus]
  misc_feature (1)..(364): Homolog of NCBI NO: 346685 NR Description: GTP-binding protein DRG [validated] - mouse
  misc_feature (1)..(364): Homolog of NCBI NO: 1169421 NR Description: Developmentally regulated GTP-binding protein 1
  misc_feature (1)..(364): Homolog of NCBI NO: 18089152 NR Description: developmentally regulated GTP binding protein 1
  misc_feature (1)..(364): Homolog of NCBI NO: 6681225 NR Description: developmentally regulated GTP binding protein 1
  misc_feature (1)..(364): Homolog of NCBI NO: 24586704 NR Description: developmentally regulated GTP binding protein 1
  misc_feature (1)..(364): Homolog of NCBI NO: 4758796 NR Description: developmentally regulated GTP binding protein 1
  misc_feature (1)..(365): Homolog of NCBI NO: 30585289 NR Description: Homo sapiens developmentally regulated GTP
MQKIKEIEDEMAKTQKNKATSHHLGLLKAKLAKLRRDLLAPPTKGGGGGAGEGFDVTKSGDSRVGLVGFPSVGKSTLLNKLTGTFSEVASYEFTTLTCIPGVITYRGAKIQLLDLPGIIEGAKDGKGRGRQVISTARTCNCILIVLDAIKPITHKRLIEKELEGFGIRLNKEPPNLTFRKKDKGGINLTSTVAVTHLDLDTVKAICGEYRMHNADITLRYDATSDDLIDVIEGSRIYMPCIYAVNKIDSITLEELEILDKLPHYCPVSAHLEWNLDGLLDKIWEYLDLTRIYTKPKAMNPDYDDPVILSSKKRTVEDFCIRIHKDMLKQFKYALVWGSSAKHKPQRVGKEHELEDEDVVQIVKKI

SEQ ID NO: 23526 - protein, 355 aa, Arabidopsis thaliana
  peptide (1)..(355): Ceres Seq. ID no. 12345019
  misc_feature (1)..(256): Pfam Name: GTP1/OBG family Pfam Description: GTP1/OBG family
  misc_feature (1)..(354): Homolog of NCBI NO: 23613265 NR Description: developmentally regulated GTP-binding protein 1,
  misc_feature (1)..(354): Homolog of NCBI NO: 26348781 NR Description: unnamed protein product [Mus musculus]
  misc_feature (1)..(354): Homolog of NCBI NO: 346685 NR Description: GTP-binding protein DRG [validated] - mouse
  misc_feature (1)..(354): Homolog of NCBI NO: 1169421 NR Description: Developmentally regulated GTP-binding protein 1
  misc_feature (1)..(354): Homolog of NCBI NO: 18089152 NR Description: developmentally regulated GTP binding protein 1
  misc_feature (1)..(354): Homolog of NCBI NO: 6681225 NR Description: developmentally regulated GTP binding protein 1
  misc_feature (1)..(354): Homolog of NCBI NO: 24586704 NR Description: developmentally regulated GTP binding protein 1
  misc_feature (1)..(354): Homolog of NCBI NO: 4758796 NR Description: developmentally regulated GTP binding protein 1
  misc_feature (1)..(355): Homolog of NCBI NO: 30585289 NR Description: Homo sapiens developmentally regulated GTP
  misc_feature (1)..(355): Homolog of NCBI NO: 15235111 NR Description: GTP-binding - like protein; protein id:
MAKTQKNKATSHHLGLLKAKLAKLRRDLLAPPTKGGGGGAGEGFDVTKSGDSRVGLVGFPSVGKSTLLNKLTGTFSEVASYEFTTLTCIPGVITYRGAKIQLLDLPGIIEGAKDGKGRGRQVISTARTCNCILIVLDAIKPITHKRLIEKELEGFGIRLNKEPPNLTFRKKDKGGINLTSTVAVTHLDLDTVKAICGEYRMHNADITLRYDATSDDLIDVIEGSRIYMPCIYAVNKIDSITLEELEILDKLPHYCPVSAHLEWNLDGLLDKIWEYLDLTRIYTKPKAMNPDYDDPVILSSKKRTVEDFCIRIHKDMLKQFKYALVWGSSAKHKPQRVGKEHELEDEDVVQIVKKI

SEQ ID NO: 23527 - DNA, 1304 bp, Arabidopsis thaliana
  misc_feature (1)..(1304): Ceres Seq. ID no. 13580633
  misc_feature: MA Experiment ID: 20000307 Result: Down-regulated in Transcription
  misc_feature: MA Experiment 20000307 PARAMETER Experiment Name: At_Germinating_Seeds_Sub_P Parameter: Age (hr) Value: 24 vs. 0
  misc_feature: MA Experiment 20000307 PARAMETER Experiment Name: At_Germinating_Seeds_Sub_P Parameter: Organism Value: A. thaliana
  misc_feature: MA Experiment 20000307 PARAMETER Experiment Name: At_Germinating_Seeds_Sub_P Parameter: Plant Line Value: WS
  misc_feature: MA Experiment 20000307 PARAMETER Experiment Name: At_Germinating_Seeds_Sub_P Parameter: Tissue Value: Germinating Seeds
  misc_feature: MA Experiment ID: 20000329 Result: Up-regulated in Transcription
  misc_feature: MA Experiment 20000329 PARAMETER Experiment Name: At_4deg_Cold_Sub_P Parameter: Age (day) Value: 14
  misc_feature: MA Experiment 20000329 PARAMETER Experiment Name: At_4deg_Cold_Sub_P Parameter: Organism Value: A. thaliana
  misc_feature: MA Experiment 20000329 PARAMETER Experiment Name: At_4deg_Cold_Sub_P Parameter: Plant Line Value: WS
  misc_feature: MA Experiment 20000329 PARAMETER Experiment Name: At_4deg_Cold_Sub_P Parameter: Temperature (deg C) Value: 4 vs. 22
  misc_feature: MA Experiment 20000329 PARAMETER Experiment Name: At_4deg_Cold_Sub_P Parameter: Timepoint (hr) Value: 6
  misc_feature: MA Experiment 20000329 PARAMETER Experiment Name: At_4deg_Cold_Sub_P Parameter: Tissue Value: Aerial
aaacctaaatttctctactcaataatgtctcacagaaagtttgagcatccaagacatggttctttgggtttccttccaaggaaaagagctagccgacaccgtgggaaagtgaaggccttccctaaggatgatccaactaagccttgcagactcacctccttcttgggatacaaagctgggatgactcacattgtgagagatgttgaaaaacctggatcaaaactacacaagaaggaaacatgtgaagctgtgacgatcattgagacacctccaatggtggttgtaggtgtggttggttatgtaaagacacctcgtggtctgcggtctctatgcactgtgtgggctcagcatctgagcgaagaattgagaaggaggttctacaagaactgggccaagtcaaagaagaaggctttcactagatattctaagaaacatgaaactgaagaagggaaaaaagatattcaaagtcaattggagaagatgaagaagtactgctctgtcatcagagttcttgctcacactcagataaggaaaatgaaagggctgaagcagaagaaggcacatctgaatgagattcagatcaatggtggagatatagcaaagaaagttgactatgcctgcagtttatttgaaaaacaagtcccagttgatgccatcttccagaaagatgaaatgattgatatcattggtgtcaccaaaggaaaaggttatgaaggtgtggttacaagatggggagtgacccgacttccaagaaagactcatcgtggtcttcgcaaggttgcttgtatcggtgcttggcatccagctagagtctcctacacggtggctagagctggacaaaacggttaccatcaccgtactgaaatgaacaagaaggtataccgggttgggaaagttggccaggagactcactcagccatgaccgagtatgacagaaccgagaaggatatcacaccaatgggaggatttccccactatgggatagtgaaggaagattatttgatgatcaagggatgttgcgtggggcctaagaaacgtgtggtgactttaagacagactttgcttaagcagacgtctaggcttgctatggaggagatcaagcttaagttcattgacgctgcttccaatgggggacacggtcgtttccagacttctcaagagaaggccaagttctatggtagaaccatcaaagcttagatttctaagtattttgttgttttttgagttttttctttggtgtttgtcggatttctcttgacagttgatatcaattatctttttttttttttaatctggatattatc

SEQ ID NO: 23528 - protein, 398 aa, Arabidopsis thaliana
  peptide (1)..(398): Ceres Seq. ID no. 13580634
  misc_feature (58)..(351): Pfam Name: Ribosomal protein L3 Pfam Description: Ribosomal protein L3
  misc_feature (9)..(393): Homolog of NCBI NO: 14250148 NR Description: ribosomal protein L3 [Homo sapiens]
  misc_feature (9)..(398): Homolog of NCBI NO: 27769202 NR Description: Similar to ribosomal protein L3 [Xenopus laevis]
  misc_feature (9)..(398): Homolog of NCBI NO: 4506649 NR Description: ribosomal protein L3
  misc_feature (9)..(392): Homolog of NCBI NO: 6688812 NR Description: L3 Ribosomal protein [Medicago sativa subsp. x
  misc_feature (9)..(398): Homolog of NCBI NO: 548770 NR Description: 60S RIBOSOMAL PROTEIN L3
  misc_feature (9)..(397): Homolog of NCBI NO: 81657 NR Description: ribosomal protein L3.e (clone ARP1), cytosolic -
  misc_feature (9)..(397): Homolog of NCBI NO: 23397228 NR Description: putative ribosomal protein [Arabidopsis thaliana]
  misc_feature (9)..(397): Homolog of NCBI NO: 15218306 NR Description: 60S ribosomal protein L3 (RPL3A) [Arabidopsis
  misc_feature (9)..(398): Homolog of NCBI NO: 81658 NR Description: ribosomal protein L3.e (clone ARP2), cytosolic -
  misc_feature (9)..(398): Homolog of NCBI NO: 15220533 NR Description: 60S ribosomal protein L3 (RPL3B) [Arabidopsis
KPKFLYSIMSHRKFEHPRHGSLGFLPRKRASRHRGKVKAFPKDDPTKPCRLTSFLGYKAGMTHIVRDVEKPGSKLHKKETCEAVTIIETPPMVVVGVVGYVKTPRGLRSLCTVWAQHLSEELRRRFYKNWAKSKKKAFTRYSKKHETEEGKKDIQSQLEKMKKYCSVIRVLAHTQIRKMKGLKQKKAHLNEIQINGGDIAKKVDYACSLFEKQVPVDAIFQKDEMIDIIGVTKGKGYEGVVTRWGVTRLPRKTHRGLRKVACIGAWHPARVSYTVARAGQNGYHHRTEMNKKVYRVGKVGQETHSAMTEYDRTEKDITPMGGFPHYGIVKEDYLMIKGCCVGPKKRVVTLRQTLLKQTSRLAMEEIKLKFIDAASNGGHGRFQTSQEKAKFYGRTIKA

SEQ ID NO: 23529 - protein, 390 aa, Arabidopsis thaliana
  peptide (1)..(390): Ceres Seq. ID no. 13580635
  misc_feature (50)..(343): Pfam Name: Ribosomal protein L3 Pfam Description: Ribosomal protein L3
  misc_feature (1)..(385): Homolog of NCBI NO: 14250148 NR Description: ribosomal protein L3 [Homo sapiens]
  misc_feature (1)..(390): Homolog of NCBI NO: 27769202 NR Description: Similar to ribosomal protein L3 [Xenopus laevis]
  misc_feature (1)..(390): Homolog of NCBI NO: 4506649 NR Description: ribosomal protein L3
  misc_feature (1)..(384): Homolog of NCBI NO: 6688812 NR Description: L3 Ribosomal protein [Medicago sativa subsp. x
  misc_feature (1)..(390): Homolog of NCBI NO: 548770 NR Description: 60S RIBOSOMAL PROTEIN L3
  misc_feature (1)..(389): Homolog of NCBI NO: 81657 NR Description: ribosomal protein L3.e (clone ARP1), cytosolic -
  misc_feature (1)..(389): Homolog of NCBI NO: 23397228 NR Description: putative ribosomal protein [Arabidopsis thaliana]
  misc_feature (1)..(389): Homolog of NCBI NO: 15218306 NR Description: 60S ribosomal protein L3 (RPL3A) [Arabidopsis
  misc_feature (1)..(390): Homolog of NCBI NO: 81658 NR Description: ribosomal protein L3.e (clone ARP2), cytosolic -
  misc_feature (1)..(390): Homolog of NCBI NO: 15220533 NR Description: 60S ribosomal protein L3 (RPL3B) [Arabidopsis
MSHRKFEHPRHGSLGFLPRKRASRHRGKVKAFPKDDPTKPCRLTSFLGYKAGMTHIVRDVEKPGSKLHKKETCEAVTIIETPPMVVVGVVGYVKTPRGLRSLCTVWAQHLSEELRRRFYKNWAKSKKKAFTRYSKKHETEEGKKDIQSQLEKMKKYCSVIRVLAHTQIRKMKGLKQKKAHLNEIQINGGDIAKKVDYACSLFEKQVPVDAIFQKDEMIDIIGVTKGKGYEGVVTRWGVTRLPRKTHRGLRKVACIGAWHPARVSYTVARAGQNGYHHRTEMNKKVYRVGKVGQETHSAMTEYDRTEKDITPMGGFPHYGIVKEDYLMIKGCCVGPKKRVVTLRQTLLKQTSRLAMEEIKLKFIDAASNGGHGRFQTSQEKAKFYGRTIKA

SEQ ID NO: 23530 - protein, 338 aa, Arabidopsis thaliana
  peptide (1)..(338): Ceres Seq. ID no. 13580636
  misc_feature (1)..(291): Pfam Name: Ribosomal protein L3 Pfam Description: Ribosomal protein L3
  misc_feature (1)..(333): Homolog of NCBI NO: 14250148 NR Description: ribosomal protein L3 [Homo sapiens]
  misc_feature (1)..(338): Homolog of NCBI NO: 27769202 NR Description: Similar to ribosomal protein L3 [Xenopus laevis]
  misc_feature (1)..(338): Homolog of NCBI NO: 4506649 NR Description: ribosomal protein L3
  misc_feature (1)..(332): Homolog of NCBI NO: 6688812 NR Description: L3 Ribosomal protein [Medicago sativa subsp. x
  misc_feature (1)..(338): Homolog of NCBI NO: 548770 NR Description: 60S RIBOSOMAL PROTEIN L3
  misc_feature (1)..(337): Homolog of NCBI NO: 81657 NR Description: ribosomal protein L3.e (clone ARP1), cytosolic -
  misc_feature (1)..(337): Homolog of NCBI NO: 23397228 NR Description: putative ribosomal protein [Arabidopsis thaliana]
  misc_feature (1)..(337): Homolog of NCBI NO: 15218306 NR Description: 60S ribosomal protein L3 (RPL3A) [Arabidopsis
  misc_feature (1)..(338): Homolog of NCBI NO: 81658 NR Description: ribosomal protein L3.e (clone ARP2), cytosolic -
  misc_feature (1)..(338): Homolog of NCBI NO: 15220533 NR Description: 60S ribosomal protein L3 (RPL3B) [Arabidopsis
MTHIVRDVEKPGSKLHKKETCEAVTIIETPPMVVVGVVGYVKTPRGLRSLCTVWAQHLSEELRRRFYKNWAKSKKKAFTRYSKKHETEEGKKDIQSQLEKMKKYCSVIRVLAHTQIRKMKGLKQKKAHLNEIQINGGDIAKKVDYACSLFEKQVPVDAIFQKDEMIDIIGVTKGKGYEGVVTRWGVTRLPRKTHRGLRKVACIGAWHPARVSYTVARAGQNGYHHRTEMNKKVYRVGKVGQETHSAMTEYDRTEKDITPMGGFPHYGIVKEDYLMIKGCCVGPKKRVVTLRQTLLKQTSRLAMEEIKLKFIDAASNGGHGRFQTSQEKAKFYGRTIKA

SEQ ID NO: 23531 - DNA, 1291 bp, Arabidopsis thaliana
  misc_feature (1)..(1291): Ceres Seq. ID no. 12322990
  misc_feature: MA Experiment ID: 108576 Result: Up-regulated in Transcription
  misc_feature: MA Experiment 108576 PARAMETER Experiment Name: At_42deg_Heat_cDNA_P Parameter: Temperature (deg C) Value: 42 vs. 22
  misc_feature: MA Experiment 108576 PARAMETER Experiment Name: At_42deg_Heat_cDNA_P Parameter: Timepoint (hr) Value: 1
  misc_feature: MA Experiment 108576 PARAMETER Experiment Name: At_42deg_Heat_cDNA_P Parameter: Tissue Value: Aerial
  misc_feature: MA Experiment ID: 20000234 Result: Up-regulated in Transcription
  misc_feature: MA Experiment 20000234 PARAMETER Experiment Name: At_Siliques_P Parameter: Age (day) Value: 21
  misc_feature: MA Experiment 20000234 PARAMETER Experiment Name: At_Siliques_P Parameter: Organism Value: A. thaliana
  misc_feature: MA Experiment 20000234 PARAMETER Experiment Name: At_Siliques_P Parameter: Plant Line Value: WS
  misc_feature: MA Experiment 20000234 PARAMETER Experiment Name: At_Siliques_P Parameter: Tissue Value: Less Than 5mm Siliques vs. Whole Plant
  misc_feature: MA Experiment ID: 20000264 Result: Up-regulated in Transcription
  misc_feature: MA Experiment 20000264 PARAMETER Experiment Name: At_Open_Flower_P Parameter: Age (day) Value: 21
  misc_feature: MA Experiment 20000264 PARAMETER Experiment Name: At_Open_Flower_P Parameter: Plant Line Value: WS
  misc_feature: MA Experiment 20000264 PARAMETER Experiment Name: At_Open_Flower_P Parameter: Tissue Value: Open Flower vs. Whole Plant
  misc_feature: MA Experiment ID: 20000265 Result: Up-regulated in Transcription
  misc_feature: MA Experiment 20000265 PARAMETER Experiment Name: At_Open_Flower_P Parameter: Age (day) Value: 21
  misc_feature: MA Experiment 20000265 PARAMETER Experiment Name: At_Open_Flower_P Parameter: Plant Line Value: WS
  misc_feature: MA Experiment 20000265 PARAMETER Experiment Name: At_Open_Flower_P Parameter: Tissue Value: Closed Flower vs. Whole Plant
  misc_feature: MA Experiment ID: 20000286 Result: Up-regulated in Transcription
  misc_feature: MA Experiment 20000286 PARAMETER Experiment Name: At_Open_Flower_P Parameter: Age (day) Value: 21
  misc_feature: MA Experiment 20000286 PARAMETER Experiment Name: At_Open_Flower_P Parameter: Plant Line Value: WS
  misc_feature: MA Experiment 20000286 PARAMETER Experiment Name: At_Open_Flower_P Parameter: Tissue Value: Half Open vs. Whole Plant
  misc_feature: MA Experiment ID: 20000794 Result: Up-regulated in Transcription
  misc_feature: MA Experiment 20000794 PARAMETER Experiment Name: At_Petals_P Parameter: Age (day) Value: 23-25 days
  misc_feature: MA Experiment 20000794 PARAMETER Experiment Name: At_Petals_P Parameter: Plant Line Value: WS
  misc_feature: MA Experiment 20000794 PARAMETER Experiment Name: At_Petals_P Parameter: Tissue Value: Petals vs. Whole plant
  misc_feature: MA Experiment ID: 20001757 Result: Down-regulated in Transcription
  misc_feature: MA Experiment 20001757 PARAMETER Experiment Name: At_50mM_NH4NO3_L-to-H_P Parameter: Timepoint (hr) Value: 6
  misc_feature: MA Experiment 20001757 PARAMETER Experiment Name: At_50mM_NH4NO3_L-to-H_P Parameter: Tissue Value: Leaf
  misc_feature: MA Experiment 20001757 PARAMETER Experiment Name: At_50mM_NH4NO3_L-to-H_P Parameter: Treatment Value: 50mM NH4NO3 vs 100mM Mannitol
  misc_feature: MA Experiment ID: 20001910 Result: Up-regulated in Transcription
  misc_feature: MA Experiment 20001910 PARAMETER Experiment Name: At_Drought_Reproduction_P Parameter: Age (day) Value: 37
  misc_feature: MA Experiment 20001910 PARAMETER Experiment Name: At_Drought_Reproduction_P Parameter: Organism Value: A. thaliana
  misc_feature: MA Experiment 20001910 PARAMETER Experiment Name: At_Drought_Reproduction_P Parameter: Plant Line Value: WS
  misc_feature: MA Experiment 20001910 PARAMETER Experiment Name: At_Drought_Reproduction_P Parameter: Timepoint (day) Value: 7
  misc_feature: MA Experiment 20001910 PARAMETER Experiment Name: At_Drought_Reproduction_P Parameter: Tissue Value: Flowers
  misc_feature: MA Experiment 20001910 PARAMETER Experiment Name: At_Drought_Reproduction_P Parameter: Treatment Value: Drought vs. No Drought
aaaaagaaaagtagaaaccccaagaaaaaataaaaaaaataatgggtcatcagcaatgcaaaagacgaaattcgacgccccacttttgactgaaaaaaatcgcgacaaatagatcgataattgtagatatcgaaggcaaaggagactacacttcggttcagaaagccatcgatgctgtccctgttggtaactctaattggattattgtccatgtccgtaaaggaatctacaaggagagagtgcacattccggagaacaagccgttcatattcatgaggggtaatggaaaaggaaaaacggtgatcgaatcttcgcaaagttcggtcgacaatgttgcttcagctactttcaaagtcgaggctaatcactttgtcgcttttggtatcagcatccgaaatgatgcacctgtcggaatggcattcacatctgagaaccaatcggtggcagcgtttgtggctgctgacaaagtagcgttttaccattgtgcgttctacagcttacacaacactttgtttgataacaaaggtagacattactaccatgagtgttacatccaaggctccatagacttcatcttcggtcgcgcaacttccattttcaacaattgtgagatatttgtgatatcagacaagagggtgaaaccgtatgggtcaatcacagcacaccatagggaaagcgcagaggaaaaaacgggttacgtgttcataagaggcaaagtgtacggaattgatgaggtttacttgggccgagccaaaggaccttattctcgagtcatctttgccaagacttacttgtccaagaccgttgtgcctgatggttggacaaactggagttaccatggctcgacccagaatctataccatggggagtataaatgtcatggaccaggagctgagaggcaaaagagatctgactgggccaaagatcttaccaaacaagaagttgagtctttcttgtccattgattttattgatggcacttcttggctccctgtttggcttcaggaaaagttttagagttccttatgctgtcgcgtttggcttttgacatttcgcgttttggtgtggcttggaaaaaaaacatatgaagaaagaagagtacttcatcctttcttcgacggtatactatacgaaatagttttctctcttttttttttgtgtacttctactctaaaatgttcttagagtgattggaaactcttatgttgtttgcaaacattatataagattgtttccatcttaataatatatgtaacctaaatttaaatcctataaatttaaaatattttccc

SEQ ID NO: 23532 - protein, 247 aa, Arabidopsis thaliana
  peptide (1)..(247): Ceres Seq. ID no. 12322991
  misc_feature (1)..(236): Pfam Name: Pectinesterase Pfam Description: Pectinesterase
  misc_feature (1)..(239): Homolog of NCBI NO: 15238111 NR Description: pectinesterase family
  misc_feature (1)..(239): Homolog of NCBI NO: 15239623 NR Description: pectinesterase family; protein id: At5g18990.1
  misc_feature (1)..(239): Homolog of NCBI NO: 15240544 NR Description: pectinesterase family; protein id: At5g55590.1
  misc_feature (1)..(239): Homolog of NCBI NO: 15226598 NR Description: pectinesterase family; protein id: At2g21610.1
  misc_feature (1)..(239): Homolog of NCBI NO: 27754550 NR Description: putative pectinesterase family protein
  misc_feature (1)..(239): Homolog of NCBI NO: 15228023 NR Description: pectinesterase family; protein id: At2g36710.1
  misc_feature (1)..(239): Homolog of NCBI NO: 15241163 NR Description: pectinesterase family
  misc_feature (1)..(239): Homolog of NCBI NO: 34909402 NR Description: putative pectin methylesterase
  misc_feature (1)..(242): Homolog of NCBI NO: 39653369 NR Description: putative pectinesterase [Oryza sativa (indica
  misc_feature (1)..(247): Homolog of NCBI NO: 15228955 NR Description: pectinesterase family
MRGNGKGKTVIESSQSSVDNVASATFKVEANHFVAFGISIRNDAPVGMAFTSENQSVAAFVAADKVAFYHCAFYSLHNTLFDNKGRHYYHECYIQGSIDFIFGRATSIFNNCEIFVISDKRVKPYGSITAHHRESAEEKTGYVFIRGKVYGIDEVYLGRAKGPYSRVIFAKTYLSKTVVPDGWTNWSYHGSTQNLYHGEYKCHGPGAERQKRSDWAKDLTKQEVESFLSIDFIDGTSWLPVWLQEKF

SEQ ID NO: 23533 - protein, 200 aa, Arabidopsis thaliana
  peptide (1)..(200): Ceres Seq. ID no. 12322992
  misc_feature (1)..(189): Pfam Name: Pectinesterase Pfam Description: Pectinesterase
  misc_feature (1)..(192): Homolog of NCBI NO: 15238111 NR Description: pectinesterase family
  misc_feature (1)..(192): Homolog of NCBI NO: 15239623 NR Description: pectinesterase family; protein id: At5g18990.1
  misc_feature (1)..(192): Homolog of NCBI NO: 15240544 NR Description: pectinesterase family; protein id: At5g55590.1
  misc_feature (1)..(192): Homolog of NCBI NO: 15226598 NR Description: pectinesterase family; protein id: At2g21610.1
  misc_feature (1)..(192): Homolog of NCBI NO: 27754550 NR Description: putative pectinesterase family protein
  misc_feature (1)..(192): Homolog of NCBI NO: 15228023 NR Description: pectinesterase family; protein id: At2g36710.1
  misc_feature (1)..(192): Homolog of NCBI NO: 15241163 NR Description: pectinesterase family
  misc_feature (1)..(192): Homolog of NCBI NO: 34909402 NR Description: putative pectin methylesterase
  misc_feature (1)..(195): Homolog of NCBI NO: 39653369 NR Description: putative pectinesterase [Oryza sativa (indica
  misc_feature (1)..(200): Homolog of NCBI NO: 15228955 NR Description: pectinesterase family
MAFTSENQSVAAFVAADKVAFYHCAFYSLHNTLFDNKGRHYYHECYIQGSIDFIFGRATSIFNNCEIFVISDKRVKPYGSITAHHRESAEEKTGYVFIRGKVYGIDEVYLGRAKGPYSRVIFAKTYLSKTVVPDGWTNWSYHGSTQNLYHGEYKCHGPGAERQKRSDWAKDLTKQEVESFLSIDFIDGTSWLPVWLQEKF

SEQ ID NO: 23534 - DNA, 725 bp, Arabidopsis thaliana
  misc_feature (1)..(725): Ceres Seq. ID no. 12396380
  misc_feature: MA Experiment ID: 108488 Result: Down-regulated in Transcription
  misc_feature: MA Experiment ID: 108595 Result: Up-regulated in Transcription
  misc_feature: MA Experiment 108595 PARAMETER Experiment Name: At_Ler-pi_Ovule_cDNA_P Parameter: Plant Line Value: null
  misc_feature: MA Experiment ID: 20000087 Result: Up-regulated in Transcription
  misc_feature: MA Experiment 20000087 PARAMETER Experiment Name: At_100uM_ABA_Mutants_cDNA_P Parameter: Plant Line Value: WS
  misc_feature: MA Experiment 20000087 PARAMETER Experiment Name: At_100uM_ABA_Mutants_cDNA_P Parameter: Timepoint (hr) Value: 6
  misc_feature: MA Experiment 20000087 PARAMETER Experiment Name: At_100uM_ABA_Mutants_cDNA_P Parameter: Tissue Value: Aerial
  misc_feature: MA Experiment 20000087 PARAMETER Experiment Name: At_100uM_ABA_Mutants_cDNA_P Parameter: Treatment Value: 100uM ABA vs. No Treatment
  misc_feature: MA Experiment ID: 20000111 Result: Up-regulated in Transcription
  misc_feature: MA Experiment 20000111 PARAMETER Experiment Name: At_42deg_Heat_cDNA_P Parameter: Temperature (deg C) Value: 42 vs. 22
  misc_feature: MA Experiment 20000111 PARAMETER Experiment Name: At_42deg_Heat_cDNA_P Parameter: Timepoint (hr) Value: 6
  misc_feature: MA Experiment 20000111 PARAMETER Experiment Name: At_42deg_Heat_cDNA_P Parameter: Tissue Value: Aerial
  misc_feature: MA Experiment ID: 20000113 Result: Up-regulated in Transcription
  misc_feature: MA Experiment 20000113 PARAMETER Experiment Name: At_42deg_Heat_cDNA_P Parameter: Temperature (deg C) Value: 42 vs. 22
  misc_feature: MA Experiment 20000113 PARAMETER Experiment Name: At_42deg_Heat_cDNA_P Parameter: Timepoint (hr) Value: 8
  misc_feature: MA Experiment 20000113 PARAMETER Experiment Name: At_42deg_Heat_cDNA_P Parameter: Tissue Value: Aerial
ccacgcaattacctcttctcactctcagacattttgtcaaacagatggtgctcgtttctgaaacagcttaagaactaacaaggagacagacactaagcttggttttttttctccgattagacggaggaaaaagtgaaaacgaggggcttagacgagtgatgtgatagagatggaaggagttgagctagaattagaaagaagaagcaagttcttgaacagtttgatacagaagaagaaggctaaagaacagcaagatcagaaagatgagttcaatgttcgtgttagggcttcagatatgcctttgcctcaacagaacagagcctttagtttgtcgcgtgagattttgaatgctactccagggaaggctgataacaaaagactcgctcatgccctaaaaaaggacttcgattcagcctacggcccggcatggcactgcattgttggaacaagctttggttcatacgtgactcattccacaggaggattcctatattttcagatcgacaaagtttacgttcttctcttcaagactgccgtggagccgttagatcaaaaatgagataaaacgttgatgatcagagcatcttcaatttaatctctgtcttgtatcccacaatgtaattctgcctaagacaaaatctttgtggctcctattgtgtaattagaagtcatcttctctactgtgaatcgtttcaacttcacaatgcaaaatattgttcttctcc

SEQ ID NO: 23535 - protein, 129 aa, Arabidopsis thaliana
  peptide (1)..(129): Ceres Seq. ID no. 12396381
  misc_feature (31)..(122): Pfam Name: Dynein light chain type 1 Pfam Description: Dynein light chain type 1
  misc_feature (29)..(121): Homolog of NCBI NO: 23488907 NR Description: dynein light chain 1, cytoplasmic [Plasmodium
  misc_feature (29)..(121): Homolog of NCBI NO: 23508829 NR Description: dynein light chain 1, putative [Plasmodium
  misc_feature (33)..(125): Homolog of NCBI NO: 15218189 NR Description: dynein light chain, putative; protein id:
  misc_feature (32)..(120): Homolog of NCBI NO: 28829295 NR Description: similar to Anthocidaris crassispina (Sea urchin).
  misc_feature (36)..(121): Homolog of NCBI NO: 34902908 NR Description: unnamed protein product [Oryza sativa (japonica
  misc_feature (38)..(121): Homolog of NCBI NO: 2811014 NR Description: DYNEIN LIGHT CHAIN LC6, FLAGELLAR OUTER ARM
  misc_feature (1)..(123): Homolog of NCBI NO: 34913978 NR Description: dynein light chain - like protein
  misc_feature (17)..(125): Homolog of NCBI NO: 15241269 NR Description: dynein light chain - like protein; protein id:
  misc_feature (1)..(126): Homolog of NCBI NO: 38567715 NR Description: B1358B12.13 [Oryza sativa (japonica
  misc_feature (1)..(129): Homolog of NCBI NO: 15220678 NR Description: dynein light subunit lc6, flagellar outer arm
MEGVELELERRSKFLNSLIQKKKAKEQQDQKDEFNVRVRASDMPLPQQNRAFSLSREILNATPGKADNKRLAHALKKDFDSAYGPAWHCIVGTSFGSYVTHSTGGFLYFQIDKVYVLLFKTAVEPLDQK

SEQ ID NO: 23536 - protein, 87 aa, Arabidopsis thaliana
  peptide (1)..(87): Ceres Seq. ID no. 12396382
  misc_feature (1)..(80): Pfam Name: Dynein light chain type 1 Pfam Description: Dynein light chain type 1
  misc_feature (1)..(79): Homolog of NCBI NO: 2811014 NR Description: DYNEIN LIGHT CHAIN LC6, FLAGELLAR OUTER ARM
  misc_feature (1)..(79): Homolog of NCBI NO: 23488907 NR Description: dynein light chain 1, cytoplasmic [Plasmodium
  misc_feature (1)..(79): Homolog of NCBI NO: 23508829 NR Description: dynein light chain 1, putative [Plasmodium
  misc_feature (1)..(83): Homolog of NCBI NO: 15218189 NR Description: dynein light chain, putative; protein id:
  misc_feature (1)..(78): Homolog of NCBI NO: 28829295 NR Description: similar to Anthocidaris crassispina (Sea urchin).
  misc_feature (1)..(79): Homolog of NCBI NO: 34902908 NR Description: unnamed protein product [Oryza sativa (japonica
  misc_feature (1)..(81): Homolog of NCBI NO: 34913978 NR Description: dynein light chain - like protein
  misc_feature (1)..(83): Homolog of NCBI NO: 15241269 NR Description: dynein light chain - like protein; protein id:
  misc_feature (1)..(84): Homolog of NCBI NO: 38567715 NR Description: B1358B12.13 [Oryza sativa (japonica
  misc_feature (1)..(87): Homolog of NCBI NO: 15220678 NR Description: dynein light subunit lc6, flagellar outer arm
MPLPQQNRAFSLSREILNATPGKADNKRLAHALKKDFDSAYGPAWHCIVGTSFGSYVTHSTGGFLYFQIDKVYVLLFKTAVEPLDQK

SEQ ID NO: 23537 - DNA, 1446 bp, Arabidopsis thaliana
  misc_feature (1)..(1446): Ceres Seq. ID no. 13497483
  misc_feature: MA Experiment ID: 108434 Result: Up-regulated in Transcription
  misc_feature: MA Experiment 108434 PARAMETER Experiment Name: At_Root_Tips_cDNA_P Parameter: Tissue Value: Root Tips
  misc_feature: MA Experiment ID: 20000111 Result: Down-regulated in Transcription
  misc_feature: MA Experiment 20000111 PARAMETER Experiment Name: At_42deg_Heat_cDNA_P Parameter: Temperature (deg C) Value: 42 vs. 22
  misc_feature: MA Experiment 20000111 PARAMETER Experiment Name: At_42deg_Heat_cDNA_P Parameter: Timepoint (hr) Value: 6
  misc_feature: MA Experiment 20000111 PARAMETER Experiment Name: At_42deg_Heat_cDNA_P Parameter: Tissue Value: Aerial
  misc_feature: MA Experiment ID: 20000113 Result: Down-regulated in Transcription
  misc_feature: MA Experiment 20000113 PARAMETER Experiment Name: At_42deg_Heat_cDNA_P Parameter: Temperature (deg C) Value: 42 vs. 22
  misc_feature: MA Experiment 20000113 PARAMETER Experiment Name: At_42deg_Heat_cDNA_P Parameter: Timepoint (hr) Value: 8
  misc_feature: MA Experiment 20000113 PARAMETER Experiment Name: At_42deg_Heat_cDNA_P Parameter: Tissue Value: Aerial
  misc_feature: MA Experiment ID: 20000171 Result: Down-regulated in Transcription
  misc_feature: MA Experiment 20000171 PARAMETER Experiment Name: At_42deg_Heat_P Parameter: Age (day) Value: 14
  misc_feature: MA Experiment 20000171 PARAMETER Experiment Name: At_42deg_Heat_P Parameter: Organism Value: A. thaliana
  misc_feature: MA Experiment 20000171 PARAMETER Experiment Name: At_42deg_Heat_P Parameter: Plant Line Value: WS
  misc_feature: MA Experiment 20000171 PARAMETER Experiment Name: At_42deg_Heat_P Parameter: Temperature (deg C) Value: 42 vs. 22
  misc_feature: MA Experiment 20000171 PARAMETER Experiment Name: At_42deg_Heat_P Parameter: Timepoint (hr) Value: 1
  misc_feature: MA Experiment 20000171 PARAMETER Experiment Name: At_42deg_Heat_P Parameter: Tissue Value: Aerial
  misc_feature: MA Experiment ID: 20000173 Result: Down-regulated in Transcription
  misc_feature: MA Experiment 20000173 PARAMETER Experiment Name: At_42deg_Heat_P Parameter: Age (day) Value: 14
  misc_feature: MA Experiment 20000173 PARAMETER Experiment Name: At_42deg_Heat_P Parameter: Organism Value: A. thaliana
  misc_feature: MA Experiment 20000173 PARAMETER Experiment Name: At_42deg_Heat_P Parameter: Plant Line Value: WS
  misc_feature: MA Experiment 20000173 PARAMETER Experiment Name: At_42deg_Heat_P Parameter: Temperature (deg C) Value: 42 vs. 22
  misc_feature: MA Experiment 20000173 PARAMETER Experiment Name: At_42deg_Heat_P Parameter: Timepoint (hr) Value: 6
  misc_feature: MA Experiment 20000173 PARAMETER Experiment Name: At_42deg_Heat_P Parameter: Tissue Value: Aerial
atatgaaaatttgcacagaacctataggactcgacaaatagaagaagcagattcgttgctaacgaagtaaaggatcttacttttttggtctttgctttagaaataacttataactacaagtcagagaggggccgagtaaatcggaaagatgacggcgccgatgatcctgaccggaagtggatcggcggcggagagagacgctcggatggcgcacactgctatggcgtttgttcagctctttaatggtggataccatgtgattactaaagtagctcttaatgttggagtcaaccagcttgtcttctgtgtatgccgtgatcttcttgctctctctattctcgctcctcttgcttacttccgcgaaagaaagatcagaactccaatgaataaaagccttctcttgtcattcttctttctgggcttagcaggggtatttgggaaccagttgttatttcttatcggtcttacatacacaaatcccacttatgctgctgccattcaaccatccatcccggtcttcacctttctcttggctgtcatgatgggtacagaaagagtgaatttgttgagaatcgaaggtcaaactaaggttggaggcacacttgtgtgtgttatgggtgctgtcttcatggttgtatttcgaggtccggccttgttaggagataaagatgcagactttgcgatgaacaatgaaatcagtgctaaaggtcaacctgagcctactggttggttagtctctggttttctcgatcttggatttgagcaatggcacattggagttttatgcttgattggaaactgcatgtgtatggctacttttcttgccattcaggcgccacttttgaagaagtatccggcaaatctttctgttgctgcattatcatacttctttggcacagtactaatgtgcacaacagctttctttatggtaaaggagccattggattggaagctaacacaatctgaggttcttgcagttatatatgcaggagttatcgcatcagcactaaactatggactcttgacttggtccaataagattattggtcctgccttggttgctctctacaatcctcttcaacccgctgcatcagctttcctatcgagaatctttctcggtagccccatttatctcggaagcgttgtgggtggattcttcatcattctaggactctatatggtcacttgggcatcgtttagagagcgaaaaacagcggtttccgggattgggattgcgccccatggtctaaaaacctcagagcctctgatatttaatgggacagttaacagactaggacagttgttttctggattacccagttcctctgtgaaatctgcagactaaaaagataccaaaaagttaagattcagacgagatcccattttacaacagctataactttttgttaactttcatctcttattaatatcttcttcgattactac

SEQ ID NO: 23538 - protein, 398 aa, Arabidopsis thaliana
  peptide (1)..(398): Ceres Seq. ID no. 13497484
  misc_feature (30)..(164): Pfam Name: Integral membrane protein DUF6 Pfam Description: Integral membrane protein DUF6
  misc_feature (12)..(176): Homolog of NCBI NO: 15231274 NR Description: notdulin N21 family protein [Arabidopsis
  misc_feature (227)..(398): Homolog of NCBI NO: 15231274 NR Description: notdulin N21 family protein [Arabidopsis
  misc_feature (227)..(330): Homolog of NCBI NO: 7487133 NR Description: hypothetical protein T18B16.150 - Arabidopsis
  misc_feature (1)..(221): Homolog of NCBI NO: 7487133 NR Description: hypothetical protein T18B16.150 - Arabidopsis
  misc_feature (1)..(73): Homolog of NCBI NO: 9758727 NR Description: nodulin-like protein [Arabidopsis thaliana]
  misc_feature (95)..(375): Homolog of NCBI NO: 9758727 NR Description: nodulin-like protein [Arabidopsis thaliana]
  misc_feature (1)..(171): Homolog of NCBI NO: 30694751 NR Description: nodulin N21 family protein [Arabidopsis thaliana]
  misc_feature (196)..(375): Homolog of NCBI NO: 30694751 NR Description: nodulin N21 family protein [Arabidopsis thaliana]
  misc_feature (25)..(398): Homolog of NCBI NO: 21593145 NR Description: unknown [Arabidopsis thaliana]
  misc_feature (1)..(398): Homolog of NCBI NO: 18415262 NR Description: nodulin-related protein [Arabidopsis thaliana]
MTAPMILTGSGSAAERDARMAHTAMAFVQLFNGGYHVITKVALNVGVNQLVFCVCRDLLALSILAPLAYFRERKIRTPMNKSLLLSFFFLGLAGVFGNQLLFLIGLTYTNPTYAAAIQPSIPVFTFLLAVMMGTERVNLLRIEGQTKVGGTLVCVMGAVFMVVFRGPALLGDKDADFAMNNEISAKGQPEPTGWLVSGFLDLGFEQWHIGVLCLIGNCMCMATFLAIQAPLLKKYPANLSVAALSYFFGTVLMCTTAFFMVKEPLDWKLTQSEVLAVIYAGVIASALNYGLLTWSNKIIGPALVALYNPLQPAASAFLSRIFLGSPIYLGSVVGGFFIILGLYMVTWASFRERKTAVSGIGIAPHGLKTSEPLIFNGTVNRLGQLFSGLPSSSVKSAD

SEQ ID NO: 23539 - protein, 394 aa, Arabidopsis thaliana
  peptide (1)..(394): Ceres Seq. ID no. 13497485
  misc_feature (26)..(160): Pfam Name: Integral membrane protein DUF6 Pfam Description: Integral membrane protein DUF6
  misc_feature (8)..(172): Homolog of NCBI NO: 15231274 NR Description: notdulin N21 family protein [Arabidopsis
  misc_feature (223)..(394): Homolog of NCBI NO: 15231274 NR Description: notdulin N21 family protein [Arabidopsis
  misc_feature (223)..(326): Homolog of NCBI NO: 7487133 NR Description: hypothetical protein T18B16.150 - Arabidopsis
  misc_feature (1)..(217): Homolog of NCBI NO: 7487133 NR Description: hypothetical protein T18B16.150 - Arabidopsis
  misc_feature (1)..(69): Homolog of NCBI NO: 9758727 NR Description: nodulin-like protein [Arabidopsis thaliana]
  misc_feature (91)..(371): Homolog of NCBI NO: 9758727 NR Description: nodulin-like protein [Arabidopsis thaliana]
  misc_feature (1)..(167): Homolog of NCBI NO: 30694751 NR Description: nodulin N21 family protein [Arabidopsis thaliana]
  misc_feature (192)..(371): Homolog of NCBI NO: 30694751 NR Description: nodulin N21 family protein [Arabidopsis thaliana]
  misc_feature (21)..(394): Homolog of NCBI NO: 21593145 NR Description: unknown [Arabidopsis thaliana]
  misc_feature (1)..(394): Homolog of NCBI NO: 18415262 NR Description: nodulin-related protein [Arabidopsis thaliana]
MILTGSGSAAERDARMAHTAMAFVQLFNGGYHVITKVALNVGVNQLVFCVCRDLLALSILAPLAYFRERKIRTPMNKSLLLSFFFLGLAGVFGNQLLFLIGLTYTNPTYAAAIQPSIPVFTFLLAVMMGTERVNLLRIEGQTKVGGTLVCVMGAVFMVVFRGPALLGDKDADFAMNNEISAKGQPEPTGWLVSGFLDLGFEQWHIGVLCLIGNCMCMATFLAIQAPLLKKYPANLSVAALSYFFGTVLMCTTAFFMVKEPLDWKLTQSEVLAVIYAGVIASALNYGLLTWSNKIIGPALVALYNPLQPAASAFLSRIFLGSPIYLGSVVGGFFIILGLYMVTWASFRERKTAVSGIGIAPHGLKTSEPLIFNGTVNRLGQLFSGLPSSSVKSAD

SEQ ID NO: 23540 - protein, 379 aa, Arabidopsis thaliana
  peptide (1)..(379): Ceres Seq. ID no. 13497486
  misc_feature (11)..(145): Pfam Name: Integral membrane protein DUF6 Pfam Description: Integral membrane protein DUF6
  misc_feature (1)..(157): Homolog of NCBI NO: 15231274 NR Description: notdulin N21 family protein [Arabidopsis
  misc_feature (208)..(379): Homolog of NCBI NO: 15231274 NR Description: notdulin N21 family protein [Arabidopsis
  misc_feature (208)..(311): Homolog of NCBI NO: 7487133 NR Description: hypothetical protein T18B16.150 - Arabidopsis
  misc_feature (1)..(202): Homolog of NCBI NO: 7487133 NR Description: hypothetical protein T18B16.150 - Arabidopsis
  misc_feature (1)..(54): Homolog of NCBI NO: 9758727 NR Description: nodulin-like protein [Arabidopsis thaliana]
  misc_feature (76)..(356): Homolog of NCBI NO: 9758727 NR Description: nodulin-like protein [Arabidopsis thaliana]
  misc_feature (1)..(152): Homolog of NCBI NO: 30694751 NR Description: nodulin N21 family protein [Arabidopsis thaliana]
  misc_feature (177)..(356): Homolog of NCBI NO: 30694751 NR Description: nodulin N21 family protein [Arabidopsis thaliana]
  misc_feature (6)..(379): Homolog of NCBI NO: 21593145 NR Description: unknown [Arabidopsis thaliana]
  misc_feature (1)..(379): Homolog of NCBI NO: 18415262 NR Description: nodulin-related protein [Arabidopsis thaliana]
MAHTAMAFVQLFNGGYHVITKVALNVGVNQLVFCVCRDLLALSILAPLAYFRERKIRTPMNKSLLLSFFFLGLAGVFGNQLLFLIGLTYTNPTYAAAIQPSIPVFTFLLAVMMGTERVNLLRIEGQTKVGGTLVCVMGAVFMVVFRGPALLGDKDADFAMNNEISAKGQPEPTGWLVSGFLDLGFEQWHIGVLCLIGNCMCMATFLAIQAPLLKKYPANLSVAALSYFFGTVLMCTTAFFMVKEPLDWKLTQSEVLAVIYAGVIASALNYGLLTWSNKIIGPALVALYNPLQPAASAFLSRIFLGSPIYLGSVVGGFFIILGLYMVTWASFRERKTAVSGIGIAPHGLKTSEPLIFNGTVNRLGQLFSGLPSSSVKSAD

SEQ ID NO: 23541 - DNA, 1241 bp, Arabidopsis thaliana
  misc_feature (1)..(1241): Ceres Seq. ID no. 12379509
  misc_feature: MA Experiment ID: 108434 Result: Up-regulated in Transcription
  misc_feature: MA Experiment 108434 PARAMETER Experiment Name: At_Root_Tips_cDNA_P Parameter: Tissue Value: Root Tips
  misc_feature: MA Experiment ID: 108569 Result: Up-regulated in Transcription
  misc_feature: MA Experiment 108569 PARAMETER Experiment Name: At_0.001%_MeJA__cDNA_P Parameter: Timepoint (hr) Value: 6
  misc_feature: MA Experiment 108569 PARAMETER Experiment Name: At_0.001%_MeJA__cDNA_P Parameter: Tissue Value: Aerial
  misc_feature: MA Experiment 108569 PARAMETER Experiment Name: At_0.001%_MeJA__cDNA_P Parameter: Treatment Value: 0.001% MeJA vs. No Treatment
  misc_feature: MA Experiment ID: 108573 Result: Up-regulated in Transcription
  misc_feature: MA Experiment 108573 PARAMETER Experiment Name: At_Drought_cDNA_P Parameter: Timepoint (hr) Value: 6
  misc_feature: MA Experiment 108573 PARAMETER Experiment Name: At_Drought_cDNA_P Parameter: Tissue Value: Aerial
  misc_feature: MA Experiment 108573 PARAMETER Experiment Name: At_Drought_cDNA_P Parameter: Treatment Value: Drought vs. No Drought
  misc_feature: MA Experiment ID: 108585 Result: Up-regulated in Transcription
  misc_feature: MA Experiment 108585 PARAMETER Experiment Name: At_5mM_NaNP_cDNA_P Parameter: Timepoint (hr) Value: 6
  misc_feature: MA Experiment 108585 PARAMETER Experiment Name: At_5mM_NaNP_cDNA_P Parameter: Tissue Value: Aerial
  misc_feature: MA Experiment 108585 PARAMETER Experiment Name: At_5mM_NaNP_cDNA_P Parameter: Treatment Value: null
  misc_feature: MA Experiment ID: 20000113 Result: Down-regulated in Transcription
  misc_feature: MA Experiment 20000113 PARAMETER Experiment Name: At_42deg_Heat_cDNA_P Parameter: Temperature (deg C) Value: 42 vs. 22
  misc_feature: MA Experiment 20000113 PARAMETER Experiment Name: At_42deg_Heat_cDNA_P Parameter: Timepoint (hr) Value: 8
  misc_feature: MA Experiment 20000113 PARAMETER Experiment Name: At_42deg_Heat_cDNA_P Parameter: Tissue Value: Aerial
  misc_feature: MA Experiment ID: 20000180 Result: Up-regulated in Transcription
  misc_feature: MA Experiment 20000180 PARAMETER Experiment Name: At_Germinating_Seeds_P Parameter: Age (hr) Value: 24 vs. 0
  misc_feature: MA Experiment 20000180 PARAMETER Experiment Name: At_Germinating_Seeds_P Parameter: Tissue Value: Germinating Seeds
  misc_feature: MA Experiment ID: 20000224 Result: Down-regulated in Transcription
attttaaccagcaaatacaaaaaacttccgatcccccttagcgtttccttctccggcgatattcttcttcttcggctcacattgcatcgtctctcactcgatccttcgttctttcagggacaatcatttcggaaacatgccaggtcagaagattgaaacgggtcatgaggacattgtccatgatgtgcagatggattactatggaaagcgaattgcaactgcatcatctgactgcaccatcaagataaccggtgtcagcaacaacggtggatcgcagcaactagccacattaaccggccaccgtggtcctgtctgggaagtcgcgtgggcacacccaaagtatggatcaatccttgcttcatgctcctatgatggtcaagtcatactctggaaagaaggcaaccagaaccaatggacccaagatcatgttttcacagaccacaaatcttcagtcaactccattgcatgggctcctcatgatatcggactatccttggcctgcgggtcatctgatggcaacatttcggttttcacagcccgtgctgacggtggctgggacacatcaaggattgaccaagcacatccggttggagtcacttcagtctcatgggccccagccacagcgcctggtgctcttgtgagctctggtcttctcgatccggtttacaagctagcttctggtggatgtgataataccgtgaaagtgtggaagctcgctaacgggtcatggaagatggattgctttccagctcttcaaaagcacactgattgggtccgtgatgtggcttgggcaccaaacttgggtctccccaagtccaccatagccagtggttcccaagatgggaaagttatcatatggacagtgggaaaagaaggtgagcaatgggaaggtaaggttctcaaggactttatgactcctgtgtggcgggtctcgtggtcgttgaccggtaacttattggccgtatccgatgggaacaacaacgtgactgtgtggaaagaggctgttgatggagagtgggaacaagttactgctgttgagccttaggtttttgatgctttgctatctctctgctcttcctttaaggaactgaatcaaacattttttctttactcttttcttagtccggtttggtggtctttttcagggaatgttgaattggttttcttaaagacttttggattattttttttcttattcttttcatagacaccattttaaaattctaaaaaccaagatcaag

SEQ ID NO: 23542 - protein, 302 aa, Arabidopsis thaliana
  peptide (1)..(302): Ceres Seq. ID no. 12379510
  misc_feature (6)..(300): Homolog of NCBI NO: 29150272 NR Description: SEC13 related gene [Mus musculus]
  misc_feature (6)..(300): Homolog of NCBI NO: 12805321 NR Description: Unknown (protein for MGC:6737) [Mus musculus]
  misc_feature (6)..(300): Homolog of NCBI NO: 38174439 NR Description: Unknown (protein for MGC:76017) [Silurana
  misc_feature (1)..(302): Homolog of NCBI NO: 34897242 NR Description: putative coat protein complex II (COPII)
  misc_feature (1)..(302): Homolog of NCBI NO: 34393220 NR Description: putative Sec13p [Oryza sativa (japonica
  misc_feature (1)..(301): Homolog of NCBI NO: 18147582 NR Description: Sec13p [Oryza sativa]
  misc_feature (1)..(302): Homolog of NCBI NO: 21593236 NR Description: transport protein SEC13, putative [Arabidopsis
  misc_feature (1)..(302): Homolog of NCBI NO: 15232095 NR Description: transport protein SEC13, putative
  misc_feature (1)..(302): Homolog of NCBI NO: 21593146 NR Description: putative protein transport protein SEC13
  misc_feature (1)..(302): Homolog of NCBI NO: 15227692 NR Description: G-protein beta family
MPGQKIETGHEDIVHDVQMDYYGKRIATASSDCTIKITGVSNNGGSQQLATLTGHRGPVWEVAWAHPKYGSILASCSYDGQVILWKEGNQNQWTQDHVFTDHKSSVNSIAWAPHDIGLSLACGSSDGNISVFTARADGGWDTSRIDQAHPVGVTSVSWAPATAPGALVSSGLLDPVYKLASGGCDNTVKVWKLANGSWKMDCFPALQKHTDWVRDVAWAPNLGLPKSTIASGSQDGKVIIWTVGKEGEQWEGKVLKDFMTPVWRVSWSLTGNLLAVSDGNNNVTVWKEAVDGEWEQVTAVEP

SEQ ID NO: 23543 - protein, 284 aa, Arabidopsis thaliana
  peptide (1)..(284): Ceres Seq. ID no. 12379511
  misc_feature (1)..(282): Homolog of NCBI NO: 27712890 NR Description: similar to SEC13 (S. cerevisiae)-like 1;
  misc_feature (1)..(282): Homolog of NCBI NO: 12805321 NR Description: Unknown (protein for MGC:6737) [Mus musculus]
  misc_feature (1)..(282): Homolog of NCBI NO: 38174439 NR Description: Unknown (protein for MGC:76017) [Silurana
  misc_feature (1)..(284): Homolog of NCBI NO: 34897242 NR Description: putative coat protein complex II (COPII)
  misc_feature (1)..(284): Homolog of NCBI NO: 34393220 NR Description: putative Sec13p [Oryza sativa (japonica
  misc_feature (1)..(283): Homolog of NCBI NO: 18147582 NR Description: Sec13p [Oryza sativa]
  misc_feature (1)..(284): Homolog of NCBI NO: 21593236 NR Description: transport protein SEC13, putative [Arabidopsis
  misc_feature (1)..(284): Homolog of NCBI NO: 15232095 NR Description: transport protein SEC13, putative
  misc_feature (1)..(284): Homolog of NCBI NO: 21593146 NR Description: putative protein transport protein SEC13
  misc_feature (1)..(284): Homolog of NCBI NO: 15227692 NR Description: G-protein beta family
MDYYGKRIATASSDCTIKITGVSNNGGSQQLATLTGHRGPVWEVAWAHPKYGSILASCSYDGQVILWKEGNQNQWTQDHVFTDHKSSVNSIAWAPHDIGLSLACGSSDGNISVFTARADGGWDTSRIDQAHPVGVTSVSWAPATAPGALVSSGLLDPVYKLASGGCDNTVKVWKLANGSWKMDCFPALQKHTDWVRDVAWAPNLGLPKSTIASGSQDGKVIIWTVGKEGEQWEGKVLKDFMTPVWRVSWSLTGNLLAVSDGNNNVTVWKEAVDGEWEQVTAVEP

SEQ ID NO: 23544 - DNA, 1440 bp, Arabidopsis thaliana
  misc_feature (1)..(1440): Ceres Seq. ID no. 12322178
  misc_feature: MA Experiment ID: 108433 Result: Up-regulated in Transcription
  misc_feature: MA Experiment 108433 PARAMETER Experiment Name: At_rhl_Mutant2_cDNA_P Parameter: Age (day) Value: 7
  misc_feature: MA Experiment 108433 PARAMETER Experiment Name: At_rhl_Mutant2_cDNA_P Parameter: Organism Value: A. thaliana
  misc_feature: MA Experiment 108433 PARAMETER Experiment Name: At_rhl_Mutant2_cDNA_P Parameter: Plant Line Value: rhl Mutant vs. wt landsburg
  misc_feature: MA Experiment 108433 PARAMETER Experiment Name: At_rhl_Mutant2_cDNA_P Parameter: Tissue Value: Roots
  misc_feature: MA Experiment ID: 108434 Result: Down-regulated in Transcription
  misc_feature: MA Experiment 108434 PARAMETER Experiment Name: At_Root_Tips_cDNA_P Parameter: Tissue Value: Root Tips
  misc_feature: MA Experiment ID: 108462 Result: Up-regulated in Transcription
  misc_feature: MA Experiment 108462 PARAMETER Experiment Name: At_Germinating_Seeds_cDNA_P Parameter: Age (day) Value: 2 vs. 0
  misc_feature: MA Experiment 108462 PARAMETER Experiment Name: At_Germinating_Seeds_cDNA_P Parameter: Tissue Value: Germinating Seeds
  misc_feature: MA Experiment ID: 108463 Result: Up-regulated in Transcription
  misc_feature: MA Experiment 108463 PARAMETER Experiment Name: At_Germinating_Seeds_cDNA_P Parameter: Age (day) Value: 3 vs. 0
  misc_feature: MA Experiment 108463 PARAMETER Experiment Name: At_Germinating_Seeds_cDNA_P Parameter: Tissue Value: Germinating Seeds
  misc_feature: MA Experiment ID: 108464 Result: Up-regulated in Transcription
  misc_feature: MA Experiment 108464 PARAMETER Experiment Name: At_Germinating_Seeds_cDNA_P Parameter: Age (day) Value: 4 vs. 0
  misc_feature: MA Experiment 108464 PARAMETER Experiment Name: At_Germinating_Seeds_cDNA_P Parameter: Tissue Value: Germinating Seeds
  misc_feature: MA Experiment ID: 20000068 Result: Up-regulated in Transcription
  misc_feature: MA Experiment ID: 20000111 Result: Down-regulated in Transcription
  misc_feature: MA Experiment 20000111 PARAMETER Experiment Name: At_42deg_Heat_cDNA_P Parameter: Temperature (deg C) Value: 42 vs. 22
  misc_feature: MA Experiment 20000111 PARAMETER Experiment Name: At_42deg_Heat_cDNA_P Parameter: Timepoint (hr) Value: 6
  misc_feature: MA Experiment 20000111 PARAMETER Experiment Name: At_42deg_Heat_cDNA_P Parameter: Tissue Value: Aerial
  misc_feature: MA Experiment ID: 20000113 Result: Down-regulated in Transcription
  misc_feature: MA Experiment 20000113 PARAMETER Experiment Name: At_42deg_Heat_cDNA_P Parameter: Temperature (deg C) Value: 42 vs. 22
  misc_feature: MA Experiment 20000113 PARAMETER Experiment Name: At_42deg_Heat_cDNA_P Parameter: Timepoint (hr) Value: 8
  misc_feature: MA Experiment 20000113 PARAMETER Experiment Name: At_42deg_Heat_cDNA_P Parameter: Tissue Value: Aerial
  misc_feature: MA Experiment ID: 20000173 Result: Down-regulated in Transcription
  misc_feature: MA Experiment 20000173 PARAMETER Experiment Name: At_42deg_Heat_P Parameter: Age (day) Value: 14
  misc_feature: MA Experiment 20000173 PARAMETER Experiment Name: At_42deg_Heat_P Parameter: Organism Value: A. thaliana
  misc_feature: MA Experiment 20000173 PARAMETER Experiment Name: At_42deg_Heat_P Parameter: Plant Line Value: WS
  misc_feature: MA Experiment 20000173 PARAMETER Experiment Name: At_42deg_Heat_P Parameter: Temperature (deg C) Value: 42 vs. 22
  misc_feature: MA Experiment 20000173 PARAMETER Experiment Name: At_42deg_Heat_P Parameter: Timepoint (hr) Value: 6
  misc_feature: MA Experiment 20000173 PARAMETER Experiment Name: At_42deg_Heat_P Parameter: Tissue Value: Aerial
  misc_feature: MA Experiment ID: 20000184 Result: Down-regulated in Transcription
  misc_feature: MA Experiment 20000184 PARAMETER Experiment Name: At_Shoots__P Parameter: Age (day) Value: 7
  misc_feature: MA Experiment 20000184 PARAMETER Experiment Name: At_Shoots__P Parameter: Tissue Value: Shoots vs. Whole Plant
  misc_feature: MA Experiment ID: 20000185 Result: Down-regulated in Transcription
  misc_feature: MA Experiment 20000185 PARAMETER Experiment Name: At_Roots__P Parameter: Age (day) Value: 7 vs. 21
  misc_feature: MA Experiment 20000185 PARAMETER Experiment Name: At_Roots__P Parameter: Organism Value: A. thaliana
  misc_feature: MA Experiment 20000185 PARAMETER Experiment Name: At_Roots__P Parameter: Tissue Value: Roots vs. Whole Plant
  misc_feature: MA Experiment ID: 20000224 Result: Down-regulated in Transcription
  misc_feature: MA Experiment ID: 20000227 Result: Down-regulated in Transcription
  misc_feature: MA Experiment 20000227 PARAMETER Experiment Name: At_Root-Tips-vs-Tops_P Parameter: Tissue Value: Root Tips vs. Root Tops
  misc_feature: MA Experiment ID: 20000234 Result: Down-regulated in Transcription
  misc_feature: MA Experiment 20000234 PARAMETER Experiment Name: At_Siliques_P Parameter: Age (day) Value: 21
  misc_feature: MA Experiment 20000234 PARAMETER Experiment Name: At_Siliques_P Parameter: Organism Value: A. thaliana
  misc_feature: MA Experiment 20000234 PARAMETER Experiment Name: At_Siliques_P Parameter: Plant Line Value: WS
  misc_feature: MA Experiment 20000234 PARAMETER Experiment Name: At_Siliques_P Parameter: Tissue Value: Less Than 5mm Siliques vs. Whole Plant
  misc_feature: MA Experiment ID: 20000265 Result: Down-regulated in Transcription
  misc_feature: MA Experiment 20000265 PARAMETER Experiment Name: At_Open_Flower_P Parameter: Age (day) Value: 21
  misc_feature: MA Experiment 20000265 PARAMETER Experiment Name: At_Open_Flower_P Parameter: Plant Line Value: WS
  misc_feature: MA Experiment 20000265 PARAMETER Experiment Name: At_Open_Flower_P Parameter: Tissue Value: Closed Flower vs. Whole Plant
  misc_feature: MA Experiment ID: 20000286 Result: Down-regulated in Transcription
  misc_feature: MA Experiment 20000286 PARAMETER Experiment Name: At_Open_Flower_P Parameter: Age (day) Value: 21
  misc_feature: MA Experiment 20000286 PARAMETER Experiment Name: At_Open_Flower_P Parameter: Plant Line Value: WS
  misc_feature: MA Experiment 20000286 PARAMETER Experiment Name: At_Open_Flower_P Parameter: Tissue Value: Half Open vs. Whole Plant
  misc_feature: MA Experiment ID: 20000439 Result: Down-regulated in Transcription
  misc_feature: MA Experiment 20000439 PARAMETER Experiment Name: At_Roots__P Parameter: Age (day) Value: 14 vs. 21
  misc_feature: MA Experiment 20000439 PARAMETER Experiment Name: At_Roots__P Parameter: Organism Value: A. thaliana
  misc_feature: MA Experiment 20000439 PARAMETER Experiment Name: At_Roots__P Parameter: Tissue Value: Roots vs. Whole Plant
  misc_feature: MA Experiment ID: 20000451 Result: Down-regulated in Transcription
  misc_feature: MA Experiment 20000451 PARAMETER Experiment Name: At_CS6879_Shoots-Roots_P Parameter: Age (day) Value: 14
  misc_feature: MA Experiment 20000451 PARAMETER Experiment Name: At_CS6879_Shoots-Roots_P Parameter: Organism Value: A. thaliana
  misc_feature: MA Experiment 20000451 PARAMETER Experiment Name: At_CS6879_Shoots-Roots_P Parameter: Plant Line Value: CS6879 vs. WS
  misc_feature: MA Experiment 20000451 PARAMETER Experiment Name: At_CS6879_Shoots-Roots_P Parameter: Tissue Value: Roots
  misc_feature: MA Experiment ID: 20000496 Result: Down-regulated in Transcription
  misc_feature: MA Experiment 20000496 PARAMETER Experiment Name: At_Guard_Cells_P Parameter: Harvest Date Value: 7/19/2002
  misc_feature: MA Experiment 20000496 PARAMETER Experiment Name: At_Guard_Cells_P Parameter: Organism Value: Canola
  misc_feature: MA Experiment 20000496 PARAMETER Experiment Name: At_Guard_Cells_P Parameter: Tissue Value: Guard Cells vs. Leaves
  misc_feature: MA Experiment ID: 20001557 Result: Down-regulated in Transcription
  misc_feature: MA Experiment 20001557 PARAMETER Experiment Name: At_Drought_Soil_Dry_P Parameter: Age (day) Value: 27
  misc_feature: MA Experiment 20001557 PARAMETER Experiment Name: At_Drought_Soil_Dry_P Parameter: Organism Value: A. thaliana
  misc_feature: MA Experiment 20001557 PARAMETER Experiment Name: At_Drought_Soil_Dry_P Parameter: Plant Line Value: WS
  misc_feature: MA Experiment 20001557 PARAMETER Experiment Name: At_Drought_Soil_Dry_P Parameter: Post Timepoint (hr) Value: 3
  misc_feature: MA Experiment 20001557 PARAMETER Experiment Name: At_Drought_Soil_Dry_P Parameter: Post-Treatment Value: Re-Water vs. No Drought
  misc_feature: MA Experiment 20001557 PARAMETER Experiment Name: At_Drought_Soil_Dry_P Parameter: Timepoint (day) Value: 13
  misc_feature: MA Experiment 20001557 PARAMETER Experiment Name: At_Drought_Soil_Dry_P Parameter: Treatment Value: Drought vs. No Drought
  misc_feature: MA Experiment ID: 20001558 Result: Down-regulated in Transcription
  misc_feature: MA Experiment 20001558 PARAMETER Experiment Name: At_Drought_Soil_Dry_P Parameter: Age (day) Value: 27
  misc_feature: MA Experiment 20001558 PARAMETER Experiment Name: At_Drought_Soil_Dry_P Parameter: Organism Value: A. thaliana
  misc_feature: MA Experiment 20001558 PARAMETER Experiment Name: At_Drought_Soil_Dry_P Parameter: Plant Line Value: WS
  misc_feature: MA Experiment 20001558 PARAMETER Experiment Name: At_Drought_Soil_Dry_P Parameter: Post Timepoint (hr) Value: 6
  misc_feature: MA Experiment 20001558 PARAMETER Experiment Name: At_Drought_Soil_Dry_P Parameter: Post-Treatment Value: Re-Water vs. No Drought
  misc_feature: MA Experiment 20001558 PARAMETER Experiment Name: At_Drought_Soil_Dry_P Parameter: Timepoint (day) Value: 13
  misc_feature: MA Experiment 20001558 PARAMETER Experiment Name: At_Drought_Soil_Dry_P Parameter: Treatment Value: Drought vs. No Drought
  misc_feature: MA Experiment ID: 20001560 Result: Down-regulated in Transcription
  misc_feature: MA Experiment 20001560 PARAMETER Experiment Name: At_Drought_Soil_Dry_P Parameter: Age (day) Value: 28
  misc_feature: MA Experiment 20001560 PARAMETER Experiment Name: At_Drought_Soil_Dry_P Parameter: Organism Value: A. thaliana
  misc_feature: MA Experiment 20001560 PARAMETER Experiment Name: At_Drought_Soil_Dry_P Parameter: Plant Line Value: WS
  misc_feature: MA Experiment 20001560 PARAMETER Experiment Name: At_Drought_Soil_Dry_P Parameter: Post Timepoint (hr) Value: None
  misc_feature: MA Experiment 20001560 PARAMETER Experiment Name: At_Drought_Soil_Dry_P Parameter: Post-Treatment Value: None
  misc_feature: MA Experiment 20001560 PARAMETER Experiment Name: At_Drought_Soil_Dry_P Parameter: Timepoint (day) Value: 14
  misc_feature: MA Experiment 20001560 PARAMETER Experiment Name: At_Drought_Soil_Dry_P Parameter: Treatment Value: Drought vs. No Drought
  misc_feature: MA Experiment ID: 20001905 Result: Down-regulated in Transcription
  misc_feature: MA Experiment 20001905 PARAMETER Experiment Name: At_Drought_Reproduction_P Parameter: Age (day) Value: 40
  misc_feature: MA Experiment 20001905 PARAMETER Experiment Name: At_Drought_Reproduction_P Parameter: Organism Value: A. thaliana
  misc_feature: MA Experiment 20001905 PARAMETER Experiment Name: At_Drought_Reproduction_P Parameter: Plant Line Value: WS
  misc_feature: MA Experiment 20001905 PARAMETER Experiment Name: At_Drought_Reproduction_P Parameter: Timepoint (day) Value: 10
  misc_feature: MA Experiment 20001905 PARAMETER Experiment Name: At_Drought_Reproduction_P Parameter: Tissue Value: Rosettes
  misc_feature: MA Experiment 20001905 PARAMETER Experiment Name: At_Drought_Reproduction_P Parameter: Treatment Value: Drought vs. No Drought
  misc_feature: MA Experiment ID: 20001906 Result: Down-regulated in Transcription
  misc_feature: MA Experiment 20001906 PARAMETER Experiment Name: At_Drought_Reproduction_P Parameter: Age (day) Value: 35
  misc_feature: MA Experiment 20001906 PARAMETER Experiment Name: At_Drought_Reproduction_P Parameter: Organism Value: A. thaliana
  misc_feature: MA Experiment 20001906 PARAMETER Experiment Name: At_Drought_Reproduction_P Parameter: Plant Line Value: WS
  misc_feature: MA Experiment 20001906 PARAMETER Experiment Name: At_Drought_Reproduction_P Parameter: Timepoint (day) Value: 5
  misc_feature: MA Experiment 20001906 PARAMETER Experiment Name: At_Drought_Reproduction_P Parameter: Tissue Value: Siliques
  misc_feature: MA Experiment 20001906 PARAMETER Experiment Name: At_Drought_Reproduction_P Parameter: Treatment Value: Drought vs. No Drought
aagaatcaaagaaagaagatggaatctgaaagactcgaatcacatcttctgaataagcaagaagaagaagcttcttccttcacttctggtcttcttctcagcacatccgtcgttgtcgctggatccttctgttatggctgcgcctccaaaatcatggaagaactgggactttccgttgcagattattcgtttttcacttcggtaatgacattaggaggaatgattacagccgcgtttagcggtaaaatctctgctctcgttggtcgtcgacagacaatgtggatctcagatgtttgctgtatttttggttggctcgctgtagcgtttgcacatgatattatactgcttaatattggacgactcttcttggggtttggggttggtctcattagttatgtggttcctgtgtatatagcagaaattacacctaaaacatttcgtggaggattttcttattccaatcagcttctacaatgtcttgggatttcactcatgttcttcaccggaaactttttccattggcgaacattagctcttttaagtgcaatcccaagtgctttccaagtgatatgtttattttttattcctgaatctcctagatggctggcgatgtatggtcaagatcaagagcttgaagtttcgttgaaaaatttaaggggagaaaatagtgatattctaaaggaagctgctgaaatcagagaaacagtggaaatatccagaaaagagtctcaaagtggaataagagacttgttccatataggaaacgcacattccttaatcattggattgggattaatgctcttgcaacaattttgtgggagcgcggcgataagtgcttatgctgctcgtatattcgacaaagcaggttttccaagcgacataggaacaaccatcctcgcagtgattctgataccgcaatctatagttgtcatgttaaccgttgaccgatggggacgccgaccacttcttatgatttcttctatcggaatgtgcatatgctcattttttattggcctttcatactaccttcagaagaatggtgaatttcagaagttatgttccgttatgttaatcgtcggtttagtgggttatgtctcatcctttggcattgggctaggtggactaccatgggttataatgtctgaggtatttccggtgaatgtgaaaatcaccgccggtagccttgtaacgatgtcaaattggttttttaattggattatcatctatagttttaatttcatgatacagtggagcgcttccggaacatatttcatattttctggagtttctctggtgacgatcgtattcatatggacattggtgcctgagacgaaaggccgaacactcgaagagattcaaacatcattagtccgactttcgtaaaatctatgtatggattatacatataagtctcttgaatagtctttttaaccgtacatt

SEQ ID NO: 23545 - protein, 460 aa, Arabidopsis thaliana
  peptide (1)..(460): Ceres Seq. ID no. 12322179
  misc_feature (42)..(109): Pfam Name: Sugar (and other) transporter Pfam Description: Sugar (and other) transporter
  misc_feature (7)..(48): Homolog of NCBI NO: 25407059 NR Description: hypothetical protein [imported] - Arabidopsis
  misc_feature (355)..(460): Homolog of NCBI NO: 25407059 NR Description: hypothetical protein [imported] - Arabidopsis
  misc_feature (42)..(233): Homolog of NCBI NO: 25407059 NR Description: hypothetical protein [imported] - Arabidopsis
  misc_feature (42)..(109): Homolog of NCBI NO: 25407061 NR Description: hypothetical protein [imported] - Arabidopsis
  misc_feature (361)..(460): Homolog of NCBI NO: 25407061 NR Description: hypothetical protein [imported] - Arabidopsis
  misc_feature (92)..(233): Homolog of NCBI NO: 25407061 NR Description: hypothetical protein [imported] - Arabidopsis
  misc_feature (7)..(48): Homolog of NCBI NO: 30680852 NR Description: sugar transporter family [Arabidopsis thaliana]
  misc_feature (236)..(289): Homolog of NCBI NO: 30680852 NR Description: sugar transporter family [Arabidopsis thaliana]
  misc_feature (355)..(460): Homolog of NCBI NO: 30680852 NR Description: sugar transporter family [Arabidopsis thaliana]
  misc_feature (42)..(233): Homolog of NCBI NO: 30680852 NR Description: sugar transporter family [Arabidopsis thaliana]
KNQRKKMESERLESHLLNKQEEEASSFTSGLLLSTSVVVAGSFCYGCASKIMEELGLSVADYSFFTSVMTLGGMITAAFSGKISALVGRRQTMWISDVCCIFGWLAVAFAHDIILLNIGRLFLGFGVGLISYVVPVYIAEITPKTFRGGFSYSNQLLQCLGISLMFFTGNFFHWRTLALLSAIPSAFQVICLFFIPESPRWLAMYGQDQELEVSLKNLRGENSDILKEAAEIRETVEISRKESQSGIRDLFHIGNAHSLIIGLGLMLLQQFCGSAAISAYAARIFDKAGFPSDIGTTILAVILIPQSIVVMLTVDRWGRRPLLMISSIGMCICSFFIGLSYYLQKNGEFQKLCSVMLIVGLVGYVSSFGIGLGGLPWVIMSEVFPVNVKITAGSLVTMSNWFFNWIIIYSFNFMIQWSASGTYFIFSGVSLVTIVFIWTLVPETKGRTLEEIQTSLVRLS

SEQ ID NO: 23546 - protein, 454 aa, Arabidopsis thaliana
  peptide (1)..(454): Ceres Seq. ID no. 12322180
  misc_feature (36)..(103): Pfam Name: Sugar (and other) transporter Pfam Description: Sugar (and other) transporter
  misc_feature (1)..(42): Homolog of NCBI NO: 25407059 NR Description: hypothetical protein [imported] - Arabidopsis
  misc_feature (349)..(454): Homolog of NCBI NO: 25407059 NR Description: hypothetical protein [imported] - Arabidopsis
  misc_feature (36)..(227): Homolog of NCBI NO: 25407059 NR Description: hypothetical protein [imported] - Arabidopsis
  misc_feature (36)..(103): Homolog of NCBI NO: 25407061 NR Description: hypothetical protein [imported] - Arabidopsis
  misc_feature (355)..(454): Homolog of NCBI NO: 25407061 NR Description: hypothetical protein [imported] - Arabidopsis
  misc_feature (86)..(227): Homolog of NCBI NO: 25407061 NR Description: hypothetical protein [imported] - Arabidopsis
  misc_feature (1)..(42): Homolog of NCBI NO: 30680852 NR Description: sugar transporter family [Arabidopsis thaliana]
  misc_feature (230)..(283): Homolog of NCBI NO: 30680852 NR Description: sugar transporter family [Arabidopsis thaliana]
  misc_feature (349)..(454): Homolog of NCBI NO: 30680852 NR Description: sugar transporter family [Arabidopsis thaliana]
  misc_feature (36)..(227): Homolog of NCBI NO: 30680852 NR Description: sugar transporter family [Arabidopsis thaliana]
MESERLESHLLNKQEEEASSFTSGLLLSTSVVVAGSFCYGCASKIMEELGLSVADYSFFTSVMTLGGMITAAFSGKISALVGRRQTMWISDVCCIFGWLAVAFAHDIILLNIGRLFLGFGVGLISYVVPVYIAEITPKTFRGGFSYSNQLLQCLGISLMFFTGNFFHWRTLALLSAIPSAFQVICLFFIPESPRWLAMYGQDQELEVSLKNLRGENSDILKEAAEIRETVEISRKESQSGIRDLFHIGNAHSLIIGLGLMLLQQFCGSAAISAYAARIFDKAGFPSDIGTTILAVILIPQSIVVMLTVDRWGRRPLLMISSIGMCICSFFIGLSYYLQKNGEFQKLCSVMLIVGLVGYVSSFGIGLGGLPWVIMSEVFPVNVKITAGSLVTMSNWFFNWIIIYSFNFMIQWSASGTYFIFSGVSLVTIVFIWTLVPETKGRTLEEIQTSLVRLS

SEQ ID NO: 23547 - protein, 409 aa, Arabidopsis thaliana
  peptide (1)..(409): Ceres Seq. ID no. 12322181
  misc_feature (1)..(58): Pfam Name: Sugar (and other) transporter Pfam Description: Sugar (and other) transporter
  misc_feature (1)..(58): Homolog of NCBI NO: 25407061 NR Description: hypothetical protein [imported] - Arabidopsis
  misc_feature (310)..(409): Homolog of NCBI NO: 25407061 NR Description: hypothetical protein [imported] - Arabidopsis
  misc_feature (41)..(182): Homolog of NCBI NO: 25407061 NR Description: hypothetical protein [imported] - Arabidopsis
  misc_feature (1)..(245): Homolog of NCBI NO: 6686829 NR Description: putative sugar transporter [Arabidopsis thaliana]
  misc_feature (304)..(409): Homolog of NCBI NO: 25407059 NR Description: hypothetical protein [imported] - Arabidopsis
  misc_feature (1)..(182): Homolog of NCBI NO: 25407059 NR Description: hypothetical protein [imported] - Arabidopsis
  misc_feature (1)..(209): Homolog of NCBI NO: 18390954 NR Description: putative sugar transport protein, ERD6
  misc_feature (185)..(238): Homolog of NCBI NO: 30680852 NR Description: sugar transporter family [Arabidopsis thaliana]
  misc_feature (304)..(409): Homolog of NCBI NO: 30680852 NR Description: sugar transporter family [Arabidopsis thaliana]
  misc_feature (1)..(182): Homolog of NCBI NO: 30680852 NR Description: sugar transporter family [Arabidopsis thaliana]
MEELGLSVADYSFFTSVMTLGGMITAAFSGKISALVGRRQTMWISDVCCIFGWLAVAFAHDIILLNIGRLFLGFGVGLISYVVPVYIAEITPKTFRGGFSYSNQLLQCLGISLMFFTGNFFHWRTLALLSAIPSAFQVICLFFIPESPRWLAMYGQDQELEVSLKNLRGENSDILKEAAEIRETVEISRKESQSGIRDLFHIGNAHSLIIGLGLMLLQQFCGSAAISAYAARIFDKAGFPSDIGTTILAVILIPQSIVVMLTVDRWGRRPLLMISSIGMCICSFFIGLSYYLQKNGEFQKLCSVMLIVGLVGYVSSFGIGLGGLPWVIMSEVFPVNVKITAGSLVTMSNWFFNWIIIYSFNFMIQWSASGTYFIFSGVSLVTIVFIWTLVPETKGRTLEEIQTSLVRLS

SEQ ID NO: 23548 - DNA, 1345 bp, Arabidopsis thaliana
  misc_feature (1)..(1345): Ceres Seq. ID no. 12325217
  misc_feature: MA Experiment ID: 20000169 Result: Up-regulated in Transcription
  misc_feature: MA Experiment 20000169 PARAMETER Experiment Name: At_100uM_ABA_P Parameter: Age (day) Value: 14
  misc_feature: MA Experiment 20000169 PARAMETER Experiment Name: At_100uM_ABA_P Parameter: Organism Value: A. thaliana
  misc_feature: MA Experiment 20000169 PARAMETER Experiment Name: At_100uM_ABA_P Parameter: Plant Line Value: WS
  misc_feature: MA Experiment 20000169 PARAMETER Experiment Name: At_100uM_ABA_P Parameter: Timepoint (hr) Value: 6
  misc_feature: MA Experiment 20000169 PARAMETER Experiment Name: At_100uM_ABA_P Parameter: Tissue Value: Aerial
  misc_feature: MA Experiment 20000169 PARAMETER Experiment Name: At_100uM_ABA_P Parameter: Treatment Value: 100uM ABA vs. No Treatment
  misc_feature: MA Experiment ID: 20000171 Result: Down-regulated in Transcription
  misc_feature: MA Experiment 20000171 PARAMETER Experiment Name: At_42deg_Heat_P Parameter: Age (day) Value: 14
  misc_feature: MA Experiment 20000171 PARAMETER Experiment Name: At_42deg_Heat_P Parameter: Organism Value: A. thaliana
  misc_feature: MA Experiment 20000171 PARAMETER Experiment Name: At_42deg_Heat_P Parameter: Plant Line Value: WS
  misc_feature: MA Experiment 20000171 PARAMETER Experiment Name: At_42deg_Heat_P Parameter: Temperature (deg C) Value: 42 vs. 22
  misc_feature: MA Experiment 20000171 PARAMETER Experiment Name: At_42deg_Heat_P Parameter: Timepoint (hr) Value: 1
  misc_feature: MA Experiment 20000171 PARAMETER Experiment Name: At_42deg_Heat_P Parameter: Tissue Value: Aerial
  misc_feature: MA Experiment ID: 20000173 Result: Down-regulated in Transcription
  misc_feature: MA Experiment 20000173 PARAMETER Experiment Name: At_42deg_Heat_P Parameter: Age (day) Value: 14
  misc_feature: MA Experiment 20000173 PARAMETER Experiment Name: At_42deg_Heat_P Parameter: Organism Value: A. thaliana
  misc_feature: MA Experiment 20000173 PARAMETER Experiment Name: At_42deg_Heat_P Parameter: Plant Line Value: WS
  misc_feature: MA Experiment 20000173 PARAMETER Experiment Name: At_42deg_Heat_P Parameter: Temperature (deg C) Value: 42 vs. 22
  misc_feature: MA Experiment 20000173 PARAMETER Experiment Name: At_42deg_Heat_P Parameter: Timepoint (hr) Value: 6
  misc_feature: MA Experiment 20000173 PARAMETER Experiment Name: At_42deg_Heat_P Parameter: Tissue Value: Aerial
  misc_feature: MA Experiment ID: 20000182 Result: Down-regulated in Transcription
  misc_feature: MA Experiment 20000182 PARAMETER Experiment Name: At_2mM_SA_P Parameter: Age (day) Value: 14
  misc_feature: MA Experiment 20000182 PARAMETER Experiment Name: At_2mM_SA_P Parameter: Organism Value: A. thaliana
  misc_feature: MA Experiment 20000182 PARAMETER Experiment Name: At_2mM_SA_P Parameter: Plant Line Value: WS
  misc_feature: MA Experiment 20000182 PARAMETER Experiment Name: At_2mM_SA_P Parameter: Timepoint (hr) Value: 6
  misc_feature: MA Experiment 20000182 PARAMETER Experiment Name: At_2mM_SA_P Parameter: Tissue Value: Aerial
  misc_feature: MA Experiment 20000182 PARAMETER Experiment Name: At_2mM_SA_P Parameter: Treatment Value: 2mM SA vs. No Treatment
  misc_feature: MA Experiment ID: 20000184 Result: Down-regulated in Transcription
  misc_feature: MA Experiment 20000184 PARAMETER Experiment Name: At_Shoots__P Parameter: Age (day) Value: 7
  misc_feature: MA Experiment 20000184 PARAMETER Experiment Name: At_Shoots__P Parameter: Tissue Value: Shoots vs. Whole Plant
  misc_feature: MA Experiment ID: 20000185 Result: Down-regulated in Transcription
  misc_feature: MA Experiment 20000185 PARAMETER Experiment Name: At_Roots__P Parameter: Age (day) Value: 7 vs. 21
  misc_feature: MA Experiment 20000185 PARAMETER Experiment Name: At_Roots__P Parameter: Organism Value: A. thaliana
  misc_feature: MA Experiment 20000185 PARAMETER Experiment Name: At_Roots__P Parameter: Tissue Value: Roots vs. Whole Plant
  misc_feature: MA Experiment ID: 20000211 Result: Up-regulated in Transcription
  misc_feature: MA Experiment 20000211 PARAMETER Experiment Name: At_0.001percent_MeJA__P Parameter: Age (day) Value: 14
  misc_feature: MA Experiment 20000211 PARAMETER Experiment Name: At_0.001percent_MeJA__P Parameter: Organism Value: A. thaliana
  misc_feature: MA Experiment 20000211 PARAMETER Experiment Name: At_0.001percent_MeJA__P Parameter: Plant Line Value: WS
  misc_feature: MA Experiment 20000211 PARAMETER Experiment Name: At_0.001percent_MeJA__P Parameter: Timepoint (hr) Value: 1
  misc_feature: MA Experiment 20000211 PARAMETER Experiment Name: At_0.001percent_MeJA__P Parameter: Tissue Value: Aerial
  misc_feature: MA Experiment 20000211 PARAMETER Experiment Name: At_0.001percent_MeJA__P Parameter: Treatment Value: 0.001percent MeJA vs. No Treatment
  misc_feature: MA Experiment ID: 20000227 Result: Up-regulated in Transcription
  misc_feature: MA Experiment 20000227 PARAMETER Experiment Name: At_Root-Tips-vs-Tops_P Parameter: Tissue Value: Root Tips vs. Root Tops
  misc_feature: MA Experiment ID: 20000234 Result: Down-regulated in Transcription
  misc_feature: MA Experiment 20000234 PARAMETER Experiment Name: At_Siliques_P Parameter: Age (day) Value: 21
  misc_feature: MA Experiment 20000234 PARAMETER Experiment Name: At_Siliques_P Parameter: Organism Value: A. thaliana
  misc_feature: MA Experiment 20000234 PARAMETER Experiment Name: At_Siliques_P Parameter: Plant Line Value: WS
  misc_feature: MA Experiment 20000234 PARAMETER Experiment Name: At_Siliques_P Parameter: Tissue Value: Less Than 5mm Siliques vs. Whole Plant
  misc_feature: MA Experiment ID: 20000235 Result: Down-regulated in Transcription
  misc_feature: MA Experiment 20000235 PARAMETER Experiment Name: At_Siliques_P Parameter: Age (day) Value: 21
  misc_feature: MA Experiment 20000235 PARAMETER Experiment Name: At_Siliques_P Parameter: Organism Value: A. thaliana
  misc_feature: MA Experiment 20000235 PARAMETER Experiment Name: At_Siliques_P Parameter: Plant Line Value: WS
  misc_feature: MA Experiment 20000235 PARAMETER Experiment Name: At_Siliques_P Parameter: Tissue Value: 5-10mm Siliques vs. Whole Plant
  misc_feature: MA Experiment ID: 20000438 Result: Down-regulated in Transcription
  misc_feature: MA Experiment 20000438 PARAMETER Experiment Name: At_Shoots__P Parameter: Age (day) Value: 14
  misc_feature: MA Experiment 20000438 PARAMETER Experiment Name: At_Shoots__P Parameter: Tissue Value: Shoots vs. Whole Plant
  misc_feature: MA Experiment ID: 20000439 Result: Down-regulated in Transcription
  misc_feature: MA Experiment 20000439 PARAMETER Experiment Name: At_Roots__P Parameter: Age (day) Value: 14 vs. 21
  misc_feature: MA Experiment 20000439 PARAMETER Experiment Name: At_Roots__P Parameter: Organism Value: A. thaliana
  misc_feature: MA Experiment 20000439 PARAMETER Experiment Name: At_Roots__P Parameter: Tissue Value: Roots vs. Whole Plant
  misc_feature: MA Experiment ID: 20000455 Result: Up-regulated in Transcription
  misc_feature: MA Experiment 20000455 PARAMETER Experiment Name: At_100uM_ABA_P Parameter: Age (day) Value: 16
  misc_feature: MA Experiment 20000455 PARAMETER Experiment Name: At_100uM_ABA_P Parameter: Organism Value: A. thaliana
  misc_feature: MA Experiment 20000455 PARAMETER Experiment Name: At_100uM_ABA_P Parameter: Plant Line Value: WS
  misc_feature: MA Experiment 20000455 PARAMETER Experiment Name: At_100uM_ABA_P Parameter: Timepoint (hr) Value: 48
  misc_feature: MA Experiment 20000455 PARAMETER Experiment Name: At_100uM_ABA_P Parameter: Tissue Value: Aerial
  misc_feature: MA Experiment 20000455 PARAMETER Experiment Name: At_100uM_ABA_P Parameter: Treatment Value: 100uM ABA vs. No Treatment
  misc_feature: MA Experiment ID: 20000495 Result: Up-regulated in Transcription
  misc_feature: MA Experiment 20000495 PARAMETER Experiment Name: At_Guard_Cells_P Parameter: Harvest Date Value: 8/2/2002
  misc_feature: MA Experiment 20000495 PARAMETER Experiment Name: At_Guard_Cells_P Parameter: Organism Value: A. thaliana
  misc_feature: MA Experiment 20000495 PARAMETER Experiment Name: At_Guard_Cells_P Parameter: Tissue Value: Guard Cells vs. Leaves
  misc_feature: MA Experiment ID: 20000527 Result: Up-regulated in Transcription
  misc_feature: MA Experiment 20000527 PARAMETER Experiment Name: At_10percent_PEG_P Parameter: Age (day) Value: 20
  misc_feature: MA Experiment 20000527 PARAMETER Experiment Name: At_10percent_PEG_P Parameter: Organism Value: A. thaliana
  misc_feature: MA Experiment 20000527 PARAMETER Experiment Name: At_10percent_PEG_P Parameter: Plant Line Value: WS
  misc_feature: MA Experiment 20000527 PARAMETER Experiment Name: At_10percent_PEG_P Parameter: Timepoint (day) Value: 20
  misc_feature: MA Experiment 20000527 PARAMETER Experiment Name: At_10percent_PEG_P Parameter: Tissue Value: Whole Plant
  misc_feature: MA Experiment 20000527 PARAMETER Experiment Name: At_10percent_PEG_P Parameter: Treatment Value: 10percent PEG vs. No Treatment
  misc_feature: MA Experiment ID: 20001247 Result: Down-regulated in Transcription
  misc_feature: MA Experiment 20001247 PARAMETER Experiment Name: At_Far-red-induction_P Parameter: Age (day) Value: 7
  misc_feature: MA Experiment 20001247 PARAMETER Experiment Name: At_Far-red-induction_P Parameter: Light Value: Far-red vs. White
  misc_feature: MA Experiment 20001247 PARAMETER Experiment Name: At_Far-red-induction_P Parameter: Organism Value: A. thaliana
  misc_feature: MA Experiment 20001247 PARAMETER Experiment Name: At_Far-red-induction_P Parameter: Plant Line Value: Columbia
  misc_feature: MA Experiment 20001247 PARAMETER Experiment Name: At_Far-red-induction_P Parameter: Timepoint (hr) Value: 1
  misc_feature: MA Experiment 20001247 PARAMETER Experiment Name: At_Far-red-induction_P Parameter: Tissue Value: Whole Plant
  misc_feature: MA Experiment ID: 20001248 Result: Down-regulated in Transcription
  misc_feature: MA Experiment 20001248 PARAMETER Experiment Name: At_Far-red-induction_P Parameter: Age (day) Value: 7
  misc_feature: MA Experiment 20001248 PARAMETER Experiment Name: At_Far-red-induction_P Parameter: Light Value: Far-red vs. White
  misc_feature: MA Experiment 20001248 PARAMETER Experiment Name: At_Far-red-induction_P Parameter: Organism Value: A. thaliana
  misc_feature: MA Experiment 20001248 PARAMETER Experiment Name: At_Far-red-induction_P Parameter: Plant Line Value: Columbia
  misc_feature: MA Experiment 20001248 PARAMETER Experiment Name: At_Far-red-induction_P Parameter: Timepoint (hr) Value: 4
  misc_feature: MA Experiment 20001248 PARAMETER Experiment Name: At_Far-red-induction_P Parameter: Tissue Value: Whole Plant
  misc_feature: MA Experiment ID: 20001450 Result: Down-regulated in Transcription
  misc_feature: MA Experiment 20001450 PARAMETER Experiment Name: At_Far-red-induction_P Parameter: Age (day) Value: 7
  misc_feature: MA Experiment 20001450 PARAMETER Experiment Name: At_Far-red-induction_P Parameter: Light Value: Far-red vs. White
  misc_feature: MA Experiment 20001450 PARAMETER Experiment Name: At_Far-red-induction_P Parameter: Organism Value: A. thaliana
  misc_feature: MA Experiment 20001450 PARAMETER Experiment Name: At_Far-red-induction_P Parameter: Plant Line Value: Columbia
  misc_feature: MA Experiment 20001450 PARAMETER Experiment Name: At_Far-red-induction_P Parameter: Timepoint (hr) Value: 8
  misc_feature: MA Experiment 20001450 PARAMETER Experiment Name: At_Far-red-induction_P Parameter: Tissue Value: Whole Plant
  misc_feature: MA Experiment ID: 20001451 Result: Down-regulated in Transcription
  misc_feature: MA Experiment 20001451 PARAMETER Experiment Name: At_Far-red-induction_P Parameter: Age (day) Value: 7
  misc_feature: MA Experiment 20001451 PARAMETER Experiment Name: At_Far-red-induction_P Parameter: Light Value: Far-red vs. White
  misc_feature: MA Experiment 20001451 PARAMETER Experiment Name: At_Far-red-induction_P Parameter: Organism Value: A. thaliana
  misc_feature: MA Experiment 20001451 PARAMETER Experiment Name: At_Far-red-induction_P Parameter: Plant Line Value: Columbia
  misc_feature: MA Experiment 20001451 PARAMETER Experiment Name: At_Far-red-induction_P Parameter: Timepoint (hr) Value: 24
  misc_feature: MA Experiment 20001451 PARAMETER Experiment Name: At_Far-red-induction_P Parameter: Tissue Value: Whole Plant
  misc_feature: MA Experiment ID: 20001457 Result: Down-regulated in Transcription
  misc_feature: MA Experiment 20001457 PARAMETER Experiment Name: At_50mM_NH4NO3_L-to-H_P Parameter: Age (day) Value: Undefined
  misc_feature: MA Experiment 20001457 PARAMETER Experiment Name: At_50mM_NH4NO3_L-to-H_P Parameter: Organism Value: Undefined
  misc_feature: MA Experiment 20001457 PARAMETER Experiment Name: At_50mM_NH4NO3_L-to-H_P Parameter: Plant Line Value: Undefined
  misc_feature: MA Experiment 20001457 PARAMETER Experiment Name: At_50mM_NH4NO3_L-to-H_P Parameter: Timepoint (hr) Value: 0.5
  misc_feature: MA Experiment 20001457 PARAMETER Experiment Name: At_50mM_NH4NO3_L-to-H_P Parameter: Tissue Value: Siliques
  misc_feature: MA Experiment 20001457 PARAMETER Experiment Name: At_50mM_NH4NO3_L-to-H_P Parameter: Treatment Value: 50mM NH4NO3 vs. 100mM Manitol
  misc_feature: MA Experiment ID: 20001555 Result: Up-regulated in Transcription
  misc_feature: MA Experiment 20001555 PARAMETER Experiment Name: At_Drought_Soil_Dry_P Parameter: Age (day) Value: 24
  misc_feature: MA Experiment 20001555 PARAMETER Experiment Name: At_Drought_Soil_Dry_P Parameter: Organism Value: A. thaliana
  misc_feature: MA Experiment 20001555 PARAMETER Experiment Name: At_Drought_Soil_Dry_P Parameter: Plant Line Value: WS
  misc_feature: MA Experiment 20001555 PARAMETER Experiment Name: At_Drought_Soil_Dry_P Parameter: Post Timepoint (hr) Value: None
  misc_feature: MA Experiment 20001555 PARAMETER Experiment Name: At_Drought_Soil_Dry_P Parameter: Post-Treatment Value: None
  misc_feature: MA Experiment 20001555 PARAMETER Experiment Name: At_Drought_Soil_Dry_P Parameter: Timepoint (day) Value: 10
  misc_feature: MA Experiment 20001555 PARAMETER Experiment Name: At_Drought_Soil_Dry_P Parameter: Treatment Value: Drought vs. No Drought
  misc_feature: MA Experiment ID: 20001557 Result: Down-regulated in Transcription
  misc_feature: MA Experiment 20001557 PARAMETER Experiment Name: At_Drought_Soil_Dry_P Parameter: Age (day) Value: 27
  misc_feature: MA Experiment 20001557 PARAMETER Experiment Name: At_Drought_Soil_Dry_P Parameter: Organism Value: A. thaliana
  misc_feature: MA Experiment 20001557 PARAMETER Experiment Name: At_Drought_Soil_Dry_P Parameter: Plant Line Value: WS
  misc_feature: MA Experiment 20001557 PARAMETER Experiment Name: At_Drought_Soil_Dry_P Parameter: Post Timepoint (hr) Value: 3
  misc_feature: MA Experiment 20001557 PARAMETER Experiment Name: At_Drought_Soil_Dry_P Parameter: Post-Treatment Value: Re-Water vs. No Drought
  misc_feature: MA Experiment 20001557 PARAMETER Experiment Name: At_Drought_Soil_Dry_P Parameter: Timepoint (day) Value: 13
  misc_feature: MA Experiment 20001557 PARAMETER Experiment Name: At_Drought_Soil_Dry_P Parameter: Treatment Value: Drought vs. No Drought
  misc_feature: MA Experiment ID: 20001558 Result: Down-regulated in Transcription
  misc_feature: MA Experiment 20001558 PARAMETER Experiment Name: At_Drought_Soil_Dry_P Parameter: Age (day) Value: 27
  misc_feature: MA Experiment 20001558 PARAMETER Experiment Name: At_Drought_Soil_Dry_P Parameter: Organism Value: A. thaliana
  misc_feature: MA Experiment 20001558 PARAMETER Experiment Name: At_Drought_Soil_Dry_P Parameter: Plant Line Value: WS
  misc_feature: MA Experiment 20001558 PARAMETER Experiment Name: At_Drought_Soil_Dry_P Parameter: Post Timepoint (hr) Value: 6
  misc_feature: MA Experiment 20001558 PARAMETER Experiment Name: At_Drought_Soil_Dry_P Parameter: Post-Treatment Value: Re-Water vs. No Drought
  misc_feature: MA Experiment 20001558 PARAMETER Experiment Name: At_Drought_Soil_Dry_P Parameter: Timepoint (day) Value: 13
  misc_feature: MA Experiment 20001558 PARAMETER Experiment Name: At_Drought_Soil_Dry_P Parameter: Treatment Value: Drought vs. No Drought
  misc_feature: MA Experiment ID: 20001560 Result: Up-regulated in Transcription
  misc_feature: MA Experiment 20001560 PARAMETER Experiment Name: At_Drought_Soil_Dry_P Parameter: Age (day) Value: 28
  misc_feature: MA Experiment 20001560 PARAMETER Experiment Name: At_Drought_Soil_Dry_P Parameter: Organism Value: A. thaliana
  misc_feature: MA Experiment 20001560 PARAMETER Experiment Name: At_Drought_Soil_Dry_P Parameter: Plant Line Value: WS
  misc_feature: MA Experiment 20001560 PARAMETER Experiment Name: At_Drought_Soil_Dry_P Parameter: Post Timepoint (hr) Value: None
  misc_feature: MA Experiment 20001560 PARAMETER Experiment Name: At_Drought_Soil_Dry_P Parameter: Post-Treatment Value: None
  misc_feature: MA Experiment 20001560 PARAMETER Experiment Name: At_Drought_Soil_Dry_P Parameter: Timepoint (day) Value: 14
  misc_feature: MA Experiment 20001560 PARAMETER Experiment Name: At_Drought_Soil_Dry_P Parameter: Treatment Value: Drought vs. No Drought
  misc_feature: MA Experiment ID: 20001772 Result: Down-regulated in Transcription
  misc_feature: MA Experiment 20001772 PARAMETER Experiment Name: At_Far-red-enriched-adult_P Parameter: Age (day) Value: 29
  misc_feature: MA Experiment 20001772 PARAMETER Experiment Name: At_Far-red-enriched-adult_P Parameter: Light Value: Far-red enriched vs. White
  misc_feature: MA Experiment 20001772 PARAMETER Experiment Name: At_Far-red-enriched-adult_P Parameter: Organism Value: A. thaliana
  misc_feature: MA Experiment 20001772 PARAMETER Experiment Name: At_Far-red-enriched-adult_P Parameter: Plant Line Value: Columbia
  misc_feature: MA Experiment 20001772 PARAMETER Experiment Name: At_Far-red-enriched-adult_P Parameter: Timepoint (hr) Value: 24
  misc_feature: MA Experiment 20001772 PARAMETER Experiment Name: At_Far-red-enriched-adult_P Parameter: Tissue Value: Aerial
  misc_feature: MA Experiment ID: 20001773 Result: Up-regulated in Transcription
  misc_feature: MA Experiment 20001773 PARAMETER Experiment Name: At_Far-red-enriched-adult_P Parameter: Age (day) Value: 30
  misc_feature: MA Experiment 20001773 PARAMETER Experiment Name: At_Far-red-enriched-adult_P Parameter: Light Value: Far-red enriched vs. White
  misc_feature: MA Experiment 20001773 PARAMETER Experiment Name: At_Far-red-enriched-adult_P Parameter: Organism Value: A. thaliana
  misc_feature: MA Experiment 20001773 PARAMETER Experiment Name: At_Far-red-enriched-adult_P Parameter: Plant Line Value: Columbia
  misc_feature: MA Experiment 20001773 PARAMETER Experiment Name: At_Far-red-enriched-adult_P Parameter: Timepoint (hr) Value: 48
  misc_feature: MA Experiment 20001773 PARAMETER Experiment Name: At_Far-red-enriched-adult_P Parameter: Tissue Value: Aerial
  misc_feature: MA Experiment ID: 20001904 Result: Up-regulated in Transcription
  misc_feature: MA Experiment 20001904 PARAMETER Experiment Name: At_Drought_Reproduction_P Parameter: Age (day) Value: 37
  misc_feature: MA Experiment 20001904 PARAMETER Experiment Name: At_Drought_Reproduction_P Parameter: Organism Value: A. thaliana
  misc_feature: MA Experiment 20001904 PARAMETER Experiment Name: At_Drought_Reproduction_P Parameter: Plant Line Value: WS
  misc_feature: MA Experiment 20001904 PARAMETER Experiment Name: At_Drought_Reproduction_P Parameter: Timepoint (day) Value: 7
  misc_feature: MA Experiment 20001904 PARAMETER Experiment Name: At_Drought_Reproduction_P Parameter: Tissue Value: Rosettes
  misc_feature: MA Experiment 20001904 PARAMETER Experiment Name: At_Drought_Reproduction_P Parameter: Treatment Value: Drought vs. No Drought
  misc_feature: MA Experiment ID: 20001906 Result: Up-regulated in Transcription
  misc_feature: MA Experiment 20001906 PARAMETER Experiment Name: At_Drought_Reproduction_P Parameter: Age (day) Value: 35
  misc_feature: MA Experiment 20001906 PARAMETER Experiment Name: At_Drought_Reproduction_P Parameter: Organism Value: A. thaliana
  misc_feature: MA Experiment 20001906 PARAMETER Experiment Name: At_Drought_Reproduction_P Parameter: Plant Line Value: WS
  misc_feature: MA Experiment 20001906 PARAMETER Experiment Name: At_Drought_Reproduction_P Parameter: Timepoint (day) Value: 5
  misc_feature: MA Experiment 20001906 PARAMETER Experiment Name: At_Drought_Reproduction_P Parameter: Tissue Value: Siliques
  misc_feature: MA Experiment 20001906 PARAMETER Experiment Name: At_Drought_Reproduction_P Parameter: Treatment Value: Drought vs. No Drought
aaaccatatgaatctcacgatcaaagataatatctcatcatctatatagtatttgtctcgatattagagacgtacacactttgtttatactcaaatcaatatgggatctttcgtgaaagaagaaacgtcgtcgttgatgacagattttttggagaagtgcggtggttatgaggtggtggatggagggtttgcgacggagctacagcgccacggagctgatatcaatgatccaatttggagtgctaagtgccttattacttctcctcaccttgttacaaaggtgcacttggattaccttgaatctggagcaaatatcatcataacagcatcttaccaggcgacgatacaaggttttgtggcaaaaggtctatcggtgggagaagcagaaaatttacttagaaggagcgttgaaatcacgtacgaggcacgtgagattttctacaacagatggaccaagggttcatgggatttcgcctatgctggaaaagcttcccggagaccgattcttgtcgcagcttccgttggtagctatggagcttatctcgctgacggctccgaatacagtgggatatatggagattctgtgagtaaggagacattaaaggatttccatagaagaagagttcaaatcttagcaaaatctggagccgacctaatagcattcgagactattccaaataagctcgaagcagaggcttatgcggatcttcttgaggaggaagatatcgatattccggcatggttctcgttcacttccaaggacggagtcagtgtgccacgaggagattcagttgtagaatgtgcgaaagtggcagattcatgcaagaacgtggtggccattggaatcaattgtactgcaccaagatacattcatgctttaattatctccttgcgccagatgacacgcaaacccatcgttgtatacccaaacagcggggaagtctacgacggtctgaacaagaaatggattaagtcagagggagagtcagaggaggattttgtgtcgtacgtgagtaaatggagagatgcaggagcttctctgtttggaggatgttgtcggactactccaaacaccatcagagccattgctaaagttctctccgacgaaccttctgcagcatcaaaacccaaattcgggcaatagacttgtcaacggtgaatttctatgcttgtgatgtcaggaaggagtttaaaatgtacaataacgcaagcgtagttctgtaatctactaatatgttgaaactataaataatggtaaactatgttagagacaactgtgtaattagcgtatgataataatggagtttaaacgataatttgatgttatagtaagcatatttttact

SEQ ID NO: 23549 - protein, 347 aa, Arabidopsis thaliana
  peptide (1)..(347): Ceres Seq. ID no. 12325218
  misc_feature (23)..(335): Pfam Name: Homocysteine S-methyltransferase Pfam Description: Homocysteine S-methyltransferase
  misc_feature (16)..(206): Homolog of NCBI NO: 34909958 NR Description: putative homocysteine S-methyltransferase-4
  misc_feature (8)..(335): Homolog of NCBI NO: 10732791 NR Description: homocysteine S-methyltransferase-4 [Zea mays]
  misc_feature (16)..(334): Homolog of NCBI NO: 10732789 NR Description: homocysteine S-methyltransferase-3 [Zea mays]
  misc_feature (7)..(333): Homolog of NCBI NO: 37534456 NR Description: putative homocysteine S-methyltransferase-2
  misc_feature (16)..(343): Homolog of NCBI NO: 10732787 NR Description: homocysteine S-methyltransferase-2 [Zea mays]
  misc_feature (9)..(342): Homolog of NCBI NO: 6094303 NR Description: Selenocysteine methyltransferase
  misc_feature (13)..(338): Homolog of NCBI NO: 25453566 NR Description: homocysteine S-methyltransferase (EC 2.1.1.10)
  misc_feature (13)..(338): Homolog of NCBI NO: 15229396 NR Description: homocysteine S-methyltransferase AtHMT-2
  misc_feature (1)..(347): Homolog of NCBI NO: 18403505 NR Description: putative selenocysteine methyltransferase
  misc_feature (1)..(347): Homolog of NCBI NO: 21593147 NR Description: putative selenocysteine methyltransferase
MGSFVKEETSSLMTDFLEKCGGYEVVDGGFATELQRHGADINDPIWSAKCLITSPHLVTKVHLDYLESGANIIITASYQATIQGFVAKGLSVGEAENLLRRSVEITYEAREIFYNRWTKGSWDFAYAGKASRRPILVAASVGSYGAYLADGSEYSGIYGDSVSKETLKDFHRRRVQILAKSGADLIAFETIPNKLEAEAYADLLEEEDIDIPAWFSFTSKDGVSVPRGDSVVECAKVADSCKNVVAIGINCTAPRYIHALIISLRQMTRKPIVVYPNSGEVYDGLNKKWIKSEGESEEDFVSYVSKWRDAGASLFGGCCRTTPNTIRAIAKVLSDEPSAASKPKFGQ

SEQ ID NO: 23550 - protein, 335 aa, Arabidopsis thaliana
  peptide (1)..(335): Ceres Seq. ID no. 12325219
  misc_feature (11)..(323): Pfam Name: Homocysteine S-methyltransferase Pfam Description: Homocysteine S-methyltransferase
  misc_feature (4)..(194): Homolog of NCBI NO: 34909958 NR Description: putative homocysteine S-methyltransferase-4
  misc_feature (1)..(323): Homolog of NCBI NO: 10732791 NR Description: homocysteine S-methyltransferase-4 [Zea mays]
  misc_feature (4)..(322): Homolog of NCBI NO: 10732789 NR Description: homocysteine S-methyltransferase-3 [Zea mays]
  misc_feature (1)..(321): Homolog of NCBI NO: 37534456 NR Description: putative homocysteine S-methyltransferase-2
  misc_feature (4)..(331): Homolog of NCBI NO: 10732787 NR Description: homocysteine S-methyltransferase-2 [Zea mays]
  misc_feature (1)..(330): Homolog of NCBI NO: 6094303 NR Description: Selenocysteine methyltransferase
  misc_feature (1)..(326): Homolog of NCBI NO: 25453566 NR Description: homocysteine S-methyltransferase (EC 2.1.1.10)
  misc_feature (1)..(326): Homolog of NCBI NO: 15229396 NR Description: homocysteine S-methyltransferase AtHMT-2
  misc_feature (1)..(335): Homolog of NCBI NO: 18403505 NR Description: putative selenocysteine methyltransferase
  misc_feature (1)..(335): Homolog of NCBI NO: 21593147 NR Description: putative selenocysteine methyltransferase
MTDFLEKCGGYEVVDGGFATELQRHGADINDPIWSAKCLITSPHLVTKVHLDYLESGANIIITASYQATIQGFVAKGLSVGEAENLLRRSVEITYEAREIFYNRWTKGSWDFAYAGKASRRPILVAASVGSYGAYLADGSEYSGIYGDSVSKETLKDFHRRRVQILAKSGADLIAFETIPNKLEAEAYADLLEEEDIDIPAWFSFTSKDGVSVPRGDSVVECAKVADSCKNVVAIGINCTAPRYIHALIISLRQMTRKPIVVYPNSGEVYDGLNKKWIKSEGESEEDFVSYVSKWRDAGASLFGGCCRTTPNTIRAIAKVLSDEPSAASKPKFGQ

SEQ ID NO: 23551 - DNA, 1162 bp, Arabidopsis thaliana
  misc_feature (1)..(1162): Ceres Seq. ID no. 12394737
  misc_feature: MA Experiment ID: 108573 Result: Up-regulated in Transcription
  misc_feature: MA Experiment 108573 PARAMETER Experiment Name: At_Drought_cDNA_P Parameter: Timepoint (hr) Value: 6
  misc_feature: MA Experiment 108573 PARAMETER Experiment Name: At_Drought_cDNA_P Parameter: Tissue Value: Aerial
  misc_feature: MA Experiment 108573 PARAMETER Experiment Name: At_Drought_cDNA_P Parameter: Treatment Value: Drought vs. No Drought
  misc_feature: MA Experiment ID: 108595 Result: Down-regulated in Transcription
  misc_feature: MA Experiment 108595 PARAMETER Experiment Name: At_Ler-pi_Ovule_cDNA_P Parameter: Plant Line Value: null
  misc_feature: MA Experiment ID: 20001451 Result: Down-regulated in Transcription
  misc_feature: MA Experiment 20001451 PARAMETER Experiment Name: At_Far-red-induction_P Parameter: Age (day) Value: 7
  misc_feature: MA Experiment 20001451 PARAMETER Experiment Name: At_Far-red-induction_P Parameter: Light Value: Far-red vs. White
  misc_feature: MA Experiment 20001451 PARAMETER Experiment Name: At_Far-red-induction_P Parameter: Organism Value: A. thaliana
  misc_feature: MA Experiment 20001451 PARAMETER Experiment Name: At_Far-red-induction_P Parameter: Plant Line Value: Columbia
  misc_feature: MA Experiment 20001451 PARAMETER Experiment Name: At_Far-red-induction_P Parameter: Timepoint (hr) Value: 24
  misc_feature: MA Experiment 20001451 PARAMETER Experiment Name: At_Far-red-induction_P Parameter: Tissue Value: Whole Plant
gtgttttctagtgttgcagaaaatggcaactactagtactactacaaagctctccgttctctgctgctctttcatttcatctcctctcgttgactctcctccttctctcgccttcttctctccgattccacgattcctcactgtccgaatcgcgactagctttagatcgagctctaggtttccggccaccaaaatccgcaagtcttcactcgccgccgtgatgtttccggaaaattcggttttatcagatgtctgcgcgtttggagtcactagcatcgttgcgttctcgtgcctcggtttctggggagagattggcaaacgtggcatcttcgaccagaaactcatccggaagcttgtgcatataaatattgggctagtttttatgctttgctggccgctgttcagttctggaatccaaggagcacttttcgcatctcttgtacctggactcaatatagtaaggatgctattgctggggcttggagtgtaccacgacgaaggaacaatcaagtcaatgagcagacatggagatcgcagggaactacttaaggggccgctttactatgtactgtcaatcacatcagcctgcatctactattggaaatcatccccgatcgcgattgcggtgatatgcaacctttgcgcaggagatggtatggctgacattgtgggtcggcggtttggaacagagaagcttccttacaacaaaaacaaatcatttgctggtagcattggaatggccaccgccgggtttctagcatctgttgggtatatgtactactttgcttcatttggttacatcgaggatagcgggggaatgattcttcgtttcctcgtcatctctatagcatcagctcttgtggaatcactcccaataagcaccgacattgacgacaatctcaccatttccttaacctctgccttggccggattcttactcttctaataataccctctcgttgttatgtatcatcaaataaagggtcgagcttgattgctgatatggaggtaaaactgcattcattgttcccatcttcttctgtatgtacgtattagtgaaacatctcatattgttgttgtccacaaatcttatttttcagctgcaattgcagttgggtacaatgttgtaatgttctatccattagtgagacatatgatgacg

SEQ ID NO: 23552 - protein, 314 aa, Arabidopsis thaliana
  peptide (1)..(314): Ceres Seq. ID no. 12394738
  misc_feature (113)..(313): Homolog of NCBI NO: 21226333 NR Description: hypothetical protein [Methanosarcina mazei Goe1]
  misc_feature (68)..(312): Homolog of NCBI NO: 21674801 NR Description: conserved hypothetical protein [Chlorobium
  misc_feature (118)..(308): Homolog of NCBI NO: 28850457 NR Description: similar to Oryza sativa (japonica
  misc_feature (62)..(314): Homolog of NCBI NO: 21537252 NR Description: unknown [Arabidopsis thaliana]
  misc_feature (62)..(314): Homolog of NCBI NO: 28393229 NR Description: unknown protein [Arabidopsis thaliana]
  misc_feature (62)..(314): Homolog of NCBI NO: 15238184 NR Description: putative protein
  misc_feature (66)..(314): Homolog of NCBI NO: 34907982 NR Description: P0446G04.23 [Oryza sativa (japonica
  misc_feature (8)..(279): Homolog of NCBI NO: 8843778 NR Description: emb|CAB85555.1~gene_id:MZN1.2~similar to unknown
  misc_feature (8)..(314): Homolog of NCBI NO: 15237702 NR Description: putative protein
  misc_feature (8)..(314): Homolog of NCBI NO: 21593148 NR Description: unknown [Arabidopsis thaliana]
CFLVLQKMATTSTTTKLSVLCCSFISSPLVDSPPSLAFFSPIPRFLTVRIATSFRSSSRFPATKIRKSSLAAVMFPENSVLSDVCAFGVTSIVAFSCLGFWGEIGKRGIFDQKLIRKLVHINIGLVFMLCWPLFSSGIQGALFASLVPGLNIVRMLLLGLGVYHDEGTIKSMSRHGDRRELLKGPLYYVLSITSACIYYWKSSPIAIAVICNLCAGDGMADIVGRRFGTEKLPYNKNKSFAGSIGMATAGFLASVGYMYYFASFGYIEDSGGMILRFLVISIASALVESLPISTDIDDNLTISLTSALAGFLLF

SEQ ID NO: 23553 - protein, 307 aa, Arabidopsis thaliana
  peptide (1)..(307): Ceres Seq. ID no. 12394739
  misc_feature (106)..(306): Homolog of NCBI NO: 21226333 NR Description: hypothetical protein [Methanosarcina mazei Goe1]
  misc_feature (61)..(305): Homolog of NCBI NO: 21674801 NR Description: conserved hypothetical protein [Chlorobium
  misc_feature (111)..(301): Homolog of NCBI NO: 28850457 NR Description: similar to Oryza sativa (japonica
  misc_feature (55)..(307): Homolog of NCBI NO: 21537252 NR Description: unknown [Arabidopsis thaliana]
  misc_feature (55)..(307): Homolog of NCBI NO: 28393229 NR Description: unknown protein [Arabidopsis thaliana]
  misc_feature (55)..(307): Homolog of NCBI NO: 15238184 NR Description: putative protein
  misc_feature (59)..(307): Homolog of NCBI NO: 34907982 NR Description: P0446G04.23 [Oryza sativa (japonica
  misc_feature (1)..(272): Homolog of NCBI NO: 8843778 NR Description: emb|CAB85555.1~gene_id:MZN1.2~similar to unknown
  misc_feature (1)..(307): Homolog of NCBI NO: 15237702 NR Description: putative protein
  misc_feature (1)..(307): Homolog of NCBI NO: 21593148 NR Description: unknown [Arabidopsis thaliana]
MATTSTTTKLSVLCCSFISSPLVDSPPSLAFFSPIPRFLTVRIATSFRSSSRFPATKIRKSSLAAVMFPENSVLSDVCAFGVTSIVAFSCLGFWGEIGKRGIFDQKLIRKLVHINIGLVFMLCWPLFSSGIQGALFASLVPGLNIVRMLLLGLGVYHDEGTIKSMSRHGDRRELLKGPLYYVLSITSACIYYWKSSPIAIAVICNLCAGDGMADIVGRRFGTEKLPYNKNKSFAGSIGMATAGFLASVGYMYYFASFGYIEDSGGMILRFLVISIASALVESLPISTDIDDNLTISLTSALAGFLLF

SEQ ID NO: 23554 - protein, 241 aa, Arabidopsis thaliana
  peptide (1)..(241): Ceres Seq. ID no. 12394740
  misc_feature (40)..(240): Homolog of NCBI NO: 21226333 NR Description: hypothetical protein [Methanosarcina mazei Goe1]
  misc_feature (1)..(239): Homolog of NCBI NO: 21674801 NR Description: conserved hypothetical protein [Chlorobium
  misc_feature (45)..(235): Homolog of NCBI NO: 28850457 NR Description: similar to Oryza sativa (japonica
  misc_feature (1)..(241): Homolog of NCBI NO: 21537252 NR Description: unknown [Arabidopsis thaliana]
  misc_feature (1)..(241): Homolog of NCBI NO: 28393229 NR Description: unknown protein [Arabidopsis thaliana]
  misc_feature (1)..(241): Homolog of NCBI NO: 15238184 NR Description: putative protein
  misc_feature (1)..(241): Homolog of NCBI NO: 34907982 NR Description: P0446G04.23 [Oryza sativa (japonica
  misc_feature (1)..(206): Homolog of NCBI NO: 8843778 NR Description: emb|CAB85555.1~gene_id:MZN1.2~similar to unknown
  misc_feature (1)..(241): Homolog of NCBI NO: 15237702 NR Description: putative protein
  misc_feature (1)..(241): Homolog of NCBI NO: 21593148 NR Description: unknown [Arabidopsis thaliana]
MFPENSVLSDVCAFGVTSIVAFSCLGFWGEIGKRGIFDQKLIRKLVHINIGLVFMLCWPLFSSGIQGALFASLVPGLNIVRMLLLGLGVYHDEGTIKSMSRHGDRRELLKGPLYYVLSITSACIYYWKSSPIAIAVICNLCAGDGMADIVGRRFGTEKLPYNKNKSFAGSIGMATAGFLASVGYMYYFASFGYIEDSGGMILRFLVISIASALVESLPISTDIDDNLTISLTSALAGFLLF

SEQ ID NO: 23555 - DNA, 915 bp, Arabidopsis thaliana
  misc_feature (1)..(915): Ceres Seq. ID no. 12340210
  misc_feature: MA Experiment ID: 108462 Result: Up-regulated in Transcription
  misc_feature: MA Experiment 108462 PARAMETER Experiment Name: At_Germinating_Seeds_cDNA_P Parameter: Age (day) Value: 2 vs. 0
  misc_feature: MA Experiment 108462 PARAMETER Experiment Name: At_Germinating_Seeds_cDNA_P Parameter: Tissue Value: Germinating Seeds
  misc_feature: MA Experiment ID: 108464 Result: Up-regulated in Transcription
  misc_feature: MA Experiment 108464 PARAMETER Experiment Name: At_Germinating_Seeds_cDNA_P Parameter: Age (day) Value: 4 vs. 0
  misc_feature: MA Experiment 108464 PARAMETER Experiment Name: At_Germinating_Seeds_cDNA_P Parameter: Tissue Value: Germinating Seeds
  misc_feature: MA Experiment ID: 108488 Result: Down-regulated in Transcription
  misc_feature: MA Experiment ID: 108595 Result: Down-regulated in Transcription
  misc_feature: MA Experiment 108595 PARAMETER Experiment Name: At_Ler-pi_Ovule_cDNA_P Parameter: Plant Line Value: null
  misc_feature: MA Experiment ID: 20000224 Result: Down-regulated in Transcription
  misc_feature: MA Experiment ID: 20000227 Result: Up-regulated in Transcription
  misc_feature: MA Experiment 20000227 PARAMETER Experiment Name: At_Root-Tips-vs-Tops_P Parameter: Tissue Value: Root Tips vs. Root Tops
  misc_feature: MA Experiment ID: 20000234 Result: Down-regulated in Transcription
  misc_feature: MA Experiment 20000234 PARAMETER Experiment Name: At_Siliques_P Parameter: Age (day) Value: 21
  misc_feature: MA Experiment 20000234 PARAMETER Experiment Name: At_Siliques_P Parameter: Organism Value: A. thaliana
  misc_feature: MA Experiment 20000234 PARAMETER Experiment Name: At_Siliques_P Parameter: Plant Line Value: WS
  misc_feature: MA Experiment 20000234 PARAMETER Experiment Name: At_Siliques_P Parameter: Tissue Value: Less Than 5mm Siliques vs. Whole Plant
  misc_feature: MA Experiment ID: 20001248 Result: Up-regulated in Transcription
  misc_feature: MA Experiment 20001248 PARAMETER Experiment Name: At_Far-red-induction_P Parameter: Age (day) Value: 7
  misc_feature: MA Experiment 20001248 PARAMETER Experiment Name: At_Far-red-induction_P Parameter: Light Value: Far-red vs. White
  misc_feature: MA Experiment 20001248 PARAMETER Experiment Name: At_Far-red-induction_P Parameter: Organism Value: A. thaliana
  misc_feature: MA Experiment 20001248 PARAMETER Experiment Name: At_Far-red-induction_P Parameter: Plant Line Value: Columbia
  misc_feature: MA Experiment 20001248 PARAMETER Experiment Name: At_Far-red-induction_P Parameter: Timepoint (hr) Value: 4
  misc_feature: MA Experiment 20001248 PARAMETER Experiment Name: At_Far-red-induction_P Parameter: Tissue Value: Whole Plant
  misc_feature: MA Experiment ID: 20001450 Result: Up-regulated in Transcription
  misc_feature: MA Experiment 20001450 PARAMETER Experiment Name: At_Far-red-induction_P Parameter: Age (day) Value: 7
  misc_feature: MA Experiment 20001450 PARAMETER Experiment Name: At_Far-red-induction_P Parameter: Light Value: Far-red vs. White
  misc_feature: MA Experiment 20001450 PARAMETER Experiment Name: At_Far-red-induction_P Parameter: Organism Value: A. thaliana
  misc_feature: MA Experiment 20001450 PARAMETER Experiment Name: At_Far-red-induction_P Parameter: Plant Line Value: Columbia
  misc_feature: MA Experiment 20001450 PARAMETER Experiment Name: At_Far-red-induction_P Parameter: Timepoint (hr) Value: 8
  misc_feature: MA Experiment 20001450 PARAMETER Experiment Name: At_Far-red-induction_P Parameter: Tissue Value: Whole Plant
  misc_feature: MA Experiment ID: 20001451 Result: Up-regulated in Transcription
  misc_feature: MA Experiment 20001451 PARAMETER Experiment Name: At_Far-red-induction_P Parameter: Age (day) Value: 7
  misc_feature: MA Experiment 20001451 PARAMETER Experiment Name: At_Far-red-induction_P Parameter: Light Value: Far-red vs. White
  misc_feature: MA Experiment 20001451 PARAMETER Experiment Name: At_Far-red-induction_P Parameter: Organism Value: A. thaliana
  misc_feature: MA Experiment 20001451 PARAMETER Experiment Name: At_Far-red-induction_P Parameter: Plant Line Value: Columbia
  misc_feature: MA Experiment 20001451 PARAMETER Experiment Name: At_Far-red-induction_P Parameter: Timepoint (hr) Value: 24
  misc_feature: MA Experiment 20001451 PARAMETER Experiment Name: At_Far-red-induction_P Parameter: Tissue Value: Whole Plant
gttctcgtcatcgtcttaaagaaggaattcgatttttcgcctgaacctgcggatttttcgattcttcaaattcaatgtcttatgcttatcttttcaagtatatcatcatcggcgatactggagtggggaaatcatgtcttctgcttcagttcaccgacaagaggttcggtgcatgaccttaccattggtgttgaatttggggctaggatgatcaccatcgataacaaacctatcaagcttcagatctgggatacggctggtcaagaatcctttaggtctattacaaggtcatactatagaggagctgcaggggcattgcttgtctatgatatcacaaagagggagacatttaaccatctagctagctggctagaagatgcaaggcagcatgcaaatgcaaatatgacgataatgctcattgggaataagtgtgatcttgctcacagaagggcagtgagtacagaggaaggagagcagtttgcaaaggagcacggtcttatattcatggaggcctctgccaagactgctcagaatgttgaggaggcattcattaagacagctgcaacaatatacaagaagattcaagatggtgtgtttgatgtgtcaaatgagtcatatggaatcaaagttggatatggaggaattccaggaccatcaggtggaagagatggatcaacctcgcaaggaggagggtgctgcggctgagatgggaaaaatatgtctatatcattatgtaaaaatgatcattatgtaaaaatgatcacatatgatatagcaaaaatgtctctgcttctttctatagttgtaaatcgttttggaattcgatttggtgactgttgtggttggttttggaacggtttgacaatacacgtgtatgcctattcatatatctaaaagttaagatgtgttttgcgc

SEQ ID NO: 23556 - protein, 234 aa, Arabidopsis thaliana
  peptide (1)..(234): Ceres Seq. ID no. 12340211
  misc_feature (57)..(192): Pfam Name: Ras family Pfam Description: Ras family
  misc_feature (57)..(233): Homolog of NCBI NO: 1370176 NR Description: RAB2A [Lotus japonicus]
  misc_feature (57)..(233): Homolog of NCBI NO: 16755592 NR Description: small GTPase Rab2 [Nicotiana tabacum]
  misc_feature (57)..(231): Homolog of NCBI NO: 7438379 NR Description: GTP-binding protein RAB2A - Arabidopsis thaliana
  misc_feature (57)..(234): Homolog of NCBI NO: 15235981 NR Description: GTP-binding protein (At-RAB2); protein id:
VLVIVLKKEFDFSPEPADFSILQIQCLMLIFSSISSSAILEWGNHVFCFSSPTRGSVHDLTIGVEFGARMITIDNKPIKLQIWDTAGQESFRSITRSYYRGAAGALLVYDITKRETFNHLASWLEDARQHANANMTIMLIGNKCDLAHRRAVSTEEGEQFAKEHGLIFMEASAKTAQNVEEAFIKTAATIYKKIQDGVFDVSNESYGIKVGYGGIPGPSGGRDGSTSQGGGCCG

SEQ ID NO: 23557 - protein, 207 aa, Arabidopsis thaliana
  peptide (1)..(207): Ceres Seq. ID no. 12340212
  misc_feature (30)..(165): Pfam Name: Ras family Pfam Description: Ras family
  misc_feature (30)..(206): Homolog of NCBI NO: 1370176 NR Description: RAB2A [Lotus japonicus]
  misc_feature (30)..(206): Homolog of NCBI NO: 16755592 NR Description: small GTPase Rab2 [Nicotiana tabacum]
  misc_feature (30)..(204): Homolog of NCBI NO: 7438379 NR Description: GTP-binding protein RAB2A - Arabidopsis thaliana
  misc_feature (30)..(207): Homolog of NCBI NO: 15235981 NR Description: GTP-binding protein (At-RAB2); protein id:
MLIFSSISSSAILEWGNHVFCFSSPTRGSVHDLTIGVEFGARMITIDNKPIKLQIWDTAGQESFRSITRSYYRGAAGALLVYDITKRETFNHLASWLEDARQHANANMTIMLIGNKCDLAHRRAVSTEEGEQFAKEHGLIFMEASAKTAQNVEEAFIKTAATIYKKIQDGVFDVSNESYGIKVGYGGIPGPSGGRDGSTSQGGGCCG

SEQ ID NO: 23558 - protein, 165 aa, Arabidopsis thaliana
  peptide (1)..(165): Ceres Seq. ID no. 12340213
  misc_feature (1)..(123): Pfam Name: Ras family Pfam Description: Ras family
  misc_feature (1)..(164): Homolog of NCBI NO: 1370176 NR Description: RAB2A [Lotus japonicus]
  misc_feature (1)..(164): Homolog of NCBI NO: 16755592 NR Description: small GTPase Rab2 [Nicotiana tabacum]
  misc_feature (1)..(162): Homolog of NCBI NO: 7438379 NR Description: GTP-binding protein RAB2A - Arabidopsis thaliana
  misc_feature (1)..(165): Homolog of NCBI NO: 15235981 NR Description: GTP-binding protein (At-RAB2); protein id:
MITIDNKPIKLQIWDTAGQESFRSITRSYYRGAAGALLVYDITKRETFNHLASWLEDARQHANANMTIMLIGNKCDLAHRRAVSTEEGEQFAKEHGLIFMEASAKTAQNVEEAFIKTAATIYKKIQDGVFDVSNESYGIKVGYGGIPGPSGGRDGSTSQGGGCCG

SEQ ID NO: 23559 - DNA, 1464 bp, Arabidopsis thaliana
  misc_feature (1)..(1464): Ceres Seq. ID no. 13486723
  misc_feature: MA Experiment ID: 108434 Result: Up-regulated in Transcription
  misc_feature: MA Experiment 108434 PARAMETER Experiment Name: At_Root_Tips_cDNA_P Parameter: Tissue Value: Root Tips
  misc_feature: MA Experiment ID: 20000180 Result: Down-regulated in Transcription
  misc_feature: MA Experiment 20000180 PARAMETER Experiment Name: At_Germinating_Seeds_P Parameter: Age (hr) Value: 24 vs. 0
  misc_feature: MA Experiment 20000180 PARAMETER Experiment Name: At_Germinating_Seeds_P Parameter: Tissue Value: Germinating Seeds
  misc_feature: MA Experiment ID: 20000234 Result: Up-regulated in Transcription
  misc_feature: MA Experiment 20000234 PARAMETER Experiment Name: At_Siliques_P Parameter: Age (day) Value: 21
  misc_feature: MA Experiment 20000234 PARAMETER Experiment Name: At_Siliques_P Parameter: Organism Value: A. thaliana
  misc_feature: MA Experiment 20000234 PARAMETER Experiment Name: At_Siliques_P Parameter: Plant Line Value: WS
  misc_feature: MA Experiment 20000234 PARAMETER Experiment Name: At_Siliques_P Parameter: Tissue Value: Less Than 5mm Siliques vs. Whole Plant
aagatttatattcaaattataaatatatactaaaacgctaaaaaattaagtacatgctataatcttttccattatttttctaacaaaagaaagttatatatgggctaaacttagaaggaaagcccaagaggccaagactatataaagattcatgacccgagtttaagatccgatttcagaatttgggactaaaggaggacaacgacaagcgccgggaaaaaatcgagagcgacaacaatggcgccttcttcgtcgagcggtctcacgttcaagctacatcctctggtgatgcttaacatatccgatcacttcactagggttaaaactcagcttaatcctcccgccgcttcttgcgccaccgggaatggctccaacaacgccgacgcgatgttactgcaaaaccctagggtttatggctgcgtcatcggtctccagagaggtcgtacggttgagatcttcaacagtttcgagctgatattcgatcctgctcttgatactctcgacagatccttcctcgagaagaagcaagaactctataagaaggtgttccctgacttctacgtattgggatggtattctacgggaagtgacgctaccgaatctgatatgcatatccacaaagctctgatggacattaatgaatctcctgtgtatgttcttttaaatcctgctatcaatcatgcacagaaggatcttcctgtgactatctacgaaagcgaatttcatgtcattgatggaattcctcagtcgattttcgtgcataccagctacacaattgagacagttgaagctgaaagaatatctgttgatcatgttgcacatcttaagccatctgatggaggctcagctgcgactcagttggctgctcatcttactggaatacatagtgccatcaagatgcttaatagcagaatcagagtgctataccagcatattgtcgctatgcagaaaggtgataaaccttgtgagaactcagttctgagacaagtatctagtctgctcagaagtttgcctgccgcagaatcagagaagttcaatgaaaatttcttgatggagtacaacgacaaattgctgatgtcttacctagcaatgatcacgaattgtaccagcaacatgaacgaggtggttgacaaattcaacactgcatacgacaaacacagccgaagaggtggtaggactgcgttcatgtaaagattagtttcaatgtaaaaaaaccttttctttcttttggtggtctggtccctaagtgaaaatttagaactcttttaaggcatttcacttttcggaaccaaacaaacagctaggaagcttttcttctgtttaagctttgtctagacagaagctaagtttaggcctaactaaattttgcgacaagactgtaaaaacaaaacagcttttaccttctctcaatttttcatttattcaaaaatttgagcaatcagtgaacaaagagatttgtttcat

SEQ ID NO: 23560 - protein, 317 aa, Arabidopsis thaliana
  peptide (1)..(317): Ceres Seq. ID no. 13486724
  misc_feature (6)..(136): Pfam Name: Mov34/MPN/PAD-1 family Pfam Description: Mov34/MPN/PAD-1 family
  misc_feature (95)..(317): Homolog of NCBI NO: 28393281 NR Description: putative COP9 complex subunit 6 CSN6 [Arabidopsis
  misc_feature (95)..(317): Homolog of NCBI NO: 19347926 NR Description: unknown protein [Arabidopsis thaliana]
  misc_feature (240)..(317): Homolog of NCBI NO: 9758401 NR Description: transcription factor-like
  misc_feature (1)..(229): Homolog of NCBI NO: 9758401 NR Description: transcription factor-like
  misc_feature (240)..(317): Homolog of NCBI NO: 7486780 NR Description: hypothetical protein M3E9.140 - Arabidopsis
  misc_feature (1)..(229): Homolog of NCBI NO: 7486780 NR Description: hypothetical protein M3E9.140 - Arabidopsis
  misc_feature (1)..(317): Homolog of NCBI NO: 18056665 NR Description: CSN complex subunit 6A [Arabidopsis thaliana]
  misc_feature (1)..(317): Homolog of NCBI NO: 18423847 NR Description: COP9 complex subunit 6 CSN6, putative
  misc_feature (1)..(317): Homolog of NCBI NO: 17940314 NR Description: COP9 signalosome subunit 6 [Arabidopsis thaliana]
  misc_feature (1)..(317): Homolog of NCBI NO: 18416749 NR Description: COP9 signalosome subunit 6 (CSN6B), CSN complex
MAPSSSSGLTFKLHPLVMLNISDHFTRVKTQLNPPAASCATGNGSNNADAMLLQNPRVYGCVIGLQRGRTVEIFNSFELIFDPALDTLDRSFLEKKQELYKKVFPDFYVLGWYSTGSDATESDMHIHKALMDINESPVYVLLNPAINHAQKDLPVTIYESEFHVIDGIPQSIFVHTSYTIETVEAERISVDHVAHLKPSDGGSAATQLAAHLTGIHSAIKMLNSRIRVLYQHIVAMQKGDKPCENSVLRQVSSLLRSLPAAESEKFNENFLMEYNDKLLMSYLAMITNCTSNMNEVVDKFNTAYDKHSRRGGRTAFM

SEQ ID NO: 23561 - protein, 300 aa, Arabidopsis thaliana
  peptide (1)..(300): Ceres Seq. ID no. 13486725
  misc_feature (1)..(119): Pfam Name: Mov34/MPN/PAD-1 family Pfam Description: Mov34/MPN/PAD-1 family
  misc_feature (78)..(300): Homolog of NCBI NO: 28393281 NR Description: putative COP9 complex subunit 6 CSN6 [Arabidopsis
  misc_feature (78)..(300): Homolog of NCBI NO: 19347926 NR Description: unknown protein [Arabidopsis thaliana]
  misc_feature (223)..(300): Homolog of NCBI NO: 9758401 NR Description: transcription factor-like
  misc_feature (1)..(212): Homolog of NCBI NO: 9758401 NR Description: transcription factor-like
  misc_feature (223)..(300): Homolog of NCBI NO: 7486780 NR Description: hypothetical protein M3E9.140 - Arabidopsis
  misc_feature (1)..(212): Homolog of NCBI NO: 7486780 NR Description: hypothetical protein M3E9.140 - Arabidopsis
  misc_feature (1)..(300): Homolog of NCBI NO: 18056665 NR Description: CSN complex subunit 6A [Arabidopsis thaliana]
  misc_feature (1)..(300): Homolog of NCBI NO: 18423847 NR Description: COP9 complex subunit 6 CSN6, putative
  misc_feature (1)..(300): Homolog of NCBI NO: 17940314 NR Description: COP9 signalosome subunit 6 [Arabidopsis thaliana]
  misc_feature (1)..(300): Homolog of NCBI NO: 18416749 NR Description: COP9 signalosome subunit 6 (CSN6B), CSN complex
MLNISDHFTRVKTQLNPPAASCATGNGSNNADAMLLQNPRVYGCVIGLQRGRTVEIFNSFELIFDPALDTLDRSFLEKKQELYKKVFPDFYVLGWYSTGSDATESDMHIHKALMDINESPVYVLLNPAINHAQKDLPVTIYESEFHVIDGIPQSIFVHTSYTIETVEAERISVDHVAHLKPSDGGSAATQLAAHLTGIHSAIKMLNSRIRVLYQHIVAMQKGDKPCENSVLRQVSSLLRSLPAAESEKFNENFLMEYNDKLLMSYLAMITNCTSNMNEVVDKFNTAYDKHSRRGGRTAFM

SEQ ID NO: 23562 - protein, 267 aa, Arabidopsis thaliana
  peptide (1)..(267): Ceres Seq. ID no. 13486726
  misc_feature (1)..(86): Pfam Name: Mov34/MPN/PAD-1 family Pfam Description: Mov34/MPN/PAD-1 family
  misc_feature (1)..(179): Homolog of NCBI NO: 7486780 NR Description: hypothetical protein M3E9.140 - Arabidopsis
  misc_feature (1)..(267): Homolog of NCBI NO: 18056665 NR Description: CSN complex subunit 6A [Arabidopsis thaliana]
  misc_feature (1)..(267): Homolog of NCBI NO: 18423847 NR Description: COP9 complex subunit 6 CSN6, putative
  misc_feature (45)..(267): Homolog of NCBI NO: 19347926 NR Description: unknown protein [Arabidopsis thaliana]
  misc_feature (1)..(179): Homolog of NCBI NO: 9758401 NR Description: transcription factor-like
  misc_feature (190)..(267): Homolog of NCBI NO: 7486780 NR Description: hypothetical protein M3E9.140 - Arabidopsis
  misc_feature (190)..(267): Homolog of NCBI NO: 9758401 NR Description: transcription factor-like
  misc_feature (45)..(267): Homolog of NCBI NO: 28393281 NR Description: putative COP9 complex subunit 6 CSN6 [Arabidopsis
  misc_feature (1)..(267): Homolog of NCBI NO: 17940314 NR Description: COP9 signalosome subunit 6 [Arabidopsis thaliana]
  misc_feature (1)..(267): Homolog of NCBI NO: 18416749 NR Description: COP9 signalosome subunit 6 (CSN6B), CSN complex
MLLQNPRVYGCVIGLQRGRTVEIFNSFELIFDPALDTLDRSFLEKKQELYKKVFPDFYVLGWYSTGSDATESDMHIHKALMDINESPVYVLLNPAINHAQKDLPVTIYESEFHVIDGIPQSIFVHTSYTIETVEAERISVDHVAHLKPSDGGSAATQLAAHLTGIHSAIKMLNSRIRVLYQHIVAMQKGDKPCENSVLRQVSSLLRSLPAAESEKFNENFLMEYNDKLLMSYLAMITNCTSNMNEVVDKFNTAYDKHSRRGGRTAFM

SEQ ID NO: 23563 - DNA, 1259 bp, Arabidopsis thaliana
  misc_feature (1)..(1259): Ceres Seq. ID no. 12393078
  misc_feature: MA Experiment ID: 108573 Result: Up-regulated in Transcription
  misc_feature: MA Experiment 108573 PARAMETER Experiment Name: At_Drought_cDNA_P Parameter: Timepoint (hr) Value: 6
  misc_feature: MA Experiment 108573 PARAMETER Experiment Name: At_Drought_cDNA_P Parameter: Tissue Value: Aerial
  misc_feature: MA Experiment 108573 PARAMETER Experiment Name: At_Drought_cDNA_P Parameter: Treatment Value: Drought vs. No Drought
  misc_feature: MA Experiment ID: 108577 Result: Down-regulated in Transcription
  misc_feature: MA Experiment 108577 PARAMETER Experiment Name: At_42deg_Heat_cDNA_P Parameter: Temperature (deg C) Value: 42 vs. 22
  misc_feature: MA Experiment 108577 PARAMETER Experiment Name: At_42deg_Heat_cDNA_P Parameter: Timepoint (hr) Value: 6
  misc_feature: MA Experiment 108577 PARAMETER Experiment Name: At_42deg_Heat_cDNA_P Parameter: Tissue Value: Aerial
  misc_feature: MA Experiment ID: 108595 Result: Down-regulated in Transcription
  misc_feature: MA Experiment 108595 PARAMETER Experiment Name: At_Ler-pi_Ovule_cDNA_P Parameter: Plant Line Value: null
  misc_feature: MA Experiment ID: 20000224 Result: Down-regulated in Transcription
  misc_feature: MA Experiment ID: 20001248 Result: Up-regulated in Transcription
  misc_feature: MA Experiment 20001248 PARAMETER Experiment Name: At_Far-red-induction_P Parameter: Age (day) Value: 7
  misc_feature: MA Experiment 20001248 PARAMETER Experiment Name: At_Far-red-induction_P Parameter: Light Value: Far-red vs. White
  misc_feature: MA Experiment 20001248 PARAMETER Experiment Name: At_Far-red-induction_P Parameter: Organism Value: A. thaliana
  misc_feature: MA Experiment 20001248 PARAMETER Experiment Name: At_Far-red-induction_P Parameter: Plant Line Value: Columbia
  misc_feature: MA Experiment 20001248 PARAMETER Experiment Name: At_Far-red-induction_P Parameter: Timepoint (hr) Value: 4
  misc_feature: MA Experiment 20001248 PARAMETER Experiment Name: At_Far-red-induction_P Parameter: Tissue Value: Whole Plant
aaacaaaaccaaagacgagccagagccacctctaacaccatcggcgacttctcctcctactcctccgtcgccgacgtgttcgatttacaacgattcggtggctattggttgtaagatttagaattaaaggttaaaggagacgacgacgagagatgccgttaaacggagatctcgaccgtcagatcgaacagctaatggagtgtaagccgttaggtgaagcagacgtgaagatcctttgcgatcaagctaaagcgattcttgttgaggaatataatgttcaaccggttaagtgtccggttacggtatgcggcgatatccatggccagttttatgacctaattgagctatttcgtattggtggtaatgctcctgatactaattacctcttcatgggagattatgtagatcgtggctactattctgtagaaacagtctctctattggtggcattaaaggtgcgttacagggacagacttacgatcctgcgagggaatcatgagagccgtcagattacacaagtctatggtttttatgacgaatgcttgaggaaatacggaaatgcaaatgtgtggaagtattttacggaccttttcgattatctccctcttacagcactcatagagagtcaggttttctgtttgcatggaggcctttcaccttctctggatactcttgacaatatccgaagcttggatcgaatacaagaggttccacacgaaggaccaatgtgcgatctactctggtctgatcccgacgatcgttgtggatggggaatatctcctcgtggtgctggttacacgtttggacaggacattgctactcagtttaatcataacaatggactgagtctgatctcaagagcgcatcaacttgtaatggaaggctataattggtgtcaggaaaagaacgtagtgacagtgtttagtgcaccgaactactgttacagatgtggaaacatggccgcaattcttgagattggagaaaagatggaacagaacttccttcaattcgatccagcacctagacaagtcgaacccgataccacgcgcaagacccctgattattttttgtgatttcattttttttcttccaaagtttgtttgttgctgtatcattgtagatgtgtctgttttattttgttttttcgagtctctagatggaatgtgataccaaagacgaaaaacccatcatttttttgttgatgttgatactgaaacaggtttgtagaagcctcttcttattatagaaaatgtcttttg

SEQ ID NO: 23564 - protein, 306 aa, Arabidopsis thaliana
  peptide (1)..(306): Ceres Seq. ID no. 12393079
  misc_feature (47)..(242): Pfam Name: Calcineurin-like phosphoesterase Pfam Description: Calcineurin-like phosphoesterase
  misc_feature (1)..(306): Homolog of NCBI NO: 11134285 NR Description: Serine/threonine protein phosphatase PP2A-1
  misc_feature (1)..(306): Homolog of NCBI NO: 11134222 NR Description: Serine/threonine protein phosphatase PP2A-3
  misc_feature (1)..(306): Homolog of NCBI NO: 7248361 NR Description: type 2A protein phosphatase-2 [Vicia faba]
  misc_feature (1)..(306): Homolog of NCBI NO: 11133825 NR Description: Serine/threonine protein phosphatase PP2A
  misc_feature (1)..(306): Homolog of NCBI NO: 10638985 NR Description: protein phosphatase 2A [Fagus sylvatica]
  misc_feature (2)..(306): Homolog of NCBI NO: 15222511 NR Description: serine/threonine protein phosphatase type 2A
  misc_feature (1)..(306): Homolog of NCBI NO: 7248359 NR Description: type 2A protein phosphatase-1 [Vicia faba]
  misc_feature (1)..(306): Homolog of NCBI NO: 15218524 NR Description: serine/threonine protein phosphatase, PP2A
  misc_feature (1)..(306): Homolog of NCBI NO: 21593150 NR Description: serine/threonine protein phosphatase type 2A,
  misc_feature (1)..(306): Homolog of NCBI NO: 15218928 NR Description: serine/threonine protein phosphatase PP2A
MPLNGDLDRQIEQLMECKPLGEADVKILCDQAKAILVEEYNVQPVKCPVTVCGDIHGQFYDLIELFRIGGNAPDTNYLFMGDYVDRGYYSVETVSLLVALKVRYRDRLTILRGNHESRQITQVYGFYDECLRKYGNANVWKYFTDLFDYLPLTALIESQVFCLHGGLSPSLDTLDNIRSLDRIQEVPHEGPMCDLLWSDPDDRCGWGISPRGAGYTFGQDIATQFNHNNGLSLISRAHQLVMEGYNWCQEKNVVTVFSAPNYCYRCGNMAAILEIGEKMEQNFLQFDPAPRQVEPDTTRKTPDYFL

SEQ ID NO: 23565 - protein, 292 aa, Arabidopsis thaliana
  peptide (1)..(292): Ceres Seq. ID no. 12393080
  misc_feature (33)..(228): Pfam Name: Calcineurin-like phosphoesterase Pfam Description: Calcineurin-like phosphoesterase
  misc_feature (1)..(292): Homolog of NCBI NO: 11134285 NR Description: Serine/threonine protein phosphatase PP2A-1
  misc_feature (1)..(292): Homolog of NCBI NO: 11134222 NR Description: Serine/threonine protein phosphatase PP2A-3
  misc_feature (1)..(292): Homolog of NCBI NO: 7248361 NR Description: type 2A protein phosphatase-2 [Vicia faba]
  misc_feature (1)..(292): Homolog of NCBI NO: 11133825 NR Description: Serine/threonine protein phosphatase PP2A
  misc_feature (1)..(292): Homolog of NCBI NO: 10638985 NR Description: protein phosphatase 2A [Fagus sylvatica]
  misc_feature (1)..(292): Homolog of NCBI NO: 15222511 NR Description: serine/threonine protein phosphatase type 2A
  misc_feature (1)..(292): Homolog of NCBI NO: 7248359 NR Description: type 2A protein phosphatase-1 [Vicia faba]
  misc_feature (1)..(292): Homolog of NCBI NO: 15218524 NR Description: serine/threonine protein phosphatase, PP2A
  misc_feature (1)..(292): Homolog of NCBI NO: 21593150 NR Description: serine/threonine protein phosphatase type 2A,
  misc_feature (1)..(292): Homolog of NCBI NO: 15218928 NR Description: serine/threonine protein phosphatase PP2A
MECKPLGEADVKILCDQAKAILVEEYNVQPVKCPVTVCGDIHGQFYDLIELFRIGGNAPDTNYLFMGDYVDRGYYSVETVSLLVALKVRYRDRLTILRGNHESRQITQVYGFYDECLRKYGNANVWKYFTDLFDYLPLTALIESQVFCLHGGLSPSLDTLDNIRSLDRIQEVPHEGPMCDLLWSDPDDRCGWGISPRGAGYTFGQDIATQFNHNNGLSLISRAHQLVMEGYNWCQEKNVVTVFSAPNYCYRCGNMAAILEIGEKMEQNFLQFDPAPRQVEPDTTRKTPDYFL

SEQ ID NO: 23566 - protein, 227 aa, Arabidopsis thaliana
  peptide (1)..(227): Ceres Seq. ID no. 12393081
  misc_feature (1)..(163): Pfam Name: Calcineurin-like phosphoesterase Pfam Description: Calcineurin-like phosphoesterase
  misc_feature (1)..(227): Homolog of NCBI NO: 11134285 NR Description: Serine/threonine protein phosphatase PP2A-1
  misc_feature (1)..(227): Homolog of NCBI NO: 11134222 NR Description: Serine/threonine protein phosphatase PP2A-3
  misc_feature (1)..(227): Homolog of NCBI NO: 7248361 NR Description: type 2A protein phosphatase-2 [Vicia faba]
  misc_feature (1)..(227): Homolog of NCBI NO: 11133825 NR Description: Serine/threonine protein phosphatase PP2A
  misc_feature (1)..(227): Homolog of NCBI NO: 10638985 NR Description: protein phosphatase 2A [Fagus sylvatica]
  misc_feature (1)..(227): Homolog of NCBI NO: 15222511 NR Description: serine/threonine protein phosphatase type 2A
  misc_feature (1)..(227): Homolog of NCBI NO: 7248359 NR Description: type 2A protein phosphatase-1 [Vicia faba]
  misc_feature (1)..(227): Homolog of NCBI NO: 15218524 NR Description: serine/threonine protein phosphatase, PP2A
  misc_feature (1)..(227): Homolog of NCBI NO: 21593150 NR Description: serine/threonine protein phosphatase type 2A,
  misc_feature (1)..(227): Homolog of NCBI NO: 15218928 NR Description: serine/threonine protein phosphatase PP2A
MGDYVDRGYYSVETVSLLVALKVRYRDRLTILRGNHESRQITQVYGFYDECLRKYGNANVWKYFTDLFDYLPLTALIESQVFCLHGGLSPSLDTLDNIRSLDRIQEVPHEGPMCDLLWSDPDDRCGWGISPRGAGYTFGQDIATQFNHNNGLSLISRAHQLVMEGYNWCQEKNVVTVFSAPNYCYRCGNMAAILEIGEKMEQNFLQFDPAPRQVEPDTTRKTPDYFL

SEQ ID NO: 23567 - DNA, 2120 bp, Arabidopsis thaliana
  misc_feature (1)..(2120): Ceres Seq. ID no. 13491655
  misc_feature: MA Experiment ID: 108434 Result: Down-regulated in Transcription
  misc_feature: MA Experiment 108434 PARAMETER Experiment Name: At_Root_Tips_cDNA_P Parameter: Tissue Value: Root Tips
  misc_feature: MA Experiment ID: 108488 Result: Down-regulated in Transcription
  misc_feature: MA Experiment ID: 108489 Result: Up-regulated in Transcription
  misc_feature: MA Experiment ID: 108573 Result: Up-regulated in Transcription
  misc_feature: MA Experiment 108573 PARAMETER Experiment Name: At_Drought_cDNA_P Parameter: Timepoint (hr) Value: 6
  misc_feature: MA Experiment 108573 PARAMETER Experiment Name: At_Drought_cDNA_P Parameter: Tissue Value: Aerial
  misc_feature: MA Experiment 108573 PARAMETER Experiment Name: At_Drought_cDNA_P Parameter: Treatment Value: Drought vs. No Drought
  misc_feature: MA Experiment ID: 108605 Result: Up-regulated in Transcription
  misc_feature: MA Experiment 108605 PARAMETER Experiment Name: At_100uM_ABA_cDNA_P Parameter: Timepoint (hr) Value: 6
  misc_feature: MA Experiment 108605 PARAMETER Experiment Name: At_100uM_ABA_cDNA_P Parameter: Tissue Value: Aerial
  misc_feature: MA Experiment 108605 PARAMETER Experiment Name: At_100uM_ABA_cDNA_P Parameter: Treatment Value: 100uM ABA vs. No Treatment
  misc_feature: MA Experiment ID: 108607 Result: Up-regulated in Transcription
  misc_feature: MA Experiment 108607 PARAMETER Experiment Name: At_100uM_ABA_cDNA_P Parameter: Timepoint (hr) Value: 4
  misc_feature: MA Experiment 108607 PARAMETER Experiment Name: At_100uM_ABA_cDNA_P Parameter: Tissue Value: Aerial
  misc_feature: MA Experiment 108607 PARAMETER Experiment Name: At_100uM_ABA_cDNA_P Parameter: Treatment Value: 100uM ABA vs. No Treatment
  misc_feature: MA Experiment ID: 20000070 Result: Up-regulated in Transcription
  misc_feature: MA Experiment 20000070 PARAMETER Experiment Name: At_100uM_ABA_Mutants_cDNA_P Parameter: Plant Line Value: CS24
  misc_feature: MA Experiment 20000070 PARAMETER Experiment Name: At_100uM_ABA_Mutants_cDNA_P Parameter: Timepoint (hr) Value: 6
  misc_feature: MA Experiment 20000070 PARAMETER Experiment Name: At_100uM_ABA_Mutants_cDNA_P Parameter: Tissue Value: Aerial
  misc_feature: MA Experiment 20000070 PARAMETER Experiment Name: At_100uM_ABA_Mutants_cDNA_P Parameter: Treatment Value: 100uM ABA vs. No Treatment
  misc_feature: MA Experiment ID: 20000072 Result: Up-regulated in Transcription
  misc_feature: MA Experiment 20000072 PARAMETER Experiment Name: At_100uM_ABA_Mutants_cDNA_P Parameter: Plant Line Value: CS8105
  misc_feature: MA Experiment 20000072 PARAMETER Experiment Name: At_100uM_ABA_Mutants_cDNA_P Parameter: Timepoint (hr) Value: 6
  misc_feature: MA Experiment 20000072 PARAMETER Experiment Name: At_100uM_ABA_Mutants_cDNA_P Parameter: Tissue Value: Aerial
  misc_feature: MA Experiment 20000072 PARAMETER Experiment Name: At_100uM_ABA_Mutants_cDNA_P Parameter: Treatment Value: 100uM ABA vs. No Treatment
  misc_feature: MA Experiment ID: 20000087 Result: Up-regulated in Transcription
  misc_feature: MA Experiment 20000087 PARAMETER Experiment Name: At_100uM_ABA_Mutants_cDNA_P Parameter: Plant Line Value: WS
  misc_feature: MA Experiment 20000087 PARAMETER Experiment Name: At_100uM_ABA_Mutants_cDNA_P Parameter: Timepoint (hr) Value: 6
  misc_feature: MA Experiment 20000087 PARAMETER Experiment Name: At_100uM_ABA_Mutants_cDNA_P Parameter: Tissue Value: Aerial
  misc_feature: MA Experiment 20000087 PARAMETER Experiment Name: At_100uM_ABA_Mutants_cDNA_P Parameter: Treatment Value: 100uM ABA vs. No Treatment
  misc_feature: MA Experiment ID: 20000088 Result: Up-regulated in Transcription
  misc_feature: MA Experiment 20000088 PARAMETER Experiment Name: At_100uM_ABA_Mutants_cDNA_P Parameter: Plant Line Value: Landsberg
  misc_feature: MA Experiment 20000088 PARAMETER Experiment Name: At_100uM_ABA_Mutants_cDNA_P Parameter: Timepoint (hr) Value: 6
  misc_feature: MA Experiment 20000088 PARAMETER Experiment Name: At_100uM_ABA_Mutants_cDNA_P Parameter: Tissue Value: Aerial
  misc_feature: MA Experiment 20000088 PARAMETER Experiment Name: At_100uM_ABA_Mutants_cDNA_P Parameter: Treatment Value: 100uM ABA vs. No Treatment
  misc_feature: MA Experiment ID: 20000117 Result: Up-regulated in Transcription
  misc_feature: MA Experiment 20000117 PARAMETER Experiment Name: At_100uM_ABA_Mutants_cDNA_P Parameter: Plant Line Value: Columbia
  misc_feature: MA Experiment 20000117 PARAMETER Experiment Name: At_100uM_ABA_Mutants_cDNA_P Parameter: Timepoint (hr) Value: 6
  misc_feature: MA Experiment 20000117 PARAMETER Experiment Name: At_100uM_ABA_Mutants_cDNA_P Parameter: Tissue Value: Aerial
  misc_feature: MA Experiment 20000117 PARAMETER Experiment Name: At_100uM_ABA_Mutants_cDNA_P Parameter: Treatment Value: 100uM ABA vs. No Treatment
  misc_feature: MA Experiment ID: 20000173 Result: Down-regulated in Transcription
  misc_feature: MA Experiment 20000173 PARAMETER Experiment Name: At_42deg_Heat_P Parameter: Age (day) Value: 14
  misc_feature: MA Experiment 20000173 PARAMETER Experiment Name: At_42deg_Heat_P Parameter: Organism Value: A. thaliana
  misc_feature: MA Experiment 20000173 PARAMETER Experiment Name: At_42deg_Heat_P Parameter: Plant Line Value: WS
  misc_feature: MA Experiment 20000173 PARAMETER Experiment Name: At_42deg_Heat_P Parameter: Temperature (deg C) Value: 42 vs. 22
  misc_feature: MA Experiment 20000173 PARAMETER Experiment Name: At_42deg_Heat_P Parameter: Timepoint (hr) Value: 6
  misc_feature: MA Experiment 20000173 PARAMETER Experiment Name: At_42deg_Heat_P Parameter: Tissue Value: Aerial
  misc_feature: MA Experiment ID: 20000184 Result: Down-regulated in Transcription
  misc_feature: MA Experiment 20000184 PARAMETER Experiment Name: At_Shoots__P Parameter: Age (day) Value: 7
  misc_feature: MA Experiment 20000184 PARAMETER Experiment Name: At_Shoots__P Parameter: Tissue Value: Shoots vs. Whole Plant
  misc_feature: MA Experiment ID: 20000185 Result: Down-regulated in Transcription
  misc_feature: MA Experiment 20000185 PARAMETER Experiment Name: At_Roots__P Parameter: Age (day) Value: 7 vs. 21
  misc_feature: MA Experiment 20000185 PARAMETER Experiment Name: At_Roots__P Parameter: Organism Value: A. thaliana
  misc_feature: MA Experiment 20000185 PARAMETER Experiment Name: At_Roots__P Parameter: Tissue Value: Roots vs. Whole Plant
  misc_feature: MA Experiment ID: 20000227 Result: Up-regulated in Transcription
  misc_feature: MA Experiment 20000227 PARAMETER Experiment Name: At_Root-Tips-vs-Tops_P Parameter: Tissue Value: Root Tips vs. Root Tops
  misc_feature: MA Experiment ID: 20000234 Result: Up-regulated in Transcription
  misc_feature: MA Experiment 20000234 PARAMETER Experiment Name: At_Siliques_P Parameter: Age (day) Value: 21
  misc_feature: MA Experiment 20000234 PARAMETER Experiment Name: At_Siliques_P Parameter: Organism Value: A. thaliana
  misc_feature: MA Experiment 20000234 PARAMETER Experiment Name: At_Siliques_P Parameter: Plant Line Value: WS
  misc_feature: MA Experiment 20000234 PARAMETER Experiment Name: At_Siliques_P Parameter: Tissue Value: Less Than 5mm Siliques vs. Whole Plant
  misc_feature: MA Experiment ID: 20000235 Result: Up-regulated in Transcription
  misc_feature: MA Experiment 20000235 PARAMETER Experiment Name: At_Siliques_P Parameter: Age (day) Value: 21
  misc_feature: MA Experiment 20000235 PARAMETER Experiment Name: At_Siliques_P Parameter: Organism Value: A. thaliana
  misc_feature: MA Experiment 20000235 PARAMETER Experiment Name: At_Siliques_P Parameter: Plant Line Value: WS
  misc_feature: MA Experiment 20000235 PARAMETER Experiment Name: At_Siliques_P Parameter: Tissue Value: 5-10mm Siliques vs. Whole Plant
  misc_feature: MA Experiment ID: 20000438 Result: Down-regulated in Transcription
  misc_feature: MA Experiment 20000438 PARAMETER Experiment Name: At_Shoots__P Parameter: Age (day) Value: 14
  misc_feature: MA Experiment 20000438 PARAMETER Experiment Name: At_Shoots__P Parameter: Tissue Value: Shoots vs. Whole Plant
  misc_feature: MA Experiment ID: 20000439 Result: Down-regulated in Transcription
  misc_feature: MA Experiment 20000439 PARAMETER Experiment Name: At_Roots__P Parameter: Age (day) Value: 14 vs. 21
  misc_feature: MA Experiment 20000439 PARAMETER Experiment Name: At_Roots__P Parameter: Organism Value: A. thaliana
  misc_feature: MA Experiment 20000439 PARAMETER Experiment Name: At_Roots__P Parameter: Tissue Value: Roots vs. Whole Plant
  misc_feature: MA Experiment ID: 20001248 Result: Up-regulated in Transcription
  misc_feature: MA Experiment 20001248 PARAMETER Experiment Name: At_Far-red-induction_P Parameter: Age (day) Value: 7
  misc_feature: MA Experiment 20001248 PARAMETER Experiment Name: At_Far-red-induction_P Parameter: Light Value: Far-red vs. White
  misc_feature: MA Experiment 20001248 PARAMETER Experiment Name: At_Far-red-induction_P Parameter: Organism Value: A. thaliana
  misc_feature: MA Experiment 20001248 PARAMETER Experiment Name: At_Far-red-induction_P Parameter: Plant Line Value: Columbia
  misc_feature: MA Experiment 20001248 PARAMETER Experiment Name: At_Far-red-induction_P Parameter: Timepoint (hr) Value: 4
  misc_feature: MA Experiment 20001248 PARAMETER Experiment Name: At_Far-red-induction_P Parameter: Tissue Value: Whole Plant
  misc_feature: MA Experiment ID: 20001557 Result: Up-regulated in Transcription
  misc_feature: MA Experiment 20001557 PARAMETER Experiment Name: At_Drought_Soil_Dry_P Parameter: Age (day) Value: 27
  misc_feature: MA Experiment 20001557 PARAMETER Experiment Name: At_Drought_Soil_Dry_P Parameter: Organism Value: A. thaliana
  misc_feature: MA Experiment 20001557 PARAMETER Experiment Name: At_Drought_Soil_Dry_P Parameter: Plant Line Value: WS
  misc_feature: MA Experiment 20001557 PARAMETER Experiment Name: At_Drought_Soil_Dry_P Parameter: Post Timepoint (hr) Value: 3
  misc_feature: MA Experiment 20001557 PARAMETER Experiment Name: At_Drought_Soil_Dry_P Parameter: Post-Treatment Value: Re-Water vs. No Drought
  misc_feature: MA Experiment 20001557 PARAMETER Experiment Name: At_Drought_Soil_Dry_P Parameter: Timepoint (day) Value: 13
  misc_feature: MA Experiment 20001557 PARAMETER Experiment Name: At_Drought_Soil_Dry_P Parameter: Treatment Value: Drought vs. No Drought
  misc_feature: MA Experiment ID: 20001905 Result: Down-regulated in Transcription
  misc_feature: MA Experiment 20001905 PARAMETER Experiment Name: At_Drought_Reproduction_P Parameter: Age (day) Value: 40
  misc_feature: MA Experiment 20001905 PARAMETER Experiment Name: At_Drought_Reproduction_P Parameter: Organism Value: A. thaliana
  misc_feature: MA Experiment 20001905 PARAMETER Experiment Name: At_Drought_Reproduction_P Parameter: Plant Line Value: WS
  misc_feature: MA Experiment 20001905 PARAMETER Experiment Name: At_Drought_Reproduction_P Parameter: Timepoint (day) Value: 10
  misc_feature: MA Experiment 20001905 PARAMETER Experiment Name: At_Drought_Reproduction_P Parameter: Tissue Value: Rosettes
  misc_feature: MA Experiment 20001905 PARAMETER Experiment Name: At_Drought_Reproduction_P Parameter: Treatment Value: Drought vs. No Drought
  misc_feature: MA Experiment ID: 20001906 Result: Down-regulated in Transcription
  misc_feature: MA Experiment 20001906 PARAMETER Experiment Name: At_Drought_Reproduction_P Parameter: Age (day) Value: 35
  misc_feature: MA Experiment 20001906 PARAMETER Experiment Name: At_Drought_Reproduction_P Parameter: Organism Value: A. thaliana
  misc_feature: MA Experiment 20001906 PARAMETER Experiment Name: At_Drought_Reproduction_P Parameter: Plant Line Value: WS
  misc_feature: MA Experiment 20001906 PARAMETER Experiment Name: At_Drought_Reproduction_P Parameter: Timepoint (day) Value: 5
  misc_feature: MA Experiment 20001906 PARAMETER Experiment Name: At_Drought_Reproduction_P Parameter: Tissue Value: Siliques
  misc_feature: MA Experiment 20001906 PARAMETER Experiment Name: At_Drought_Reproduction_P Parameter: Treatment Value: Drought vs. No Drought
  misc_feature: MA Experiment ID: 20001908 Result: Down-regulated in Transcription
  misc_feature: MA Experiment 20001908 PARAMETER Experiment Name: At_Drought_Reproduction_P Parameter: Age (day) Value: 40
  misc_feature: MA Experiment 20001908 PARAMETER Experiment Name: At_Drought_Reproduction_P Parameter: Organism Value: A. thaliana
  misc_feature: MA Experiment 20001908 PARAMETER Experiment Name: At_Drought_Reproduction_P Parameter: Plant Line Value: WS
  misc_feature: MA Experiment 20001908 PARAMETER Experiment Name: At_Drought_Reproduction_P Parameter: Timepoint (day) Value: 10
  misc_feature: MA Experiment 20001908 PARAMETER Experiment Name: At_Drought_Reproduction_P Parameter: Tissue Value: Siliques
  misc_feature: MA Experiment 20001908 PARAMETER Experiment Name: At_Drought_Reproduction_P Parameter: Treatment Value: Drought vs. No Drought
gtcgcagaaaacagagattcctcgctgtctgaactgaaaaataagatcgcattaactcaaaactctcacaaagacaaagatcttctcctccttctcttctctttttcacttttctctcttcccctctctcgaagcttgaaaggtaacaacaatggagaaccctccggatcaaacagagtcaaaggagactcttcaacaacccattacaagaagaagaacaaagggtggtcttctcactatgcccttcatcattgcaaacgaggggttcgagaaagtggcgagctatggattattacagaacatgattctttatctgatgagtgattacagattgggacttgttaaaggacaaactgtcttgttcatgtgggttgctgctactaatttcatgcctctcgttggagcttttctctcagattcatatttgggtcgctttctcaccattgtcattgcttctctctccagtctcctggggatggtggttctatggctaacggcgatgttgccgcaagtaaaaccatcaccgtgtgtagcaacagccggaaccaactgcagttccgcgacatcttctcaattggctctcttgtataccgcattcgcattaatatcgattggatcaggaggaatcaggccatgttctttagcctttggtgctgatcaattggacaacaaagagaatcctaagaacgagagagttcttgagagtttctttggttggtactacgcttcttcatcagttgctgtcttgatcgctttcaccgtcattgtttacattcaagatcatctaggatggaaaatcgggtttggaatacccgcgattctcatgctgctcgcgggtttcttgtttgttttcgcgtctcctctctacgttaagcgcgatgtgagcaagagtctgttcactggtttagctcaagtggttgctgcagcttacgtgaagagaaacttaactttgccggatcatcatgactccagagattgttattaccgtttgaaagattctgaactcaaagctccaagtgacaaattgaggtttttaaacaaagcttgtgccataagtaaccgcgatgaagaccttggttctgatggtttggccttaaaccagtggaggctatgcacaacggaccaagttgagaaactcaaggcgttggtcaaggtgataccggtatggtccacggggataatgatgtcgataaacgttagccagaactcttttcagttgcttcaagctaaatcaatggacagacgtttaagcagcaattcgaccttccaaatcccagctggatcgtttggtatgttcacaatcatagccttaatctcatgggttgttctgtacgaccgcgcaattctccctttagcttcaaagatccgaggcagaccagttagagtcaatgtcaagattcgaatgggattagggctattcatatcattcttagcaatggcggtttccgcaactgttgaacattacagaaggaaaaccgcgataagccaaggactcgcaaacgatgccaactcaacagtgagcatctcagcaatgtggcttgtaccacagtatgtactacacggtttagcagaggccttgaccgggataggacagaccgagtttttctataccgagtttcctaaaagcatgtcgagtatcgcagcttcgttgttcggtctaggaatggcagtggctaatatcttggctagtgtgatcctaaatgcggtaaagaatagctcaaagcagggcaatgtgagctggattgaagataacatcaacaagggtcactatgactattactattgggttttagcgatcttgagcttcgttaatgtcatctactacgttgtgtgtagctggtcctatggtcctacggtggatcaggtgaggaatgataaggttaatggtatgagaaaagaagaagaggaagttattaaattaaactaagaccaattggttgatcataattaaatggtgtacgtgtgttataaaatctatatatttgtatgtaattagattatcatatattatggatttgggttttcttaggatgtagcgaatgatgttaattattgggtgtgtttatttcttactacaaaaaagccattgtgtgtatttgattgaagagaatcaaattttc

SEQ ID NO: 23568 - protein, 591 aa, Arabidopsis thaliana
  peptide (1)..(591): Ceres Seq. ID no. 13491656
  misc_feature (95)..(505): Pfam Name: POT family Pfam Description: POT family
  misc_feature (316)..(566): Homolog of NCBI NO: 15239084 NR Description: oligopeptide transporter protein -related
  misc_feature (1)..(591): Homolog of NCBI NO: 15221439 NR Description: peptide transporter -related [Arabidopsis
  misc_feature (6)..(586): Homolog of NCBI NO: 15391731 NR Description: nitrite transporter [Cucumis sativus]
  misc_feature (1)..(293): Homolog of NCBI NO: 21536862 NR Description: unknown [Arabidopsis thaliana]
  misc_feature (12)..(566): Homolog of NCBI NO: 34909752 NR Description: putative peptide transporter
  misc_feature (14)..(590): Homolog of NCBI NO: 34909754 NR Description: putative peptide transporter
  misc_feature (1)..(590): Homolog of NCBI NO: 15218183 NR Description: peptide transporter -related [Arabidopsis
  misc_feature (51)..(591): Homolog of NCBI NO: 9294465 NR Description: peptide/amino acid transporter-like protein
  misc_feature (1)..(579): Homolog of NCBI NO: 20466248 NR Description: putative transport protein [Arabidopsis thaliana]
  misc_feature (1)..(591): Homolog of NCBI NO: 15233307 NR Description: transport protein -related [Arabidopsis thaliana]
MENPPDQTESKETLQQPITRRRTKGGLLTMPFIIANEGFEKVASYGLLQNMILYLMSDYRLGLVKGQTVLFMWVAATNFMPLVGAFLSDSYLGRFLTIVIASLSSLLGMVVLWLTAMLPQVKPSPCVATAGTNCSSATSSQLALLYTAFALISIGSGGIRPCSLAFGADQLDNKENPKNERVLESFFGWYYASSSVAVLIAFTVIVYIQDHLGWKIGFGIPAILMLLAGFLFVFASPLYVKRDVSKSLFTGLAQVVAAAYVKRNLTLPDHHDSRDCYYRLKDSELKAPSDKLRFLNKACAISNRDEDLGSDGLALNQWRLCTTDQVEKLKALVKVIPVWSTGIMMSINVSQNSFQLLQAKSMDRRLSSNSTFQIPAGSFGMFTIIALISWVVLYDRAILPLASKIRGRPVRVNVKIRMGLGLFISFLAMAVSATVEHYRRKTAISQGLANDANSTVSISAMWLVPQYVLHGLAEALTGIGQTEFFYTEFPKSMSSIAASLFGLGMAVANILASVILNAVKNSSKQGNVSWIEDNINKGHYDYYYWVLAILSFVNVIYYVVCSWSYGPTVDQVRNDKVNGMRKEEEEVIKLN

SEQ ID NO: 23569 - protein, 562 aa, Arabidopsis thaliana
  peptide (1)..(562): Ceres Seq. ID no. 13491657
  misc_feature (66)..(476): Pfam Name: POT family Pfam Description: POT family
  misc_feature (287)..(537): Homolog of NCBI NO: 15239084 NR Description: oligopeptide transporter protein -related
  misc_feature (1)..(562): Homolog of NCBI NO: 15221439 NR Description: peptide transporter -related [Arabidopsis
  misc_feature (1)..(557): Homolog of NCBI NO: 15391731 NR Description: nitrite transporter [Cucumis sativus]
  misc_feature (1)..(264): Homolog of NCBI NO: 21536862 NR Description: unknown [Arabidopsis thaliana]
  misc_feature (1)..(537): Homolog of NCBI NO: 34909752 NR Description: putative peptide transporter
  misc_feature (1)..(561): Homolog of NCBI NO: 34909754 NR Description: putative peptide transporter
  misc_feature (1)..(561): Homolog of NCBI NO: 15218183 NR Description: peptide transporter -related [Arabidopsis
  misc_feature (22)..(562): Homolog of NCBI NO: 9294465 NR Description: peptide/amino acid transporter-like protein
  misc_feature (1)..(550): Homolog of NCBI NO: 20466248 NR Description: putative transport protein [Arabidopsis thaliana]
  misc_feature (1)..(562): Homolog of NCBI NO: 15233307 NR Description: transport protein -related [Arabidopsis thaliana]
MPFIIANEGFEKVASYGLLQNMILYLMSDYRLGLVKGQTVLFMWVAATNFMPLVGAFLSDSYLGRFLTIVIASLSSLLGMVVLWLTAMLPQVKPSPCVATAGTNCSSATSSQLALLYTAFALISIGSGGIRPCSLAFGADQLDNKENPKNERVLESFFGWYYASSSVAVLIAFTVIVYIQDHLGWKIGFGIPAILMLLAGFLFVFASPLYVKRDVSKSLFTGLAQVVAAAYVKRNLTLPDHHDSRDCYYRLKDSELKAPSDKLRFLNKACAISNRDEDLGSDGLALNQWRLCTTDQVEKLKALVKVIPVWSTGIMMSINVSQNSFQLLQAKSMDRRLSSNSTFQIPAGSFGMFTIIALISWVVLYDRAILPLASKIRGRPVRVNVKIRMGLGLFISFLAMAVSATVEHYRRKTAISQGLANDANSTVSISAMWLVPQYVLHGLAEALTGIGQTEFFYTEFPKSMSSIAASLFGLGMAVANILASVILNAVKNSSKQGNVSWIEDNINKGHYDYYYWVLAILSFVNVIYYVVCSWSYGPTVDQVRNDKVNGMRKEEEEVIKLN

SEQ ID NO: 23570 - protein, 541 aa, Arabidopsis thaliana
  peptide (1)..(541): Ceres Seq. ID no. 13491658
  misc_feature (45)..(455): Pfam Name: POT family Pfam Description: POT family
  misc_feature (266)..(516): Homolog of NCBI NO: 15239084 NR Description: oligopeptide transporter protein -related
  misc_feature (1)..(541): Homolog of NCBI NO: 15221439 NR Description: peptide transporter -related [Arabidopsis
  misc_feature (1)..(536): Homolog of NCBI NO: 15391731 NR Description: nitrite transporter [Cucumis sativus]
  misc_feature (1)..(243): Homolog of NCBI NO: 21536862 NR Description: unknown [Arabidopsis thaliana]
  misc_feature (1)..(516): Homolog of NCBI NO: 34909752 NR Description: putative peptide transporter
  misc_feature (1)..(540): Homolog of NCBI NO: 34909754 NR Description: putative peptide transporter
  misc_feature (1)..(540): Homolog of NCBI NO: 15218183 NR Description: peptide transporter -related [Arabidopsis
  misc_feature (1)..(541): Homolog of NCBI NO: 9294465 NR Description: peptide/amino acid transporter-like protein
  misc_feature (1)..(529): Homolog of NCBI NO: 20466248 NR Description: putative transport protein [Arabidopsis thaliana]
  misc_feature (1)..(541): Homolog of NCBI NO: 15233307 NR Description: transport protein -related [Arabidopsis thaliana]
MILYLMSDYRLGLVKGQTVLFMWVAATNFMPLVGAFLSDSYLGRFLTIVIASLSSLLGMVVLWLTAMLPQVKPSPCVATAGTNCSSATSSQLALLYTAFALISIGSGGIRPCSLAFGADQLDNKENPKNERVLESFFGWYYASSSVAVLIAFTVIVYIQDHLGWKIGFGIPAILMLLAGFLFVFASPLYVKRDVSKSLFTGLAQVVAAAYVKRNLTLPDHHDSRDCYYRLKDSELKAPSDKLRFLNKACAISNRDEDLGSDGLALNQWRLCTTDQVEKLKALVKVIPVWSTGIMMSINVSQNSFQLLQAKSMDRRLSSNSTFQIPAGSFGMFTIIALISWVVLYDRAILPLASKIRGRPVRVNVKIRMGLGLFISFLAMAVSATVEHYRRKTAISQGLANDANSTVSISAMWLVPQYVLHGLAEALTGIGQTEFFYTEFPKSMSSIAASLFGLGMAVANILASVILNAVKNSSKQGNVSWIEDNINKGHYDYYYWVLAILSFVNVIYYVVCSWSYGPTVDQVRNDKVNGMRKEEEEVIKLN

SEQ ID NO: 23571 - DNA, 1345 bp, Arabidopsis thaliana
  misc_feature (1)..(1345): Ceres Seq. ID no. 12377399
  misc_feature: MA Experiment ID: 20000171 Result: Down-regulated in Transcription
  misc_feature: MA Experiment 20000171 PARAMETER Experiment Name: At_42deg_Heat_P Parameter: Age (day) Value: 14
  misc_feature: MA Experiment 20000171 PARAMETER Experiment Name: At_42deg_Heat_P Parameter: Organism Value: A. thaliana
  misc_feature: MA Experiment 20000171 PARAMETER Experiment Name: At_42deg_Heat_P Parameter: Plant Line Value: WS
  misc_feature: MA Experiment 20000171 PARAMETER Experiment Name: At_42deg_Heat_P Parameter: Temperature (deg C) Value: 42 vs. 22
  misc_feature: MA Experiment 20000171 PARAMETER Experiment Name: At_42deg_Heat_P Parameter: Timepoint (hr) Value: 1
  misc_feature: MA Experiment 20000171 PARAMETER Experiment Name: At_42deg_Heat_P Parameter: Tissue Value: Aerial
  misc_feature: MA Experiment ID: 20000173 Result: Down-regulated in Transcription
  misc_feature: MA Experiment 20000173 PARAMETER Experiment Name: At_42deg_Heat_P Parameter: Age (day) Value: 14
  misc_feature: MA Experiment 20000173 PARAMETER Experiment Name: At_42deg_Heat_P Parameter: Organism Value: A. thaliana
  misc_feature: MA Experiment 20000173 PARAMETER Experiment Name: At_42deg_Heat_P Parameter: Plant Line Value: WS
  misc_feature: MA Experiment 20000173 PARAMETER Experiment Name: At_42deg_Heat_P Parameter: Temperature (deg C) Value: 42 vs. 22
  misc_feature: MA Experiment 20000173 PARAMETER Experiment Name: At_42deg_Heat_P Parameter: Timepoint (hr) Value: 6
  misc_feature: MA Experiment 20000173 PARAMETER Experiment Name: At_42deg_Heat_P Parameter: Tissue Value: Aerial
  misc_feature: MA Experiment ID: 20000179 Result: Up-regulated in Transcription
  misc_feature: MA Experiment 20000179 PARAMETER Experiment Name: At_Germinating_Seeds_P Parameter: Age (hr) Value: 6 vs. 0
  misc_feature: MA Experiment 20000179 PARAMETER Experiment Name: At_Germinating_Seeds_P Parameter: Tissue Value: Germinating Seeds
  misc_feature: MA Experiment ID: 20000182 Result: Down-regulated in Transcription
  misc_feature: MA Experiment 20000182 PARAMETER Experiment Name: At_2mM_SA_P Parameter: Age (day) Value: 14
  misc_feature: MA Experiment 20000182 PARAMETER Experiment Name: At_2mM_SA_P Parameter: Organism Value: A. thaliana
  misc_feature: MA Experiment 20000182 PARAMETER Experiment Name: At_2mM_SA_P Parameter: Plant Line Value: WS
  misc_feature: MA Experiment 20000182 PARAMETER Experiment Name: At_2mM_SA_P Parameter: Timepoint (hr) Value: 6
  misc_feature: MA Experiment 20000182 PARAMETER Experiment Name: At_2mM_SA_P Parameter: Tissue Value: Aerial
  misc_feature: MA Experiment 20000182 PARAMETER Experiment Name: At_2mM_SA_P Parameter: Treatment Value: 2mM SA vs. No Treatment
  misc_feature: MA Experiment ID: 20000184 Result: Up-regulated in Transcription
  misc_feature: MA Experiment 20000184 PARAMETER Experiment Name: At_Shoots__P Parameter: Age (day) Value: 7
  misc_feature: MA Experiment 20000184 PARAMETER Experiment Name: At_Shoots__P Parameter: Tissue Value: Shoots vs. Whole Plant
  misc_feature: MA Experiment ID: 20000185 Result: Down-regulated in Transcription
  misc_feature: MA Experiment 20000185 PARAMETER Experiment Name: At_Roots__P Parameter: Age (day) Value: 7 vs. 21
  misc_feature: MA Experiment 20000185 PARAMETER Experiment Name: At_Roots__P Parameter: Organism Value: A. thaliana
  misc_feature: MA Experiment 20000185 PARAMETER Experiment Name: At_Roots__P Parameter: Tissue Value: Roots vs. Whole Plant
  misc_feature: MA Experiment ID: 20000234 Result: Up-regulated in Transcription
  misc_feature: MA Experiment 20000234 PARAMETER Experiment Name: At_Siliques_P Parameter: Age (day) Value: 21
  misc_feature: MA Experiment 20000234 PARAMETER Experiment Name: At_Siliques_P Parameter: Organism Value: A. thaliana
  misc_feature: MA Experiment 20000234 PARAMETER Experiment Name: At_Siliques_P Parameter: Plant Line Value: WS
  misc_feature: MA Experiment 20000234 PARAMETER Experiment Name: At_Siliques_P Parameter: Tissue Value: Less Than 5mm Siliques vs. Whole Plant
  misc_feature: MA Experiment ID: 20000264 Result: Up-regulated in Transcription
  misc_feature: MA Experiment 20000264 PARAMETER Experiment Name: At_Open_Flower_P Parameter: Age (day) Value: 21
  misc_feature: MA Experiment 20000264 PARAMETER Experiment Name: At_Open_Flower_P Parameter: Plant Line Value: WS
  misc_feature: MA Experiment 20000264 PARAMETER Experiment Name: At_Open_Flower_P Parameter: Tissue Value: Open Flower vs. Whole Plant
  misc_feature: MA Experiment ID: 20000265 Result: Up-regulated in Transcription
  misc_feature: MA Experiment 20000265 PARAMETER Experiment Name: At_Open_Flower_P Parameter: Age (day) Value: 21
  misc_feature: MA Experiment 20000265 PARAMETER Experiment Name: At_Open_Flower_P Parameter: Plant Line Value: WS
  misc_feature: MA Experiment 20000265 PARAMETER Experiment Name: At_Open_Flower_P Parameter: Tissue Value: Closed Flower vs. Whole Plant
  misc_feature: MA Experiment ID: 20000286 Result: Up-regulated in Transcription
  misc_feature: MA Experiment 20000286 PARAMETER Experiment Name: At_Open_Flower_P Parameter: Age (day) Value: 21
  misc_feature: MA Experiment 20000286 PARAMETER Experiment Name: At_Open_Flower_P Parameter: Plant Line Value: WS
  misc_feature: MA Experiment 20000286 PARAMETER Experiment Name: At_Open_Flower_P Parameter: Tissue Value: Half Open vs. Whole Plant
  misc_feature: MA Experiment ID: 20000436 Result: Down-regulated in Transcription
  misc_feature: MA Experiment 20000436 PARAMETER Experiment Name: At_Drought_P Parameter: Age (day) Value: 7
  misc_feature: MA Experiment 20000436 PARAMETER Experiment Name: At_Drought_P Parameter: Organism Value: A. thaliana
  misc_feature: MA Experiment 20000436 PARAMETER Experiment Name: At_Drought_P Parameter: Plant Line Value: WS
  misc_feature: MA Experiment 20000436 PARAMETER Experiment Name: At_Drought_P Parameter: Timepoint (hr) Value: 12
  misc_feature: MA Experiment 20000436 PARAMETER Experiment Name: At_Drought_P Parameter: Tissue Value: Whole Plant
  misc_feature: MA Experiment 20000436 PARAMETER Experiment Name: At_Drought_P Parameter: Treatment Value: Drought vs. No Drought
  misc_feature: MA Experiment ID: 20000437 Result: Down-regulated in Transcription
  misc_feature: MA Experiment 20000437 PARAMETER Experiment Name: At_Drought_P Parameter: Age (day) Value: 8
  misc_feature: MA Experiment 20000437 PARAMETER Experiment Name: At_Drought_P Parameter: Organism Value: A. thaliana
  misc_feature: MA Experiment 20000437 PARAMETER Experiment Name: At_Drought_P Parameter: Plant Line Value: WS
  misc_feature: MA Experiment 20000437 PARAMETER Experiment Name: At_Drought_P Parameter: Timepoint (hr) Value: 24
  misc_feature: MA Experiment 20000437 PARAMETER Experiment Name: At_Drought_P Parameter: Tissue Value: Whole Plant
  misc_feature: MA Experiment 20000437 PARAMETER Experiment Name: At_Drought_P Parameter: Treatment Value: Drought vs. No Drought
  misc_feature: MA Experiment ID: 20000438 Result: Up-regulated in Transcription
  misc_feature: MA Experiment 20000438 PARAMETER Experiment Name: At_Shoots__P Parameter: Age (day) Value: 14
  misc_feature: MA Experiment 20000438 PARAMETER Experiment Name: At_Shoots__P Parameter: Tissue Value: Shoots vs. Whole Plant
  misc_feature: MA Experiment ID: 20000439 Result: Down-regulated in Transcription
  misc_feature: MA Experiment 20000439 PARAMETER Experiment Name: At_Roots__P Parameter: Age (day) Value: 14 vs. 21
  misc_feature: MA Experiment 20000439 PARAMETER Experiment Name: At_Roots__P Parameter: Organism Value: A. thaliana
  misc_feature: MA Experiment 20000439 PARAMETER Experiment Name: At_Roots__P Parameter: Tissue Value: Roots vs. Whole Plant
  misc_feature: MA Experiment ID: 20000445 Result: Down-regulated in Transcription
  misc_feature: MA Experiment 20000445 PARAMETER Experiment Name: At_100uM_NAA__P Parameter: Age (day) Value: 14
  misc_feature: MA Experiment 20000445 PARAMETER Experiment Name: At_100uM_NAA__P Parameter: Organism Value: A. thaliana
  misc_feature: MA Experiment 20000445 PARAMETER Experiment Name: At_100uM_NAA__P Parameter: Plant Line Value: WS
  misc_feature: MA Experiment 20000445 PARAMETER Experiment Name: At_100uM_NAA__P Parameter: Timepoint (hr) Value: 6
  misc_feature: MA Experiment 20000445 PARAMETER Experiment Name: At_100uM_NAA__P Parameter: Tissue Value: Aerial
  misc_feature: MA Experiment 20000445 PARAMETER Experiment Name: At_100uM_NAA__P Parameter: Treatment Value: 100uM NAA vs. No Treatment
  misc_feature: MA Experiment ID: 20000451 Result: Up-regulated in Transcription
  misc_feature: MA Experiment 20000451 PARAMETER Experiment Name: At_CS6879_Shoots-Roots_P Parameter: Age (day) Value: 14
  misc_feature: MA Experiment 20000451 PARAMETER Experiment Name: At_CS6879_Shoots-Roots_P Parameter: Organism Value: A. thaliana
  misc_feature: MA Experiment 20000451 PARAMETER Experiment Name: At_CS6879_Shoots-Roots_P Parameter: Plant Line Value: CS6879 vs. WS
  misc_feature: MA Experiment 20000451 PARAMETER Experiment Name: At_CS6879_Shoots-Roots_P Parameter: Tissue Value: Roots
  misc_feature: MA Experiment ID: 20000453 Result: Down-regulated in Transcription
  misc_feature: MA Experiment 20000453 PARAMETER Experiment Name: At_100uM_ABA_P Parameter: Age (day) Value: 15
  misc_feature: MA Experiment 20000453 PARAMETER Experiment Name: At_100uM_ABA_P Parameter: Organism Value: A. thaliana
  misc_feature: MA Experiment 20000453 PARAMETER Experiment Name: At_100uM_ABA_P Parameter: Plant Line Value: WS
  misc_feature: MA Experiment 20000453 PARAMETER Experiment Name: At_100uM_ABA_P Parameter: Timepoint (hr) Value: 24
  misc_feature: MA Experiment 20000453 PARAMETER Experiment Name: At_100uM_ABA_P Parameter: Tissue Value: Aerial
  misc_feature: MA Experiment 20000453 PARAMETER Experiment Name: At_100uM_ABA_P Parameter: Treatment Value: 100uM ABA vs. No Treatment
  misc_feature: MA Experiment ID: 20000573 Result: Down-regulated in Transcription
  misc_feature: MA Experiment 20000573 PARAMETER Experiment Name: At_100uM_ABA_Mutants__P Parameter: Organism Value: A. thaliana
  misc_feature: MA Experiment 20000573 PARAMETER Experiment Name: At_100uM_ABA_Mutants__P Parameter: Plant Line Value: CS22 vs. Ler wt
  misc_feature: MA Experiment 20000573 PARAMETER Experiment Name: At_100uM_ABA_Mutants__P Parameter: Timepoint (hr) Value: N/A
  misc_feature: MA Experiment 20000573 PARAMETER Experiment Name: At_100uM_ABA_Mutants__P Parameter: Tissue Value: Whole Plant
  misc_feature: MA Experiment 20000573 PARAMETER Experiment Name: At_100uM_ABA_Mutants__P Parameter: Treatment Value: None
  misc_feature: MA Experiment ID: 20000574 Result: Down-regulated in Transcription
  misc_feature: MA Experiment 20000574 PARAMETER Experiment Name: At_100uM_ABA_Mutants__P Parameter: Organism Value: A. thaliana
  misc_feature: MA Experiment 20000574 PARAMETER Experiment Name: At_100uM_ABA_Mutants__P Parameter: Plant Line Value: CS23 vs. Ler wt
  misc_feature: MA Experiment 20000574 PARAMETER Experiment Name: At_100uM_ABA_Mutants__P Parameter: Timepoint (hr) Value: N/A
  misc_feature: MA Experiment 20000574 PARAMETER Experiment Name: At_100uM_ABA_Mutants__P Parameter: Tissue Value: Whole Plant
  misc_feature: MA Experiment 20000574 PARAMETER Experiment Name: At_100uM_ABA_Mutants__P Parameter: Treatment Value: None
  misc_feature: MA Experiment ID: 20000794 Result: Down-regulated in Transcription
  misc_feature: MA Experiment 20000794 PARAMETER Experiment Name: At_Petals_P Parameter: Age (day) Value: 23-25 days
  misc_feature: MA Experiment 20000794 PARAMETER Experiment Name: At_Petals_P Parameter: Plant Line Value: WS
  misc_feature: MA Experiment 20000794 PARAMETER Experiment Name: At_Petals_P Parameter: Tissue Value: Petals vs. Whole plant
  misc_feature: MA Experiment ID: 20001248 Result: Down-regulated in Transcription
  misc_feature: MA Experiment 20001248 PARAMETER Experiment Name: At_Far-red-induction_P Parameter: Age (day) Value: 7
  misc_feature: MA Experiment 20001248 PARAMETER Experiment Name: At_Far-red-induction_P Parameter: Light Value: Far-red vs. White
  misc_feature: MA Experiment 20001248 PARAMETER Experiment Name: At_Far-red-induction_P Parameter: Organism Value: A. thaliana
  misc_feature: MA Experiment 20001248 PARAMETER Experiment Name: At_Far-red-induction_P Parameter: Plant Line Value: Columbia
  misc_feature: MA Experiment 20001248 PARAMETER Experiment Name: At_Far-red-induction_P Parameter: Timepoint (hr) Value: 4
  misc_feature: MA Experiment 20001248 PARAMETER Experiment Name: At_Far-red-induction_P Parameter: Tissue Value: Whole Plant
  misc_feature: MA Experiment ID: 20001457 Result: Up-regulated in Transcription
  misc_feature: MA Experiment 20001457 PARAMETER Experiment Name: At_50mM_NH4NO3_L-to-H_P Parameter: Age (day) Value: Undefined
  misc_feature: MA Experiment 20001457 PARAMETER Experiment Name: At_50mM_NH4NO3_L-to-H_P Parameter: Organism Value: Undefined
  misc_feature: MA Experiment 20001457 PARAMETER Experiment Name: At_50mM_NH4NO3_L-to-H_P Parameter: Plant Line Value: Undefined
  misc_feature: MA Experiment 20001457 PARAMETER Experiment Name: At_50mM_NH4NO3_L-to-H_P Parameter: Timepoint (hr) Value: 0.5
  misc_feature: MA Experiment 20001457 PARAMETER Experiment Name: At_50mM_NH4NO3_L-to-H_P Parameter: Tissue Value: Siliques
  misc_feature: MA Experiment 20001457 PARAMETER Experiment Name: At_50mM_NH4NO3_L-to-H_P Parameter: Treatment Value: 50mM NH4NO3 vs. 100mM Manitol
  misc_feature: MA Experiment ID: 20001555 Result: Down-regulated in Transcription
  misc_feature: MA Experiment 20001555 PARAMETER Experiment Name: At_Drought_Soil_Dry_P Parameter: Age (day) Value: 24
  misc_feature: MA Experiment 20001555 PARAMETER Experiment Name: At_Drought_Soil_Dry_P Parameter: Organism Value: A. thaliana
  misc_feature: MA Experiment 20001555 PARAMETER Experiment Name: At_Drought_Soil_Dry_P Parameter: Plant Line Value: WS
  misc_feature: MA Experiment 20001555 PARAMETER Experiment Name: At_Drought_Soil_Dry_P Parameter: Post Timepoint (hr) Value: None
  misc_feature: MA Experiment 20001555 PARAMETER Experiment Name: At_Drought_Soil_Dry_P Parameter: Post-Treatment Value: None
  misc_feature: MA Experiment 20001555 PARAMETER Experiment Name: At_Drought_Soil_Dry_P Parameter: Timepoint (day) Value: 10
  misc_feature: MA Experiment 20001555 PARAMETER Experiment Name: At_Drought_Soil_Dry_P Parameter: Treatment Value: Drought vs. No Drought
  misc_feature: MA Experiment ID: 20001556 Result: Down-regulated in Transcription
  misc_feature: MA Experiment 20001556 PARAMETER Experiment Name: At_Drought_Soil_Dry_P Parameter: Age (day) Value: 26
  misc_feature: MA Experiment 20001556 PARAMETER Experiment Name: At_Drought_Soil_Dry_P Parameter: Organism Value: A. thaliana
  misc_feature: MA Experiment 20001556 PARAMETER Experiment Name: At_Drought_Soil_Dry_P Parameter: Plant Line Value: WS
  misc_feature: MA Experiment 20001556 PARAMETER Experiment Name: At_Drought_Soil_Dry_P Parameter: Post Timepoint (hr) Value: None
  misc_feature: MA Experiment 20001556 PARAMETER Experiment Name: At_Drought_Soil_Dry_P Parameter: Post-Treatment Value: None
  misc_feature: MA Experiment 20001556 PARAMETER Experiment Name: At_Drought_Soil_Dry_P Parameter: Timepoint (day) Value: 12
  misc_feature: MA Experiment 20001556 PARAMETER Experiment Name: At_Drought_Soil_Dry_P Parameter: Treatment Value: Drought vs. No Drought
  misc_feature: MA Experiment ID: 20001557 Result: Up-regulated in Transcription
  misc_feature: MA Experiment 20001557 PARAMETER Experiment Name: At_Drought_Soil_Dry_P Parameter: Age (day) Value: 27
  misc_feature: MA Experiment 20001557 PARAMETER Experiment Name: At_Drought_Soil_Dry_P Parameter: Organism Value: A. thaliana
  misc_feature: MA Experiment 20001557 PARAMETER Experiment Name: At_Drought_Soil_Dry_P Parameter: Plant Line Value: WS
  misc_feature: MA Experiment 20001557 PARAMETER Experiment Name: At_Drought_Soil_Dry_P Parameter: Post Timepoint (hr) Value: 3
  misc_feature: MA Experiment 20001557 PARAMETER Experiment Name: At_Drought_Soil_Dry_P Parameter: Post-Treatment Value: Re-Water vs. No Drought
  misc_feature: MA Experiment 20001557 PARAMETER Experiment Name: At_Drought_Soil_Dry_P Parameter: Timepoint (day) Value: 13
  misc_feature: MA Experiment 20001557 PARAMETER Experiment Name: At_Drought_Soil_Dry_P Parameter: Treatment Value: Drought vs. No Drought
  misc_feature: MA Experiment ID: 20001558 Result: Up-regulated in Transcription
  misc_feature: MA Experiment 20001558 PARAMETER Experiment Name: At_Drought_Soil_Dry_P Parameter: Age (day) Value: 27
  misc_feature: MA Experiment 20001558 PARAMETER Experiment Name: At_Drought_Soil_Dry_P Parameter: Organism Value: A. thaliana
  misc_feature: MA Experiment 20001558 PARAMETER Experiment Name: At_Drought_Soil_Dry_P Parameter: Plant Line Value: WS
  misc_feature: MA Experiment 20001558 PARAMETER Experiment Name: At_Drought_Soil_Dry_P Parameter: Post Timepoint (hr) Value: 6
  misc_feature: MA Experiment 20001558 PARAMETER Experiment Name: At_Drought_Soil_Dry_P Parameter: Post-Treatment Value: Re-Water vs. No Drought
  misc_feature: MA Experiment 20001558 PARAMETER Experiment Name: At_Drought_Soil_Dry_P Parameter: Timepoint (day) Value: 13
  misc_feature: MA Experiment 20001558 PARAMETER Experiment Name: At_Drought_Soil_Dry_P Parameter: Treatment Value: Drought vs. No Drought
  misc_feature: MA Experiment ID: 20001560 Result: Up-regulated in Transcription
  misc_feature: MA Experiment 20001560 PARAMETER Experiment Name: At_Drought_Soil_Dry_P Parameter: Age (day) Value: 28
  misc_feature: MA Experiment 20001560 PARAMETER Experiment Name: At_Drought_Soil_Dry_P Parameter: Organism Value: A. thaliana
  misc_feature: MA Experiment 20001560 PARAMETER Experiment Name: At_Drought_Soil_Dry_P Parameter: Plant Line Value: WS
  misc_feature: MA Experiment 20001560 PARAMETER Experiment Name: At_Drought_Soil_Dry_P Parameter: Post Timepoint (hr) Value: None
  misc_feature: MA Experiment 20001560 PARAMETER Experiment Name: At_Drought_Soil_Dry_P Parameter: Post-Treatment Value: None
  misc_feature: MA Experiment 20001560 PARAMETER Experiment Name: At_Drought_Soil_Dry_P Parameter: Timepoint (day) Value: 14
  misc_feature: MA Experiment 20001560 PARAMETER Experiment Name: At_Drought_Soil_Dry_P Parameter: Treatment Value: Drought vs. No Drought
  misc_feature: MA Experiment ID: 20001757 Result: Up-regulated in Transcription
  misc_feature: MA Experiment 20001757 PARAMETER Experiment Name: At_50mM_NH4NO3_L-to-H_P Parameter: Timepoint (hr) Value: 6
  misc_feature: MA Experiment 20001757 PARAMETER Experiment Name: At_50mM_NH4NO3_L-to-H_P Parameter: Tissue Value: Leaf
  misc_feature: MA Experiment 20001757 PARAMETER Experiment Name: At_50mM_NH4NO3_L-to-H_P Parameter: Treatment Value: 50mM NH4NO3 vs 100mM Mannitol
  misc_feature: MA Experiment ID: 20001911 Result: Down-regulated in Transcription
  misc_feature: MA Experiment 20001911 PARAMETER Experiment Name: At_Drought_Reproduction_P Parameter: Age (day) Value: 40
  misc_feature: MA Experiment 20001911 PARAMETER Experiment Name: At_Drought_Reproduction_P Parameter: Organism Value: A. thaliana
  misc_feature: MA Experiment 20001911 PARAMETER Experiment Name: At_Drought_Reproduction_P Parameter: Plant Line Value: WS
  misc_feature: MA Experiment 20001911 PARAMETER Experiment Name: At_Drought_Reproduction_P Parameter: Timepoint (day) Value: 10
  misc_feature: MA Experiment 20001911 PARAMETER Experiment Name: At_Drought_Reproduction_P Parameter: Tissue Value: Flowers
  misc_feature: MA Experiment 20001911 PARAMETER Experiment Name: At_Drought_Reproduction_P Parameter: Treatment Value: Drought vs. No Drought
attcttcaaaactatattatataaacacatttttcgtttcttcacattcacaaaacatctctctctttcttctcccattcactcactatcttgctcctagaaaaagatggcgagaatgagtttgatgatcatgatgattatggttgctgtgaccatgattaacattgctaagagtgatcccattgcaccatgttacttcatatttggtgactctttggttgataatggcaacaataatcagcttcagtcattagctagagctaattactttccttacggtattgactttgctgccggtccaaccggtcggtttagcaacggcttaaccactgtcgatgttatcgctcagcttttgggtttcgaggactacattacaccttacgcttctgcaagaggacaagacattctccgaggagttaactatgcttccgctgctgccggaatccgagacgaaaccggcagacaattgagaggtcgaatagcatttgcagggcaagtagcaaatcacgtgaacactgtgtcacaagtagtgaacatacttggtgatcaaaacgaagcctcgaattacctcagcaaatgcatttactctatcggattaggcagtaacgattatcttaacaactacttcatgcctactttttactctaccggtaaccagttctcccccgaatcctatgccgacgatctcgttgcccgttacaccgaacaactcagggtactgtataccaatggagcgaggaagtttgcgttgataggagtcggggcaatcggttgcagcccgaacgagctagctcaaaacagcagagacggaagaacgtgtgacgaaagaatcaactcagcgaacagaatctttaacagcaaactcatatctatagtcgacgcttttaaccagaacacaccagatgcaaaattcacttacatcaacgcttatggcatcttccaagacattattacaaaccctgctcgctacgggtttagagtgacaaatgcaggatgttgtggagttgggaggaacaatggacagataacttgtcttccaggtcaagcaccatgtctaaataggaatgagtatgtgttttgggatgcgtttcatcccggtgaagctgcgaatattgttattggaagacgatcttttaagcgagaagctgcttctgatgctcatccttatgatattcagcagctagcatctctctaaagagagaaagatcttttggttgtctaagtattttgatagttcttcaatggcagctgagttttggactcaagaagaagtgatttggtttgtgttgtgtgatgtcataactgtttatgtaatgatttggagttactgtttatctctttttct

SEQ ID NO: 23572 - protein, 362 aa, Arabidopsis thaliana
  peptide (1)..(362): Ceres Seq. ID no. 12377400
  misc_feature (30)..(342): Pfam Name: GDSL-like Lipase/Acylhydrolase Pfam Description: GDSL-like Lipase/Acylhydrolase
  misc_feature (1)..(362): Homolog of NCBI NO: 34910808 NR Description: GDSL-motif lipase/hydrolase-like protein
  misc_feature (10)..(362): Homolog of NCBI NO: 21594055 NR Description: lipase/hydrolase, putative [Arabidopsis thaliana]
  misc_feature (10)..(362): Homolog of NCBI NO: 15220512 NR Description: lipase/hydrolase, putative
  misc_feature (1)..(362): Homolog of NCBI NO: 21592417 NR Description: lipase/hydrolase, putative [Arabidopsis thaliana]
  misc_feature (1)..(362): Homolog of NCBI NO: 15220514 NR Description: lipase/hydrolase, putative
  misc_feature (1)..(362): Homolog of NCBI NO: 21618199 NR Description: GDSL-motif lipase/hydrolase-like protein
  misc_feature (1)..(362): Homolog of NCBI NO: 18415211 NR Description: Expressed protein
  misc_feature (1)..(362): Homolog of NCBI NO: 7485419 NR Description: hypothetical protein F13C5.140 - Arabidopsis
  misc_feature (1)..(362): Homolog of NCBI NO: 21553940 NR Description: GDSL-motif lipase/hydrolase-like protein
  misc_feature (1)..(362): Homolog of NCBI NO: 15242458 NR Description: GDSL-motif lipase/hydrolase-like protein
MARMSLMIMMIMVAVTMINIAKSDPIAPCYFIFGDSLVDNGNNNQLQSLARANYFPYGIDFAAGPTGRFSNGLTTVDVIAQLLGFEDYITPYASARGQDILRGVNYASAAAGIRDETGRQLRGRIAFAGQVANHVNTVSQVVNILGDQNEASNYLSKCIYSIGLGSNDYLNNYFMPTFYSTGNQFSPESYADDLVARYTEQLRVLYTNGARKFALIGVGAIGCSPNELAQNSRDGRTCDERINSANRIFNSKLISIVDAFNQNTPDAKFTYINAYGIFQDIITNPARYGFRVTNAGCCGVGRNNGQITCLPGQAPCLNRNEYVFWDAFHPGEAANIVIGRRSFKREAASDAHPYDIQQLASL

SEQ ID NO: 23573 - protein, 359 aa, Arabidopsis thaliana
  peptide (1)..(359): Ceres Seq. ID no. 12377401
  misc_feature (27)..(339): Pfam Name: GDSL-like Lipase/Acylhydrolase Pfam Description: GDSL-like Lipase/Acylhydrolase
  misc_feature (1)..(359): Homolog of NCBI NO: 7485419 NR Description: hypothetical protein F13C5.140 - Arabidopsis
  misc_feature (1)..(359): Homolog of NCBI NO: 21553940 NR Description: GDSL-motif lipase/hydrolase-like protein
  misc_feature (7)..(359): Homolog of NCBI NO: 21594055 NR Description: lipase/hydrolase, putative [Arabidopsis thaliana]
  misc_feature (1)..(359): Homolog of NCBI NO: 21592417 NR Description: lipase/hydrolase, putative [Arabidopsis thaliana]
  misc_feature (1)..(359): Homolog of NCBI NO: 21618199 NR Description: GDSL-motif lipase/hydrolase-like protein
  misc_feature (1)..(359): Homolog of NCBI NO: 18415211 NR Description: Expressed protein
  misc_feature (1)..(359): Homolog of NCBI NO: 15220514 NR Description: lipase/hydrolase, putative
  misc_feature (7)..(359): Homolog of NCBI NO: 15220512 NR Description: lipase/hydrolase, putative
  misc_feature (1)..(359): Homolog of NCBI NO: 34910808 NR Description: GDSL-motif lipase/hydrolase-like protein
  misc_feature (1)..(359): Homolog of NCBI NO: 15242458 NR Description: GDSL-motif lipase/hydrolase-like protein
MSLMIMMIMVAVTMINIAKSDPIAPCYFIFGDSLVDNGNNNQLQSLARANYFPYGIDFAAGPTGRFSNGLTTVDVIAQLLGFEDYITPYASARGQDILRGVNYASAAAGIRDETGRQLRGRIAFAGQVANHVNTVSQVVNILGDQNEASNYLSKCIYSIGLGSNDYLNNYFMPTFYSTGNQFSPESYADDLVARYTEQLRVLYTNGARKFALIGVGAIGCSPNELAQNSRDGRTCDERINSANRIFNSKLISIVDAFNQNTPDAKFTYINAYGIFQDIITNPARYGFRVTNAGCCGVGRNNGQITCLPGQAPCLNRNEYVFWDAFHPGEAANIVIGRRSFKREAASDAHPYDIQQLASL

SEQ ID NO: 23574 - protein, 356 aa, Arabidopsis thaliana
  peptide (1)..(356): Ceres Seq. ID no. 12377402
  misc_feature (24)..(336): Pfam Name: GDSL-like Lipase/Acylhydrolase Pfam Description: GDSL-like Lipase/Acylhydrolase
  misc_feature (1)..(356): Homolog of NCBI NO: 34910808 NR Description: GDSL-motif lipase/hydrolase-like protein
  misc_feature (4)..(356): Homolog of NCBI NO: 21594055 NR Description: lipase/hydrolase, putative [Arabidopsis thaliana]
  misc_feature (4)..(356): Homolog of NCBI NO: 15220512 NR Description: lipase/hydrolase, putative
  misc_feature (1)..(356): Homolog of NCBI NO: 21592417 NR Description: lipase/hydrolase, putative [Arabidopsis thaliana]
  misc_feature (1)..(356): Homolog of NCBI NO: 15220514 NR Description: lipase/hydrolase, putative
  misc_feature (1)..(356): Homolog of NCBI NO: 21618199 NR Description: GDSL-motif lipase/hydrolase-like protein
  misc_feature (1)..(356): Homolog of NCBI NO: 18415211 NR Description: Expressed protein
  misc_feature (1)..(356): Homolog of NCBI NO: 7485419 NR Description: hypothetical protein F13C5.140 - Arabidopsis
  misc_feature (1)..(356): Homolog of NCBI NO: 21553940 NR Description: GDSL-motif lipase/hydrolase-like protein
  misc_feature (1)..(356): Homolog of NCBI NO: 15242458 NR Description: GDSL-motif lipase/hydrolase-like protein
MIMMIMVAVTMINIAKSDPIAPCYFIFGDSLVDNGNNNQLQSLARANYFPYGIDFAAGPTGRFSNGLTTVDVIAQLLGFEDYITPYASARGQDILRGVNYASAAAGIRDETGRQLRGRIAFAGQVANHVNTVSQVVNILGDQNEASNYLSKCIYSIGLGSNDYLNNYFMPTFYSTGNQFSPESYADDLVARYTEQLRVLYTNGARKFALIGVGAIGCSPNELAQNSRDGRTCDERINSANRIFNSKLISIVDAFNQNTPDAKFTYINAYGIFQDIITNPARYGFRVTNAGCCGVGRNNGQITCLPGQAPCLNRNEYVFWDAFHPGEAANIVIGRRSFKREAASDAHPYDIQQLASL

SEQ ID NO: 23575 - DNA, 1044 bp, Arabidopsis thaliana
  misc_feature (1)..(1044): Ceres Seq. ID no. 12488528
  misc_feature: MA Experiment ID: 108464 Result: Up-regulated in Transcription
  misc_feature: MA Experiment 108464 PARAMETER Experiment Name: At_Germinating_Seeds_cDNA_P Parameter: Age (day) Value: 4 vs. 0
  misc_feature: MA Experiment 108464 PARAMETER Experiment Name: At_Germinating_Seeds_cDNA_P Parameter: Tissue Value: Germinating Seeds
  misc_feature: MA Experiment ID: 20000113 Result: Down-regulated in Transcription
  misc_feature: MA Experiment 20000113 PARAMETER Experiment Name: At_42deg_Heat_cDNA_P Parameter: Temperature (deg C) Value: 42 vs. 22
  misc_feature: MA Experiment 20000113 PARAMETER Experiment Name: At_42deg_Heat_cDNA_P Parameter: Timepoint (hr) Value: 8
  misc_feature: MA Experiment 20000113 PARAMETER Experiment Name: At_42deg_Heat_cDNA_P Parameter: Tissue Value: Aerial
  misc_feature: MA Experiment ID: 20000173 Result: Up-regulated in Transcription
  misc_feature: MA Experiment 20000173 PARAMETER Experiment Name: At_42deg_Heat_P Parameter: Age (day) Value: 14
  misc_feature: MA Experiment 20000173 PARAMETER Experiment Name: At_42deg_Heat_P Parameter: Organism Value: A. thaliana
  misc_feature: MA Experiment 20000173 PARAMETER Experiment Name: At_42deg_Heat_P Parameter: Plant Line Value: WS
  misc_feature: MA Experiment 20000173 PARAMETER Experiment Name: At_42deg_Heat_P Parameter: Temperature (deg C) Value: 42 vs. 22
  misc_feature: MA Experiment 20000173 PARAMETER Experiment Name: At_42deg_Heat_P Parameter: Timepoint (hr) Value: 6
  misc_feature: MA Experiment 20000173 PARAMETER Experiment Name: At_42deg_Heat_P Parameter: Tissue Value: Aerial
  misc_feature: MA Experiment ID: 20000180 Result: Up-regulated in Transcription
  misc_feature: MA Experiment 20000180 PARAMETER Experiment Name: At_Germinating_Seeds_P Parameter: Age (hr) Value: 24 vs. 0
  misc_feature: MA Experiment 20000180 PARAMETER Experiment Name: At_Germinating_Seeds_P Parameter: Tissue Value: Germinating Seeds
  misc_feature: MA Experiment ID: 20000184 Result: Up-regulated in Transcription
  misc_feature: MA Experiment 20000184 PARAMETER Experiment Name: At_Shoots__P Parameter: Age (day) Value: 7
  misc_feature: MA Experiment 20000184 PARAMETER Experiment Name: At_Shoots__P Parameter: Tissue Value: Shoots vs. Whole Plant
  misc_feature: MA Experiment ID: 20000185 Result: Up-regulated in Transcription
  misc_feature: MA Experiment 20000185 PARAMETER Experiment Name: At_Roots__P Parameter: Age (day) Value: 7 vs. 21
  misc_feature: MA Experiment 20000185 PARAMETER Experiment Name: At_Roots__P Parameter: Organism Value: A. thaliana
  misc_feature: MA Experiment 20000185 PARAMETER Experiment Name: At_Roots__P Parameter: Tissue Value: Roots vs. Whole Plant
  misc_feature: MA Experiment ID: 20000437 Result: Down-regulated in Transcription
  misc_feature: MA Experiment 20000437 PARAMETER Experiment Name: At_Drought_P Parameter: Age (day) Value: 8
  misc_feature: MA Experiment 20000437 PARAMETER Experiment Name: At_Drought_P Parameter: Organism Value: A. thaliana
  misc_feature: MA Experiment 20000437 PARAMETER Experiment Name: At_Drought_P Parameter: Plant Line Value: WS
  misc_feature: MA Experiment 20000437 PARAMETER Experiment Name: At_Drought_P Parameter: Timepoint (hr) Value: 24
  misc_feature: MA Experiment 20000437 PARAMETER Experiment Name: At_Drought_P Parameter: Tissue Value: Whole Plant
  misc_feature: MA Experiment 20000437 PARAMETER Experiment Name: At_Drought_P Parameter: Treatment Value: Drought vs. No Drought
  misc_feature: MA Experiment ID: 20000573 Result: Down-regulated in Transcription
  misc_feature: MA Experiment 20000573 PARAMETER Experiment Name: At_100uM_ABA_Mutants__P Parameter: Organism Value: A. thaliana
  misc_feature: MA Experiment 20000573 PARAMETER Experiment Name: At_100uM_ABA_Mutants__P Parameter: Plant Line Value: CS22 vs. Ler wt
  misc_feature: MA Experiment 20000573 PARAMETER Experiment Name: At_100uM_ABA_Mutants__P Parameter: Timepoint (hr) Value: N/A
  misc_feature: MA Experiment 20000573 PARAMETER Experiment Name: At_100uM_ABA_Mutants__P Parameter: Tissue Value: Whole Plant
  misc_feature: MA Experiment 20000573 PARAMETER Experiment Name: At_100uM_ABA_Mutants__P Parameter: Treatment Value: None
  misc_feature: MA Experiment ID: 20000794 Result: Down-regulated in Transcription
  misc_feature: MA Experiment 20000794 PARAMETER Experiment Name: At_Petals_P Parameter: Age (day) Value: 23-25 days
  misc_feature: MA Experiment 20000794 PARAMETER Experiment Name: At_Petals_P Parameter: Plant Line Value: WS
  misc_feature: MA Experiment 20000794 PARAMETER Experiment Name: At_Petals_P Parameter: Tissue Value: Petals vs. Whole plant
  misc_feature: MA Experiment ID: 20001248 Result: Down-regulated in Transcription
  misc_feature: MA Experiment 20001248 PARAMETER Experiment Name: At_Far-red-induction_P Parameter: Age (day) Value: 7
  misc_feature: MA Experiment 20001248 PARAMETER Experiment Name: At_Far-red-induction_P Parameter: Light Value: Far-red vs. White
  misc_feature: MA Experiment 20001248 PARAMETER Experiment Name: At_Far-red-induction_P Parameter: Organism Value: A. thaliana
  misc_feature: MA Experiment 20001248 PARAMETER Experiment Name: At_Far-red-induction_P Parameter: Plant Line Value: Columbia
  misc_feature: MA Experiment 20001248 PARAMETER Experiment Name: At_Far-red-induction_P Parameter: Timepoint (hr) Value: 4
  misc_feature: MA Experiment 20001248 PARAMETER Experiment Name: At_Far-red-induction_P Parameter: Tissue Value: Whole Plant
  misc_feature: MA Experiment ID: 20001450 Result: Down-regulated in Transcription
  misc_feature: MA Experiment 20001450 PARAMETER Experiment Name: At_Far-red-induction_P Parameter: Age (day) Value: 7
  misc_feature: MA Experiment 20001450 PARAMETER Experiment Name: At_Far-red-induction_P Parameter: Light Value: Far-red vs. White
  misc_feature: MA Experiment 20001450 PARAMETER Experiment Name: At_Far-red-induction_P Parameter: Organism Value: A. thaliana
  misc_feature: MA Experiment 20001450 PARAMETER Experiment Name: At_Far-red-induction_P Parameter: Plant Line Value: Columbia
  misc_feature: MA Experiment 20001450 PARAMETER Experiment Name: At_Far-red-induction_P Parameter: Timepoint (hr) Value: 8
  misc_feature: MA Experiment 20001450 PARAMETER Experiment Name: At_Far-red-induction_P Parameter: Tissue Value: Whole Plant
  misc_feature: MA Experiment ID: 20001451 Result: Down-regulated in Transcription
  misc_feature: MA Experiment 20001451 PARAMETER Experiment Name: At_Far-red-induction_P Parameter: Age (day) Value: 7
  misc_feature: MA Experiment 20001451 PARAMETER Experiment Name: At_Far-red-induction_P Parameter: Light Value: Far-red vs. White
  misc_feature: MA Experiment 20001451 PARAMETER Experiment Name: At_Far-red-induction_P Parameter: Organism Value: A. thaliana
  misc_feature: MA Experiment 20001451 PARAMETER Experiment Name: At_Far-red-induction_P Parameter: Plant Line Value: Columbia
  misc_feature: MA Experiment 20001451 PARAMETER Experiment Name: At_Far-red-induction_P Parameter: Timepoint (hr) Value: 24
  misc_feature: MA Experiment 20001451 PARAMETER Experiment Name: At_Far-red-induction_P Parameter: Tissue Value: Whole Plant
  misc_feature: MA Experiment ID: 20001555 Result: Down-regulated in Transcription
  misc_feature: MA Experiment 20001555 PARAMETER Experiment Name: At_Drought_Soil_Dry_P Parameter: Age (day) Value: 24
  misc_feature: MA Experiment 20001555 PARAMETER Experiment Name: At_Drought_Soil_Dry_P Parameter: Organism Value: A. thaliana
  misc_feature: MA Experiment 20001555 PARAMETER Experiment Name: At_Drought_Soil_Dry_P Parameter: Plant Line Value: WS
  misc_feature: MA Experiment 20001555 PARAMETER Experiment Name: At_Drought_Soil_Dry_P Parameter: Post Timepoint (hr) Value: None
  misc_feature: MA Experiment 20001555 PARAMETER Experiment Name: At_Drought_Soil_Dry_P Parameter: Post-Treatment Value: None
  misc_feature: MA Experiment 20001555 PARAMETER Experiment Name: At_Drought_Soil_Dry_P Parameter: Timepoint (day) Value: 10
  misc_feature: MA Experiment 20001555 PARAMETER Experiment Name: At_Drought_Soil_Dry_P Parameter: Treatment Value: Drought vs. No Drought
  misc_feature: MA Experiment ID: 20001556 Result: Down-regulated in Transcription
  misc_feature: MA Experiment 20001556 PARAMETER Experiment Name: At_Drought_Soil_Dry_P Parameter: Age (day) Value: 26
  misc_feature: MA Experiment 20001556 PARAMETER Experiment Name: At_Drought_Soil_Dry_P Parameter: Organism Value: A. thaliana
  misc_feature: MA Experiment 20001556 PARAMETER Experiment Name: At_Drought_Soil_Dry_P Parameter: Plant Line Value: WS
  misc_feature: MA Experiment 20001556 PARAMETER Experiment Name: At_Drought_Soil_Dry_P Parameter: Post Timepoint (hr) Value: None
  misc_feature: MA Experiment 20001556 PARAMETER Experiment Name: At_Drought_Soil_Dry_P Parameter: Post-Treatment Value: None
  misc_feature: MA Experiment 20001556 PARAMETER Experiment Name: At_Drought_Soil_Dry_P Parameter: Timepoint (day) Value: 12
  misc_feature: MA Experiment 20001556 PARAMETER Experiment Name: At_Drought_Soil_Dry_P Parameter: Treatment Value: Drought vs. No Drought
  misc_feature: MA Experiment ID: 20001905 Result: Down-regulated in Transcription
  misc_feature: MA Experiment 20001905 PARAMETER Experiment Name: At_Drought_Reproduction_P Parameter: Age (day) Value: 40
  misc_feature: MA Experiment 20001905 PARAMETER Experiment Name: At_Drought_Reproduction_P Parameter: Organism Value: A. thaliana
  misc_feature: MA Experiment 20001905 PARAMETER Experiment Name: At_Drought_Reproduction_P Parameter: Plant Line Value: WS
  misc_feature: MA Experiment 20001905 PARAMETER Experiment Name: At_Drought_Reproduction_P Parameter: Timepoint (day) Value: 10
  misc_feature: MA Experiment 20001905 PARAMETER Experiment Name: At_Drought_Reproduction_P Parameter: Tissue Value: Rosettes
  misc_feature: MA Experiment 20001905 PARAMETER Experiment Name: At_Drought_Reproduction_P Parameter: Treatment Value: Drought vs. No Drought
  misc_feature: MA Experiment ID: 20001906 Result: Down-regulated in Transcription
  misc_feature: MA Experiment 20001906 PARAMETER Experiment Name: At_Drought_Reproduction_P Parameter: Age (day) Value: 35
  misc_feature: MA Experiment 20001906 PARAMETER Experiment Name: At_Drought_Reproduction_P Parameter: Organism Value: A. thaliana
  misc_feature: MA Experiment 20001906 PARAMETER Experiment Name: At_Drought_Reproduction_P Parameter: Plant Line Value: WS
  misc_feature: MA Experiment 20001906 PARAMETER Experiment Name: At_Drought_Reproduction_P Parameter: Timepoint (day) Value: 5
  misc_feature: MA Experiment 20001906 PARAMETER Experiment Name: At_Drought_Reproduction_P Parameter: Tissue Value: Siliques
  misc_feature: MA Experiment 20001906 PARAMETER Experiment Name: At_Drought_Reproduction_P Parameter: Treatment Value: Drought vs. No Drought
  misc_feature: MA Experiment ID: 20001911 Result: Down-regulated in Transcription
  misc_feature: MA Experiment 20001911 PARAMETER Experiment Name: At_Drought_Reproduction_P Parameter: Age (day) Value: 40
  misc_feature: MA Experiment 20001911 PARAMETER Experiment Name: At_Drought_Reproduction_P Parameter: Organism Value: A. thaliana
  misc_feature: MA Experiment 20001911 PARAMETER Experiment Name: At_Drought_Reproduction_P Parameter: Plant Line Value: WS
  misc_feature: MA Experiment 20001911 PARAMETER Experiment Name: At_Drought_Reproduction_P Parameter: Timepoint (day) Value: 10
  misc_feature: MA Experiment 20001911 PARAMETER Experiment Name: At_Drought_Reproduction_P Parameter: Tissue Value: Flowers
  misc_feature: MA Experiment 20001911 PARAMETER Experiment Name: At_Drought_Reproduction_P Parameter: Treatment Value: Drought vs. No Drought
aaaatcatcaaatccatctcccactcttctagcatcttgaagcttaaatctcagccgtccgatcatgccgatcagaaacatcgccattggccgtccagatgaagccacccgtcccgatgccttaaaggcggcgttggctgagttcatttcaactttgatctttgtcgtcgccggttcaggctctggcatggctttcaacaagctcactgaaaacggagccaccactccttctggtctcgtagctgctgcagtggctcatgcctttggactcttcgtcgctgtctcagttggtgccaacatctctggtggacacgttaaccctgccgtcactttcggtgctttcattggtggtaacatcactctcctccgtggtatcctctactggattgctcagcttctcggctccgtcgtcgcttgcctcatccttaaattcgccaccggtggcttggctgtgccggcttttggtctctctgctggagtaggagtgttgaacgctttcgttttcgagatcgtgatgacattcgggcttgtttacaccgtctacgctacagccattgaccccaaaaacgggagtcttggaacaattgctcccatcgcaatcggtttcattgttggagccaacatcttagctggaggagctttctctggagcctccatgaatcccgccgtggctttcggaccagcggtggtgagctggacatggaccaaccactgggtctactgggccggacctctcgtcggcggtggaatcgctggactcatctacgaagttttcttcatcaacaccacacacacgagcagctcccaaccacagactactgaattaatctctctttttctctcttgtgtaattttattcgactttgaatttgaattttaatgtctttttaatttccgtttgtgtaatttcgaatcatcaaggggtttatgatcgttcgatcttttagatgaatccttgtccgttggtttcaagagtggccattgcaatttcgactatataatgtgaattatgtatcaatctcatcttaagttttcaagtgttgc

SEQ ID NO: 23576 - protein, 271 aa, Arabidopsis thaliana
  peptide (1)..(271): Ceres Seq. ID no. 12488529
  misc_feature (13)..(234): Pfam Name: Major intrinsic protein Pfam Description: Major intrinsic protein
  misc_feature (13)..(234): Pfam Name: Major intrinsic protein Pfam Description: Major intrinsic protein
  misc_feature (1)..(253): Homolog of NCBI NO: 11357300 NR Description: gamma tonoplast intrinsic protein 2
  misc_feature (1)..(253): Homolog of NCBI NO: 15231569 NR Description: gamma tonoplast intrinsic protein
  misc_feature (1)..(253): Homolog of NCBI NO: 5081419 NR Description: tonoplast intrinsic protein [Brassica napus]
  misc_feature (1)..(253): Homolog of NCBI NO: 1514977 NR Description: VM23 [Raphanus sativus]
  misc_feature (1)..(243): Homolog of NCBI NO: 22858917 NR Description: tonoplast intrinsic protein bobTIP26-2
  misc_feature (1)..(253): Homolog of NCBI NO: 11357300 NR Description: gamma tonoplast intrinsic protein 2
  misc_feature (1)..(253): Homolog of NCBI NO: 5081419 NR Description: tonoplast intrinsic protein [Brassica napus]
  misc_feature (1)..(243): Homolog of NCBI NO: 22858917 NR Description: tonoplast intrinsic protein bobTIP26-2
  misc_feature (1)..(247): Homolog of NCBI NO: 99747 NR Description: probable membrane channel protein RB7 -
  misc_feature (1)..(243): Homolog of NCBI NO: 15228041 NR Description: putative aquaporin (tonoplast intrinsic protein
  misc_feature (1)..(243): Homolog of NCBI NO: 21593151 NR Description: putative aquaporin (tonoplast intrinsic protein
  misc_feature (1)..(243): Homolog of NCBI NO: 475048 NR Description: tonoplast intrinsic protein gamma (gamma-TIP)
  misc_feature (1)..(243): Homolog of NCBI NO: 21284370 NR Description: tonoplast intrinsic protein bobTIP26-1
  misc_feature (1)..(253): Homolog of NCBI NO: 1514977 NR Description: VM23 [Raphanus sativus]
  misc_feature (1)..(253): Homolog of NCBI NO: 15231569 NR Description: gamma tonoplast intrinsic protein
  misc_feature (1)..(243): Homolog of NCBI NO: 21284370 NR Description: tonoplast intrinsic protein bobTIP26-1
  misc_feature (1)..(243): Homolog of NCBI NO: 475048 NR Description: tonoplast intrinsic protein gamma (gamma-TIP)
  misc_feature (1)..(243): Homolog of NCBI NO: 21593151 NR Description: putative aquaporin (tonoplast intrinsic protein
  misc_feature (1)..(243): Homolog of NCBI NO: 15228041 NR Description: putative aquaporin (tonoplast intrinsic protein
  misc_feature (1)..(247): Homolog of NCBI NO: 99747 NR Description: probable membrane channel protein RB7 -
MPIRNIAIGRPDEATRPDALKAALAEFISTLIFVVAGSGSGMAFNKLTENGATTPSGLVAAAVAHAFGLFVAVSVGANISGGHVNPAVTFGAFIGGNITLLRGILYWIAQLLGSVVACLILKFATGGLAVPAFGLSAGVGVLNAFVFEIVMTFGLVYTVYATAIDPKNGSLGTIAPIAIGFIVGANILAGGAFSGASMNPAVAFGPAVVSWTWTNHWVYWAGPLVGGGIAGLIYEVFFINTTHTSSSQPQTTELISLFLSCVILFDFEFEF

SEQ ID NO: 23577 - protein, 230 aa, Arabidopsis thaliana
  peptide (1)..(230): Ceres Seq. ID no. 12488530
  misc_feature (1)..(193): Pfam Name: Major intrinsic protein Pfam Description: Major intrinsic protein
  misc_feature (1)..(193): Pfam Name: Major intrinsic protein Pfam Description: Major intrinsic protein
  misc_feature (1)..(212): Homolog of NCBI NO: 11357300 NR Description: gamma tonoplast intrinsic protein 2
  misc_feature (1)..(212): Homolog of NCBI NO: 15231569 NR Description: gamma tonoplast intrinsic protein
  misc_feature (1)..(212): Homolog of NCBI NO: 5081419 NR Description: tonoplast intrinsic protein [Brassica napus]
  misc_feature (1)..(212): Homolog of NCBI NO: 1514977 NR Description: VM23 [Raphanus sativus]
  misc_feature (1)..(202): Homolog of NCBI NO: 22858917 NR Description: tonoplast intrinsic protein bobTIP26-2
  misc_feature (1)..(212): Homolog of NCBI NO: 11357300 NR Description: gamma tonoplast intrinsic protein 2
  misc_feature (1)..(212): Homolog of NCBI NO: 5081419 NR Description: tonoplast intrinsic protein [Brassica napus]
  misc_feature (1)..(202): Homolog of NCBI NO: 22858917 NR Description: tonoplast intrinsic protein bobTIP26-2
  misc_feature (1)..(206): Homolog of NCBI NO: 99747 NR Description: probable membrane channel protein RB7 -
  misc_feature (1)..(202): Homolog of NCBI NO: 15228041 NR Description: putative aquaporin (tonoplast intrinsic protein
  misc_feature (1)..(202): Homolog of NCBI NO: 21593151 NR Description: putative aquaporin (tonoplast intrinsic protein
  misc_feature (1)..(202): Homolog of NCBI NO: 475048 NR Description: tonoplast intrinsic protein gamma (gamma-TIP)
  misc_feature (1)..(202): Homolog of NCBI NO: 21284370 NR Description: tonoplast intrinsic protein bobTIP26-1
  misc_feature (1)..(212): Homolog of NCBI NO: 1514977 NR Description: VM23 [Raphanus sativus]
  misc_feature (1)..(212): Homolog of NCBI NO: 15231569 NR Description: gamma tonoplast intrinsic protein
  misc_feature (1)..(202): Homolog of NCBI NO: 21284370 NR Description: tonoplast intrinsic protein bobTIP26-1
  misc_feature (1)..(202): Homolog of NCBI NO: 475048 NR Description: tonoplast intrinsic protein gamma (gamma-TIP)
  misc_feature (1)..(202): Homolog of NCBI NO: 21593151 NR Description: putative aquaporin (tonoplast intrinsic protein
  misc_feature (1)..(202): Homolog of NCBI NO: 15228041 NR Description: putative aquaporin (tonoplast intrinsic protein
  misc_feature (1)..(206): Homolog of NCBI NO: 99747 NR Description: probable membrane channel protein RB7 -
MAFNKLTENGATTPSGLVAAAVAHAFGLFVAVSVGANISGGHVNPAVTFGAFIGGNITLLRGILYWIAQLLGSVVACLILKFATGGLAVPAFGLSAGVGVLNAFVFEIVMTFGLVYTVYATAIDPKNGSLGTIAPIAIGFIVGANILAGGAFSGASMNPAVAFGPAVVSWTWTNHWVYWAGPLVGGGIAGLIYEVFFINTTHTSSSQPQTTELISLFLSCVILFDFEFEF

SEQ ID NO: 23578 - DNA, 1328 bp, Arabidopsis thaliana
  misc_feature (1)..(1328): Ceres Seq. ID no. 13487110
  misc_feature: MA Experiment ID: 108435 Result: Up-regulated in Transcription
  misc_feature: MA Experiment 108435 PARAMETER Experiment Name: At_stm_Mutants_cDNA_P Parameter: Plant Line Value: wt Landsburg vs stm
  misc_feature: MA Experiment 108435 PARAMETER Experiment Name: At_stm_Mutants_cDNA_P Parameter: Tissue Value: Shoot Apical Meristem Region
  misc_feature: MA Experiment ID: 108461 Result: Up-regulated in Transcription
  misc_feature: MA Experiment 108461 PARAMETER Experiment Name: At_Germinating_Seeds_cDNA_P Parameter: Age (day) Value: 1 vs. 0
  misc_feature: MA Experiment 108461 PARAMETER Experiment Name: At_Germinating_Seeds_cDNA_P Parameter: Tissue Value: Germinating Seeds
  misc_feature: MA Experiment ID: 108462 Result: Up-regulated in Transcription
  misc_feature: MA Experiment 108462 PARAMETER Experiment Name: At_Germinating_Seeds_cDNA_P Parameter: Age (day) Value: 2 vs. 0
  misc_feature: MA Experiment 108462 PARAMETER Experiment Name: At_Germinating_Seeds_cDNA_P Parameter: Tissue Value: Germinating Seeds
  misc_feature: MA Experiment ID: 108463 Result: Up-regulated in Transcription
  misc_feature: MA Experiment 108463 PARAMETER Experiment Name: At_Germinating_Seeds_cDNA_P Parameter: Age (day) Value: 3 vs. 0
  misc_feature: MA Experiment 108463 PARAMETER Experiment Name: At_Germinating_Seeds_cDNA_P Parameter: Tissue Value: Germinating Seeds
  misc_feature: MA Experiment ID: 108464 Result: Up-regulated in Transcription
  misc_feature: MA Experiment 108464 PARAMETER Experiment Name: At_Germinating_Seeds_cDNA_P Parameter: Age (day) Value: 4 vs. 0
  misc_feature: MA Experiment 108464 PARAMETER Experiment Name: At_Germinating_Seeds_cDNA_P Parameter: Tissue Value: Germinating Seeds
  misc_feature: MA Experiment ID: 108473 Result: Down-regulated in Transcription
  misc_feature: MA Experiment 108473 PARAMETER Experiment Name: At_Drought_Flowers_cDNA_P Parameter: Timepoint (hr) Value: 7 d
  misc_feature: MA Experiment 108473 PARAMETER Experiment Name: At_Drought_Flowers_cDNA_P Parameter: Tissue Value: Flower
  misc_feature: MA Experiment 108473 PARAMETER Experiment Name: At_Drought_Flowers_cDNA_P Parameter: Treatment Value: Drought vs. No Drought
  misc_feature: MA Experiment ID: 108489 Result: Down-regulated in Transcription
  misc_feature: MA Experiment ID: 108569 Result: Up-regulated in Transcription
  misc_feature: MA Experiment 108569 PARAMETER Experiment Name: At_0.001%_MeJA__cDNA_P Parameter: Timepoint (hr) Value: 6
  misc_feature: MA Experiment 108569 PARAMETER Experiment Name: At_0.001%_MeJA__cDNA_P Parameter: Tissue Value: Aerial
  misc_feature: MA Experiment 108569 PARAMETER Experiment Name: At_0.001%_MeJA__cDNA_P Parameter: Treatment Value: 0.001% MeJA vs. No Treatment
  misc_feature: MA Experiment ID: 108577 Result: Up-regulated in Transcription
  misc_feature: MA Experiment 108577 PARAMETER Experiment Name: At_42deg_Heat_cDNA_P Parameter: Temperature (deg C) Value: 42 vs. 22
  misc_feature: MA Experiment 108577 PARAMETER Experiment Name: At_42deg_Heat_cDNA_P Parameter: Timepoint (hr) Value: 6
  misc_feature: MA Experiment 108577 PARAMETER Experiment Name: At_42deg_Heat_cDNA_P Parameter: Tissue Value: Aerial
  misc_feature: MA Experiment ID: 108579 Result: Up-regulated in Transcription
  misc_feature: MA Experiment 108579 PARAMETER Experiment Name: At_4deg_Cold_cDNA_P Parameter: Temperature (deg C) Value: 4 vs. 22
  misc_feature: MA Experiment 108579 PARAMETER Experiment Name: At_4deg_Cold_cDNA_P Parameter: Timepoint (hr) Value: 6
  misc_feature: MA Experiment 108579 PARAMETER Experiment Name: At_4deg_Cold_cDNA_P Parameter: Tissue Value: Aerial
  misc_feature: MA Experiment ID: 108585 Result: Up-regulated in Transcription
  misc_feature: MA Experiment 108585 PARAMETER Experiment Name: At_5mM_NaNP_cDNA_P Parameter: Timepoint (hr) Value: 6
  misc_feature: MA Experiment 108585 PARAMETER Experiment Name: At_5mM_NaNP_cDNA_P Parameter: Tissue Value: Aerial
  misc_feature: MA Experiment 108585 PARAMETER Experiment Name: At_5mM_NaNP_cDNA_P Parameter: Treatment Value: null
  misc_feature: MA Experiment ID: 108595 Result: Up-regulated in Transcription
  misc_feature: MA Experiment 108595 PARAMETER Experiment Name: At_Ler-pi_Ovule_cDNA_P Parameter: Plant Line Value: null
  misc_feature: MA Experiment ID: 20000069 Result: Down-regulated in Transcription
  misc_feature: MA Experiment 20000069 PARAMETER Experiment Name: At_100uM_ABA_Mutants_cDNA_P Parameter: Plant Line Value: CS23
  misc_feature: MA Experiment 20000069 PARAMETER Experiment Name: At_100uM_ABA_Mutants_cDNA_P Parameter: Timepoint (hr) Value: 6
  misc_feature: MA Experiment 20000069 PARAMETER Experiment Name: At_100uM_ABA_Mutants_cDNA_P Parameter: Tissue Value: Aerial
  misc_feature: MA Experiment 20000069 PARAMETER Experiment Name: At_100uM_ABA_Mutants_cDNA_P Parameter: Treatment Value: 100uM ABA vs. No Treatment
  misc_feature: MA Experiment ID: 20000070 Result: Down-regulated in Transcription
  misc_feature: MA Experiment 20000070 PARAMETER Experiment Name: At_100uM_ABA_Mutants_cDNA_P Parameter: Plant Line Value: CS24
  misc_feature: MA Experiment 20000070 PARAMETER Experiment Name: At_100uM_ABA_Mutants_cDNA_P Parameter: Timepoint (hr) Value: 6
  misc_feature: MA Experiment 20000070 PARAMETER Experiment Name: At_100uM_ABA_Mutants_cDNA_P Parameter: Tissue Value: Aerial
  misc_feature: MA Experiment 20000070 PARAMETER Experiment Name: At_100uM_ABA_Mutants_cDNA_P Parameter: Treatment Value: 100uM ABA vs. No Treatment
  misc_feature: MA Experiment ID: 20000071 Result: Down-regulated in Transcription
  misc_feature: MA Experiment 20000071 PARAMETER Experiment Name: At_100uM_ABA_Mutants_cDNA_P Parameter: Plant Line Value: CS8104
  misc_feature: MA Experiment 20000071 PARAMETER Experiment Name: At_100uM_ABA_Mutants_cDNA_P Parameter: Timepoint (hr) Value: 6
  misc_feature: MA Experiment 20000071 PARAMETER Experiment Name: At_100uM_ABA_Mutants_cDNA_P Parameter: Tissue Value: Aerial
  misc_feature: MA Experiment 20000071 PARAMETER Experiment Name: At_100uM_ABA_Mutants_cDNA_P Parameter: Treatment Value: 100uM ABA vs. No Treatment
  misc_feature: MA Experiment ID: 20000086 Result: Down-regulated in Transcription
  misc_feature: MA Experiment 20000086 PARAMETER Experiment Name: At_100uM_ABA_Mutants_cDNA_P Parameter: Plant Line Value: CS22
  misc_feature: MA Experiment 20000086 PARAMETER Experiment Name: At_100uM_ABA_Mutants_cDNA_P Parameter: Timepoint (hr) Value: 6
  misc_feature: MA Experiment 20000086 PARAMETER Experiment Name: At_100uM_ABA_Mutants_cDNA_P Parameter: Tissue Value: Aerial
  misc_feature: MA Experiment 20000086 PARAMETER Experiment Name: At_100uM_ABA_Mutants_cDNA_P Parameter: Treatment Value: 100uM ABA vs. No Treatment
  misc_feature: MA Experiment ID: 20000087 Result: Down-regulated in Transcription
  misc_feature: MA Experiment 20000087 PARAMETER Experiment Name: At_100uM_ABA_Mutants_cDNA_P Parameter: Plant Line Value: WS
  misc_feature: MA Experiment 20000087 PARAMETER Experiment Name: At_100uM_ABA_Mutants_cDNA_P Parameter: Timepoint (hr) Value: 6
  misc_feature: MA Experiment 20000087 PARAMETER Experiment Name: At_100uM_ABA_Mutants_cDNA_P Parameter: Tissue Value: Aerial
  misc_feature: MA Experiment 20000087 PARAMETER Experiment Name: At_100uM_ABA_Mutants_cDNA_P Parameter: Treatment Value: 100uM ABA vs. No Treatment
  misc_feature: MA Experiment ID: 20000088 Result: Down-regulated in Transcription
  misc_feature: MA Experiment 20000088 PARAMETER Experiment Name: At_100uM_ABA_Mutants_cDNA_P Parameter: Plant Line Value: Landsberg
  misc_feature: MA Experiment 20000088 PARAMETER Experiment Name: At_100uM_ABA_Mutants_cDNA_P Parameter: Timepoint (hr) Value: 6
  misc_feature: MA Experiment 20000088 PARAMETER Experiment Name: At_100uM_ABA_Mutants_cDNA_P Parameter: Tissue Value: Aerial
  misc_feature: MA Experiment 20000088 PARAMETER Experiment Name: At_100uM_ABA_Mutants_cDNA_P Parameter: Treatment Value: 100uM ABA vs. No Treatment
  misc_feature: MA Experiment ID: 20000089 Result: Down-regulated in Transcription
  misc_feature: MA Experiment ID: 20000090 Result: Down-regulated in Transcription
  misc_feature: MA Experiment ID: 20000117 Result: Down-regulated in Transcription
  misc_feature: MA Experiment 20000117 PARAMETER Experiment Name: At_100uM_ABA_Mutants_cDNA_P Parameter: Plant Line Value: Columbia
  misc_feature: MA Experiment 20000117 PARAMETER Experiment Name: At_100uM_ABA_Mutants_cDNA_P Parameter: Timepoint (hr) Value: 6
  misc_feature: MA Experiment 20000117 PARAMETER Experiment Name: At_100uM_ABA_Mutants_cDNA_P Parameter: Tissue Value: Aerial
  misc_feature: MA Experiment 20000117 PARAMETER Experiment Name: At_100uM_ABA_Mutants_cDNA_P Parameter: Treatment Value: 100uM ABA vs. No Treatment
  misc_feature: MA Experiment ID: 20000179 Result: Up-regulated in Transcription
  misc_feature: MA Experiment 20000179 PARAMETER Experiment Name: At_Germinating_Seeds_P Parameter: Age (hr) Value: 6 vs. 0
  misc_feature: MA Experiment 20000179 PARAMETER Experiment Name: At_Germinating_Seeds_P Parameter: Tissue Value: Germinating Seeds
  misc_feature: MA Experiment ID: 20000180 Result: Up-regulated in Transcription
  misc_feature: MA Experiment 20000180 PARAMETER Experiment Name: At_Germinating_Seeds_P Parameter: Age (hr) Value: 24 vs. 0
  misc_feature: MA Experiment 20000180 PARAMETER Experiment Name: At_Germinating_Seeds_P Parameter: Tissue Value: Germinating Seeds
  misc_feature: MA Experiment ID: 20000185 Result: Up-regulated in Transcription
  misc_feature: MA Experiment 20000185 PARAMETER Experiment Name: At_Roots__P Parameter: Age (day) Value: 7 vs. 21
  misc_feature: MA Experiment 20000185 PARAMETER Experiment Name: At_Roots__P Parameter: Organism Value: A. thaliana
  misc_feature: MA Experiment 20000185 PARAMETER Experiment Name: At_Roots__P Parameter: Tissue Value: Roots vs. Whole Plant
  misc_feature: MA Experiment ID: 20000227 Result: Up-regulated in Transcription
  misc_feature: MA Experiment 20000227 PARAMETER Experiment Name: At_Root-Tips-vs-Tops_P Parameter: Tissue Value: Root Tips vs. Root Tops
  misc_feature: MA Experiment ID: 20000234 Result: Up-regulated in Transcription
  misc_feature: MA Experiment 20000234 PARAMETER Experiment Name: At_Siliques_P Parameter: Age (day) Value: 21
  misc_feature: MA Experiment 20000234 PARAMETER Experiment Name: At_Siliques_P Parameter: Organism Value: A. thaliana
  misc_feature: MA Experiment 20000234 PARAMETER Experiment Name: At_Siliques_P Parameter: Plant Line Value: WS
  misc_feature: MA Experiment 20000234 PARAMETER Experiment Name: At_Siliques_P Parameter: Tissue Value: Less Than 5mm Siliques vs. Whole Plant
  misc_feature: MA Experiment ID: 20000264 Result: Up-regulated in Transcription
  misc_feature: MA Experiment 20000264 PARAMETER Experiment Name: At_Open_Flower_P Parameter: Age (day) Value: 21
  misc_feature: MA Experiment 20000264 PARAMETER Experiment Name: At_Open_Flower_P Parameter: Plant Line Value: WS
  misc_feature: MA Experiment 20000264 PARAMETER Experiment Name: At_Open_Flower_P Parameter: Tissue Value: Open Flower vs. Whole Plant
  misc_feature: MA Experiment ID: 20000265 Result: Up-regulated in Transcription
  misc_feature: MA Experiment 20000265 PARAMETER Experiment Name: At_Open_Flower_P Parameter: Age (day) Value: 21
  misc_feature: MA Experiment 20000265 PARAMETER Experiment Name: At_Open_Flower_P Parameter: Plant Line Value: WS
  misc_feature: MA Experiment 20000265 PARAMETER Experiment Name: At_Open_Flower_P Parameter: Tissue Value: Closed Flower vs. Whole Plant
  misc_feature: MA Experiment ID: 20000267 Result: Up-regulated in Transcription
  misc_feature: MA Experiment 20000267 PARAMETER Experiment Name: At_Drought_P Parameter: Age (day) Value: 7
  misc_feature: MA Experiment 20000267 PARAMETER Experiment Name: At_Drought_P Parameter: Organism Value: A. thaliana
  misc_feature: MA Experiment 20000267 PARAMETER Experiment Name: At_Drought_P Parameter: Plant Line Value: WS
  misc_feature: MA Experiment 20000267 PARAMETER Experiment Name: At_Drought_P Parameter: Timepoint (hr) Value: 6
  misc_feature: MA Experiment 20000267 PARAMETER Experiment Name: At_Drought_P Parameter: Tissue Value: Whole Plant
  misc_feature: MA Experiment 20000267 PARAMETER Experiment Name: At_Drought_P Parameter: Treatment Value: Drought vs. No Drought
  misc_feature: MA Experiment ID: 20000286 Result: Up-regulated in Transcription
  misc_feature: MA Experiment 20000286 PARAMETER Experiment Name: At_Open_Flower_P Parameter: Age (day) Value: 21
  misc_feature: MA Experiment 20000286 PARAMETER Experiment Name: At_Open_Flower_P Parameter: Plant Line Value: WS
  misc_feature: MA Experiment 20000286 PARAMETER Experiment Name: At_Open_Flower_P Parameter: Tissue Value: Half Open vs. Whole Plant
  misc_feature: MA Experiment ID: 20000308 Result: Up-regulated in Transcription
  misc_feature: MA Experiment 20000308 PARAMETER Experiment Name: At_100mM_NaCl__P Parameter: Age (day) Value: 17
  misc_feature: MA Experiment 20000308 PARAMETER Experiment Name: At_100mM_NaCl__P Parameter: Organism Value: A. thaliana
  misc_feature: MA Experiment 20000308 PARAMETER Experiment Name: At_100mM_NaCl__P Parameter: Plant Line Value: WS
  misc_feature: MA Experiment 20000308 PARAMETER Experiment Name: At_100mM_NaCl__P Parameter: Timepoint (hr) Value: 72
  misc_feature: MA Experiment 20000308 PARAMETER Experiment Name: At_100mM_NaCl__P Parameter: Tissue Value: Whole Plant
  misc_feature: MA Experiment 20000308 PARAMETER Experiment Name: At_100mM_NaCl__P Parameter: Treatment Value: 100mM NaCl vs. No Treatment
  misc_feature: MA Experiment ID: 20000439 Result: Up-regulated in Transcription
  misc_feature: MA Experiment 20000439 PARAMETER Experiment Name: At_Roots__P Parameter: Age (day) Value: 14 vs. 21
  misc_feature: MA Experiment 20000439 PARAMETER Experiment Name: At_Roots__P Parameter: Organism Value: A. thaliana
  misc_feature: MA Experiment 20000439 PARAMETER Experiment Name: At_Roots__P Parameter: Tissue Value: Roots vs. Whole Plant
  misc_feature: MA Experiment ID: 20000573 Result: Down-regulated in Transcription
  misc_feature: MA Experiment 20000573 PARAMETER Experiment Name: At_100uM_ABA_Mutants__P Parameter: Organism Value: A. thaliana
  misc_feature: MA Experiment 20000573 PARAMETER Experiment Name: At_100uM_ABA_Mutants__P Parameter: Plant Line Value: CS22 vs. Ler wt
  misc_feature: MA Experiment 20000573 PARAMETER Experiment Name: At_100uM_ABA_Mutants__P Parameter: Timepoint (hr) Value: N/A
  misc_feature: MA Experiment 20000573 PARAMETER Experiment Name: At_100uM_ABA_Mutants__P Parameter: Tissue Value: Whole Plant
  misc_feature: MA Experiment 20000573 PARAMETER Experiment Name: At_100uM_ABA_Mutants__P Parameter: Treatment Value: None
  misc_feature: MA Experiment ID: 20001248 Result: Down-regulated in Transcription
  misc_feature: MA Experiment 20001248 PARAMETER Experiment Name: At_Far-red-induction_P Parameter: Age (day) Value: 7
  misc_feature: MA Experiment 20001248 PARAMETER Experiment Name: At_Far-red-induction_P Parameter: Light Value: Far-red vs. White
  misc_feature: MA Experiment 20001248 PARAMETER Experiment Name: At_Far-red-induction_P Parameter: Organism Value: A. thaliana
  misc_feature: MA Experiment 20001248 PARAMETER Experiment Name: At_Far-red-induction_P Parameter: Plant Line Value: Columbia
  misc_feature: MA Experiment 20001248 PARAMETER Experiment Name: At_Far-red-induction_P Parameter: Timepoint (hr) Value: 4
  misc_feature: MA Experiment 20001248 PARAMETER Experiment Name: At_Far-red-induction_P Parameter: Tissue Value: Whole Plant
  misc_feature: MA Experiment ID: 20001554 Result: Up-regulated in Transcription
  misc_feature: MA Experiment 20001554 PARAMETER Experiment Name: At_Drought_Soil_Dry_P Parameter: Age (day) Value: 21
  misc_feature: MA Experiment 20001554 PARAMETER Experiment Name: At_Drought_Soil_Dry_P Parameter: Organism Value: A. thaliana
  misc_feature: MA Experiment 20001554 PARAMETER Experiment Name: At_Drought_Soil_Dry_P Parameter: Plant Line Value: WS
  misc_feature: MA Experiment 20001554 PARAMETER Experiment Name: At_Drought_Soil_Dry_P Parameter: Post Timepoint (hr) Value: None
  misc_feature: MA Experiment 20001554 PARAMETER Experiment Name: At_Drought_Soil_Dry_P Parameter: Post-Treatment Value: None
  misc_feature: MA Experiment 20001554 PARAMETER Experiment Name: At_Drought_Soil_Dry_P Parameter: Timepoint (day) Value: 7
  misc_feature: MA Experiment 20001554 PARAMETER Experiment Name: At_Drought_Soil_Dry_P Parameter: Treatment Value: Drought vs. No Drought
  misc_feature: MA Experiment ID: 20001555 Result: Up-regulated in Transcription
  misc_feature: MA Experiment 20001555 PARAMETER Experiment Name: At_Drought_Soil_Dry_P Parameter: Age (day) Value: 24
  misc_feature: MA Experiment 20001555 PARAMETER Experiment Name: At_Drought_Soil_Dry_P Parameter: Organism Value: A. thaliana
  misc_feature: MA Experiment 20001555 PARAMETER Experiment Name: At_Drought_Soil_Dry_P Parameter: Plant Line Value: WS
  misc_feature: MA Experiment 20001555 PARAMETER Experiment Name: At_Drought_Soil_Dry_P Parameter: Post Timepoint (hr) Value: None
  misc_feature: MA Experiment 20001555 PARAMETER Experiment Name: At_Drought_Soil_Dry_P Parameter: Post-Treatment Value: None
  misc_feature: MA Experiment 20001555 PARAMETER Experiment Name: At_Drought_Soil_Dry_P Parameter: Timepoint (day) Value: 10
  misc_feature: MA Experiment 20001555 PARAMETER Experiment Name: At_Drought_Soil_Dry_P Parameter: Treatment Value: Drought vs. No Drought
  misc_feature: MA Experiment ID: 20001556 Result: Up-regulated in Transcription
  misc_feature: MA Experiment 20001556 PARAMETER Experiment Name: At_Drought_Soil_Dry_P Parameter: Age (day) Value: 26
  misc_feature: MA Experiment 20001556 PARAMETER Experiment Name: At_Drought_Soil_Dry_P Parameter: Organism Value: A. thaliana
  misc_feature: MA Experiment 20001556 PARAMETER Experiment Name: At_Drought_Soil_Dry_P Parameter: Plant Line Value: WS
  misc_feature: MA Experiment 20001556 PARAMETER Experiment Name: At_Drought_Soil_Dry_P Parameter: Post Timepoint (hr) Value: None
  misc_feature: MA Experiment 20001556 PARAMETER Experiment Name: At_Drought_Soil_Dry_P Parameter: Post-Treatment Value: None
  misc_feature: MA Experiment 20001556 PARAMETER Experiment Name: At_Drought_Soil_Dry_P Parameter: Timepoint (day) Value: 12
  misc_feature: MA Experiment 20001556 PARAMETER Experiment Name: At_Drought_Soil_Dry_P Parameter: Treatment Value: Drought vs. No Drought
  misc_feature: MA Experiment ID: 20001557 Result: Up-regulated in Transcription
  misc_feature: MA Experiment 20001557 PARAMETER Experiment Name: At_Drought_Soil_Dry_P Parameter: Age (day) Value: 27
  misc_feature: MA Experiment 20001557 PARAMETER Experiment Name: At_Drought_Soil_Dry_P Parameter: Organism Value: A. thaliana
  misc_feature: MA Experiment 20001557 PARAMETER Experiment Name: At_Drought_Soil_Dry_P Parameter: Plant Line Value: WS
  misc_feature: MA Experiment 20001557 PARAMETER Experiment Name: At_Drought_Soil_Dry_P Parameter: Post Timepoint (hr) Value: 3
  misc_feature: MA Experiment 20001557 PARAMETER Experiment Name: At_Drought_Soil_Dry_P Parameter: Post-Treatment Value: Re-Water vs. No Drought
  misc_feature: MA Experiment 20001557 PARAMETER Experiment Name: At_Drought_Soil_Dry_P Parameter: Timepoint (day) Value: 13
  misc_feature: MA Experiment 20001557 PARAMETER Experiment Name: At_Drought_Soil_Dry_P Parameter: Treatment Value: Drought vs. No Drought
  misc_feature: MA Experiment ID: 20001559 Result: Up-regulated in Transcription
  misc_feature: MA Experiment 20001559 PARAMETER Experiment Name: At_Drought_Soil_Dry_P Parameter: Age (day) Value: 28
  misc_feature: MA Experiment 20001559 PARAMETER Experiment Name: At_Drought_Soil_Dry_P Parameter: Organism Value: A. thaliana
  misc_feature: MA Experiment 20001559 PARAMETER Experiment Name: At_Drought_Soil_Dry_P Parameter: Plant Line Value: WS
  misc_feature: MA Experiment 20001559 PARAMETER Experiment Name: At_Drought_Soil_Dry_P Parameter: Post Timepoint (hr) Value: 29
  misc_feature: MA Experiment 20001559 PARAMETER Experiment Name: At_Drought_Soil_Dry_P Parameter: Post-Treatment Value: Re-Water vs. No Drought
  misc_feature: MA Experiment 20001559 PARAMETER Experiment Name: At_Drought_Soil_Dry_P Parameter: Timepoint (day) Value: 14
  misc_feature: MA Experiment 20001559 PARAMETER Experiment Name: At_Drought_Soil_Dry_P Parameter: Treatment Value: Drought vs. No Drought
  misc_feature: MA Experiment ID: 20001757 Result: Down-regulated in Transcription
  misc_feature: MA Experiment 20001757 PARAMETER Experiment Name: At_50mM_NH4NO3_L-to-H_P Parameter: Timepoint (hr) Value: 6
  misc_feature: MA Experiment 20001757 PARAMETER Experiment Name: At_50mM_NH4NO3_L-to-H_P Parameter: Tissue Value: Leaf
  misc_feature: MA Experiment 20001757 PARAMETER Experiment Name: At_50mM_NH4NO3_L-to-H_P Parameter: Treatment Value: 50mM NH4NO3 vs 100mM Mannitol
  misc_feature: MA Experiment ID: 20001904 Result: Up-regulated in Transcription
  misc_feature: MA Experiment 20001904 PARAMETER Experiment Name: At_Drought_Reproduction_P Parameter: Age (day) Value: 37
  misc_feature: MA Experiment 20001904 PARAMETER Experiment Name: At_Drought_Reproduction_P Parameter: Organism Value: A. thaliana
  misc_feature: MA Experiment 20001904 PARAMETER Experiment Name: At_Drought_Reproduction_P Parameter: Plant Line Value: WS
  misc_feature: MA Experiment 20001904 PARAMETER Experiment Name: At_Drought_Reproduction_P Parameter: Timepoint (day) Value: 7
  misc_feature: MA Experiment 20001904 PARAMETER Experiment Name: At_Drought_Reproduction_P Parameter: Tissue Value: Rosettes
  misc_feature: MA Experiment 20001904 PARAMETER Experiment Name: At_Drought_Reproduction_P Parameter: Treatment Value: Drought vs. No Drought
agatctctcttaatttagtcttttgtcttcgtaattacaatggctccaggaactttgactgagctagccggagagtctaagctcaactctaaatttgtcagggacgaagatgaacggcccaaagtcgcttacaatgtgtttagcgacgaaatcccggtgatctctctcgccggtatcgatgacgtcgatggaaaaagaggagagatctgccgtcagatcgttgaggcttgtgagaattggggcatcttccaagtggtcgatcacggcgtcgatactaacttagtggcggatatgactcgtctcgctcgtgacttctttgctttacctccggaagacaagctccgtttcgacatgtccggtggtaaaaaaggaggattcatcgtctctagtcacctccagggagaggctgtgcaagattggagagagattgtaacgtatttctcgtacccggtgagaaacagagactactcacggtggccagataagccggaaggttgggtgaaagtgacggaggagtatagtgagaggcttatgagtttggcttgtaagcttcttgaggttttgtctgaagctatgggtcttgagaaagagtctcttaccaatgcatgcgtcgatatggaccaaaagattgttgttaattattacccaaaatgccctcagcctgatctcaccctcggactcaagcgtcacactgaccctggaaccattaccttgctgctacaagaccaagtcggtggattacaagccacacgtgacaatggcaagacatggattacggttcagcctgttgaaggagcgtttgtcgtcaatctcggcgaccacggccattttttgagcaatgggaggttcaagaatgctgatcatcaggccgtggtgaactctaactcgagcagattatccatagccacgttccagaaccccgcgccggatgccacagtgtatccactgaaagtaagagaaggagagaaggcaatattggaggagccaatcacgtttgccgagatgtataagagaaagatgggaagagatttggagcttgctcgcctcaagaagctggctaaagaggagcgtgaccacaaagaagttgacaagcctgtcgaccaaatcttcgcttagaatctttgtgttcttgcttacttgttgttgcgttggttctgttttgtacgttggtactgaaaattatgctaggctcggtgtgttttgtgtttatttatgttctttcgaatcataaagaaataatgataattgatgcacttgtctatgacaaaaacatcatactccacctgtatttgacgcgttgggtttatgtcaaaaagcattaatacttc

SEQ ID NO: 23579 - protein, 358 aa, Arabidopsis thaliana
  peptide (1)..(358): Ceres Seq. ID no. 13487111
  misc_feature (15)..(358): Homolog of NCBI NO: 12578941 NR Description: flavanone-3-hydroxylase [Arabidopsis thaliana]
  misc_feature (11)..(350): Homolog of NCBI NO: 24740452 NR Description: flavanone-3-hydroxylase [Arabidopsis thaliana]
  misc_feature (15)..(358): Homolog of NCBI NO: 12578935 NR Description: flavanone-3-hydroxylase [Arabidopsis thaliana]
  misc_feature (15)..(358): Homolog of NCBI NO: 12578929 NR Description: flavanone-3-hydroxylase [Arabidopsis thaliana]
  misc_feature (2)..(358): Homolog of NCBI NO: 729506 NR Description: Naringenin,2-oxoglutarate 3-dioxygenase
  misc_feature (15)..(358): Homolog of NCBI NO: 12578915 NR Description: flavanone-3-hydroxylase [Arabidopsis thaliana]
  misc_feature (15)..(358): Homolog of NCBI NO: 12578949 NR Description: flavanone-3-hydroxylase [Arabidopsis thaliana]
  misc_feature (1)..(358): Homolog of NCBI NO: 21593152 NR Description: flavanone 3-hydroxylase FH3 [Arabidopsis thaliana]
  misc_feature (1)..(358): Homolog of NCBI NO: 1002803 NR Description: flavanone 3-hydroxylase
  misc_feature (1)..(358): Homolog of NCBI NO: 15230433 NR Description: naringenin 3-dioxygenase (flavanone
MAPGTLTELAGESKLNSKFVRDEDERPKVAYNVFSDEIPVISLAGIDDVDGKRGEICRQIVEACENWGIFQVVDHGVDTNLVADMTRLARDFFALPPEDKLRFDMSGGKKGGFIVSSHLQGEAVQDWREIVTYFSYPVRNRDYSRWPDKPEGWVKVTEEYSERLMSLACKLLEVLSEAMGLEKESLTNACVDMDQKIVVNYYPKCPQPDLTLGLKRHTDPGTITLLLQDQVGGLQATRDNGKTWITVQPVEGAFVVNLGDHGHFLSNGRFKNADHQAVVNSNSSRLSIATFQNPAPDATVYPLKVREGEKAILEEPITFAEMYKRKMGRDLELARLKKLAKEERDHKEVDKPVDQIFA

SEQ ID NO: 23580 - protein, 274 aa, Arabidopsis thaliana
  peptide (1)..(274): Ceres Seq. ID no. 13487112
  misc_feature (1)..(274): Homolog of NCBI NO: 12578941 NR Description: flavanone-3-hydroxylase [Arabidopsis thaliana]
  misc_feature (1)..(266): Homolog of NCBI NO: 24740452 NR Description: flavanone-3-hydroxylase [Arabidopsis thaliana]
  misc_feature (1)..(274): Homolog of NCBI NO: 12578935 NR Description: flavanone-3-hydroxylase [Arabidopsis thaliana]
  misc_feature (1)..(274): Homolog of NCBI NO: 12578929 NR Description: flavanone-3-hydroxylase [Arabidopsis thaliana]
  misc_feature (1)..(274): Homolog of NCBI NO: 729506 NR Description: Naringenin,2-oxoglutarate 3-dioxygenase
  misc_feature (1)..(274): Homolog of NCBI NO: 12578915 NR Description: flavanone-3-hydroxylase [Arabidopsis thaliana]
  misc_feature (1)..(274): Homolog of NCBI NO: 12578949 NR Description: flavanone-3-hydroxylase [Arabidopsis thaliana]
  misc_feature (1)..(274): Homolog of NCBI NO: 21593152 NR Description: flavanone 3-hydroxylase FH3 [Arabidopsis thaliana]
  misc_feature (1)..(274): Homolog of NCBI NO: 1002803 NR Description: flavanone 3-hydroxylase
  misc_feature (1)..(274): Homolog of NCBI NO: 15230433 NR Description: naringenin 3-dioxygenase (flavanone
MTRLARDFFALPPEDKLRFDMSGGKKGGFIVSSHLQGEAVQDWREIVTYFSYPVRNRDYSRWPDKPEGWVKVTEEYSERLMSLACKLLEVLSEAMGLEKESLTNACVDMDQKIVVNYYPKCPQPDLTLGLKRHTDPGTITLLLQDQVGGLQATRDNGKTWITVQPVEGAFVVNLGDHGHFLSNGRFKNADHQAVVNSNSSRLSIATFQNPAPDATVYPLKVREGEKAILEEPITFAEMYKRKMGRDLELARLKKLAKEERDHKEVDKPVDQIFA

SEQ ID NO: 23581 - protein, 254 aa, Arabidopsis thaliana
  peptide (1)..(254): Ceres Seq. ID no. 13487113
  misc_feature (1)..(254): Homolog of NCBI NO: 12578941 NR Description: flavanone-3-hydroxylase [Arabidopsis thaliana]
  misc_feature (1)..(246): Homolog of NCBI NO: 24740452 NR Description: flavanone-3-hydroxylase [Arabidopsis thaliana]
  misc_feature (1)..(254): Homolog of NCBI NO: 12578935 NR Description: flavanone-3-hydroxylase [Arabidopsis thaliana]
  misc_feature (1)..(254): Homolog of NCBI NO: 12578929 NR Description: flavanone-3-hydroxylase [Arabidopsis thaliana]
  misc_feature (1)..(254): Homolog of NCBI NO: 729506 NR Description: Naringenin,2-oxoglutarate 3-dioxygenase
  misc_feature (1)..(254): Homolog of NCBI NO: 12578915 NR Description: flavanone-3-hydroxylase [Arabidopsis thaliana]
  misc_feature (1)..(254): Homolog of NCBI NO: 12578949 NR Description: flavanone-3-hydroxylase [Arabidopsis thaliana]
  misc_feature (1)..(254): Homolog of NCBI NO: 21593152 NR Description: flavanone 3-hydroxylase FH3 [Arabidopsis thaliana]
  misc_feature (1)..(254): Homolog of NCBI NO: 1002803 NR Description: flavanone 3-hydroxylase
  misc_feature (1)..(254): Homolog of NCBI NO: 15230433 NR Description: naringenin 3-dioxygenase (flavanone
MSGGKKGGFIVSSHLQGEAVQDWREIVTYFSYPVRNRDYSRWPDKPEGWVKVTEEYSERLMSLACKLLEVLSEAMGLEKESLTNACVDMDQKIVVNYYPKCPQPDLTLGLKRHTDPGTITLLLQDQVGGLQATRDNGKTWITVQPVEGAFVVNLGDHGHFLSNGRFKNADHQAVVNSNSSRLSIATFQNPAPDATVYPLKVREGEKAILEEPITFAEMYKRKMGRDLELARLKKLAKEERDHKEVDKPVDQIFA

SEQ ID NO: 23582 - DNA, 1523 bp, Arabidopsis thaliana
  misc_feature (1)..(1523): Ceres Seq. ID no. 13576517
  misc_feature: MA Experiment ID: 108434 Result: Down-regulated in Transcription
  misc_feature: MA Experiment 108434 PARAMETER Experiment Name: At_Root_Tips_cDNA_P Parameter: Tissue Value: Root Tips
  misc_feature: MA Experiment ID: 108435 Result: Up-regulated in Transcription
  misc_feature: MA Experiment 108435 PARAMETER Experiment Name: At_stm_Mutants_cDNA_P Parameter: Plant Line Value: wt Landsburg vs stm
  misc_feature: MA Experiment 108435 PARAMETER Experiment Name: At_stm_Mutants_cDNA_P Parameter: Tissue Value: Shoot Apical Meristem Region
  misc_feature: MA Experiment ID: 108463 Result: Up-regulated in Transcription
  misc_feature: MA Experiment 108463 PARAMETER Experiment Name: At_Germinating_Seeds_cDNA_P Parameter: Age (day) Value: 3 vs. 0
  misc_feature: MA Experiment 108463 PARAMETER Experiment Name: At_Germinating_Seeds_cDNA_P Parameter: Tissue Value: Germinating Seeds
  misc_feature: MA Experiment ID: 108464 Result: Up-regulated in Transcription
  misc_feature: MA Experiment 108464 PARAMETER Experiment Name: At_Germinating_Seeds_cDNA_P Parameter: Age (day) Value: 4 vs. 0
  misc_feature: MA Experiment 108464 PARAMETER Experiment Name: At_Germinating_Seeds_cDNA_P Parameter: Tissue Value: Germinating Seeds
  misc_feature: MA Experiment ID: 108473 Result: Up-regulated in Transcription
  misc_feature: MA Experiment 108473 PARAMETER Experiment Name: At_Drought_Flowers_cDNA_P Parameter: Timepoint (hr) Value: 7 d
  misc_feature: MA Experiment 108473 PARAMETER Experiment Name: At_Drought_Flowers_cDNA_P Parameter: Tissue Value: Flower
  misc_feature: MA Experiment 108473 PARAMETER Experiment Name: At_Drought_Flowers_cDNA_P Parameter: Treatment Value: Drought vs. No Drought
  misc_feature: MA Experiment ID: 108489 Result: Down-regulated in Transcription
  misc_feature: MA Experiment ID: 108595 Result: Up-regulated in Transcription
  misc_feature: MA Experiment 108595 PARAMETER Experiment Name: At_Ler-pi_Ovule_cDNA_P Parameter: Plant Line Value: null
  misc_feature: MA Experiment ID: 20001908 Result: Up-regulated in Transcription
  misc_feature: MA Experiment 20001908 PARAMETER Experiment Name: At_Drought_Reproduction_P Parameter: Age (day) Value: 40
  misc_feature: MA Experiment 20001908 PARAMETER Experiment Name: At_Drought_Reproduction_P Parameter: Organism Value: A. thaliana
  misc_feature: MA Experiment 20001908 PARAMETER Experiment Name: At_Drought_Reproduction_P Parameter: Plant Line Value: WS
  misc_feature: MA Experiment 20001908 PARAMETER Experiment Name: At_Drought_Reproduction_P Parameter: Timepoint (day) Value: 10
  misc_feature: MA Experiment 20001908 PARAMETER Experiment Name: At_Drought_Reproduction_P Parameter: Tissue Value: Siliques
  misc_feature: MA Experiment 20001908 PARAMETER Experiment Name: At_Drought_Reproduction_P Parameter: Treatment Value: Drought vs. No Drought
atgtaaatttaagtcctagctccattttcgttttcttcttctcaaaaaaaaaaaacaaaaaaaaaagtttttgatcgattgatgagttttctcatttattgatctctctagttttaacttgtgtttggtgaaaccggtactggcgaagtttaaaacacaagtgtaaacacaaatttataaaaatttcaaatcatgtaaatttcgtctctatcaatttatttcccctcaccaaaaaaaaaacaaaaaaaaattagaatttagtacttttattttaaacaaaaaccaaaaaaaaaaaccaaaaaaaaaaacgttggaaatggctccaccggaggctgaggtgggtgcggtaatggtgatggctcctccaacgccggggacaccgggaacaccgggaggaccgttgatcacggggatgagagtggattcaatgtcgtttgatcatcggaaaccaacgcctcgatgcaaatgcttgccggtgatgggatcaacttggggtcaacatgacacatgcttcaccgattttccctctcctgatgtctccctcactcgcaagcttggagccgagttcgtgggaacattcatcttgatattcaccgcgacagccggtccaatcgtgaaccagaaatacgatggagcagaaaccctaatcggtaacgctgcatgcgcaggactcgcagtgatgatcataatactctcaacaggtcatatctcaggggctcacctaaacccatcactgaccatagcattcgctgctctaaggcacttcccttgggcacacgtccctgcttacatagcggctcaagtctcagcttccatttgcgcttcattcgcacttaaaggagtgttccatccttttatgtccggtggtgtcactattccatctgttagccttggacaagcctttgctcttgagttcatcatcactttcattctcctctttgttgtaactgccgtcgctaccgacactcgtgccgttggagaattggcaggtatagccgttggagccacggtcatgctcaatattctagtcgcagggccatcgactggtggatctatgaatcctgtgagaactctaggaccagccgttgcatcaggaaactataggtcactatgggtgtatctggtggctcctacacttggtgccatatctggtgcagcggtctacacaggtgttaagcttaacgatagcgtgactgacccgcctcgtccggttaggagctttcgtcgttaagtgagtgagagacttgtttacaagtcttttgctttgtataattttactgtatgattatgtaatgatatgaaaaagctttggaagcttgtgtgaagaataaaaggcgatgtgactataagtccacgcatggcatcggtctatataaacctgatgcgaacttgtctcgtcattgtcaaattgtgtctgtgtaataatacacttttatgtgtggtttgggtttctttgttggtttgctgttgtatgttacctcggagacgaggctgtttttattaataaaatctatggcatgtgg

SEQ ID NO: 23583 - protein, 304 aa, Arabidopsis thaliana
  peptide (1)..(304): Ceres Seq. ID no. 13576518
  misc_feature (70)..(283): Pfam Name: Major intrinsic protein Pfam Description: Major intrinsic protein
  misc_feature (60)..(304): Homolog of NCBI NO: 15240348 NR Description: major intrinsic protein (MIP) family [Arabidopsis
  misc_feature (54)..(287): Homolog of NCBI NO: 17025880 NR Description: multifunctional aquaporin [Medicago truncatula]
  misc_feature (63)..(290): Homolog of NCBI NO: 541944 NR Description: nodulin-26 - soybean
  misc_feature (70)..(294): Homolog of NCBI NO: 9971217 NR Description: MIP [Adiantum capillus-veneris]
  misc_feature (70)..(288): Homolog of NCBI NO: 28971941 NR Description: putative nodulin [Oryza sativa (japonica
  misc_feature (68)..(288): Homolog of NCBI NO: 37573042 NR Description: putative nodulin [Oryza sativa (japonica
  misc_feature (80)..(304): Homolog of NCBI NO: 37536006 NR Description: putative nodulin-26 [Oryza sativa (japonica
  misc_feature (16)..(304): Homolog of NCBI NO: 15220826 NR Description: major intrinsic protein (MIP) family [Arabidopsis
  misc_feature (16)..(304): Homolog of NCBI NO: 13447791 NR Description: NOD26-like membrane integral protein ZmNIP3-1
  misc_feature (1)..(304): Homolog of NCBI NO: 15235034 NR Description: major intrinsic protein (MIP) family [Arabidopsis
MAPPEAEVGAVMVMAPPTPGTPGTPGGPLITGMRVDSMSFDHRKPTPRCKCLPVMGSTWGQHDTCFTDFPSPDVSLTRKLGAEFVGTFILIFTATAGPIVNQKYDGAETLIGNAACAGLAVMIIILSTGHISGAHLNPSLTIAFAALRHFPWAHVPAYIAAQVSASICASFALKGVFHPFMSGGVTIPSVSLGQAFALEFIITFILLFVVTAVATDTRAVGELAGIAVGATVMLNILVAGPSTGGSMNPVRTLGPAVASGNYRSLWVYLVAPTLGAISGAAVYTGVKLNDSVTDPPRPVRSFRR

SEQ ID NO: 23584 - protein, 293 aa, Arabidopsis thaliana
  peptide (1)..(293): Ceres Seq. ID no. 13576519
  misc_feature (59)..(272): Pfam Name: Major intrinsic protein Pfam Description: Major intrinsic protein
  misc_feature (1)..(293): Homolog of NCBI NO: 15235034 NR Description: major intrinsic protein (MIP) family [Arabidopsis
  misc_feature (49)..(293): Homolog of NCBI NO: 15240348 NR Description: major intrinsic protein (MIP) family [Arabidopsis
  misc_feature (43)..(276): Homolog of NCBI NO: 17025880 NR Description: multifunctional aquaporin [Medicago truncatula]
  misc_feature (52)..(279): Homolog of NCBI NO: 541944 NR Description: nodulin-26 - soybean
  misc_feature (59)..(283): Homolog of NCBI NO: 9971217 NR Description: MIP [Adiantum capillus-veneris]
  misc_feature (59)..(277): Homolog of NCBI NO: 28971941 NR Description: putative nodulin [Oryza sativa (japonica
  misc_feature (57)..(277): Homolog of NCBI NO: 37573042 NR Description: putative nodulin [Oryza sativa (japonica
  misc_feature (69)..(293): Homolog of NCBI NO: 37536006 NR Description: putative nodulin-26 [Oryza sativa (japonica
  misc_feature (5)..(293): Homolog of NCBI NO: 15220826 NR Description: major intrinsic protein (MIP) family [Arabidopsis
  misc_feature (5)..(293): Homolog of NCBI NO: 13447791 NR Description: NOD26-like membrane integral protein ZmNIP3-1
MVMAPPTPGTPGTPGGPLITGMRVDSMSFDHRKPTPRCKCLPVMGSTWGQHDTCFTDFPSPDVSLTRKLGAEFVGTFILIFTATAGPIVNQKYDGAETLIGNAACAGLAVMIIILSTGHISGAHLNPSLTIAFAALRHFPWAHVPAYIAAQVSASICASFALKGVFHPFMSGGVTIPSVSLGQAFALEFIITFILLFVVTAVATDTRAVGELAGIAVGATVMLNILVAGPSTGGSMNPVRTLGPAVASGNYRSLWVYLVAPTLGAISGAAVYTGVKLNDSVTDPPRPVRSFRR

SEQ ID NO: 23585 - protein, 291 aa, Arabidopsis thaliana
  peptide (1)..(291): Ceres Seq. ID no. 13576520
  misc_feature (57)..(270): Pfam Name: Major intrinsic protein Pfam Description: Major intrinsic protein
  misc_feature (47)..(291): Homolog of NCBI NO: 15240348 NR Description: major intrinsic protein (MIP) family [Arabidopsis
  misc_feature (41)..(274): Homolog of NCBI NO: 17025880 NR Description: multifunctional aquaporin [Medicago truncatula]
  misc_feature (50)..(277): Homolog of NCBI NO: 541944 NR Description: nodulin-26 - soybean
  misc_feature (57)..(281): Homolog of NCBI NO: 9971217 NR Description: MIP [Adiantum capillus-veneris]
  misc_feature (57)..(275): Homolog of NCBI NO: 28971941 NR Description: putative nodulin [Oryza sativa (japonica
  misc_feature (55)..(275): Homolog of NCBI NO: 37573042 NR Description: putative nodulin [Oryza sativa (japonica
  misc_feature (67)..(291): Homolog of NCBI NO: 37536006 NR Description: putative nodulin-26 [Oryza sativa (japonica
  misc_feature (3)..(291): Homolog of NCBI NO: 15220826 NR Description: major intrinsic protein (MIP) family [Arabidopsis
  misc_feature (3)..(291): Homolog of NCBI NO: 13447791 NR Description: NOD26-like membrane integral protein ZmNIP3-1
  misc_feature (1)..(291): Homolog of NCBI NO: 15235034 NR Description: major intrinsic protein (MIP) family [Arabidopsis
MAPPTPGTPGTPGGPLITGMRVDSMSFDHRKPTPRCKCLPVMGSTWGQHDTCFTDFPSPDVSLTRKLGAEFVGTFILIFTATAGPIVNQKYDGAETLIGNAACAGLAVMIIILSTGHISGAHLNPSLTIAFAALRHFPWAHVPAYIAAQVSASICASFALKGVFHPFMSGGVTIPSVSLGQAFALEFIITFILLFVVTAVATDTRAVGELAGIAVGATVMLNILVAGPSTGGSMNPVRTLGPAVASGNYRSLWVYLVAPTLGAISGAAVYTGVKLNDSVTDPPRPVRSFRR

SEQ ID NO: 23586 - DNA, 1550 bp, Arabidopsis thaliana
  misc_feature (1)..(1550): Ceres Seq. ID no. 12483456
  misc_feature: MA Experiment ID: 108464 Result: Up-regulated in Transcription
  misc_feature: MA Experiment 108464 PARAMETER Experiment Name: At_Germinating_Seeds_cDNA_P Parameter: Age (day) Value: 4 vs. 0
  misc_feature: MA Experiment 108464 PARAMETER Experiment Name: At_Germinating_Seeds_cDNA_P Parameter: Tissue Value: Germinating Seeds
  misc_feature: MA Experiment ID: 108573 Result: Up-regulated in Transcription
  misc_feature: MA Experiment 108573 PARAMETER Experiment Name: At_Drought_cDNA_P Parameter: Timepoint (hr) Value: 6
  misc_feature: MA Experiment 108573 PARAMETER Experiment Name: At_Drought_cDNA_P Parameter: Tissue Value: Aerial
  misc_feature: MA Experiment 108573 PARAMETER Experiment Name: At_Drought_cDNA_P Parameter: Treatment Value: Drought vs. No Drought
  misc_feature: MA Experiment ID: 108574 Result: Up-regulated in Transcription
  misc_feature: MA Experiment 108574 PARAMETER Experiment Name: At_Wounding__cDNA_P Parameter: Timepoint (hr) Value: 1
  misc_feature: MA Experiment 108574 PARAMETER Experiment Name: At_Wounding__cDNA_P Parameter: Tissue Value: Aerial
  misc_feature: MA Experiment 108574 PARAMETER Experiment Name: At_Wounding__cDNA_P Parameter: Treatment Value: Wounding vs. No Wounding
  misc_feature: MA Experiment ID: 108579 Result: Up-regulated in Transcription
  misc_feature: MA Experiment 108579 PARAMETER Experiment Name: At_4deg_Cold_cDNA_P Parameter: Temperature (deg C) Value: 4 vs. 22
  misc_feature: MA Experiment 108579 PARAMETER Experiment Name: At_4deg_Cold_cDNA_P Parameter: Timepoint (hr) Value: 6
  misc_feature: MA Experiment 108579 PARAMETER Experiment Name: At_4deg_Cold_cDNA_P Parameter: Tissue Value: Aerial
  misc_feature: MA Experiment ID: 108585 Result: Up-regulated in Transcription
  misc_feature: MA Experiment 108585 PARAMETER Experiment Name: At_5mM_NaNP_cDNA_P Parameter: Timepoint (hr) Value: 6
  misc_feature: MA Experiment 108585 PARAMETER Experiment Name: At_5mM_NaNP_cDNA_P Parameter: Tissue Value: Aerial
  misc_feature: MA Experiment 108585 PARAMETER Experiment Name: At_5mM_NaNP_cDNA_P Parameter: Treatment Value: null
  misc_feature: MA Experiment ID: 20000072 Result: Up-regulated in Transcription
  misc_feature: MA Experiment 20000072 PARAMETER Experiment Name: At_100uM_ABA_Mutants_cDNA_P Parameter: Plant Line Value: CS8105
  misc_feature: MA Experiment 20000072 PARAMETER Experiment Name: At_100uM_ABA_Mutants_cDNA_P Parameter: Timepoint (hr) Value: 6
  misc_feature: MA Experiment 20000072 PARAMETER Experiment Name: At_100uM_ABA_Mutants_cDNA_P Parameter: Tissue Value: Aerial
  misc_feature: MA Experiment 20000072 PARAMETER Experiment Name: At_100uM_ABA_Mutants_cDNA_P Parameter: Treatment Value: 100uM ABA vs. No Treatment
  misc_feature: MA Experiment ID: 20000089 Result: Down-regulated in Transcription
  misc_feature: MA Experiment ID: 20000090 Result: Down-regulated in Transcription
  misc_feature: MA Experiment ID: 20000093 Result: Up-regulated in Transcription
  misc_feature: MA Experiment 20000093 PARAMETER Experiment Name: At_42deg_Heat_cDNA_P Parameter: Temperature (deg C) Value: 42 vs. 22
  misc_feature: MA Experiment 20000093 PARAMETER Experiment Name: At_42deg_Heat_cDNA_P Parameter: Timepoint (hr) Value: 0.5
  misc_feature: MA Experiment 20000093 PARAMETER Experiment Name: At_42deg_Heat_cDNA_P Parameter: Tissue Value: Aerial
  misc_feature: MA Experiment ID: 20000112 Result: Up-regulated in Transcription
  misc_feature: MA Experiment 20000112 PARAMETER Experiment Name: At_42deg_Heat_cDNA_P Parameter: Temperature (deg C) Value: 42 vs. 22
  misc_feature: MA Experiment 20000112 PARAMETER Experiment Name: At_42deg_Heat_cDNA_P Parameter: Timepoint (hr) Value: 2
  misc_feature: MA Experiment 20000112 PARAMETER Experiment Name: At_42deg_Heat_cDNA_P Parameter: Tissue Value: Aerial
  misc_feature: MA Experiment ID: 20000113 Result: Up-regulated in Transcription
  misc_feature: MA Experiment 20000113 PARAMETER Experiment Name: At_42deg_Heat_cDNA_P Parameter: Temperature (deg C) Value: 42 vs. 22
  misc_feature: MA Experiment 20000113 PARAMETER Experiment Name: At_42deg_Heat_cDNA_P Parameter: Timepoint (hr) Value: 8
  misc_feature: MA Experiment 20000113 PARAMETER Experiment Name: At_42deg_Heat_cDNA_P Parameter: Tissue Value: Aerial
  misc_feature: MA Experiment ID: 20000144 Result: Up-regulated in Transcription
  misc_feature: MA Experiment 20000144 PARAMETER Experiment Name: At_42deg_Heat_cDNA_P Parameter: Temperature (deg C) Value: 42 vs. 22
  misc_feature: MA Experiment 20000144 PARAMETER Experiment Name: At_42deg_Heat_cDNA_P Parameter: Timepoint (hr) Value: 1
  misc_feature: MA Experiment 20000144 PARAMETER Experiment Name: At_42deg_Heat_cDNA_P Parameter: Tissue Value: Aerial
  misc_feature: MA Experiment ID: 20000171 Result: Up-regulated in Transcription
  misc_feature: MA Experiment 20000171 PARAMETER Experiment Name: At_42deg_Heat_P Parameter: Age (day) Value: 14
  misc_feature: MA Experiment 20000171 PARAMETER Experiment Name: At_42deg_Heat_P Parameter: Organism Value: A. thaliana
  misc_feature: MA Experiment 20000171 PARAMETER Experiment Name: At_42deg_Heat_P Parameter: Plant Line Value: WS
  misc_feature: MA Experiment 20000171 PARAMETER Experiment Name: At_42deg_Heat_P Parameter: Temperature (deg C) Value: 42 vs. 22
  misc_feature: MA Experiment 20000171 PARAMETER Experiment Name: At_42deg_Heat_P Parameter: Timepoint (hr) Value: 1
  misc_feature: MA Experiment 20000171 PARAMETER Experiment Name: At_42deg_Heat_P Parameter: Tissue Value: Aerial
  misc_feature: MA Experiment ID: 20000234 Result: Down-regulated in Transcription
  misc_feature: MA Experiment 20000234 PARAMETER Experiment Name: At_Siliques_P Parameter: Age (day) Value: 21
  misc_feature: MA Experiment 20000234 PARAMETER Experiment Name: At_Siliques_P Parameter: Organism Value: A. thaliana
  misc_feature: MA Experiment 20000234 PARAMETER Experiment Name: At_Siliques_P Parameter: Plant Line Value: WS
  misc_feature: MA Experiment 20000234 PARAMETER Experiment Name: At_Siliques_P Parameter: Tissue Value: Less Than 5mm Siliques vs. Whole Plant
  misc_feature: MA Experiment ID: 20000436 Result: Up-regulated in Transcription
  misc_feature: MA Experiment 20000436 PARAMETER Experiment Name: At_Drought_P Parameter: Age (day) Value: 7
  misc_feature: MA Experiment 20000436 PARAMETER Experiment Name: At_Drought_P Parameter: Organism Value: A. thaliana
  misc_feature: MA Experiment 20000436 PARAMETER Experiment Name: At_Drought_P Parameter: Plant Line Value: WS
  misc_feature: MA Experiment 20000436 PARAMETER Experiment Name: At_Drought_P Parameter: Timepoint (hr) Value: 12
  misc_feature: MA Experiment 20000436 PARAMETER Experiment Name: At_Drought_P Parameter: Tissue Value: Whole Plant
  misc_feature: MA Experiment 20000436 PARAMETER Experiment Name: At_Drought_P Parameter: Treatment Value: Drought vs. No Drought
  misc_feature: MA Experiment ID: 20000495 Result: Down-regulated in Transcription
  misc_feature: MA Experiment 20000495 PARAMETER Experiment Name: At_Guard_Cells_P Parameter: Harvest Date Value: 8/2/2002
  misc_feature: MA Experiment 20000495 PARAMETER Experiment Name: At_Guard_Cells_P Parameter: Organism Value: A. thaliana
  misc_feature: MA Experiment 20000495 PARAMETER Experiment Name: At_Guard_Cells_P Parameter: Tissue Value: Guard Cells vs. Leaves
  misc_feature: MA Experiment ID: 20001247 Result: Up-regulated in Transcription
  misc_feature: MA Experiment 20001247 PARAMETER Experiment Name: At_Far-red-induction_P Parameter: Age (day) Value: 7
  misc_feature: MA Experiment 20001247 PARAMETER Experiment Name: At_Far-red-induction_P Parameter: Light Value: Far-red vs. White
  misc_feature: MA Experiment 20001247 PARAMETER Experiment Name: At_Far-red-induction_P Parameter: Organism Value: A. thaliana
  misc_feature: MA Experiment 20001247 PARAMETER Experiment Name: At_Far-red-induction_P Parameter: Plant Line Value: Columbia
  misc_feature: MA Experiment 20001247 PARAMETER Experiment Name: At_Far-red-induction_P Parameter: Timepoint (hr) Value: 1
  misc_feature: MA Experiment 20001247 PARAMETER Experiment Name: At_Far-red-induction_P Parameter: Tissue Value: Whole Plant
  misc_feature: MA Experiment ID: 20001248 Result: Down-regulated in Transcription
  misc_feature: MA Experiment 20001248 PARAMETER Experiment Name: At_Far-red-induction_P Parameter: Age (day) Value: 7
  misc_feature: MA Experiment 20001248 PARAMETER Experiment Name: At_Far-red-induction_P Parameter: Light Value: Far-red vs. White
  misc_feature: MA Experiment 20001248 PARAMETER Experiment Name: At_Far-red-induction_P Parameter: Organism Value: A. thaliana
  misc_feature: MA Experiment 20001248 PARAMETER Experiment Name: At_Far-red-induction_P Parameter: Plant Line Value: Columbia
  misc_feature: MA Experiment 20001248 PARAMETER Experiment Name: At_Far-red-induction_P Parameter: Timepoint (hr) Value: 4
  misc_feature: MA Experiment 20001248 PARAMETER Experiment Name: At_Far-red-induction_P Parameter: Tissue Value: Whole Plant
  misc_feature: MA Experiment ID: 20001450 Result: Up-regulated in Transcription
  misc_feature: MA Experiment 20001450 PARAMETER Experiment Name: At_Far-red-induction_P Parameter: Age (day) Value: 7
  misc_feature: MA Experiment 20001450 PARAMETER Experiment Name: At_Far-red-induction_P Parameter: Light Value: Far-red vs. White
  misc_feature: MA Experiment 20001450 PARAMETER Experiment Name: At_Far-red-induction_P Parameter: Organism Value: A. thaliana
  misc_feature: MA Experiment 20001450 PARAMETER Experiment Name: At_Far-red-induction_P Parameter: Plant Line Value: Columbia
  misc_feature: MA Experiment 20001450 PARAMETER Experiment Name: At_Far-red-induction_P Parameter: Timepoint (hr) Value: 8
  misc_feature: MA Experiment 20001450 PARAMETER Experiment Name: At_Far-red-induction_P Parameter: Tissue Value: Whole Plant
  misc_feature: MA Experiment ID: 20001558 Result: Down-regulated in Transcription
  misc_feature: MA Experiment 20001558 PARAMETER Experiment Name: At_Drought_Soil_Dry_P Parameter: Age (day) Value: 27
  misc_feature: MA Experiment 20001558 PARAMETER Experiment Name: At_Drought_Soil_Dry_P Parameter: Organism Value: A. thaliana
  misc_feature: MA Experiment 20001558 PARAMETER Experiment Name: At_Drought_Soil_Dry_P Parameter: Plant Line Value: WS
  misc_feature: MA Experiment 20001558 PARAMETER Experiment Name: At_Drought_Soil_Dry_P Parameter: Post Timepoint (hr) Value: 6
  misc_feature: MA Experiment 20001558 PARAMETER Experiment Name: At_Drought_Soil_Dry_P Parameter: Post-Treatment Value: Re-Water vs. No Drought
  misc_feature: MA Experiment 20001558 PARAMETER Experiment Name: At_Drought_Soil_Dry_P Parameter: Timepoint (day) Value: 13
  misc_feature: MA Experiment 20001558 PARAMETER Experiment Name: At_Drought_Soil_Dry_P Parameter: Treatment Value: Drought vs. No Drought
  misc_feature: MA Experiment ID: 20001560 Result: Down-regulated in Transcription
  misc_feature: MA Experiment 20001560 PARAMETER Experiment Name: At_Drought_Soil_Dry_P Parameter: Age (day) Value: 28
  misc_feature: MA Experiment 20001560 PARAMETER Experiment Name: At_Drought_Soil_Dry_P Parameter: Organism Value: A. thaliana
  misc_feature: MA Experiment 20001560 PARAMETER Experiment Name: At_Drought_Soil_Dry_P Parameter: Plant Line Value: WS
  misc_feature: MA Experiment 20001560 PARAMETER Experiment Name: At_Drought_Soil_Dry_P Parameter: Post Timepoint (hr) Value: None
  misc_feature: MA Experiment 20001560 PARAMETER Experiment Name: At_Drought_Soil_Dry_P Parameter: Post-Treatment Value: None
  misc_feature: MA Experiment 20001560 PARAMETER Experiment Name: At_Drought_Soil_Dry_P Parameter: Timepoint (day) Value: 14
  misc_feature: MA Experiment 20001560 PARAMETER Experiment Name: At_Drought_Soil_Dry_P Parameter: Treatment Value: Drought vs. No Drought
  misc_feature: MA Experiment ID: 20001757 Result: Down-regulated in Transcription
  misc_feature: MA Experiment 20001757 PARAMETER Experiment Name: At_50mM_NH4NO3_L-to-H_P Parameter: Timepoint (hr) Value: 6
  misc_feature: MA Experiment 20001757 PARAMETER Experiment Name: At_50mM_NH4NO3_L-to-H_P Parameter: Tissue Value: Leaf
  misc_feature: MA Experiment 20001757 PARAMETER Experiment Name: At_50mM_NH4NO3_L-to-H_P Parameter: Treatment Value: 50mM NH4NO3 vs 100mM Mannitol
ctcaggaaaactaaaccaaagtctgtttaccagtaatatcaatcgatcgccattctcgacatttctctctctcaagctagtctaaagtttcttcttatctccttcctccgaccaaaacttcgacttctctcttattttcaccctcagagagtaaccatggatgccttgacctcgagtttggttcgatctcccatcgtaccatcgagaacttccgacaacggttctggatctatgttccttaccgccagtggccctggattcacgcgttctggttcttcaagacttcaacttcgtttaagggtatgtcccaaatctcttcaaaacgcgtctgctagatcctcaagatcattacagagcttaacaacgactgctaaaactcggagaagttttgtggttagagcttcttcagcgtctaatgatgcttcatctggttcttcccccaaaccgatcgctccgctccagctgcaatcgcctgctggtcagtttctgtctcagattttggtgagccatcctcatcttgtgcctgcagctgttgaacagcagcttgagcagcttcaaactgatcgggactctcagggacagaacaaagattcagcgtctgtacctggaaccgacatcgtcctctacaggagaattgcggagttgaaggaaaacgagagaagaagaacattggaagagattttgtatgcattggtggttcaaaagttcatggaagctaacgtatcacttgtaccttcagtaagcccatcttcagatccgtctggtcgggttgatacttggccgaccaaagtggagaaactcgagcggcttcactcgcccgagatgtacgagatgattcacaaccatcttgccttgattcttgaaagcagaatgggtgatctgaactctgttgcacagataagcaagctcagagttggccaagtttacgctgcttctgtgatgtatggatatttcttgaagagggtggaccaaaggtttcagcttgagaagacgatgaagattcttccgggtgggtcggatgaaagtcaaacaagcgttgagcaagccgaggggacggcaacatatcaggcggctgtatcgtctcacccagaggttggtgcatttgcgggcggagttagtgctaagggcttcggcagcgagattaaaccatcccgattaaggtcatatgtgatgtcatttgatgcggagacgctgcagagatacgccactataagatcaagagaagcagttggaatcatcgagaagcacacagaggcattgtttggtaagcctgagattgtaataacaccggagggcacagtcgattcatcgaaggacgaacagataaagatcagcttcggtggaatgaagaggctcgtcttggaggcagttactttcgggtcgttcctttgggatgttgagagccatgtagatgcgaggtaccactttgtattgaactaaaaacatggtctgtaatgcagttgactaacttatgtagcattaagaagatacccattaagggtatcattacacttgtatcaaaaatttgaggaaaagatcgtacattttat

SEQ ID NO: 23587 - protein, 427 aa, Arabidopsis thaliana
  peptide (1)..(427): Ceres Seq. ID no. 12483457
  misc_feature (11)..(427): Pfam Name: Protein of unknown function (DUF760) Pfam Description: Protein of unknown function (DUF760)
  misc_feature (74)..(277): Homolog of NCBI NO: 15239021 NR Description: putative protein
  misc_feature (333)..(422): Homolog of NCBI NO: 18397912 NR Description: expressed protein
  misc_feature (77)..(285): Homolog of NCBI NO: 18397912 NR Description: expressed protein
  misc_feature (66)..(425): Homolog of NCBI NO: 32489097 NR Description: OSJNBa0093F12.3 [Oryza sativa (japonica
  misc_feature (65)..(425): Homolog of NCBI NO: 18398302 NR Description: expressed protein
  misc_feature (53)..(427): Homolog of NCBI NO: 28301943 NR Description: unknown protein [Oryza sativa (japonica
  misc_feature (171)..(427): Homolog of NCBI NO: 13561930 NR Description: unknown [Brassica napus]
  misc_feature (1)..(427): Homolog of NCBI NO: 15221185 NR Description: unknown protein
  misc_feature (1)..(427): Homolog of NCBI NO: 17064820 NR Description: Unknown protein [Arabidopsis thaliana]
  misc_feature (1)..(427): Homolog of NCBI NO: 18401645 NR Description: expressed protein
MDALTSSLVRSPIVPSRTSDNGSGSMFLTASGPGFTRSGSSRLQLRLRVCPKSLQNASARSSRSLQSLTTTAKTRRSFVVRASSASNDASSGSSPKPIAPLQLQSPAGQFLSQILVSHPHLVPAAVEQQLEQLQTDRDSQGQNKDSASVPGTDIVLYRRIAELKENERRRTLEEILYALVVQKFMEANVSLVPSVSPSSDPSGRVDTWPTKVEKLERLHSPEMYEMIHNHLALILESRMGDLNSVAQISKLRVGQVYAASVMYGYFLKRVDQRFQLEKTMKILPGGSDESQTSVEQAEGTATYQAAVSSHPEVGAFAGGVSAKGFGSEIKPSRLRSYVMSFDAETLQRYATIRSREAVGIIEKHTEALFGKPEIVITPEGTVDSSKDEQIKISFGGMKRLVLEAVTFGSFLWDVESHVDARYHFVLN

SEQ ID NO: 23588 - protein, 402 aa, Arabidopsis thaliana
  peptide (1)..(402): Ceres Seq. ID no. 12483458
  misc_feature (1)..(402): Pfam Name: Protein of unknown function (DUF760) Pfam Description: Protein of unknown function (DUF760)
  misc_feature (49)..(252): Homolog of NCBI NO: 15239021 NR Description: putative protein
  misc_feature (308)..(397): Homolog of NCBI NO: 18397912 NR Description: expressed protein
  misc_feature (52)..(260): Homolog of NCBI NO: 18397912 NR Description: expressed protein
  misc_feature (41)..(400): Homolog of NCBI NO: 32489097 NR Description: OSJNBa0093F12.3 [Oryza sativa (japonica
  misc_feature (40)..(400): Homolog of NCBI NO: 18398302 NR Description: expressed protein
  misc_feature (28)..(402): Homolog of NCBI NO: 28301943 NR Description: unknown protein [Oryza sativa (japonica
  misc_feature (146)..(402): Homolog of NCBI NO: 13561930 NR Description: unknown [Brassica napus]
  misc_feature (1)..(402): Homolog of NCBI NO: 15221185 NR Description: unknown protein
  misc_feature (1)..(402): Homolog of NCBI NO: 17064820 NR Description: Unknown protein [Arabidopsis thaliana]
  misc_feature (1)..(402): Homolog of NCBI NO: 18401645 NR Description: expressed protein
MFLTASGPGFTRSGSSRLQLRLRVCPKSLQNASARSSRSLQSLTTTAKTRRSFVVRASSASNDASSGSSPKPIAPLQLQSPAGQFLSQILVSHPHLVPAAVEQQLEQLQTDRDSQGQNKDSASVPGTDIVLYRRIAELKENERRRTLEEILYALVVQKFMEANVSLVPSVSPSSDPSGRVDTWPTKVEKLERLHSPEMYEMIHNHLALILESRMGDLNSVAQISKLRVGQVYAASVMYGYFLKRVDQRFQLEKTMKILPGGSDESQTSVEQAEGTATYQAAVSSHPEVGAFAGGVSAKGFGSEIKPSRLRSYVMSFDAETLQRYATIRSREAVGIIEKHTEALFGKPEIVITPEGTVDSSKDEQIKISFGGMKRLVLEAVTFGSFLWDVESHVDARYHFVLN

SEQ ID NO: 23589 - protein, 243 aa, Arabidopsis thaliana
  peptide (1)..(243): Ceres Seq. ID no. 12483459
  misc_feature (1)..(243): Pfam Name: Protein of unknown function (DUF760) Pfam Description: Protein of unknown function (DUF760)
  misc_feature (1)..(93): Homolog of NCBI NO: 15239021 NR Description: putative protein
  misc_feature (149)..(238): Homolog of NCBI NO: 18397912 NR Description: expressed protein
  misc_feature (1)..(101): Homolog of NCBI NO: 18397912 NR Description: expressed protein
  misc_feature (1)..(241): Homolog of NCBI NO: 32489097 NR Description: OSJNBa0093F12.3 [Oryza sativa (japonica
  misc_feature (1)..(241): Homolog of NCBI NO: 18398302 NR Description: expressed protein
  misc_feature (1)..(243): Homolog of NCBI NO: 28301943 NR Description: unknown protein [Oryza sativa (japonica
  misc_feature (1)..(243): Homolog of NCBI NO: 13561930 NR Description: unknown [Brassica napus]
  misc_feature (1)..(243): Homolog of NCBI NO: 15221185 NR Description: unknown protein
  misc_feature (1)..(243): Homolog of NCBI NO: 17064820 NR Description: Unknown protein [Arabidopsis thaliana]
  misc_feature (1)..(243): Homolog of NCBI NO: 18401645 NR Description: expressed protein
MEANVSLVPSVSPSSDPSGRVDTWPTKVEKLERLHSPEMYEMIHNHLALILESRMGDLNSVAQISKLRVGQVYAASVMYGYFLKRVDQRFQLEKTMKILPGGSDESQTSVEQAEGTATYQAAVSSHPEVGAFAGGVSAKGFGSEIKPSRLRSYVMSFDAETLQRYATIRSREAVGIIEKHTEALFGKPEIVITPEGTVDSSKDEQIKISFGGMKRLVLEAVTFGSFLWDVESHVDARYHFVLN

SEQ ID NO: 23590 - DNA, 1274 bp, Arabidopsis thaliana
  misc_feature (1)..(1274): Ceres Seq. ID no. 12325105
  misc_feature: MA Experiment ID: 108434 Result: Down-regulated in Transcription
  misc_feature: MA Experiment 108434 PARAMETER Experiment Name: At_Root_Tips_cDNA_P Parameter: Tissue Value: Root Tips
  misc_feature: MA Experiment ID: 108462 Result: Up-regulated in Transcription
  misc_feature: MA Experiment 108462 PARAMETER Experiment Name: At_Germinating_Seeds_cDNA_P Parameter: Age (day) Value: 2 vs. 0
  misc_feature: MA Experiment 108462 PARAMETER Experiment Name: At_Germinating_Seeds_cDNA_P Parameter: Tissue Value: Germinating Seeds
  misc_feature: MA Experiment ID: 108464 Result: Up-regulated in Transcription
  misc_feature: MA Experiment 108464 PARAMETER Experiment Name: At_Germinating_Seeds_cDNA_P Parameter: Age (day) Value: 4 vs. 0
  misc_feature: MA Experiment 108464 PARAMETER Experiment Name: At_Germinating_Seeds_cDNA_P Parameter: Tissue Value: Germinating Seeds
  misc_feature: MA Experiment ID: 108573 Result: Up-regulated in Transcription
  misc_feature: MA Experiment 108573 PARAMETER Experiment Name: At_Drought_cDNA_P Parameter: Timepoint (hr) Value: 6
  misc_feature: MA Experiment 108573 PARAMETER Experiment Name: At_Drought_cDNA_P Parameter: Tissue Value: Aerial
  misc_feature: MA Experiment 108573 PARAMETER Experiment Name: At_Drought_cDNA_P Parameter: Treatment Value: Drought vs. No Drought
  misc_feature: MA Experiment ID: 108595 Result: Down-regulated in Transcription
  misc_feature: MA Experiment 108595 PARAMETER Experiment Name: At_Ler-pi_Ovule_cDNA_P Parameter: Plant Line Value: null
  misc_feature: MA Experiment ID: 108668 Result: Up-regulated in Transcription
  misc_feature: MA Experiment 108668 PARAMETER Experiment Name: At_2mM_SA_cDNA_P Parameter: Plant Line Value: WS
  misc_feature: MA Experiment 108668 PARAMETER Experiment Name: At_2mM_SA_cDNA_P Parameter: Timepoint (hr) Value: 6
  misc_feature: MA Experiment 108668 PARAMETER Experiment Name: At_2mM_SA_cDNA_P Parameter: Treatment Value: 2mM SA vs. No Treatment
  misc_feature: MA Experiment ID: 20000111 Result: Down-regulated in Transcription
  misc_feature: MA Experiment 20000111 PARAMETER Experiment Name: At_42deg_Heat_cDNA_P Parameter: Temperature (deg C) Value: 42 vs. 22
  misc_feature: MA Experiment 20000111 PARAMETER Experiment Name: At_42deg_Heat_cDNA_P Parameter: Timepoint (hr) Value: 6
  misc_feature: MA Experiment 20000111 PARAMETER Experiment Name: At_42deg_Heat_cDNA_P Parameter: Tissue Value: Aerial
  misc_feature: MA Experiment ID: 20000173 Result: Down-regulated in Transcription
  misc_feature: MA Experiment 20000173 PARAMETER Experiment Name: At_42deg_Heat_P Parameter: Age (day) Value: 14
  misc_feature: MA Experiment 20000173 PARAMETER Experiment Name: At_42deg_Heat_P Parameter: Organism Value: A. thaliana
  misc_feature: MA Experiment 20000173 PARAMETER Experiment Name: At_42deg_Heat_P Parameter: Plant Line Value: WS
  misc_feature: MA Experiment 20000173 PARAMETER Experiment Name: At_42deg_Heat_P Parameter: Temperature (deg C) Value: 42 vs. 22
  misc_feature: MA Experiment 20000173 PARAMETER Experiment Name: At_42deg_Heat_P Parameter: Timepoint (hr) Value: 6
  misc_feature: MA Experiment 20000173 PARAMETER Experiment Name: At_42deg_Heat_P Parameter: Tissue Value: Aerial
  misc_feature: MA Experiment ID: 20000182 Result: Up-regulated in Transcription
  misc_feature: MA Experiment 20000182 PARAMETER Experiment Name: At_2mM_SA_P Parameter: Age (day) Value: 14
  misc_feature: MA Experiment 20000182 PARAMETER Experiment Name: At_2mM_SA_P Parameter: Organism Value: A. thaliana
  misc_feature: MA Experiment 20000182 PARAMETER Experiment Name: At_2mM_SA_P Parameter: Plant Line Value: WS
  misc_feature: MA Experiment 20000182 PARAMETER Experiment Name: At_2mM_SA_P Parameter: Timepoint (hr) Value: 6
  misc_feature: MA Experiment 20000182 PARAMETER Experiment Name: At_2mM_SA_P Parameter: Tissue Value: Aerial
  misc_feature: MA Experiment 20000182 PARAMETER Experiment Name: At_2mM_SA_P Parameter: Treatment Value: 2mM SA vs. No Treatment
  misc_feature: MA Experiment ID: 20000184 Result: Down-regulated in Transcription
  misc_feature: MA Experiment 20000184 PARAMETER Experiment Name: At_Shoots__P Parameter: Age (day) Value: 7
  misc_feature: MA Experiment 20000184 PARAMETER Experiment Name: At_Shoots__P Parameter: Tissue Value: Shoots vs. Whole Plant
  misc_feature: MA Experiment ID: 20000227 Result: Down-regulated in Transcription
  misc_feature: MA Experiment 20000227 PARAMETER Experiment Name: At_Root-Tips-vs-Tops_P Parameter: Tissue Value: Root Tips vs. Root Tops
  misc_feature: MA Experiment ID: 20000234 Result: Down-regulated in Transcription
  misc_feature: MA Experiment 20000234 PARAMETER Experiment Name: At_Siliques_P Parameter: Age (day) Value: 21
  misc_feature: MA Experiment 20000234 PARAMETER Experiment Name: At_Siliques_P Parameter: Organism Value: A. thaliana
  misc_feature: MA Experiment 20000234 PARAMETER Experiment Name: At_Siliques_P Parameter: Plant Line Value: WS
  misc_feature: MA Experiment 20000234 PARAMETER Experiment Name: At_Siliques_P Parameter: Tissue Value: Less Than 5mm Siliques vs. Whole Plant
  misc_feature: MA Experiment ID: 20000235 Result: Down-regulated in Transcription
  misc_feature: MA Experiment 20000235 PARAMETER Experiment Name: At_Siliques_P Parameter: Age (day) Value: 21
  misc_feature: MA Experiment 20000235 PARAMETER Experiment Name: At_Siliques_P Parameter: Organism Value: A. thaliana
  misc_feature: MA Experiment 20000235 PARAMETER Experiment Name: At_Siliques_P Parameter: Plant Line Value: WS
  misc_feature: MA Experiment 20000235 PARAMETER Experiment Name: At_Siliques_P Parameter: Tissue Value: 5-10mm Siliques vs. Whole Plant
  misc_feature: MA Experiment ID: 20000437 Result: Up-regulated in Transcription
  misc_feature: MA Experiment 20000437 PARAMETER Experiment Name: At_Drought_P Parameter: Age (day) Value: 8
  misc_feature: MA Experiment 20000437 PARAMETER Experiment Name: At_Drought_P Parameter: Organism Value: A. thaliana
  misc_feature: MA Experiment 20000437 PARAMETER Experiment Name: At_Drought_P Parameter: Plant Line Value: WS
  misc_feature: MA Experiment 20000437 PARAMETER Experiment Name: At_Drought_P Parameter: Timepoint (hr) Value: 24
  misc_feature: MA Experiment 20000437 PARAMETER Experiment Name: At_Drought_P Parameter: Tissue Value: Whole Plant
  misc_feature: MA Experiment 20000437 PARAMETER Experiment Name: At_Drought_P Parameter: Treatment Value: Drought vs. No Drought
  misc_feature: MA Experiment ID: 20000438 Result: Down-regulated in Transcription
  misc_feature: MA Experiment 20000438 PARAMETER Experiment Name: At_Shoots__P Parameter: Age (day) Value: 14
  misc_feature: MA Experiment 20000438 PARAMETER Experiment Name: At_Shoots__P Parameter: Tissue Value: Shoots vs. Whole Plant
  misc_feature: MA Experiment ID: 20001451 Result: Up-regulated in Transcription
  misc_feature: MA Experiment 20001451 PARAMETER Experiment Name: At_Far-red-induction_P Parameter: Age (day) Value: 7
  misc_feature: MA Experiment 20001451 PARAMETER Experiment Name: At_Far-red-induction_P Parameter: Light Value: Far-red vs. White
  misc_feature: MA Experiment 20001451 PARAMETER Experiment Name: At_Far-red-induction_P Parameter: Organism Value: A. thaliana
  misc_feature: MA Experiment 20001451 PARAMETER Experiment Name: At_Far-red-induction_P Parameter: Plant Line Value: Columbia
  misc_feature: MA Experiment 20001451 PARAMETER Experiment Name: At_Far-red-induction_P Parameter: Timepoint (hr) Value: 24
  misc_feature: MA Experiment 20001451 PARAMETER Experiment Name: At_Far-red-induction_P Parameter: Tissue Value: Whole Plant
ataatcttccaaacttcaccagaagaaattcttaacaaacaattttcttcataatattaattctcaagatcttaaagattatattaatacgaagagaaaattcaaatgggtcttgatgattcatgcaacacaggtcttgttcttggtttaggcctctcaccaacgcctaataattacaatcatgccatcaagaaatcttcctccactgtggaccatcgtttcatcaggctcgatccgtcgttgactctaagcctatccggtgagagctacaagatcaagactggtgccggcgccggcgaccaaatttgccggcagacctcgtcccacagcggcatctcatctttctcgagcggaagggtaaagagagaaagagaaatctccggcggcgatggagaagaagaggcggaggagacgacggagagagtggtgtgttcgagagtgagtgatgatcatgacgatgaagaaggtgttagtgctcgtaaaaagcttagactcactaaacaacaatctgctcttctcgaagataacttcaaacttcatagcacccttaatcccaagcaaaaacaagctcttgcgagacagctgaatctaaggcctagacaagttgaagtgtggttccaaaacaggagagctagaacaaaactaaagcaaacagaagtggattgtgagtttttgaagaaatgttgcgagactttaacggatgagaatagaaggcttcaaaaagagcttcaagaccttaaggctttaaaattgtctcaaccgttttacatgcacatgccggcggcgactttgactatgtgcccttcttgtgagagactcggcggtggtggtgtcggaggagatacgacggcggttgatgaagaaacggcgaaaggagctttctccatcgtcacaaagcctcgtttctataaccctttcactaatccttctgcagcatgttagttacttattagttatttaatttctttttgttggttttttttttgtttcttaaatcaaattaggaattagttagaagataaatcccagggaaaaaatattacgttgaaattggggggaaatggggtatagtctttatagataagactcttcaacgattccactttatttttcggtgggattgttggttgatgaagaaaaaaaaatagtttgtaattacaggtttaaatatgtagagaaaaaatgacgaatatgtattatcttgtttttttttccttcgaatatgtattacggtaatataaatttgcttgtaaaaataataaatatattatttg

SEQ ID NO: 23591 - protein, 278 aa, Arabidopsis thaliana
  peptide (1)..(278): Ceres Seq. ID no. 12325106
  misc_feature (126)..(180): Pfam Name: Homeobox domain Pfam Description: Homeobox domain
  misc_feature (76)..(266): Homolog of NCBI NO: 29028870 NR Description: At5g06710 [Arabidopsis thaliana]
  misc_feature (76)..(266): Homolog of NCBI NO: 22326632 NR Description: homeobox-leucine zipper protein HAT14 (HD-Zip
  misc_feature (76)..(266): Homolog of NCBI NO: 12230908 NR Description: Homeobox-leucine zipper protein HAT14 (HD-ZIP
  misc_feature (76)..(278): Homolog of NCBI NO: 7489329 NR Description: homeobox protein - common sunflower
  misc_feature (42)..(278): Homolog of NCBI NO: 27311238 NR Description: Hypothetical protein [Oryza sativa (japonica
  misc_feature (1)..(277): Homolog of NCBI NO: 7446246 NR Description: homeobox leucine zipper protein Hb-2,
  misc_feature (1)..(278): Homolog of NCBI NO: 25386244 NR Description: homeobox protein HAT9 [imported] - Arabidopsis
  misc_feature (1)..(278): Homolog of NCBI NO: 25386242 NR Description: homeobox protein HAT9 [imported] - Arabidopsis
  misc_feature (1)..(278): Homolog of NCBI NO: 15227754 NR Description: homeobox-leucine zipper protein HAT9 (HD-Zip
  misc_feature (1)..(278): Homolog of NCBI NO: 15235712 NR Description: homeobox protein HAT22
MGLDDSCNTGLVLGLGLSPTPNNYNHAIKKSSSTVDHRFIRLDPSLTLSLSGESYKIKTGAGAGDQICRQTSSHSGISSFSSGRVKREREISGGDGEEEAEETTERVVCSRVSDDHDDEEGVSARKKLRLTKQQSALLEDNFKLHSTLNPKQKQALARQLNLRPRQVEVWFQNRRARTKLKQTEVDCEFLKKCCETLTDENRRLQKELQDLKALKLSQPFYMHMPAATLTMCPSCERLGGGGVGGDTTAVDEETAKGAFSIVTKPRFYNPFTNPSAAC

SEQ ID NO: 23592 - DNA, 1426 bp, Arabidopsis thaliana
  misc_feature (1)..(1426): Ceres Seq. ID no. 12395981
  misc_feature: MA Experiment ID: 108573 Result: Up-regulated in Transcription
  misc_feature: MA Experiment 108573 PARAMETER Experiment Name: At_Drought_cDNA_P Parameter: Timepoint (hr) Value: 6
  misc_feature: MA Experiment 108573 PARAMETER Experiment Name: At_Drought_cDNA_P Parameter: Tissue Value: Aerial
  misc_feature: MA Experiment 108573 PARAMETER Experiment Name: At_Drought_cDNA_P Parameter: Treatment Value: Drought vs. No Drought
  misc_feature: MA Experiment ID: 108585 Result: Up-regulated in Transcription
  misc_feature: MA Experiment 108585 PARAMETER Experiment Name: At_5mM_NaNP_cDNA_P Parameter: Timepoint (hr) Value: 6
  misc_feature: MA Experiment 108585 PARAMETER Experiment Name: At_5mM_NaNP_cDNA_P Parameter: Tissue Value: Aerial
  misc_feature: MA Experiment 108585 PARAMETER Experiment Name: At_5mM_NaNP_cDNA_P Parameter: Treatment Value: null
  misc_feature: MA Experiment ID: 20000180 Result: Down-regulated in Transcription
  misc_feature: MA Experiment 20000180 PARAMETER Experiment Name: At_Germinating_Seeds_P Parameter: Age (hr) Value: 24 vs. 0
  misc_feature: MA Experiment 20000180 PARAMETER Experiment Name: At_Germinating_Seeds_P Parameter: Tissue Value: Germinating Seeds
  misc_feature: MA Experiment ID: 20000794 Result: Up-regulated in Transcription
  misc_feature: MA Experiment 20000794 PARAMETER Experiment Name: At_Petals_P Parameter: Age (day) Value: 23-25 days
  misc_feature: MA Experiment 20000794 PARAMETER Experiment Name: At_Petals_P Parameter: Plant Line Value: WS
  misc_feature: MA Experiment 20000794 PARAMETER Experiment Name: At_Petals_P Parameter: Tissue Value: Petals vs. Whole plant
ctctctctatactttgcttctctctctaaacttctctctttctttttttctcaaagcttttttccttctccctaaacgatgaagattttcgtgaagactctcagtggttcgaacttcgagatcgaagtaaaacctgcagataaggtttctgatgttaaaacggctatagaaactgttaaaggtgcagaataccctgctgctaagcagatgctgatccaccaaggaaaggttctaaaggatgagaccacattggaagagaacaatgttgttgagaacagtttcattgttatcatgttgtccaagaccaaggcttctccaagtggggcatcaaccgcatctgcaccagcacctagtgctacacagccacagacagtagctacacctcaggtttctgctcctactgcctcagttccagttcctacaagtggaactgcaaccgctgcagctccagctactgctgcttcggttcagacagatgtgtatggtcaagcagcatcaaaccttgttgctggaactactttagagtccactgttcagcaaattcttgatatgggtggaggtagttgggaccgtgacactgttgttcgtgctctgagagctgcgttcaacaatcctgaaagagctgttgaatacctgtactcgggtatccctgctcaagctgaaatcccaccagttgctcaagccccagctactggggaacaggcagccaatcctctagcacagccccaacaagcagcagctccagcagctgcaactggtggtccaaacgcaaatccattaaacctgttcccccagggcatgcccgctgcagatgctggtgctggagctggtaatcttgatttcctgcgtaacagtcaacagttccaagccttgcgagctatggtacaagcaaacccacaaattctacagcctatgcttcaggagctcggtaaacaaaacccccagcttgtgcgactaattcaagagcaccaggctgacttcctacgcttgataaacgaacctgtcgagggagaagagaatgttatggaacagttggaagcagcaatgccacaagctgttaccgttacacctgaagagcgtgaagccattgaacggcttgaagggatggggtttgatcgtgcgatggtcttggaagtgttctttgcgtgtaacaagaatgaagaacttgcagctaattaccttctagatcacatgcatgagtttgaagatcaataaacagagcaaatccattcctccctctaaactcagaccatctttctgtttctttttcttcttctttttaatatgataatctcttctccaatgccatttgacagtttcatgtttatgttcatgggagttgatgtgtttatgttactattaaaactatcatagtttatctggtttgaagatgctcctcttttatcatattattagcctttgaatc

SEQ ID NO: 23593 - protein, 378 aa, Arabidopsis thaliana
  peptide (1)..(378): Ceres Seq. ID no. 12395982
  misc_feature (1)..(77): Pfam Name: Ubiquitin family Pfam Description: Ubiquitin family
  misc_feature (1)..(377): Homolog of NCBI NO: 30409718 NR Description: RAD23-like protein [Arabidopsis thaliana]
  misc_feature (1)..(377): Homolog of NCBI NO: 22330746 NR Description: DNA repair protein RAD23, putative
  misc_feature (1)..(377): Homolog of NCBI NO: 30699439 NR Description: DNA repair protein RAD23 -related [Arabidopsis
  misc_feature (22)..(377): Homolog of NCBI NO: 15232924 NR Description: putative RAD23
  misc_feature (1)..(378): Homolog of NCBI NO: 7446462 NR Description: RAD23 protein homolog - rice
  misc_feature (1)..(376): Homolog of NCBI NO: 7446459 NR Description: RAD23 protein, isoform I - carrot
  misc_feature (1)..(377): Homolog of NCBI NO: 5640111 NR Description: RAD23 protein [Lycopersicon esculentum]
  misc_feature (1)..(304): Homolog of NCBI NO: 30409730 NR Description: RAD23-like protein [Arabidopsis thaliana]
  misc_feature (1)..(378): Homolog of NCBI NO: 14335004 NR Description: unknown protein [Arabidopsis thaliana]
  misc_feature (1)..(378): Homolog of NCBI NO: 15240922 NR Description: DNA repair protein RAD23 homolog
MKIFVKTLSGSNFEIEVKPADKVSDVKTAIETVKGAEYPAAKQMLIHQGKVLKDETTLEENNVVENSFIVIMLSKTKASPSGASTASAPAPSATQPQTVATPQVSAPTASVPVPTSGTATAAAPATAASVQTDVYGQAASNLVAGTTLESTVQQILDMGGGSWDRDTVVRALRAAFNNPERAVEYLYSGIPAQAEIPPVAQAPATGEQAANPLAQPQQAAAPAAATGGPNANPLNLFPQGMPAADAGAGAGNLDFLRNSQQFQALRAMVQANPQILQPMLQELGKQNPQLVRLIQEHQADFLRLINEPVEGEENVMEQLEAAMPQAVTVTPEEREAIERLEGMGFDRAMVLEVFFACNKNEELAANYLLDHMHEFEDQ

SEQ ID NO: 23594 - protein, 335 aa, Arabidopsis thaliana
  peptide (1)..(335): Ceres Seq. ID no. 12395983
  misc_feature (104)..(146): Pfam Name: UBA/TS-N domain Pfam Description: UBA/TS-N domain
  misc_feature (1)..(334): Homolog of NCBI NO: 30409718 NR Description: RAD23-like protein [Arabidopsis thaliana]
  misc_feature (1)..(334): Homolog of NCBI NO: 22330746 NR Description: DNA repair protein RAD23, putative
  misc_feature (1)..(334): Homolog of NCBI NO: 30699439 NR Description: DNA repair protein RAD23 -related [Arabidopsis
  misc_feature (1)..(334): Homolog of NCBI NO: 15232924 NR Description: putative RAD23
  misc_feature (1)..(335): Homolog of NCBI NO: 7446462 NR Description: RAD23 protein homolog - rice
  misc_feature (1)..(333): Homolog of NCBI NO: 7446459 NR Description: RAD23 protein, isoform I - carrot
  misc_feature (1)..(334): Homolog of NCBI NO: 5640111 NR Description: RAD23 protein [Lycopersicon esculentum]
  misc_feature (1)..(261): Homolog of NCBI NO: 30409730 NR Description: RAD23-like protein [Arabidopsis thaliana]
  misc_feature (1)..(335): Homolog of NCBI NO: 14335004 NR Description: unknown protein [Arabidopsis thaliana]
  misc_feature (1)..(335): Homolog of NCBI NO: 15240922 NR Description: DNA repair protein RAD23 homolog
MLIHQGKVLKDETTLEENNVVENSFIVIMLSKTKASPSGASTASAPAPSATQPQTVATPQVSAPTASVPVPTSGTATAAAPATAASVQTDVYGQAASNLVAGTTLESTVQQILDMGGGSWDRDTVVRALRAAFNNPERAVEYLYSGIPAQAEIPPVAQAPATGEQAANPLAQPQQAAAPAAATGGPNANPLNLFPQGMPAADAGAGAGNLDFLRNSQQFQALRAMVQANPQILQPMLQELGKQNPQLVRLIQEHQADFLRLINEPVEGEENVMEQLEAAMPQAVTVTPEEREAIERLEGMGFDRAMVLEVFFACNKNEELAANYLLDHMHEFEDQ

SEQ ID NO: 23595 - protein, 307 aa, Arabidopsis thaliana
  peptide (1)..(307): Ceres Seq. ID no. 12395984
  misc_feature (76)..(118): Pfam Name: UBA/TS-N domain Pfam Description: UBA/TS-N domain
  misc_feature (1)..(306): Homolog of NCBI NO: 30409718 NR Description: RAD23-like protein [Arabidopsis thaliana]
  misc_feature (1)..(306): Homolog of NCBI NO: 22330746 NR Description: DNA repair protein RAD23, putative
  misc_feature (1)..(306): Homolog of NCBI NO: 30699439 NR Description: DNA repair protein RAD23 -related [Arabidopsis
  misc_feature (1)..(306): Homolog of NCBI NO: 15232924 NR Description: putative RAD23
  misc_feature (1)..(307): Homolog of NCBI NO: 7446462 NR Description: RAD23 protein homolog - rice
  misc_feature (1)..(305): Homolog of NCBI NO: 7446459 NR Description: RAD23 protein, isoform I - carrot
  misc_feature (1)..(306): Homolog of NCBI NO: 5640111 NR Description: RAD23 protein [Lycopersicon esculentum]
  misc_feature (1)..(233): Homolog of NCBI NO: 30409730 NR Description: RAD23-like protein [Arabidopsis thaliana]
  misc_feature (1)..(307): Homolog of NCBI NO: 14335004 NR Description: unknown protein [Arabidopsis thaliana]
  misc_feature (1)..(307): Homolog of NCBI NO: 15240922 NR Description: DNA repair protein RAD23 homolog
MLSKTKASPSGASTASAPAPSATQPQTVATPQVSAPTASVPVPTSGTATAAAPATAASVQTDVYGQAASNLVAGTTLESTVQQILDMGGGSWDRDTVVRALRAAFNNPERAVEYLYSGIPAQAEIPPVAQAPATGEQAANPLAQPQQAAAPAAATGGPNANPLNLFPQGMPAADAGAGAGNLDFLRNSQQFQALRAMVQANPQILQPMLQELGKQNPQLVRLIQEHQADFLRLINEPVEGEENVMEQLEAAMPQAVTVTPEEREAIERLEGMGFDRAMVLEVFFACNKNEELAANYLLDHMHEFEDQ

SEQ ID NO: 23596 - DNA, 679 bp, Arabidopsis thaliana
  misc_feature (1)..(679): Ceres Seq. ID no. 12385416
  misc_feature: MA Experiment ID: 108462 Result: Up-regulated in Transcription
  misc_feature: MA Experiment 108462 PARAMETER Experiment Name: At_Germinating_Seeds_cDNA_P Parameter: Age (day) Value: 2 vs. 0
  misc_feature: MA Experiment 108462 PARAMETER Experiment Name: At_Germinating_Seeds_cDNA_P Parameter: Tissue Value: Germinating Seeds
  misc_feature: MA Experiment ID: 108463 Result: Up-regulated in Transcription
  misc_feature: MA Experiment 108463 PARAMETER Experiment Name: At_Germinating_Seeds_cDNA_P Parameter: Age (day) Value: 3 vs. 0
  misc_feature: MA Experiment 108463 PARAMETER Experiment Name: At_Germinating_Seeds_cDNA_P Parameter: Tissue Value: Germinating Seeds
  misc_feature: MA Experiment ID: 108473 Result: Up-regulated in Transcription
  misc_feature: MA Experiment 108473 PARAMETER Experiment Name: At_Drought_Flowers_cDNA_P Parameter: Timepoint (hr) Value: 7 d
  misc_feature: MA Experiment 108473 PARAMETER Experiment Name: At_Drought_Flowers_cDNA_P Parameter: Tissue Value: Flower
  misc_feature: MA Experiment 108473 PARAMETER Experiment Name: At_Drought_Flowers_cDNA_P Parameter: Treatment Value: Drought vs. No Drought
  misc_feature: MA Experiment ID: 108561 Result: Up-regulated in Transcription
  misc_feature: MA Experiment 108561 PARAMETER Experiment Name: At_100uM_ABA_cDNA_P Parameter: Timepoint (hr) Value: 6
  misc_feature: MA Experiment 108561 PARAMETER Experiment Name: At_100uM_ABA_cDNA_P Parameter: Tissue Value: Aerial
  misc_feature: MA Experiment 108561 PARAMETER Experiment Name: At_100uM_ABA_cDNA_P Parameter: Treatment Value: 100uM ABA vs. No Treatment
  misc_feature: MA Experiment ID: 108572 Result: Up-regulated in Transcription
  misc_feature: MA Experiment 108572 PARAMETER Experiment Name: At_Drought_cDNA_P Parameter: Timepoint (hr) Value: 1
  misc_feature: MA Experiment 108572 PARAMETER Experiment Name: At_Drought_cDNA_P Parameter: Tissue Value: Aerial
  misc_feature: MA Experiment 108572 PARAMETER Experiment Name: At_Drought_cDNA_P Parameter: Treatment Value: Drought vs. No Drought
  misc_feature: MA Experiment ID: 108573 Result: Up-regulated in Transcription
  misc_feature: MA Experiment 108573 PARAMETER Experiment Name: At_Drought_cDNA_P Parameter: Timepoint (hr) Value: 6
  misc_feature: MA Experiment 108573 PARAMETER Experiment Name: At_Drought_cDNA_P Parameter: Tissue Value: Aerial
  misc_feature: MA Experiment 108573 PARAMETER Experiment Name: At_Drought_cDNA_P Parameter: Treatment Value: Drought vs. No Drought
  misc_feature: MA Experiment ID: 108574 Result: Up-regulated in Transcription
  misc_feature: MA Experiment 108574 PARAMETER Experiment Name: At_Wounding__cDNA_P Parameter: Timepoint (hr) Value: 1
  misc_feature: MA Experiment 108574 PARAMETER Experiment Name: At_Wounding__cDNA_P Parameter: Tissue Value: Aerial
  misc_feature: MA Experiment 108574 PARAMETER Experiment Name: At_Wounding__cDNA_P Parameter: Treatment Value: Wounding vs. No Wounding
  misc_feature: MA Experiment ID: 108579 Result: Up-regulated in Transcription
  misc_feature: MA Experiment 108579 PARAMETER Experiment Name: At_4deg_Cold_cDNA_P Parameter: Temperature (deg C) Value: 4 vs. 22
  misc_feature: MA Experiment 108579 PARAMETER Experiment Name: At_4deg_Cold_cDNA_P Parameter: Timepoint (hr) Value: 6
  misc_feature: MA Experiment 108579 PARAMETER Experiment Name: At_4deg_Cold_cDNA_P Parameter: Tissue Value: Aerial
  misc_feature: MA Experiment ID: 108585 Result: Up-regulated in Transcription
  misc_feature: MA Experiment 108585 PARAMETER Experiment Name: At_5mM_NaNP_cDNA_P Parameter: Timepoint (hr) Value: 6
  misc_feature: MA Experiment 108585 PARAMETER Experiment Name: At_5mM_NaNP_cDNA_P Parameter: Tissue Value: Aerial
  misc_feature: MA Experiment 108585 PARAMETER Experiment Name: At_5mM_NaNP_cDNA_P Parameter: Treatment Value: null
  misc_feature: MA Experiment ID: 108595 Result: Up-regulated in Transcription
  misc_feature: MA Experiment 108595 PARAMETER Experiment Name: At_Ler-pi_Ovule_cDNA_P Parameter: Plant Line Value: null
  misc_feature: MA Experiment ID: 108605 Result: Up-regulated in Transcription
  misc_feature: MA Experiment 108605 PARAMETER Experiment Name: At_100uM_ABA_cDNA_P Parameter: Timepoint (hr) Value: 6
  misc_feature: MA Experiment 108605 PARAMETER Experiment Name: At_100uM_ABA_cDNA_P Parameter: Tissue Value: Aerial
  misc_feature: MA Experiment 108605 PARAMETER Experiment Name: At_100uM_ABA_cDNA_P Parameter: Treatment Value: 100uM ABA vs. No Treatment
  misc_feature: MA Experiment ID: 108607 Result: Up-regulated in Transcription
  misc_feature: MA Experiment 108607 PARAMETER Experiment Name: At_100uM_ABA_cDNA_P Parameter: Timepoint (hr) Value: 4
  misc_feature: MA Experiment 108607 PARAMETER Experiment Name: At_100uM_ABA_cDNA_P Parameter: Tissue Value: Aerial
  misc_feature: MA Experiment 108607 PARAMETER Experiment Name: At_100uM_ABA_cDNA_P Parameter: Treatment Value: 100uM ABA vs. No Treatment
  misc_feature: MA Experiment ID: 108608 Result: Up-regulated in Transcription
  misc_feature: MA Experiment 108608 PARAMETER Experiment Name: At_100uM_ABA_cDNA_P Parameter: Timepoint (hr) Value: 1
  misc_feature: MA Experiment 108608 PARAMETER Experiment Name: At_100uM_ABA_cDNA_P Parameter: Tissue Value: Aerial
  misc_feature: MA Experiment 108608 PARAMETER Experiment Name: At_100uM_ABA_cDNA_P Parameter: Treatment Value: 100uM ABA vs. No Treatment
  misc_feature: MA Experiment ID: 108668 Result: Up-regulated in Transcription
  misc_feature: MA Experiment 108668 PARAMETER Experiment Name: At_2mM_SA_cDNA_P Parameter: Plant Line Value: WS
  misc_feature: MA Experiment 108668 PARAMETER Experiment Name: At_2mM_SA_cDNA_P Parameter: Timepoint (hr) Value: 6
  misc_feature: MA Experiment 108668 PARAMETER Experiment Name: At_2mM_SA_cDNA_P Parameter: Treatment Value: 2mM SA vs. No Treatment
  misc_feature: MA Experiment ID: 20000069 Result: Up-regulated in Transcription
  misc_feature: MA Experiment 20000069 PARAMETER Experiment Name: At_100uM_ABA_Mutants_cDNA_P Parameter: Plant Line Value: CS23
  misc_feature: MA Experiment 20000069 PARAMETER Experiment Name: At_100uM_ABA_Mutants_cDNA_P Parameter: Timepoint (hr) Value: 6
  misc_feature: MA Experiment 20000069 PARAMETER Experiment Name: At_100uM_ABA_Mutants_cDNA_P Parameter: Tissue Value: Aerial
  misc_feature: MA Experiment 20000069 PARAMETER Experiment Name: At_100uM_ABA_Mutants_cDNA_P Parameter: Treatment Value: 100uM ABA vs. No Treatment
  misc_feature: MA Experiment ID: 20000070 Result: Up-regulated in Transcription
  misc_feature: MA Experiment 20000070 PARAMETER Experiment Name: At_100uM_ABA_Mutants_cDNA_P Parameter: Plant Line Value: CS24
  misc_feature: MA Experiment 20000070 PARAMETER Experiment Name: At_100uM_ABA_Mutants_cDNA_P Parameter: Timepoint (hr) Value: 6
  misc_feature: MA Experiment 20000070 PARAMETER Experiment Name: At_100uM_ABA_Mutants_cDNA_P Parameter: Tissue Value: Aerial
  misc_feature: MA Experiment 20000070 PARAMETER Experiment Name: At_100uM_ABA_Mutants_cDNA_P Parameter: Treatment Value: 100uM ABA vs. No Treatment
  misc_feature: MA Experiment ID: 20000071 Result: Up-regulated in Transcription
  misc_feature: MA Experiment 20000071 PARAMETER Experiment Name: At_100uM_ABA_Mutants_cDNA_P Parameter: Plant Line Value: CS8104
  misc_feature: MA Experiment 20000071 PARAMETER Experiment Name: At_100uM_ABA_Mutants_cDNA_P Parameter: Timepoint (hr) Value: 6
  misc_feature: MA Experiment 20000071 PARAMETER Experiment Name: At_100uM_ABA_Mutants_cDNA_P Parameter: Tissue Value: Aerial
  misc_feature: MA Experiment 20000071 PARAMETER Experiment Name: At_100uM_ABA_Mutants_cDNA_P Parameter: Treatment Value: 100uM ABA vs. No Treatment
  misc_feature: MA Experiment ID: 20000072 Result: Up-regulated in Transcription
  misc_feature: MA Experiment 20000072 PARAMETER Experiment Name: At_100uM_ABA_Mutants_cDNA_P Parameter: Plant Line Value: CS8105
  misc_feature: MA Experiment 20000072 PARAMETER Experiment Name: At_100uM_ABA_Mutants_cDNA_P Parameter: Timepoint (hr) Value: 6
  misc_feature: MA Experiment 20000072 PARAMETER Experiment Name: At_100uM_ABA_Mutants_cDNA_P Parameter: Tissue Value: Aerial
  misc_feature: MA Experiment 20000072 PARAMETER Experiment Name: At_100uM_ABA_Mutants_cDNA_P Parameter: Treatment Value: 100uM ABA vs. No Treatment
  misc_feature: MA Experiment ID: 20000086 Result: Up-regulated in Transcription
  misc_feature: MA Experiment 20000086 PARAMETER Experiment Name: At_100uM_ABA_Mutants_cDNA_P Parameter: Plant Line Value: CS22
  misc_feature: MA Experiment 20000086 PARAMETER Experiment Name: At_100uM_ABA_Mutants_cDNA_P Parameter: Timepoint (hr) Value: 6
  misc_feature: MA Experiment 20000086 PARAMETER Experiment Name: At_100uM_ABA_Mutants_cDNA_P Parameter: Tissue Value: Aerial
  misc_feature: MA Experiment 20000086 PARAMETER Experiment Name: At_100uM_ABA_Mutants_cDNA_P Parameter: Treatment Value: 100uM ABA vs. No Treatment
  misc_feature: MA Experiment ID: 20000087 Result: Up-regulated in Transcription
  misc_feature: MA Experiment 20000087 PARAMETER Experiment Name: At_100uM_ABA_Mutants_cDNA_P Parameter: Plant Line Value: WS
  misc_feature: MA Experiment 20000087 PARAMETER Experiment Name: At_100uM_ABA_Mutants_cDNA_P Parameter: Timepoint (hr) Value: 6
  misc_feature: MA Experiment 20000087 PARAMETER Experiment Name: At_100uM_ABA_Mutants_cDNA_P Parameter: Tissue Value: Aerial
  misc_feature: MA Experiment 20000087 PARAMETER Experiment Name: At_100uM_ABA_Mutants_cDNA_P Parameter: Treatment Value: 100uM ABA vs. No Treatment
  misc_feature: MA Experiment ID: 20000088 Result: Up-regulated in Transcription
  misc_feature: MA Experiment 20000088 PARAMETER Experiment Name: At_100uM_ABA_Mutants_cDNA_P Parameter: Plant Line Value: Landsberg
  misc_feature: MA Experiment 20000088 PARAMETER Experiment Name: At_100uM_ABA_Mutants_cDNA_P Parameter: Timepoint (hr) Value: 6
  misc_feature: MA Experiment 20000088 PARAMETER Experiment Name: At_100uM_ABA_Mutants_cDNA_P Parameter: Tissue Value: Aerial
  misc_feature: MA Experiment 20000088 PARAMETER Experiment Name: At_100uM_ABA_Mutants_cDNA_P Parameter: Treatment Value: 100uM ABA vs. No Treatment
  misc_feature: MA Experiment ID: 20000089 Result: Up-regulated in Transcription
  misc_feature: MA Experiment ID: 20000117 Result: Up-regulated in Transcription
  misc_feature: MA Experiment 20000117 PARAMETER Experiment Name: At_100uM_ABA_Mutants_cDNA_P Parameter: Plant Line Value: Columbia
  misc_feature: MA Experiment 20000117 PARAMETER Experiment Name: At_100uM_ABA_Mutants_cDNA_P Parameter: Timepoint (hr) Value: 6
  misc_feature: MA Experiment 20000117 PARAMETER Experiment Name: At_100uM_ABA_Mutants_cDNA_P Parameter: Tissue Value: Aerial
  misc_feature: MA Experiment 20000117 PARAMETER Experiment Name: At_100uM_ABA_Mutants_cDNA_P Parameter: Treatment Value: 100uM ABA vs. No Treatment
  misc_feature: MA Experiment ID: 20000166 Result: Up-regulated in Transcription
  misc_feature: MA Experiment 20000166 PARAMETER Experiment Name: At_100uM_ABA_P Parameter: Age (day) Value: 14
  misc_feature: MA Experiment 20000166 PARAMETER Experiment Name: At_100uM_ABA_P Parameter: Organism Value: A. thaliana
  misc_feature: MA Experiment 20000166 PARAMETER Experiment Name: At_100uM_ABA_P Parameter: Plant Line Value: WS
  misc_feature: MA Experiment 20000166 PARAMETER Experiment Name: At_100uM_ABA_P Parameter: Timepoint (hr) Value: 1
  misc_feature: MA Experiment 20000166 PARAMETER Experiment Name: At_100uM_ABA_P Parameter: Tissue Value: Aerial
  misc_feature: MA Experiment 20000166 PARAMETER Experiment Name: At_100uM_ABA_P Parameter: Treatment Value: 100uM ABA vs. No Treatment
  misc_feature: MA Experiment ID: 20000169 Result: Up-regulated in Transcription
  misc_feature: MA Experiment 20000169 PARAMETER Experiment Name: At_100uM_ABA_P Parameter: Age (day) Value: 14
  misc_feature: MA Experiment 20000169 PARAMETER Experiment Name: At_100uM_ABA_P Parameter: Organism Value: A. thaliana
  misc_feature: MA Experiment 20000169 PARAMETER Experiment Name: At_100uM_ABA_P Parameter: Plant Line Value: WS
  misc_feature: MA Experiment 20000169 PARAMETER Experiment Name: At_100uM_ABA_P Parameter: Timepoint (hr) Value: 6
  misc_feature: MA Experiment 20000169 PARAMETER Experiment Name: At_100uM_ABA_P Parameter: Tissue Value: Aerial
  misc_feature: MA Experiment 20000169 PARAMETER Experiment Name: At_100uM_ABA_P Parameter: Treatment Value: 100uM ABA vs. No Treatment
  misc_feature: MA Experiment ID: 20000182 Result: Up-regulated in Transcription
  misc_feature: MA Experiment 20000182 PARAMETER Experiment Name: At_2mM_SA_P Parameter: Age (day) Value: 14
  misc_feature: MA Experiment 20000182 PARAMETER Experiment Name: At_2mM_SA_P Parameter: Organism Value: A. thaliana
  misc_feature: MA Experiment 20000182 PARAMETER Experiment Name: At_2mM_SA_P Parameter: Plant Line Value: WS
  misc_feature: MA Experiment 20000182 PARAMETER Experiment Name: At_2mM_SA_P Parameter: Timepoint (hr) Value: 6
  misc_feature: MA Experiment 20000182 PARAMETER Experiment Name: At_2mM_SA_P Parameter: Tissue Value: Aerial
  misc_feature: MA Experiment 20000182 PARAMETER Experiment Name: At_2mM_SA_P Parameter: Treatment Value: 2mM SA vs. No Treatment
  misc_feature: MA Experiment ID: 20000184 Result: Down-regulated in Transcription
  misc_feature: MA Experiment 20000184 PARAMETER Experiment Name: At_Shoots__P Parameter: Age (day) Value: 7
  misc_feature: MA Experiment 20000184 PARAMETER Experiment Name: At_Shoots__P Parameter: Tissue Value: Shoots vs. Whole Plant
  misc_feature: MA Experiment ID: 20000227 Result: Down-regulated in Transcription
  misc_feature: MA Experiment 20000227 PARAMETER Experiment Name: At_Root-Tips-vs-Tops_P Parameter: Tissue Value: Root Tips vs. Root Tops
  misc_feature: MA Experiment ID: 20000234 Result: Down-regulated in Transcription
  misc_feature: MA Experiment 20000234 PARAMETER Experiment Name: At_Siliques_P Parameter: Age (day) Value: 21
  misc_feature: MA Experiment 20000234 PARAMETER Experiment Name: At_Siliques_P Parameter: Organism Value: A. thaliana
  misc_feature: MA Experiment 20000234 PARAMETER Experiment Name: At_Siliques_P Parameter: Plant Line Value: WS
  misc_feature: MA Experiment 20000234 PARAMETER Experiment Name: At_Siliques_P Parameter: Tissue Value: Less Than 5mm Siliques vs. Whole Plant
  misc_feature: MA Experiment ID: 20000235 Result: Down-regulated in Transcription
  misc_feature: MA Experiment 20000235 PARAMETER Experiment Name: At_Siliques_P Parameter: Age (day) Value: 21
  misc_feature: MA Experiment 20000235 PARAMETER Experiment Name: At_Siliques_P Parameter: Organism Value: A. thaliana
  misc_feature: MA Experiment 20000235 PARAMETER Experiment Name: At_Siliques_P Parameter: Plant Line Value: WS
  misc_feature: MA Experiment 20000235 PARAMETER Experiment Name: At_Siliques_P Parameter: Tissue Value: 5-10mm Siliques vs. Whole Plant
  misc_feature: MA Experiment ID: 20000264 Result: Down-regulated in Transcription
  misc_feature: MA Experiment 20000264 PARAMETER Experiment Name: At_Open_Flower_P Parameter: Age (day) Value: 21
  misc_feature: MA Experiment 20000264 PARAMETER Experiment Name: At_Open_Flower_P Parameter: Plant Line Value: WS
  misc_feature: MA Experiment 20000264 PARAMETER Experiment Name: At_Open_Flower_P Parameter: Tissue Value: Open Flower vs. Whole Plant
  misc_feature: MA Experiment ID: 20000265 Result: Down-regulated in Transcription
  misc_feature: MA Experiment 20000265 PARAMETER Experiment Name: At_Open_Flower_P Parameter: Age (day) Value: 21
  misc_feature: MA Experiment 20000265 PARAMETER Experiment Name: At_Open_Flower_P Parameter: Plant Line Value: WS
  misc_feature: MA Experiment 20000265 PARAMETER Experiment Name: At_Open_Flower_P Parameter: Tissue Value: Closed Flower vs. Whole Plant
  misc_feature: MA Experiment ID: 20000267 Result: Up-regulated in Transcription
  misc_feature: MA Experiment 20000267 PARAMETER Experiment Name: At_Drought_P Parameter: Age (day) Value: 7
  misc_feature: MA Experiment 20000267 PARAMETER Experiment Name: At_Drought_P Parameter: Organism Value: A. thaliana
  misc_feature: MA Experiment 20000267 PARAMETER Experiment Name: At_Drought_P Parameter: Plant Line Value: WS
  misc_feature: MA Experiment 20000267 PARAMETER Experiment Name: At_Drought_P Parameter: Timepoint (hr) Value: 6
  misc_feature: MA Experiment 20000267 PARAMETER Experiment Name: At_Drought_P Parameter: Tissue Value: Whole Plant
  misc_feature: MA Experiment 20000267 PARAMETER Experiment Name: At_Drought_P Parameter: Treatment Value: Drought vs. No Drought
  misc_feature: MA Experiment ID: 20000268 Result: Up-regulated in Transcription
  misc_feature: MA Experiment 20000268 PARAMETER Experiment Name: At_100mM_NaCl__P Parameter: Age (day) Value: 14
  misc_feature: MA Experiment 20000268 PARAMETER Experiment Name: At_100mM_NaCl__P Parameter: Organism Value: A. thaliana
  misc_feature: MA Experiment 20000268 PARAMETER Experiment Name: At_100mM_NaCl__P Parameter: Plant Line Value: WS
  misc_feature: MA Experiment 20000268 PARAMETER Experiment Name: At_100mM_NaCl__P Parameter: Timepoint (hr) Value: 6
  misc_feature: MA Experiment 20000268 PARAMETER Experiment Name: At_100mM_NaCl__P Parameter: Tissue Value: Whole Plant
  misc_feature: MA Experiment 20000268 PARAMETER Experiment Name: At_100mM_NaCl__P Parameter: Treatment Value: 100mM NaCl vs. No Treatment
  misc_feature: MA Experiment ID: 20000315 Result: Down-regulated in Transcription
  misc_feature: MA Experiment 20000315 PARAMETER Experiment Name: At_14day_Shoots-Roots_Sub_P Parameter: Age (day) Value: 14
  misc_feature: MA Experiment 20000315 PARAMETER Experiment Name: At_14day_Shoots-Roots_Sub_P Parameter: Organism Value: A. thaliana
  misc_feature: MA Experiment 20000315 PARAMETER Experiment Name: At_14day_Shoots-Roots_Sub_P Parameter: Plant Line Value: WS
  misc_feature: MA Experiment 20000315 PARAMETER Experiment Name: At_14day_Shoots-Roots_Sub_P Parameter: Tissue Value: Shoots vs. Whole Plant
  misc_feature: MA Experiment ID: 20000329 Result: Up-regulated in Transcription
  misc_feature: MA Experiment 20000329 PARAMETER Experiment Name: At_4deg_Cold_Sub_P Parameter: Age (day) Value: 14
  misc_feature: MA Experiment 20000329 PARAMETER Experiment Name: At_4deg_Cold_Sub_P Parameter: Organism Value: A. thaliana
  misc_feature: MA Experiment 20000329 PARAMETER Experiment Name: At_4deg_Cold_Sub_P Parameter: Plant Line Value: WS
  misc_feature: MA Experiment 20000329 PARAMETER Experiment Name: At_4deg_Cold_Sub_P Parameter: Temperature (deg C) Value: 4 vs. 22
  misc_feature: MA Experiment 20000329 PARAMETER Experiment Name: At_4deg_Cold_Sub_P Parameter: Timepoint (hr) Value: 6
  misc_feature: MA Experiment 20000329 PARAMETER Experiment Name: At_4deg_Cold_Sub_P Parameter: Tissue Value: Aerial
  misc_feature: MA Experiment ID: 20000347 Result: Up-regulated in Transcription
  misc_feature: MA Experiment 20000347 PARAMETER Experiment Name: At_2mM_SA_Sub_P Parameter: Age (day) Value: 14
  misc_feature: MA Experiment 20000347 PARAMETER Experiment Name: At_2mM_SA_Sub_P Parameter: Organism Value: A. thaliana
  misc_feature: MA Experiment 20000347 PARAMETER Experiment Name: At_2mM_SA_Sub_P Parameter: Plant Line Value: WS
  misc_feature: MA Experiment 20000347 PARAMETER Experiment Name: At_2mM_SA_Sub_P Parameter: Timepoint (hr) Value: 6
  misc_feature: MA Experiment 20000347 PARAMETER Experiment Name: At_2mM_SA_Sub_P Parameter: Tissue Value: Aerial
  misc_feature: MA Experiment 20000347 PARAMETER Experiment Name: At_2mM_SA_Sub_P Parameter: Treatment Value: 2mM SA vs. No Treatment
  misc_feature: MA Experiment ID: 20000348 Result: Up-regulated in Transcription
  misc_feature: MA Experiment 20000348 PARAMETER Experiment Name: At_100uM_ABA_Sub_P Parameter: Age (day) Value: 14
  misc_feature: MA Experiment 20000348 PARAMETER Experiment Name: At_100uM_ABA_Sub_P Parameter: Organism Value: A. thaliana
  misc_feature: MA Experiment 20000348 PARAMETER Experiment Name: At_100uM_ABA_Sub_P Parameter: Plant Line Value: WS
  misc_feature: MA Experiment 20000348 PARAMETER Experiment Name: At_100uM_ABA_Sub_P Parameter: Timepoint (hr) Value: 1
  misc_feature: MA Experiment 20000348 PARAMETER Experiment Name: At_100uM_ABA_Sub_P Parameter: Tissue Value: Aerial
  misc_feature: MA Experiment 20000348 PARAMETER Experiment Name: At_100uM_ABA_Sub_P Parameter: Treatment Value: 100uM ABA vs. No Treatment
  misc_feature: MA Experiment ID: 20000352 Result: Up-regulated in Transcription
  misc_feature: MA Experiment 20000352 PARAMETER Experiment Name: At_Drought_Sub_P Parameter: Age (day) Value: 7
  misc_feature: MA Experiment 20000352 PARAMETER Experiment Name: At_Drought_Sub_P Parameter: Organism Value: A. thaliana
  misc_feature: MA Experiment 20000352 PARAMETER Experiment Name: At_Drought_Sub_P Parameter: Plant Line Value: WS
  misc_feature: MA Experiment 20000352 PARAMETER Experiment Name: At_Drought_Sub_P Parameter: Timepoint (hr) Value: 6
  misc_feature: MA Experiment 20000352 PARAMETER Experiment Name: At_Drought_Sub_P Parameter: Tissue Value: Whole Plant
  misc_feature: MA Experiment 20000352 PARAMETER Experiment Name: At_Drought_Sub_P Parameter: Treatment Value: Drought vs. No Drought
  misc_feature: MA Experiment ID: 20000355 Result: Down-regulated in Transcription
  misc_feature: MA Experiment 20000355 PARAMETER Experiment Name: At_Siliques_Sub_P Parameter: Age (day) Value: 21
  misc_feature: MA Experiment 20000355 PARAMETER Experiment Name: At_Siliques_Sub_P Parameter: Organism Value: A. thaliana
  misc_feature: MA Experiment 20000355 PARAMETER Experiment Name: At_Siliques_Sub_P Parameter: Plant Line Value: WS
  misc_feature: MA Experiment 20000355 PARAMETER Experiment Name: At_Siliques_Sub_P Parameter: Tissue Value: Less Than 5mm Siliques vs. Whole Plant
  misc_feature: MA Experiment ID: 20000436 Result: Up-regulated in Transcription
  misc_feature: MA Experiment 20000436 PARAMETER Experiment Name: At_Drought_P Parameter: Age (day) Value: 7
  misc_feature: MA Experiment 20000436 PARAMETER Experiment Name: At_Drought_P Parameter: Organism Value: A. thaliana
  misc_feature: MA Experiment 20000436 PARAMETER Experiment Name: At_Drought_P Parameter: Plant Line Value: WS
  misc_feature: MA Experiment 20000436 PARAMETER Experiment Name: At_Drought_P Parameter: Timepoint (hr) Value: 12
  misc_feature: MA Experiment 20000436 PARAMETER Experiment Name: At_Drought_P Parameter: Tissue Value: Whole Plant
  misc_feature: MA Experiment 20000436 PARAMETER Experiment Name: At_Drought_P Parameter: Treatment Value: Drought vs. No Drought
  misc_feature: MA Experiment ID: 20000437 Result: Up-regulated in Transcription
  misc_feature: MA Experiment 20000437 PARAMETER Experiment Name: At_Drought_P Parameter: Age (day) Value: 8
  misc_feature: MA Experiment 20000437 PARAMETER Experiment Name: At_Drought_P Parameter: Organism Value: A. thaliana
  misc_feature: MA Experiment 20000437 PARAMETER Experiment Name: At_Drought_P Parameter: Plant Line Value: WS
  misc_feature: MA Experiment 20000437 PARAMETER Experiment Name: At_Drought_P Parameter: Timepoint (hr) Value: 24
  misc_feature: MA Experiment 20000437 PARAMETER Experiment Name: At_Drought_P Parameter: Tissue Value: Whole Plant
  misc_feature: MA Experiment 20000437 PARAMETER Experiment Name: At_Drought_P Parameter: Treatment Value: Drought vs. No Drought
  misc_feature: MA Experiment ID: 20000438 Result: Down-regulated in Transcription
  misc_feature: MA Experiment 20000438 PARAMETER Experiment Name: At_Shoots__P Parameter: Age (day) Value: 14
  misc_feature: MA Experiment 20000438 PARAMETER Experiment Name: At_Shoots__P Parameter: Tissue Value: Shoots vs. Whole Plant
  misc_feature: MA Experiment ID: 20000440 Result: Down-regulated in Transcription
  misc_feature: MA Experiment 20000440 PARAMETER Experiment Name: At_Closed-Flower__Sub_P Parameter: Tissue Value: Closed Flower vs. Whole Plant
  misc_feature: MA Experiment ID: 20000453 Result: Up-regulated in Transcription
  misc_feature: MA Experiment 20000453 PARAMETER Experiment Name: At_100uM_ABA_P Parameter: Age (day) Value: 15
  misc_feature: MA Experiment 20000453 PARAMETER Experiment Name: At_100uM_ABA_P Parameter: Organism Value: A. thaliana
  misc_feature: MA Experiment 20000453 PARAMETER Experiment Name: At_100uM_ABA_P Parameter: Plant Line Value: WS
  misc_feature: MA Experiment 20000453 PARAMETER Experiment Name: At_100uM_ABA_P Parameter: Timepoint (hr) Value: 24
  misc_feature: MA Experiment 20000453 PARAMETER Experiment Name: At_100uM_ABA_P Parameter: Tissue Value: Aerial
  misc_feature: MA Experiment 20000453 PARAMETER Experiment Name: At_100uM_ABA_P Parameter: Treatment Value: 100uM ABA vs. No Treatment
  misc_feature: MA Experiment ID: 20000495 Result: Down-regulated in Transcription
  misc_feature: MA Experiment 20000495 PARAMETER Experiment Name: At_Guard_Cells_P Parameter: Harvest Date Value: 8/2/2002
  misc_feature: MA Experiment 20000495 PARAMETER Experiment Name: At_Guard_Cells_P Parameter: Organism Value: A. thaliana
  misc_feature: MA Experiment 20000495 PARAMETER Experiment Name: At_Guard_Cells_P Parameter: Tissue Value: Guard Cells vs. Leaves
  misc_feature: MA Experiment ID: 20000576 Result: Up-regulated in Transcription
  misc_feature: MA Experiment 20000576 PARAMETER Experiment Name: At_100uM_ABA_Mutants__P Parameter: Organism Value: A. thaliana
  misc_feature: MA Experiment 20000576 PARAMETER Experiment Name: At_100uM_ABA_Mutants__P Parameter: Plant Line Value: CS23
  misc_feature: MA Experiment 20000576 PARAMETER Experiment Name: At_100uM_ABA_Mutants__P Parameter: Timepoint (hr) Value: 6
  misc_feature: MA Experiment 20000576 PARAMETER Experiment Name: At_100uM_ABA_Mutants__P Parameter: Tissue Value: Whole Plant
  misc_feature: MA Experiment 20000576 PARAMETER Experiment Name: At_100uM_ABA_Mutants__P Parameter: Treatment Value: 1uM ABA vs. No Treatment
  misc_feature: MA Experiment ID: 20000794 Result: Down-regulated in Transcription
  misc_feature: MA Experiment 20000794 PARAMETER Experiment Name: At_Petals_P Parameter: Age (day) Value: 23-25 days
  misc_feature: MA Experiment 20000794 PARAMETER Experiment Name: At_Petals_P Parameter: Plant Line Value: WS
  misc_feature: MA Experiment 20000794 PARAMETER Experiment Name: At_Petals_P Parameter: Tissue Value: Petals vs. Whole plant
  misc_feature: MA Experiment ID: 20001451 Result: Down-regulated in Transcription
  misc_feature: MA Experiment 20001451 PARAMETER Experiment Name: At_Far-red-induction_P Parameter: Age (day) Value: 7
  misc_feature: MA Experiment 20001451 PARAMETER Experiment Name: At_Far-red-induction_P Parameter: Light Value: Far-red vs. White
  misc_feature: MA Experiment 20001451 PARAMETER Experiment Name: At_Far-red-induction_P Parameter: Organism Value: A. thaliana
  misc_feature: MA Experiment 20001451 PARAMETER Experiment Name: At_Far-red-induction_P Parameter: Plant Line Value: Columbia
  misc_feature: MA Experiment 20001451 PARAMETER Experiment Name: At_Far-red-induction_P Parameter: Timepoint (hr) Value: 24
  misc_feature: MA Experiment 20001451 PARAMETER Experiment Name: At_Far-red-induction_P Parameter: Tissue Value: Whole Plant
  misc_feature: MA Experiment ID: 20001554 Result: Up-regulated in Transcription
  misc_feature: MA Experiment 20001554 PARAMETER Experiment Name: At_Drought_Soil_Dry_P Parameter: Age (day) Value: 21
  misc_feature: MA Experiment 20001554 PARAMETER Experiment Name: At_Drought_Soil_Dry_P Parameter: Organism Value: A. thaliana
  misc_feature: MA Experiment 20001554 PARAMETER Experiment Name: At_Drought_Soil_Dry_P Parameter: Plant Line Value: WS
  misc_feature: MA Experiment 20001554 PARAMETER Experiment Name: At_Drought_Soil_Dry_P Parameter: Post Timepoint (hr) Value: None
  misc_feature: MA Experiment 20001554 PARAMETER Experiment Name: At_Drought_Soil_Dry_P Parameter: Post-Treatment Value: None
  misc_feature: MA Experiment 20001554 PARAMETER Experiment Name: At_Drought_Soil_Dry_P Parameter: Timepoint (day) Value: 7
  misc_feature: MA Experiment 20001554 PARAMETER Experiment Name: At_Drought_Soil_Dry_P Parameter: Treatment Value: Drought vs. No Drought
  misc_feature: MA Experiment ID: 20001555 Result: Up-regulated in Transcription
  misc_feature: MA Experiment 20001555 PARAMETER Experiment Name: At_Drought_Soil_Dry_P Parameter: Age (day) Value: 24
  misc_feature: MA Experiment 20001555 PARAMETER Experiment Name: At_Drought_Soil_Dry_P Parameter: Organism Value: A. thaliana
  misc_feature: MA Experiment 20001555 PARAMETER Experiment Name: At_Drought_Soil_Dry_P Parameter: Plant Line Value: WS
  misc_feature: MA Experiment 20001555 PARAMETER Experiment Name: At_Drought_Soil_Dry_P Parameter: Post Timepoint (hr) Value: None
  misc_feature: MA Experiment 20001555 PARAMETER Experiment Name: At_Drought_Soil_Dry_P Parameter: Post-Treatment Value: None
  misc_feature: MA Experiment 20001555 PARAMETER Experiment Name: At_Drought_Soil_Dry_P Parameter: Timepoint (day) Value: 10
  misc_feature: MA Experiment 20001555 PARAMETER Experiment Name: At_Drought_Soil_Dry_P Parameter: Treatment Value: Drought vs. No Drought
  misc_feature: MA Experiment ID: 20001558 Result: Down-regulated in Transcription
  misc_feature: MA Experiment 20001558 PARAMETER Experiment Name: At_Drought_Soil_Dry_P Parameter: Age (day) Value: 27
  misc_feature: MA Experiment 20001558 PARAMETER Experiment Name: At_Drought_Soil_Dry_P Parameter: Organism Value: A. thaliana
  misc_feature: MA Experiment 20001558 PARAMETER Experiment Name: At_Drought_Soil_Dry_P Parameter: Plant Line Value: WS
  misc_feature: MA Experiment 20001558 PARAMETER Experiment Name: At_Drought_Soil_Dry_P Parameter: Post Timepoint (hr) Value: 6
  misc_feature: MA Experiment 20001558 PARAMETER Experiment Name: At_Drought_Soil_Dry_P Parameter: Post-Treatment Value: Re-Water vs. No Drought
  misc_feature: MA Experiment 20001558 PARAMETER Experiment Name: At_Drought_Soil_Dry_P Parameter: Timepoint (day) Value: 13
  misc_feature: MA Experiment 20001558 PARAMETER Experiment Name: At_Drought_Soil_Dry_P Parameter: Treatment Value: Drought vs. No Drought
  misc_feature: MA Experiment ID: 20001560 Result: Down-regulated in Transcription
  misc_feature: MA Experiment 20001560 PARAMETER Experiment Name: At_Drought_Soil_Dry_P Parameter: Age (day) Value: 28
  misc_feature: MA Experiment 20001560 PARAMETER Experiment Name: At_Drought_Soil_Dry_P Parameter: Organism Value: A. thaliana
  misc_feature: MA Experiment 20001560 PARAMETER Experiment Name: At_Drought_Soil_Dry_P Parameter: Plant Line Value: WS
  misc_feature: MA Experiment 20001560 PARAMETER Experiment Name: At_Drought_Soil_Dry_P Parameter: Post Timepoint (hr) Value: None
  misc_feature: MA Experiment 20001560 PARAMETER Experiment Name: At_Drought_Soil_Dry_P Parameter: Post-Treatment Value: None
  misc_feature: MA Experiment 20001560 PARAMETER Experiment Name: At_Drought_Soil_Dry_P Parameter: Timepoint (day) Value: 14
  misc_feature: MA Experiment 20001560 PARAMETER Experiment Name: At_Drought_Soil_Dry_P Parameter: Treatment Value: Drought vs. No Drought
  misc_feature: MA Experiment ID: 20001905 Result: Up-regulated in Transcription
  misc_feature: MA Experiment 20001905 PARAMETER Experiment Name: At_Drought_Reproduction_P Parameter: Age (day) Value: 40
  misc_feature: MA Experiment 20001905 PARAMETER Experiment Name: At_Drought_Reproduction_P Parameter: Organism Value: A. thaliana
  misc_feature: MA Experiment 20001905 PARAMETER Experiment Name: At_Drought_Reproduction_P Parameter: Plant Line Value: WS
  misc_feature: MA Experiment 20001905 PARAMETER Experiment Name: At_Drought_Reproduction_P Parameter: Timepoint (day) Value: 10
  misc_feature: MA Experiment 20001905 PARAMETER Experiment Name: At_Drought_Reproduction_P Parameter: Tissue Value: Rosettes
  misc_feature: MA Experiment 20001905 PARAMETER Experiment Name: At_Drought_Reproduction_P Parameter: Treatment Value: Drought vs. No Drought
  misc_feature: MA Experiment ID: 20001906 Result: Up-regulated in Transcription
  misc_feature: MA Experiment 20001906 PARAMETER Experiment Name: At_Drought_Reproduction_P Parameter: Age (day) Value: 35
  misc_feature: MA Experiment 20001906 PARAMETER Experiment Name: At_Drought_Reproduction_P Parameter: Organism Value: A. thaliana
  misc_feature: MA Experiment 20001906 PARAMETER Experiment Name: At_Drought_Reproduction_P Parameter: Plant Line Value: WS
  misc_feature: MA Experiment 20001906 PARAMETER Experiment Name: At_Drought_Reproduction_P Parameter: Timepoint (day) Value: 5
  misc_feature: MA Experiment 20001906 PARAMETER Experiment Name: At_Drought_Reproduction_P Parameter: Tissue Value: Siliques
  misc_feature: MA Experiment 20001906 PARAMETER Experiment Name: At_Drought_Reproduction_P Parameter: Treatment Value: Drought vs. No Drought
  misc_feature: MA Experiment ID: 20001910 Result: Up-regulated in Transcription
  misc_feature: MA Experiment 20001910 PARAMETER Experiment Name: At_Drought_Reproduction_P Parameter: Age (day) Value: 37
  misc_feature: MA Experiment 20001910 PARAMETER Experiment Name: At_Drought_Reproduction_P Parameter: Organism Value: A. thaliana
  misc_feature: MA Experiment 20001910 PARAMETER Experiment Name: At_Drought_Reproduction_P Parameter: Plant Line Value: WS
  misc_feature: MA Experiment 20001910 PARAMETER Experiment Name: At_Drought_Reproduction_P Parameter: Timepoint (day) Value: 7
  misc_feature: MA Experiment 20001910 PARAMETER Experiment Name: At_Drought_Reproduction_P Parameter: Tissue Value: Flowers
  misc_feature: MA Experiment 20001910 PARAMETER Experiment Name: At_Drought_Reproduction_P Parameter: Treatment Value: Drought vs. No Drought
  misc_feature: MA Experiment ID: 20001911 Result: Up-regulated in Transcription
  misc_feature: MA Experiment 20001911 PARAMETER Experiment Name: At_Drought_Reproduction_P Parameter: Age (day) Value: 40
  misc_feature: MA Experiment 20001911 PARAMETER Experiment Name: At_Drought_Reproduction_P Parameter: Organism Value: A. thaliana
  misc_feature: MA Experiment 20001911 PARAMETER Experiment Name: At_Drought_Reproduction_P Parameter: Plant Line Value: WS
  misc_feature: MA Experiment 20001911 PARAMETER Experiment Name: At_Drought_Reproduction_P Parameter: Timepoint (day) Value: 10
  misc_feature: MA Experiment 20001911 PARAMETER Experiment Name: At_Drought_Reproduction_P Parameter: Tissue Value: Flowers
  misc_feature: MA Experiment 20001911 PARAMETER Experiment Name: At_Drought_Reproduction_P Parameter: Treatment Value: Drought vs. No Drought
acataagaacatcgtaatcccatccgtttatatatatattccaagttaaacttcatatcatacacacaaacctaaaacaccgaaacaaaaacaaagagatttaaacaagaagagttattatggcgagcttgctagataaagccaaggacttcgtggcggataaactcaccgcgatccctaaaccggagggttcagttacggacgttgacctcaaagacgtgaaccgtgactcagttgagtacttggccaaagtctctgtcaccaatccttacagtcattcgattccgatctgtgagatcagtttcactttccacagcgccggcagggagattggaaaggggaagataccggacccgggttctctgaaagctaaggacatgacggctcttgatattcccgtggtggtgccgtatagtatactgtttaacctggctcgagacgttggtgtggactgggacattgactacgagctccaaatcggtctaaccatcgaccttcctgttgtaggggaatttactatccctatctctagtaagggagaaatcaaacttcctacttttaaagatttcttctgatcgacaaaacctatatataagaccacacatcgttatgatggtgaatggtgatgatcgtaatgtaataagttgggtttgctataactaataaaatgttattttgc

SEQ ID NO: 23597 - protein, 151 aa, Arabidopsis thaliana
  peptide (1)..(151): Ceres Seq. ID no. 12385417
  misc_feature (2)..(151): Pfam Name: Late embryogenesis abundant protein Pfam Description: Late embryogenesis abundant protein
  misc_feature (1)..(151): Homolog of NCBI NO: 1170746 NR Description: Desiccation protectant protein Lea14 homolog
  misc_feature (1)..(151): Homolog of NCBI NO: 1170745 NR Description: Late embryogenesis abundant protein Lea14-A
  misc_feature (1)..(151): Homolog of NCBI NO: 15223413 NR Description: hypothetical protein
MASLLDKAKDFVADKLTAIPKPEGSVTDVDLKDVNRDSVEYLAKVSVTNPYSHSIPICEISFTFHSAGREIGKGKIPDPGSLKAKDMTALDIPVVVPYSILFNLARDVGVDWDIDYELQIGLTIDLPVVGEFTIPISSKGEIKLPTFKDFF

SEQ ID NO: 23598 - DNA, 455 bp, Arabidopsis thaliana
  misc_feature (1)..(455): Ceres Seq. ID no. 12337562
  misc_feature: MA Experiment ID: 108434 Result: Down-regulated in Transcription
  misc_feature: MA Experiment 108434 PARAMETER Experiment Name: At_Root_Tips_cDNA_P Parameter: Tissue Value: Root Tips
  misc_feature: MA Experiment ID: 108573 Result: Up-regulated in Transcription
  misc_feature: MA Experiment 108573 PARAMETER Experiment Name: At_Drought_cDNA_P Parameter: Timepoint (hr) Value: 6
  misc_feature: MA Experiment 108573 PARAMETER Experiment Name: At_Drought_cDNA_P Parameter: Tissue Value: Aerial
  misc_feature: MA Experiment 108573 PARAMETER Experiment Name: At_Drought_cDNA_P Parameter: Treatment Value: Drought vs. No Drought
  misc_feature: MA Experiment ID: 108577 Result: Up-regulated in Transcription
  misc_feature: MA Experiment 108577 PARAMETER Experiment Name: At_42deg_Heat_cDNA_P Parameter: Temperature (deg C) Value: 42 vs. 22
  misc_feature: MA Experiment 108577 PARAMETER Experiment Name: At_42deg_Heat_cDNA_P Parameter: Timepoint (hr) Value: 6
  misc_feature: MA Experiment 108577 PARAMETER Experiment Name: At_42deg_Heat_cDNA_P Parameter: Tissue Value: Aerial
  misc_feature: MA Experiment ID: 108579 Result: Up-regulated in Transcription
  misc_feature: MA Experiment 108579 PARAMETER Experiment Name: At_4deg_Cold_cDNA_P Parameter: Temperature (deg C) Value: 4 vs. 22
  misc_feature: MA Experiment 108579 PARAMETER Experiment Name: At_4deg_Cold_cDNA_P Parameter: Timepoint (hr) Value: 6
  misc_feature: MA Experiment 108579 PARAMETER Experiment Name: At_4deg_Cold_cDNA_P Parameter: Tissue Value: Aerial
  misc_feature: MA Experiment ID: 20000093 Result: Up-regulated in Transcription
  misc_feature: MA Experiment 20000093 PARAMETER Experiment Name: At_42deg_Heat_cDNA_P Parameter: Temperature (deg C) Value: 42 vs. 22
  misc_feature: MA Experiment 20000093 PARAMETER Experiment Name: At_42deg_Heat_cDNA_P Parameter: Timepoint (hr) Value: 0.5
  misc_feature: MA Experiment 20000093 PARAMETER Experiment Name: At_42deg_Heat_cDNA_P Parameter: Tissue Value: Aerial
  misc_feature: MA Experiment ID: 20000111 Result: Up-regulated in Transcription
  misc_feature: MA Experiment 20000111 PARAMETER Experiment Name: At_42deg_Heat_cDNA_P Parameter: Temperature (deg C) Value: 42 vs. 22
  misc_feature: MA Experiment 20000111 PARAMETER Experiment Name: At_42deg_Heat_cDNA_P Parameter: Timepoint (hr) Value: 6
  misc_feature: MA Experiment 20000111 PARAMETER Experiment Name: At_42deg_Heat_cDNA_P Parameter: Tissue Value: Aerial
  misc_feature: MA Experiment ID: 20000112 Result: Up-regulated in Transcription
  misc_feature: MA Experiment 20000112 PARAMETER Experiment Name: At_42deg_Heat_cDNA_P Parameter: Temperature (deg C) Value: 42 vs. 22
  misc_feature: MA Experiment 20000112 PARAMETER Experiment Name: At_42deg_Heat_cDNA_P Parameter: Timepoint (hr) Value: 2
  misc_feature: MA Experiment 20000112 PARAMETER Experiment Name: At_42deg_Heat_cDNA_P Parameter: Tissue Value: Aerial
  misc_feature: MA Experiment ID: 20000144 Result: Up-regulated in Transcription
  misc_feature: MA Experiment 20000144 PARAMETER Experiment Name: At_42deg_Heat_cDNA_P Parameter: Temperature (deg C) Value: 42 vs. 22
  misc_feature: MA Experiment 20000144 PARAMETER Experiment Name: At_42deg_Heat_cDNA_P Parameter: Timepoint (hr) Value: 1
  misc_feature: MA Experiment 20000144 PARAMETER Experiment Name: At_42deg_Heat_cDNA_P Parameter: Tissue Value: Aerial
  misc_feature: MA Experiment ID: 20000327 Result: Up-regulated in Transcription
  misc_feature: MA Experiment 20000327 PARAMETER Experiment Name: At_42deg_Heat_Sub_P Parameter: Age (day) Value: 14
  misc_feature: MA Experiment 20000327 PARAMETER Experiment Name: At_42deg_Heat_Sub_P Parameter: Organism Value: A. thaliana
  misc_feature: MA Experiment 20000327 PARAMETER Experiment Name: At_42deg_Heat_Sub_P Parameter: Plant Line Value: WS
  misc_feature: MA Experiment 20000327 PARAMETER Experiment Name: At_42deg_Heat_Sub_P Parameter: Temperature (deg C) Value: 42 vs. 22
  misc_feature: MA Experiment 20000327 PARAMETER Experiment Name: At_42deg_Heat_Sub_P Parameter: Timepoint (hr) Value: 1
  misc_feature: MA Experiment 20000327 PARAMETER Experiment Name: At_42deg_Heat_Sub_P Parameter: Tissue Value: Aerial
  misc_feature: MA Experiment ID: 20000328 Result: Up-regulated in Transcription
  misc_feature: MA Experiment 20000328 PARAMETER Experiment Name: At_42deg_Heat_Sub_P Parameter: Age (day) Value: 14
  misc_feature: MA Experiment 20000328 PARAMETER Experiment Name: At_42deg_Heat_Sub_P Parameter: Organism Value: A. thaliana
  misc_feature: MA Experiment 20000328 PARAMETER Experiment Name: At_42deg_Heat_Sub_P Parameter: Plant Line Value: WS
  misc_feature: MA Experiment 20000328 PARAMETER Experiment Name: At_42deg_Heat_Sub_P Parameter: Temperature (deg C) Value: 42 vs. 22
  misc_feature: MA Experiment 20000328 PARAMETER Experiment Name: At_42deg_Heat_Sub_P Parameter: Timepoint (hr) Value: 6
  misc_feature: MA Experiment 20000328 PARAMETER Experiment Name: At_42deg_Heat_Sub_P Parameter: Tissue Value: Aerial
  misc_feature: MA Experiment ID: 20000440 Result: Down-regulated in Transcription
  misc_feature: MA Experiment 20000440 PARAMETER Experiment Name: At_Closed-Flower__Sub_P Parameter: Tissue Value: Closed Flower vs. Whole Plant
  misc_feature: MA Experiment ID: 20001807 Result: Down-regulated in Transcription
  misc_feature: MA Experiment 20001807 PARAMETER Experiment Name: At_50mM_NH4NO3_L-to-H_Sub_P Parameter: Timepoint (hr) Value: 6
  misc_feature: MA Experiment 20001807 PARAMETER Experiment Name: At_50mM_NH4NO3_L-to-H_Sub_P Parameter: Tissue Value: Leaf
  misc_feature: MA Experiment 20001807 PARAMETER Experiment Name: At_50mM_NH4NO3_L-to-H_Sub_P Parameter: Treatment Value: 50mM NH4NO3 vs 100mM Mannitol
cggattacaacatccagaaggagtcgacccttcacttggtgttgcgtctgcgtggaggtatgcagatcttcgtcaagactttgaccggaaagaccatcacccttgaagtggaaagctccgacaccattgacaacgtcaaggccaagatccaggacaaggaaggtattcctccggagcagcagcgtctcatcttcgctggaaagcagcttgaggatggacgtactttggccgactacaacatccagaaggagtctactcttcacttggtcctgcgtcttcgtggtggtttctaaatctcgtctctgttatgcttaagaagttcaatgtttcgtttcatgtaaaactttggtggtttgtgttttggggccttgtataatccctgatgaataagtgttctactatgtttccgttcctgttatctctttctttctaatgacaagtcgaacttcttcttc

SEQ ID NO: 23599 - protein, 96 aa, Arabidopsis thaliana
  peptide (1)..(96): Ceres Seq. ID no. 12337563
  misc_feature (20)..(93): Pfam Name: Ubiquitin family Pfam Description: Ubiquitin family
  misc_feature (1)..(96): Homolog of NCBI NO: 29836445 NR Description: putative polyubiquitin [Gossypium herbaceum]
  misc_feature (1)..(96): Homolog of NCBI NO: 170354 NR Description: pentameric polyubiquitin
  misc_feature (1)..(96): Homolog of NCBI NO: 1800281 NR Description: polyubiquitin [Fragaria x ananassa]
  misc_feature (1)..(96): Homolog of NCBI NO: 6118549 NR Description: ubiquitin precursor [Hevea brasiliensis]
  misc_feature (1)..(96): Homolog of NCBI NO: 170352 NR Description: hexameric polyubiquitin
  misc_feature (1)..(96): Homolog of NCBI NO: 70645 NR Description: polyubiquitin 5 - garden pea
  misc_feature (1)..(96): Homolog of NCBI NO: 70644 NR Description: ubiquitin precursor - common sunflower (fragment)
  misc_feature (1)..(53): Homolog of NCBI NO: 30680052 NR Description: polyubiquitin UBQ10/SEN3 [Arabidopsis thaliana]
  misc_feature (1)..(59): Homolog of NCBI NO: 23397122 NR Description: putative polyubiquitin (UBQ10) [Arabidopsis
  misc_feature (1)..(53): Homolog of NCBI NO: 18412930 NR Description: polyubiquitin UBQ10/SEN3; protein id: At4g05320.1
DYNIQKESTLHLVLRLRGGMQIFVKTLTGKTITLEVESSDTIDNVKAKIQDKEGIPPEQQRLIFAGKQLEDGRTLADYNIQKESTLHLVLRLRGGF

SEQ ID NO: 23600 - protein, 77 aa, Arabidopsis thaliana
  peptide (1)..(77): Ceres Seq. ID no. 12337564
  misc_feature (1)..(74): Pfam Name: Ubiquitin family Pfam Description: Ubiquitin family
  misc_feature (1)..(77): Homolog of NCBI NO: 170352 NR Description: hexameric polyubiquitin
  misc_feature (1)..(77): Homolog of NCBI NO: 170354 NR Description: pentameric polyubiquitin
  misc_feature (1)..(77): Homolog of NCBI NO: 1800281 NR Description: polyubiquitin [Fragaria x ananassa]
  misc_feature (1)..(77): Homolog of NCBI NO: 6118549 NR Description: ubiquitin precursor [Hevea brasiliensis]
  misc_feature (1)..(77): Homolog of NCBI NO: 15982787 NR Description: AT4g05320/C17L7_240 [Arabidopsis thaliana]
  misc_feature (1)..(77): Homolog of NCBI NO: 29836445 NR Description: putative polyubiquitin [Gossypium herbaceum]
  misc_feature (1)..(77): Homolog of NCBI NO: 70644 NR Description: ubiquitin precursor - common sunflower (fragment)
  misc_feature (1)..(34): Homolog of NCBI NO: 30680052 NR Description: polyubiquitin UBQ10/SEN3 [Arabidopsis thaliana]
  misc_feature (1)..(40): Homolog of NCBI NO: 23397122 NR Description: putative polyubiquitin (UBQ10) [Arabidopsis
  misc_feature (1)..(34): Homolog of NCBI NO: 18412930 NR Description: polyubiquitin UBQ10/SEN3; protein id: At4g05320.1
MQIFVKTLTGKTITLEVESSDTIDNVKAKIQDKEGIPPEQQRLIFAGKQLEDGRTLADYNIQKESTLHLVLRLRGGF

SEQ ID NO: 23601 - DNA, 1439 bp, Arabidopsis thaliana
  misc_feature (1)..(1439): Ceres Seq. ID no. 12421268
  misc_feature: MA Experiment ID: 108434 Result: Up-regulated in Transcription
  misc_feature: MA Experiment 108434 PARAMETER Experiment Name: At_Root_Tips_cDNA_P Parameter: Tissue Value: Root Tips
  misc_feature: MA Experiment ID: 20000315 Result: Down-regulated in Transcription
  misc_feature: MA Experiment 20000315 PARAMETER Experiment Name: At_14day_Shoots-Roots_Sub_P Parameter: Age (day) Value: 14
  misc_feature: MA Experiment 20000315 PARAMETER Experiment Name: At_14day_Shoots-Roots_Sub_P Parameter: Organism Value: A. thaliana
  misc_feature: MA Experiment 20000315 PARAMETER Experiment Name: At_14day_Shoots-Roots_Sub_P Parameter: Plant Line Value: WS
  misc_feature: MA Experiment 20000315 PARAMETER Experiment Name: At_14day_Shoots-Roots_Sub_P Parameter: Tissue Value: Shoots vs. Whole Plant
  misc_feature: MA Experiment ID: 20000355 Result: Down-regulated in Transcription
  misc_feature: MA Experiment 20000355 PARAMETER Experiment Name: At_Siliques_Sub_P Parameter: Age (day) Value: 21
  misc_feature: MA Experiment 20000355 PARAMETER Experiment Name: At_Siliques_Sub_P Parameter: Organism Value: A. thaliana
  misc_feature: MA Experiment 20000355 PARAMETER Experiment Name: At_Siliques_Sub_P Parameter: Plant Line Value: WS
  misc_feature: MA Experiment 20000355 PARAMETER Experiment Name: At_Siliques_Sub_P Parameter: Tissue Value: Less Than 5mm Siliques vs. Whole Plant
  misc_feature: MA Experiment ID: 20000440 Result: Down-regulated in Transcription
  misc_feature: MA Experiment 20000440 PARAMETER Experiment Name: At_Closed-Flower__Sub_P Parameter: Tissue Value: Closed Flower vs. Whole Plant
ctctgaagaagaaaagcaaaatccacgagagaaacagatagaaagttgcaaaagtgcgttcgatttttgcttcttcttctgtttcggattcggatttggatttggaatctgctcctttagcagaaccagaggaaatggtgacgtacgtgagcgcgttgttctacggattcggagggatagtcgtcgccggagtggcgctgctcgtggctttccaggagaagcttgtgtacgtcccagtgcttccgggtttaagcaagtcttatccgatcactcccgctaggctcaatctcatctacgaagatatttggcttcaatcatccgatggtgtacgtctccacgcttggttcatcaagatgttccctgaatgtcgaggtccaaccattttatttttccaggagaacgctggaaacatcgctcatcgtctggagatggttcgcatcatgatacaaaaattgaagtgcaatgtattcatgctttcatatcgcggctatggggcaagtgaaggctatccttcacaacaaggtatcataaaagatgctcaggctgcattggatcacctttctggaaggactgacattgatacatctagaatagttgtatttggaaggtcccttgggggagctgttggagctgtgcttaccaaaaacaatccagataaggtatctgcattgattctggaaaatactttcacatccattcttgatatggctggcgttttgctgccgttcttgaagtggtttattggaggaagtggtacgaaaagcctgaagcttcttaattttgttgtacgttctccctggaaaacaattgatgctattgctgagatcaaacaaccagtgcttttcctctctggactgcaagatgagatggtccctccatttcacatgaaaatgctgtatgcgaaagcggctgcccgtaaccctcagtgcacatttgtggagtttccaagtgggatgcatatggatacatggctgtctggtggtgaagtttactggaaaacaaacttgcaatttctcgaaaagtatgcgcctgagaaaaggaaagaagatacaggaaggtaacgatcaacgatgctgtgtttagaggaagattcgactcacttatttcctattgcaacctgaaacgacggtattgtttgttataagcatgtgtatacgtatgttgcatttgggagtgacagatacaacttgttcagagagtgagatattggacaggaacttttgtaagcagaaccagctagtggagatggcaagtgtaagctaatcagatgcatttgcttcgtctcagttttccttcttttttttgggttattttttttccaattgttgttggtgtttctcatctgatcgtaactatttcctctggatgatcatggctttgtagatgattgagaaaagtgaaaaaagacatggttatatgattatatcttgaatgtgttg

SEQ ID NO: 23602 - protein, 308 aa, Arabidopsis thaliana
  peptide (1)..(308): Ceres Seq. ID no. 12421269
  misc_feature (111)..(192): Pfam Name: alpha/beta hydrolase fold Pfam Description: alpha/beta hydrolase fold
  misc_feature (14)..(302): Homolog of NCBI NO: 32420537 NR Description: hypothetical protein [Neurospora crassa]
  misc_feature (9)..(283): Homolog of NCBI NO: 17137566 NR Description: CG18642-PA [Drosophila melanogaster]
  misc_feature (9)..(296): Homolog of NCBI NO: 31211785 NR Description: ENSANGP00000005169 [Anopheles gambiae]
  misc_feature (9)..(305): Homolog of NCBI NO: 28483207 NR Description: RIKEN cDNA 1110065L07 [Mus musculus]
  misc_feature (9)..(305): Homolog of NCBI NO: 34879678 NR Description: similar to 1110065L07Rik protein [Rattus
  misc_feature (9)..(294): Homolog of NCBI NO: 19112401 NR Description: supressor of bem1/bud5 [Schizosaccharomyces
  misc_feature (9)..(294): Homolog of NCBI NO: 2257503 NR Description: BEM46 PROTEIN [Schizosaccharomyces pombe]
  misc_feature (9)..(294): Homolog of NCBI NO: 987287 NR Description: temperature sensitive supressor of Saccharomyces
  misc_feature (1)..(306): Homolog of NCBI NO: 34395138 NR Description: putative membrane protein [Oryza sativa (japonica
  misc_feature (1)..(308): Homolog of NCBI NO: 18420236 NR Description: putative protein
MVTYVSALFYGFGGIVVAGVALLVAFQEKLVYVPVLPGLSKSYPITPARLNLIYEDIWLQSSDGVRLHAWFIKMFPECRGPTILFFQENAGNIAHRLEMVRIMIQKLKCNVFMLSYRGYGASEGYPSQQGIIKDAQAALDHLSGRTDIDTSRIVVFGRSLGGAVGAVLTKNNPDKVSALILENTFTSILDMAGVLLPFLKWFIGGSGTKSLKLLNFVVRSPWKTIDAIAEIKQPVLFLSGLQDEMVPPFHMKMLYAKAAARNPQCTFVEFPSGMHMDTWLSGGEVYWKTNLQFLEKYAPEKRKEDTGR

SEQ ID NO: 23603 - protein, 235 aa, Arabidopsis thaliana
  peptide (1)..(235): Ceres Seq. ID no. 12421270
  misc_feature (38)..(119): Pfam Name: alpha/beta hydrolase fold Pfam Description: alpha/beta hydrolase fold
  misc_feature (1)..(229): Homolog of NCBI NO: 32420537 NR Description: hypothetical protein [Neurospora crassa]
  misc_feature (1)..(210): Homolog of NCBI NO: 17137566 NR Description: CG18642-PA [Drosophila melanogaster]
  misc_feature (1)..(223): Homolog of NCBI NO: 31211785 NR Description: ENSANGP00000005169 [Anopheles gambiae]
  misc_feature (1)..(232): Homolog of NCBI NO: 28483207 NR Description: RIKEN cDNA 1110065L07 [Mus musculus]
  misc_feature (1)..(232): Homolog of NCBI NO: 34879678 NR Description: similar to 1110065L07Rik protein [Rattus
  misc_feature (1)..(221): Homolog of NCBI NO: 2257503 NR Description: BEM46 PROTEIN [Schizosaccharomyces pombe]
  misc_feature (1)..(221): Homolog of NCBI NO: 19112401 NR Description: supressor of bem1/bud5 [Schizosaccharomyces
  misc_feature (1)..(221): Homolog of NCBI NO: 987287 NR Description: temperature sensitive supressor of Saccharomyces
  misc_feature (1)..(233): Homolog of NCBI NO: 34395138 NR Description: putative membrane protein [Oryza sativa (japonica
  misc_feature (1)..(235): Homolog of NCBI NO: 18420236 NR Description: putative protein
MFPECRGPTILFFQENAGNIAHRLEMVRIMIQKLKCNVFMLSYRGYGASEGYPSQQGIIKDAQAALDHLSGRTDIDTSRIVVFGRSLGGAVGAVLTKNNPDKVSALILENTFTSILDMAGVLLPFLKWFIGGSGTKSLKLLNFVVRSPWKTIDAIAEIKQPVLFLSGLQDEMVPPFHMKMLYAKAAARNPQCTFVEFPSGMHMDTWLSGGEVYWKTNLQFLEKYAPEKRKEDTGR

SEQ ID NO: 23604 - protein, 210 aa, Arabidopsis thaliana
  peptide (1)..(210): Ceres Seq. ID no. 12421271
  misc_feature (13)..(94): Pfam Name: alpha/beta hydrolase fold Pfam Description: alpha/beta hydrolase fold
  misc_feature (1)..(204): Homolog of NCBI NO: 32420537 NR Description: hypothetical protein [Neurospora crassa]
  misc_feature (1)..(185): Homolog of NCBI NO: 17137566 NR Description: CG18642-PA [Drosophila melanogaster]
  misc_feature (1)..(198): Homolog of NCBI NO: 31211785 NR Description: ENSANGP00000005169 [Anopheles gambiae]
  misc_feature (1)..(207): Homolog of NCBI NO: 28483207 NR Description: RIKEN cDNA 1110065L07 [Mus musculus]
  misc_feature (1)..(207): Homolog of NCBI NO: 34879678 NR Description: similar to 1110065L07Rik protein [Rattus
  misc_feature (1)..(196): Homolog of NCBI NO: 19112401 NR Description: supressor of bem1/bud5 [Schizosaccharomyces
  misc_feature (1)..(196): Homolog of NCBI NO: 2257503 NR Description: BEM46 PROTEIN [Schizosaccharomyces pombe]
  misc_feature (1)..(196): Homolog of NCBI NO: 987287 NR Description: temperature sensitive supressor of Saccharomyces
  misc_feature (1)..(208): Homolog of NCBI NO: 34395138 NR Description: putative membrane protein [Oryza sativa (japonica
  misc_feature (1)..(210): Homolog of NCBI NO: 18420236 NR Description: putative protein
MVRIMIQKLKCNVFMLSYRGYGASEGYPSQQGIIKDAQAALDHLSGRTDIDTSRIVVFGRSLGGAVGAVLTKNNPDKVSALILENTFTSILDMAGVLLPFLKWFIGGSGTKSLKLLNFVVRSPWKTIDAIAEIKQPVLFLSGLQDEMVPPFHMKMLYAKAAARNPQCTFVEFPSGMHMDTWLSGGEVYWKTNLQFLEKYAPEKRKEDTGR

SEQ ID NO: 23605 - DNA, 1067 bp, Arabidopsis thaliana
  misc_feature (1)..(1067): Ceres Seq. ID no. 12421908
  misc_feature: MA Experiment ID: 108434 Result: Down-regulated in Transcription
  misc_feature: MA Experiment 108434 PARAMETER Experiment Name: At_Root_Tips_cDNA_P Parameter: Tissue Value: Root Tips
  misc_feature: MA Experiment ID: 108461 Result: Up-regulated in Transcription
  misc_feature: MA Experiment 108461 PARAMETER Experiment Name: At_Germinating_Seeds_cDNA_P Parameter: Age (day) Value: 1 vs. 0
  misc_feature: MA Experiment 108461 PARAMETER Experiment Name: At_Germinating_Seeds_cDNA_P Parameter: Tissue Value: Germinating Seeds
  misc_feature: MA Experiment ID: 108462 Result: Up-regulated in Transcription
  misc_feature: MA Experiment 108462 PARAMETER Experiment Name: At_Germinating_Seeds_cDNA_P Parameter: Age (day) Value: 2 vs. 0
  misc_feature: MA Experiment 108462 PARAMETER Experiment Name: At_Germinating_Seeds_cDNA_P Parameter: Tissue Value: Germinating Seeds
  misc_feature: MA Experiment ID: 108463 Result: Up-regulated in Transcription
  misc_feature: MA Experiment 108463 PARAMETER Experiment Name: At_Germinating_Seeds_cDNA_P Parameter: Age (day) Value: 3 vs. 0
  misc_feature: MA Experiment 108463 PARAMETER Experiment Name: At_Germinating_Seeds_cDNA_P Parameter: Tissue Value: Germinating Seeds
  misc_feature: MA Experiment ID: 108464 Result: Up-regulated in Transcription
  misc_feature: MA Experiment 108464 PARAMETER Experiment Name: At_Germinating_Seeds_cDNA_P Parameter: Age (day) Value: 4 vs. 0
  misc_feature: MA Experiment 108464 PARAMETER Experiment Name: At_Germinating_Seeds_cDNA_P Parameter: Tissue Value: Germinating Seeds
  misc_feature: MA Experiment ID: 108561 Result: Up-regulated in Transcription
  misc_feature: MA Experiment 108561 PARAMETER Experiment Name: At_100uM_ABA_cDNA_P Parameter: Timepoint (hr) Value: 6
  misc_feature: MA Experiment 108561 PARAMETER Experiment Name: At_100uM_ABA_cDNA_P Parameter: Tissue Value: Aerial
  misc_feature: MA Experiment 108561 PARAMETER Experiment Name: At_100uM_ABA_cDNA_P Parameter: Treatment Value: 100uM ABA vs. No Treatment
  misc_feature: MA Experiment ID: 108576 Result: Down-regulated in Transcription
  misc_feature: MA Experiment 108576 PARAMETER Experiment Name: At_42deg_Heat_cDNA_P Parameter: Temperature (deg C) Value: 42 vs. 22
  misc_feature: MA Experiment 108576 PARAMETER Experiment Name: At_42deg_Heat_cDNA_P Parameter: Timepoint (hr) Value: 1
  misc_feature: MA Experiment 108576 PARAMETER Experiment Name: At_42deg_Heat_cDNA_P Parameter: Tissue Value: Aerial
  misc_feature: MA Experiment ID: 108594 Result: Up-regulated in Transcription
  misc_feature: MA Experiment 108594 PARAMETER Experiment Name: At_Ler-rhl_Root_cDNA_P Parameter: Plant Line Value: null
  misc_feature: MA Experiment ID: 108595 Result: Up-regulated in Transcription
  misc_feature: MA Experiment 108595 PARAMETER Experiment Name: At_Ler-pi_Ovule_cDNA_P Parameter: Plant Line Value: null
  misc_feature: MA Experiment ID: 108605 Result: Up-regulated in Transcription
  misc_feature: MA Experiment 108605 PARAMETER Experiment Name: At_100uM_ABA_cDNA_P Parameter: Timepoint (hr) Value: 6
  misc_feature: MA Experiment 108605 PARAMETER Experiment Name: At_100uM_ABA_cDNA_P Parameter: Tissue Value: Aerial
  misc_feature: MA Experiment 108605 PARAMETER Experiment Name: At_100uM_ABA_cDNA_P Parameter: Treatment Value: 100uM ABA vs. No Treatment
  misc_feature: MA Experiment ID: 108607 Result: Up-regulated in Transcription
  misc_feature: MA Experiment 108607 PARAMETER Experiment Name: At_100uM_ABA_cDNA_P Parameter: Timepoint (hr) Value: 4
  misc_feature: MA Experiment 108607 PARAMETER Experiment Name: At_100uM_ABA_cDNA_P Parameter: Tissue Value: Aerial
  misc_feature: MA Experiment 108607 PARAMETER Experiment Name: At_100uM_ABA_cDNA_P Parameter: Treatment Value: 100uM ABA vs. No Treatment
  misc_feature: MA Experiment ID: 108608 Result: Up-regulated in Transcription
  misc_feature: MA Experiment 108608 PARAMETER Experiment Name: At_100uM_ABA_cDNA_P Parameter: Timepoint (hr) Value: 1
  misc_feature: MA Experiment 108608 PARAMETER Experiment Name: At_100uM_ABA_cDNA_P Parameter: Tissue Value: Aerial
  misc_feature: MA Experiment 108608 PARAMETER Experiment Name: At_100uM_ABA_cDNA_P Parameter: Treatment Value: 100uM ABA vs. No Treatment
  misc_feature: MA Experiment ID: 108609 Result: Up-regulated in Transcription
  misc_feature: MA Experiment 108609 PARAMETER Experiment Name: At_100uM_ABA_cDNA_P Parameter: Timepoint (hr) Value: 24
  misc_feature: MA Experiment 108609 PARAMETER Experiment Name: At_100uM_ABA_cDNA_P Parameter: Tissue Value: Aerial
  misc_feature: MA Experiment 108609 PARAMETER Experiment Name: At_100uM_ABA_cDNA_P Parameter: Treatment Value: 100uM ABA vs. No Treatment
  misc_feature: MA Experiment ID: 108668 Result: Down-regulated in Transcription
  misc_feature: MA Experiment 108668 PARAMETER Experiment Name: At_2mM_SA_cDNA_P Parameter: Plant Line Value: WS
  misc_feature: MA Experiment 108668 PARAMETER Experiment Name: At_2mM_SA_cDNA_P Parameter: Timepoint (hr) Value: 6
  misc_feature: MA Experiment 108668 PARAMETER Experiment Name: At_2mM_SA_cDNA_P Parameter: Treatment Value: 2mM SA vs. No Treatment
  misc_feature: MA Experiment ID: 20000089 Result: Down-regulated in Transcription
  misc_feature: MA Experiment ID: 20000090 Result: Down-regulated in Transcription
  misc_feature: MA Experiment ID: 20000166 Result: Up-regulated in Transcription
  misc_feature: MA Experiment 20000166 PARAMETER Experiment Name: At_100uM_ABA_P Parameter: Age (day) Value: 14
  misc_feature: MA Experiment 20000166 PARAMETER Experiment Name: At_100uM_ABA_P Parameter: Organism Value: A. thaliana
  misc_feature: MA Experiment 20000166 PARAMETER Experiment Name: At_100uM_ABA_P Parameter: Plant Line Value: WS
  misc_feature: MA Experiment 20000166 PARAMETER Experiment Name: At_100uM_ABA_P Parameter: Timepoint (hr) Value: 1
  misc_feature: MA Experiment 20000166 PARAMETER Experiment Name: At_100uM_ABA_P Parameter: Tissue Value: Aerial
  misc_feature: MA Experiment 20000166 PARAMETER Experiment Name: At_100uM_ABA_P Parameter: Treatment Value: 100uM ABA vs. No Treatment
  misc_feature: MA Experiment ID: 20000169 Result: Up-regulated in Transcription
  misc_feature: MA Experiment 20000169 PARAMETER Experiment Name: At_100uM_ABA_P Parameter: Age (day) Value: 14
  misc_feature: MA Experiment 20000169 PARAMETER Experiment Name: At_100uM_ABA_P Parameter: Organism Value: A. thaliana
  misc_feature: MA Experiment 20000169 PARAMETER Experiment Name: At_100uM_ABA_P Parameter: Plant Line Value: WS
  misc_feature: MA Experiment 20000169 PARAMETER Experiment Name: At_100uM_ABA_P Parameter: Timepoint (hr) Value: 6
  misc_feature: MA Experiment 20000169 PARAMETER Experiment Name: At_100uM_ABA_P Parameter: Tissue Value: Aerial
  misc_feature: MA Experiment 20000169 PARAMETER Experiment Name: At_100uM_ABA_P Parameter: Treatment Value: 100uM ABA vs. No Treatment
  misc_feature: MA Experiment ID: 20000180 Result: Up-regulated in Transcription
  misc_feature: MA Experiment 20000180 PARAMETER Experiment Name: At_Germinating_Seeds_P Parameter: Age (hr) Value: 24 vs. 0
  misc_feature: MA Experiment 20000180 PARAMETER Experiment Name: At_Germinating_Seeds_P Parameter: Tissue Value: Germinating Seeds
  misc_feature: MA Experiment ID: 20000182 Result: Down-regulated in Transcription
  misc_feature: MA Experiment 20000182 PARAMETER Experiment Name: At_2mM_SA_P Parameter: Age (day) Value: 14
  misc_feature: MA Experiment 20000182 PARAMETER Experiment Name: At_2mM_SA_P Parameter: Organism Value: A. thaliana
  misc_feature: MA Experiment 20000182 PARAMETER Experiment Name: At_2mM_SA_P Parameter: Plant Line Value: WS
  misc_feature: MA Experiment 20000182 PARAMETER Experiment Name: At_2mM_SA_P Parameter: Timepoint (hr) Value: 6
  misc_feature: MA Experiment 20000182 PARAMETER Experiment Name: At_2mM_SA_P Parameter: Tissue Value: Aerial
  misc_feature: MA Experiment 20000182 PARAMETER Experiment Name: At_2mM_SA_P Parameter: Treatment Value: 2mM SA vs. No Treatment
  misc_feature: MA Experiment ID: 20000213 Result: Up-regulated in Transcription
  misc_feature: MA Experiment 20000213 PARAMETER Experiment Name: At_4deg_Cold_P Parameter: Timepoint (hr) Value: 2
  misc_feature: MA Experiment ID: 20000224 Result: Up-regulated in Transcription
  misc_feature: MA Experiment ID: 20000227 Result: Down-regulated in Transcription
  misc_feature: MA Experiment 20000227 PARAMETER Experiment Name: At_Root-Tips-vs-Tops_P Parameter: Tissue Value: Root Tips vs. Root Tops
  misc_feature: MA Experiment ID: 20000573 Result: Down-regulated in Transcription
  misc_feature: MA Experiment 20000573 PARAMETER Experiment Name: At_100uM_ABA_Mutants__P Parameter: Organism Value: A. thaliana
  misc_feature: MA Experiment 20000573 PARAMETER Experiment Name: At_100uM_ABA_Mutants__P Parameter: Plant Line Value: CS22 vs. Ler wt
  misc_feature: MA Experiment 20000573 PARAMETER Experiment Name: At_100uM_ABA_Mutants__P Parameter: Timepoint (hr) Value: N/A
  misc_feature: MA Experiment 20000573 PARAMETER Experiment Name: At_100uM_ABA_Mutants__P Parameter: Tissue Value: Whole Plant
  misc_feature: MA Experiment 20000573 PARAMETER Experiment Name: At_100uM_ABA_Mutants__P Parameter: Treatment Value: None
  misc_feature: MA Experiment ID: 20000794 Result: Up-regulated in Transcription
  misc_feature: MA Experiment 20000794 PARAMETER Experiment Name: At_Petals_P Parameter: Age (day) Value: 23-25 days
  misc_feature: MA Experiment 20000794 PARAMETER Experiment Name: At_Petals_P Parameter: Plant Line Value: WS
  misc_feature: MA Experiment 20000794 PARAMETER Experiment Name: At_Petals_P Parameter: Tissue Value: Petals vs. Whole plant
  misc_feature: MA Experiment ID: 20001248 Result: Down-regulated in Transcription
  misc_feature: MA Experiment 20001248 PARAMETER Experiment Name: At_Far-red-induction_P Parameter: Age (day) Value: 7
  misc_feature: MA Experiment 20001248 PARAMETER Experiment Name: At_Far-red-induction_P Parameter: Light Value: Far-red vs. White
  misc_feature: MA Experiment 20001248 PARAMETER Experiment Name: At_Far-red-induction_P Parameter: Organism Value: A. thaliana
  misc_feature: MA Experiment 20001248 PARAMETER Experiment Name: At_Far-red-induction_P Parameter: Plant Line Value: Columbia
  misc_feature: MA Experiment 20001248 PARAMETER Experiment Name: At_Far-red-induction_P Parameter: Timepoint (hr) Value: 4
  misc_feature: MA Experiment 20001248 PARAMETER Experiment Name: At_Far-red-induction_P Parameter: Tissue Value: Whole Plant
  misc_feature: MA Experiment ID: 20001450 Result: Down-regulated in Transcription
  misc_feature: MA Experiment 20001450 PARAMETER Experiment Name: At_Far-red-induction_P Parameter: Age (day) Value: 7
  misc_feature: MA Experiment 20001450 PARAMETER Experiment Name: At_Far-red-induction_P Parameter: Light Value: Far-red vs. White
  misc_feature: MA Experiment 20001450 PARAMETER Experiment Name: At_Far-red-induction_P Parameter: Organism Value: A. thaliana
  misc_feature: MA Experiment 20001450 PARAMETER Experiment Name: At_Far-red-induction_P Parameter: Plant Line Value: Columbia
  misc_feature: MA Experiment 20001450 PARAMETER Experiment Name: At_Far-red-induction_P Parameter: Timepoint (hr) Value: 8
  misc_feature: MA Experiment 20001450 PARAMETER Experiment Name: At_Far-red-induction_P Parameter: Tissue Value: Whole Plant
  misc_feature: MA Experiment ID: 20001451 Result: Up-regulated in Transcription
  misc_feature: MA Experiment 20001451 PARAMETER Experiment Name: At_Far-red-induction_P Parameter: Age (day) Value: 7
  misc_feature: MA Experiment 20001451 PARAMETER Experiment Name: At_Far-red-induction_P Parameter: Light Value: Far-red vs. White
  misc_feature: MA Experiment 20001451 PARAMETER Experiment Name: At_Far-red-induction_P Parameter: Organism Value: A. thaliana
  misc_feature: MA Experiment 20001451 PARAMETER Experiment Name: At_Far-red-induction_P Parameter: Plant Line Value: Columbia
  misc_feature: MA Experiment 20001451 PARAMETER Experiment Name: At_Far-red-induction_P Parameter: Timepoint (hr) Value: 24
  misc_feature: MA Experiment 20001451 PARAMETER Experiment Name: At_Far-red-induction_P Parameter: Tissue Value: Whole Plant
  misc_feature: MA Experiment ID: 20001554 Result: Up-regulated in Transcription
  misc_feature: MA Experiment 20001554 PARAMETER Experiment Name: At_Drought_Soil_Dry_P Parameter: Age (day) Value: 21
  misc_feature: MA Experiment 20001554 PARAMETER Experiment Name: At_Drought_Soil_Dry_P Parameter: Organism Value: A. thaliana
  misc_feature: MA Experiment 20001554 PARAMETER Experiment Name: At_Drought_Soil_Dry_P Parameter: Plant Line Value: WS
  misc_feature: MA Experiment 20001554 PARAMETER Experiment Name: At_Drought_Soil_Dry_P Parameter: Post Timepoint (hr) Value: None
  misc_feature: MA Experiment 20001554 PARAMETER Experiment Name: At_Drought_Soil_Dry_P Parameter: Post-Treatment Value: None
  misc_feature: MA Experiment 20001554 PARAMETER Experiment Name: At_Drought_Soil_Dry_P Parameter: Timepoint (day) Value: 7
  misc_feature: MA Experiment 20001554 PARAMETER Experiment Name: At_Drought_Soil_Dry_P Parameter: Treatment Value: Drought vs. No Drought
  misc_feature: MA Experiment ID: 20001557 Result: Down-regulated in Transcription
  misc_feature: MA Experiment 20001557 PARAMETER Experiment Name: At_Drought_Soil_Dry_P Parameter: Age (day) Value: 27
  misc_feature: MA Experiment 20001557 PARAMETER Experiment Name: At_Drought_Soil_Dry_P Parameter: Organism Value: A. thaliana
  misc_feature: MA Experiment 20001557 PARAMETER Experiment Name: At_Drought_Soil_Dry_P Parameter: Plant Line Value: WS
  misc_feature: MA Experiment 20001557 PARAMETER Experiment Name: At_Drought_Soil_Dry_P Parameter: Post Timepoint (hr) Value: 3
  misc_feature: MA Experiment 20001557 PARAMETER Experiment Name: At_Drought_Soil_Dry_P Parameter: Post-Treatment Value: Re-Water vs. No Drought
  misc_feature: MA Experiment 20001557 PARAMETER Experiment Name: At_Drought_Soil_Dry_P Parameter: Timepoint (day) Value: 13
  misc_feature: MA Experiment 20001557 PARAMETER Experiment Name: At_Drought_Soil_Dry_P Parameter: Treatment Value: Drought vs. No Drought
  misc_feature: MA Experiment ID: 20001560 Result: Down-regulated in Transcription
  misc_feature: MA Experiment 20001560 PARAMETER Experiment Name: At_Drought_Soil_Dry_P Parameter: Age (day) Value: 28
  misc_feature: MA Experiment 20001560 PARAMETER Experiment Name: At_Drought_Soil_Dry_P Parameter: Organism Value: A. thaliana
  misc_feature: MA Experiment 20001560 PARAMETER Experiment Name: At_Drought_Soil_Dry_P Parameter: Plant Line Value: WS
  misc_feature: MA Experiment 20001560 PARAMETER Experiment Name: At_Drought_Soil_Dry_P Parameter: Post Timepoint (hr) Value: None
  misc_feature: MA Experiment 20001560 PARAMETER Experiment Name: At_Drought_Soil_Dry_P Parameter: Post-Treatment Value: None
  misc_feature: MA Experiment 20001560 PARAMETER Experiment Name: At_Drought_Soil_Dry_P Parameter: Timepoint (day) Value: 14
  misc_feature: MA Experiment 20001560 PARAMETER Experiment Name: At_Drought_Soil_Dry_P Parameter: Treatment Value: Drought vs. No Drought
  misc_feature: MA Experiment ID: 20001911 Result: Up-regulated in Transcription
  misc_feature: MA Experiment 20001911 PARAMETER Experiment Name: At_Drought_Reproduction_P Parameter: Age (day) Value: 40
  misc_feature: MA Experiment 20001911 PARAMETER Experiment Name: At_Drought_Reproduction_P Parameter: Organism Value: A. thaliana
  misc_feature: MA Experiment 20001911 PARAMETER Experiment Name: At_Drought_Reproduction_P Parameter: Plant Line Value: WS
  misc_feature: MA Experiment 20001911 PARAMETER Experiment Name: At_Drought_Reproduction_P Parameter: Timepoint (day) Value: 10
  misc_feature: MA Experiment 20001911 PARAMETER Experiment Name: At_Drought_Reproduction_P Parameter: Tissue Value: Flowers
  misc_feature: MA Experiment 20001911 PARAMETER Experiment Name: At_Drought_Reproduction_P Parameter: Treatment Value: Drought vs. No Drought
cccccacaccttctctttctcttagcatactctgctcttcctctctctgttgttctctgttccaaaggctttgagaaaaaatgaagttcgagaaccggtacggacttgcaacgtcgcagaagtacgactgtctcttgttcgatttggacgatactctttatcctcttagctccggaatcgcaagagaatgtgggaacaacatcaaagattacatgaccgagaaactcggtataccgaaggacaaaatcgtcgaattgtctgatcttctatacaagaactatggaacaacaatggctggtcttagggcgatcggatatgaatttgactacgatgagtaccacagcttcgtccacggtcgtttaccctatgacaacataaaacccgaccttgttcttcgcagcctcttgcttagcctccctctccgcaaagtcatctttaccaacgcggacagagttcacgcggccaaggcgttgaagaagttgggattagaggattgtttcgaaggaatcatatgtttcgaaacgctaaacctcatgcacacaaacgctgcgtctaacaattccgagatttttgatatcgttggacattttaaccggtctgaaccggtcggttcacttcccaaaacgcctgttgtgtgtaaaccatctgaatctgctatcgagaaagctcttgaaatcgccaatattgatcctaaccgaacgctgttctttgaggacagtgtccgaaacgtacaagctggaaaacgcgttggtctttacacggttctggttggtaaatcgaccaaagtcaaaggagcggattacgcgttggaaaacattcacaacatgaaagaggcgataccggagttatgggaatccgacaggaaatcgtcggatgttggatattccggcaaggtcgccgttgagacttctgttagagcttaggaggagtactgtttcgccgttgtacctaattttccaccactgtcattttcattttcttttttcaaatgacgtaatgtcatttttgtttttttttcgacttgtgtttataaaagattaataaaaaatgagaaaataatttccatc

SEQ ID NO: 23606 - protein, 280 aa, Arabidopsis thaliana
  peptide (1)..(280): Ceres Seq. ID no. 12421909
  misc_feature (15)..(233): Pfam Name: haloacid dehalogenase-like hydrolase Pfam Description: haloacid dehalogenase-like hydrolase
  misc_feature (9)..(280): Homolog of NCBI NO: 40714684 NR Description: expressed protein [Oryza sativa (japonica
  misc_feature (1)..(276): Homolog of NCBI NO: 21618155 NR Description: putative ripening-related protein-like
  misc_feature (1)..(276): Homolog of NCBI NO: 30697236 NR Description: haloacid dehalogenase-like hydrolase family
  misc_feature (1)..(276): Homolog of NCBI NO: 30697234 NR Description: haloacid dehalogenase-like hydrolase family
  misc_feature (1)..(280): Homolog of NCBI NO: 15238429 NR Description: putative ripening-related protein - like; protein
  misc_feature (1)..(280): Homolog of NCBI NO: 8885554 NR Description: ripening-related protein-like; hydrolase-like
  misc_feature (148)..(280): Homolog of NCBI NO: 7406669 NR Description: putative ripening-related protein [Vitis vinifera]
  misc_feature (1)..(162): Homolog of NCBI NO: 7406669 NR Description: putative ripening-related protein [Vitis vinifera]
  misc_feature (1)..(280): Homolog of NCBI NO: 15241720 NR Description: putative protein
  misc_feature (1)..(280): Homolog of NCBI NO: 21593165 NR Description: unknown [Arabidopsis thaliana]
MKFENRYGLATSQKYDCLLFDLDDTLYPLSSGIARECGNNIKDYMTEKLGIPKDKIVELSDLLYKNYGTTMAGLRAIGYEFDYDEYHSFVHGRLPYDNIKPDLVLRSLLLSLPLRKVIFTNADRVHAAKALKKLGLEDCFEGIICFETLNLMHTNAASNNSEIFDIVGHFNRSEPVGSLPKTPVVCKPSESAIEKALEIANIDPNRTLFFEDSVRNVQAGKRVGLYTVLVGKSTKVKGADYALENIHNMKEAIPELWESDRKSSDVGYSGKVAVETSVRA

SEQ ID NO: 23607 - protein, 236 aa, Arabidopsis thaliana
  peptide (1)..(236): Ceres Seq. ID no. 12421910
  misc_feature (1)..(189): Pfam Name: haloacid dehalogenase-like hydrolase Pfam Description: haloacid dehalogenase-like hydrolase
  misc_feature (1)..(236): Homolog of NCBI NO: 40714684 NR Description: expressed protein [Oryza sativa (japonica
  misc_feature (1)..(232): Homolog of NCBI NO: 21618155 NR Description: putative ripening-related protein-like
  misc_feature (1)..(232): Homolog of NCBI NO: 30697236 NR Description: haloacid dehalogenase-like hydrolase family
  misc_feature (1)..(232): Homolog of NCBI NO: 30697234 NR Description: haloacid dehalogenase-like hydrolase family
  misc_feature (1)..(236): Homolog of NCBI NO: 15238429 NR Description: putative ripening-related protein - like; protein
  misc_feature (1)..(236): Homolog of NCBI NO: 8885554 NR Description: ripening-related protein-like; hydrolase-like
  misc_feature (104)..(236): Homolog of NCBI NO: 7406669 NR Description: putative ripening-related protein [Vitis vinifera]
  misc_feature (1)..(118): Homolog of NCBI NO: 7406669 NR Description: putative ripening-related protein [Vitis vinifera]
  misc_feature (1)..(236): Homolog of NCBI NO: 15241720 NR Description: putative protein
  misc_feature (1)..(236): Homolog of NCBI NO: 21593165 NR Description: unknown [Arabidopsis thaliana]
MTEKLGIPKDKIVELSDLLYKNYGTTMAGLRAIGYEFDYDEYHSFVHGRLPYDNIKPDLVLRSLLLSLPLRKVIFTNADRVHAAKALKKLGLEDCFEGIICFETLNLMHTNAASNNSEIFDIVGHFNRSEPVGSLPKTPVVCKPSESAIEKALEIANIDPNRTLFFEDSVRNVQAGKRVGLYTVLVGKSTKVKGADYALENIHNMKEAIPELWESDRKSSDVGYSGKVAVETSVRA

SEQ ID NO: 23608 - protein, 210 aa, Arabidopsis thaliana
  peptide (1)..(210): Ceres Seq. ID no. 12421911
  misc_feature (1)..(163): Pfam Name: haloacid dehalogenase-like hydrolase Pfam Description: haloacid dehalogenase-like hydrolase
  misc_feature (1)..(210): Homolog of NCBI NO: 40714684 NR Description: expressed protein [Oryza sativa (japonica
  misc_feature (1)..(206): Homolog of NCBI NO: 21618155 NR Description: putative ripening-related protein-like
  misc_feature (1)..(206): Homolog of NCBI NO: 30697236 NR Description: haloacid dehalogenase-like hydrolase family
  misc_feature (1)..(206): Homolog of NCBI NO: 30697234 NR Description: haloacid dehalogenase-like hydrolase family
  misc_feature (1)..(210): Homolog of NCBI NO: 15238429 NR Description: putative ripening-related protein - like; protein
  misc_feature (1)..(210): Homolog of NCBI NO: 8885554 NR Description: ripening-related protein-like; hydrolase-like
  misc_feature (78)..(210): Homolog of NCBI NO: 7406669 NR Description: putative ripening-related protein [Vitis vinifera]
  misc_feature (1)..(92): Homolog of NCBI NO: 7406669 NR Description: putative ripening-related protein [Vitis vinifera]
  misc_feature (1)..(210): Homolog of NCBI NO: 15241720 NR Description: putative protein
  misc_feature (1)..(210): Homolog of NCBI NO: 21593165 NR Description: unknown [Arabidopsis thaliana]
MAGLRAIGYEFDYDEYHSFVHGRLPYDNIKPDLVLRSLLLSLPLRKVIFTNADRVHAAKALKKLGLEDCFEGIICFETLNLMHTNAASNNSEIFDIVGHFNRSEPVGSLPKTPVVCKPSESAIEKALEIANIDPNRTLFFEDSVRNVQAGKRVGLYTVLVGKSTKVKGADYALENIHNMKEAIPELWESDRKSSDVGYSGKVAVETSVRA

SEQ ID NO: 23609 - DNA, 1451 bp, Arabidopsis thaliana
  misc_feature (1)..(1451): Ceres Seq. ID no. 12338323
  misc_feature: MA Experiment ID: 20001451 Result: Down-regulated in Transcription
  misc_feature: MA Experiment 20001451 PARAMETER Experiment Name: At_Far-red-induction_P Parameter: Age (day) Value: 7
  misc_feature: MA Experiment 20001451 PARAMETER Experiment Name: At_Far-red-induction_P Parameter: Light Value: Far-red vs. White
  misc_feature: MA Experiment 20001451 PARAMETER Experiment Name: At_Far-red-induction_P Parameter: Organism Value: A. thaliana
  misc_feature: MA Experiment 20001451 PARAMETER Experiment Name: At_Far-red-induction_P Parameter: Plant Line Value: Columbia
  misc_feature: MA Experiment 20001451 PARAMETER Experiment Name: At_Far-red-induction_P Parameter: Timepoint (hr) Value: 24
  misc_feature: MA Experiment 20001451 PARAMETER Experiment Name: At_Far-red-induction_P Parameter: Tissue Value: Whole Plant
aaaaaaaaactaaaccctagaatgcgtatcgctttctttgacctgaatgtgcaatcaaactcctcttagatctatggctctcgattcttccggaaaacaacctgagcagcagcaacaacaacaaccacgagcctcctctggaaacggcaaggcaagattgaagcttcggagaacccctaatgaagaacatgagcctgagaactatgaagatctacctttggactatagtccttctctgttcacctctcttgagcgttacttacctgagcagcttctcaattccacacgaatcgataaagctagtttcatgagagaccttcttctccgatattcccctgatactgagcgagttcgggttctgaggcataaagaatacagagacaaaatcatgtcttcttaccaacgtctgcatggagagatctatactcttgaccctagtagtttctttgcgccatcgtttcttggagcttttagtcggaagtcagagccgaatttcagaagtagtatggttgaatcttatcctgggattttcacttttgaaatgtttaaaccacagttttgtgaaatgttattagcagaggttgaacatatggagaaatgggtttatgattcaagatccacaataatgagacctaatacgatgaacaatttcggtgttgtccttgatgattttggctttgatagcatgcttcagaagttggttgatgactttattagtcctatagctcaagttctgttcccggaagtctgtggaacctctttagattctcaccatggctatattgttgaatatggaaaagatagggatgttgatcttgggtttcatgtggatgactcagaagttagtttaaatgtctgcttgggtaaacaattctctggcggggagctgtattttcgaggggtgagatgtgataagcatgtgaattccgatagcactgaaaaggaagtttatgattactctcatgtacctggtcacgccattcttcatcgtggacgtcatcgccatggtgctagagctacaacttctggacaccgagccaacttgattttgtggtgtagaagctcaacttttcgagagatgaagaattatcagagagatttctcaggttggtgtggaggatgcaaacttgataaacagagaaggcagcgtgattcgattaatgcaactaaagagatactagcaaggaaagctgcagagaagacacttgttgagctggcttcaaaatcatgtgccgagtaaacaaaaacaagaatatgtcaaatacctcatcttctttgtaccattccagaggctatgtgtatatagagaggcaagttaaatcgtttgtttgtaagcaagcattagatacctttgtcaaaggtaaattttgttccatttttcagattgctgcctgtaacaataaatttcttagaggagtgaaggcaaatgaaatacacaaatgttatctctt

SEQ ID NO: 23610 - protein, 397 aa, Arabidopsis thaliana
  peptide (1)..(397): Ceres Seq. ID no. 12338324
  misc_feature (240)..(339): Pfam Name: 2OG-Fe(II) oxygenase superfamily Pfam Description: 2OG-Fe(II) oxygenase superfamily
  misc_feature (76)..(202): Homolog of NCBI NO: 15221938 NR Description: unknown protein; protein id: At1g48700.1
  misc_feature (229)..(375): Homolog of NCBI NO: 15221938 NR Description: unknown protein; protein id: At1g48700.1
  misc_feature (10)..(382): Homolog of NCBI NO: 15221946 NR Description: unknown protein; protein id: At1g48740.1
  misc_feature (39)..(381): Homolog of NCBI NO: 15239932 NR Description: putative protein; protein id: At5g43660.1
  misc_feature (28)..(387): Homolog of NCBI NO: 34914494 NR Description: B1080D07.28 [Oryza sativa (japonica
  misc_feature (39)..(378): Homolog of NCBI NO: 18401806 NR Description: expressed protein
  misc_feature (220)..(397): Homolog of NCBI NO: 15219973 NR Description: unknown protein; protein id: At1g22950.1
  misc_feature (10)..(228): Homolog of NCBI NO: 15219973 NR Description: unknown protein; protein id: At1g22950.1
  misc_feature (220)..(397): Homolog of NCBI NO: 25518648 NR Description: hypothetical protein F19G10.9 [imported] -
  misc_feature (9)..(228): Homolog of NCBI NO: 25518648 NR Description: hypothetical protein F19G10.9 [imported] -
MCNQTPLRSMALDSSGKQPEQQQQQQPRASSGNGKARLKLRRTPNEEHEPENYEDLPLDYSPSLFTSLERYLPEQLLNSTRIDKASFMRDLLLRYSPDTERVRVLRHKEYRDKIMSSYQRLHGEIYTLDPSSFFAPSFLGAFSRKSEPNFRSSMVESYPGIFTFEMFKPQFCEMLLAEVEHMEKWVYDSRSTIMRPNTMNNFGVVLDDFGFDSMLQKLVDDFISPIAQVLFPEVCGTSLDSHHGYIVEYGKDRDVDLGFHVDDSEVSLNVCLGKQFSGGELYFRGVRCDKHVNSDSTEKEVYDYSHVPGHAILHRGRHRHGARATTSGHRANLILWCRSSTFREMKNYQRDFSGWCGGCKLDKQRRQRDSINATKEILARKAAEKTLVELASKSCAE

SEQ ID NO: 23611 - protein, 388 aa, Arabidopsis thaliana
  peptide (1)..(388): Ceres Seq. ID no. 12338325
  misc_feature (231)..(330): Pfam Name: 2OG-Fe(II) oxygenase superfamily Pfam Description: 2OG-Fe(II) oxygenase superfamily
  misc_feature (67)..(193): Homolog of NCBI NO: 15221938 NR Description: unknown protein; protein id: At1g48700.1
  misc_feature (220)..(366): Homolog of NCBI NO: 15221938 NR Description: unknown protein; protein id: At1g48700.1
  misc_feature (1)..(373): Homolog of NCBI NO: 15221946 NR Description: unknown protein; protein id: At1g48740.1
  misc_feature (30)..(372): Homolog of NCBI NO: 15239932 NR Description: putative protein; protein id: At5g43660.1
  misc_feature (19)..(378): Homolog of NCBI NO: 34914494 NR Description: B1080D07.28 [Oryza sativa (japonica
  misc_feature (30)..(369): Homolog of NCBI NO: 18401806 NR Description: expressed protein
  misc_feature (211)..(388): Homolog of NCBI NO: 15219973 NR Description: unknown protein; protein id: At1g22950.1
  misc_feature (1)..(219): Homolog of NCBI NO: 15219973 NR Description: unknown protein; protein id: At1g22950.1
  misc_feature (211)..(388): Homolog of NCBI NO: 25518648 NR Description: hypothetical protein F19G10.9 [imported] -
  misc_feature (1)..(219): Homolog of NCBI NO: 25518648 NR Description: hypothetical protein F19G10.9 [imported] -
MALDSSGKQPEQQQQQQPRASSGNGKARLKLRRTPNEEHEPENYEDLPLDYSPSLFTSLERYLPEQLLNSTRIDKASFMRDLLLRYSPDTERVRVLRHKEYRDKIMSSYQRLHGEIYTLDPSSFFAPSFLGAFSRKSEPNFRSSMVESYPGIFTFEMFKPQFCEMLLAEVEHMEKWVYDSRSTIMRPNTMNNFGVVLDDFGFDSMLQKLVDDFISPIAQVLFPEVCGTSLDSHHGYIVEYGKDRDVDLGFHVDDSEVSLNVCLGKQFSGGELYFRGVRCDKHVNSDSTEKEVYDYSHVPGHAILHRGRHRHGARATTSGHRANLILWCRSSTFREMKNYQRDFSGWCGGCKLDKQRRQRDSINATKEILARKAAEKTLVELASKSCAE

SEQ ID NO: 23612 - protein, 310 aa, Arabidopsis thaliana
  peptide (1)..(310): Ceres Seq. ID no. 12338326
  misc_feature (153)..(252): Pfam Name: 2OG-Fe(II) oxygenase superfamily Pfam Description: 2OG-Fe(II) oxygenase superfamily
  misc_feature (1)..(115): Homolog of NCBI NO: 15221938 NR Description: unknown protein; protein id: At1g48700.1
  misc_feature (142)..(288): Homolog of NCBI NO: 15221938 NR Description: unknown protein; protein id: At1g48700.1
  misc_feature (1)..(295): Homolog of NCBI NO: 15221946 NR Description: unknown protein; protein id: At1g48740.1
  misc_feature (1)..(294): Homolog of NCBI NO: 15239932 NR Description: putative protein; protein id: At5g43660.1
  misc_feature (1)..(300): Homolog of NCBI NO: 34914494 NR Description: B1080D07.28 [Oryza sativa (japonica
  misc_feature (1)..(291): Homolog of NCBI NO: 18401806 NR Description: expressed protein
  misc_feature (133)..(310): Homolog of NCBI NO: 15219973 NR Description: unknown protein; protein id: At1g22950.1
  misc_feature (1)..(141): Homolog of NCBI NO: 15219973 NR Description: unknown protein; protein id: At1g22950.1
  misc_feature (133)..(310): Homolog of NCBI NO: 25518648 NR Description: hypothetical protein F19G10.9 [imported] -
  misc_feature (1)..(141): Homolog of NCBI NO: 25518648 NR Description: hypothetical protein F19G10.9 [imported] -
MRDLLLRYSPDTERVRVLRHKEYRDKIMSSYQRLHGEIYTLDPSSFFAPSFLGAFSRKSEPNFRSSMVESYPGIFTFEMFKPQFCEMLLAEVEHMEKWVYDSRSTIMRPNTMNNFGVVLDDFGFDSMLQKLVDDFISPIAQVLFPEVCGTSLDSHHGYIVEYGKDRDVDLGFHVDDSEVSLNVCLGKQFSGGELYFRGVRCDKHVNSDSTEKEVYDYSHVPGHAILHRGRHRHGARATTSGHRANLILWCRSSTFREMKNYQRDFSGWCGGCKLDKQRRQRDSINATKEILARKAAEKTLVELASKSCAE

SEQ ID NO: 23613 - DNA, 1509 bp, Arabidopsis thaliana
  misc_feature (1)..(1509): Ceres Seq. ID no. 12339528
  misc_feature: MA Experiment ID: 108434 Result: Down-regulated in Transcription
  misc_feature: MA Experiment 108434 PARAMETER Experiment Name: At_Root_Tips_cDNA_P Parameter: Tissue Value: Root Tips
  misc_feature: MA Experiment ID: 108435 Result: Down-regulated in Transcription
  misc_feature: MA Experiment 108435 PARAMETER Experiment Name: At_stm_Mutants_cDNA_P Parameter: Plant Line Value: wt Landsburg vs stm
  misc_feature: MA Experiment 108435 PARAMETER Experiment Name: At_stm_Mutants_cDNA_P Parameter: Tissue Value: Shoot Apical Meristem Region
  misc_feature: MA Experiment ID: 108462 Result: Up-regulated in Transcription
  misc_feature: MA Experiment 108462 PARAMETER Experiment Name: At_Germinating_Seeds_cDNA_P Parameter: Age (day) Value: 2 vs. 0
  misc_feature: MA Experiment 108462 PARAMETER Experiment Name: At_Germinating_Seeds_cDNA_P Parameter: Tissue Value: Germinating Seeds
  misc_feature: MA Experiment ID: 108464 Result: Up-regulated in Transcription
  misc_feature: MA Experiment 108464 PARAMETER Experiment Name: At_Germinating_Seeds_cDNA_P Parameter: Age (day) Value: 4 vs. 0
  misc_feature: MA Experiment 108464 PARAMETER Experiment Name: At_Germinating_Seeds_cDNA_P Parameter: Tissue Value: Germinating Seeds
  misc_feature: MA Experiment ID: 108488 Result: Up-regulated in Transcription
  misc_feature: MA Experiment ID: 108577 Result: Down-regulated in Transcription
  misc_feature: MA Experiment 108577 PARAMETER Experiment Name: At_42deg_Heat_cDNA_P Parameter: Temperature (deg C) Value: 42 vs. 22
  misc_feature: MA Experiment 108577 PARAMETER Experiment Name: At_42deg_Heat_cDNA_P Parameter: Timepoint (hr) Value: 6
  misc_feature: MA Experiment 108577 PARAMETER Experiment Name: At_42deg_Heat_cDNA_P Parameter: Tissue Value: Aerial
  misc_feature: MA Experiment ID: 108579 Result: Down-regulated in Transcription
  misc_feature: MA Experiment 108579 PARAMETER Experiment Name: At_4deg_Cold_cDNA_P Parameter: Temperature (deg C) Value: 4 vs. 22
  misc_feature: MA Experiment 108579 PARAMETER Experiment Name: At_4deg_Cold_cDNA_P Parameter: Timepoint (hr) Value: 6
  misc_feature: MA Experiment 108579 PARAMETER Experiment Name: At_4deg_Cold_cDNA_P Parameter: Tissue Value: Aerial
  misc_feature: MA Experiment ID: 108595 Result: Down-regulated in Transcription
  misc_feature: MA Experiment 108595 PARAMETER Experiment Name: At_Ler-pi_Ovule_cDNA_P Parameter: Plant Line Value: null
  misc_feature: MA Experiment ID: 108667 Result: Down-regulated in Transcription
  misc_feature: MA Experiment 108667 PARAMETER Experiment Name: At_2mM_SA_cDNA_P Parameter: Plant Line Value: WS
  misc_feature: MA Experiment 108667 PARAMETER Experiment Name: At_2mM_SA_cDNA_P Parameter: Timepoint (hr) Value: 1
  misc_feature: MA Experiment 108667 PARAMETER Experiment Name: At_2mM_SA_cDNA_P Parameter: Treatment Value: 2mM SA vs. No Treatment
  misc_feature: MA Experiment ID: 20000069 Result: Up-regulated in Transcription
  misc_feature: MA Experiment 20000069 PARAMETER Experiment Name: At_100uM_ABA_Mutants_cDNA_P Parameter: Plant Line Value: CS23
  misc_feature: MA Experiment 20000069 PARAMETER Experiment Name: At_100uM_ABA_Mutants_cDNA_P Parameter: Timepoint (hr) Value: 6
  misc_feature: MA Experiment 20000069 PARAMETER Experiment Name: At_100uM_ABA_Mutants_cDNA_P Parameter: Tissue Value: Aerial
  misc_feature: MA Experiment 20000069 PARAMETER Experiment Name: At_100uM_ABA_Mutants_cDNA_P Parameter: Treatment Value: 100uM ABA vs. No Treatment
  misc_feature: MA Experiment ID: 20000070 Result: Up-regulated in Transcription
  misc_feature: MA Experiment 20000070 PARAMETER Experiment Name: At_100uM_ABA_Mutants_cDNA_P Parameter: Plant Line Value: CS24
  misc_feature: MA Experiment 20000070 PARAMETER Experiment Name: At_100uM_ABA_Mutants_cDNA_P Parameter: Timepoint (hr) Value: 6
  misc_feature: MA Experiment 20000070 PARAMETER Experiment Name: At_100uM_ABA_Mutants_cDNA_P Parameter: Tissue Value: Aerial
  misc_feature: MA Experiment 20000070 PARAMETER Experiment Name: At_100uM_ABA_Mutants_cDNA_P Parameter: Treatment Value: 100uM ABA vs. No Treatment
  misc_feature: MA Experiment ID: 20000071 Result: Up-regulated in Transcription
  misc_feature: MA Experiment 20000071 PARAMETER Experiment Name: At_100uM_ABA_Mutants_cDNA_P Parameter: Plant Line Value: CS8104
  misc_feature: MA Experiment 20000071 PARAMETER Experiment Name: At_100uM_ABA_Mutants_cDNA_P Parameter: Timepoint (hr) Value: 6
  misc_feature: MA Experiment 20000071 PARAMETER Experiment Name: At_100uM_ABA_Mutants_cDNA_P Parameter: Tissue Value: Aerial
  misc_feature: MA Experiment 20000071 PARAMETER Experiment Name: At_100uM_ABA_Mutants_cDNA_P Parameter: Treatment Value: 100uM ABA vs. No Treatment
  misc_feature: MA Experiment ID: 20000072 Result: Up-regulated in Transcription
  misc_feature: MA Experiment 20000072 PARAMETER Experiment Name: At_100uM_ABA_Mutants_cDNA_P Parameter: Plant Line Value: CS8105
  misc_feature: MA Experiment 20000072 PARAMETER Experiment Name: At_100uM_ABA_Mutants_cDNA_P Parameter: Timepoint (hr) Value: 6
  misc_feature: MA Experiment 20000072 PARAMETER Experiment Name: At_100uM_ABA_Mutants_cDNA_P Parameter: Tissue Value: Aerial
  misc_feature: MA Experiment 20000072 PARAMETER Experiment Name: At_100uM_ABA_Mutants_cDNA_P Parameter: Treatment Value: 100uM ABA vs. No Treatment
  misc_feature: MA Experiment ID: 20000087 Result: Up-regulated in Transcription
  misc_feature: MA Experiment 20000087 PARAMETER Experiment Name: At_100uM_ABA_Mutants_cDNA_P Parameter: Plant Line Value: WS
  misc_feature: MA Experiment 20000087 PARAMETER Experiment Name: At_100uM_ABA_Mutants_cDNA_P Parameter: Timepoint (hr) Value: 6
  misc_feature: MA Experiment 20000087 PARAMETER Experiment Name: At_100uM_ABA_Mutants_cDNA_P Parameter: Tissue Value: Aerial
  misc_feature: MA Experiment 20000087 PARAMETER Experiment Name: At_100uM_ABA_Mutants_cDNA_P Parameter: Treatment Value: 100uM ABA vs. No Treatment
  misc_feature: MA Experiment ID: 20000089 Result: Up-regulated in Transcription
  misc_feature: MA Experiment ID: 20000090 Result: Up-regulated in Transcription
  misc_feature: MA Experiment ID: 20000111 Result: Down-regulated in Transcription
  misc_feature: MA Experiment 20000111 PARAMETER Experiment Name: At_42deg_Heat_cDNA_P Parameter: Temperature (deg C) Value: 42 vs. 22
  misc_feature: MA Experiment 20000111 PARAMETER Experiment Name: At_42deg_Heat_cDNA_P Parameter: Timepoint (hr) Value: 6
  misc_feature: MA Experiment 20000111 PARAMETER Experiment Name: At_42deg_Heat_cDNA_P Parameter: Tissue Value: Aerial
  misc_feature: MA Experiment ID: 20000112 Result: Down-regulated in Transcription
  misc_feature: MA Experiment 20000112 PARAMETER Experiment Name: At_42deg_Heat_cDNA_P Parameter: Temperature (deg C) Value: 42 vs. 22
  misc_feature: MA Experiment 20000112 PARAMETER Experiment Name: At_42deg_Heat_cDNA_P Parameter: Timepoint (hr) Value: 2
  misc_feature: MA Experiment 20000112 PARAMETER Experiment Name: At_42deg_Heat_cDNA_P Parameter: Tissue Value: Aerial
  misc_feature: MA Experiment ID: 20000113 Result: Down-regulated in Transcription
  misc_feature: MA Experiment 20000113 PARAMETER Experiment Name: At_42deg_Heat_cDNA_P Parameter: Temperature (deg C) Value: 42 vs. 22
  misc_feature: MA Experiment 20000113 PARAMETER Experiment Name: At_42deg_Heat_cDNA_P Parameter: Timepoint (hr) Value: 8
  misc_feature: MA Experiment 20000113 PARAMETER Experiment Name: At_42deg_Heat_cDNA_P Parameter: Tissue Value: Aerial
  misc_feature: MA Experiment ID: 20000117 Result: Up-regulated in Transcription
  misc_feature: MA Experiment 20000117 PARAMETER Experiment Name: At_100uM_ABA_Mutants_cDNA_P Parameter: Plant Line Value: Columbia
  misc_feature: MA Experiment 20000117 PARAMETER Experiment Name: At_100uM_ABA_Mutants_cDNA_P Parameter: Timepoint (hr) Value: 6
  misc_feature: MA Experiment 20000117 PARAMETER Experiment Name: At_100uM_ABA_Mutants_cDNA_P Parameter: Tissue Value: Aerial
  misc_feature: MA Experiment 20000117 PARAMETER Experiment Name: At_100uM_ABA_Mutants_cDNA_P Parameter: Treatment Value: 100uM ABA vs. No Treatment
  misc_feature: MA Experiment ID: 20000173 Result: Down-regulated in Transcription
  misc_feature: MA Experiment 20000173 PARAMETER Experiment Name: At_42deg_Heat_P Parameter: Age (day) Value: 14
  misc_feature: MA Experiment 20000173 PARAMETER Experiment Name: At_42deg_Heat_P Parameter: Organism Value: A. thaliana
  misc_feature: MA Experiment 20000173 PARAMETER Experiment Name: At_42deg_Heat_P Parameter: Plant Line Value: WS
  misc_feature: MA Experiment 20000173 PARAMETER Experiment Name: At_42deg_Heat_P Parameter: Temperature (deg C) Value: 42 vs. 22
  misc_feature: MA Experiment 20000173 PARAMETER Experiment Name: At_42deg_Heat_P Parameter: Timepoint (hr) Value: 6
  misc_feature: MA Experiment 20000173 PARAMETER Experiment Name: At_42deg_Heat_P Parameter: Tissue Value: Aerial
  misc_feature: MA Experiment ID: 20000179 Result: Up-regulated in Transcription
  misc_feature: MA Experiment 20000179 PARAMETER Experiment Name: At_Germinating_Seeds_P Parameter: Age (hr) Value: 6 vs. 0
  misc_feature: MA Experiment 20000179 PARAMETER Experiment Name: At_Germinating_Seeds_P Parameter: Tissue Value: Germinating Seeds
  misc_feature: MA Experiment ID: 20000180 Result: Up-regulated in Transcription
  misc_feature: MA Experiment 20000180 PARAMETER Experiment Name: At_Germinating_Seeds_P Parameter: Age (hr) Value: 24 vs. 0
  misc_feature: MA Experiment 20000180 PARAMETER Experiment Name: At_Germinating_Seeds_P Parameter: Tissue Value: Germinating Seeds
  misc_feature: MA Experiment ID: 20000182 Result: Down-regulated in Transcription
  misc_feature: MA Experiment 20000182 PARAMETER Experiment Name: At_2mM_SA_P Parameter: Age (day) Value: 14
  misc_feature: MA Experiment 20000182 PARAMETER Experiment Name: At_2mM_SA_P Parameter: Organism Value: A. thaliana
  misc_feature: MA Experiment 20000182 PARAMETER Experiment Name: At_2mM_SA_P Parameter: Plant Line Value: WS
  misc_feature: MA Experiment 20000182 PARAMETER Experiment Name: At_2mM_SA_P Parameter: Timepoint (hr) Value: 6
  misc_feature: MA Experiment 20000182 PARAMETER Experiment Name: At_2mM_SA_P Parameter: Tissue Value: Aerial
  misc_feature: MA Experiment 20000182 PARAMETER Experiment Name: At_2mM_SA_P Parameter: Treatment Value: 2mM SA vs. No Treatment
  misc_feature: MA Experiment ID: 20000185 Result: Down-regulated in Transcription
  misc_feature: MA Experiment 20000185 PARAMETER Experiment Name: At_Roots__P Parameter: Age (day) Value: 7 vs. 21
  misc_feature: MA Experiment 20000185 PARAMETER Experiment Name: At_Roots__P Parameter: Organism Value: A. thaliana
  misc_feature: MA Experiment 20000185 PARAMETER Experiment Name: At_Roots__P Parameter: Tissue Value: Roots vs. Whole Plant
  misc_feature: MA Experiment ID: 20000227 Result: Down-regulated in Transcription
  misc_feature: MA Experiment 20000227 PARAMETER Experiment Name: At_Root-Tips-vs-Tops_P Parameter: Tissue Value: Root Tips vs. Root Tops
  misc_feature: MA Experiment ID: 20000439 Result: Down-regulated in Transcription
  misc_feature: MA Experiment 20000439 PARAMETER Experiment Name: At_Roots__P Parameter: Age (day) Value: 14 vs. 21
  misc_feature: MA Experiment 20000439 PARAMETER Experiment Name: At_Roots__P Parameter: Organism Value: A. thaliana
  misc_feature: MA Experiment 20000439 PARAMETER Experiment Name: At_Roots__P Parameter: Tissue Value: Roots vs. Whole Plant
  misc_feature: MA Experiment ID: 20000794 Result: Down-regulated in Transcription
  misc_feature: MA Experiment 20000794 PARAMETER Experiment Name: At_Petals_P Parameter: Age (day) Value: 23-25 days
  misc_feature: MA Experiment 20000794 PARAMETER Experiment Name: At_Petals_P Parameter: Plant Line Value: WS
  misc_feature: MA Experiment 20000794 PARAMETER Experiment Name: At_Petals_P Parameter: Tissue Value: Petals vs. Whole plant
  misc_feature: MA Experiment ID: 20001458 Result: Up-regulated in Transcription
  misc_feature: MA Experiment 20001458 PARAMETER Experiment Name: At_50mM_NH4NO3_L-to-H_P Parameter: Age (day) Value: Undefined
  misc_feature: MA Experiment 20001458 PARAMETER Experiment Name: At_50mM_NH4NO3_L-to-H_P Parameter: Organism Value: Undefined
  misc_feature: MA Experiment 20001458 PARAMETER Experiment Name: At_50mM_NH4NO3_L-to-H_P Parameter: Plant Line Value: Undefined
  misc_feature: MA Experiment 20001458 PARAMETER Experiment Name: At_50mM_NH4NO3_L-to-H_P Parameter: Timepoint (hr) Value: 2
  misc_feature: MA Experiment 20001458 PARAMETER Experiment Name: At_50mM_NH4NO3_L-to-H_P Parameter: Tissue Value: Siliques
  misc_feature: MA Experiment 20001458 PARAMETER Experiment Name: At_50mM_NH4NO3_L-to-H_P Parameter: Treatment Value: 50mM NH4NO3 vs. 100mM Manitol
  misc_feature: MA Experiment ID: 20001459 Result: Down-regulated in Transcription
  misc_feature: MA Experiment 20001459 PARAMETER Experiment Name: At_50mM_NH4NO3_L-to-H_P Parameter: Age (day) Value: Undefined
  misc_feature: MA Experiment 20001459 PARAMETER Experiment Name: At_50mM_NH4NO3_L-to-H_P Parameter: Organism Value: Undefined
  misc_feature: MA Experiment 20001459 PARAMETER Experiment Name: At_50mM_NH4NO3_L-to-H_P Parameter: Plant Line Value: Undefined
  misc_feature: MA Experiment 20001459 PARAMETER Experiment Name: At_50mM_NH4NO3_L-to-H_P Parameter: Timepoint (hr) Value: 4
  misc_feature: MA Experiment 20001459 PARAMETER Experiment Name: At_50mM_NH4NO3_L-to-H_P Parameter: Tissue Value: Siliques
  misc_feature: MA Experiment 20001459 PARAMETER Experiment Name: At_50mM_NH4NO3_L-to-H_P Parameter: Treatment Value: 50mM NH4NO3 vs. 100mM Manitol
  misc_feature: MA Experiment ID: 20001757 Result: Up-regulated in Transcription
  misc_feature: MA Experiment 20001757 PARAMETER Experiment Name: At_50mM_NH4NO3_L-to-H_P Parameter: Timepoint (hr) Value: 6
  misc_feature: MA Experiment 20001757 PARAMETER Experiment Name: At_50mM_NH4NO3_L-to-H_P Parameter: Tissue Value: Leaf
  misc_feature: MA Experiment 20001757 PARAMETER Experiment Name: At_50mM_NH4NO3_L-to-H_P Parameter: Treatment Value: 50mM NH4NO3 vs 100mM Mannitol
  misc_feature: MA Experiment ID: 20001904 Result: Down-regulated in Transcription
  misc_feature: MA Experiment 20001904 PARAMETER Experiment Name: At_Drought_Reproduction_P Parameter: Age (day) Value: 37
  misc_feature: MA Experiment 20001904 PARAMETER Experiment Name: At_Drought_Reproduction_P Parameter: Organism Value: A. thaliana
  misc_feature: MA Experiment 20001904 PARAMETER Experiment Name: At_Drought_Reproduction_P Parameter: Plant Line Value: WS
  misc_feature: MA Experiment 20001904 PARAMETER Experiment Name: At_Drought_Reproduction_P Parameter: Timepoint (day) Value: 7
  misc_feature: MA Experiment 20001904 PARAMETER Experiment Name: At_Drought_Reproduction_P Parameter: Tissue Value: Rosettes
  misc_feature: MA Experiment 20001904 PARAMETER Experiment Name: At_Drought_Reproduction_P Parameter: Treatment Value: Drought vs. No Drought
  misc_feature: MA Experiment ID: 20001905 Result: Down-regulated in Transcription
  misc_feature: MA Experiment 20001905 PARAMETER Experiment Name: At_Drought_Reproduction_P Parameter: Age (day) Value: 40
  misc_feature: MA Experiment 20001905 PARAMETER Experiment Name: At_Drought_Reproduction_P Parameter: Organism Value: A. thaliana
  misc_feature: MA Experiment 20001905 PARAMETER Experiment Name: At_Drought_Reproduction_P Parameter: Plant Line Value: WS
  misc_feature: MA Experiment 20001905 PARAMETER Experiment Name: At_Drought_Reproduction_P Parameter: Timepoint (day) Value: 10
  misc_feature: MA Experiment 20001905 PARAMETER Experiment Name: At_Drought_Reproduction_P Parameter: Tissue Value: Rosettes
  misc_feature: MA Experiment 20001905 PARAMETER Experiment Name: At_Drought_Reproduction_P Parameter: Treatment Value: Drought vs. No Drought
  misc_feature: MA Experiment ID: 20001906 Result: Down-regulated in Transcription
  misc_feature: MA Experiment 20001906 PARAMETER Experiment Name: At_Drought_Reproduction_P Parameter: Age (day) Value: 35
  misc_feature: MA Experiment 20001906 PARAMETER Experiment Name: At_Drought_Reproduction_P Parameter: Organism Value: A. thaliana
  misc_feature: MA Experiment 20001906 PARAMETER Experiment Name: At_Drought_Reproduction_P Parameter: Plant Line Value: WS
  misc_feature: MA Experiment 20001906 PARAMETER Experiment Name: At_Drought_Reproduction_P Parameter: Timepoint (day) Value: 5
  misc_feature: MA Experiment 20001906 PARAMETER Experiment Name: At_Drought_Reproduction_P Parameter: Tissue Value: Siliques
  misc_feature: MA Experiment 20001906 PARAMETER Experiment Name: At_Drought_Reproduction_P Parameter: Treatment Value: Drought vs. No Drought
  misc_feature: MA Experiment ID: 20001908 Result: Down-regulated in Transcription
  misc_feature: MA Experiment 20001908 PARAMETER Experiment Name: At_Drought_Reproduction_P Parameter: Age (day) Value: 40
  misc_feature: MA Experiment 20001908 PARAMETER Experiment Name: At_Drought_Reproduction_P Parameter: Organism Value: A. thaliana
  misc_feature: MA Experiment 20001908 PARAMETER Experiment Name: At_Drought_Reproduction_P Parameter: Plant Line Value: WS
  misc_feature: MA Experiment 20001908 PARAMETER Experiment Name: At_Drought_Reproduction_P Parameter: Timepoint (day) Value: 10
  misc_feature: MA Experiment 20001908 PARAMETER Experiment Name: At_Drought_Reproduction_P Parameter: Tissue Value: Siliques
  misc_feature: MA Experiment 20001908 PARAMETER Experiment Name: At_Drought_Reproduction_P Parameter: Treatment Value: Drought vs. No Drought
  misc_feature: MA Experiment ID: 20001911 Result: Down-regulated in Transcription
  misc_feature: MA Experiment 20001911 PARAMETER Experiment Name: At_Drought_Reproduction_P Parameter: Age (day) Value: 40
  misc_feature: MA Experiment 20001911 PARAMETER Experiment Name: At_Drought_Reproduction_P Parameter: Organism Value: A. thaliana
  misc_feature: MA Experiment 20001911 PARAMETER Experiment Name: At_Drought_Reproduction_P Parameter: Plant Line Value: WS
  misc_feature: MA Experiment 20001911 PARAMETER Experiment Name: At_Drought_Reproduction_P Parameter: Timepoint (day) Value: 10
  misc_feature: MA Experiment 20001911 PARAMETER Experiment Name: At_Drought_Reproduction_P Parameter: Tissue Value: Flowers
  misc_feature: MA Experiment 20001911 PARAMETER Experiment Name: At_Drought_Reproduction_P Parameter: Treatment Value: Drought vs. No Drought
atccactacgatagttttcttcagcaatcacactctctctttgttcgagtaccaacaatggcccttcaagctgcttctttggtctcctctgctttctctgttcgcaaagatgcgaagttgaatgcttcttcatcatctttcaaggactcgagtctttttggtgcctccattaccgaccaaatcaaatccgaacatggatcttcctcgttaagattcaagagagaacagagcttaaggaatctagcaattcgagcccaaaccgctgcgacttcaagccctacagttacaaaatccgtggacggcaagaaaacgttgaggaaaggaaatgtggtggtcactggagcctcgtctgggttaggtctagccacggctaaagctctagctgagacagggaaatggaacgtgataatggcgtgcagagacttccttaaagccgagagagctgctaaatccgtagggatgcctaaagacagctacacagtgatgcatttagacttagcctcgttggacagcgtgagacagtttgttgataatttcaggagaacagagacgcctctcgatgttttggtctgcaatgctgcggtttatttcccgacagctaaagagcctacttacagtgctgaagggtttgagcttagtgttgcgacgaaccatttgggacattttcttctcgcaaggttgttgcttgatgacttgaagaaatctgattacccttcaaagcgtctcatcatcgtcggatccattaccgggaacacgaatacattggcgggtaatgtaccaccgaaggcgaatctcggtgatttgaggggtttagccggcggattaaacggtttaaacagctcagctatgattgatggaggagatttcgacggtgcaaaggcttacaaagacagtaaagtctgcaatatgttgacaatgcaagagtttcacaggcgtttccatgaagaaactggagtcactttcgcttcgctttaccccggttgcatcgcctccacaggtttattccgagagcacattcctctcttccgtgccctcttccctccctttcagaagtacatcactaaaggatatgtctccgaaacagagtcaggcaaaagacttgctcaggtggtgagtgatccaagcttgacgaaatcaggggtttattggagctggaacaatgcttcggcttcttttgagaaccagttatcagaagaagcaagtgacgttgagaaggctcgtaaagtgtgggagatcagtgagaagctcgtgggcttggcctaataaacttgaagtctgttaaatttgatgacacctctcggtaccaatcgaagaaatctagtgaatttccgggatttttagatatctgattctgttgcgaagtttttttatccttattagtgtctgttgagtgtagattgcttggcgagtagcccacaataaagaaataaaaatggcgaatctttagctttatttactctgtttttcatcgaaacagattcagtaatatatactctgttttttcatctg

SEQ ID NO: 23614 - protein, 420 aa, Arabidopsis thaliana
  peptide (1)..(420): Ceres Seq. ID no. 12339530
  misc_feature (20)..(420): Homolog of NCBI NO: 9587209 NR Description: NADPH-protochlorophyllide oxidoreductase [Vigna
  misc_feature (20)..(420): Homolog of NCBI NO: 10720233 NR Description: Protochlorophyllide reductase, chloroplast
  misc_feature (20)..(420): Homolog of NCBI NO: 10720220 NR Description: Protochlorophyllide reductase, chloroplast
  misc_feature (20)..(420): Homolog of NCBI NO: 266742 NR Description: Protochlorophyllide reductase, chloroplast
  misc_feature (20)..(420): Homolog of NCBI NO: 21068893 NR Description: NADPH:protochlorophyllide oxidoreductase
  misc_feature (20)..(420): Homolog of NCBI NO: 81946 NR Description: protochlorophyllide reductase (EC 1.3.1.33)
  misc_feature (20)..(420): Homolog of NCBI NO: 968975 NR Description: NADPH:protochlorophyllide oxidoreductase A
  misc_feature (20)..(420): Homolog of NCBI NO: 15239574 NR Description: NADPH:protochlorophyllide oxidoreductase A
  misc_feature (20)..(420): Homolog of NCBI NO: 21593167 NR Description: protochlorophyllide reductase precursor
  misc_feature (20)..(420): Homolog of NCBI NO: 15234129 NR Description: protochlorophyllide reductase precursor
IHYDSFLQQSHSLFVRVPTMALQAASLVSSAFSVRKDAKLNASSSSFKDSSLFGASITDQIKSEHGSSSLRFKREQSLRNLAIRAQTAATSSPTVTKSVDGKKTLRKGNVVVTGASSGLGLATAKALAETGKWNVIMACRDFLKAERAAKSVGMPKDSYTVMHLDLASLDSVRQFVDNFRRTETPLDVLVCNAAVYFPTAKEPTYSAEGFELSVATNHLGHFLLARLLLDDLKKSDYPSKRLIIVGSITGNTNTLAGNVPPKANLGDLRGLAGGLNGLNSSAMIDGGDFDGAKAYKDSKVCNMLTMQEFHRRFHEETGVTFASLYPGCIASTGLFREHIPLFRALFPPFQKYITKGYVSETESGKRLAQVVSDPSLTKSGVYWSWNNASASFENQLSEEASDVEKARKVWEISEKLVGLA

SEQ ID NO: 23615 - protein, 401 aa, Arabidopsis thaliana
  peptide (1)..(401): Ceres Seq. ID no. 12339531
  misc_feature (1)..(401): Homolog of NCBI NO: 9587209 NR Description: NADPH-protochlorophyllide oxidoreductase [Vigna
  misc_feature (1)..(401): Homolog of NCBI NO: 10720233 NR Description: Protochlorophyllide reductase, chloroplast
  misc_feature (1)..(401): Homolog of NCBI NO: 10720220 NR Description: Protochlorophyllide reductase, chloroplast
  misc_feature (1)..(401): Homolog of NCBI NO: 266742 NR Description: Protochlorophyllide reductase, chloroplast
  misc_feature (1)..(401): Homolog of NCBI NO: 21068893 NR Description: NADPH:protochlorophyllide oxidoreductase
  misc_feature (1)..(401): Homolog of NCBI NO: 81946 NR Description: protochlorophyllide reductase (EC 1.3.1.33)
  misc_feature (1)..(401): Homolog of NCBI NO: 968975 NR Description: NADPH:protochlorophyllide oxidoreductase A
  misc_feature (1)..(401): Homolog of NCBI NO: 15239574 NR Description: NADPH:protochlorophyllide oxidoreductase A
  misc_feature (1)..(401): Homolog of NCBI NO: 21593167 NR Description: protochlorophyllide reductase precursor
  misc_feature (1)..(401): Homolog of NCBI NO: 15234129 NR Description: protochlorophyllide reductase precursor
MALQAASLVSSAFSVRKDAKLNASSSSFKDSSLFGASITDQIKSEHGSSSLRFKREQSLRNLAIRAQTAATSSPTVTKSVDGKKTLRKGNVVVTGASSGLGLATAKALAETGKWNVIMACRDFLKAERAAKSVGMPKDSYTVMHLDLASLDSVRQFVDNFRRTETPLDVLVCNAAVYFPTAKEPTYSAEGFELSVATNHLGHFLLARLLLDDLKKSDYPSKRLIIVGSITGNTNTLAGNVPPKANLGDLRGLAGGLNGLNSSAMIDGGDFDGAKAYKDSKVCNMLTMQEFHRRFHEETGVTFASLYPGCIASTGLFREHIPLFRALFPPFQKYITKGYVSETESGKRLAQVVSDPSLTKSGVYWSWNNASASFENQLSEEASDVEKARKVWEISEKLVGLA

SEQ ID NO: 23616 - protein, 284 aa, Arabidopsis thaliana
  peptide (1)..(284): Ceres Seq. ID no. 12339533
  misc_feature (1)..(284): Homolog of NCBI NO: 9587209 NR Description: NADPH-protochlorophyllide oxidoreductase [Vigna
  misc_feature (1)..(284): Homolog of NCBI NO: 10720233 NR Description: Protochlorophyllide reductase, chloroplast
  misc_feature (1)..(284): Homolog of NCBI NO: 10720220 NR Description: Protochlorophyllide reductase, chloroplast
  misc_feature (1)..(284): Homolog of NCBI NO: 266742 NR Description: Protochlorophyllide reductase, chloroplast
  misc_feature (1)..(284): Homolog of NCBI NO: 21068893 NR Description: NADPH:protochlorophyllide oxidoreductase
  misc_feature (1)..(284): Homolog of NCBI NO: 81946 NR Description: protochlorophyllide reductase (EC 1.3.1.33)
  misc_feature (1)..(284): Homolog of NCBI NO: 968975 NR Description: NADPH:protochlorophyllide oxidoreductase A
  misc_feature (1)..(284): Homolog of NCBI NO: 15239574 NR Description: NADPH:protochlorophyllide oxidoreductase A
  misc_feature (1)..(284): Homolog of NCBI NO: 21593167 NR Description: protochlorophyllide reductase precursor
  misc_feature (1)..(284): Homolog of NCBI NO: 15234129 NR Description: protochlorophyllide reductase precursor
MACRDFLKAERAAKSVGMPKDSYTVMHLDLASLDSVRQFVDNFRRTETPLDVLVCNAAVYFPTAKEPTYSAEGFELSVATNHLGHFLLARLLLDDLKKSDYPSKRLIIVGSITGNTNTLAGNVPPKANLGDLRGLAGGLNGLNSSAMIDGGDFDGAKAYKDSKVCNMLTMQEFHRRFHEETGVTFASLYPGCIASTGLFREHIPLFRALFPPFQKYITKGYVSETESGKRLAQVVSDPSLTKSGVYWSWNNASASFENQLSEEASDVEKARKVWEISEKLVGLA

SEQ ID NO: 23617 - DNA, 778 bp, Arabidopsis thaliana
  misc_feature (1)..(778): Ceres Seq. ID no. 13486892
  misc_feature: MA Experiment ID: 108434 Result: Up-regulated in Transcription
  misc_feature: MA Experiment 108434 PARAMETER Experiment Name: At_Root_Tips_cDNA_P Parameter: Tissue Value: Root Tips
  misc_feature: MA Experiment ID: 108462 Result: Down-regulated in Transcription
  misc_feature: MA Experiment 108462 PARAMETER Experiment Name: At_Germinating_Seeds_cDNA_P Parameter: Age (day) Value: 2 vs. 0
  misc_feature: MA Experiment 108462 PARAMETER Experiment Name: At_Germinating_Seeds_cDNA_P Parameter: Tissue Value: Germinating Seeds
  misc_feature: MA Experiment ID: 108463 Result: Down-regulated in Transcription
  misc_feature: MA Experiment 108463 PARAMETER Experiment Name: At_Germinating_Seeds_cDNA_P Parameter: Age (day) Value: 3 vs. 0
  misc_feature: MA Experiment 108463 PARAMETER Experiment Name: At_Germinating_Seeds_cDNA_P Parameter: Tissue Value: Germinating Seeds
  misc_feature: MA Experiment ID: 108464 Result: Down-regulated in Transcription
  misc_feature: MA Experiment 108464 PARAMETER Experiment Name: At_Germinating_Seeds_cDNA_P Parameter: Age (day) Value: 4 vs. 0
  misc_feature: MA Experiment 108464 PARAMETER Experiment Name: At_Germinating_Seeds_cDNA_P Parameter: Tissue Value: Germinating Seeds
  misc_feature: MA Experiment ID: 108573 Result: Down-regulated in Transcription
  misc_feature: MA Experiment 108573 PARAMETER Experiment Name: At_Drought_cDNA_P Parameter: Timepoint (hr) Value: 6
  misc_feature: MA Experiment 108573 PARAMETER Experiment Name: At_Drought_cDNA_P Parameter: Tissue Value: Aerial
  misc_feature: MA Experiment 108573 PARAMETER Experiment Name: At_Drought_cDNA_P Parameter: Treatment Value: Drought vs. No Drought
  misc_feature: MA Experiment ID: 108576 Result: Down-regulated in Transcription
  misc_feature: MA Experiment 108576 PARAMETER Experiment Name: At_42deg_Heat_cDNA_P Parameter: Temperature (deg C) Value: 42 vs. 22
  misc_feature: MA Experiment 108576 PARAMETER Experiment Name: At_42deg_Heat_cDNA_P Parameter: Timepoint (hr) Value: 1
  misc_feature: MA Experiment 108576 PARAMETER Experiment Name: At_42deg_Heat_cDNA_P Parameter: Tissue Value: Aerial
  misc_feature: MA Experiment ID: 108595 Result: Down-regulated in Transcription
  misc_feature: MA Experiment 108595 PARAMETER Experiment Name: At_Ler-pi_Ovule_cDNA_P Parameter: Plant Line Value: null
  misc_feature: MA Experiment ID: 20000111 Result: Down-regulated in Transcription
  misc_feature: MA Experiment 20000111 PARAMETER Experiment Name: At_42deg_Heat_cDNA_P Parameter: Temperature (deg C) Value: 42 vs. 22
  misc_feature: MA Experiment 20000111 PARAMETER Experiment Name: At_42deg_Heat_cDNA_P Parameter: Timepoint (hr) Value: 6
  misc_feature: MA Experiment 20000111 PARAMETER Experiment Name: At_42deg_Heat_cDNA_P Parameter: Tissue Value: Aerial
  misc_feature: MA Experiment ID: 20000112 Result: Down-regulated in Transcription
  misc_feature: MA Experiment 20000112 PARAMETER Experiment Name: At_42deg_Heat_cDNA_P Parameter: Temperature (deg C) Value: 42 vs. 22
  misc_feature: MA Experiment 20000112 PARAMETER Experiment Name: At_42deg_Heat_cDNA_P Parameter: Timepoint (hr) Value: 2
  misc_feature: MA Experiment 20000112 PARAMETER Experiment Name: At_42deg_Heat_cDNA_P Parameter: Tissue Value: Aerial
  misc_feature: MA Experiment ID: 20000113 Result: Down-regulated in Transcription
  misc_feature: MA Experiment 20000113 PARAMETER Experiment Name: At_42deg_Heat_cDNA_P Parameter: Temperature (deg C) Value: 42 vs. 22
  misc_feature: MA Experiment 20000113 PARAMETER Experiment Name: At_42deg_Heat_cDNA_P Parameter: Timepoint (hr) Value: 8
  misc_feature: MA Experiment 20000113 PARAMETER Experiment Name: At_42deg_Heat_cDNA_P Parameter: Tissue Value: Aerial
  misc_feature: MA Experiment ID: 20000117 Result: Down-regulated in Transcription
  misc_feature: MA Experiment 20000117 PARAMETER Experiment Name: At_100uM_ABA_Mutants_cDNA_P Parameter: Plant Line Value: Columbia
  misc_feature: MA Experiment 20000117 PARAMETER Experiment Name: At_100uM_ABA_Mutants_cDNA_P Parameter: Timepoint (hr) Value: 6
  misc_feature: MA Experiment 20000117 PARAMETER Experiment Name: At_100uM_ABA_Mutants_cDNA_P Parameter: Tissue Value: Aerial
  misc_feature: MA Experiment 20000117 PARAMETER Experiment Name: At_100uM_ABA_Mutants_cDNA_P Parameter: Treatment Value: 100uM ABA vs. No Treatment
  misc_feature: MA Experiment ID: 20000180 Result: Down-regulated in Transcription
  misc_feature: MA Experiment 20000180 PARAMETER Experiment Name: At_Germinating_Seeds_P Parameter: Age (hr) Value: 24 vs. 0
  misc_feature: MA Experiment 20000180 PARAMETER Experiment Name: At_Germinating_Seeds_P Parameter: Tissue Value: Germinating Seeds
  misc_feature: MA Experiment ID: 20000184 Result: Up-regulated in Transcription
  misc_feature: MA Experiment 20000184 PARAMETER Experiment Name: At_Shoots__P Parameter: Age (day) Value: 7
  misc_feature: MA Experiment 20000184 PARAMETER Experiment Name: At_Shoots__P Parameter: Tissue Value: Shoots vs. Whole Plant
  misc_feature: MA Experiment ID: 20000227 Result: Up-regulated in Transcription
  misc_feature: MA Experiment 20000227 PARAMETER Experiment Name: At_Root-Tips-vs-Tops_P Parameter: Tissue Value: Root Tips vs. Root Tops
  misc_feature: MA Experiment ID: 20000234 Result: Up-regulated in Transcription
  misc_feature: MA Experiment 20000234 PARAMETER Experiment Name: At_Siliques_P Parameter: Age (day) Value: 21
  misc_feature: MA Experiment 20000234 PARAMETER Experiment Name: At_Siliques_P Parameter: Organism Value: A. thaliana
  misc_feature: MA Experiment 20000234 PARAMETER Experiment Name: At_Siliques_P Parameter: Plant Line Value: WS
  misc_feature: MA Experiment 20000234 PARAMETER Experiment Name: At_Siliques_P Parameter: Tissue Value: Less Than 5mm Siliques vs. Whole Plant
  misc_feature: MA Experiment ID: 20000264 Result: Up-regulated in Transcription
  misc_feature: MA Experiment 20000264 PARAMETER Experiment Name: At_Open_Flower_P Parameter: Age (day) Value: 21
  misc_feature: MA Experiment 20000264 PARAMETER Experiment Name: At_Open_Flower_P Parameter: Plant Line Value: WS
  misc_feature: MA Experiment 20000264 PARAMETER Experiment Name: At_Open_Flower_P Parameter: Tissue Value: Open Flower vs. Whole Plant
  misc_feature: MA Experiment ID: 20000265 Result: Up-regulated in Transcription
  misc_feature: MA Experiment 20000265 PARAMETER Experiment Name: At_Open_Flower_P Parameter: Age (day) Value: 21
  misc_feature: MA Experiment 20000265 PARAMETER Experiment Name: At_Open_Flower_P Parameter: Plant Line Value: WS
  misc_feature: MA Experiment 20000265 PARAMETER Experiment Name: At_Open_Flower_P Parameter: Tissue Value: Closed Flower vs. Whole Plant
  misc_feature: MA Experiment ID: 20000286 Result: Up-regulated in Transcription
  misc_feature: MA Experiment 20000286 PARAMETER Experiment Name: At_Open_Flower_P Parameter: Age (day) Value: 21
  misc_feature: MA Experiment 20000286 PARAMETER Experiment Name: At_Open_Flower_P Parameter: Plant Line Value: WS
  misc_feature: MA Experiment 20000286 PARAMETER Experiment Name: At_Open_Flower_P Parameter: Tissue Value: Half Open vs. Whole Plant
  misc_feature: MA Experiment ID: 20000436 Result: Down-regulated in Transcription
  misc_feature: MA Experiment 20000436 PARAMETER Experiment Name: At_Drought_P Parameter: Age (day) Value: 7
  misc_feature: MA Experiment 20000436 PARAMETER Experiment Name: At_Drought_P Parameter: Organism Value: A. thaliana
  misc_feature: MA Experiment 20000436 PARAMETER Experiment Name: At_Drought_P Parameter: Plant Line Value: WS
  misc_feature: MA Experiment 20000436 PARAMETER Experiment Name: At_Drought_P Parameter: Timepoint (hr) Value: 12
  misc_feature: MA Experiment 20000436 PARAMETER Experiment Name: At_Drought_P Parameter: Tissue Value: Whole Plant
  misc_feature: MA Experiment 20000436 PARAMETER Experiment Name: At_Drought_P Parameter: Treatment Value: Drought vs. No Drought
  misc_feature: MA Experiment ID: 20000794 Result: Down-regulated in Transcription
  misc_feature: MA Experiment 20000794 PARAMETER Experiment Name: At_Petals_P Parameter: Age (day) Value: 23-25 days
  misc_feature: MA Experiment 20000794 PARAMETER Experiment Name: At_Petals_P Parameter: Plant Line Value: WS
  misc_feature: MA Experiment 20000794 PARAMETER Experiment Name: At_Petals_P Parameter: Tissue Value: Petals vs. Whole plant
  misc_feature: MA Experiment ID: 20001557 Result: Up-regulated in Transcription
  misc_feature: MA Experiment 20001557 PARAMETER Experiment Name: At_Drought_Soil_Dry_P Parameter: Age (day) Value: 27
  misc_feature: MA Experiment 20001557 PARAMETER Experiment Name: At_Drought_Soil_Dry_P Parameter: Organism Value: A. thaliana
  misc_feature: MA Experiment 20001557 PARAMETER Experiment Name: At_Drought_Soil_Dry_P Parameter: Plant Line Value: WS
  misc_feature: MA Experiment 20001557 PARAMETER Experiment Name: At_Drought_Soil_Dry_P Parameter: Post Timepoint (hr) Value: 3
  misc_feature: MA Experiment 20001557 PARAMETER Experiment Name: At_Drought_Soil_Dry_P Parameter: Post-Treatment Value: Re-Water vs. No Drought
  misc_feature: MA Experiment 20001557 PARAMETER Experiment Name: At_Drought_Soil_Dry_P Parameter: Timepoint (day) Value: 13
  misc_feature: MA Experiment 20001557 PARAMETER Experiment Name: At_Drought_Soil_Dry_P Parameter: Treatment Value: Drought vs. No Drought
  misc_feature: MA Experiment ID: 20001558 Result: Up-regulated in Transcription
  misc_feature: MA Experiment 20001558 PARAMETER Experiment Name: At_Drought_Soil_Dry_P Parameter: Age (day) Value: 27
  misc_feature: MA Experiment 20001558 PARAMETER Experiment Name: At_Drought_Soil_Dry_P Parameter: Organism Value: A. thaliana
  misc_feature: MA Experiment 20001558 PARAMETER Experiment Name: At_Drought_Soil_Dry_P Parameter: Plant Line Value: WS
  misc_feature: MA Experiment 20001558 PARAMETER Experiment Name: At_Drought_Soil_Dry_P Parameter: Post Timepoint (hr) Value: 6
  misc_feature: MA Experiment 20001558 PARAMETER Experiment Name: At_Drought_Soil_Dry_P Parameter: Post-Treatment Value: Re-Water vs. No Drought
  misc_feature: MA Experiment 20001558 PARAMETER Experiment Name: At_Drought_Soil_Dry_P Parameter: Timepoint (day) Value: 13
  misc_feature: MA Experiment 20001558 PARAMETER Experiment Name: At_Drought_Soil_Dry_P Parameter: Treatment Value: Drought vs. No Drought
  misc_feature: MA Experiment ID: 20001560 Result: Up-regulated in Transcription
  misc_feature: MA Experiment 20001560 PARAMETER Experiment Name: At_Drought_Soil_Dry_P Parameter: Age (day) Value: 28
  misc_feature: MA Experiment 20001560 PARAMETER Experiment Name: At_Drought_Soil_Dry_P Parameter: Organism Value: A. thaliana
  misc_feature: MA Experiment 20001560 PARAMETER Experiment Name: At_Drought_Soil_Dry_P Parameter: Plant Line Value: WS
  misc_feature: MA Experiment 20001560 PARAMETER Experiment Name: At_Drought_Soil_Dry_P Parameter: Post Timepoint (hr) Value: None
  misc_feature: MA Experiment 20001560 PARAMETER Experiment Name: At_Drought_Soil_Dry_P Parameter: Post-Treatment Value: None
  misc_feature: MA Experiment 20001560 PARAMETER Experiment Name: At_Drought_Soil_Dry_P Parameter: Timepoint (day) Value: 14
  misc_feature: MA Experiment 20001560 PARAMETER Experiment Name: At_Drought_Soil_Dry_P Parameter: Treatment Value: Drought vs. No Drought
  misc_feature: MA Experiment ID: 20001757 Result: Up-regulated in Transcription
  misc_feature: MA Experiment 20001757 PARAMETER Experiment Name: At_50mM_NH4NO3_L-to-H_P Parameter: Timepoint (hr) Value: 6
  misc_feature: MA Experiment 20001757 PARAMETER Experiment Name: At_50mM_NH4NO3_L-to-H_P Parameter: Tissue Value: Leaf
  misc_feature: MA Experiment 20001757 PARAMETER Experiment Name: At_50mM_NH4NO3_L-to-H_P Parameter: Treatment Value: 50mM NH4NO3 vs 100mM Mannitol
atcttgtatttagttctcttgttaaactttgcctcttcgtcttttgctccagagtttttgtgcggctgccattttcgatttccaaaggttttgagctttgaaaaatggtgagaatcagtgtgcttaacgatgctcttaagagtatgtacaatgctgagaagagagggaagaggcaagtcatgatcaggccttcctctaaagtgatcatcaagtttcttatcgtcatgcagaaacacggttacattggtgagtttgagtacgttgatgaccacaggtctggaaagatcgtggtcgagcttaatggaagacttaacaaatgtggagtcatcagtcctcgtttcgatgttggagttaaggagattgaaggctggaccgctcgtcttcttccttccagacagtttgggtacattgttcttacgacctcggctggtattatggaccacgaagaagccaggagaaagaatgttggtggcaaggttcttggcttcttttactgaatcaagtcttgaagaagagaatcattatggttggtgatactttgcttctccttttggtgagaagaggattccgattgagctaaatgtttaagggtagtagagtttttgatgtcttcttctgtttgttatctttagatgatatgccattttgttcgttttggtttttgcgcaaaagttgttaaagacttgcaaagtagacagtaatttcaatttctgttttctacaacaaaaaacacttgcttttcttgagccaatcttatctatcgagacgtttcaatttc

SEQ ID NO: 23618 - protein, 130 aa, Arabidopsis thaliana
  peptide (1)..(130): Ceres Seq. ID no. 13486893
  misc_feature (5)..(130): Pfam Name: Ribosomal protein S8 Pfam Description: Ribosomal protein S8
  misc_feature (1)..(130): Homolog of NCBI NO: 6323399 NR Description: Homology to rat S15a; Rps22bp [Saccharomyces
  misc_feature (1)..(130): Homolog of NCBI NO: 6322271 NR Description: Homology to rat S15a; Rps22ap [Saccharomyces
  misc_feature (1)..(130): Homolog of NCBI NO: 15225502 NR Description: 40S ribosomal protein S15A (RPS15aC) [Arabidopsis
  misc_feature (1)..(130): Homolog of NCBI NO: 2130985 NR Description: r-protein BnS15a [Brassica napus]
  misc_feature (1)..(130): Homolog of NCBI NO: 28411802 NR Description: ribosomal protein S15 [Oryza sativa (japonica
  misc_feature (1)..(130): Homolog of NCBI NO: 13560779 NR Description: cytoplasmic ribosomal protein S15a [Daucus carota]
  misc_feature (1)..(130): Homolog of NCBI NO: 6683481 NR Description: wrp15a [Citrullus lanatus]
  misc_feature (1)..(130): Homolog of NCBI NO: 15231316 NR Description: 40S ribosomal protein S15A (RPS15aD) [Arabidopsis
  misc_feature (1)..(130): Homolog of NCBI NO: 133793 NR Description: 40S RIBOSOMAL PROTEIN S15A (PPCB8)
  misc_feature (1)..(130): Homolog of NCBI NO: 15223001 NR Description: 40S ribosomal protein S15A (RPS15aA) [Arabidopsis
MVRISVLNDALKSMYNAEKRGKRQVMIRPSSKVIIKFLIVMQKHGYIGEFEYVDDHRSGKIVVELNGRLNKCGVISPRFDVGVKEIEGWTARLLPSRQFGYIVLTTSAGIMDHEEARRKNVGGKVLGFFY

SEQ ID NO: 23619 - protein, 117 aa, Arabidopsis thaliana
  peptide (1)..(117): Ceres Seq. ID no. 13486894
  misc_feature (1)..(117): Pfam Name: Ribosomal protein S8 Pfam Description: Ribosomal protein S8
  misc_feature (1)..(117): Homolog of NCBI NO: 6323399 NR Description: Homology to rat S15a; Rps22bp [Saccharomyces
  misc_feature (1)..(117): Homolog of NCBI NO: 6322271 NR Description: Homology to rat S15a; Rps22ap [Saccharomyces
  misc_feature (1)..(117): Homolog of NCBI NO: 15225502 NR Description: 40S ribosomal protein S15A (RPS15aC) [Arabidopsis
  misc_feature (1)..(117): Homolog of NCBI NO: 2130985 NR Description: r-protein BnS15a [Brassica napus]
  misc_feature (1)..(117): Homolog of NCBI NO: 28411802 NR Description: ribosomal protein S15 [Oryza sativa (japonica
  misc_feature (1)..(117): Homolog of NCBI NO: 13560779 NR Description: cytoplasmic ribosomal protein S15a [Daucus carota]
  misc_feature (1)..(117): Homolog of NCBI NO: 6683481 NR Description: wrp15a [Citrullus lanatus]
  misc_feature (1)..(117): Homolog of NCBI NO: 15231316 NR Description: 40S ribosomal protein S15A (RPS15aD) [Arabidopsis
  misc_feature (1)..(117): Homolog of NCBI NO: 133793 NR Description: 40S RIBOSOMAL PROTEIN S15A (PPCB8)
  misc_feature (1)..(117): Homolog of NCBI NO: 15223001 NR Description: 40S ribosomal protein S15A (RPS15aA) [Arabidopsis
MYNAEKRGKRQVMIRPSSKVIIKFLIVMQKHGYIGEFEYVDDHRSGKIVVELNGRLNKCGVISPRFDVGVKEIEGWTARLLPSRQFGYIVLTTSAGIMDHEEARRKNVGGKVLGFFY

SEQ ID NO: 23620 - protein, 105 aa, Arabidopsis thaliana
  peptide (1)..(105): Ceres Seq. ID no. 13486895
  misc_feature (1)..(105): Pfam Name: Ribosomal protein S8 Pfam Description: Ribosomal protein S8
  misc_feature (1)..(105): Homolog of NCBI NO: 6323399 NR Description: Homology to rat S15a; Rps22bp [Saccharomyces
  misc_feature (1)..(105): Homolog of NCBI NO: 6322271 NR Description: Homology to rat S15a; Rps22ap [Saccharomyces
  misc_feature (1)..(105): Homolog of NCBI NO: 15225502 NR Description: 40S ribosomal protein S15A (RPS15aC) [Arabidopsis
  misc_feature (1)..(105): Homolog of NCBI NO: 2130985 NR Description: r-protein BnS15a [Brassica napus]
  misc_feature (1)..(105): Homolog of NCBI NO: 28411802 NR Description: ribosomal protein S15 [Oryza sativa (japonica
  misc_feature (1)..(105): Homolog of NCBI NO: 13560779 NR Description: cytoplasmic ribosomal protein S15a [Daucus carota]
  misc_feature (1)..(105): Homolog of NCBI NO: 6683481 NR Description: wrp15a [Citrullus lanatus]
  misc_feature (1)..(105): Homolog of NCBI NO: 15231316 NR Description: 40S ribosomal protein S15A (RPS15aD) [Arabidopsis
  misc_feature (1)..(105): Homolog of NCBI NO: 133793 NR Description: 40S RIBOSOMAL PROTEIN S15A (PPCB8)
  misc_feature (1)..(105): Homolog of NCBI NO: 15223001 NR Description: 40S ribosomal protein S15A (RPS15aA) [Arabidopsis
MIRPSSKVIIKFLIVMQKHGYIGEFEYVDDHRSGKIVVELNGRLNKCGVISPRFDVGVKEIEGWTARLLPSRQFGYIVLTTSAGIMDHEEARRKNVGGKVLGFFY

SEQ ID NO: 23621 - DNA, 1385 bp, Arabidopsis thaliana
  misc_feature (1)..(1385): Ceres Seq. ID no. 12371612
  misc_feature: MA Experiment ID: 20000234 Result: Up-regulated in Transcription
  misc_feature: MA Experiment 20000234 PARAMETER Experiment Name: At_Siliques_P Parameter: Age (day) Value: 21
  misc_feature: MA Experiment 20000234 PARAMETER Experiment Name: At_Siliques_P Parameter: Organism Value: A. thaliana
  misc_feature: MA Experiment 20000234 PARAMETER Experiment Name: At_Siliques_P Parameter: Plant Line Value: WS
  misc_feature: MA Experiment 20000234 PARAMETER Experiment Name: At_Siliques_P Parameter: Tissue Value: Less Than 5mm Siliques vs. Whole Plant
  misc_feature: MA Experiment ID: 20000264 Result: Up-regulated in Transcription
  misc_feature: MA Experiment 20000264 PARAMETER Experiment Name: At_Open_Flower_P Parameter: Age (day) Value: 21
  misc_feature: MA Experiment 20000264 PARAMETER Experiment Name: At_Open_Flower_P Parameter: Plant Line Value: WS
  misc_feature: MA Experiment 20000264 PARAMETER Experiment Name: At_Open_Flower_P Parameter: Tissue Value: Open Flower vs. Whole Plant
  misc_feature: MA Experiment ID: 20000265 Result: Up-regulated in Transcription
  misc_feature: MA Experiment 20000265 PARAMETER Experiment Name: At_Open_Flower_P Parameter: Age (day) Value: 21
  misc_feature: MA Experiment 20000265 PARAMETER Experiment Name: At_Open_Flower_P Parameter: Plant Line Value: WS
  misc_feature: MA Experiment 20000265 PARAMETER Experiment Name: At_Open_Flower_P Parameter: Tissue Value: Closed Flower vs. Whole Plant
  misc_feature: MA Experiment ID: 20000286 Result: Up-regulated in Transcription
  misc_feature: MA Experiment 20000286 PARAMETER Experiment Name: At_Open_Flower_P Parameter: Age (day) Value: 21
  misc_feature: MA Experiment 20000286 PARAMETER Experiment Name: At_Open_Flower_P Parameter: Plant Line Value: WS
  misc_feature: MA Experiment 20000286 PARAMETER Experiment Name: At_Open_Flower_P Parameter: Tissue Value: Half Open vs. Whole Plant
  misc_feature: MA Experiment ID: 20000794 Result: Up-regulated in Transcription
  misc_feature: MA Experiment 20000794 PARAMETER Experiment Name: At_Petals_P Parameter: Age (day) Value: 23-25 days
  misc_feature: MA Experiment 20000794 PARAMETER Experiment Name: At_Petals_P Parameter: Plant Line Value: WS
  misc_feature: MA Experiment 20000794 PARAMETER Experiment Name: At_Petals_P Parameter: Tissue Value: Petals vs. Whole plant
  misc_feature: MA Experiment ID: 20001757 Result: Down-regulated in Transcription
  misc_feature: MA Experiment 20001757 PARAMETER Experiment Name: At_50mM_NH4NO3_L-to-H_P Parameter: Timepoint (hr) Value: 6
  misc_feature: MA Experiment 20001757 PARAMETER Experiment Name: At_50mM_NH4NO3_L-to-H_P Parameter: Tissue Value: Leaf
  misc_feature: MA Experiment 20001757 PARAMETER Experiment Name: At_50mM_NH4NO3_L-to-H_P Parameter: Treatment Value: 50mM NH4NO3 vs 100mM Mannitol
  misc_feature: MA Experiment ID: 20001905 Result: Up-regulated in Transcription
  misc_feature: MA Experiment 20001905 PARAMETER Experiment Name: At_Drought_Reproduction_P Parameter: Age (day) Value: 40
  misc_feature: MA Experiment 20001905 PARAMETER Experiment Name: At_Drought_Reproduction_P Parameter: Organism Value: A. thaliana
  misc_feature: MA Experiment 20001905 PARAMETER Experiment Name: At_Drought_Reproduction_P Parameter: Plant Line Value: WS
  misc_feature: MA Experiment 20001905 PARAMETER Experiment Name: At_Drought_Reproduction_P Parameter: Timepoint (day) Value: 10
  misc_feature: MA Experiment 20001905 PARAMETER Experiment Name: At_Drought_Reproduction_P Parameter: Tissue Value: Rosettes
  misc_feature: MA Experiment 20001905 PARAMETER Experiment Name: At_Drought_Reproduction_P Parameter: Treatment Value: Drought vs. No Drought
  misc_feature: MA Experiment ID: 20001909 Result: Up-regulated in Transcription
  misc_feature: MA Experiment 20001909 PARAMETER Experiment Name: At_Drought_Reproduction_P Parameter: Age (day) Value: 35
  misc_feature: MA Experiment 20001909 PARAMETER Experiment Name: At_Drought_Reproduction_P Parameter: Organism Value: A. thaliana
  misc_feature: MA Experiment 20001909 PARAMETER Experiment Name: At_Drought_Reproduction_P Parameter: Plant Line Value: WS
  misc_feature: MA Experiment 20001909 PARAMETER Experiment Name: At_Drought_Reproduction_P Parameter: Timepoint (day) Value: 5
  misc_feature: MA Experiment 20001909 PARAMETER Experiment Name: At_Drought_Reproduction_P Parameter: Tissue Value: Flowers
  misc_feature: MA Experiment 20001909 PARAMETER Experiment Name: At_Drought_Reproduction_P Parameter: Treatment Value: Drought vs. No Drought
  misc_feature: MA Experiment ID: 20001910 Result: Up-regulated in Transcription
  misc_feature: MA Experiment 20001910 PARAMETER Experiment Name: At_Drought_Reproduction_P Parameter: Age (day) Value: 37
  misc_feature: MA Experiment 20001910 PARAMETER Experiment Name: At_Drought_Reproduction_P Parameter: Organism Value: A. thaliana
  misc_feature: MA Experiment 20001910 PARAMETER Experiment Name: At_Drought_Reproduction_P Parameter: Plant Line Value: WS
  misc_feature: MA Experiment 20001910 PARAMETER Experiment Name: At_Drought_Reproduction_P Parameter: Timepoint (day) Value: 7
  misc_feature: MA Experiment 20001910 PARAMETER Experiment Name: At_Drought_Reproduction_P Parameter: Tissue Value: Flowers
  misc_feature: MA Experiment 20001910 PARAMETER Experiment Name: At_Drought_Reproduction_P Parameter: Treatment Value: Drought vs. No Drought
  misc_feature: MA Experiment ID: 20001911 Result: Up-regulated in Transcription
  misc_feature: MA Experiment 20001911 PARAMETER Experiment Name: At_Drought_Reproduction_P Parameter: Age (day) Value: 40
  misc_feature: MA Experiment 20001911 PARAMETER Experiment Name: At_Drought_Reproduction_P Parameter: Organism Value: A. thaliana
  misc_feature: MA Experiment 20001911 PARAMETER Experiment Name: At_Drought_Reproduction_P Parameter: Plant Line Value: WS
  misc_feature: MA Experiment 20001911 PARAMETER Experiment Name: At_Drought_Reproduction_P Parameter: Timepoint (day) Value: 10
  misc_feature: MA Experiment 20001911 PARAMETER Experiment Name: At_Drought_Reproduction_P Parameter: Tissue Value: Flowers
  misc_feature: MA Experiment 20001911 PARAMETER Experiment Name: At_Drought_Reproduction_P Parameter: Treatment Value: Drought vs. No Drought
agaaaacaaaaaatagaataacaaatagtaatattagtagtaatttttttatttttttggggaaaaaatgggtggatattttggagtttctacaatttttattatctgtttgttgggaatttcagccaatgctgaggtattcaccattggttcttcatcaggttctgatattactcaggcacttctgaaagcattcacatcggcatgccaatcttcgtcaccaagcaaagtggtgatcccaaaaggagagttcaagcttggtgagatcgagatgaggggtccatgcaaagctcccattgaggtcacccttcaaggtactgtcaaagctgacggtaacgctatccaagggaaggaaaaatgggtcgtcttcggcaacattgatggctttaagttgaacggaggaggagccttcgacggtgaaggcaatgcagcttggagagtcaataactgtcacaagactttcgagtgcaagaaacttcccatcagtataaggtttgacttcatattgaactctgagatcagagacatatcctcgatcgatgccaagaacttccacatcaacgtgttgggagccaagaacatgaccatgaataacatcaagatcgtcgccccagaagacagtcccaacactgatggaatccatttgggaagaagtgacggagtcaagatccttaactctttcatctccaccggagacgattgtatctccgtcggagatgggatgaagaaccttcacgtggagaaggtcacatgcggtccgggacacggaatcagtgtcgggagtcttggaaggtacggacacgagcaagatgtcagcggcattaaggtcatcaactgcactcttcaagagactgacaacgggttgaggatcaagacatggccctctgcagcttgctccaccaccgcatccgatattcatttcgaggatattatcctcaaggacgttagcaacccaatcctcatcgaccaagagtactgcccttggaaccagtgcaacaagcaaaaagcatcaacaattaagttggtgaacattagcttcaagaacatcagaggaacatcagggaacaaggacgcggtgaagctactttgcagcaaggggtatccgtgccagaacgtggagattggagacattgatatcaagtacaatggagcagatggtccagccactttccattgctcaaacgtcagtcccaaaatcttgggatctcagagccctaaagcatgcagcgctccagcagcctaaatgtagaagctctaaaacaattaattaatcaaacactcattcaattcaattttatatatgaatttcttctacacagtaactatatacgatgtatgctctcatttaattcaacaatgaatgcatcatccattatttcttggtg

SEQ ID NO: 23622 - protein, 391 aa, Arabidopsis thaliana
  peptide (1)..(391): Ceres Seq. ID no. 12371613
  misc_feature (47)..(386): Pfam Name: Glycosyl hydrolases family 28 Pfam Description: Glycosyl hydrolases family 28
  misc_feature (7)..(389): Homolog of NCBI NO: 3024385 NR Description: POLYGALACTURONASE PRECURSOR (PG) (PECTINASE)
  misc_feature (7)..(389): Homolog of NCBI NO: 3024386 NR Description: POLYGALACTURONASE PRECURSOR (PG) (PECTINASE)
  misc_feature (1)..(389): Homolog of NCBI NO: 548490 NR Description: Polygalacturonase precursor (PG) (Pectinase)
  misc_feature (1)..(389): Homolog of NCBI NO: 30984029 NR Description: polygalacturonase [Brassica napus]
  misc_feature (1)..(389): Homolog of NCBI NO: 21668071 NR Description: putative pollen polygalacturonase [Brassica
  misc_feature (4)..(389): Homolog of NCBI NO: 15238902 NR Description: polygalacturonase, putative
  misc_feature (1)..(388): Homolog of NCBI NO: 15231878 NR Description: exopolygalacturonase; protein id: At3g07840.1
  misc_feature (1)..(389): Homolog of NCBI NO: 15231876 NR Description: polygalacturonase, putative; protein id:
  misc_feature (1)..(391): Homolog of NCBI NO: 11263969 NR Description: polygalacturonase (EC 3.2.1.15) [imported] -
  misc_feature (1)..(391): Homolog of NCBI NO: 15231874 NR Description: polygalacturonase, putative
MGGYFGVSTIFIICLLGISANAEVFTIGSSSGSDITQALLKAFTSACQSSSPSKVVIPKGEFKLGEIEMRGPCKAPIEVTLQGTVKADGNAIQGKEKWVVFGNIDGFKLNGGGAFDGEGNAAWRVNNCHKTFECKKLPISIRFDFILNSEIRDISSIDAKNFHINVLGAKNMTMNNIKIVAPEDSPNTDGIHLGRSDGVKILNSFISTGDDCISVGDGMKNLHVEKVTCGPGHGISVGSLGRYGHEQDVSGIKVINCTLQETDNGLRIKTWPSAACSTTASDIHFEDIILKDVSNPILIDQEYCPWNQCNKQKASTIKLVNISFKNIRGTSGNKDAVKLLCSKGYPCQNVEIGDIDIKYNGADGPATFHCSNVSPKILGSQSPKACSAPAA

SEQ ID NO: 23623 - protein, 323 aa, Arabidopsis thaliana
  peptide (1)..(323): Ceres Seq. ID no. 12371614
  misc_feature (1)..(318): Pfam Name: Glycosyl hydrolases family 28 Pfam Description: Glycosyl hydrolases family 28
  misc_feature (1)..(321): Homolog of NCBI NO: 3024385 NR Description: POLYGALACTURONASE PRECURSOR (PG) (PECTINASE)
  misc_feature (1)..(321): Homolog of NCBI NO: 3024386 NR Description: POLYGALACTURONASE PRECURSOR (PG) (PECTINASE)
  misc_feature (1)..(321): Homolog of NCBI NO: 548490 NR Description: Polygalacturonase precursor (PG) (Pectinase)
  misc_feature (1)..(321): Homolog of NCBI NO: 30984029 NR Description: polygalacturonase [Brassica napus]
  misc_feature (1)..(321): Homolog of NCBI NO: 21668071 NR Description: putative pollen polygalacturonase [Brassica
  misc_feature (1)..(321): Homolog of NCBI NO: 15238902 NR Description: polygalacturonase, putative
  misc_feature (1)..(320): Homolog of NCBI NO: 15231878 NR Description: exopolygalacturonase; protein id: At3g07840.1
  misc_feature (1)..(321): Homolog of NCBI NO: 15231876 NR Description: polygalacturonase, putative; protein id:
  misc_feature (1)..(323): Homolog of NCBI NO: 11263969 NR Description: polygalacturonase (EC 3.2.1.15) [imported] -
  misc_feature (1)..(323): Homolog of NCBI NO: 15231874 NR Description: polygalacturonase, putative
MRGPCKAPIEVTLQGTVKADGNAIQGKEKWVVFGNIDGFKLNGGGAFDGEGNAAWRVNNCHKTFECKKLPISIRFDFILNSEIRDISSIDAKNFHINVLGAKNMTMNNIKIVAPEDSPNTDGIHLGRSDGVKILNSFISTGDDCISVGDGMKNLHVEKVTCGPGHGISVGSLGRYGHEQDVSGIKVINCTLQETDNGLRIKTWPSAACSTTASDIHFEDIILKDVSNPILIDQEYCPWNQCNKQKASTIKLVNISFKNIRGTSGNKDAVKLLCSKGYPCQNVEIGDIDIKYNGADGPATFHCSNVSPKILGSQSPKACSAPAA

SEQ ID NO: 23624 - protein, 220 aa, Arabidopsis thaliana
  peptide (1)..(220): Ceres Seq. ID no. 12371615
  misc_feature (1)..(215): Pfam Name: Glycosyl hydrolases family 28 Pfam Description: Glycosyl hydrolases family 28
  misc_feature (1)..(218): Homolog of NCBI NO: 3024385 NR Description: POLYGALACTURONASE PRECURSOR (PG) (PECTINASE)
  misc_feature (1)..(218): Homolog of NCBI NO: 3024386 NR Description: POLYGALACTURONASE PRECURSOR (PG) (PECTINASE)
  misc_feature (1)..(218): Homolog of NCBI NO: 548490 NR Description: Polygalacturonase precursor (PG) (Pectinase)
  misc_feature (1)..(218): Homolog of NCBI NO: 30984029 NR Description: polygalacturonase [Brassica napus]
  misc_feature (1)..(218): Homolog of NCBI NO: 21668071 NR Description: putative pollen polygalacturonase [Brassica
  misc_feature (1)..(218): Homolog of NCBI NO: 15238902 NR Description: polygalacturonase, putative
  misc_feature (1)..(217): Homolog of NCBI NO: 15231878 NR Description: exopolygalacturonase; protein id: At3g07840.1
  misc_feature (1)..(218): Homolog of NCBI NO: 15231876 NR Description: polygalacturonase, putative; protein id:
  misc_feature (1)..(220): Homolog of NCBI NO: 11263969 NR Description: polygalacturonase (EC 3.2.1.15) [imported] -
  misc_feature (1)..(220): Homolog of NCBI NO: 15231874 NR Description: polygalacturonase, putative
MTMNNIKIVAPEDSPNTDGIHLGRSDGVKILNSFISTGDDCISVGDGMKNLHVEKVTCGPGHGISVGSLGRYGHEQDVSGIKVINCTLQETDNGLRIKTWPSAACSTTASDIHFEDIILKDVSNPILIDQEYCPWNQCNKQKASTIKLVNISFKNIRGTSGNKDAVKLLCSKGYPCQNVEIGDIDIKYNGADGPATFHCSNVSPKILGSQSPKACSAPAA

SEQ ID NO: 23625 - DNA, 1724 bp, Arabidopsis thaliana
  misc_feature (1)..(1724): Ceres Seq. ID no. 12338453
  misc_feature: MA Experiment ID: 20000182 Result: Up-regulated in Transcription
  misc_feature: MA Experiment 20000182 PARAMETER Experiment Name: At_2mM_SA_P Parameter: Age (day) Value: 14
  misc_feature: MA Experiment 20000182 PARAMETER Experiment Name: At_2mM_SA_P Parameter: Organism Value: A. thaliana
  misc_feature: MA Experiment 20000182 PARAMETER Experiment Name: At_2mM_SA_P Parameter: Plant Line Value: WS
  misc_feature: MA Experiment 20000182 PARAMETER Experiment Name: At_2mM_SA_P Parameter: Timepoint (hr) Value: 6
  misc_feature: MA Experiment 20000182 PARAMETER Experiment Name: At_2mM_SA_P Parameter: Tissue Value: Aerial
  misc_feature: MA Experiment 20000182 PARAMETER Experiment Name: At_2mM_SA_P Parameter: Treatment Value: 2mM SA vs. No Treatment
  misc_feature: MA Experiment ID: 20000234 Result: Up-regulated in Transcription
  misc_feature: MA Experiment 20000234 PARAMETER Experiment Name: At_Siliques_P Parameter: Age (day) Value: 21
  misc_feature: MA Experiment 20000234 PARAMETER Experiment Name: At_Siliques_P Parameter: Organism Value: A. thaliana
  misc_feature: MA Experiment 20000234 PARAMETER Experiment Name: At_Siliques_P Parameter: Plant Line Value: WS
  misc_feature: MA Experiment 20000234 PARAMETER Experiment Name: At_Siliques_P Parameter: Tissue Value: Less Than 5mm Siliques vs. Whole Plant
acaagaagaatattcacagagaagagagagcgataataatggcgtttaagggtttcgcgtgttttttcgattcttttgttgttgtctctattcgtttcctctatacgaagcgaggagacgaaggaatttgtcttgactctcgatcactctaacttcaccgaaaccatctccaagcacgatttcatcgtcgtcgagttctacgccccttggtgtggtcactgccagaagcttgctcctgagtacgagaaggctgcatcagagttgagtagtcataaccctcctcttgctctcgccaagatcgatgctagtgaagaagcaaacaaagaatttgctaatgagtacaagattcagggtttccccactcttaagattttgagaaatggagggaagtcggttcaagattacaacggacctcgtgaagctgagggtattgtcacttatttgaagaagcaaagtggtcctgcttctgttgaaattaagtcagctgattctgccactgaggttgttggtgaaaagaatgttgttgctgttggagtgttccctaaattatccggggatgagtttgattctttcatggcccttgctgagaaattgcgtgctgactatgatttcgcacacactttggatgctaagtttcttcctcgtggagagtctgtggaaggacctgcagtgaggctgttcaagccttttgatgaattgtttgttgactccaaggacttcaatggggaagctctagagaaatttgtcaaagaatcaagtatcccacttgtcaccgtctttgacattgatccaaacaaccacccttatgttgccaaattctttgaaagccctgccactaaggcgatgatgttcgttaacttcactggagcaacagctgaagctctaaaatcaaagtaccgtgaagtagctacatccaacaaagatcaaagtcttgccttccttgttggtgatgcagagagcagccaaggcgctttccagtactttggactcgaagagagccaagttcccctcatcatcatccagaccccagataacaagaagtatttgaaagtcaacgttgaggttgaccagattgaatcatggttcaaggacttccaggacggaaaagttgctgtccacaaaaaatcccaacctattccagctgagaacaacgaacctgtgaaggttgttgttgccgagagccttgacgacatagttttcaagtctggaaagaatgtcttgattgagttctatgcaccatggtgtggacattgtcaaaaacttgctccaatcttggacgaagtggctttgtcattccagaacgacccaagtgtgatcatagcaaaattggacgcaaccgcaaatgatatcccaagtgataccttcgatgtgaaaggattcccgaccatttacttcaggtcagcgagcggaaatgttgtagtgtacgaaggagacaggacaaaggaagacttcataaacttcgttgagaagaacagtgagaagaagccaacttctcatggagaagagtctaccaagagtgaggaacctaagaagaccgaggaaacggccgcaaaggacgagctgtagaaatctcatgagttttgtttcggaatttgagtaggagcgtttctcttcttcaccatatccaacagaatcttcttttttctttagcagttttacagttttatcttttttgctctcttgttcgaacccaaaattatccccattaataaaaagttaaacct

SEQ ID NO: 23626 - protein, 330 aa, Arabidopsis thaliana
  peptide (1)..(330): Ceres Seq. ID no. 12338454
  misc_feature (1)..(179): Pfam Name: Calsequestrin Pfam Description: Calsequestrin
  misc_feature (1)..(330): Homolog of NCBI NO: 13925726 NR Description: protein disulfide isomerase 2 precursor [Triticum
  misc_feature (1)..(330): Homolog of NCBI NO: 13925728 NR Description: protein disulfide isomerase 3 precursor [Triticum
  misc_feature (1)..(330): Homolog of NCBI NO: 12056115 NR Description: protein disulfide isomerase [Triticum turgidum
  misc_feature (1)..(330): Homolog of NCBI NO: 1709619 NR Description: Protein disulfide isomerase precursor (PDI)
  misc_feature (1)..(303): Homolog of NCBI NO: 11133775 NR Description: Protein disulfide isomerase precursor (PDI)
  misc_feature (1)..(325): Homolog of NCBI NO: 11133818 NR Description: Protein disulfide isomerase precursor (PDI)
  misc_feature (1)..(330): Homolog of NCBI NO: 99992 NR Description: protein disulfide-isomerase (EC 5.3.4.1)
  misc_feature (1)..(330): Homolog of NCBI NO: 266743 NR Description: Protein disulfide isomerase precursor (PDI)
  misc_feature (1)..(330): Homolog of NCBI NO: 15219086 NR Description: putative protein disulfide isomerase precursor
  misc_feature (1)..(330): Homolog of NCBI NO: 15223975 NR Description: putative thioredoxin; protein id: At1g77510.1
MALAEKLRADYDFAHTLDAKFLPRGESVEGPAVRLFKPFDELFVDSKDFNGEALEKFVKESSIPLVTVFDIDPNNHPYVAKFFESPATKAMMFVNFTGATAEALKSKYREVATSNKDQSLAFLVGDAESSQGAFQYFGLEESQVPLIIIQTPDNKKYLKVNVEVDQIESWFKDFQDGKVAVHKKSQPIPAENNEPVKVVVAESLDDIVFKSGKNVLIEFYAPWCGHCQKLAPILDEVALSFQNDPSVIIAKLDATANDIPSDTFDVKGFPTIYFRSASGNVVVYEGDRTKEDFINFVEKNSEKKPTSHGEESTKSEEPKKTEETAAKDEL

SEQ ID NO: 23627 - protein, 240 aa, Arabidopsis thaliana
  peptide (1)..(240): Ceres Seq. ID no. 12338455
  misc_feature (1)..(89): Pfam Name: Calsequestrin Pfam Description: Calsequestrin
  misc_feature (1)..(240): Homolog of NCBI NO: 13925726 NR Description: protein disulfide isomerase 2 precursor [Triticum
  misc_feature (1)..(240): Homolog of NCBI NO: 13925728 NR Description: protein disulfide isomerase 3 precursor [Triticum
  misc_feature (1)..(240): Homolog of NCBI NO: 12056115 NR Description: protein disulfide isomerase [Triticum turgidum
  misc_feature (1)..(240): Homolog of NCBI NO: 1709619 NR Description: Protein disulfide isomerase precursor (PDI)
  misc_feature (1)..(213): Homolog of NCBI NO: 11133775 NR Description: Protein disulfide isomerase precursor (PDI)
  misc_feature (1)..(235): Homolog of NCBI NO: 11133818 NR Description: Protein disulfide isomerase precursor (PDI)
  misc_feature (1)..(240): Homolog of NCBI NO: 99992 NR Description: protein disulfide-isomerase (EC 5.3.4.1)
  misc_feature (1)..(240): Homolog of NCBI NO: 266743 NR Description: Protein disulfide isomerase precursor (PDI)
  misc_feature (1)..(240): Homolog of NCBI NO: 15219086 NR Description: putative protein disulfide isomerase precursor
  misc_feature (1)..(240): Homolog of NCBI NO: 15223975 NR Description: putative thioredoxin; protein id: At1g77510.1
MMFVNFTGATAEALKSKYREVATSNKDQSLAFLVGDAESSQGAFQYFGLEESQVPLIIIQTPDNKKYLKVNVEVDQIESWFKDFQDGKVAVHKKSQPIPAENNEPVKVVVAESLDDIVFKSGKNVLIEFYAPWCGHCQKLAPILDEVALSFQNDPSVIIAKLDATANDIPSDTFDVKGFPTIYFRSASGNVVVYEGDRTKEDFINFVEKNSEKKPTSHGEESTKSEEPKKTEETAAKDEL

SEQ ID NO: 23628 - protein, 239 aa, Arabidopsis thaliana
  peptide (1)..(239): Ceres Seq. ID no. 12338456
  misc_feature (1)..(88): Pfam Name: Calsequestrin Pfam Description: Calsequestrin
  misc_feature (1)..(239): Homolog of NCBI NO: 13925726 NR Description: protein disulfide isomerase 2 precursor [Triticum
  misc_feature (1)..(239): Homolog of NCBI NO: 13925728 NR Description: protein disulfide isomerase 3 precursor [Triticum
  misc_feature (1)..(239): Homolog of NCBI NO: 12056115 NR Description: protein disulfide isomerase [Triticum turgidum
  misc_feature (1)..(239): Homolog of NCBI NO: 1709619 NR Description: Protein disulfide isomerase precursor (PDI)
  misc_feature (1)..(212): Homolog of NCBI NO: 11133775 NR Description: Protein disulfide isomerase precursor (PDI)
  misc_feature (1)..(234): Homolog of NCBI NO: 11133818 NR Description: Protein disulfide isomerase precursor (PDI)
  misc_feature (1)..(239): Homolog of NCBI NO: 99992 NR Description: protein disulfide-isomerase (EC 5.3.4.1)
  misc_feature (1)..(239): Homolog of NCBI NO: 266743 NR Description: Protein disulfide isomerase precursor (PDI)
  misc_feature (1)..(239): Homolog of NCBI NO: 15219086 NR Description: putative protein disulfide isomerase precursor
  misc_feature (1)..(239): Homolog of NCBI NO: 15223975 NR Description: putative thioredoxin; protein id: At1g77510.1
MFVNFTGATAEALKSKYREVATSNKDQSLAFLVGDAESSQGAFQYFGLEESQVPLIIIQTPDNKKYLKVNVEVDQIESWFKDFQDGKVAVHKKSQPIPAENNEPVKVVVAESLDDIVFKSGKNVLIEFYAPWCGHCQKLAPILDEVALSFQNDPSVIIAKLDATANDIPSDTFDVKGFPTIYFRSASGNVVVYEGDRTKEDFINFVEKNSEKKPTSHGEESTKSEEPKKTEETAAKDEL

SEQ ID NO: 23629 - DNA, 1133 bp, Arabidopsis thaliana
  misc_feature (1)..(1133): Ceres Seq. ID no. 12394768
  misc_feature: MA Experiment ID: 108595 Result: Up-regulated in Transcription
  misc_feature: MA Experiment 108595 PARAMETER Experiment Name: At_Ler-pi_Ovule_cDNA_P Parameter: Plant Line Value: null
  misc_feature: MA Experiment ID: 20000184 Result: Up-regulated in Transcription
  misc_feature: MA Experiment 20000184 PARAMETER Experiment Name: At_Shoots__P Parameter: Age (day) Value: 7
  misc_feature: MA Experiment 20000184 PARAMETER Experiment Name: At_Shoots__P Parameter: Tissue Value: Shoots vs. Whole Plant
  misc_feature: MA Experiment ID: 20000185 Result: Down-regulated in Transcription
  misc_feature: MA Experiment 20000185 PARAMETER Experiment Name: At_Roots__P Parameter: Age (day) Value: 7 vs. 21
  misc_feature: MA Experiment 20000185 PARAMETER Experiment Name: At_Roots__P Parameter: Organism Value: A. thaliana
  misc_feature: MA Experiment 20000185 PARAMETER Experiment Name: At_Roots__P Parameter: Tissue Value: Roots vs. Whole Plant
  misc_feature: MA Experiment ID: 20000265 Result: Up-regulated in Transcription
  misc_feature: MA Experiment 20000265 PARAMETER Experiment Name: At_Open_Flower_P Parameter: Age (day) Value: 21
  misc_feature: MA Experiment 20000265 PARAMETER Experiment Name: At_Open_Flower_P Parameter: Plant Line Value: WS
  misc_feature: MA Experiment 20000265 PARAMETER Experiment Name: At_Open_Flower_P Parameter: Tissue Value: Closed Flower vs. Whole Plant
  misc_feature: MA Experiment ID: 20000286 Result: Up-regulated in Transcription
  misc_feature: MA Experiment 20000286 PARAMETER Experiment Name: At_Open_Flower_P Parameter: Age (day) Value: 21
  misc_feature: MA Experiment 20000286 PARAMETER Experiment Name: At_Open_Flower_P Parameter: Plant Line Value: WS
  misc_feature: MA Experiment 20000286 PARAMETER Experiment Name: At_Open_Flower_P Parameter: Tissue Value: Half Open vs. Whole Plant
  misc_feature: MA Experiment ID: 20000439 Result: Down-regulated in Transcription
  misc_feature: MA Experiment 20000439 PARAMETER Experiment Name: At_Roots__P Parameter: Age (day) Value: 14 vs. 21
  misc_feature: MA Experiment 20000439 PARAMETER Experiment Name: At_Roots__P Parameter: Organism Value: A. thaliana
  misc_feature: MA Experiment 20000439 PARAMETER Experiment Name: At_Roots__P Parameter: Tissue Value: Roots vs. Whole Plant
  misc_feature: MA Experiment ID: 20000495 Result: Up-regulated in Transcription
  misc_feature: MA Experiment 20000495 PARAMETER Experiment Name: At_Guard_Cells_P Parameter: Harvest Date Value: 8/2/2002
  misc_feature: MA Experiment 20000495 PARAMETER Experiment Name: At_Guard_Cells_P Parameter: Organism Value: A. thaliana
  misc_feature: MA Experiment 20000495 PARAMETER Experiment Name: At_Guard_Cells_P Parameter: Tissue Value: Guard Cells vs. Leaves
  misc_feature: MA Experiment ID: 20000573 Result: Up-regulated in Transcription
  misc_feature: MA Experiment 20000573 PARAMETER Experiment Name: At_100uM_ABA_Mutants__P Parameter: Organism Value: A. thaliana
  misc_feature: MA Experiment 20000573 PARAMETER Experiment Name: At_100uM_ABA_Mutants__P Parameter: Plant Line Value: CS22 vs. Ler wt
  misc_feature: MA Experiment 20000573 PARAMETER Experiment Name: At_100uM_ABA_Mutants__P Parameter: Timepoint (hr) Value: N/A
  misc_feature: MA Experiment 20000573 PARAMETER Experiment Name: At_100uM_ABA_Mutants__P Parameter: Tissue Value: Whole Plant
  misc_feature: MA Experiment 20000573 PARAMETER Experiment Name: At_100uM_ABA_Mutants__P Parameter: Treatment Value: None
  misc_feature: MA Experiment ID: 20000794 Result: Down-regulated in Transcription
  misc_feature: MA Experiment 20000794 PARAMETER Experiment Name: At_Petals_P Parameter: Age (day) Value: 23-25 days
  misc_feature: MA Experiment 20000794 PARAMETER Experiment Name: At_Petals_P Parameter: Plant Line Value: WS
  misc_feature: MA Experiment 20000794 PARAMETER Experiment Name: At_Petals_P Parameter: Tissue Value: Petals vs. Whole plant
  misc_feature: MA Experiment ID: 20001457 Result: Down-regulated in Transcription
  misc_feature: MA Experiment 20001457 PARAMETER Experiment Name: At_50mM_NH4NO3_L-to-H_P Parameter: Age (day) Value: Undefined
  misc_feature: MA Experiment 20001457 PARAMETER Experiment Name: At_50mM_NH4NO3_L-to-H_P Parameter: Organism Value: Undefined
  misc_feature: MA Experiment 20001457 PARAMETER Experiment Name: At_50mM_NH4NO3_L-to-H_P Parameter: Plant Line Value: Undefined
  misc_feature: MA Experiment 20001457 PARAMETER Experiment Name: At_50mM_NH4NO3_L-to-H_P Parameter: Timepoint (hr) Value: 0.5
  misc_feature: MA Experiment 20001457 PARAMETER Experiment Name: At_50mM_NH4NO3_L-to-H_P Parameter: Tissue Value: Siliques
  misc_feature: MA Experiment 20001457 PARAMETER Experiment Name: At_50mM_NH4NO3_L-to-H_P Parameter: Treatment Value: 50mM NH4NO3 vs. 100mM Manitol
  misc_feature: MA Experiment ID: 20001560 Result: Up-regulated in Transcription
  misc_feature: MA Experiment 20001560 PARAMETER Experiment Name: At_Drought_Soil_Dry_P Parameter: Age (day) Value: 28
  misc_feature: MA Experiment 20001560 PARAMETER Experiment Name: At_Drought_Soil_Dry_P Parameter: Organism Value: A. thaliana
  misc_feature: MA Experiment 20001560 PARAMETER Experiment Name: At_Drought_Soil_Dry_P Parameter: Plant Line Value: WS
  misc_feature: MA Experiment 20001560 PARAMETER Experiment Name: At_Drought_Soil_Dry_P Parameter: Post Timepoint (hr) Value: None
  misc_feature: MA Experiment 20001560 PARAMETER Experiment Name: At_Drought_Soil_Dry_P Parameter: Post-Treatment Value: None
  misc_feature: MA Experiment 20001560 PARAMETER Experiment Name: At_Drought_Soil_Dry_P Parameter: Timepoint (day) Value: 14
  misc_feature: MA Experiment 20001560 PARAMETER Experiment Name: At_Drought_Soil_Dry_P Parameter: Treatment Value: Drought vs. No Drought
  misc_feature: MA Experiment ID: 20001906 Result: Up-regulated in Transcription
  misc_feature: MA Experiment 20001906 PARAMETER Experiment Name: At_Drought_Reproduction_P Parameter: Age (day) Value: 35
  misc_feature: MA Experiment 20001906 PARAMETER Experiment Name: At_Drought_Reproduction_P Parameter: Organism Value: A. thaliana
  misc_feature: MA Experiment 20001906 PARAMETER Experiment Name: At_Drought_Reproduction_P Parameter: Plant Line Value: WS
  misc_feature: MA Experiment 20001906 PARAMETER Experiment Name: At_Drought_Reproduction_P Parameter: Timepoint (day) Value: 5
  misc_feature: MA Experiment 20001906 PARAMETER Experiment Name: At_Drought_Reproduction_P Parameter: Tissue Value: Siliques
  misc_feature: MA Experiment 20001906 PARAMETER Experiment Name: At_Drought_Reproduction_P Parameter: Treatment Value: Drought vs. No Drought
  misc_feature: MA Experiment ID: 20001910 Result: Down-regulated in Transcription
  misc_feature: MA Experiment 20001910 PARAMETER Experiment Name: At_Drought_Reproduction_P Parameter: Age (day) Value: 37
  misc_feature: MA Experiment 20001910 PARAMETER Experiment Name: At_Drought_Reproduction_P Parameter: Organism Value: A. thaliana
  misc_feature: MA Experiment 20001910 PARAMETER Experiment Name: At_Drought_Reproduction_P Parameter: Plant Line Value: WS
  misc_feature: MA Experiment 20001910 PARAMETER Experiment Name: At_Drought_Reproduction_P Parameter: Timepoint (day) Value: 7
  misc_feature: MA Experiment 20001910 PARAMETER Experiment Name: At_Drought_Reproduction_P Parameter: Tissue Value: Flowers
  misc_feature: MA Experiment 20001910 PARAMETER Experiment Name: At_Drought_Reproduction_P Parameter: Treatment Value: Drought vs. No Drought
aatgcaacaagagtttcattgaaaatttcaagaaccctagttaataacgataatgggttcgagagttttggcttccttctttgttttcttaatcttcacggtcatcacattgcctcccacgatccaagcttgcactccttgtactcgtcctcatcctccggttccgaaacctccacaacacggcggtggtggaggtggtggtagcaagccgcctccacatcacggtggaaaaggtggtggtaaacccccaccccacggtggaaaaggtggaggaccgccgcatcatggtggaggaggaggaggaggagggaaatcaccgccggttgttagacctcctcccgtagtggtgaggccaccgccaatcataagacctcctccggtcgtctatccaccaccaattgtgaggccaccgccaatcacaagacctcccatcataatccctccaattcaaccaccgccggttacaactcctccgggactcctccctccgatcacaactcctccgggactcctccctccagtcacaactcctccgggacttctccctccagtcacaactcctccaggacttctccctccaatcattaacccacctccggtcacagtcccaccaccatcgtccggctatccaccatatggtccaccttccggtggaggaggaggaggcggcggcaaacaaccaacgtgtccgatcaatgcattgaagcttggagcctgtgttgatgttttgggaggattgatccatataggacttggaaatccggtggagaatgtgtgttgtccagtgttacaagggttacttgagctagaagcagccgtttgtctttgcacaaccataagacttaagcttctcaacttaaacatcttcattcctcttgcacttcaagctcttatcacttgtgggatcaatcctccttctggttttgtctgccctcctctcacttgatctaaaaacatccccttgatttaacaaatgtacgtatgatcaagggtggttttcgaggcttttgtaataattcaaatatatatgtggtacttttgattatcaggtttgttgattatctagggttttaattaacaagtgttgttttctgttattgtcgttgttgttataattaagctagggtttttgc

SEQ ID NO: 23630 - protein, 297 aa, Arabidopsis thaliana
  peptide (1)..(297): Ceres Seq. ID no. 12394769
  misc_feature (212)..(293): Pfam Name: Protease inhibitor/seed storage/LTP family Pfam Description: Protease inhibitor/seed storage/LTP family
  misc_feature (21)..(294): Homolog of NCBI NO: 19521 NR Description: proline rich protein [Lycopersicon esculentum]
  misc_feature (20)..(294): Homolog of NCBI NO: 7446486 NR Description: hypothetical protein - carrot
  misc_feature (34)..(294): Homolog of NCBI NO: 7446483 NR Description: probable cell wall protein - garden pea
  misc_feature (1)..(294): Homolog of NCBI NO: 7446488 NR Description: cytokinin-induced proline rich protein - southern
  misc_feature (21)..(294): Homolog of NCBI NO: 1076501 NR Description: cell wall protein - alfalfa
  misc_feature (21)..(294): Homolog of NCBI NO: 1709767 NR Description: 36.4 KD PROLINE-RICH PROTEIN
  misc_feature (19)..(294): Homolog of NCBI NO: 7446482 NR Description: probable cell wall-plasma membrane linker protein
  misc_feature (21)..(294): Homolog of NCBI NO: 15022163 NR Description: putative proline-rich protein [Solanum brevidens]
  misc_feature (21)..(294): Homolog of NCBI NO: 11994732 NR Description: contains similarity to cell wall-plasma membrane
  misc_feature (1)..(297): Homolog of NCBI NO: 15221483 NR Description: putative proline-rich cell wall protein
MGSRVLASFFVFLIFTVITLPPTIQACTPCTRPHPPVPKPPQHGGGGGGGSKPPPHHGGKGGGKPPPHGGKGGGPPHHGGGGGGGGKSPPVVRPPPVVVRPPPIIRPPPVVYPPPIVRPPPITRPPIIIPPIQPPPVTTPPGLLPPITTPPGLLPPVTTPPGLLPPVTTPPGLLPPIINPPPVTVPPPSSGYPPYGPPSGGGGGGGGKQPTCPINALKLGACVDVLGGLIHIGLGNPVENVCCPVLQGLLELEAAVCLCTTIRLKLLNLNIFIPLALQALITCGINPPSGFVCPPLT

SEQ ID NO: 23631 - DNA, 1180 bp, Arabidopsis thaliana
  misc_feature (1)..(1180): Ceres Seq. ID no. 12330478
  misc_feature: MA Experiment ID: 20000495 Result: Down-regulated in Transcription
  misc_feature: MA Experiment 20000495 PARAMETER Experiment Name: At_Guard_Cells_P Parameter: Harvest Date Value: 8/2/2002
  misc_feature: MA Experiment 20000495 PARAMETER Experiment Name: At_Guard_Cells_P Parameter: Organism Value: A. thaliana
  misc_feature: MA Experiment 20000495 PARAMETER Experiment Name: At_Guard_Cells_P Parameter: Tissue Value: Guard Cells vs. Leaves
accactatgagaggatcctagggttactactaatctcgaaatcaatcaaatcaaagcatccatttttgattcagacttcagagagacagagaaggaagaagaagaagaagaagaagaaaaaactatggagaatgagagggaaaagcaggtttacttggctaagctctccgagcaaaccgaaagatacgatgaaatggtggaggcgatgaagaaagttgctcagcttgatgtggagctaactgtggaagagaggaatcttgtatctgtagggtacaagaatgtgattggtgcaaggagagcatcatggagaatactatcttccattgagcagaaggaagagtccaagggaaatgatgaaaatgtcaagaggcttaagaattatcgtaagagagttgaagatgagcttgctaaagtttgtaatgacatcttgtctgtcattgataagcatctcattccatcgtctaacgctgtggagtcaactgtctttttctacaaaatgaaaggagattactatcgctatcttgcggagttcagttctggtgctgaacgcaaggaagctgcagatcagtctcttgaagcatataaggctgctgttgctgctgcagagaatggtttggcacccacacatccagttagacttggcttggcgttgaacttttcagttttctactatgagatcttgaactctcccgaaagcgcatgccaattggctaagcaagcattcgatgatgcaattgctgaacttgacagcctcaacgaggaatcatacaaagacagcactcttattatgcagctacttagagacaatctcaccttgtggacttcagaccttaatgaggaaggagatgagagaaccaaaggtgctgatgagcctcaagatgagaactaaatcctctgtgagaagagaaacgactcttgctgcatcctgaatcttgaagtgaagacagtaagtgtcgttgtttgttactcgaatgtgtaatttttaatctatgtctttcttgatggtgttttccagattcttgaacttttcacaacacaacactgcgttgcgtatcttcaaccctcttatgatgtggttgaattctgttttacgcttagtttgcttcttttgttgttgaattgagccagcaggcatgatttgggtttttgtttatcagaatattaggcgtatcatggtctc

SEQ ID NO: 23632 - protein, 254 aa, Arabidopsis thaliana
  peptide (1)..(254): Ceres Seq. ID no. 12330479
  misc_feature (5)..(240): Pfam Name: 14-3-3 protein Pfam Description: 14-3-3 protein
  misc_feature (5)..(240): Pfam Name: 14-3-3 protein Pfam Description: 14-3-3 protein
  misc_feature (5)..(240): Pfam Name: 14-3-3 protein Pfam Description: 14-3-3 protein
  misc_feature (1)..(240): Homolog of NCBI NO: 18399427 NR Description: 14-3-3 protein GF14 omicron (grf11)
  misc_feature (1)..(254): Homolog of NCBI NO: 2492490 NR Description: 14-3-3-LIKE PROTEIN
  misc_feature (1)..(254): Homolog of NCBI NO: 3925703 NR Description: 14-3-3 protein [Lycopersicon esculentum]
  misc_feature (1)..(240): Homolog of NCBI NO: 18399427 NR Description: 14-3-3 protein GF14 omicron (grf11)
  misc_feature (1)..(254): Homolog of NCBI NO: 3925703 NR Description: 14-3-3 protein [Lycopersicon esculentum]
  misc_feature (1)..(253): Homolog of NCBI NO: 30687814 NR Description: 14-3-3 protein GF14 epsilon (grf10) [Arabidopsis
  misc_feature (1)..(254): Homolog of NCBI NO: 2492490 NR Description: 14-3-3-LIKE PROTEIN
  misc_feature (1)..(254): Homolog of NCBI NO: 18395103 NR Description: 14-3-3 protein GF14 epsilon (grf10)
  misc_feature (1)..(253): Homolog of NCBI NO: 30687814 NR Description: 14-3-3 protein GF14 epsilon (grf10) [Arabidopsis
  misc_feature (1)..(254): Homolog of NCBI NO: 26454609 NR Description: 14-3-3 protein 7
  misc_feature (1)..(254): Homolog of NCBI NO: 3925703 NR Description: 14-3-3 protein [Lycopersicon esculentum]
  misc_feature (1)..(240): Homolog of NCBI NO: 18399427 NR Description: 14-3-3 protein GF14 omicron (grf11)
  misc_feature (1)..(254): Homolog of NCBI NO: 18395103 NR Description: 14-3-3 protein GF14 epsilon (grf10)
  misc_feature (1)..(254): Homolog of NCBI NO: 26454609 NR Description: 14-3-3 protein 7
  misc_feature (1)..(254): Homolog of NCBI NO: 2492490 NR Description: 14-3-3-LIKE PROTEIN
  misc_feature (1)..(254): Homolog of NCBI NO: 26454609 NR Description: 14-3-3 protein 7
  misc_feature (1)..(253): Homolog of NCBI NO: 30687814 NR Description: 14-3-3 protein GF14 epsilon (grf10) [Arabidopsis
  misc_feature (1)..(254): Homolog of NCBI NO: 18395103 NR Description: 14-3-3 protein GF14 epsilon (grf10)
MENEREKQVYLAKLSEQTERYDEMVEAMKKVAQLDVELTVEERNLVSVGYKNVIGARRASWRILSSIEQKEESKGNDENVKRLKNYRKRVEDELAKVCNDILSVIDKHLIPSSNAVESTVFFYKMKGDYYRYLAEFSSGAERKEAADQSLEAYKAAVAAAENGLAPTHPVRLGLALNFSVFYYEILNSPESACQLAKQAFDDAIAELDSLNEESYKDSTLIMQLLRDNLTLWTSDLNEEGDERTKGADEPQDEN

SEQ ID NO: 23633 - protein, 231 aa, Arabidopsis thaliana
  peptide (1)..(231): Ceres Seq. ID no. 12330480
  misc_feature (1)..(217): Pfam Name: 14-3-3 protein Pfam Description: 14-3-3 protein
  misc_feature (1)..(217): Pfam Name: 14-3-3 protein Pfam Description: 14-3-3 protein
  misc_feature (1)..(217): Pfam Name: 14-3-3 protein Pfam Description: 14-3-3 protein
  misc_feature (1)..(217): Homolog of NCBI NO: 18399427 NR Description: 14-3-3 protein GF14 omicron (grf11)
  misc_feature (1)..(231): Homolog of NCBI NO: 2492490 NR Description: 14-3-3-LIKE PROTEIN
  misc_feature (1)..(231): Homolog of NCBI NO: 3925703 NR Description: 14-3-3 protein [Lycopersicon esculentum]
  misc_feature (1)..(217): Homolog of NCBI NO: 18399427 NR Description: 14-3-3 protein GF14 omicron (grf11)
  misc_feature (1)..(231): Homolog of NCBI NO: 3925703 NR Description: 14-3-3 protein [Lycopersicon esculentum]
  misc_feature (1)..(230): Homolog of NCBI NO: 30687814 NR Description: 14-3-3 protein GF14 epsilon (grf10) [Arabidopsis
  misc_feature (1)..(231): Homolog of NCBI NO: 2492490 NR Description: 14-3-3-LIKE PROTEIN
  misc_feature (1)..(231): Homolog of NCBI NO: 18395103 NR Description: 14-3-3 protein GF14 epsilon (grf10)
  misc_feature (1)..(230): Homolog of NCBI NO: 30687814 NR Description: 14-3-3 protein GF14 epsilon (grf10) [Arabidopsis
  misc_feature (1)..(231): Homolog of NCBI NO: 26454609 NR Description: 14-3-3 protein 7
  misc_feature (1)..(231): Homolog of NCBI NO: 3925703 NR Description: 14-3-3 protein [Lycopersicon esculentum]
  misc_feature (1)..(217): Homolog of NCBI NO: 18399427 NR Description: 14-3-3 protein GF14 omicron (grf11)
  misc_feature (1)..(231): Homolog of NCBI NO: 18395103 NR Description: 14-3-3 protein GF14 epsilon (grf10)
  misc_feature (1)..(231): Homolog of NCBI NO: 26454609 NR Description: 14-3-3 protein 7
  misc_feature (1)..(231): Homolog of NCBI NO: 2492490 NR Description: 14-3-3-LIKE PROTEIN
  misc_feature (1)..(231): Homolog of NCBI NO: 26454609 NR Description: 14-3-3 protein 7
  misc_feature (1)..(230): Homolog of NCBI NO: 30687814 NR Description: 14-3-3 protein GF14 epsilon (grf10) [Arabidopsis
  misc_feature (1)..(231): Homolog of NCBI NO: 18395103 NR Description: 14-3-3 protein GF14 epsilon (grf10)
MVEAMKKVAQLDVELTVEERNLVSVGYKNVIGARRASWRILSSIEQKEESKGNDENVKRLKNYRKRVEDELAKVCNDILSVIDKHLIPSSNAVESTVFFYKMKGDYYRYLAEFSSGAERKEAADQSLEAYKAAVAAAENGLAPTHPVRLGLALNFSVFYYEILNSPESACQLAKQAFDDAIAELDSLNEESYKDSTLIMQLLRDNLTLWTSDLNEEGDERTKGADEPQDEN

SEQ ID NO: 23634 - protein, 227 aa, Arabidopsis thaliana
  peptide (1)..(227): Ceres Seq. ID no. 12330481
  misc_feature (1)..(213): Pfam Name: 14-3-3 protein Pfam Description: 14-3-3 protein
  misc_feature (1)..(213): Pfam Name: 14-3-3 protein Pfam Description: 14-3-3 protein
  misc_feature (1)..(213): Pfam Name: 14-3-3 protein Pfam Description: 14-3-3 protein
  misc_feature (1)..(213): Homolog of NCBI NO: 18399427 NR Description: 14-3-3 protein GF14 omicron (grf11)
  misc_feature (1)..(227): Homolog of NCBI NO: 2492490 NR Description: 14-3-3-LIKE PROTEIN
  misc_feature (1)..(227): Homolog of NCBI NO: 3925703 NR Description: 14-3-3 protein [Lycopersicon esculentum]
  misc_feature (1)..(213): Homolog of NCBI NO: 18399427 NR Description: 14-3-3 protein GF14 omicron (grf11)
  misc_feature (1)..(227): Homolog of NCBI NO: 3925703 NR Description: 14-3-3 protein [Lycopersicon esculentum]
  misc_feature (1)..(226): Homolog of NCBI NO: 30687814 NR Description: 14-3-3 protein GF14 epsilon (grf10) [Arabidopsis
  misc_feature (1)..(227): Homolog of NCBI NO: 2492490 NR Description: 14-3-3-LIKE PROTEIN
  misc_feature (1)..(227): Homolog of NCBI NO: 18395103 NR Description: 14-3-3 protein GF14 epsilon (grf10)
  misc_feature (1)..(226): Homolog of NCBI NO: 30687814 NR Description: 14-3-3 protein GF14 epsilon (grf10) [Arabidopsis
  misc_feature (1)..(227): Homolog of NCBI NO: 26454609 NR Description: 14-3-3 protein 7
  misc_feature (1)..(227): Homolog of NCBI NO: 3925703 NR Description: 14-3-3 protein [Lycopersicon esculentum]
  misc_feature (1)..(213): Homolog of NCBI NO: 18399427 NR Description: 14-3-3 protein GF14 omicron (grf11)
  misc_feature (1)..(227): Homolog of NCBI NO: 18395103 NR Description: 14-3-3 protein GF14 epsilon (grf10)
  misc_feature (1)..(227): Homolog of NCBI NO: 26454609 NR Description: 14-3-3 protein 7
  misc_feature (1)..(227): Homolog of NCBI NO: 2492490 NR Description: 14-3-3-LIKE PROTEIN
  misc_feature (1)..(227): Homolog of NCBI NO: 26454609 NR Description: 14-3-3 protein 7
  misc_feature (1)..(226): Homolog of NCBI NO: 30687814 NR Description: 14-3-3 protein GF14 epsilon (grf10) [Arabidopsis
  misc_feature (1)..(227): Homolog of NCBI NO: 18395103 NR Description: 14-3-3 protein GF14 epsilon (grf10)
MKKVAQLDVELTVEERNLVSVGYKNVIGARRASWRILSSIEQKEESKGNDENVKRLKNYRKRVEDELAKVCNDILSVIDKHLIPSSNAVESTVFFYKMKGDYYRYLAEFSSGAERKEAADQSLEAYKAAVAAAENGLAPTHPVRLGLALNFSVFYYEILNSPESACQLAKQAFDDAIAELDSLNEESYKDSTLIMQLLRDNLTLWTSDLNEEGDERTKGADEPQDEN

SEQ ID NO: 23635 - DNA, 1670 bp, Arabidopsis thaliana
  misc_feature (1)..(1670): Ceres Seq. ID no. 13576264
  misc_feature: MA Experiment ID: 108434 Result: Up-regulated in Transcription
  misc_feature: MA Experiment 108434 PARAMETER Experiment Name: At_Root_Tips_cDNA_P Parameter: Tissue Value: Root Tips
  misc_feature: MA Experiment ID: 108462 Result: Down-regulated in Transcription
  misc_feature: MA Experiment 108462 PARAMETER Experiment Name: At_Germinating_Seeds_cDNA_P Parameter: Age (day) Value: 2 vs. 0
  misc_feature: MA Experiment 108462 PARAMETER Experiment Name: At_Germinating_Seeds_cDNA_P Parameter: Tissue Value: Germinating Seeds
  misc_feature: MA Experiment ID: 108463 Result: Down-regulated in Transcription
  misc_feature: MA Experiment 108463 PARAMETER Experiment Name: At_Germinating_Seeds_cDNA_P Parameter: Age (day) Value: 3 vs. 0
  misc_feature: MA Experiment 108463 PARAMETER Experiment Name: At_Germinating_Seeds_cDNA_P Parameter: Tissue Value: Germinating Seeds
  misc_feature: MA Experiment ID: 108464 Result: Down-regulated in Transcription
  misc_feature: MA Experiment 108464 PARAMETER Experiment Name: At_Germinating_Seeds_cDNA_P Parameter: Age (day) Value: 4 vs. 0
  misc_feature: MA Experiment 108464 PARAMETER Experiment Name: At_Germinating_Seeds_cDNA_P Parameter: Tissue Value: Germinating Seeds
  misc_feature: MA Experiment ID: 20000069 Result: Down-regulated in Transcription
  misc_feature: MA Experiment 20000069 PARAMETER Experiment Name: At_100uM_ABA_Mutants_cDNA_P Parameter: Plant Line Value: CS23
  misc_feature: MA Experiment 20000069 PARAMETER Experiment Name: At_100uM_ABA_Mutants_cDNA_P Parameter: Timepoint (hr) Value: 6
  misc_feature: MA Experiment 20000069 PARAMETER Experiment Name: At_100uM_ABA_Mutants_cDNA_P Parameter: Tissue Value: Aerial
  misc_feature: MA Experiment 20000069 PARAMETER Experiment Name: At_100uM_ABA_Mutants_cDNA_P Parameter: Treatment Value: 100uM ABA vs. No Treatment
  misc_feature: MA Experiment ID: 20000070 Result: Down-regulated in Transcription
  misc_feature: MA Experiment 20000070 PARAMETER Experiment Name: At_100uM_ABA_Mutants_cDNA_P Parameter: Plant Line Value: CS24
  misc_feature: MA Experiment 20000070 PARAMETER Experiment Name: At_100uM_ABA_Mutants_cDNA_P Parameter: Timepoint (hr) Value: 6
  misc_feature: MA Experiment 20000070 PARAMETER Experiment Name: At_100uM_ABA_Mutants_cDNA_P Parameter: Tissue Value: Aerial
  misc_feature: MA Experiment 20000070 PARAMETER Experiment Name: At_100uM_ABA_Mutants_cDNA_P Parameter: Treatment Value: 100uM ABA vs. No Treatment
  misc_feature: MA Experiment ID: 20000113 Result: Down-regulated in Transcription
  misc_feature: MA Experiment 20000113 PARAMETER Experiment Name: At_42deg_Heat_cDNA_P Parameter: Temperature (deg C) Value: 42 vs. 22
  misc_feature: MA Experiment 20000113 PARAMETER Experiment Name: At_42deg_Heat_cDNA_P Parameter: Timepoint (hr) Value: 8
  misc_feature: MA Experiment 20000113 PARAMETER Experiment Name: At_42deg_Heat_cDNA_P Parameter: Tissue Value: Aerial
  misc_feature: MA Experiment ID: 20000117 Result: Down-regulated in Transcription
  misc_feature: MA Experiment 20000117 PARAMETER Experiment Name: At_100uM_ABA_Mutants_cDNA_P Parameter: Plant Line Value: Columbia
  misc_feature: MA Experiment 20000117 PARAMETER Experiment Name: At_100uM_ABA_Mutants_cDNA_P Parameter: Timepoint (hr) Value: 6
  misc_feature: MA Experiment 20000117 PARAMETER Experiment Name: At_100uM_ABA_Mutants_cDNA_P Parameter: Tissue Value: Aerial
  misc_feature: MA Experiment 20000117 PARAMETER Experiment Name: At_100uM_ABA_Mutants_cDNA_P Parameter: Treatment Value: 100uM ABA vs. No Treatment
  misc_feature: MA Experiment ID: 20000173 Result: Down-regulated in Transcription
  misc_feature: MA Experiment 20000173 PARAMETER Experiment Name: At_42deg_Heat_P Parameter: Age (day) Value: 14
  misc_feature: MA Experiment 20000173 PARAMETER Experiment Name: At_42deg_Heat_P Parameter: Organism Value: A. thaliana
  misc_feature: MA Experiment 20000173 PARAMETER Experiment Name: At_42deg_Heat_P Parameter: Plant Line Value: WS
  misc_feature: MA Experiment 20000173 PARAMETER Experiment Name: At_42deg_Heat_P Parameter: Temperature (deg C) Value: 42 vs. 22
  misc_feature: MA Experiment 20000173 PARAMETER Experiment Name: At_42deg_Heat_P Parameter: Timepoint (hr) Value: 6
  misc_feature: MA Experiment 20000173 PARAMETER Experiment Name: At_42deg_Heat_P Parameter: Tissue Value: Aerial
  misc_feature: MA Experiment ID: 20000182 Result: Down-regulated in Transcription
  misc_feature: MA Experiment 20000182 PARAMETER Experiment Name: At_2mM_SA_P Parameter: Age (day) Value: 14
  misc_feature: MA Experiment 20000182 PARAMETER Experiment Name: At_2mM_SA_P Parameter: Organism Value: A. thaliana
  misc_feature: MA Experiment 20000182 PARAMETER Experiment Name: At_2mM_SA_P Parameter: Plant Line Value: WS
  misc_feature: MA Experiment 20000182 PARAMETER Experiment Name: At_2mM_SA_P Parameter: Timepoint (hr) Value: 6
  misc_feature: MA Experiment 20000182 PARAMETER Experiment Name: At_2mM_SA_P Parameter: Tissue Value: Aerial
  misc_feature: MA Experiment 20000182 PARAMETER Experiment Name: At_2mM_SA_P Parameter: Treatment Value: 2mM SA vs. No Treatment
  misc_feature: MA Experiment ID: 20000437 Result: Down-regulated in Transcription
  misc_feature: MA Experiment 20000437 PARAMETER Experiment Name: At_Drought_P Parameter: Age (day) Value: 8
  misc_feature: MA Experiment 20000437 PARAMETER Experiment Name: At_Drought_P Parameter: Organism Value: A. thaliana
  misc_feature: MA Experiment 20000437 PARAMETER Experiment Name: At_Drought_P Parameter: Plant Line Value: WS
  misc_feature: MA Experiment 20000437 PARAMETER Experiment Name: At_Drought_P Parameter: Timepoint (hr) Value: 24
  misc_feature: MA Experiment 20000437 PARAMETER Experiment Name: At_Drought_P Parameter: Tissue Value: Whole Plant
  misc_feature: MA Experiment 20000437 PARAMETER Experiment Name: At_Drought_P Parameter: Treatment Value: Drought vs. No Drought
  misc_feature: MA Experiment ID: 20000438 Result: Up-regulated in Transcription
  misc_feature: MA Experiment 20000438 PARAMETER Experiment Name: At_Shoots__P Parameter: Age (day) Value: 14
  misc_feature: MA Experiment 20000438 PARAMETER Experiment Name: At_Shoots__P Parameter: Tissue Value: Shoots vs. Whole Plant
  misc_feature: MA Experiment ID: 20000439 Result: Down-regulated in Transcription
  misc_feature: MA Experiment 20000439 PARAMETER Experiment Name: At_Roots__P Parameter: Age (day) Value: 14 vs. 21
  misc_feature: MA Experiment 20000439 PARAMETER Experiment Name: At_Roots__P Parameter: Organism Value: A. thaliana
  misc_feature: MA Experiment 20000439 PARAMETER Experiment Name: At_Roots__P Parameter: Tissue Value: Roots vs. Whole Plant
  misc_feature: MA Experiment ID: 20000794 Result: Down-regulated in Transcription
  misc_feature: MA Experiment 20000794 PARAMETER Experiment Name: At_Petals_P Parameter: Age (day) Value: 23-25 days
  misc_feature: MA Experiment 20000794 PARAMETER Experiment Name: At_Petals_P Parameter: Plant Line Value: WS
  misc_feature: MA Experiment 20000794 PARAMETER Experiment Name: At_Petals_P Parameter: Tissue Value: Petals vs. Whole plant
  misc_feature: MA Experiment ID: 20001558 Result: Up-regulated in Transcription
  misc_feature: MA Experiment 20001558 PARAMETER Experiment Name: At_Drought_Soil_Dry_P Parameter: Age (day) Value: 27
  misc_feature: MA Experiment 20001558 PARAMETER Experiment Name: At_Drought_Soil_Dry_P Parameter: Organism Value: A. thaliana
  misc_feature: MA Experiment 20001558 PARAMETER Experiment Name: At_Drought_Soil_Dry_P Parameter: Plant Line Value: WS
  misc_feature: MA Experiment 20001558 PARAMETER Experiment Name: At_Drought_Soil_Dry_P Parameter: Post Timepoint (hr) Value: 6
  misc_feature: MA Experiment 20001558 PARAMETER Experiment Name: At_Drought_Soil_Dry_P Parameter: Post-Treatment Value: Re-Water vs. No Drought
  misc_feature: MA Experiment 20001558 PARAMETER Experiment Name: At_Drought_Soil_Dry_P Parameter: Timepoint (day) Value: 13
  misc_feature: MA Experiment 20001558 PARAMETER Experiment Name: At_Drought_Soil_Dry_P Parameter: Treatment Value: Drought vs. No Drought
  misc_feature: MA Experiment ID: 20001757 Result: Up-regulated in Transcription
  misc_feature: MA Experiment 20001757 PARAMETER Experiment Name: At_50mM_NH4NO3_L-to-H_P Parameter: Timepoint (hr) Value: 6
  misc_feature: MA Experiment 20001757 PARAMETER Experiment Name: At_50mM_NH4NO3_L-to-H_P Parameter: Tissue Value: Leaf
  misc_feature: MA Experiment 20001757 PARAMETER Experiment Name: At_50mM_NH4NO3_L-to-H_P Parameter: Treatment Value: 50mM NH4NO3 vs 100mM Mannitol
  misc_feature: MA Experiment ID: 20001905 Result: Down-regulated in Transcription
  misc_feature: MA Experiment 20001905 PARAMETER Experiment Name: At_Drought_Reproduction_P Parameter: Age (day) Value: 40
  misc_feature: MA Experiment 20001905 PARAMETER Experiment Name: At_Drought_Reproduction_P Parameter: Organism Value: A. thaliana
  misc_feature: MA Experiment 20001905 PARAMETER Experiment Name: At_Drought_Reproduction_P Parameter: Plant Line Value: WS
  misc_feature: MA Experiment 20001905 PARAMETER Experiment Name: At_Drought_Reproduction_P Parameter: Timepoint (day) Value: 10
  misc_feature: MA Experiment 20001905 PARAMETER Experiment Name: At_Drought_Reproduction_P Parameter: Tissue Value: Rosettes
  misc_feature: MA Experiment 20001905 PARAMETER Experiment Name: At_Drought_Reproduction_P Parameter: Treatment Value: Drought vs. No Drought
  misc_feature: MA Experiment ID: 20001911 Result: Down-regulated in Transcription
  misc_feature: MA Experiment 20001911 PARAMETER Experiment Name: At_Drought_Reproduction_P Parameter: Age (day) Value: 40
  misc_feature: MA Experiment 20001911 PARAMETER Experiment Name: At_Drought_Reproduction_P Parameter: Organism Value: A. thaliana
  misc_feature: MA Experiment 20001911 PARAMETER Experiment Name: At_Drought_Reproduction_P Parameter: Plant Line Value: WS
  misc_feature: MA Experiment 20001911 PARAMETER Experiment Name: At_Drought_Reproduction_P Parameter: Timepoint (day) Value: 10
  misc_feature: MA Experiment 20001911 PARAMETER Experiment Name: At_Drought_Reproduction_P Parameter: Tissue Value: Flowers
  misc_feature: MA Experiment 20001911 PARAMETER Experiment Name: At_Drought_Reproduction_P Parameter: Treatment Value: Drought vs. No Drought
cttgtgattcttttccaatttcgtaattttagaaaagctgtagaagatggcgagtgtgtcgtggcgggctgtggctgtagctatggtggtggtgttgctgtcaatgcagtggtttgcagaagggtacccggaagaagatttggtggtgaggctgccaggtcaaccaactgttgggttcaaacaatacgcaggttatgttgatgtcgatgtgaaagctggtcggagtctgttctattactatgtggaggctgtgaaacaacctgactcaaaaccattgaccctttggcttaatggaggtcctggttgttcttcaattgggggaggagctttcactgagttgggtccattttaccccacaggagatggccgtggcctccgagttaactccatgtcttggaacaaagcctcgaacctgctatttgtggagtcaccggctggagtaggatggtcttactctaaccgaagctctgattacaacaccggggacaaatctactgcaaacgatatgcttgtgttcttgttgagatggttcgagaagttcccaaagttgaagtctcgggatctctttcttactggcgaaagctatgcaggacattacatacctcaactggctgatgcgattctcagctacaattcacactcaagtggattcaaattcaacatcaaaggcgttgctattgggaatccacttctgaagcttgacagagacagtccagctacctacgagttcttctggtcgcatggcatgatctctgatgaactaaaactaacaatcacaagccaatgtgactttgatgattacacatttgctagcccccataatgtaagcacggcctgcaatgaagctattagtgaaactgaaaacattatcactgagtatgtcaacaactatgatgttctcctcgatgtatgttatccgtctatcgtccagcaagagctgaggctcaagaaaatggctactaaaatgagcatgggagtggatgtgtgtatgacctatgaaagacggttctactttaatcttccagaggtacaaaaggcgcttcatgcgaaccgtactcatctgccttattcatggtcaatgtgcagcggcgtgttaaactactctgacatcgatgggaacatcgatatgctaccgattctgaagagaattatacagaacaaaactcctgtttggatcttcagtggagatcaagattctgtagttccattcggaggttcaagaactctcgtaagagaacttgctcaagatctcaacttcaagacaacagttccctatggagcctggttccacaaaagccaggttggaggctgggccatagagtatggaaaactactgacgtttgcaacagtgagaggagcggctcatatggtaccgtatgcacagccctcacgagctctacatttgttcagtagctttgtaagtggccggagattacccaacaacacacattcttctactgatgaatgaaagagcagaggtatatcttttgtaagaaaaatgtagtttttgtatttaatttatctgtctcaggccttagattagtagagatagaaacatgtaaaagtttgtgttgtggtttggttggatcttcaagtgtagtttgttttagttatctcaaacgttgacaacaattctctttagtcatgtttatattgaatcgaatttatct

SEQ ID NO: 23636 - protein, 473 aa, Arabidopsis thaliana
  peptide (1)..(473): Ceres Seq. ID no. 13576265
  misc_feature (1)..(464): Homolog of NCBI NO: 25289785 NR Description: probable serine carboxypeptidase II
  misc_feature (9)..(464): Homolog of NCBI NO: 25289793 NR Description: probable serine carboxypeptidase II
  misc_feature (1)..(464): Homolog of NCBI NO: 18396647 NR Description: serine carboxypeptidase -related [Arabidopsis
  misc_feature (9)..(464): Homolog of NCBI NO: 30685740 NR Description: serine carboxypeptidase -related [Arabidopsis
  misc_feature (1)..(467): Homolog of NCBI NO: 15218514 NR Description: serine carboxypeptidase -related [Arabidopsis
  misc_feature (287)..(473): Homolog of NCBI NO: 28393789 NR Description: putative serine carboxypeptidase II [Arabidopsis
  misc_feature (4)..(303): Homolog of NCBI NO: 28393789 NR Description: putative serine carboxypeptidase II [Arabidopsis
  misc_feature (1)..(467): Homolog of NCBI NO: 15238327 NR Description: serine carboxypeptidase -related [Arabidopsis
  misc_feature (4)..(473): Homolog of NCBI NO: 15224454 NR Description: serine carboxypeptidase -related [Arabidopsis
  misc_feature (1)..(473): Homolog of NCBI NO: 15238328 NR Description: serine carboxypeptidase -related [Arabidopsis
  misc_feature (1)..(464): Homolog of NCBI NO: 25289785 NR Description: probable serine carboxypeptidase II
  misc_feature (9)..(464): Homolog of NCBI NO: 25289793 NR Description: probable serine carboxypeptidase II
  misc_feature (1)..(464): Homolog of NCBI NO: 18396647 NR Description: serine carboxypeptidase -related [Arabidopsis
  misc_feature (9)..(464): Homolog of NCBI NO: 30685740 NR Description: serine carboxypeptidase -related [Arabidopsis
  misc_feature (1)..(467): Homolog of NCBI NO: 15218514 NR Description: serine carboxypeptidase -related [Arabidopsis
  misc_feature (287)..(473): Homolog of NCBI NO: 28393789 NR Description: putative serine carboxypeptidase II [Arabidopsis
  misc_feature (4)..(303): Homolog of NCBI NO: 28393789 NR Description: putative serine carboxypeptidase II [Arabidopsis
  misc_feature (1)..(467): Homolog of NCBI NO: 15238327 NR Description: serine carboxypeptidase -related [Arabidopsis
  misc_feature (4)..(473): Homolog of NCBI NO: 15224454 NR Description: serine carboxypeptidase -related [Arabidopsis
  misc_feature (1)..(473): Homolog of NCBI NO: 15238328 NR Description: serine carboxypeptidase -related [Arabidopsis
MASVSWRAVAVAMVVVLLSMQWFAEGYPEEDLVVRLPGQPTVGFKQYAGYVDVDVKAGRSLFYYYVEAVKQPDSKPLTLWLNGGPGCSSIGGGAFTELGPFYPTGDGRGLRVNSMSWNKASNLLFVESPAGVGWSYSNRSSDYNTGDKSTANDMLVFLLRWFEKFPKLKSRDLFLTGESYAGHYIPQLADAILSYNSHSSGFKFNIKGVAIGNPLLKLDRDSPATYEFFWSHGMISDELKLTITSQCDFDDYTFASPHNVSTACNEAISETENIITEYVNNYDVLLDVCYPSIVQQELRLKKMATKMSMGVDVCMTYERRFYFNLPEVQKALHANRTHLPYSWSMCSGVLNYSDIDGNIDMLPILKRIIQNKTPVWIFSGDQDSVVPFGGSRTLVRELAQDLNFKTTVPYGAWFHKSQVGGWAIEYGKLLTFATVRGAAHMVPYAQPSRALHLFSSFVSGRRLPNNTHSSTDE

SEQ ID NO: 23637 - protein, 461 aa, Arabidopsis thaliana
  peptide (1)..(461): Ceres Seq. ID no. 13576266
  misc_feature (1)..(452): Homolog of NCBI NO: 25289785 NR Description: probable serine carboxypeptidase II
  misc_feature (1)..(452): Homolog of NCBI NO: 25289793 NR Description: probable serine carboxypeptidase II
  misc_feature (1)..(452): Homolog of NCBI NO: 18396647 NR Description: serine carboxypeptidase -related [Arabidopsis
  misc_feature (1)..(452): Homolog of NCBI NO: 30685740 NR Description: serine carboxypeptidase -related [Arabidopsis
  misc_feature (1)..(455): Homolog of NCBI NO: 15218514 NR Description: serine carboxypeptidase -related [Arabidopsis
  misc_feature (275)..(461): Homolog of NCBI NO: 28393789 NR Description: putative serine carboxypeptidase II [Arabidopsis
  misc_feature (1)..(291): Homolog of NCBI NO: 28393789 NR Description: putative serine carboxypeptidase II [Arabidopsis
  misc_feature (1)..(455): Homolog of NCBI NO: 15238327 NR Description: serine carboxypeptidase -related [Arabidopsis
  misc_feature (1)..(461): Homolog of NCBI NO: 15224454 NR Description: serine carboxypeptidase -related [Arabidopsis
  misc_feature (1)..(461): Homolog of NCBI NO: 15238328 NR Description: serine carboxypeptidase -related [Arabidopsis
  misc_feature (1)..(452): Homolog of NCBI NO: 25289785 NR Description: probable serine carboxypeptidase II
  misc_feature (1)..(452): Homolog of NCBI NO: 25289793 NR Description: probable serine carboxypeptidase II
  misc_feature (1)..(452): Homolog of NCBI NO: 18396647 NR Description: serine carboxypeptidase -related [Arabidopsis
  misc_feature (1)..(452): Homolog of NCBI NO: 30685740 NR Description: serine carboxypeptidase -related [Arabidopsis
  misc_feature (1)..(455): Homolog of NCBI NO: 15218514 NR Description: serine carboxypeptidase -related [Arabidopsis
  misc_feature (275)..(461): Homolog of NCBI NO: 28393789 NR Description: putative serine carboxypeptidase II [Arabidopsis
  misc_feature (1)..(291): Homolog of NCBI NO: 28393789 NR Description: putative serine carboxypeptidase II [Arabidopsis
  misc_feature (1)..(455): Homolog of NCBI NO: 15238327 NR Description: serine carboxypeptidase -related [Arabidopsis
  misc_feature (1)..(461): Homolog of NCBI NO: 15224454 NR Description: serine carboxypeptidase -related [Arabidopsis
  misc_feature (1)..(461): Homolog of NCBI NO: 15238328 NR Description: serine carboxypeptidase -related [Arabidopsis
MVVVLLSMQWFAEGYPEEDLVVRLPGQPTVGFKQYAGYVDVDVKAGRSLFYYYVEAVKQPDSKPLTLWLNGGPGCSSIGGGAFTELGPFYPTGDGRGLRVNSMSWNKASNLLFVESPAGVGWSYSNRSSDYNTGDKSTANDMLVFLLRWFEKFPKLKSRDLFLTGESYAGHYIPQLADAILSYNSHSSGFKFNIKGVAIGNPLLKLDRDSPATYEFFWSHGMISDELKLTITSQCDFDDYTFASPHNVSTACNEAISETENIITEYVNNYDVLLDVCYPSIVQQELRLKKMATKMSMGVDVCMTYERRFYFNLPEVQKALHANRTHLPYSWSMCSGVLNYSDIDGNIDMLPILKRIIQNKTPVWIFSGDQDSVVPFGGSRTLVRELAQDLNFKTTVPYGAWFHKSQVGGWAIEYGKLLTFATVRGAAHMVPYAQPSRALHLFSSFVSGRRLPNNTHSSTDE

SEQ ID NO: 23638 - protein, 454 aa, Arabidopsis thaliana
  peptide (1)..(454): Ceres Seq. ID no. 13576267
  misc_feature (1)..(445): Homolog of NCBI NO: 25289785 NR Description: probable serine carboxypeptidase II
  misc_feature (1)..(445): Homolog of NCBI NO: 25289793 NR Description: probable serine carboxypeptidase II
  misc_feature (1)..(445): Homolog of NCBI NO: 18396647 NR Description: serine carboxypeptidase -related [Arabidopsis
  misc_feature (1)..(445): Homolog of NCBI NO: 30685740 NR Description: serine carboxypeptidase -related [Arabidopsis
  misc_feature (1)..(448): Homolog of NCBI NO: 15218514 NR Description: serine carboxypeptidase -related [Arabidopsis
  misc_feature (268)..(454): Homolog of NCBI NO: 28393789 NR Description: putative serine carboxypeptidase II [Arabidopsis
  misc_feature (1)..(284): Homolog of NCBI NO: 28393789 NR Description: putative serine carboxypeptidase II [Arabidopsis
  misc_feature (1)..(448): Homolog of NCBI NO: 15238327 NR Description: serine carboxypeptidase -related [Arabidopsis
  misc_feature (1)..(454): Homolog of NCBI NO: 15224454 NR Description: serine carboxypeptidase -related [Arabidopsis
  misc_feature (1)..(454): Homolog of NCBI NO: 15238328 NR Description: serine carboxypeptidase -related [Arabidopsis
  misc_feature (1)..(445): Homolog of NCBI NO: 25289785 NR Description: probable serine carboxypeptidase II
  misc_feature (1)..(445): Homolog of NCBI NO: 25289793 NR Description: probable serine carboxypeptidase II
  misc_feature (1)..(445): Homolog of NCBI NO: 18396647 NR Description: serine carboxypeptidase -related [Arabidopsis
  misc_feature (1)..(445): Homolog of NCBI NO: 30685740 NR Description: serine carboxypeptidase -related [Arabidopsis
  misc_feature (1)..(448): Homolog of NCBI NO: 15218514 NR Description: serine carboxypeptidase -related [Arabidopsis
  misc_feature (268)..(454): Homolog of NCBI NO: 28393789 NR Description: putative serine carboxypeptidase II [Arabidopsis
  misc_feature (1)..(284): Homolog of NCBI NO: 28393789 NR Description: putative serine carboxypeptidase II [Arabidopsis
  misc_feature (1)..(448): Homolog of NCBI NO: 15238327 NR Description: serine carboxypeptidase -related [Arabidopsis
  misc_feature (1)..(454): Homolog of NCBI NO: 15224454 NR Description: serine carboxypeptidase -related [Arabidopsis
  misc_feature (1)..(454): Homolog of NCBI NO: 15238328 NR Description: serine carboxypeptidase -related [Arabidopsis
MQWFAEGYPEEDLVVRLPGQPTVGFKQYAGYVDVDVKAGRSLFYYYVEAVKQPDSKPLTLWLNGGPGCSSIGGGAFTELGPFYPTGDGRGLRVNSMSWNKASNLLFVESPAGVGWSYSNRSSDYNTGDKSTANDMLVFLLRWFEKFPKLKSRDLFLTGESYAGHYIPQLADAILSYNSHSSGFKFNIKGVAIGNPLLKLDRDSPATYEFFWSHGMISDELKLTITSQCDFDDYTFASPHNVSTACNEAISETENIITEYVNNYDVLLDVCYPSIVQQELRLKKMATKMSMGVDVCMTYERRFYFNLPEVQKALHANRTHLPYSWSMCSGVLNYSDIDGNIDMLPILKRIIQNKTPVWIFSGDQDSVVPFGGSRTLVRELAQDLNFKTTVPYGAWFHKSQVGGWAIEYGKLLTFATVRGAAHMVPYAQPSRALHLFSSFVSGRRLPNNTHSSTDE

SEQ ID NO: 23639 - DNA, 783 bp, Arabidopsis thaliana
  misc_feature (1)..(783): Ceres Seq. ID no. 12338191
  misc_feature: MA Experiment ID: 108573 Result: Up-regulated in Transcription
  misc_feature: MA Experiment 108573 PARAMETER Experiment Name: At_Drought_cDNA_P Parameter: Timepoint (hr) Value: 6
  misc_feature: MA Experiment 108573 PARAMETER Experiment Name: At_Drought_cDNA_P Parameter: Tissue Value: Aerial
  misc_feature: MA Experiment 108573 PARAMETER Experiment Name: At_Drought_cDNA_P Parameter: Treatment Value: Drought vs. No Drought
  misc_feature: MA Experiment ID: 108579 Result: Up-regulated in Transcription
  misc_feature: MA Experiment 108579 PARAMETER Experiment Name: At_4deg_Cold_cDNA_P Parameter: Temperature (deg C) Value: 4 vs. 22
  misc_feature: MA Experiment 108579 PARAMETER Experiment Name: At_4deg_Cold_cDNA_P Parameter: Timepoint (hr) Value: 6
  misc_feature: MA Experiment 108579 PARAMETER Experiment Name: At_4deg_Cold_cDNA_P Parameter: Tissue Value: Aerial
  misc_feature: MA Experiment ID: 20000171 Result: Down-regulated in Transcription
  misc_feature: MA Experiment 20000171 PARAMETER Experiment Name: At_42deg_Heat_P Parameter: Age (day) Value: 14
  misc_feature: MA Experiment 20000171 PARAMETER Experiment Name: At_42deg_Heat_P Parameter: Organism Value: A. thaliana
  misc_feature: MA Experiment 20000171 PARAMETER Experiment Name: At_42deg_Heat_P Parameter: Plant Line Value: WS
  misc_feature: MA Experiment 20000171 PARAMETER Experiment Name: At_42deg_Heat_P Parameter: Temperature (deg C) Value: 42 vs. 22
  misc_feature: MA Experiment 20000171 PARAMETER Experiment Name: At_42deg_Heat_P Parameter: Timepoint (hr) Value: 1
  misc_feature: MA Experiment 20000171 PARAMETER Experiment Name: At_42deg_Heat_P Parameter: Tissue Value: Aerial
  misc_feature: MA Experiment ID: 20000184 Result: Up-regulated in Transcription
  misc_feature: MA Experiment 20000184 PARAMETER Experiment Name: At_Shoots__P Parameter: Age (day) Value: 7
  misc_feature: MA Experiment 20000184 PARAMETER Experiment Name: At_Shoots__P Parameter: Tissue Value: Shoots vs. Whole Plant
  misc_feature: MA Experiment ID: 20000185 Result: Down-regulated in Transcription
  misc_feature: MA Experiment 20000185 PARAMETER Experiment Name: At_Roots__P Parameter: Age (day) Value: 7 vs. 21
  misc_feature: MA Experiment 20000185 PARAMETER Experiment Name: At_Roots__P Parameter: Organism Value: A. thaliana
  misc_feature: MA Experiment 20000185 PARAMETER Experiment Name: At_Roots__P Parameter: Tissue Value: Roots vs. Whole Plant
  misc_feature: MA Experiment ID: 20000234 Result: Up-regulated in Transcription
  misc_feature: MA Experiment 20000234 PARAMETER Experiment Name: At_Siliques_P Parameter: Age (day) Value: 21
  misc_feature: MA Experiment 20000234 PARAMETER Experiment Name: At_Siliques_P Parameter: Organism Value: A. thaliana
  misc_feature: MA Experiment 20000234 PARAMETER Experiment Name: At_Siliques_P Parameter: Plant Line Value: WS
  misc_feature: MA Experiment 20000234 PARAMETER Experiment Name: At_Siliques_P Parameter: Tissue Value: Less Than 5mm Siliques vs. Whole Plant
  misc_feature: MA Experiment ID: 20000436 Result: Up-regulated in Transcription
  misc_feature: MA Experiment 20000436 PARAMETER Experiment Name: At_Drought_P Parameter: Age (day) Value: 7
  misc_feature: MA Experiment 20000436 PARAMETER Experiment Name: At_Drought_P Parameter: Organism Value: A. thaliana
  misc_feature: MA Experiment 20000436 PARAMETER Experiment Name: At_Drought_P Parameter: Plant Line Value: WS
  misc_feature: MA Experiment 20000436 PARAMETER Experiment Name: At_Drought_P Parameter: Timepoint (hr) Value: 12
  misc_feature: MA Experiment 20000436 PARAMETER Experiment Name: At_Drought_P Parameter: Tissue Value: Whole Plant
  misc_feature: MA Experiment 20000436 PARAMETER Experiment Name: At_Drought_P Parameter: Treatment Value: Drought vs. No Drought
  misc_feature: MA Experiment ID: 20000438 Result: Up-regulated in Transcription
  misc_feature: MA Experiment 20000438 PARAMETER Experiment Name: At_Shoots__P Parameter: Age (day) Value: 14
  misc_feature: MA Experiment 20000438 PARAMETER Experiment Name: At_Shoots__P Parameter: Tissue Value: Shoots vs. Whole Plant
  misc_feature: MA Experiment ID: 20000439 Result: Down-regulated in Transcription
  misc_feature: MA Experiment 20000439 PARAMETER Experiment Name: At_Roots__P Parameter: Age (day) Value: 14 vs. 21
  misc_feature: MA Experiment 20000439 PARAMETER Experiment Name: At_Roots__P Parameter: Organism Value: A. thaliana
  misc_feature: MA Experiment 20000439 PARAMETER Experiment Name: At_Roots__P Parameter: Tissue Value: Roots vs. Whole Plant
  misc_feature: MA Experiment ID: 20000451 Result: Up-regulated in Transcription
  misc_feature: MA Experiment 20000451 PARAMETER Experiment Name: At_CS6879_Shoots-Roots_P Parameter: Age (day) Value: 14
  misc_feature: MA Experiment 20000451 PARAMETER Experiment Name: At_CS6879_Shoots-Roots_P Parameter: Organism Value: A. thaliana
  misc_feature: MA Experiment 20000451 PARAMETER Experiment Name: At_CS6879_Shoots-Roots_P Parameter: Plant Line Value: CS6879 vs. WS
  misc_feature: MA Experiment 20000451 PARAMETER Experiment Name: At_CS6879_Shoots-Roots_P Parameter: Tissue Value: Roots
  misc_feature: MA Experiment ID: 20000573 Result: Down-regulated in Transcription
  misc_feature: MA Experiment 20000573 PARAMETER Experiment Name: At_100uM_ABA_Mutants__P Parameter: Organism Value: A. thaliana
  misc_feature: MA Experiment 20000573 PARAMETER Experiment Name: At_100uM_ABA_Mutants__P Parameter: Plant Line Value: CS22 vs. Ler wt
  misc_feature: MA Experiment 20000573 PARAMETER Experiment Name: At_100uM_ABA_Mutants__P Parameter: Timepoint (hr) Value: N/A
  misc_feature: MA Experiment 20000573 PARAMETER Experiment Name: At_100uM_ABA_Mutants__P Parameter: Tissue Value: Whole Plant
  misc_feature: MA Experiment 20000573 PARAMETER Experiment Name: At_100uM_ABA_Mutants__P Parameter: Treatment Value: None
  misc_feature: MA Experiment ID: 20001248 Result: Down-regulated in Transcription
  misc_feature: MA Experiment 20001248 PARAMETER Experiment Name: At_Far-red-induction_P Parameter: Age (day) Value: 7
  misc_feature: MA Experiment 20001248 PARAMETER Experiment Name: At_Far-red-induction_P Parameter: Light Value: Far-red vs. White
  misc_feature: MA Experiment 20001248 PARAMETER Experiment Name: At_Far-red-induction_P Parameter: Organism Value: A. thaliana
  misc_feature: MA Experiment 20001248 PARAMETER Experiment Name: At_Far-red-induction_P Parameter: Plant Line Value: Columbia
  misc_feature: MA Experiment 20001248 PARAMETER Experiment Name: At_Far-red-induction_P Parameter: Timepoint (hr) Value: 4
  misc_feature: MA Experiment 20001248 PARAMETER Experiment Name: At_Far-red-induction_P Parameter: Tissue Value: Whole Plant
  misc_feature: MA Experiment ID: 20001557 Result: Up-regulated in Transcription
  misc_feature: MA Experiment 20001557 PARAMETER Experiment Name: At_Drought_Soil_Dry_P Parameter: Age (day) Value: 27
  misc_feature: MA Experiment 20001557 PARAMETER Experiment Name: At_Drought_Soil_Dry_P Parameter: Organism Value: A. thaliana
  misc_feature: MA Experiment 20001557 PARAMETER Experiment Name: At_Drought_Soil_Dry_P Parameter: Plant Line Value: WS
  misc_feature: MA Experiment 20001557 PARAMETER Experiment Name: At_Drought_Soil_Dry_P Parameter: Post Timepoint (hr) Value: 3
  misc_feature: MA Experiment 20001557 PARAMETER Experiment Name: At_Drought_Soil_Dry_P Parameter: Post-Treatment Value: Re-Water vs. No Drought
  misc_feature: MA Experiment 20001557 PARAMETER Experiment Name: At_Drought_Soil_Dry_P Parameter: Timepoint (day) Value: 13
  misc_feature: MA Experiment 20001557 PARAMETER Experiment Name: At_Drought_Soil_Dry_P Parameter: Treatment Value: Drought vs. No Drought
  misc_feature: MA Experiment ID: 20001558 Result: Up-regulated in Transcription
  misc_feature: MA Experiment 20001558 PARAMETER Experiment Name: At_Drought_Soil_Dry_P Parameter: Age (day) Value: 27
  misc_feature: MA Experiment 20001558 PARAMETER Experiment Name: At_Drought_Soil_Dry_P Parameter: Organism Value: A. thaliana
  misc_feature: MA Experiment 20001558 PARAMETER Experiment Name: At_Drought_Soil_Dry_P Parameter: Plant Line Value: WS
  misc_feature: MA Experiment 20001558 PARAMETER Experiment Name: At_Drought_Soil_Dry_P Parameter: Post Timepoint (hr) Value: 6
  misc_feature: MA Experiment 20001558 PARAMETER Experiment Name: At_Drought_Soil_Dry_P Parameter: Post-Treatment Value: Re-Water vs. No Drought
  misc_feature: MA Experiment 20001558 PARAMETER Experiment Name: At_Drought_Soil_Dry_P Parameter: Timepoint (day) Value: 13
  misc_feature: MA Experiment 20001558 PARAMETER Experiment Name: At_Drought_Soil_Dry_P Parameter: Treatment Value: Drought vs. No Drought
  misc_feature: MA Experiment ID: 20001560 Result: Up-regulated in Transcription
  misc_feature: MA Experiment 20001560 PARAMETER Experiment Name: At_Drought_Soil_Dry_P Parameter: Age (day) Value: 28
  misc_feature: MA Experiment 20001560 PARAMETER Experiment Name: At_Drought_Soil_Dry_P Parameter: Organism Value: A. thaliana
  misc_feature: MA Experiment 20001560 PARAMETER Experiment Name: At_Drought_Soil_Dry_P Parameter: Plant Line Value: WS
  misc_feature: MA Experiment 20001560 PARAMETER Experiment Name: At_Drought_Soil_Dry_P Parameter: Post Timepoint (hr) Value: None
  misc_feature: MA Experiment 20001560 PARAMETER Experiment Name: At_Drought_Soil_Dry_P Parameter: Post-Treatment Value: None
  misc_feature: MA Experiment 20001560 PARAMETER Experiment Name: At_Drought_Soil_Dry_P Parameter: Timepoint (day) Value: 14
  misc_feature: MA Experiment 20001560 PARAMETER Experiment Name: At_Drought_Soil_Dry_P Parameter: Treatment Value: Drought vs. No Drought
  misc_feature: MA Experiment ID: 20001904 Result: Up-regulated in Transcription
  misc_feature: MA Experiment 20001904 PARAMETER Experiment Name: At_Drought_Reproduction_P Parameter: Age (day) Value: 37
  misc_feature: MA Experiment 20001904 PARAMETER Experiment Name: At_Drought_Reproduction_P Parameter: Organism Value: A. thaliana
  misc_feature: MA Experiment 20001904 PARAMETER Experiment Name: At_Drought_Reproduction_P Parameter: Plant Line Value: WS
  misc_feature: MA Experiment 20001904 PARAMETER Experiment Name: At_Drought_Reproduction_P Parameter: Timepoint (day) Value: 7
  misc_feature: MA Experiment 20001904 PARAMETER Experiment Name: At_Drought_Reproduction_P Parameter: Tissue Value: Rosettes
  misc_feature: MA Experiment 20001904 PARAMETER Experiment Name: At_Drought_Reproduction_P Parameter: Treatment Value: Drought vs. No Drought
aaaagagtaattgaacaaaagaaagaaaaactgataatgaagggtcttcatctccacctcgtcctagtcaccatgacgatcgttgcctccatcgccgccgctgcaccggctgctcccggaggagctctggctgatgaatgcaaccaggattttcaaaaggtgactttgtgtttggactttgcgaccgggaaggcaacaactccgtctaagaagtgttgtgacgctgttgaagatatcaaagaaagagatccaaagtgtttgtgtttcgttatacaacaagcgaagacaggaggacaagccttgaatgatcttggtgttcaagaagacaaactcattcaactcccaacttcttgtcagctccacaacgctagcattaccaactgtccaaagcttctagggatttcacctagctcgccagacgcagccgtattcacaaacaatgccacaacaacaccggtggcaccagcaggaaagtctccggcaactccagctacgtccacggataagggaggatcagcttcagcaaaggatggtcacgcagtcgttgctctagccgtcgctttgatggccgtctcctttgtcttgaccttgcctagacatgtcacattagggatgtaatcttttcttatgaagttggttggtgcttttgtttttgtcccttttgtttcaaaacttatctttcaagtgtgtttctttgttcggacatttgttgtaatgagtcaacttcccactcaaatctgatatctctccgcaaatgagtaaatttatgctatttcattttcg

SEQ ID NO: 23640 - protein, 205 aa, Arabidopsis thaliana
  peptide (1)..(205): Ceres Seq. ID no. 12338192
  misc_feature (47)..(128): Pfam Name: Protease inhibitor/seed storage/LTP family Pfam Description: Protease inhibitor/seed storage/LTP family
  misc_feature (20)..(196): Homolog of NCBI NO: 38344972 NR Description: OSJNBa0072F16.17 [Oryza sativa (japonica
  misc_feature (16)..(174): Homolog of NCBI NO: 28269449 NR Description: putative protease inhibitor
  misc_feature (23)..(193): Homolog of NCBI NO: 25553595 NR Description: OJ1656_E11.26 [Oryza sativa (japonica
  misc_feature (25)..(194): Homolog of NCBI NO: 25553602 NR Description: OJ1656_E11.34 [Oryza sativa (japonica
  misc_feature (17)..(182): Homolog of NCBI NO: 34394084 NR Description: lipid transfer protein-like
  misc_feature (12)..(195): Homolog of NCBI NO: 25553588 NR Description: OJ1656_E11.14 [Oryza sativa (japonica
  misc_feature (16)..(173): Homolog of NCBI NO: 15224863 NR Description: unknown protein; protein id: At2g44300.1
  misc_feature (23)..(178): Homolog of NCBI NO: 15224862 NR Description: unknown protein; protein id: At2g44290.1
  misc_feature (13)..(205): Homolog of NCBI NO: 15217777 NR Description: lipid transfer protein, putative
  misc_feature (13)..(205): Homolog of NCBI NO: 21553541 NR Description: lipid transfer protein, putative [Arabidopsis
KRVIEQKKEKLIMKGLHLHLVLVTMTIVASIAAAAPAAPGGALADECNQDFQKVTLCLDFATGKATTPSKKCCDAVEDIKERDPKCLCFVIQQAKTGGQALNDLGVQEDKLIQLPTSCQLHNASITNCPKLLGISPSSPDAAVFTNNATTTPVAPAGKSPATPATSTDKGGSASAKDGHAVVALAVALMAVSFVLTLPRHVTLGM

SEQ ID NO: 23641 - protein, 193 aa, Arabidopsis thaliana
  peptide (1)..(193): Ceres Seq. ID no. 12338193
  misc_feature (35)..(116): Pfam Name: Protease inhibitor/seed storage/LTP family Pfam Description: Protease inhibitor/seed storage/LTP family
  misc_feature (8)..(184): Homolog of NCBI NO: 38344972 NR Description: OSJNBa0072F16.17 [Oryza sativa (japonica
  misc_feature (4)..(162): Homolog of NCBI NO: 28269449 NR Description: putative protease inhibitor
  misc_feature (11)..(181): Homolog of NCBI NO: 25553595 NR Description: OJ1656_E11.26 [Oryza sativa (japonica
  misc_feature (13)..(182): Homolog of NCBI NO: 25553602 NR Description: OJ1656_E11.34 [Oryza sativa (japonica
  misc_feature (5)..(170): Homolog of NCBI NO: 34394084 NR Description: lipid transfer protein-like
  misc_feature (1)..(183): Homolog of NCBI NO: 25553588 NR Description: OJ1656_E11.14 [Oryza sativa (japonica
  misc_feature (4)..(161): Homolog of NCBI NO: 15224863 NR Description: unknown protein; protein id: At2g44300.1
  misc_feature (11)..(166): Homolog of NCBI NO: 15224862 NR Description: unknown protein; protein id: At2g44290.1
  misc_feature (1)..(193): Homolog of NCBI NO: 15217777 NR Description: lipid transfer protein, putative
  misc_feature (1)..(193): Homolog of NCBI NO: 21553541 NR Description: lipid transfer protein, putative [Arabidopsis
MKGLHLHLVLVTMTIVASIAAAAPAAPGGALADECNQDFQKVTLCLDFATGKATTPSKKCCDAVEDIKERDPKCLCFVIQQAKTGGQALNDLGVQEDKLIQLPTSCQLHNASITNCPKLLGISPSSPDAAVFTNNATTTPVAPAGKSPATPATSTDKGGSASAKDGHAVVALAVALMAVSFVLTLPRHVTLGM

SEQ ID NO: 23642 - protein, 181 aa, Arabidopsis thaliana
  peptide (1)..(181): Ceres Seq. ID no. 12338194
  misc_feature (23)..(104): Pfam Name: Protease inhibitor/seed storage/LTP family Pfam Description: Protease inhibitor/seed storage/LTP family
  misc_feature (1)..(181): Homolog of NCBI NO: 15217777 NR Description: lipid transfer protein, putative
  misc_feature (1)..(172): Homolog of NCBI NO: 38344972 NR Description: OSJNBa0072F16.17 [Oryza sativa (japonica
  misc_feature (1)..(169): Homolog of NCBI NO: 25553595 NR Description: OJ1656_E11.26 [Oryza sativa (japonica
  misc_feature (1)..(158): Homolog of NCBI NO: 34394084 NR Description: lipid transfer protein-like
  misc_feature (1)..(149): Homolog of NCBI NO: 15224863 NR Description: unknown protein; protein id: At2g44300.1
  misc_feature (1)..(154): Homolog of NCBI NO: 15224862 NR Description: unknown protein; protein id: At2g44290.1
  misc_feature (1)..(171): Homolog of NCBI NO: 25553588 NR Description: OJ1656_E11.14 [Oryza sativa (japonica
  misc_feature (1)..(170): Homolog of NCBI NO: 25553602 NR Description: OJ1656_E11.34 [Oryza sativa (japonica
  misc_feature (1)..(150): Homolog of NCBI NO: 28269449 NR Description: putative protease inhibitor
  misc_feature (1)..(181): Homolog of NCBI NO: 21553541 NR Description: lipid transfer protein, putative [Arabidopsis
MTIVASIAAAAPAAPGGALADECNQDFQKVTLCLDFATGKATTPSKKCCDAVEDIKERDPKCLCFVIQQAKTGGQALNDLGVQEDKLIQLPTSCQLHNASITNCPKLLGISPSSPDAAVFTNNATTTPVAPAGKSPATPATSTDKGGSASAKDGHAVVALAVALMAVSFVLTLPRHVTLGM

SEQ ID NO: 23643 - DNA, 1113 bp, Arabidopsis thaliana
  misc_feature (1)..(1113): Ceres Seq. ID no. 12343579
  misc_feature: MA Experiment ID: 20000185 Result: Down-regulated in Transcription
  misc_feature: MA Experiment 20000185 PARAMETER Experiment Name: At_Roots__P Parameter: Age (day) Value: 7 vs. 21
  misc_feature: MA Experiment 20000185 PARAMETER Experiment Name: At_Roots__P Parameter: Organism Value: A. thaliana
  misc_feature: MA Experiment 20000185 PARAMETER Experiment Name: At_Roots__P Parameter: Tissue Value: Roots vs. Whole Plant
  misc_feature: MA Experiment ID: 20000227 Result: Down-regulated in Transcription
  misc_feature: MA Experiment 20000227 PARAMETER Experiment Name: At_Root-Tips-vs-Tops_P Parameter: Tissue Value: Root Tips vs. Root Tops
  misc_feature: MA Experiment ID: 20000264 Result: Down-regulated in Transcription
  misc_feature: MA Experiment 20000264 PARAMETER Experiment Name: At_Open_Flower_P Parameter: Age (day) Value: 21
  misc_feature: MA Experiment 20000264 PARAMETER Experiment Name: At_Open_Flower_P Parameter: Plant Line Value: WS
  misc_feature: MA Experiment 20000264 PARAMETER Experiment Name: At_Open_Flower_P Parameter: Tissue Value: Open Flower vs. Whole Plant
  misc_feature: MA Experiment ID: 20000269 Result: Down-regulated in Transcription
  misc_feature: MA Experiment 20000269 PARAMETER Experiment Name: At_1mM_KNO3_L-vs-H_Roots_P Parameter: Age (day) Value: 7,10,12
  misc_feature: MA Experiment 20000269 PARAMETER Experiment Name: At_1mM_KNO3_L-vs-H_Roots_P Parameter: Organism Value: A. thaliana
  misc_feature: MA Experiment 20000269 PARAMETER Experiment Name: At_1mM_KNO3_L-vs-H_Roots_P Parameter: Plant Line Value: WS
  misc_feature: MA Experiment 20000269 PARAMETER Experiment Name: At_1mM_KNO3_L-vs-H_Roots_P Parameter: Timepoint (day) Value: 7,10,12
  misc_feature: MA Experiment 20000269 PARAMETER Experiment Name: At_1mM_KNO3_L-vs-H_Roots_P Parameter: Tissue Value: Roots
  misc_feature: MA Experiment 20000269 PARAMETER Experiment Name: At_1mM_KNO3_L-vs-H_Roots_P Parameter: Treatment Value: 1mM KNO3 vs. 50mM KNO3
  misc_feature: MA Experiment ID: 20000439 Result: Down-regulated in Transcription
  misc_feature: MA Experiment 20000439 PARAMETER Experiment Name: At_Roots__P Parameter: Age (day) Value: 14 vs. 21
  misc_feature: MA Experiment 20000439 PARAMETER Experiment Name: At_Roots__P Parameter: Organism Value: A. thaliana
  misc_feature: MA Experiment 20000439 PARAMETER Experiment Name: At_Roots__P Parameter: Tissue Value: Roots vs. Whole Plant
  misc_feature: MA Experiment ID: 20000794 Result: Down-regulated in Transcription
  misc_feature: MA Experiment 20000794 PARAMETER Experiment Name: At_Petals_P Parameter: Age (day) Value: 23-25 days
  misc_feature: MA Experiment 20000794 PARAMETER Experiment Name: At_Petals_P Parameter: Plant Line Value: WS
  misc_feature: MA Experiment 20000794 PARAMETER Experiment Name: At_Petals_P Parameter: Tissue Value: Petals vs. Whole plant
  misc_feature: MA Experiment ID: 20001904 Result: Down-regulated in Transcription
  misc_feature: MA Experiment 20001904 PARAMETER Experiment Name: At_Drought_Reproduction_P Parameter: Age (day) Value: 37
  misc_feature: MA Experiment 20001904 PARAMETER Experiment Name: At_Drought_Reproduction_P Parameter: Organism Value: A. thaliana
  misc_feature: MA Experiment 20001904 PARAMETER Experiment Name: At_Drought_Reproduction_P Parameter: Plant Line Value: WS
  misc_feature: MA Experiment 20001904 PARAMETER Experiment Name: At_Drought_Reproduction_P Parameter: Timepoint (day) Value: 7
  misc_feature: MA Experiment 20001904 PARAMETER Experiment Name: At_Drought_Reproduction_P Parameter: Tissue Value: Rosettes
  misc_feature: MA Experiment 20001904 PARAMETER Experiment Name: At_Drought_Reproduction_P Parameter: Treatment Value: Drought vs. No Drought
  misc_feature: MA Experiment ID: 20001905 Result: Down-regulated in Transcription
  misc_feature: MA Experiment 20001905 PARAMETER Experiment Name: At_Drought_Reproduction_P Parameter: Age (day) Value: 40
  misc_feature: MA Experiment 20001905 PARAMETER Experiment Name: At_Drought_Reproduction_P Parameter: Organism Value: A. thaliana
  misc_feature: MA Experiment 20001905 PARAMETER Experiment Name: At_Drought_Reproduction_P Parameter: Plant Line Value: WS
  misc_feature: MA Experiment 20001905 PARAMETER Experiment Name: At_Drought_Reproduction_P Parameter: Timepoint (day) Value: 10
  misc_feature: MA Experiment 20001905 PARAMETER Experiment Name: At_Drought_Reproduction_P Parameter: Tissue Value: Rosettes
  misc_feature: MA Experiment 20001905 PARAMETER Experiment Name: At_Drought_Reproduction_P Parameter: Treatment Value: Drought vs. No Drought
aaaaaagaaaaaaaaactcagagcagaggagatcgagagagacaaagagagacaaagagagagagagagagagagagagagagagagagagagagatcttcaacaagcaatgtctatatccatggcgttattctctccgccgatctcttcctcacttcaaaaccctaatctcatccccaagatctcaacctctcttctctccaccaaacgtttctctctaatctccgtccctagagcttcctccgacaatggtacgacttcccccgtcgtgaaaattccgaagcctgcgtctgtagctgtagaggaagttccggttaaatctccggcggaaagctcctccgcttctgaaaacggcgccgttggaggtgaagcgactgattcgagtactgagacggtaatcaaatatcaaaatgcgaagtgggttaatggaacttgggatctgaaacagttcgagaaagatggcaaaactgattgggattctgttatcgtttctgaggcaaagaggagaaaatggcttgaagataacccggaaacaacgagtaacgacgagcttgttgtcttcgatacttcgattattccatggtgggcatggatgaagagataccatctacctgaagctgaacttctcaatggtcgtgctgcgatgatagggttcttcatggcttactttgttgatagtcttaccggagtaggacttgttgatcaaatggggaatttcttctgcaaaacactcttgtttgtggctgtagctggagttctcttcatccgtaagaatgaagatttagacaaacttaaggatctgttcgatgagactacgttatatgacaaacaatggcaagctgcatggaaagagccagattcatcaacagtttcttcaaagaagtgaacaagttcttacaatctttcattttcctttttttgttatgcaataatctgtgaatcagtgaaagtttatctctactgaactactgatcttcagattttgtaatctttctgctttaaaaatctctatgaagtagtctcaaagataatgtatcgaaggtctttgacttgtaaagcagacctatttcgttttgacgcttgataatttaatcaataagagatttttttttt

SEQ ID NO: 23644 - protein, 294 aa, Arabidopsis thaliana
  peptide (1)..(294): Ceres Seq. ID no. 12343580
  misc_feature (41)..(294): Homolog of NCBI NO: 18414927 NR Description: Lil3 protein
  misc_feature (41)..(294): Homolog of NCBI NO: 7485188 NR Description: hypothetical protein - Arabidopsis thaliana
  misc_feature (41)..(294): Homolog of NCBI NO: 21555799 NR Description: Lil3 protein [Arabidopsis thaliana]
  misc_feature (41)..(294): Homolog of NCBI NO: 8978078 NR Description: Lil3 protein [Arabidopsis thaliana]
  misc_feature (37)..(294): Homolog of NCBI NO: 30695110 NR Description: Lil3 protein [Arabidopsis thaliana]
KKKKKLRAEEIERDKERQRERERERERERERDLQQAMSISMALFSPPISSSLQNPNLIPKISTSLLSTKRFSLISVPRASSDNGTTSPVVKIPKPASVAVEEVPVKSPAESSSASENGAVGGEATDSSTETVIKYQNAKWVNGTWDLKQFEKDGKTDWDSVIVSEAKRRKWLEDNPETTSNDELVVFDTSIIPWWAWMKRYHLPEAELLNGRAAMIGFFMAYFVDSLTGVGLVDQMGNFFCKTLLFVAVAGVLFIRKNEDLDKLKDLFDETTLYDKQWQAAWKEPDSSTVSSKK

SEQ ID NO: 23645 - protein, 258 aa, Arabidopsis thaliana
  peptide (1)..(258): Ceres Seq. ID no. 12343581
  misc_feature (5)..(258): Homolog of NCBI NO: 18414927 NR Description: Lil3 protein
  misc_feature (5)..(258): Homolog of NCBI NO: 7485188 NR Description: hypothetical protein - Arabidopsis thaliana
  misc_feature (5)..(258): Homolog of NCBI NO: 21555799 NR Description: Lil3 protein [Arabidopsis thaliana]
  misc_feature (5)..(258): Homolog of NCBI NO: 8978078 NR Description: Lil3 protein [Arabidopsis thaliana]
  misc_feature (1)..(258): Homolog of NCBI NO: 30695110 NR Description: Lil3 protein [Arabidopsis thaliana]
MSISMALFSPPISSSLQNPNLIPKISTSLLSTKRFSLISVPRASSDNGTTSPVVKIPKPASVAVEEVPVKSPAESSSASENGAVGGEATDSSTETVIKYQNAKWVNGTWDLKQFEKDGKTDWDSVIVSEAKRRKWLEDNPETTSNDELVVFDTSIIPWWAWMKRYHLPEAELLNGRAAMIGFFMAYFVDSLTGVGLVDQMGNFFCKTLLFVAVAGVLFIRKNEDLDKLKDLFDETTLYDKQWQAAWKEPDSSTVSSKK

SEQ ID NO: 23646 - protein, 254 aa, Arabidopsis thaliana
  peptide (1)..(254): Ceres Seq. ID no. 12343582
  misc_feature (1)..(254): Homolog of NCBI NO: 18414927 NR Description: Lil3 protein
  misc_feature (1)..(254): Homolog of NCBI NO: 7485188 NR Description: hypothetical protein - Arabidopsis thaliana
  misc_feature (1)..(254): Homolog of NCBI NO: 21555799 NR Description: Lil3 protein [Arabidopsis thaliana]
  misc_feature (1)..(254): Homolog of NCBI NO: 8978078 NR Description: Lil3 protein [Arabidopsis thaliana]
  misc_feature (1)..(254): Homolog of NCBI NO: 30695110 NR Description: Lil3 protein [Arabidopsis thaliana]
MALFSPPISSSLQNPNLIPKISTSLLSTKRFSLISVPRASSDNGTTSPVVKIPKPASVAVEEVPVKSPAESSSASENGAVGGEATDSSTETVIKYQNAKWVNGTWDLKQFEKDGKTDWDSVIVSEAKRRKWLEDNPETTSNDELVVFDTSIIPWWAWMKRYHLPEAELLNGRAAMIGFFMAYFVDSLTGVGLVDQMGNFFCKTLLFVAVAGVLFIRKNEDLDKLKDLFDETTLYDKQWQAAWKEPDSSTVSSKK

SEQ ID NO: 23647 - DNA, 1221 bp, Arabidopsis thaliana
  misc_feature (1)..(1221): Ceres Seq. ID no. 12371645
  misc_feature: MA Experiment ID: 108434 Result: Up-regulated in Transcription
  misc_feature: MA Experiment 108434 PARAMETER Experiment Name: At_Root_Tips_cDNA_P Parameter: Tissue Value: Root Tips
  misc_feature: MA Experiment ID: 108435 Result: Up-regulated in Transcription
  misc_feature: MA Experiment 108435 PARAMETER Experiment Name: At_stm_Mutants_cDNA_P Parameter: Plant Line Value: wt Landsburg vs stm
  misc_feature: MA Experiment 108435 PARAMETER Experiment Name: At_stm_Mutants_cDNA_P Parameter: Tissue Value: Shoot Apical Meristem Region
  misc_feature: MA Experiment ID: 108462 Result: Down-regulated in Transcription
  misc_feature: MA Experiment 108462 PARAMETER Experiment Name: At_Germinating_Seeds_cDNA_P Parameter: Age (day) Value: 2 vs. 0
  misc_feature: MA Experiment 108462 PARAMETER Experiment Name: At_Germinating_Seeds_cDNA_P Parameter: Tissue Value: Germinating Seeds
  misc_feature: MA Experiment ID: 108463 Result: Down-regulated in Transcription
  misc_feature: MA Experiment 108463 PARAMETER Experiment Name: At_Germinating_Seeds_cDNA_P Parameter: Age (day) Value: 3 vs. 0
  misc_feature: MA Experiment 108463 PARAMETER Experiment Name: At_Germinating_Seeds_cDNA_P Parameter: Tissue Value: Germinating Seeds
  misc_feature: MA Experiment ID: 108464 Result: Down-regulated in Transcription
  misc_feature: MA Experiment 108464 PARAMETER Experiment Name: At_Germinating_Seeds_cDNA_P Parameter: Age (day) Value: 4 vs. 0
  misc_feature: MA Experiment 108464 PARAMETER Experiment Name: At_Germinating_Seeds_cDNA_P Parameter: Tissue Value: Germinating Seeds
  misc_feature: MA Experiment ID: 108488 Result: Up-regulated in Transcription
  misc_feature: MA Experiment ID: 108489 Result: Up-regulated in Transcription
  misc_feature: MA Experiment ID: 108573 Result: Down-regulated in Transcription
  misc_feature: MA Experiment 108573 PARAMETER Experiment Name: At_Drought_cDNA_P Parameter: Timepoint (hr) Value: 6
  misc_feature: MA Experiment 108573 PARAMETER Experiment Name: At_Drought_cDNA_P Parameter: Tissue Value: Aerial
  misc_feature: MA Experiment 108573 PARAMETER Experiment Name: At_Drought_cDNA_P Parameter: Treatment Value: Drought vs. No Drought
  misc_feature: MA Experiment ID: 108595 Result: Down-regulated in Transcription
  misc_feature: MA Experiment 108595 PARAMETER Experiment Name: At_Ler-pi_Ovule_cDNA_P Parameter: Plant Line Value: null
  misc_feature: MA Experiment ID: 20000234 Result: Up-regulated in Transcription
  misc_feature: MA Experiment 20000234 PARAMETER Experiment Name: At_Siliques_P Parameter: Age (day) Value: 21
  misc_feature: MA Experiment 20000234 PARAMETER Experiment Name: At_Siliques_P Parameter: Organism Value: A. thaliana
  misc_feature: MA Experiment 20000234 PARAMETER Experiment Name: At_Siliques_P Parameter: Plant Line Value: WS
  misc_feature: MA Experiment 20000234 PARAMETER Experiment Name: At_Siliques_P Parameter: Tissue Value: Less Than 5mm Siliques vs. Whole Plant
  misc_feature: MA Experiment ID: 20000495 Result: Up-regulated in Transcription
  misc_feature: MA Experiment 20000495 PARAMETER Experiment Name: At_Guard_Cells_P Parameter: Harvest Date Value: 8/2/2002
  misc_feature: MA Experiment 20000495 PARAMETER Experiment Name: At_Guard_Cells_P Parameter: Organism Value: A. thaliana
  misc_feature: MA Experiment 20000495 PARAMETER Experiment Name: At_Guard_Cells_P Parameter: Tissue Value: Guard Cells vs. Leaves
  misc_feature: MA Experiment ID: 20000794 Result: Down-regulated in Transcription
  misc_feature: MA Experiment 20000794 PARAMETER Experiment Name: At_Petals_P Parameter: Age (day) Value: 23-25 days
  misc_feature: MA Experiment 20000794 PARAMETER Experiment Name: At_Petals_P Parameter: Plant Line Value: WS
  misc_feature: MA Experiment 20000794 PARAMETER Experiment Name: At_Petals_P Parameter: Tissue Value: Petals vs. Whole plant
  misc_feature: MA Experiment ID: 20001557 Result: Up-regulated in Transcription
  misc_feature: MA Experiment 20001557 PARAMETER Experiment Name: At_Drought_Soil_Dry_P Parameter: Age (day) Value: 27
  misc_feature: MA Experiment 20001557 PARAMETER Experiment Name: At_Drought_Soil_Dry_P Parameter: Organism Value: A. thaliana
  misc_feature: MA Experiment 20001557 PARAMETER Experiment Name: At_Drought_Soil_Dry_P Parameter: Plant Line Value: WS
  misc_feature: MA Experiment 20001557 PARAMETER Experiment Name: At_Drought_Soil_Dry_P Parameter: Post Timepoint (hr) Value: 3
  misc_feature: MA Experiment 20001557 PARAMETER Experiment Name: At_Drought_Soil_Dry_P Parameter: Post-Treatment Value: Re-Water vs. No Drought
  misc_feature: MA Experiment 20001557 PARAMETER Experiment Name: At_Drought_Soil_Dry_P Parameter: Timepoint (day) Value: 13
  misc_feature: MA Experiment 20001557 PARAMETER Experiment Name: At_Drought_Soil_Dry_P Parameter: Treatment Value: Drought vs. No Drought
  misc_feature: MA Experiment ID: 20001558 Result: Up-regulated in Transcription
  misc_feature: MA Experiment 20001558 PARAMETER Experiment Name: At_Drought_Soil_Dry_P Parameter: Age (day) Value: 27
  misc_feature: MA Experiment 20001558 PARAMETER Experiment Name: At_Drought_Soil_Dry_P Parameter: Organism Value: A. thaliana
  misc_feature: MA Experiment 20001558 PARAMETER Experiment Name: At_Drought_Soil_Dry_P Parameter: Plant Line Value: WS
  misc_feature: MA Experiment 20001558 PARAMETER Experiment Name: At_Drought_Soil_Dry_P Parameter: Post Timepoint (hr) Value: 6
  misc_feature: MA Experiment 20001558 PARAMETER Experiment Name: At_Drought_Soil_Dry_P Parameter: Post-Treatment Value: Re-Water vs. No Drought
  misc_feature: MA Experiment 20001558 PARAMETER Experiment Name: At_Drought_Soil_Dry_P Parameter: Timepoint (day) Value: 13
  misc_feature: MA Experiment 20001558 PARAMETER Experiment Name: At_Drought_Soil_Dry_P Parameter: Treatment Value: Drought vs. No Drought
  misc_feature: MA Experiment ID: 20001560 Result: Up-regulated in Transcription
  misc_feature: MA Experiment 20001560 PARAMETER Experiment Name: At_Drought_Soil_Dry_P Parameter: Age (day) Value: 28
  misc_feature: MA Experiment 20001560 PARAMETER Experiment Name: At_Drought_Soil_Dry_P Parameter: Organism Value: A. thaliana
  misc_feature: MA Experiment 20001560 PARAMETER Experiment Name: At_Drought_Soil_Dry_P Parameter: Plant Line Value: WS
  misc_feature: MA Experiment 20001560 PARAMETER Experiment Name: At_Drought_Soil_Dry_P Parameter: Post Timepoint (hr) Value: None
  misc_feature: MA Experiment 20001560 PARAMETER Experiment Name: At_Drought_Soil_Dry_P Parameter: Post-Treatment Value: None
  misc_feature: MA Experiment 20001560 PARAMETER Experiment Name: At_Drought_Soil_Dry_P Parameter: Timepoint (day) Value: 14
  misc_feature: MA Experiment 20001560 PARAMETER Experiment Name: At_Drought_Soil_Dry_P Parameter: Treatment Value: Drought vs. No Drought
  misc_feature: MA Experiment ID: 20001757 Result: Up-regulated in Transcription
  misc_feature: MA Experiment 20001757 PARAMETER Experiment Name: At_50mM_NH4NO3_L-to-H_P Parameter: Timepoint (hr) Value: 6
  misc_feature: MA Experiment 20001757 PARAMETER Experiment Name: At_50mM_NH4NO3_L-to-H_P Parameter: Tissue Value: Leaf
  misc_feature: MA Experiment 20001757 PARAMETER Experiment Name: At_50mM_NH4NO3_L-to-H_P Parameter: Treatment Value: 50mM NH4NO3 vs 100mM Mannitol
aagttttctattgattcattataatttgtttgttctgatgtttgtgagatcgataaacccagttgtcccagttctatcgtagagaaattcactttgattttagatttgcaatcgttgcattgagttttccgatcttctctaattgctccttttcattttgctgtttggttttaaacattgtcgttgatgttcctgccttgcttctctgtgattaacaatctgttcaatttctcaaaggtgtcctttttatttgattagtatagcttatttttggtttgtttgtggaatggtatgtatgtaggagaaatggctgaatccaaggtagtggttccagagtctgtgctaaagaagatcaagaggcaagaggaatgggcattggccaagaaagatgaagctgtagctgctaagaagaagagtgttgaggcccgcaagcttatcttcaagagagctgagcagtatgccaaagaatacgctgagaaggataacgagttgatccgattgaagcgggaggctaagttgaaaggaggtttctacgttgaccctgaggctaagttgctctttatcattcgtatccgtggtatcaatgccattgacccaaaaaccaagaagattctgcagctcctgcgtttgagacagatcttcaatggtgtgtttcttaaggtgaacaaggcaacagtaaacatgctgcgccgagttgaaccatacgtgacttacggatacccaaacttgaagagcgttaaggaactgatctacaaaagaggttatggaaagctgaaccaccagaggatagcacttactgacaactccattgtggatcaggctctcggaaagcatgggatcatctgcgttgaggatctcatccacgagatcatgactgttggacctcacttcaaggaagccaacaacttcctgtggccattccaattgaaggcaccactcggtggccttaagaagaagagaaaccactacgtcgaaggtggtgatgctggaaacagggagaatttcatcaacgagcttgtcaggagaatgaattgatgaaagcttccttctttatctttgcaaatttcaaagattttgggaccgagtttttttttttttgttcaagttatcagagacttgtgatcttttatccgagataggctttttatgactaatcatgttattttccaatggcgggcttttaaattgatcttgaatttttattggctgttagattgttcg

SEQ ID NO: 23648 - protein, 247 aa, Arabidopsis thaliana
  peptide (1)..(247): Ceres Seq. ID no. 12371646
  misc_feature (87)..(139): Pfam Name: Ribosomal protein L30p/L7e Pfam Description: Ribosomal protein L30p/L7e
  misc_feature (1)..(247): Homolog of NCBI NO: 32416114 NR Description: hypothetical protein [Neurospora crassa]
  misc_feature (13)..(246): Homolog of NCBI NO: 28630259 NR Description: ribosomal protein L7 [Branchiostoma lanceolatum]
  misc_feature (5)..(247): Homolog of NCBI NO: 38637548 NR Description: putative 60S ribosomal protein L7
  misc_feature (9)..(247): Homolog of NCBI NO: 38346542 NR Description: OSJNBa0035M09.3 [Oryza sativa (japonica
  misc_feature (6)..(247): Homolog of NCBI NO: 445613 NR Description: ribosomal protein L7
  misc_feature (7)..(247): Homolog of NCBI NO: 15231288 NR Description: ribosomal protein, putative
  misc_feature (6)..(247): Homolog of NCBI NO: 15226212 NR Description: putative ribosomal protein L7
  misc_feature (6)..(247): Homolog of NCBI NO: 27311547 NR Description: Unknown protein [Arabidopsis thaliana]
  misc_feature (6)..(247): Homolog of NCBI NO: 30689617 NR Description: 60S ribosomal protein L7 (RPL7C) [Arabidopsis
  misc_feature (1)..(247): Homolog of NCBI NO: 30689623 NR Description: 60S ribosomal protein L7 (RPL7C) [Arabidopsis
MYVGEMAESKVVVPESVLKKIKRQEEWALAKKDEAVAAKKKSVEARKLIFKRAEQYAKEYAEKDNELIRLKREAKLKGGFYVDPEAKLLFIIRIRGINAIDPKTKKILQLLRLRQIFNGVFLKVNKATVNMLRRVEPYVTYGYPNLKSVKELIYKRGYGKLNHQRIALTDNSIVDQALGKHGIICVEDLIHEIMTVGPHFKEANNFLWPFQLKAPLGGLKKKRNHYVEGGDAGNRENFINELVRRMN

SEQ ID NO: 23649 - protein, 242 aa, Arabidopsis thaliana
  peptide (1)..(242): Ceres Seq. ID no. 12371647
  misc_feature (82)..(134): Pfam Name: Ribosomal protein L30p/L7e Pfam Description: Ribosomal protein L30p/L7e
  misc_feature (1)..(242): Homolog of NCBI NO: 32416114 NR Description: hypothetical protein [Neurospora crassa]
  misc_feature (8)..(241): Homolog of NCBI NO: 28630259 NR Description: ribosomal protein L7 [Branchiostoma lanceolatum]
  misc_feature (1)..(242): Homolog of NCBI NO: 38637548 NR Description: putative 60S ribosomal protein L7
  misc_feature (4)..(242): Homolog of NCBI NO: 38346542 NR Description: OSJNBa0035M09.3 [Oryza sativa (japonica
  misc_feature (1)..(242): Homolog of NCBI NO: 445613 NR Description: ribosomal protein L7
  misc_feature (2)..(242): Homolog of NCBI NO: 15231288 NR Description: ribosomal protein, putative
  misc_feature (1)..(242): Homolog of NCBI NO: 15226212 NR Description: putative ribosomal protein L7
  misc_feature (1)..(242): Homolog of NCBI NO: 27311547 NR Description: Unknown protein [Arabidopsis thaliana]
  misc_feature (1)..(242): Homolog of NCBI NO: 30689617 NR Description: 60S ribosomal protein L7 (RPL7C) [Arabidopsis
  misc_feature (1)..(242): Homolog of NCBI NO: 30689623 NR Description: 60S ribosomal protein L7 (RPL7C) [Arabidopsis
MAESKVVVPESVLKKIKRQEEWALAKKDEAVAAKKKSVEARKLIFKRAEQYAKEYAEKDNELIRLKREAKLKGGFYVDPEAKLLFIIRIRGINAIDPKTKKILQLLRLRQIFNGVFLKVNKATVNMLRRVEPYVTYGYPNLKSVKELIYKRGYGKLNHQRIALTDNSIVDQALGKHGIICVEDLIHEIMTVGPHFKEANNFLWPFQLKAPLGGLKKKRNHYVEGGDAGNRENFINELVRRMN

SEQ ID NO: 23650 - DNA, 1581 bp, Arabidopsis thaliana
  misc_feature (1)..(1581): Ceres Seq. ID no. 12339645
  misc_feature: MA Experiment ID: 108433 Result: Down-regulated in Transcription
  misc_feature: MA Experiment 108433 PARAMETER Experiment Name: At_rhl_Mutant2_cDNA_P Parameter: Age (day) Value: 7
  misc_feature: MA Experiment 108433 PARAMETER Experiment Name: At_rhl_Mutant2_cDNA_P Parameter: Organism Value: A. thaliana
  misc_feature: MA Experiment 108433 PARAMETER Experiment Name: At_rhl_Mutant2_cDNA_P Parameter: Plant Line Value: rhl Mutant vs. wt landsburg
  misc_feature: MA Experiment 108433 PARAMETER Experiment Name: At_rhl_Mutant2_cDNA_P Parameter: Tissue Value: Roots
  misc_feature: MA Experiment ID: 108434 Result: Up-regulated in Transcription
  misc_feature: MA Experiment 108434 PARAMETER Experiment Name: At_Root_Tips_cDNA_P Parameter: Tissue Value: Root Tips
  misc_feature: MA Experiment ID: 108462 Result: Down-regulated in Transcription
  misc_feature: MA Experiment 108462 PARAMETER Experiment Name: At_Germinating_Seeds_cDNA_P Parameter: Age (day) Value: 2 vs. 0
  misc_feature: MA Experiment 108462 PARAMETER Experiment Name: At_Germinating_Seeds_cDNA_P Parameter: Tissue Value: Germinating Seeds
  misc_feature: MA Experiment ID: 108463 Result: Down-regulated in Transcription
  misc_feature: MA Experiment 108463 PARAMETER Experiment Name: At_Germinating_Seeds_cDNA_P Parameter: Age (day) Value: 3 vs. 0
  misc_feature: MA Experiment 108463 PARAMETER Experiment Name: At_Germinating_Seeds_cDNA_P Parameter: Tissue Value: Germinating Seeds
  misc_feature: MA Experiment ID: 108464 Result: Down-regulated in Transcription
  misc_feature: MA Experiment 108464 PARAMETER Experiment Name: At_Germinating_Seeds_cDNA_P Parameter: Age (day) Value: 4 vs. 0
  misc_feature: MA Experiment 108464 PARAMETER Experiment Name: At_Germinating_Seeds_cDNA_P Parameter: Tissue Value: Germinating Seeds
  misc_feature: MA Experiment ID: 108595 Result: Down-regulated in Transcription
  misc_feature: MA Experiment 108595 PARAMETER Experiment Name: At_Ler-pi_Ovule_cDNA_P Parameter: Plant Line Value: null
  misc_feature: MA Experiment ID: 20000224 Result: Down-regulated in Transcription
  misc_feature: MA Experiment ID: 20001558 Result: Up-regulated in Transcription
  misc_feature: MA Experiment 20001558 PARAMETER Experiment Name: At_Drought_Soil_Dry_P Parameter: Age (day) Value: 27
  misc_feature: MA Experiment 20001558 PARAMETER Experiment Name: At_Drought_Soil_Dry_P Parameter: Organism Value: A. thaliana
  misc_feature: MA Experiment 20001558 PARAMETER Experiment Name: At_Drought_Soil_Dry_P Parameter: Plant Line Value: WS
  misc_feature: MA Experiment 20001558 PARAMETER Experiment Name: At_Drought_Soil_Dry_P Parameter: Post Timepoint (hr) Value: 6
  misc_feature: MA Experiment 20001558 PARAMETER Experiment Name: At_Drought_Soil_Dry_P Parameter: Post-Treatment Value: Re-Water vs. No Drought
  misc_feature: MA Experiment 20001558 PARAMETER Experiment Name: At_Drought_Soil_Dry_P Parameter: Timepoint (day) Value: 13
  misc_feature: MA Experiment 20001558 PARAMETER Experiment Name: At_Drought_Soil_Dry_P Parameter: Treatment Value: Drought vs. No Drought
aagaaacctcagagagacgaagcacaatgggtcaaggaccttccggcggattgaatcggcaaggagatcggaaaccagatggtggagagaagaaggagaagaagttcgaaccagccgcaccacctgctcgtgtagggaggaagcaacggaagcagaaaggacctgaagcggcggcgagattgccgacggtgactccttctactaaatgtaagcttcgattgctgaaattggagcgaatcaaggactatttgcttatggaggaagagttcgtagcgaatcaggagagattgaaacctcaggaagagaaagctgaggaagatagatctaaagttgatgatcttcgtggtacacctatgagtgttggcaatcttgaagagcttattgatgagaatcacgccattgtttcttcttcggttggtcctgagtactacgttggcattttgtctttcgttgataaggatcagcttgaacctggctgctctattttgatgcataacaaggtactctctgttgttgggattcttcaagatgaagtggatccaatggtgtctgtgatgaaagtggagaaggctcctttggagtcatatgctgacattggaggtttagaagctcagattcaggagattaaggaagctgttgagttacctttaacacatcccgagctgtatgaagatattggaattaagccaccaaaaggtgtgatcttgtatggtgagccaggcactgggaagacattgcttgctaaggcagtggcaaattctacttcagctactttcttgcgtgttgtcggtagtgaactgattcagaagtatttaggagatggtcccaagcttgtgagggaacttttcagggttgctgatgacctttctccttctattgttttcatagacgagattgatgctgttggcaccaagcggtatgacgcaaactcaggtggggaacgtgaaatccaaagaaccatgttggaactactgaaccagcttgatgggtttgattcaagaggagatgttaaggttattctcgcgacaaacaggatcgagagtcttgacccggcacttcttagaccaggccggatcgacaggaaaatcgaattccctcttccagatatcaaaacaagaagacgtatcttccagatacacacatcaaagatgactttggctgaagatgtgaacttagaagagtttgtaatgacaaaagacgagttctcaggagctgatataaaggcaatatgcacagaagctggtctgcttgctcttagagagcgtcggatgaaagtgacgcatgtggacttcaagaaggcgaaggagaaggttatgttcaagaagaaagaaggagttcctgaaggtctttacatgtgaatgatgcacaacgactggtttcaatctcttttttcgagtttgctctctttttctccgtttttctgttttcactctctgcttagatttttttttctgatcatataaaatcgtttgcccattattaatctgcttccaaattagcaatttattagtttgctttcttcagaacaacctcatagatttattcatttgaaatttccatcatttttactttgcggttacg

SEQ ID NO: 23651 - protein, 451 aa, Arabidopsis thaliana
  peptide (1)..(451): Ceres Seq. ID no. 12339646
  misc_feature (232)..(419): Pfam Name: ATPase family associated with various cellular Pfam Description: ATPase family associated with various cellular
  misc_feature (9)..(451): Homolog of NCBI NO: 39593059 NR Description: Hypothetical protein CBG09267 [Caenorhabditis
  misc_feature (9)..(451): Homolog of NCBI NO: 18479040 NR Description: 26S proteasome regulatory subunit IV [Tortula
  misc_feature (9)..(451): Homolog of NCBI NO: 17297987 NR Description: 26S proteasome regulatory particle triple-A
  misc_feature (9)..(451): Homolog of NCBI NO: 1172635 NR Description: 26S PROTEASE REGULATORY SUBUNIT 4 HOMOLOG
  misc_feature (9)..(451): Homolog of NCBI NO: 11045086 NR Description: 26S proteasome subunit 4-like protein [Brassica
  misc_feature (9)..(451): Homolog of NCBI NO: 6652880 NR Description: 26S proteasome AAA-ATPase subunit RPT2a
  misc_feature (9)..(451): Homolog of NCBI NO: 15235544 NR Description: 26S proteasome AAA-ATPase subunit RPT2a
  misc_feature (9)..(451): Homolog of NCBI NO: 21593177 NR Description: 26S proteasome subunit 4 [Arabidopsis thaliana]
  misc_feature (9)..(451): Homolog of NCBI NO: 13937244 NR Description: At2g20140/T2G17.6 [Arabidopsis thaliana]
  misc_feature (9)..(451): Homolog of NCBI NO: 15225307 NR Description: 26S proteasome subunit 4
ETSERRSTMGQGPSGGLNRQGDRKPDGGEKKEKKFEPAAPPARVGRKQRKQKGPEAAARLPTVTPSTKCKLRLLKLERIKDYLLMEEEFVANQERLKPQEEKAEEDRSKVDDLRGTPMSVGNLEELIDENHAIVSSSVGPEYYVGILSFVDKDQLEPGCSILMHNKVLSVVGILQDEVDPMVSVMKVEKAPLESYADIGGLEAQIQEIKEAVELPLTHPELYEDIGIKPPKGVILYGEPGTGKTLLAKAVANSTSATFLRVVGSELIQKYLGDGPKLVRELFRVADDLSPSIVFIDEIDAVGTKRYDANSGGEREIQRTMLELLNQLDGFDSRGDVKVILATNRIESLDPALLRPGRIDRKIEFPLPDIKTRRRIFQIHTSKMTLAEDVNLEEFVMTKDEFSGADIKAICTEAGLLALRERRMKVTHVDFKKAKEKVMFKKKEGVPEGLYM

SEQ ID NO: 23652 - protein, 443 aa, Arabidopsis thaliana
  peptide (1)..(443): Ceres Seq. ID no. 12339647
  misc_feature (224)..(411): Pfam Name: ATPase family associated with various cellular Pfam Description: ATPase family associated with various cellular
  misc_feature (1)..(443): Homolog of NCBI NO: 39593059 NR Description: Hypothetical protein CBG09267 [Caenorhabditis
  misc_feature (1)..(443): Homolog of NCBI NO: 18479040 NR Description: 26S proteasome regulatory subunit IV [Tortula
  misc_feature (1)..(443): Homolog of NCBI NO: 17297987 NR Description: 26S proteasome regulatory particle triple-A
  misc_feature (1)..(443): Homolog of NCBI NO: 1172635 NR Description: 26S PROTEASE REGULATORY SUBUNIT 4 HOMOLOG
  misc_feature (1)..(443): Homolog of NCBI NO: 11045086 NR Description: 26S proteasome subunit 4-like protein [Brassica
  misc_feature (1)..(443): Homolog of NCBI NO: 6652880 NR Description: 26S proteasome AAA-ATPase subunit RPT2a
  misc_feature (1)..(443): Homolog of NCBI NO: 15235544 NR Description: 26S proteasome AAA-ATPase subunit RPT2a
  misc_feature (1)..(443): Homolog of NCBI NO: 21593177 NR Description: 26S proteasome subunit 4 [Arabidopsis thaliana]
  misc_feature (1)..(443): Homolog of NCBI NO: 13937244 NR Description: At2g20140/T2G17.6 [Arabidopsis thaliana]
  misc_feature (1)..(443): Homolog of NCBI NO: 15225307 NR Description: 26S proteasome subunit 4
MGQGPSGGLNRQGDRKPDGGEKKEKKFEPAAPPARVGRKQRKQKGPEAAARLPTVTPSTKCKLRLLKLERIKDYLLMEEEFVANQERLKPQEEKAEEDRSKVDDLRGTPMSVGNLEELIDENHAIVSSSVGPEYYVGILSFVDKDQLEPGCSILMHNKVLSVVGILQDEVDPMVSVMKVEKAPLESYADIGGLEAQIQEIKEAVELPLTHPELYEDIGIKPPKGVILYGEPGTGKTLLAKAVANSTSATFLRVVGSELIQKYLGDGPKLVRELFRVADDLSPSIVFIDEIDAVGTKRYDANSGGEREIQRTMLELLNQLDGFDSRGDVKVILATNRIESLDPALLRPGRIDRKIEFPLPDIKTRRRIFQIHTSKMTLAEDVNLEEFVMTKDEFSGADIKAICTEAGLLALRERRMKVTHVDFKKAKEKVMFKKKEGVPEGLYM

SEQ ID NO: 23653 - protein, 367 aa, Arabidopsis thaliana
  peptide (1)..(367): Ceres Seq. ID no. 12339649
  misc_feature (148)..(335): Pfam Name: ATPase family associated with various cellular Pfam Description: ATPase family associated with various cellular
  misc_feature (1)..(367): Homolog of NCBI NO: 39593059 NR Description: Hypothetical protein CBG09267 [Caenorhabditis
  misc_feature (1)..(367): Homolog of NCBI NO: 18479040 NR Description: 26S proteasome regulatory subunit IV [Tortula
  misc_feature (1)..(367): Homolog of NCBI NO: 17297987 NR Description: 26S proteasome regulatory particle triple-A
  misc_feature (1)..(367): Homolog of NCBI NO: 1172635 NR Description: 26S PROTEASE REGULATORY SUBUNIT 4 HOMOLOG
  misc_feature (1)..(367): Homolog of NCBI NO: 11045086 NR Description: 26S proteasome subunit 4-like protein [Brassica
  misc_feature (1)..(367): Homolog of NCBI NO: 6652880 NR Description: 26S proteasome AAA-ATPase subunit RPT2a
  misc_feature (1)..(367): Homolog of NCBI NO: 15235544 NR Description: 26S proteasome AAA-ATPase subunit RPT2a
  misc_feature (1)..(367): Homolog of NCBI NO: 21593177 NR Description: 26S proteasome subunit 4 [Arabidopsis thaliana]
  misc_feature (1)..(367): Homolog of NCBI NO: 13937244 NR Description: At2g20140/T2G17.6 [Arabidopsis thaliana]
  misc_feature (1)..(367): Homolog of NCBI NO: 15225307 NR Description: 26S proteasome subunit 4
MEEEFVANQERLKPQEEKAEEDRSKVDDLRGTPMSVGNLEELIDENHAIVSSSVGPEYYVGILSFVDKDQLEPGCSILMHNKVLSVVGILQDEVDPMVSVMKVEKAPLESYADIGGLEAQIQEIKEAVELPLTHPELYEDIGIKPPKGVILYGEPGTGKTLLAKAVANSTSATFLRVVGSELIQKYLGDGPKLVRELFRVADDLSPSIVFIDEIDAVGTKRYDANSGGEREIQRTMLELLNQLDGFDSRGDVKVILATNRIESLDPALLRPGRIDRKIEFPLPDIKTRRRIFQIHTSKMTLAEDVNLEEFVMTKDEFSGADIKAICTEAGLLALRERRMKVTHVDFKKAKEKVMFKKKEGVPEGLYM

SEQ ID NO: 23654 - DNA, 1441 bp, Arabidopsis thaliana
  misc_feature (1)..(1441): Ceres Seq. ID no. 12357651
  misc_feature: MA Experiment ID: 20000173 Result: Down-regulated in Transcription
  misc_feature: MA Experiment 20000173 PARAMETER Experiment Name: At_42deg_Heat_P Parameter: Age (day) Value: 14
  misc_feature: MA Experiment 20000173 PARAMETER Experiment Name: At_42deg_Heat_P Parameter: Organism Value: A. thaliana
  misc_feature: MA Experiment 20000173 PARAMETER Experiment Name: At_42deg_Heat_P Parameter: Plant Line Value: WS
  misc_feature: MA Experiment 20000173 PARAMETER Experiment Name: At_42deg_Heat_P Parameter: Temperature (deg C) Value: 42 vs. 22
  misc_feature: MA Experiment 20000173 PARAMETER Experiment Name: At_42deg_Heat_P Parameter: Timepoint (hr) Value: 6
  misc_feature: MA Experiment 20000173 PARAMETER Experiment Name: At_42deg_Heat_P Parameter: Tissue Value: Aerial
  misc_feature: MA Experiment ID: 20000185 Result: Up-regulated in Transcription
  misc_feature: MA Experiment 20000185 PARAMETER Experiment Name: At_Roots__P Parameter: Age (day) Value: 7 vs. 21
  misc_feature: MA Experiment 20000185 PARAMETER Experiment Name: At_Roots__P Parameter: Organism Value: A. thaliana
  misc_feature: MA Experiment 20000185 PARAMETER Experiment Name: At_Roots__P Parameter: Tissue Value: Roots vs. Whole Plant
cgattctctgtttcttctagattgaatttaaaaaccctacttttgaattttcacatgggagaacaatcaccttctcaaccatcgactcaatgccaaagtcatccacaatcacccaaacccgatactcataacctaattccaccggaatccaccgatgaatgtctcgattcagctggagtttcaggctcaatcgtctcatctaccacaatcgacgctcgacggatcactgaactaggcaatgtatcgtctccgccgtccaaaatccctctccgccctcggaaaatcaggaaactcacactcgacggagacgtatccggtgaagattataaggcggaggatatctcctcatctcaagtaaactctccgctctcgacggatggaaaatctcccggtaaaggtaaattgtcgcacttacgagctataactgtgccgaggatccaagctcgtcctctgacatgtgaaggtgagctcgaaacagcgattcactatctccgtaacgcggatcctttgctcgcggcgttaatcgacgttcatccaccgccgacgtttgagtcgtttaagactccgttcttagctctgatacgaaacatcctctaccaacagcttgcaatgaaagctgggaattcaatctacacacgatttgtttctctctgcggcggcgaaaatttggttgtacctgagacggtcttatcattaaatcctcagcagcttcgtcaaattggtgtctcgggacgtaaagcgagttatcttcatgatttagctagaaagtatcaaaacggaatcttgtcggattcggcgattttgaacatggatgagaagtctttgttcacgatgctaacaatggttaatggaattgggtcatggtctgttcatatgttcatgataaattctcttcatcgaccagatgttttgccggttaatgatctcggtgttaggaaaggagtgcagttgctgtatggcttagatgacctgcctcggccatcgcagatggagcagcattgtgctaagtggagaccgtacagatcagtgggttcgtggtacatgtggcggctcattgaagctaagagtacatcaacgagtgctgctgttgcagccggagtgtcattgcctccattggaagatatccaacaagaacatcagcagcaacagcttatggaccctcttaatggtgtgttcagtatcggggcttggggacaatcgtagctgttcttccacgttggtcctggatcgtctgatggcttacgtgagttatttagttctggacttacgtgggttttgtgcctagtaaaagaaaatgtatgggaaagaataataaaaggatgtgctagtctgggttccttcagatacaagctgaagtaacagtgaatatgatcttcttagttgagtgaaagagtctgtaatgttaagagtgagtagctaatgacaaagtagtgtcttcttc

SEQ ID NO: 23655 - protein, 400 aa, Arabidopsis thaliana
  peptide (1)..(400): Ceres Seq. ID no. 12357652
  misc_feature (194)..(339): Pfam Name: HhH-GPD superfamily base excision DNA repair protein Pfam Description: HhH-GPD superfamily base excision DNA repair
  misc_feature (152)..(351): Homolog of NCBI NO: 23116389 NR Description: hypothetical protein [Desulfitobacterium
  misc_feature (157)..(350): Homolog of NCBI NO: 22971879 NR Description: hypothetical protein [Chloroflexus aurantiacus]
  misc_feature (157)..(353): Homolog of NCBI NO: 37521587 NR Description: probable DNA-3-methyladenine glycosylase
  misc_feature (144)..(357): Homolog of NCBI NO: 15230333 NR Description: putative DNA-3-methyladenine glycosidase; protein
  misc_feature (73)..(395): Homolog of NCBI NO: 5091600 NR Description: This gene is a member of PF|01332 Alkylbase DNA
  misc_feature (19)..(400): Homolog of NCBI NO: 25406423 NR Description: hypothetical protein F22H5.5 [imported] -
  misc_feature (19)..(400): Homolog of NCBI NO: 18410802 NR Description: 3-methyladenine DNA glycosylase, putative
  misc_feature (19)..(400): Homolog of NCBI NO: 25402893 NR Description: protein F18O14.25 [imported] - Arabidopsis
  misc_feature (19)..(400): Homolog of NCBI NO: 21593178 NR Description: unknown [Arabidopsis thaliana]
  misc_feature (19)..(400): Homolog of NCBI NO: 18394744 NR Description: Expressed protein
RFSVSSRLNLKTLLLNFHMGEQSPSQPSTQCQSHPQSPKPDTHNLIPPESTDECLDSAGVSGSIVSSTTIDARRITELGNVSSPPSKIPLRPRKIRKLTLDGDVSGEDYKAEDISSSQVNSPLSTDGKSPGKGKLSHLRAITVPRIQARPLTCEGELETAIHYLRNADPLLAALIDVHPPPTFESFKTPFLALIRNILYQQLAMKAGNSIYTRFVSLCGGENLVVPETVLSLNPQQLRQIGVSGRKASYLHDLARKYQNGILSDSAILNMDEKSLFTMLTMVNGIGSWSVHMFMINSLHRPDVLPVNDLGVRKGVQLLYGLDDLPRPSQMEQHCAKWRPYRSVGSWYMWRLIEAKSTSTSAAVAAGVSLPPLEDIQQEHQQQQLMDPLNGVFSIGAWGQS

SEQ ID NO: 23656 - protein, 382 aa, Arabidopsis thaliana
  peptide (1)..(382): Ceres Seq. ID no. 12357653
  misc_feature (176)..(321): Pfam Name: HhH-GPD superfamily base excision DNA repair protein Pfam Description: HhH-GPD superfamily base excision DNA repair
  misc_feature (1)..(382): Homolog of NCBI NO: 25406423 NR Description: hypothetical protein F22H5.5 [imported] -
  misc_feature (1)..(382): Homolog of NCBI NO: 18410802 NR Description: 3-methyladenine DNA glycosylase, putative
  misc_feature (1)..(382): Homolog of NCBI NO: 25402893 NR Description: protein F18O14.25 [imported] - Arabidopsis
  misc_feature (139)..(332): Homolog of NCBI NO: 22971879 NR Description: hypothetical protein [Chloroflexus aurantiacus]
  misc_feature (126)..(339): Homolog of NCBI NO: 15230333 NR Description: putative DNA-3-methyladenine glycosidase; protein
  misc_feature (55)..(377): Homolog of NCBI NO: 5091600 NR Description: This gene is a member of PF|01332 Alkylbase DNA
  misc_feature (139)..(335): Homolog of NCBI NO: 37521587 NR Description: probable DNA-3-methyladenine glycosylase
  misc_feature (134)..(333): Homolog of NCBI NO: 23116389 NR Description: hypothetical protein [Desulfitobacterium
  misc_feature (1)..(382): Homolog of NCBI NO: 21593178 NR Description: unknown [Arabidopsis thaliana]
  misc_feature (1)..(382): Homolog of NCBI NO: 18394744 NR Description: Expressed protein
MGEQSPSQPSTQCQSHPQSPKPDTHNLIPPESTDECLDSAGVSGSIVSSTTIDARRITELGNVSSPPSKIPLRPRKIRKLTLDGDVSGEDYKAEDISSSQVNSPLSTDGKSPGKGKLSHLRAITVPRIQARPLTCEGELETAIHYLRNADPLLAALIDVHPPPTFESFKTPFLALIRNILYQQLAMKAGNSIYTRFVSLCGGENLVVPETVLSLNPQQLRQIGVSGRKASYLHDLARKYQNGILSDSAILNMDEKSLFTMLTMVNGIGSWSVHMFMINSLHRPDVLPVNDLGVRKGVQLLYGLDDLPRPSQMEQHCAKWRPYRSVGSWYMWRLIEAKSTSTSAAVAAGVSLPPLEDIQQEHQQQQLMDPLNGVFSIGAWGQS

SEQ ID NO: 23657 - DNA, 1424 bp, Arabidopsis thaliana
  misc_feature (1)..(1424): Ceres Seq. ID no. 13491455
  misc_feature: MA Experiment ID: 108434 Result: Up-regulated in Transcription
  misc_feature: MA Experiment 108434 PARAMETER Experiment Name: At_Root_Tips_cDNA_P Parameter: Tissue Value: Root Tips
  misc_feature: MA Experiment ID: 108463 Result: Down-regulated in Transcription
  misc_feature: MA Experiment 108463 PARAMETER Experiment Name: At_Germinating_Seeds_cDNA_P Parameter: Age (day) Value: 3 vs. 0
  misc_feature: MA Experiment 108463 PARAMETER Experiment Name: At_Germinating_Seeds_cDNA_P Parameter: Tissue Value: Germinating Seeds
  misc_feature: MA Experiment ID: 108464 Result: Down-regulated in Transcription
  misc_feature: MA Experiment 108464 PARAMETER Experiment Name: At_Germinating_Seeds_cDNA_P Parameter: Age (day) Value: 4 vs. 0
  misc_feature: MA Experiment 108464 PARAMETER Experiment Name: At_Germinating_Seeds_cDNA_P Parameter: Tissue Value: Germinating Seeds
  misc_feature: MA Experiment ID: 108595 Result: Down-regulated in Transcription
  misc_feature: MA Experiment 108595 PARAMETER Experiment Name: At_Ler-pi_Ovule_cDNA_P Parameter: Plant Line Value: null
  misc_feature: MA Experiment ID: 20001451 Result: Down-regulated in Transcription
  misc_feature: MA Experiment 20001451 PARAMETER Experiment Name: At_Far-red-induction_P Parameter: Age (day) Value: 7
  misc_feature: MA Experiment 20001451 PARAMETER Experiment Name: At_Far-red-induction_P Parameter: Light Value: Far-red vs. White
  misc_feature: MA Experiment 20001451 PARAMETER Experiment Name: At_Far-red-induction_P Parameter: Organism Value: A. thaliana
  misc_feature: MA Experiment 20001451 PARAMETER Experiment Name: At_Far-red-induction_P Parameter: Plant Line Value: Columbia
  misc_feature: MA Experiment 20001451 PARAMETER Experiment Name: At_Far-red-induction_P Parameter: Timepoint (hr) Value: 24
  misc_feature: MA Experiment 20001451 PARAMETER Experiment Name: At_Far-red-induction_P Parameter: Tissue Value: Whole Plant
  misc_feature: MA Experiment ID: 20001557 Result: Up-regulated in Transcription
  misc_feature: MA Experiment 20001557 PARAMETER Experiment Name: At_Drought_Soil_Dry_P Parameter: Age (day) Value: 27
  misc_feature: MA Experiment 20001557 PARAMETER Experiment Name: At_Drought_Soil_Dry_P Parameter: Organism Value: A. thaliana
  misc_feature: MA Experiment 20001557 PARAMETER Experiment Name: At_Drought_Soil_Dry_P Parameter: Plant Line Value: WS
  misc_feature: MA Experiment 20001557 PARAMETER Experiment Name: At_Drought_Soil_Dry_P Parameter: Post Timepoint (hr) Value: 3
  misc_feature: MA Experiment 20001557 PARAMETER Experiment Name: At_Drought_Soil_Dry_P Parameter: Post-Treatment Value: Re-Water vs. No Drought
  misc_feature: MA Experiment 20001557 PARAMETER Experiment Name: At_Drought_Soil_Dry_P Parameter: Timepoint (day) Value: 13
  misc_feature: MA Experiment 20001557 PARAMETER Experiment Name: At_Drought_Soil_Dry_P Parameter: Treatment Value: Drought vs. No Drought
atattcgtttcttcgatctgtgttttttagatctgtaagagttcaaaatggttgatcaagttcagcaccccactattgcgcagaaagctgccgggcagttcatgcgttcaagtgtttccaaggacgttcaagtgggttaccagaggccttctatgtatcaaagacatgcaacctacggaaactactccaatgctgcatttcaatttcctccgacatcccggatgttggcaacaactgcttctcccgtgtttgtccaaaccccaggagagaaggggttcactaactttgcccttgactttctgatgggtggtgtttctgctgccgtctccaagactgctgctgctcctattgaacgtgttaagcttttgatccagaaccaggatgagatgattaaagctggcaggctttctgaaccctacaagggtattggtgactgtttcggcaggacgattaaggatgaaggttttggttctctatggagaggaaacactgccaatgttatccgttatttccccactcaggccttgaactttgccttcaaagattacttcaaaagacttttcaactttaagaaggacagagatggttactggaagtggtttgctggtaacttggcatctggaggagcagctggtgcctcttcccttctgtttgtgtactcccttgactatgcccgtacccgtctagctaatgatgccaaggctgcaaagaaaggaggtggtggaagacagtttgatggtcttgttgatgtctacagaaagacacttaagactgatggtattgctggtctgtaccgtggattcaacatctcatgtgttggtatcattgtctaccgtggtctgtactttggactctatgactctgtgaagcctgttctcctcactggtgacttacaggacagtttcttcgctagtttcgctcttggatgggttattaccaatggtgcgggtcttgcatcctaccccattgacactgtccgcagaagaatgatgatgacgtctaatgaagctgtcaagtacaagagttctttggacgccttcaagcagatcctcaagaatgaaggagccaagtcactcttcaagggagctggtgccaacattctgcgtgctgttgcaggtgctggtgtgctttccggttacgacaaattgactctgattgtcttcggtaagaagtacggatcaggaggtgcctaagcatgcttcttcctccttttcgatttaattgcggtttaaggcccgcaataaactgagatgttgatgaaattttttttgcttaagacttagggaggcatgtgccctaaaccaaattttatatcgttctgacgccaactttttttacttatggaataattcatgtttgagagagtttgttagactcttcgattttaaagaattttggatttatgaaataaattcttctttttt

SEQ ID NO: 23658 - protein, 381 aa, Arabidopsis thaliana
  peptide (1)..(381): Ceres Seq. ID no. 13491456
  misc_feature (1)..(381): Homolog of NCBI NO: 100424 NR Description: ADP,ATP carrier protein precursor - potato
  misc_feature (1)..(381): Homolog of NCBI NO: 113457 NR Description: ADP,ATP carrier protein, mitochondrial precursor
  misc_feature (1)..(381): Homolog of NCBI NO: 1890116 NR Description: ADP/ATP translocator [Lycopersicon esculentum]
  misc_feature (6)..(380): Homolog of NCBI NO: 113461 NR Description: ADP,ATP carrier protein, mitochondrial precursor
  misc_feature (2)..(381): Homolog of NCBI NO: 3334115 NR Description: ADP,ATP carrier protein 1, mitochondrial (ADP/ATP translocase 1) (Adenine nucleotide translocator 1) (ANT
  misc_feature (1)..(381): Homolog of NCBI NO: 478810 NR Description: ADP,ATP carrier protein - Arabidopsis thaliana
  misc_feature (1)..(381): Homolog of NCBI NO: 15240640 NR Description: mitochondrial ADP,ATP carrier protein 2
  misc_feature (1)..(381): Homolog of NCBI NO: 444790 NR Description: nucleotide translocator
  misc_feature (4)..(381): Homolog of NCBI NO: 99658 NR Description: ADP,ATP carrier protein - Arabidopsis thaliana
  misc_feature (1)..(381): Homolog of NCBI NO: 15231937 NR Description: mitochondrial ADP,ATP carrier protein 1
MVDQVQHPTIAQKAAGQFMRSSVSKDVQVGYQRPSMYQRHATYGNYSNAAFQFPPTSRMLATTASPVFVQTPGEKGFTNFALDFLMGGVSAAVSKTAAAPIERVKLLIQNQDEMIKAGRLSEPYKGIGDCFGRTIKDEGFGSLWRGNTANVIRYFPTQALNFAFKDYFKRLFNFKKDRDGYWKWFAGNLASGGAAGASSLLFVYSLDYARTRLANDAKAAKKGGGGRQFDGLVDVYRKTLKTDGIAGLYRGFNISCVGIIVYRGLYFGLYDSVKPVLLTGDLQDSFFASFALGWVITNGAGLASYPIDTVRRRMMMTSNEAVKYKSSLDAFKQILKNEGAKSLFKGAGANILRAVAGAGVLSGYDKLTLIVFGKKYGSGGA

SEQ ID NO: 23659 - protein, 363 aa, Arabidopsis thaliana
  peptide (1)..(363): Ceres Seq. ID no. 13491457
  misc_feature (1)..(363): Homolog of NCBI NO: 100424 NR Description: ADP,ATP carrier protein precursor - potato
  misc_feature (1)..(363): Homolog of NCBI NO: 113457 NR Description: ADP,ATP carrier protein, mitochondrial precursor
  misc_feature (1)..(363): Homolog of NCBI NO: 1890116 NR Description: ADP/ATP translocator [Lycopersicon esculentum]
  misc_feature (1)..(362): Homolog of NCBI NO: 113461 NR Description: ADP,ATP carrier protein, mitochondrial precursor
  misc_feature (1)..(363): Homolog of NCBI NO: 3334115 NR Description: ADP,ATP carrier protein 1, mitochondrial (ADP/ATP translocase 1) (Adenine nucleotide translocator 1) (ANT
  misc_feature (1)..(363): Homolog of NCBI NO: 478810 NR Description: ADP,ATP carrier protein - Arabidopsis thaliana
  misc_feature (1)..(363): Homolog of NCBI NO: 15240640 NR Description: mitochondrial ADP,ATP carrier protein 2
  misc_feature (1)..(363): Homolog of NCBI NO: 444790 NR Description: nucleotide translocator
  misc_feature (1)..(363): Homolog of NCBI NO: 99658 NR Description: ADP,ATP carrier protein - Arabidopsis thaliana
  misc_feature (1)..(363): Homolog of NCBI NO: 15231937 NR Description: mitochondrial ADP,ATP carrier protein 1
MRSSVSKDVQVGYQRPSMYQRHATYGNYSNAAFQFPPTSRMLATTASPVFVQTPGEKGFTNFALDFLMGGVSAAVSKTAAAPIERVKLLIQNQDEMIKAGRLSEPYKGIGDCFGRTIKDEGFGSLWRGNTANVIRYFPTQALNFAFKDYFKRLFNFKKDRDGYWKWFAGNLASGGAAGASSLLFVYSLDYARTRLANDAKAAKKGGGGRQFDGLVDVYRKTLKTDGIAGLYRGFNISCVGIIVYRGLYFGLYDSVKPVLLTGDLQDSFFASFALGWVITNGAGLASYPIDTVRRRMMMTSNEAVKYKSSLDAFKQILKNEGAKSLFKGAGANILRAVAGAGVLSGYDKLTLIVFGKKYGSGGA

SEQ ID NO: 23660 - protein, 346 aa, Arabidopsis thaliana
  peptide (1)..(346): Ceres Seq. ID no. 13491458
  misc_feature (1)..(346): Homolog of NCBI NO: 100424 NR Description: ADP,ATP carrier protein precursor - potato
  misc_feature (1)..(346): Homolog of NCBI NO: 113457 NR Description: ADP,ATP carrier protein, mitochondrial precursor
  misc_feature (1)..(346): Homolog of NCBI NO: 1890116 NR Description: ADP/ATP translocator [Lycopersicon esculentum]
  misc_feature (1)..(345): Homolog of NCBI NO: 113461 NR Description: ADP,ATP carrier protein, mitochondrial precursor
  misc_feature (1)..(346): Homolog of NCBI NO: 3334115 NR Description: ADP,ATP carrier protein 1, mitochondrial (ADP/ATP translocase 1) (Adenine nucleotide translocator 1) (ANT
  misc_feature (1)..(346): Homolog of NCBI NO: 478810 NR Description: ADP,ATP carrier protein - Arabidopsis thaliana
  misc_feature (1)..(346): Homolog of NCBI NO: 15240640 NR Description: mitochondrial ADP,ATP carrier protein 2
  misc_feature (1)..(346): Homolog of NCBI NO: 444790 NR Description: nucleotide translocator
  misc_feature (1)..(346): Homolog of NCBI NO: 99658 NR Description: ADP,ATP carrier protein - Arabidopsis thaliana
  misc_feature (1)..(346): Homolog of NCBI NO: 15231937 NR Description: mitochondrial ADP,ATP carrier protein 1
MYQRHATYGNYSNAAFQFPPTSRMLATTASPVFVQTPGEKGFTNFALDFLMGGVSAAVSKTAAAPIERVKLLIQNQDEMIKAGRLSEPYKGIGDCFGRTIKDEGFGSLWRGNTANVIRYFPTQALNFAFKDYFKRLFNFKKDRDGYWKWFAGNLASGGAAGASSLLFVYSLDYARTRLANDAKAAKKGGGGRQFDGLVDVYRKTLKTDGIAGLYRGFNISCVGIIVYRGLYFGLYDSVKPVLLTGDLQDSFFASFALGWVITNGAGLASYPIDTVRRRMMMTSNEAVKYKSSLDAFKQILKNEGAKSLFKGAGANILRAVAGAGVLSGYDKLTLIVFGKKYGSGGA

SEQ ID NO: 23661 - DNA, 1494 bp, Arabidopsis thaliana
  misc_feature (1)..(1494): Ceres Seq. ID no. 13487724
  misc_feature: MA Experiment ID: 108462 Result: Down-regulated in Transcription
  misc_feature: MA Experiment 108462 PARAMETER Experiment Name: At_Germinating_Seeds_cDNA_P Parameter: Age (day) Value: 2 vs. 0
  misc_feature: MA Experiment 108462 PARAMETER Experiment Name: At_Germinating_Seeds_cDNA_P Parameter: Tissue Value: Germinating Seeds
  misc_feature: MA Experiment ID: 108463 Result: Down-regulated in Transcription
  misc_feature: MA Experiment 108463 PARAMETER Experiment Name: At_Germinating_Seeds_cDNA_P Parameter: Age (day) Value: 3 vs. 0
  misc_feature: MA Experiment 108463 PARAMETER Experiment Name: At_Germinating_Seeds_cDNA_P Parameter: Tissue Value: Germinating Seeds
  misc_feature: MA Experiment ID: 108464 Result: Down-regulated in Transcription
  misc_feature: MA Experiment 108464 PARAMETER Experiment Name: At_Germinating_Seeds_cDNA_P Parameter: Age (day) Value: 4 vs. 0
  misc_feature: MA Experiment 108464 PARAMETER Experiment Name: At_Germinating_Seeds_cDNA_P Parameter: Tissue Value: Germinating Seeds
  misc_feature: MA Experiment ID: 20000113 Result: Up-regulated in Transcription
  misc_feature: MA Experiment 20000113 PARAMETER Experiment Name: At_42deg_Heat_cDNA_P Parameter: Temperature (deg C) Value: 42 vs. 22
  misc_feature: MA Experiment 20000113 PARAMETER Experiment Name: At_42deg_Heat_cDNA_P Parameter: Timepoint (hr) Value: 8
  misc_feature: MA Experiment 20000113 PARAMETER Experiment Name: At_42deg_Heat_cDNA_P Parameter: Tissue Value: Aerial
  misc_feature: MA Experiment ID: 20000179 Result: Down-regulated in Transcription
  misc_feature: MA Experiment 20000179 PARAMETER Experiment Name: At_Germinating_Seeds_P Parameter: Age (hr) Value: 6 vs. 0
  misc_feature: MA Experiment 20000179 PARAMETER Experiment Name: At_Germinating_Seeds_P Parameter: Tissue Value: Germinating Seeds
  misc_feature: MA Experiment ID: 20000180 Result: Down-regulated in Transcription
  misc_feature: MA Experiment 20000180 PARAMETER Experiment Name: At_Germinating_Seeds_P Parameter: Age (hr) Value: 24 vs. 0
  misc_feature: MA Experiment 20000180 PARAMETER Experiment Name: At_Germinating_Seeds_P Parameter: Tissue Value: Germinating Seeds
  misc_feature: MA Experiment ID: 20000184 Result: Up-regulated in Transcription
  misc_feature: MA Experiment 20000184 PARAMETER Experiment Name: At_Shoots__P Parameter: Age (day) Value: 7
  misc_feature: MA Experiment 20000184 PARAMETER Experiment Name: At_Shoots__P Parameter: Tissue Value: Shoots vs. Whole Plant
  misc_feature: MA Experiment ID: 20000185 Result: Up-regulated in Transcription
  misc_feature: MA Experiment 20000185 PARAMETER Experiment Name: At_Roots__P Parameter: Age (day) Value: 7 vs. 21
  misc_feature: MA Experiment 20000185 PARAMETER Experiment Name: At_Roots__P Parameter: Organism Value: A. thaliana
  misc_feature: MA Experiment 20000185 PARAMETER Experiment Name: At_Roots__P Parameter: Tissue Value: Roots vs. Whole Plant
  misc_feature: MA Experiment ID: 20000227 Result: Down-regulated in Transcription
  misc_feature: MA Experiment 20000227 PARAMETER Experiment Name: At_Root-Tips-vs-Tops_P Parameter: Tissue Value: Root Tips vs. Root Tops
  misc_feature: MA Experiment ID: 20000286 Result: Down-regulated in Transcription
  misc_feature: MA Experiment 20000286 PARAMETER Experiment Name: At_Open_Flower_P Parameter: Age (day) Value: 21
  misc_feature: MA Experiment 20000286 PARAMETER Experiment Name: At_Open_Flower_P Parameter: Plant Line Value: WS
  misc_feature: MA Experiment 20000286 PARAMETER Experiment Name: At_Open_Flower_P Parameter: Tissue Value: Half Open vs. Whole Plant
  misc_feature: MA Experiment ID: 20000437 Result: Down-regulated in Transcription
  misc_feature: MA Experiment 20000437 PARAMETER Experiment Name: At_Drought_P Parameter: Age (day) Value: 8
  misc_feature: MA Experiment 20000437 PARAMETER Experiment Name: At_Drought_P Parameter: Organism Value: A. thaliana
  misc_feature: MA Experiment 20000437 PARAMETER Experiment Name: At_Drought_P Parameter: Plant Line Value: WS
  misc_feature: MA Experiment 20000437 PARAMETER Experiment Name: At_Drought_P Parameter: Timepoint (hr) Value: 24
  misc_feature: MA Experiment 20000437 PARAMETER Experiment Name: At_Drought_P Parameter: Tissue Value: Whole Plant
  misc_feature: MA Experiment 20000437 PARAMETER Experiment Name: At_Drought_P Parameter: Treatment Value: Drought vs. No Drought
  misc_feature: MA Experiment ID: 20000438 Result: Up-regulated in Transcription
  misc_feature: MA Experiment 20000438 PARAMETER Experiment Name: At_Shoots__P Parameter: Age (day) Value: 14
  misc_feature: MA Experiment 20000438 PARAMETER Experiment Name: At_Shoots__P Parameter: Tissue Value: Shoots vs. Whole Plant
  misc_feature: MA Experiment ID: 20000439 Result: Up-regulated in Transcription
  misc_feature: MA Experiment 20000439 PARAMETER Experiment Name: At_Roots__P Parameter: Age (day) Value: 14 vs. 21
  misc_feature: MA Experiment 20000439 PARAMETER Experiment Name: At_Roots__P Parameter: Organism Value: A. thaliana
  misc_feature: MA Experiment 20000439 PARAMETER Experiment Name: At_Roots__P Parameter: Tissue Value: Roots vs. Whole Plant
  misc_feature: MA Experiment ID: 20000527 Result: Down-regulated in Transcription
  misc_feature: MA Experiment 20000527 PARAMETER Experiment Name: At_10percent_PEG_P Parameter: Age (day) Value: 20
  misc_feature: MA Experiment 20000527 PARAMETER Experiment Name: At_10percent_PEG_P Parameter: Organism Value: A. thaliana
  misc_feature: MA Experiment 20000527 PARAMETER Experiment Name: At_10percent_PEG_P Parameter: Plant Line Value: WS
  misc_feature: MA Experiment 20000527 PARAMETER Experiment Name: At_10percent_PEG_P Parameter: Timepoint (day) Value: 20
  misc_feature: MA Experiment 20000527 PARAMETER Experiment Name: At_10percent_PEG_P Parameter: Tissue Value: Whole Plant
  misc_feature: MA Experiment 20000527 PARAMETER Experiment Name: At_10percent_PEG_P Parameter: Treatment Value: 10percent PEG vs. No Treatment
  misc_feature: MA Experiment ID: 20000573 Result: Down-regulated in Transcription
  misc_feature: MA Experiment 20000573 PARAMETER Experiment Name: At_100uM_ABA_Mutants__P Parameter: Organism Value: A. thaliana
  misc_feature: MA Experiment 20000573 PARAMETER Experiment Name: At_100uM_ABA_Mutants__P Parameter: Plant Line Value: CS22 vs. Ler wt
  misc_feature: MA Experiment 20000573 PARAMETER Experiment Name: At_100uM_ABA_Mutants__P Parameter: Timepoint (hr) Value: N/A
  misc_feature: MA Experiment 20000573 PARAMETER Experiment Name: At_100uM_ABA_Mutants__P Parameter: Tissue Value: Whole Plant
  misc_feature: MA Experiment 20000573 PARAMETER Experiment Name: At_100uM_ABA_Mutants__P Parameter: Treatment Value: None
  misc_feature: MA Experiment ID: 20001247 Result: Up-regulated in Transcription
  misc_feature: MA Experiment 20001247 PARAMETER Experiment Name: At_Far-red-induction_P Parameter: Age (day) Value: 7
  misc_feature: MA Experiment 20001247 PARAMETER Experiment Name: At_Far-red-induction_P Parameter: Light Value: Far-red vs. White
  misc_feature: MA Experiment 20001247 PARAMETER Experiment Name: At_Far-red-induction_P Parameter: Organism Value: A. thaliana
  misc_feature: MA Experiment 20001247 PARAMETER Experiment Name: At_Far-red-induction_P Parameter: Plant Line Value: Columbia
  misc_feature: MA Experiment 20001247 PARAMETER Experiment Name: At_Far-red-induction_P Parameter: Timepoint (hr) Value: 1
  misc_feature: MA Experiment 20001247 PARAMETER Experiment Name: At_Far-red-induction_P Parameter: Tissue Value: Whole Plant
  misc_feature: MA Experiment ID: 20001556 Result: Down-regulated in Transcription
  misc_feature: MA Experiment 20001556 PARAMETER Experiment Name: At_Drought_Soil_Dry_P Parameter: Age (day) Value: 26
  misc_feature: MA Experiment 20001556 PARAMETER Experiment Name: At_Drought_Soil_Dry_P Parameter: Organism Value: A. thaliana
  misc_feature: MA Experiment 20001556 PARAMETER Experiment Name: At_Drought_Soil_Dry_P Parameter: Plant Line Value: WS
  misc_feature: MA Experiment 20001556 PARAMETER Experiment Name: At_Drought_Soil_Dry_P Parameter: Post Timepoint (hr) Value: None
  misc_feature: MA Experiment 20001556 PARAMETER Experiment Name: At_Drought_Soil_Dry_P Parameter: Post-Treatment Value: None
  misc_feature: MA Experiment 20001556 PARAMETER Experiment Name: At_Drought_Soil_Dry_P Parameter: Timepoint (day) Value: 12
  misc_feature: MA Experiment 20001556 PARAMETER Experiment Name: At_Drought_Soil_Dry_P Parameter: Treatment Value: Drought vs. No Drought
  misc_feature: MA Experiment ID: 20001757 Result: Up-regulated in Transcription
  misc_feature: MA Experiment 20001757 PARAMETER Experiment Name: At_50mM_NH4NO3_L-to-H_P Parameter: Timepoint (hr) Value: 6
  misc_feature: MA Experiment 20001757 PARAMETER Experiment Name: At_50mM_NH4NO3_L-to-H_P Parameter: Tissue Value: Leaf
  misc_feature: MA Experiment 20001757 PARAMETER Experiment Name: At_50mM_NH4NO3_L-to-H_P Parameter: Treatment Value: 50mM NH4NO3 vs 100mM Mannitol
gtgaaaaattaattattgcccactttctctctctctctctctctgattgattcttgaaaagaaaatcaaagtctcaatagctttgttttgattctagttccattccacaattgcatctaattctcctaccgtagccttttcttctttatttgtcatcaacaactcctaaaattcatatgaaattagagaaatcgaaacgaaaagataatatttttcaagaaagagctacatatacaccttttgaccttgtaaagttggaaccctagaggcctttcaagcaaatcatcagggtaacaatttcttgatctttctttttagcgaatttccagtttttggtcaatcatggcaaacccttggtggacgaaccagagtggtttagcgggcatggtggaccattcggtctcctcaggccatcaccaaaaccatcaccaccaaagtcttcttaccaaaggagatcttggaatagccatgaatcagagccaagacaacgaccaagacgaagaagatgatcctagagaaggagccgttgaggtggtcaaccgtagaccaagaggtagaccaccaggatccaaaaacaaacccaaagctccaatctttgtgacaagagacagccccaacgcactccgtagccatgtcttggagatctccgacggcagtgacgtcgccgacacaatcgctcacttctcaagacgcaggcaacgcggcgtttgcgttctcagcgggacaggctcagtcgctaacgtcaccctccgccaagccgccgcaccaggaggtgtggtctctctccaaggcaggtttgaaatcttatctttaaccggtgctttcctccctggaccttccccacccgggtcaaccggtttaacggtttacttagccggggtccagggtcaggtcgttggaggtagcgttgtaggcccactcttagccatagggtcggtcatggtgattgctgctactttctctaacgctacttatgagagattgcccatggaagaagaggaagacggtggcggctcaagacagattcacggaggcggtgactcaccgcccagaatcggtagtaacctgcctgatctatcagggatggccgggccaggctacaatatgccgccgcatctgattccaaatggggctggtcagctagggcacgaaccatatacatgggtccacgcaagaccaccttactgactcagtgagccatttctatatataatggtctatataaataaatatatagatgaatataagcaagcaatttgaggtagtctattacaaagcttttgctctggttggaaaaataaataagtatcaaagctttgtttgttcttaatggaaatatagagcttgggaaggtagaaagagacgacattaagggactttcagattttcagtattactactccacgaaattattgaaataaataaacattgtactgtaaattagaatgtttgtctttttgtttttgtgtagtagtatttaactacaatatttgc

SEQ ID NO: 23662 - protein, 281 aa, Arabidopsis thaliana
  peptide (1)..(281): Ceres Seq. ID no. 13487725
  misc_feature (17)..(281): Homolog of NCBI NO: 15226945 NR Description: hypothetical protein [Arabidopsis thaliana]
  misc_feature (49)..(280): Homolog of NCBI NO: 34902080 NR Description: unknown protein [Oryza sativa (japonica
  misc_feature (60)..(262): Homolog of NCBI NO: 15236657 NR Description: expressed protein [Arabidopsis thaliana]
  misc_feature (44)..(280): Homolog of NCBI NO: 15233302 NR Description: expressed protein [Arabidopsis thaliana]
  misc_feature (60)..(281): Homolog of NCBI NO: 38346718 NR Description: OSJNBa0086O06.16 [Oryza sativa (japonica
  misc_feature (60)..(281): Homolog of NCBI NO: 15235815 NR Description: DNA binding protein -related [Arabidopsis
  misc_feature (60)..(281): Homolog of NCBI NO: 15234404 NR Description: DNA-binding protein -related [Arabidopsis
  misc_feature (19)..(278): Homolog of NCBI NO: 18396925 NR Description: expressed protein [Arabidopsis thaliana]
  misc_feature (1)..(281): Homolog of NCBI NO: 21593180 NR Description: putative DNA-binding protein [Arabidopsis
  misc_feature (1)..(281): Homolog of NCBI NO: 18414224 NR Description: expressed protein [Arabidopsis thaliana]
MANPWWTNQSGLAGMVDHSVSSGHHQNHHHQSLLTKGDLGIAMNQSQDNDQDEEDDPREGAVEVVNRRPRGRPPGSKNKPKAPIFVTRDSPNALRSHVLEISDGSDVADTIAHFSRRRQRGVCVLSGTGSVANVTLRQAAAPGGVVSLQGRFEILSLTGAFLPGPSPPGSTGLTVYLAGVQGQVVGGSVVGPLLAIGSVMVIAATFSNATYERLPMEEEEDGGGSRQIHGGGDSPPRIGSNLPDLSGMAGPGYNMPPHLIPNGAGQLGHEPYTWVHARPPY

SEQ ID NO: 23663 - protein, 267 aa, Arabidopsis thaliana
  peptide (1)..(267): Ceres Seq. ID no. 13487726
  misc_feature (3)..(267): Homolog of NCBI NO: 15226945 NR Description: hypothetical protein [Arabidopsis thaliana]
  misc_feature (35)..(266): Homolog of NCBI NO: 34902080 NR Description: unknown protein [Oryza sativa (japonica
  misc_feature (46)..(248): Homolog of NCBI NO: 15236657 NR Description: expressed protein [Arabidopsis thaliana]
  misc_feature (30)..(266): Homolog of NCBI NO: 15233302 NR Description: expressed protein [Arabidopsis thaliana]
  misc_feature (46)..(267): Homolog of NCBI NO: 38346718 NR Description: OSJNBa0086O06.16 [Oryza sativa (japonica
  misc_feature (46)..(267): Homolog of NCBI NO: 15235815 NR Description: DNA binding protein -related [Arabidopsis
  misc_feature (46)..(267): Homolog of NCBI NO: 15234404 NR Description: DNA-binding protein -related [Arabidopsis
  misc_feature (5)..(264): Homolog of NCBI NO: 18396925 NR Description: expressed protein [Arabidopsis thaliana]
  misc_feature (1)..(267): Homolog of NCBI NO: 21593180 NR Description: putative DNA-binding protein [Arabidopsis
  misc_feature (1)..(267): Homolog of NCBI NO: 18414224 NR Description: expressed protein [Arabidopsis thaliana]
MVDHSVSSGHHQNHHHQSLLTKGDLGIAMNQSQDNDQDEEDDPREGAVEVVNRRPRGRPPGSKNKPKAPIFVTRDSPNALRSHVLEISDGSDVADTIAHFSRRRQRGVCVLSGTGSVANVTLRQAAAPGGVVSLQGRFEILSLTGAFLPGPSPPGSTGLTVYLAGVQGQVVGGSVVGPLLAIGSVMVIAATFSNATYERLPMEEEEDGGGSRQIHGGGDSPPRIGSNLPDLSGMAGPGYNMPPHLIPNGAGQLGHEPYTWVHARPPY

SEQ ID NO: 23664 - protein, 239 aa, Arabidopsis thaliana
  peptide (1)..(239): Ceres Seq. ID no. 13487727
  misc_feature (1)..(239): Homolog of NCBI NO: 15226945 NR Description: hypothetical protein [Arabidopsis thaliana]
  misc_feature (7)..(238): Homolog of NCBI NO: 34902080 NR Description: unknown protein [Oryza sativa (japonica
  misc_feature (18)..(220): Homolog of NCBI NO: 15236657 NR Description: expressed protein [Arabidopsis thaliana]
  misc_feature (2)..(238): Homolog of NCBI NO: 15233302 NR Description: expressed protein [Arabidopsis thaliana]
  misc_feature (18)..(239): Homolog of NCBI NO: 38346718 NR Description: OSJNBa0086O06.16 [Oryza sativa (japonica
  misc_feature (18)..(239): Homolog of NCBI NO: 15235815 NR Description: DNA binding protein -related [Arabidopsis
  misc_feature (18)..(239): Homolog of NCBI NO: 15234404 NR Description: DNA-binding protein -related [Arabidopsis
  misc_feature (1)..(236): Homolog of NCBI NO: 18396925 NR Description: expressed protein [Arabidopsis thaliana]
  misc_feature (1)..(239): Homolog of NCBI NO: 21593180 NR Description: putative DNA-binding protein [Arabidopsis
  misc_feature (1)..(239): Homolog of NCBI NO: 18414224 NR Description: expressed protein [Arabidopsis thaliana]
MNQSQDNDQDEEDDPREGAVEVVNRRPRGRPPGSKNKPKAPIFVTRDSPNALRSHVLEISDGSDVADTIAHFSRRRQRGVCVLSGTGSVANVTLRQAAAPGGVVSLQGRFEILSLTGAFLPGPSPPGSTGLTVYLAGVQGQVVGGSVVGPLLAIGSVMVIAATFSNATYERLPMEEEEDGGGSRQIHGGGDSPPRIGSNLPDLSGMAGPGYNMPPHLIPNGAGQLGHEPYTWVHARPPY

SEQ ID NO: 23665 - DNA, 1718 bp, Arabidopsis thaliana
  misc_feature (1)..(1718): Ceres Seq. ID no. 12321491
  misc_feature: MA Experiment ID: 108572 Result: Up-regulated in Transcription
  misc_feature: MA Experiment 108572 PARAMETER Experiment Name: At_Drought_cDNA_P Parameter: Timepoint (hr) Value: 1
  misc_feature: MA Experiment 108572 PARAMETER Experiment Name: At_Drought_cDNA_P Parameter: Tissue Value: Aerial
  misc_feature: MA Experiment 108572 PARAMETER Experiment Name: At_Drought_cDNA_P Parameter: Treatment Value: Drought vs. No Drought
  misc_feature: MA Experiment ID: 108607 Result: Up-regulated in Transcription
  misc_feature: MA Experiment 108607 PARAMETER Experiment Name: At_100uM_ABA_cDNA_P Parameter: Timepoint (hr) Value: 4
  misc_feature: MA Experiment 108607 PARAMETER Experiment Name: At_100uM_ABA_cDNA_P Parameter: Tissue Value: Aerial
  misc_feature: MA Experiment 108607 PARAMETER Experiment Name: At_100uM_ABA_cDNA_P Parameter: Treatment Value: 100uM ABA vs. No Treatment
  misc_feature: MA Experiment ID: 20000089 Result: Down-regulated in Transcription
  misc_feature: MA Experiment ID: 20000111 Result: Down-regulated in Transcription
  misc_feature: MA Experiment 20000111 PARAMETER Experiment Name: At_42deg_Heat_cDNA_P Parameter: Temperature (deg C) Value: 42 vs. 22
  misc_feature: MA Experiment 20000111 PARAMETER Experiment Name: At_42deg_Heat_cDNA_P Parameter: Timepoint (hr) Value: 6
  misc_feature: MA Experiment 20000111 PARAMETER Experiment Name: At_42deg_Heat_cDNA_P Parameter: Tissue Value: Aerial
  misc_feature: MA Experiment ID: 20000227 Result: Up-regulated in Transcription
  misc_feature: MA Experiment 20000227 PARAMETER Experiment Name: At_Root-Tips-vs-Tops_P Parameter: Tissue Value: Root Tips vs. Root Tops
atttaactgtctcttcttcaaaaccaaaaccaaaaccaaaaccaaaaccttctattgtttccctcccacgctataattcatagacataagagaatgaggaaaggacagggctactcctactctgtaatcgcatcggtgttggtgttactgtgtgtggtggtgtctcgaatcgaatgcagcagccaagtgcacgccctgagccgtctttacctgtctaagcgaggggttggtggttcgtccaccatggacacaagccatttcaaggcggttaaggatttgaaaccgtcttcgctgcggagtgctgctaatcaggaggggttaagaaagagagatctgatacggagattgcccgggacagcctcccgttagtttcgatcagtacggcggctatgttaccgtcaacgaatccgccgggcgttcctttttctactatttcgtggaagcctctaagtctaaagattcttctcctctgcttctctggctcaacggcggaccgggatgctcgtcactggcgtatggagcattacaagagcttgggccgttcagagtacacagcgacggcaaaacgctttttagaaaccgatatgcatggaacaatgctgcgaatgtcttgttcttagaatcgccggcgggagtggggttctcgtacaccaacacgacgtcggacctggagaagcacggggacaggaataccgcagctgataactacatcttcctggttaactggctggagaggttcccggagtacaaaggcagggacttgtacatcgccggtgagagctatgccggccactatgttccgcaacttgcccatactatccttctccatcaccggagcttcttcaatctcaagggcattctgataggaaatgcggtgatcaacgacgagaccgacttgatgggtatgtacgactttttcgagagtcatgctttgatctccgaagattctttggctagactcaagagcaactgcgatctcaagacggagtctgcgagtgtaatgactgaggagtgcgcggtggtgtccgaccaaatagacatggatacatattacctcgacatctacaacatatacgctccattgtgcctcaactccacgctcactcgcaggcccaagcgaggaaccacaataagggagtttgacccctgcagtgaccattacgtgcaggcctacctgaacagacctgaagtccaagcggccctgcacgcaaacgctacgaagctgccttacgagtggcagccgtgcagcagtgtgataaagaagtggaacgacagtcctaccacagtgattcctctcatcaaggagctgatgggtcagggcgtccgcgtctgggtgttcagcggagacacagacgggagaattccagtgacgtccaccaaatactccctcaagaagatgaatctaacggccaaaacggcctggcatccctggtacctagggggtgaggtgggtggatacacagaggagtacaaagggaaattgacatttgccacagtgagaggggctggtcatcaagttcccagcttccagccaaagcgctctctttcactcttcattcacttcctcaatgacactcctctccctgacacctctcgttactaaatattctatctgagattgtaatttctctcttaattagcttttattcctcctcccatccattttttatctactatttcattacatacctttgaatgttaatatctgttttgctccc

SEQ ID NO: 23666 - protein, 234 aa, Arabidopsis thaliana
  peptide (1)..(234): Ceres Seq. ID no. 12321492
  misc_feature (1)..(233): Homolog of NCBI NO: 34899032 NR Description: putative serine carboxypeptidase II-3 precursor
  misc_feature (1)..(230): Homolog of NCBI NO: 1706082 NR Description: Serine carboxypeptidase II-3 precursor (CP-MII.3)
  misc_feature (1)..(231): Homolog of NCBI NO: 15231103 NR Description: serine-type carboxypeptidase-like protein
  misc_feature (1)..(229): Homolog of NCBI NO: 11967861 NR Description: putative serine carboxypeptidase [Pisum sativum]
  misc_feature (1)..(234): Homolog of NCBI NO: 15229439 NR Description: serin carboxypeptidase - like protein
  misc_feature (1)..(231): Homolog of NCBI NO: 15224995 NR Description: putative serine carboxypeptidase II
  misc_feature (1)..(233): Homolog of NCBI NO: 29367473 NR Description: serine carboxypepsidase [Oryza sativa (japonica
  misc_feature (1)..(223): Homolog of NCBI NO: 34329345 NR Description: putative serine carboxypeptidase [Medicago
  misc_feature (1)..(234): Homolog of NCBI NO: 27808556 NR Description: At3g63470 [Arabidopsis thaliana]
  misc_feature (1)..(232): Homolog of NCBI NO: 15231099 NR Description: serine-type carboxypeptidase like protein
MGMYDFFESHALISEDSLARLKSNCDLKTESASVMTEECAVVSDQIDMDTYYLDIYNIYAPLCLNSTLTRRPKRGTTIREFDPCSDHYVQAYLNRPEVQAALHANATKLPYEWQPCSSVIKKWNDSPTTVIPLIKELMGQGVRVWVFSGDTDGRIPVTSTKYSLKKMNLTAKTAWHPWYLGGEVGGYTEEYKGKLTFATVRGAGHQVPSFQPKRSLSLFIHFLNDTPLPDTSRY

SEQ ID NO: 23667 - protein, 232 aa, Arabidopsis thaliana
  peptide (1)..(232): Ceres Seq. ID no. 12321493
  misc_feature (1)..(229): Homolog of NCBI NO: 15224995 NR Description: putative serine carboxypeptidase II
  misc_feature (1)..(231): Homolog of NCBI NO: 29367473 NR Description: serine carboxypepsidase [Oryza sativa (japonica
  misc_feature (1)..(221): Homolog of NCBI NO: 34329345 NR Description: putative serine carboxypeptidase [Medicago
  misc_feature (1)..(232): Homolog of NCBI NO: 27808556 NR Description: At3g63470 [Arabidopsis thaliana]
  misc_feature (1)..(230): Homolog of NCBI NO: 15231099 NR Description: serine-type carboxypeptidase like protein
  misc_feature (1)..(231): Homolog of NCBI NO: 34899032 NR Description: putative serine carboxypeptidase II-3 precursor
  misc_feature (1)..(228): Homolog of NCBI NO: 1706082 NR Description: Serine carboxypeptidase II-3 precursor (CP-MII.3)
  misc_feature (1)..(229): Homolog of NCBI NO: 15231103 NR Description: serine-type carboxypeptidase-like protein
  misc_feature (1)..(227): Homolog of NCBI NO: 11967861 NR Description: putative serine carboxypeptidase [Pisum sativum]
  misc_feature (1)..(232): Homolog of NCBI NO: 15229439 NR Description: serin carboxypeptidase - like protein
MYDFFESHALISEDSLARLKSNCDLKTESASVMTEECAVVSDQIDMDTYYLDIYNIYAPLCLNSTLTRRPKRGTTIREFDPCSDHYVQAYLNRPEVQAALHANATKLPYEWQPCSSVIKKWNDSPTTVIPLIKELMGQGVRVWVFSGDTDGRIPVTSTKYSLKKMNLTAKTAWHPWYLGGEVGGYTEEYKGKLTFATVRGAGHQVPSFQPKRSLSLFIHFLNDTPLPDTSRY

SEQ ID NO: 23668 - protein, 200 aa, Arabidopsis thaliana
  peptide (1)..(200): Ceres Seq. ID no. 12321494
  misc_feature (1)..(197): Homolog of NCBI NO: 15224995 NR Description: putative serine carboxypeptidase II
  misc_feature (1)..(199): Homolog of NCBI NO: 29367473 NR Description: serine carboxypepsidase [Oryza sativa (japonica
  misc_feature (1)..(189): Homolog of NCBI NO: 34329345 NR Description: putative serine carboxypeptidase [Medicago
  misc_feature (1)..(200): Homolog of NCBI NO: 27808556 NR Description: At3g63470 [Arabidopsis thaliana]
  misc_feature (1)..(198): Homolog of NCBI NO: 15231099 NR Description: serine-type carboxypeptidase like protein
  misc_feature (1)..(199): Homolog of NCBI NO: 34899032 NR Description: putative serine carboxypeptidase II-3 precursor
  misc_feature (1)..(196): Homolog of NCBI NO: 1706082 NR Description: Serine carboxypeptidase II-3 precursor (CP-MII.3)
  misc_feature (1)..(197): Homolog of NCBI NO: 15231103 NR Description: serine-type carboxypeptidase-like protein
  misc_feature (1)..(195): Homolog of NCBI NO: 11967861 NR Description: putative serine carboxypeptidase [Pisum sativum]
  misc_feature (1)..(200): Homolog of NCBI NO: 15229439 NR Description: serin carboxypeptidase - like protein
MTEECAVVSDQIDMDTYYLDIYNIYAPLCLNSTLTRRPKRGTTIREFDPCSDHYVQAYLNRPEVQAALHANATKLPYEWQPCSSVIKKWNDSPTTVIPLIKELMGQGVRVWVFSGDTDGRIPVTSTKYSLKKMNLTAKTAWHPWYLGGEVGGYTEEYKGKLTFATVRGAGHQVPSFQPKRSLSLFIHFLNDTPLPDTSRY

SEQ ID NO: 23669 - DNA, 780 bp, Arabidopsis thaliana
  misc_feature (1)..(780): Ceres Seq. ID no. 13486730
  misc_feature: MA Experiment ID: 108462 Result: Down-regulated in Transcription
  misc_feature: MA Experiment 108462 PARAMETER Experiment Name: At_Germinating_Seeds_cDNA_P Parameter: Age (day) Value: 2 vs. 0
  misc_feature: MA Experiment 108462 PARAMETER Experiment Name: At_Germinating_Seeds_cDNA_P Parameter: Tissue Value: Germinating Seeds
  misc_feature: MA Experiment ID: 108463 Result: Down-regulated in Transcription
  misc_feature: MA Experiment 108463 PARAMETER Experiment Name: At_Germinating_Seeds_cDNA_P Parameter: Age (day) Value: 3 vs. 0
  misc_feature: MA Experiment 108463 PARAMETER Experiment Name: At_Germinating_Seeds_cDNA_P Parameter: Tissue Value: Germinating Seeds
  misc_feature: MA Experiment ID: 108464 Result: Down-regulated in Transcription
  misc_feature: MA Experiment 108464 PARAMETER Experiment Name: At_Germinating_Seeds_cDNA_P Parameter: Age (day) Value: 4 vs. 0
  misc_feature: MA Experiment 108464 PARAMETER Experiment Name: At_Germinating_Seeds_cDNA_P Parameter: Tissue Value: Germinating Seeds
  misc_feature: MA Experiment ID: 20000069 Result: Down-regulated in Transcription
  misc_feature: MA Experiment 20000069 PARAMETER Experiment Name: At_100uM_ABA_Mutants_cDNA_P Parameter: Plant Line Value: CS23
  misc_feature: MA Experiment 20000069 PARAMETER Experiment Name: At_100uM_ABA_Mutants_cDNA_P Parameter: Timepoint (hr) Value: 6
  misc_feature: MA Experiment 20000069 PARAMETER Experiment Name: At_100uM_ABA_Mutants_cDNA_P Parameter: Tissue Value: Aerial
  misc_feature: MA Experiment 20000069 PARAMETER Experiment Name: At_100uM_ABA_Mutants_cDNA_P Parameter: Treatment Value: 100uM ABA vs. No Treatment
  misc_feature: MA Experiment ID: 20000071 Result: Down-regulated in Transcription
  misc_feature: MA Experiment 20000071 PARAMETER Experiment Name: At_100uM_ABA_Mutants_cDNA_P Parameter: Plant Line Value: CS8104
  misc_feature: MA Experiment 20000071 PARAMETER Experiment Name: At_100uM_ABA_Mutants_cDNA_P Parameter: Timepoint (hr) Value: 6
  misc_feature: MA Experiment 20000071 PARAMETER Experiment Name: At_100uM_ABA_Mutants_cDNA_P Parameter: Tissue Value: Aerial
  misc_feature: MA Experiment 20000071 PARAMETER Experiment Name: At_100uM_ABA_Mutants_cDNA_P Parameter: Treatment Value: 100uM ABA vs. No Treatment
  misc_feature: MA Experiment ID: 20000072 Result: Down-regulated in Transcription
  misc_feature: MA Experiment 20000072 PARAMETER Experiment Name: At_100uM_ABA_Mutants_cDNA_P Parameter: Plant Line Value: CS8105
  misc_feature: MA Experiment 20000072 PARAMETER Experiment Name: At_100uM_ABA_Mutants_cDNA_P Parameter: Timepoint (hr) Value: 6
  misc_feature: MA Experiment 20000072 PARAMETER Experiment Name: At_100uM_ABA_Mutants_cDNA_P Parameter: Tissue Value: Aerial
  misc_feature: MA Experiment 20000072 PARAMETER Experiment Name: At_100uM_ABA_Mutants_cDNA_P Parameter: Treatment Value: 100uM ABA vs. No Treatment
  misc_feature: MA Experiment ID: 20000086 Result: Down-regulated in Transcription
  misc_feature: MA Experiment 20000086 PARAMETER Experiment Name: At_100uM_ABA_Mutants_cDNA_P Parameter: Plant Line Value: CS22
  misc_feature: MA Experiment 20000086 PARAMETER Experiment Name: At_100uM_ABA_Mutants_cDNA_P Parameter: Timepoint (hr) Value: 6
  misc_feature: MA Experiment 20000086 PARAMETER Experiment Name: At_100uM_ABA_Mutants_cDNA_P Parameter: Tissue Value: Aerial
  misc_feature: MA Experiment 20000086 PARAMETER Experiment Name: At_100uM_ABA_Mutants_cDNA_P Parameter: Treatment Value: 100uM ABA vs. No Treatment
  misc_feature: MA Experiment ID: 20000087 Result: Down-regulated in Transcription
  misc_feature: MA Experiment 20000087 PARAMETER Experiment Name: At_100uM_ABA_Mutants_cDNA_P Parameter: Plant Line Value: WS
  misc_feature: MA Experiment 20000087 PARAMETER Experiment Name: At_100uM_ABA_Mutants_cDNA_P Parameter: Timepoint (hr) Value: 6
  misc_feature: MA Experiment 20000087 PARAMETER Experiment Name: At_100uM_ABA_Mutants_cDNA_P Parameter: Tissue Value: Aerial
  misc_feature: MA Experiment 20000087 PARAMETER Experiment Name: At_100uM_ABA_Mutants_cDNA_P Parameter: Treatment Value: 100uM ABA vs. No Treatment
  misc_feature: MA Experiment ID: 20000088 Result: Down-regulated in Transcription
  misc_feature: MA Experiment 20000088 PARAMETER Experiment Name: At_100uM_ABA_Mutants_cDNA_P Parameter: Plant Line Value: Landsberg
  misc_feature: MA Experiment 20000088 PARAMETER Experiment Name: At_100uM_ABA_Mutants_cDNA_P Parameter: Timepoint (hr) Value: 6
  misc_feature: MA Experiment 20000088 PARAMETER Experiment Name: At_100uM_ABA_Mutants_cDNA_P Parameter: Tissue Value: Aerial
  misc_feature: MA Experiment 20000088 PARAMETER Experiment Name: At_100uM_ABA_Mutants_cDNA_P Parameter: Treatment Value: 100uM ABA vs. No Treatment
  misc_feature: MA Experiment ID: 20000089 Result: Down-regulated in Transcription
  misc_feature: MA Experiment ID: 20000090 Result: Down-regulated in Transcription
  misc_feature: MA Experiment ID: 20000184 Result: Up-regulated in Transcription
  misc_feature: MA Experiment 20000184 PARAMETER Experiment Name: At_Shoots__P Parameter: Age (day) Value: 7
  misc_feature: MA Experiment 20000184 PARAMETER Experiment Name: At_Shoots__P Parameter: Tissue Value: Shoots vs. Whole Plant
tgagagagatctgttacgacagttatgtctccgtcgacgacgacgattttcatcggtcccatcttagcggtggacgccgccgtatctcacgcgattcacacggcggcgaaaccattcctcccaccatttgtcctcctcctcctcgaaatctcagctgatttccgattctccttccccgtatccctttccttcctcctctcccctccattacgctctttcctcgtccctttcctcctcggcctcctcttcgatctaatcttcgtcggaatcgtaaaattaatcttccgtcgtgctcgtcccgcttacaatcacccttcaatgtccgccgctgtatcagctgatcactactcgttcccctcaggtcacgcttctcgcgttttcttcgttgctgcatctgttcacttcttctctgctgctgctgaagcttccatgactggtccaagctactccttcttagatggatggatcagagatcataacgatggcgatgtgaaggtagaagttgtggtcgttgtatggatctgggcaacagtgactgcaatttcaaggattcttttaggaagacattacgttctcgatgtagctgctggtgcttttttagggattgtagaagctctctttgctcttcgatttctgagatttgatgaaatgatctttgggaggtaacaaatgtatccaaattgttgttgtttttaacaaattgttctgtaatttttgtttcgattacattgagaagaagaattgtattgttcatgaatcaaagattgttccttttgtttc

SEQ ID NO: 23670 - protein, 213 aa, Arabidopsis thaliana
  peptide (1)..(213): Ceres Seq. ID no. 13486731
  misc_feature (58)..(209): Pfam Name: PAP2 superfamily Pfam Description: PAP2 superfamily
  misc_feature (158)..(196): Homolog of NCBI NO: 14042336 NR Description: unnamed protein product [Homo sapiens]
  misc_feature (66)..(129): Homolog of NCBI NO: 14042336 NR Description: unnamed protein product [Homo sapiens]
  misc_feature (158)..(196): Homolog of NCBI NO: 12698216 NR Description: hypothetical protein [Macaca fascicularis]
  misc_feature (66)..(122): Homolog of NCBI NO: 12698216 NR Description: hypothetical protein [Macaca fascicularis]
  misc_feature (162)..(196): Homolog of NCBI NO: 12855379 NR Description: unnamed protein product [Mus musculus]
  misc_feature (1)..(122): Homolog of NCBI NO: 12855379 NR Description: unnamed protein product [Mus musculus]
  misc_feature (164)..(198): Homolog of NCBI NO: 24583289 NR Description: CG31717-PA [Drosophila melanogaster]
  misc_feature (40)..(121): Homolog of NCBI NO: 24583289 NR Description: CG31717-PA [Drosophila melanogaster]
  misc_feature (2)..(209): Homolog of NCBI NO: 12247468 NR Description: PnFL-1 [Ipomoea nil]
  misc_feature (1)..(213): Homolog of NCBI NO: 15235691 NR Description: phosphatidic acid phosphatase (PAP2)-related
MSPSTTTIFIGPILAVDAAVSHAIHTAAKPFLPPFVLLLLEISADFRFSFPVSLSFLLSPPLRSFLVPFLLGLLFDLIFVGIVKLIFRRARPAYNHPSMSAAVSADHYSFPSGHASRVFFVAASVHFFSAAAEASMTGPSYSFLDGWIRDHNDGDVKVEVVVVVWIWATVTAISRILLGRHYVLDVAAGAFLGIVEALFALRFLRFDEMIFGR

SEQ ID NO: 23671 - protein, 115 aa, Arabidopsis thaliana
  peptide (1)..(115): Ceres Seq. ID no. 13486732
  misc_feature (1)..(111): Pfam Name: PAP2 superfamily Pfam Description: PAP2 superfamily
  misc_feature (60)..(98): Homolog of NCBI NO: 14042336 NR Description: unnamed protein product [Homo sapiens]
  misc_feature (1)..(31): Homolog of NCBI NO: 14042336 NR Description: unnamed protein product [Homo sapiens]
  misc_feature (60)..(98): Homolog of NCBI NO: 12698216 NR Description: hypothetical protein [Macaca fascicularis]
  misc_feature (1)..(24): Homolog of NCBI NO: 12698216 NR Description: hypothetical protein [Macaca fascicularis]
  misc_feature (64)..(98): Homolog of NCBI NO: 12855379 NR Description: unnamed protein product [Mus musculus]
  misc_feature (1)..(24): Homolog of NCBI NO: 12855379 NR Description: unnamed protein product [Mus musculus]
  misc_feature (66)..(100): Homolog of NCBI NO: 24583289 NR Description: CG31717-PA [Drosophila melanogaster]
  misc_feature (1)..(23): Homolog of NCBI NO: 24583289 NR Description: CG31717-PA [Drosophila melanogaster]
  misc_feature (1)..(111): Homolog of NCBI NO: 12247468 NR Description: PnFL-1 [Ipomoea nil]
  misc_feature (1)..(115): Homolog of NCBI NO: 15235691 NR Description: phosphatidic acid phosphatase (PAP2)-related
MSAAVSADHYSFPSGHASRVFFVAASVHFFSAAAEASMTGPSYSFLDGWIRDHNDGDVKVEVVVVVWIWATVTAISRILLGRHYVLDVAAGAFLGIVEALFALRFLRFDEMIFGR

SEQ ID NO: 23672 - DNA, 1365 bp, Arabidopsis thaliana
  misc_feature (1)..(1365): Ceres Seq. ID no. 12338560
  misc_feature: MA Experiment ID: 20000171 Result: Down-regulated in Transcription
  misc_feature: MA Experiment 20000171 PARAMETER Experiment Name: At_42deg_Heat_P Parameter: Age (day) Value: 14
  misc_feature: MA Experiment 20000171 PARAMETER Experiment Name: At_42deg_Heat_P Parameter: Organism Value: A. thaliana
  misc_feature: MA Experiment 20000171 PARAMETER Experiment Name: At_42deg_Heat_P Parameter: Plant Line Value: WS
  misc_feature: MA Experiment 20000171 PARAMETER Experiment Name: At_42deg_Heat_P Parameter: Temperature (deg C) Value: 42 vs. 22
  misc_feature: MA Experiment 20000171 PARAMETER Experiment Name: At_42deg_Heat_P Parameter: Timepoint (hr) Value: 1
  misc_feature: MA Experiment 20000171 PARAMETER Experiment Name: At_42deg_Heat_P Parameter: Tissue Value: Aerial
  misc_feature: MA Experiment ID: 20000184 Result: Up-regulated in Transcription
  misc_feature: MA Experiment 20000184 PARAMETER Experiment Name: At_Shoots__P Parameter: Age (day) Value: 7
  misc_feature: MA Experiment 20000184 PARAMETER Experiment Name: At_Shoots__P Parameter: Tissue Value: Shoots vs. Whole Plant
  misc_feature: MA Experiment ID: 20000234 Result: Up-regulated in Transcription
  misc_feature: MA Experiment 20000234 PARAMETER Experiment Name: At_Siliques_P Parameter: Age (day) Value: 21
  misc_feature: MA Experiment 20000234 PARAMETER Experiment Name: At_Siliques_P Parameter: Organism Value: A. thaliana
  misc_feature: MA Experiment 20000234 PARAMETER Experiment Name: At_Siliques_P Parameter: Plant Line Value: WS
  misc_feature: MA Experiment 20000234 PARAMETER Experiment Name: At_Siliques_P Parameter: Tissue Value: Less Than 5mm Siliques vs. Whole Plant
  misc_feature: MA Experiment ID: 20000235 Result: Up-regulated in Transcription
  misc_feature: MA Experiment 20000235 PARAMETER Experiment Name: At_Siliques_P Parameter: Age (day) Value: 21
  misc_feature: MA Experiment 20000235 PARAMETER Experiment Name: At_Siliques_P Parameter: Organism Value: A. thaliana
  misc_feature: MA Experiment 20000235 PARAMETER Experiment Name: At_Siliques_P Parameter: Plant Line Value: WS
  misc_feature: MA Experiment 20000235 PARAMETER Experiment Name: At_Siliques_P Parameter: Tissue Value: 5-10mm Siliques vs. Whole Plant
  misc_feature: MA Experiment ID: 20000265 Result: Up-regulated in Transcription
  misc_feature: MA Experiment 20000265 PARAMETER Experiment Name: At_Open_Flower_P Parameter: Age (day) Value: 21
  misc_feature: MA Experiment 20000265 PARAMETER Experiment Name: At_Open_Flower_P Parameter: Plant Line Value: WS
  misc_feature: MA Experiment 20000265 PARAMETER Experiment Name: At_Open_Flower_P Parameter: Tissue Value: Closed Flower vs. Whole Plant
  misc_feature: MA Experiment ID: 20000286 Result: Up-regulated in Transcription
  misc_feature: MA Experiment 20000286 PARAMETER Experiment Name: At_Open_Flower_P Parameter: Age (day) Value: 21
  misc_feature: MA Experiment 20000286 PARAMETER Experiment Name: At_Open_Flower_P Parameter: Plant Line Value: WS
  misc_feature: MA Experiment 20000286 PARAMETER Experiment Name: At_Open_Flower_P Parameter: Tissue Value: Half Open vs. Whole Plant
  misc_feature: MA Experiment ID: 20000438 Result: Up-regulated in Transcription
  misc_feature: MA Experiment 20000438 PARAMETER Experiment Name: At_Shoots__P Parameter: Age (day) Value: 14
  misc_feature: MA Experiment 20000438 PARAMETER Experiment Name: At_Shoots__P Parameter: Tissue Value: Shoots vs. Whole Plant
  misc_feature: MA Experiment ID: 20000453 Result: Up-regulated in Transcription
  misc_feature: MA Experiment 20000453 PARAMETER Experiment Name: At_100uM_ABA_P Parameter: Age (day) Value: 15
  misc_feature: MA Experiment 20000453 PARAMETER Experiment Name: At_100uM_ABA_P Parameter: Organism Value: A. thaliana
  misc_feature: MA Experiment 20000453 PARAMETER Experiment Name: At_100uM_ABA_P Parameter: Plant Line Value: WS
  misc_feature: MA Experiment 20000453 PARAMETER Experiment Name: At_100uM_ABA_P Parameter: Timepoint (hr) Value: 24
  misc_feature: MA Experiment 20000453 PARAMETER Experiment Name: At_100uM_ABA_P Parameter: Tissue Value: Aerial
  misc_feature: MA Experiment 20000453 PARAMETER Experiment Name: At_100uM_ABA_P Parameter: Treatment Value: 100uM ABA vs. No Treatment
  misc_feature: MA Experiment ID: 20001557 Result: Down-regulated in Transcription
  misc_feature: MA Experiment 20001557 PARAMETER Experiment Name: At_Drought_Soil_Dry_P Parameter: Age (day) Value: 27
  misc_feature: MA Experiment 20001557 PARAMETER Experiment Name: At_Drought_Soil_Dry_P Parameter: Organism Value: A. thaliana
  misc_feature: MA Experiment 20001557 PARAMETER Experiment Name: At_Drought_Soil_Dry_P Parameter: Plant Line Value: WS
  misc_feature: MA Experiment 20001557 PARAMETER Experiment Name: At_Drought_Soil_Dry_P Parameter: Post Timepoint (hr) Value: 3
  misc_feature: MA Experiment 20001557 PARAMETER Experiment Name: At_Drought_Soil_Dry_P Parameter: Post-Treatment Value: Re-Water vs. No Drought
  misc_feature: MA Experiment 20001557 PARAMETER Experiment Name: At_Drought_Soil_Dry_P Parameter: Timepoint (day) Value: 13
  misc_feature: MA Experiment 20001557 PARAMETER Experiment Name: At_Drought_Soil_Dry_P Parameter: Treatment Value: Drought vs. No Drought
  misc_feature: MA Experiment ID: 20001558 Result: Down-regulated in Transcription
  misc_feature: MA Experiment 20001558 PARAMETER Experiment Name: At_Drought_Soil_Dry_P Parameter: Age (day) Value: 27
  misc_feature: MA Experiment 20001558 PARAMETER Experiment Name: At_Drought_Soil_Dry_P Parameter: Organism Value: A. thaliana
  misc_feature: MA Experiment 20001558 PARAMETER Experiment Name: At_Drought_Soil_Dry_P Parameter: Plant Line Value: WS
  misc_feature: MA Experiment 20001558 PARAMETER Experiment Name: At_Drought_Soil_Dry_P Parameter: Post Timepoint (hr) Value: 6
  misc_feature: MA Experiment 20001558 PARAMETER Experiment Name: At_Drought_Soil_Dry_P Parameter: Post-Treatment Value: Re-Water vs. No Drought
  misc_feature: MA Experiment 20001558 PARAMETER Experiment Name: At_Drought_Soil_Dry_P Parameter: Timepoint (day) Value: 13
  misc_feature: MA Experiment 20001558 PARAMETER Experiment Name: At_Drought_Soil_Dry_P Parameter: Treatment Value: Drought vs. No Drought
  misc_feature: MA Experiment ID: 20001560 Result: Down-regulated in Transcription
  misc_feature: MA Experiment 20001560 PARAMETER Experiment Name: At_Drought_Soil_Dry_P Parameter: Age (day) Value: 28
  misc_feature: MA Experiment 20001560 PARAMETER Experiment Name: At_Drought_Soil_Dry_P Parameter: Organism Value: A. thaliana
  misc_feature: MA Experiment 20001560 PARAMETER Experiment Name: At_Drought_Soil_Dry_P Parameter: Plant Line Value: WS
  misc_feature: MA Experiment 20001560 PARAMETER Experiment Name: At_Drought_Soil_Dry_P Parameter: Post Timepoint (hr) Value: None
  misc_feature: MA Experiment 20001560 PARAMETER Experiment Name: At_Drought_Soil_Dry_P Parameter: Post-Treatment Value: None
  misc_feature: MA Experiment 20001560 PARAMETER Experiment Name: At_Drought_Soil_Dry_P Parameter: Timepoint (day) Value: 14
  misc_feature: MA Experiment 20001560 PARAMETER Experiment Name: At_Drought_Soil_Dry_P Parameter: Treatment Value: Drought vs. No Drought
  misc_feature: MA Experiment ID: 20001911 Result: Down-regulated in Transcription
  misc_feature: MA Experiment 20001911 PARAMETER Experiment Name: At_Drought_Reproduction_P Parameter: Age (day) Value: 40
  misc_feature: MA Experiment 20001911 PARAMETER Experiment Name: At_Drought_Reproduction_P Parameter: Organism Value: A. thaliana
  misc_feature: MA Experiment 20001911 PARAMETER Experiment Name: At_Drought_Reproduction_P Parameter: Plant Line Value: WS
  misc_feature: MA Experiment 20001911 PARAMETER Experiment Name: At_Drought_Reproduction_P Parameter: Timepoint (day) Value: 10
  misc_feature: MA Experiment 20001911 PARAMETER Experiment Name: At_Drought_Reproduction_P Parameter: Tissue Value: Flowers
  misc_feature: MA Experiment 20001911 PARAMETER Experiment Name: At_Drought_Reproduction_P Parameter: Treatment Value: Drought vs. No Drought
aaactctaatctaaaccactattaatggagacaaatttgctaatgtcagacgattctttaggcaaatccaactgcaactttgaatgaaaagtcccaaactttaatgagacgttgatcttttcaacctctaaaatccttattttcccaattcttcttcataatcacacattttcacctcagaaacatatctagctaattctctgaagcatccatggaagctcctccaccttcaagcgatccatacaagttcctcaacattacacttaactcagatggatctctcaccagacaccgtgatttccccaaactgcccccaacagagcaatccaaagacataccattaaaccaaaccaacaataccttcatccgaatcttcaagccacggaatattccgccggaatccaaacttccgatcctcgtttactttcacggcggtggatttatcctctacagcgccgcttcagctcctttccatgaatcttgcaccaaaatggctgatcgtcttcaaactataatcctctccgtcgaataccgtctagctcccgaacaccgtctcccggcggcgtacgaagacgccgtcgaagctatcttatggctccgtgatcaagctcgtgggccaatcaacggtggtgattgcgacacgtggttaaaagacggtgtcgatttctcgaaatgctacgtcatgggttcaagctctggaggaaatattgtctacaacgtggcgttgcgtgtagttgacacagatctttctcctgttaagatccaagggctgataatgaaccaagctttcttcggtggcgttgagccgtcggattctgagtcacggcttaaagacgataagatctgtccgttaccagctactcacttgttgtggtcactttgtttaccggacggtgtagatcgtgaccacgtgtacagtaatccaattaagagcagtgggcctcaggaaaaagataagatgggacgttttccgtcgactcttatcaacggttacggtggggatcctttagtggatcgtcagagacacgtggcggagatgttaaagggacgtggagttcacgtggagacgaggtttgataaagatgggtttcatgcttgtgagttgtttgatgggaacaaagctaaggccctgtacgaaaccgttgaggcctttatgaagagttgttcatcaactggcccatcgtccaactccaacatgtagtagtctgatctaatcatgttttacgaactatatatatatctagctaataattaaattcctacaactattacgcaatttttgttgttttaagtcacatatgatatgtgtggtgcaatggaaaaatgtataccctttcaataaatatagtggatgcaatttaatct

SEQ ID NO: 23673 - protein, 329 aa, Arabidopsis thaliana
  peptide (1)..(329): Ceres Seq. ID no. 12338562
  misc_feature (54)..(111): Pfam Name: Carboxylesterase Pfam Description: Carboxylesterase
  misc_feature (1)..(285): Homolog of NCBI NO: 34895916 NR Description: P0030H07.24 [Oryza sativa (japonica
  misc_feature (40)..(319): Homolog of NCBI NO: 15240090 NR Description: putative protein; protein id: At5g06570.1
  misc_feature (16)..(315): Homolog of NCBI NO: 5487873 NR Description: PrMC3 [Pinus radiata]
  misc_feature (22)..(291): Homolog of NCBI NO: 34895938 NR Description: P0030H07.40 [Oryza sativa (japonica
  misc_feature (15)..(315): Homolog of NCBI NO: 27819508 NR Description: putative esterase [Oryza sativa (japonica
  misc_feature (4)..(321): Homolog of NCBI NO: 8574455 NR Description: pepper esterase [Capsicum annuum]
  misc_feature (1)..(317): Homolog of NCBI NO: 15241725 NR Description: putative protein; protein id: At5g62180.1
  misc_feature (5)..(315): Homolog of NCBI NO: 15225521 NR Description: unknown protein; protein id: At2g45610.1
  misc_feature (1)..(329): Homolog of NCBI NO: 21593183 NR Description: unknown [Arabidopsis thaliana]
  misc_feature (1)..(329): Homolog of NCBI NO: 18406834 NR Description: expressed protein
MEAPPPSSDPYKFLNITLNSDGSLTRHRDFPKLPPTEQSKDIPLNQTNNTFIRIFKPRNIPPESKLPILVYFHGGGFILYSAASAPFHESCTKMADRLQTIILSVEYRLAPEHRLPAAYEDAVEAILWLRDQARGPINGGDCDTWLKDGVDFSKCYVMGSSSGGNIVYNVALRVVDTDLSPVKIQGLIMNQAFFGGVEPSDSESRLKDDKICPLPATHLLWSLCLPDGVDRDHVYSNPIKSSGPQEKDKMGRFPSTLINGYGGDPLVDRQRHVAEMLKGRGVHVETRFDKDGFHACELFDGNKAKALYETVEAFMKSCSSTGPSSNSNM

SEQ ID NO: 23674 - protein, 236 aa, Arabidopsis thaliana
  peptide (1)..(236): Ceres Seq. ID no. 12338563
  misc_feature (1)..(192): Homolog of NCBI NO: 34895916 NR Description: P0030H07.24 [Oryza sativa (japonica
  misc_feature (1)..(226): Homolog of NCBI NO: 15240090 NR Description: putative protein; protein id: At5g06570.1
  misc_feature (1)..(222): Homolog of NCBI NO: 5487873 NR Description: PrMC3 [Pinus radiata]
  misc_feature (1)..(198): Homolog of NCBI NO: 34895938 NR Description: P0030H07.40 [Oryza sativa (japonica
  misc_feature (1)..(222): Homolog of NCBI NO: 27819508 NR Description: putative esterase [Oryza sativa (japonica
  misc_feature (1)..(228): Homolog of NCBI NO: 8574455 NR Description: pepper esterase [Capsicum annuum]
  misc_feature (1)..(224): Homolog of NCBI NO: 15241725 NR Description: putative protein; protein id: At5g62180.1
  misc_feature (1)..(222): Homolog of NCBI NO: 15225521 NR Description: unknown protein; protein id: At2g45610.1
  misc_feature (1)..(236): Homolog of NCBI NO: 21593183 NR Description: unknown [Arabidopsis thaliana]
  misc_feature (1)..(236): Homolog of NCBI NO: 18406834 NR Description: expressed protein
MADRLQTIILSVEYRLAPEHRLPAAYEDAVEAILWLRDQARGPINGGDCDTWLKDGVDFSKCYVMGSSSGGNIVYNVALRVVDTDLSPVKIQGLIMNQAFFGGVEPSDSESRLKDDKICPLPATHLLWSLCLPDGVDRDHVYSNPIKSSGPQEKDKMGRFPSTLINGYGGDPLVDRQRHVAEMLKGRGVHVETRFDKDGFHACELFDGNKAKALYETVEAFMKSCSSTGPSSNSNM

SEQ ID NO: 23675 - protein, 172 aa, Arabidopsis thaliana
  peptide (1)..(172): Ceres Seq. ID no. 12338565
  misc_feature (1)..(128): Homolog of NCBI NO: 34895916 NR Description: P0030H07.24 [Oryza sativa (japonica
  misc_feature (1)..(162): Homolog of NCBI NO: 15240090 NR Description: putative protein; protein id: At5g06570.1
  misc_feature (1)..(158): Homolog of NCBI NO: 5487873 NR Description: PrMC3 [Pinus radiata]
  misc_feature (1)..(134): Homolog of NCBI NO: 34895938 NR Description: P0030H07.40 [Oryza sativa (japonica
  misc_feature (1)..(158): Homolog of NCBI NO: 27819508 NR Description: putative esterase [Oryza sativa (japonica
  misc_feature (1)..(164): Homolog of NCBI NO: 8574455 NR Description: pepper esterase [Capsicum annuum]
  misc_feature (1)..(160): Homolog of NCBI NO: 15241725 NR Description: putative protein; protein id: At5g62180.1
  misc_feature (1)..(158): Homolog of NCBI NO: 15225521 NR Description: unknown protein; protein id: At2g45610.1
  misc_feature (1)..(172): Homolog of NCBI NO: 21593183 NR Description: unknown [Arabidopsis thaliana]
  misc_feature (1)..(172): Homolog of NCBI NO: 18406834 NR Description: expressed protein
MGSSSGGNIVYNVALRVVDTDLSPVKIQGLIMNQAFFGGVEPSDSESRLKDDKICPLPATHLLWSLCLPDGVDRDHVYSNPIKSSGPQEKDKMGRFPSTLINGYGGDPLVDRQRHVAEMLKGRGVHVETRFDKDGFHACELFDGNKAKALYETVEAFMKSCSSTGPSSNSNM

SEQ ID NO: 23676 - DNA, 1964 bp, Arabidopsis thaliana
  misc_feature (1)..(1964): Ceres Seq. ID no. 12322840
  misc_feature: MA Experiment ID: 108434 Result: Down-regulated in Transcription
  misc_feature: MA Experiment 108434 PARAMETER Experiment Name: At_Root_Tips_cDNA_P Parameter: Tissue Value: Root Tips
  misc_feature: MA Experiment ID: 108435 Result: Down-regulated in Transcription
  misc_feature: MA Experiment 108435 PARAMETER Experiment Name: At_stm_Mutants_cDNA_P Parameter: Plant Line Value: wt Landsburg vs stm
  misc_feature: MA Experiment 108435 PARAMETER Experiment Name: At_stm_Mutants_cDNA_P Parameter: Tissue Value: Shoot Apical Meristem Region
  misc_feature: MA Experiment ID: 108462 Result: Up-regulated in Transcription
  misc_feature: MA Experiment 108462 PARAMETER Experiment Name: At_Germinating_Seeds_cDNA_P Parameter: Age (day) Value: 2 vs. 0
  misc_feature: MA Experiment 108462 PARAMETER Experiment Name: At_Germinating_Seeds_cDNA_P Parameter: Tissue Value: Germinating Seeds
  misc_feature: MA Experiment ID: 108463 Result: Up-regulated in Transcription
  misc_feature: MA Experiment 108463 PARAMETER Experiment Name: At_Germinating_Seeds_cDNA_P Parameter: Age (day) Value: 3 vs. 0
  misc_feature: MA Experiment 108463 PARAMETER Experiment Name: At_Germinating_Seeds_cDNA_P Parameter: Tissue Value: Germinating Seeds
  misc_feature: MA Experiment ID: 108464 Result: Up-regulated in Transcription
  misc_feature: MA Experiment 108464 PARAMETER Experiment Name: At_Germinating_Seeds_cDNA_P Parameter: Age (day) Value: 4 vs. 0
  misc_feature: MA Experiment 108464 PARAMETER Experiment Name: At_Germinating_Seeds_cDNA_P Parameter: Tissue Value: Germinating Seeds
  misc_feature: MA Experiment ID: 108489 Result: Down-regulated in Transcription
  misc_feature: MA Experiment ID: 108569 Result: Down-regulated in Transcription
  misc_feature: MA Experiment 108569 PARAMETER Experiment Name: At_0.001%_MeJA__cDNA_P Parameter: Timepoint (hr) Value: 6
  misc_feature: MA Experiment 108569 PARAMETER Experiment Name: At_0.001%_MeJA__cDNA_P Parameter: Tissue Value: Aerial
  misc_feature: MA Experiment 108569 PARAMETER Experiment Name: At_0.001%_MeJA__cDNA_P Parameter: Treatment Value: 0.001% MeJA vs. No Treatment
  misc_feature: MA Experiment ID: 108572 Result: Down-regulated in Transcription
  misc_feature: MA Experiment 108572 PARAMETER Experiment Name: At_Drought_cDNA_P Parameter: Timepoint (hr) Value: 1
  misc_feature: MA Experiment 108572 PARAMETER Experiment Name: At_Drought_cDNA_P Parameter: Tissue Value: Aerial
  misc_feature: MA Experiment 108572 PARAMETER Experiment Name: At_Drought_cDNA_P Parameter: Treatment Value: Drought vs. No Drought
  misc_feature: MA Experiment ID: 108573 Result: Down-regulated in Transcription
  misc_feature: MA Experiment 108573 PARAMETER Experiment Name: At_Drought_cDNA_P Parameter: Timepoint (hr) Value: 6
  misc_feature: MA Experiment 108573 PARAMETER Experiment Name: At_Drought_cDNA_P Parameter: Tissue Value: Aerial
  misc_feature: MA Experiment 108573 PARAMETER Experiment Name: At_Drought_cDNA_P Parameter: Treatment Value: Drought vs. No Drought
  misc_feature: MA Experiment ID: 108574 Result: Up-regulated in Transcription
  misc_feature: MA Experiment 108574 PARAMETER Experiment Name: At_Wounding__cDNA_P Parameter: Timepoint (hr) Value: 1
  misc_feature: MA Experiment 108574 PARAMETER Experiment Name: At_Wounding__cDNA_P Parameter: Tissue Value: Aerial
  misc_feature: MA Experiment 108574 PARAMETER Experiment Name: At_Wounding__cDNA_P Parameter: Treatment Value: Wounding vs. No Wounding
  misc_feature: MA Experiment ID: 108579 Result: Up-regulated in Transcription
  misc_feature: MA Experiment 108579 PARAMETER Experiment Name: At_4deg_Cold_cDNA_P Parameter: Temperature (deg C) Value: 4 vs. 22
  misc_feature: MA Experiment 108579 PARAMETER Experiment Name: At_4deg_Cold_cDNA_P Parameter: Timepoint (hr) Value: 6
  misc_feature: MA Experiment 108579 PARAMETER Experiment Name: At_4deg_Cold_cDNA_P Parameter: Tissue Value: Aerial
  misc_feature: MA Experiment ID: 108585 Result: Down-regulated in Transcription
  misc_feature: MA Experiment 108585 PARAMETER Experiment Name: At_5mM_NaNP_cDNA_P Parameter: Timepoint (hr) Value: 6
  misc_feature: MA Experiment 108585 PARAMETER Experiment Name: At_5mM_NaNP_cDNA_P Parameter: Tissue Value: Aerial
  misc_feature: MA Experiment 108585 PARAMETER Experiment Name: At_5mM_NaNP_cDNA_P Parameter: Treatment Value: null
  misc_feature: MA Experiment ID: 108605 Result: Down-regulated in Transcription
  misc_feature: MA Experiment 108605 PARAMETER Experiment Name: At_100uM_ABA_cDNA_P Parameter: Timepoint (hr) Value: 6
  misc_feature: MA Experiment 108605 PARAMETER Experiment Name: At_100uM_ABA_cDNA_P Parameter: Tissue Value: Aerial
  misc_feature: MA Experiment 108605 PARAMETER Experiment Name: At_100uM_ABA_cDNA_P Parameter: Treatment Value: 100uM ABA vs. No Treatment
  misc_feature: MA Experiment ID: 108607 Result: Down-regulated in Transcription
  misc_feature: MA Experiment 108607 PARAMETER Experiment Name: At_100uM_ABA_cDNA_P Parameter: Timepoint (hr) Value: 4
  misc_feature: MA Experiment 108607 PARAMETER Experiment Name: At_100uM_ABA_cDNA_P Parameter: Tissue Value: Aerial
  misc_feature: MA Experiment 108607 PARAMETER Experiment Name: At_100uM_ABA_cDNA_P Parameter: Treatment Value: 100uM ABA vs. No Treatment
  misc_feature: MA Experiment ID: 108668 Result: Down-regulated in Transcription
  misc_feature: MA Experiment 108668 PARAMETER Experiment Name: At_2mM_SA_cDNA_P Parameter: Plant Line Value: WS
  misc_feature: MA Experiment 108668 PARAMETER Experiment Name: At_2mM_SA_cDNA_P Parameter: Timepoint (hr) Value: 6
  misc_feature: MA Experiment 108668 PARAMETER Experiment Name: At_2mM_SA_cDNA_P Parameter: Treatment Value: 2mM SA vs. No Treatment
  misc_feature: MA Experiment ID: 20000087 Result: Down-regulated in Transcription
  misc_feature: MA Experiment 20000087 PARAMETER Experiment Name: At_100uM_ABA_Mutants_cDNA_P Parameter: Plant Line Value: WS
  misc_feature: MA Experiment 20000087 PARAMETER Experiment Name: At_100uM_ABA_Mutants_cDNA_P Parameter: Timepoint (hr) Value: 6
  misc_feature: MA Experiment 20000087 PARAMETER Experiment Name: At_100uM_ABA_Mutants_cDNA_P Parameter: Tissue Value: Aerial
  misc_feature: MA Experiment 20000087 PARAMETER Experiment Name: At_100uM_ABA_Mutants_cDNA_P Parameter: Treatment Value: 100uM ABA vs. No Treatment
  misc_feature: MA Experiment ID: 20000113 Result: Down-regulated in Transcription
  misc_feature: MA Experiment 20000113 PARAMETER Experiment Name: At_42deg_Heat_cDNA_P Parameter: Temperature (deg C) Value: 42 vs. 22
  misc_feature: MA Experiment 20000113 PARAMETER Experiment Name: At_42deg_Heat_cDNA_P Parameter: Timepoint (hr) Value: 8
  misc_feature: MA Experiment 20000113 PARAMETER Experiment Name: At_42deg_Heat_cDNA_P Parameter: Tissue Value: Aerial
  misc_feature: MA Experiment ID: 20000169 Result: Down-regulated in Transcription
  misc_feature: MA Experiment 20000169 PARAMETER Experiment Name: At_100uM_ABA_P Parameter: Age (day) Value: 14
  misc_feature: MA Experiment 20000169 PARAMETER Experiment Name: At_100uM_ABA_P Parameter: Organism Value: A. thaliana
  misc_feature: MA Experiment 20000169 PARAMETER Experiment Name: At_100uM_ABA_P Parameter: Plant Line Value: WS
  misc_feature: MA Experiment 20000169 PARAMETER Experiment Name: At_100uM_ABA_P Parameter: Timepoint (hr) Value: 6
  misc_feature: MA Experiment 20000169 PARAMETER Experiment Name: At_100uM_ABA_P Parameter: Tissue Value: Aerial
  misc_feature: MA Experiment 20000169 PARAMETER Experiment Name: At_100uM_ABA_P Parameter: Treatment Value: 100uM ABA vs. No Treatment
  misc_feature: MA Experiment ID: 20000184 Result: Down-regulated in Transcription
  misc_feature: MA Experiment 20000184 PARAMETER Experiment Name: At_Shoots__P Parameter: Age (day) Value: 7
  misc_feature: MA Experiment 20000184 PARAMETER Experiment Name: At_Shoots__P Parameter: Tissue Value: Shoots vs. Whole Plant
  misc_feature: MA Experiment ID: 20000185 Result: Down-regulated in Transcription
  misc_feature: MA Experiment 20000185 PARAMETER Experiment Name: At_Roots__P Parameter: Age (day) Value: 7 vs. 21
  misc_feature: MA Experiment 20000185 PARAMETER Experiment Name: At_Roots__P Parameter: Organism Value: A. thaliana
  misc_feature: MA Experiment 20000185 PARAMETER Experiment Name: At_Roots__P Parameter: Tissue Value: Roots vs. Whole Plant
  misc_feature: MA Experiment ID: 20000213 Result: Up-regulated in Transcription
  misc_feature: MA Experiment 20000213 PARAMETER Experiment Name: At_4deg_Cold_P Parameter: Timepoint (hr) Value: 2
  misc_feature: MA Experiment ID: 20000214 Result: Up-regulated in Transcription
  misc_feature: MA Experiment 20000214 PARAMETER Experiment Name: At_4deg_Cold_P Parameter: Timepoint (hr) Value: 6
  misc_feature: MA Experiment ID: 20000224 Result: Up-regulated in Transcription
  misc_feature: MA Experiment ID: 20000264 Result: Down-regulated in Transcription
  misc_feature: MA Experiment 20000264 PARAMETER Experiment Name: At_Open_Flower_P Parameter: Age (day) Value: 21
  misc_feature: MA Experiment 20000264 PARAMETER Experiment Name: At_Open_Flower_P Parameter: Plant Line Value: WS
  misc_feature: MA Experiment 20000264 PARAMETER Experiment Name: At_Open_Flower_P Parameter: Tissue Value: Open Flower vs. Whole Plant
  misc_feature: MA Experiment ID: 20000436 Result: Down-regulated in Transcription
  misc_feature: MA Experiment 20000436 PARAMETER Experiment Name: At_Drought_P Parameter: Age (day) Value: 7
  misc_feature: MA Experiment 20000436 PARAMETER Experiment Name: At_Drought_P Parameter: Organism Value: A. thaliana
  misc_feature: MA Experiment 20000436 PARAMETER Experiment Name: At_Drought_P Parameter: Plant Line Value: WS
  misc_feature: MA Experiment 20000436 PARAMETER Experiment Name: At_Drought_P Parameter: Timepoint (hr) Value: 12
  misc_feature: MA Experiment 20000436 PARAMETER Experiment Name: At_Drought_P Parameter: Tissue Value: Whole Plant
  misc_feature: MA Experiment 20000436 PARAMETER Experiment Name: At_Drought_P Parameter: Treatment Value: Drought vs. No Drought
  misc_feature: MA Experiment ID: 20000437 Result: Down-regulated in Transcription
  misc_feature: MA Experiment 20000437 PARAMETER Experiment Name: At_Drought_P Parameter: Age (day) Value: 8
  misc_feature: MA Experiment 20000437 PARAMETER Experiment Name: At_Drought_P Parameter: Organism Value: A. thaliana
  misc_feature: MA Experiment 20000437 PARAMETER Experiment Name: At_Drought_P Parameter: Plant Line Value: WS
  misc_feature: MA Experiment 20000437 PARAMETER Experiment Name: At_Drought_P Parameter: Timepoint (hr) Value: 24
  misc_feature: MA Experiment 20000437 PARAMETER Experiment Name: At_Drought_P Parameter: Tissue Value: Whole Plant
  misc_feature: MA Experiment 20000437 PARAMETER Experiment Name: At_Drought_P Parameter: Treatment Value: Drought vs. No Drought
  misc_feature: MA Experiment ID: 20000439 Result: Down-regulated in Transcription
  misc_feature: MA Experiment 20000439 PARAMETER Experiment Name: At_Roots__P Parameter: Age (day) Value: 14 vs. 21
  misc_feature: MA Experiment 20000439 PARAMETER Experiment Name: At_Roots__P Parameter: Organism Value: A. thaliana
  misc_feature: MA Experiment 20000439 PARAMETER Experiment Name: At_Roots__P Parameter: Tissue Value: Roots vs. Whole Plant
  misc_feature: MA Experiment ID: 20000452 Result: Up-regulated in Transcription
  misc_feature: MA Experiment 20000452 PARAMETER Experiment Name: At_CS6879_Shoots-Roots_P Parameter: Age (day) Value: 14
  misc_feature: MA Experiment 20000452 PARAMETER Experiment Name: At_CS6879_Shoots-Roots_P Parameter: Organism Value: A. thaliana
  misc_feature: MA Experiment 20000452 PARAMETER Experiment Name: At_CS6879_Shoots-Roots_P Parameter: Plant Line Value: CS6879 vs. WS
  misc_feature: MA Experiment 20000452 PARAMETER Experiment Name: At_CS6879_Shoots-Roots_P Parameter: Tissue Value: Shoots
  misc_feature: MA Experiment ID: 20000495 Result: Down-regulated in Transcription
  misc_feature: MA Experiment 20000495 PARAMETER Experiment Name: At_Guard_Cells_P Parameter: Harvest Date Value: 8/2/2002
  misc_feature: MA Experiment 20000495 PARAMETER Experiment Name: At_Guard_Cells_P Parameter: Organism Value: A. thaliana
  misc_feature: MA Experiment 20000495 PARAMETER Experiment Name: At_Guard_Cells_P Parameter: Tissue Value: Guard Cells vs. Leaves
  misc_feature: MA Experiment ID: 20000573 Result: Down-regulated in Transcription
  misc_feature: MA Experiment 20000573 PARAMETER Experiment Name: At_100uM_ABA_Mutants__P Parameter: Organism Value: A. thaliana
  misc_feature: MA Experiment 20000573 PARAMETER Experiment Name: At_100uM_ABA_Mutants__P Parameter: Plant Line Value: CS22 vs. Ler wt
  misc_feature: MA Experiment 20000573 PARAMETER Experiment Name: At_100uM_ABA_Mutants__P Parameter: Timepoint (hr) Value: N/A
  misc_feature: MA Experiment 20000573 PARAMETER Experiment Name: At_100uM_ABA_Mutants__P Parameter: Tissue Value: Whole Plant
  misc_feature: MA Experiment 20000573 PARAMETER Experiment Name: At_100uM_ABA_Mutants__P Parameter: Treatment Value: None
  misc_feature: MA Experiment ID: 20001450 Result: Down-regulated in Transcription
  misc_feature: MA Experiment 20001450 PARAMETER Experiment Name: At_Far-red-induction_P Parameter: Age (day) Value: 7
  misc_feature: MA Experiment 20001450 PARAMETER Experiment Name: At_Far-red-induction_P Parameter: Light Value: Far-red vs. White
  misc_feature: MA Experiment 20001450 PARAMETER Experiment Name: At_Far-red-induction_P Parameter: Organism Value: A. thaliana
  misc_feature: MA Experiment 20001450 PARAMETER Experiment Name: At_Far-red-induction_P Parameter: Plant Line Value: Columbia
  misc_feature: MA Experiment 20001450 PARAMETER Experiment Name: At_Far-red-induction_P Parameter: Timepoint (hr) Value: 8
  misc_feature: MA Experiment 20001450 PARAMETER Experiment Name: At_Far-red-induction_P Parameter: Tissue Value: Whole Plant
  misc_feature: MA Experiment ID: 20001555 Result: Down-regulated in Transcription
  misc_feature: MA Experiment 20001555 PARAMETER Experiment Name: At_Drought_Soil_Dry_P Parameter: Age (day) Value: 24
  misc_feature: MA Experiment 20001555 PARAMETER Experiment Name: At_Drought_Soil_Dry_P Parameter: Organism Value: A. thaliana
  misc_feature: MA Experiment 20001555 PARAMETER Experiment Name: At_Drought_Soil_Dry_P Parameter: Plant Line Value: WS
  misc_feature: MA Experiment 20001555 PARAMETER Experiment Name: At_Drought_Soil_Dry_P Parameter: Post Timepoint (hr) Value: None
  misc_feature: MA Experiment 20001555 PARAMETER Experiment Name: At_Drought_Soil_Dry_P Parameter: Post-Treatment Value: None
  misc_feature: MA Experiment 20001555 PARAMETER Experiment Name: At_Drought_Soil_Dry_P Parameter: Timepoint (day) Value: 10
  misc_feature: MA Experiment 20001555 PARAMETER Experiment Name: At_Drought_Soil_Dry_P Parameter: Treatment Value: Drought vs. No Drought
  misc_feature: MA Experiment ID: 20001560 Result: Down-regulated in Transcription
  misc_feature: MA Experiment 20001560 PARAMETER Experiment Name: At_Drought_Soil_Dry_P Parameter: Age (day) Value: 28
  misc_feature: MA Experiment 20001560 PARAMETER Experiment Name: At_Drought_Soil_Dry_P Parameter: Organism Value: A. thaliana
  misc_feature: MA Experiment 20001560 PARAMETER Experiment Name: At_Drought_Soil_Dry_P Parameter: Plant Line Value: WS
  misc_feature: MA Experiment 20001560 PARAMETER Experiment Name: At_Drought_Soil_Dry_P Parameter: Post Timepoint (hr) Value: None
  misc_feature: MA Experiment 20001560 PARAMETER Experiment Name: At_Drought_Soil_Dry_P Parameter: Post-Treatment Value: None
  misc_feature: MA Experiment 20001560 PARAMETER Experiment Name: At_Drought_Soil_Dry_P Parameter: Timepoint (day) Value: 14
  misc_feature: MA Experiment 20001560 PARAMETER Experiment Name: At_Drought_Soil_Dry_P Parameter: Treatment Value: Drought vs. No Drought
  misc_feature: MA Experiment ID: 20001761 Result: Down-regulated in Transcription
  misc_feature: MA Experiment 20001761 PARAMETER Experiment Name: At_50mM_NH4NO3_L-to-H_P Parameter: Timepoint (hr) Value: 4
  misc_feature: MA Experiment 20001761 PARAMETER Experiment Name: At_50mM_NH4NO3_L-to-H_P Parameter: Tissue Value: Siliques
  misc_feature: MA Experiment 20001761 PARAMETER Experiment Name: At_50mM_NH4NO3_L-to-H_P Parameter: Treatment Value: 50mM NH4NO3 vs 100mM Mannitol
  misc_feature: MA Experiment ID: 20001904 Result: Down-regulated in Transcription
  misc_feature: MA Experiment 20001904 PARAMETER Experiment Name: At_Drought_Reproduction_P Parameter: Age (day) Value: 37
  misc_feature: MA Experiment 20001904 PARAMETER Experiment Name: At_Drought_Reproduction_P Parameter: Organism Value: A. thaliana
  misc_feature: MA Experiment 20001904 PARAMETER Experiment Name: At_Drought_Reproduction_P Parameter: Plant Line Value: WS
  misc_feature: MA Experiment 20001904 PARAMETER Experiment Name: At_Drought_Reproduction_P Parameter: Timepoint (day) Value: 7
  misc_feature: MA Experiment 20001904 PARAMETER Experiment Name: At_Drought_Reproduction_P Parameter: Tissue Value: Rosettes
  misc_feature: MA Experiment 20001904 PARAMETER Experiment Name: At_Drought_Reproduction_P Parameter: Treatment Value: Drought vs. No Drought
  misc_feature: MA Experiment ID: 20001905 Result: Down-regulated in Transcription
  misc_feature: MA Experiment 20001905 PARAMETER Experiment Name: At_Drought_Reproduction_P Parameter: Age (day) Value: 40
  misc_feature: MA Experiment 20001905 PARAMETER Experiment Name: At_Drought_Reproduction_P Parameter: Organism Value: A. thaliana
  misc_feature: MA Experiment 20001905 PARAMETER Experiment Name: At_Drought_Reproduction_P Parameter: Plant Line Value: WS
  misc_feature: MA Experiment 20001905 PARAMETER Experiment Name: At_Drought_Reproduction_P Parameter: Timepoint (day) Value: 10
  misc_feature: MA Experiment 20001905 PARAMETER Experiment Name: At_Drought_Reproduction_P Parameter: Tissue Value: Rosettes
  misc_feature: MA Experiment 20001905 PARAMETER Experiment Name: At_Drought_Reproduction_P Parameter: Treatment Value: Drought vs. No Drought
aaacacaaacatatcttctatcaaacaccaacagctctattctctacctcatttctcatcataacaaagagagagaaaaaaactatggaattgacactgaattcctcgagttctcttatcaaacgtaaagatgccaagagttctagaaaccaagaaagttcctccaacaacatgacctttgcgaagatgaagccgccaacatatcaattccaagcaaagaactcggttaaggaaatgaagttcactcacgagaagaccttcacgccagaaggtgaaacccttgagaaatgggagaagctccacgttctctcatacccacactccaagaacgacgctagcgttccggtgttcgtcatgttaccgctcgacacagtaacaatgtcagggcatttgaacaaaccacgagccatgaacgctagtttgatggccctgaaaggagctggtgtggaaggtgtgatggtggatgcttggtggggattggtggagaaagatggacctatgaattataactgggaaggctatgccgagcttatacagatggttcaaaagcacggtctcaaactccaggtcgttatgtcattccatcaatgtggaggaaacgtaggagactcttgcagtatccccttgcctccatgggtgcttgaagagatcagcaagaaccctgatcttgtctacacagacaaatctgggagaaggaaccctgaatatatctccttgggatgtgattctgtgcctgtcctaagaggaagaacacctatccaggtctactcagatttcatgaggagcttccgtgaacgatttgaaggctacataggaggagttattgcggaaattcaagtaggaatgggaccttgtggagaattgagatacccatcataccctgagagcaacgggacctggagattccccggaattggagagttccagtgctacgacaagtatatgaaatcgtcacttcaagcatatgctgagtcaatcgggaaaactaactggggaacaagtggacctcatgatgccggcgagtacaagaacctcccagaagatactgaatttttcaggagagacggaacatggaatagcgagtatggaaagtttttcatggaatggtactccgggaagctgctagaacatggagaccaactcctatcttcagcgaaaggtatctttcaaggaagcggagcaaagctatcaggaaaggtagctggaattcactggcactacaacaccaggtcacacgcagctgagctaaccgctggatactacaacacaagaaaccatgacgggtatctgccaatagctaagatgttcaacaaacatggagttgtgctcaacttcacctgcatggagatgaaagacggggagcaacctgagcacgcgaattgctcaccagaaggtctggtcaagcaagtacagaacgcgacaaggcaggccggaaccgaactagcaggggagaacgcgctagaacgatatgactcaagcgcattcggacaagtggtagcaacaaataggtcagattctggaaatgggttaaccgcatttacttacctaagaatgaacaagcggttatttgagggtcaaaattggcagcagttagtggagtttgttaagaacatgaaggaaggtggtcatgggaggagactctcaaaagaagacacaactggaagtgacctttatgttggatttgtcaaaggcaagatcgctgagaatgtggaggaggctgctttagtgtaatttcccacataggtacatacatatagtgtggtgtttattgtattcctgtctgataaataactagagagatcaaaccagtaagagtgttaaagctatagatttgcacaattctgggtcagagtcagagcaaagagaagcaaaatcaagatgatgtacacttagatgtttcctatgagttttccttgtacatcatcttcatactcttaatctcaaatactatgcatttttctcct

SEQ ID NO: 23677 - protein, 576 aa, Arabidopsis thaliana
  peptide (1)..(576): Ceres Seq. ID no. 12322841
  misc_feature (117)..(534): Pfam Name: Glycosyl hydrolase family 14 Pfam Description: Glycosyl hydrolase family 14
  misc_feature (27)..(568): Homolog of NCBI NO: 17224922 NR Description: putative chloroplast-targeted beta-amylase
  misc_feature (114)..(568): Homolog of NCBI NO: 15229544 NR Description: glycosyl hydrolase family 14 (beta-amylase)
  misc_feature (101)..(554): Homolog of NCBI NO: 37535192 NR Description: putative amylase [Oryza sativa (japonica
  misc_feature (29)..(574): Homolog of NCBI NO: 37536926 NR Description: putative chloroplast-targeted beta-amylase
  misc_feature (29)..(404): Homolog of NCBI NO: 15450429 NR Description: AT4g17090/dl4575c [Arabidopsis thaliana]
  misc_feature (114)..(538): Homolog of NCBI NO: 3913031 NR Description: BETA-AMYLASE (1,4-ALPHA-D-GLUCAN MALTOHYDROLASE)
  misc_feature (29)..(576): Homolog of NCBI NO: 15082058 NR Description: beta-amylase PCT-BMYI [Solanum tuberosum]
  misc_feature (79)..(576): Homolog of NCBI NO: 7435338 NR Description: probable Beta-Amylase - Arabidopsis thaliana
  misc_feature (79)..(576): Homolog of NCBI NO: 25289326 NR Description: probable beta-amylase [imported] - Arabidopsis
  misc_feature (29)..(576): Homolog of NCBI NO: 18414813 NR Description: glycosyl hydrolase family 14 (beta-amylase)
KHKHIFYQTPTALFSTSFLIITKREKKTMELTLNSSSSLIKRKDAKSSRNQESSSNNMTFAKMKPPTYQFQAKNSVKEMKFTHEKTFTPEGETLEKWEKLHVLSYPHSKNDASVPVFVMLPLDTVTMSGHLNKPRAMNASLMALKGAGVEGVMVDAWWGLVEKDGPMNYNWEGYAELIQMVQKHGLKLQVVMSFHQCGGNVGDSCSIPLPPWVLEEISKNPDLVYTDKSGRRNPEYISLGCDSVPVLRGRTPIQVYSDFMRSFRERFEGYIGGVIAEIQVGMGPCGELRYPSYPESNGTWRFPGIGEFQCYDKYMKSSLQAYAESIGKTNWGTSGPHDAGEYKNLPEDTEFFRRDGTWNSEYGKFFMEWYSGKLLEHGDQLLSSAKGIFQGSGAKLSGKVAGIHWHYNTRSHAAELTAGYYNTRNHDGYLPIAKMFNKHGVVLNFTCMEMKDGEQPEHANCSPEGLVKQVQNATRQAGTELAGENALERYDSSAFGQVVATNRSDSGNGLTAFTYLRMNKRLFEGQNWQQLVEFVKNMKEGGHGRRLSKEDTTGSDLYVGFVKGKIAENVEEAALV

SEQ ID NO: 23678 - protein, 548 aa, Arabidopsis thaliana
  peptide (1)..(548): Ceres Seq. ID no. 12322842
  misc_feature (89)..(506): Pfam Name: Glycosyl hydrolase family 14 Pfam Description: Glycosyl hydrolase family 14
  misc_feature (86)..(510): Homolog of NCBI NO: 3913031 NR Description: BETA-AMYLASE (1,4-ALPHA-D-GLUCAN MALTOHYDROLASE)
  misc_feature (1)..(540): Homolog of NCBI NO: 17224922 NR Description: putative chloroplast-targeted beta-amylase
  misc_feature (86)..(540): Homolog of NCBI NO: 15229544 NR Description: glycosyl hydrolase family 14 (beta-amylase)
  misc_feature (73)..(526): Homolog of NCBI NO: 37535192 NR Description: putative amylase [Oryza sativa (japonica
  misc_feature (1)..(546): Homolog of NCBI NO: 37536926 NR Description: putative chloroplast-targeted beta-amylase
  misc_feature (1)..(376): Homolog of NCBI NO: 15450429 NR Description: AT4g17090/dl4575c [Arabidopsis thaliana]
  misc_feature (1)..(548): Homolog of NCBI NO: 15082058 NR Description: beta-amylase PCT-BMYI [Solanum tuberosum]
  misc_feature (51)..(548): Homolog of NCBI NO: 7435338 NR Description: probable Beta-Amylase - Arabidopsis thaliana
  misc_feature (51)..(548): Homolog of NCBI NO: 25289326 NR Description: probable beta-amylase [imported] - Arabidopsis
  misc_feature (1)..(548): Homolog of NCBI NO: 18414813 NR Description: glycosyl hydrolase family 14 (beta-amylase)
MELTLNSSSSLIKRKDAKSSRNQESSSNNMTFAKMKPPTYQFQAKNSVKEMKFTHEKTFTPEGETLEKWEKLHVLSYPHSKNDASVPVFVMLPLDTVTMSGHLNKPRAMNASLMALKGAGVEGVMVDAWWGLVEKDGPMNYNWEGYAELIQMVQKHGLKLQVVMSFHQCGGNVGDSCSIPLPPWVLEEISKNPDLVYTDKSGRRNPEYISLGCDSVPVLRGRTPIQVYSDFMRSFRERFEGYIGGVIAEIQVGMGPCGELRYPSYPESNGTWRFPGIGEFQCYDKYMKSSLQAYAESIGKTNWGTSGPHDAGEYKNLPEDTEFFRRDGTWNSEYGKFFMEWYSGKLLEHGDQLLSSAKGIFQGSGAKLSGKVAGIHWHYNTRSHAAELTAGYYNTRNHDGYLPIAKMFNKHGVVLNFTCMEMKDGEQPEHANCSPEGLVKQVQNATRQAGTELAGENALERYDSSAFGQVVATNRSDSGNGLTAFTYLRMNKRLFEGQNWQQLVEFVKNMKEGGHGRRLSKEDTTGSDLYVGFVKGKIAENVEEAALV

SEQ ID NO: 23679 - protein, 519 aa, Arabidopsis thaliana
  peptide (1)..(519): Ceres Seq. ID no. 12322843
  misc_feature (60)..(477): Pfam Name: Glycosyl hydrolase family 14 Pfam Description: Glycosyl hydrolase family 14
  misc_feature (57)..(481): Homolog of NCBI NO: 3913031 NR Description: BETA-AMYLASE (1,4-ALPHA-D-GLUCAN MALTOHYDROLASE)
  misc_feature (1)..(511): Homolog of NCBI NO: 17224922 NR Description: putative chloroplast-targeted beta-amylase
  misc_feature (57)..(511): Homolog of NCBI NO: 15229544 NR Description: glycosyl hydrolase family 14 (beta-amylase)
  misc_feature (44)..(497): Homolog of NCBI NO: 37535192 NR Description: putative amylase [Oryza sativa (japonica
  misc_feature (1)..(517): Homolog of NCBI NO: 37536926 NR Description: putative chloroplast-targeted beta-amylase
  misc_feature (1)..(347): Homolog of NCBI NO: 15450429 NR Description: AT4g17090/dl4575c [Arabidopsis thaliana]
  misc_feature (1)..(519): Homolog of NCBI NO: 15082058 NR Description: beta-amylase PCT-BMYI [Solanum tuberosum]
  misc_feature (22)..(519): Homolog of NCBI NO: 7435338 NR Description: probable Beta-Amylase - Arabidopsis thaliana
  misc_feature (22)..(519): Homolog of NCBI NO: 25289326 NR Description: probable beta-amylase [imported] - Arabidopsis
  misc_feature (1)..(519): Homolog of NCBI NO: 18414813 NR Description: glycosyl hydrolase family 14 (beta-amylase)
MTFAKMKPPTYQFQAKNSVKEMKFTHEKTFTPEGETLEKWEKLHVLSYPHSKNDASVPVFVMLPLDTVTMSGHLNKPRAMNASLMALKGAGVEGVMVDAWWGLVEKDGPMNYNWEGYAELIQMVQKHGLKLQVVMSFHQCGGNVGDSCSIPLPPWVLEEISKNPDLVYTDKSGRRNPEYISLGCDSVPVLRGRTPIQVYSDFMRSFRERFEGYIGGVIAEIQVGMGPCGELRYPSYPESNGTWRFPGIGEFQCYDKYMKSSLQAYAESIGKTNWGTSGPHDAGEYKNLPEDTEFFRRDGTWNSEYGKFFMEWYSGKLLEHGDQLLSSAKGIFQGSGAKLSGKVAGIHWHYNTRSHAAELTAGYYNTRNHDGYLPIAKMFNKHGVVLNFTCMEMKDGEQPEHANCSPEGLVKQVQNATRQAGTELAGENALERYDSSAFGQVVATNRSDSGNGLTAFTYLRMNKRLFEGQNWQQLVEFVKNMKEGGHGRRLSKEDTTGSDLYVGFVKGKIAENVEEAALV

SEQ ID NO: 23680 - DNA, 1203 bp, Arabidopsis thaliana
  misc_feature (1)..(1203): Ceres Seq. ID no. 12323086
  misc_feature: MA Experiment ID: 108461 Result: Up-regulated in Transcription
  misc_feature: MA Experiment 108461 PARAMETER Experiment Name: At_Germinating_Seeds_cDNA_P Parameter: Age (day) Value: 1 vs. 0
  misc_feature: MA Experiment 108461 PARAMETER Experiment Name: At_Germinating_Seeds_cDNA_P Parameter: Tissue Value: Germinating Seeds
  misc_feature: MA Experiment ID: 108501 Result: Up-regulated in Transcription
  misc_feature: MA Experiment 108501 PARAMETER Experiment Name: At_ap2_floral_buds_cDNA_P Parameter: Plant Line Value: ap2 (Ler.)
  misc_feature: MA Experiment 108501 PARAMETER Experiment Name: At_ap2_floral_buds_cDNA_P Parameter: Tissue Value: Closed Flower
  misc_feature: MA Experiment ID: 20000117 Result: Down-regulated in Transcription
  misc_feature: MA Experiment 20000117 PARAMETER Experiment Name: At_100uM_ABA_Mutants_cDNA_P Parameter: Plant Line Value: Columbia
  misc_feature: MA Experiment 20000117 PARAMETER Experiment Name: At_100uM_ABA_Mutants_cDNA_P Parameter: Timepoint (hr) Value: 6
  misc_feature: MA Experiment 20000117 PARAMETER Experiment Name: At_100uM_ABA_Mutants_cDNA_P Parameter: Tissue Value: Aerial
  misc_feature: MA Experiment 20000117 PARAMETER Experiment Name: At_100uM_ABA_Mutants_cDNA_P Parameter: Treatment Value: 100uM ABA vs. No Treatment
  misc_feature: MA Experiment ID: 20000224 Result: Down-regulated in Transcription
  misc_feature: MA Experiment ID: 20000227 Result: Down-regulated in Transcription
  misc_feature: MA Experiment 20000227 PARAMETER Experiment Name: At_Root-Tips-vs-Tops_P Parameter: Tissue Value: Root Tips vs. Root Tops
  misc_feature: MA Experiment ID: 20000235 Result: Up-regulated in Transcription
  misc_feature: MA Experiment 20000235 PARAMETER Experiment Name: At_Siliques_P Parameter: Age (day) Value: 21
  misc_feature: MA Experiment 20000235 PARAMETER Experiment Name: At_Siliques_P Parameter: Organism Value: A. thaliana
  misc_feature: MA Experiment 20000235 PARAMETER Experiment Name: At_Siliques_P Parameter: Plant Line Value: WS
  misc_feature: MA Experiment 20000235 PARAMETER Experiment Name: At_Siliques_P Parameter: Tissue Value: 5-10mm Siliques vs. Whole Plant
  misc_feature: MA Experiment ID: 20000265 Result: Down-regulated in Transcription
  misc_feature: MA Experiment 20000265 PARAMETER Experiment Name: At_Open_Flower_P Parameter: Age (day) Value: 21
  misc_feature: MA Experiment 20000265 PARAMETER Experiment Name: At_Open_Flower_P Parameter: Plant Line Value: WS
  misc_feature: MA Experiment 20000265 PARAMETER Experiment Name: At_Open_Flower_P Parameter: Tissue Value: Closed Flower vs. Whole Plant
  misc_feature: MA Experiment ID: 20000286 Result: Down-regulated in Transcription
  misc_feature: MA Experiment 20000286 PARAMETER Experiment Name: At_Open_Flower_P Parameter: Age (day) Value: 21
  misc_feature: MA Experiment 20000286 PARAMETER Experiment Name: At_Open_Flower_P Parameter: Plant Line Value: WS
  misc_feature: MA Experiment 20000286 PARAMETER Experiment Name: At_Open_Flower_P Parameter: Tissue Value: Half Open vs. Whole Plant
  misc_feature: MA Experiment ID: 20000437 Result: Down-regulated in Transcription
  misc_feature: MA Experiment 20000437 PARAMETER Experiment Name: At_Drought_P Parameter: Age (day) Value: 8
  misc_feature: MA Experiment 20000437 PARAMETER Experiment Name: At_Drought_P Parameter: Organism Value: A. thaliana
  misc_feature: MA Experiment 20000437 PARAMETER Experiment Name: At_Drought_P Parameter: Plant Line Value: WS
  misc_feature: MA Experiment 20000437 PARAMETER Experiment Name: At_Drought_P Parameter: Timepoint (hr) Value: 24
  misc_feature: MA Experiment 20000437 PARAMETER Experiment Name: At_Drought_P Parameter: Tissue Value: Whole Plant
  misc_feature: MA Experiment 20000437 PARAMETER Experiment Name: At_Drought_P Parameter: Treatment Value: Drought vs. No Drought
  misc_feature: MA Experiment ID: 20000438 Result: Up-regulated in Transcription
  misc_feature: MA Experiment 20000438 PARAMETER Experiment Name: At_Shoots__P Parameter: Age (day) Value: 14
  misc_feature: MA Experiment 20000438 PARAMETER Experiment Name: At_Shoots__P Parameter: Tissue Value: Shoots vs. Whole Plant
atcttctcacttcaaactctctctatctttttctctcacctcatattatgaactaaagatttctctgaaagctgacttcataaactttttctgaagaagaaacacacaaaaacgatcgatcttgaattgattctttgtagtattttatttacatatatatatatagatgggaagacattcatgttgttacaaacagaaactgaggaaaggactttggtctcctgaagaagatgagaagcttcttcgttacatcactaagtacggtcatggttgctggagctctgtccctaaacaagctggtttacagagatgtggaaaaagttgtagattaagatggataaactatttaagaccagatttaaagagaggagcattttctcaagatgaagaaaatctcattattgaacttcatgccgttcttggcaatagatggtctcagatagctgcacagcttcctggaagaaccgacaatgaaatcaaaaatctttggaattcttgtttgaagaagaaattgaggctgagaggaattgacccggttacacacaagctcttaaccgaaatcgaaaccggtacagatgacaaaccaaaaccggttgagaagagtcaacagacctacctcgttgagactgatggctcctctagtaccactacttgtagtactaaccaaaacaacaacactgatcatctttataccggaaatttcggttttcaacggttaagtctagaaaacggttcaagaatcgcagccggttccgacctcggcatctggattccccaaaccggaagaaaccatcatcatcatgtggatgaaaccatccccagtgcagtgagcatcagcaaattcaagagagtaactacaacaattcgacattctttggaaatgggaatctgaattggggattaacaatggaggacaatcaaaatccattcacaatatcgaatcattcgttacagaatcattcaaattcgtccttatacagtgatataaaatcagagaccaatttttttggcacagaggctacaaatgttggtatgtggccatgtaaccagctccagcctcagcaacatgcatatggccatatataaatcttcttgtatattataaggtgtgtgaatctttttttttttctttctcaaatatggacttttaaaaaaaatgggttgtgtatatagtttgtgttatatatcatttaatttaacagc

SEQ ID NO: 23681 - protein, 241 aa, Arabidopsis thaliana
  peptide (1)..(241): Ceres Seq. ID no. 12323087
  misc_feature (14)..(61): Pfam Name: Myb-like DNA-binding domain Pfam Description: Myb-like DNA-binding domain
  misc_feature (43)..(134): Homolog of NCBI NO: 7446174 NR Description: transcription factor MYB4 - Arabidopsis thaliana
  misc_feature (1)..(134): Homolog of NCBI NO: 30690317 NR Description: myb transcription factor (ATMYB4) [Arabidopsis
  misc_feature (1)..(134): Homolog of NCBI NO: 2280530 NR Description: ATMYB4 [Arabidopsis thaliana]
  misc_feature (1)..(133): Homolog of NCBI NO: 34902542 NR Description: putative transcription factor (myb)
  misc_feature (1)..(149): Homolog of NCBI NO: 15223612 NR Description: myb family transcription factor
  misc_feature (1)..(154): Homolog of NCBI NO: 28628949 NR Description: MYB2 [Dendrobium sp. XMW-2002-2]
  misc_feature (1)..(203): Homolog of NCBI NO: 25294104 NR Description: hypothetical protein [imported] - Arabidopsis
  misc_feature (1)..(203): Homolog of NCBI NO: 22329445 NR Description: myb family transcription factor
  misc_feature (1)..(241): Homolog of NCBI NO: 7438352 NR Description: transcription factor MYB4 homolog T15B16.7 -
  misc_feature (1)..(241): Homolog of NCBI NO: 15234262 NR Description: myb family transcription factor
MGRHSCCYKQKLRKGLWSPEEDEKLLRYITKYGHGCWSSVPKQAGLQRCGKSCRLRWINYLRPDLKRGAFSQDEENLIIELHAVLGNRWSQIAAQLPGRTDNEIKNLWNSCLKKKLRLRGIDPVTHKLLTEIETGTDDKPKPVEKSQQTYLVETDGSSSTTTCSTNQNNNTDHLYTGNFGFQRLSLENGSRIAAGSDLGIWIPQTGRNHHHHVDETIPSAVSISKFKRVTTTIRHSLEMGI

SEQ ID NO: 23682 - DNA, 1580 bp, Arabidopsis thaliana
  misc_feature (1)..(1580): Ceres Seq. ID no. 12370393
  misc_feature: MA Experiment ID: 108434 Result: Up-regulated in Transcription
  misc_feature: MA Experiment 108434 PARAMETER Experiment Name: At_Root_Tips_cDNA_P Parameter: Tissue Value: Root Tips
  misc_feature: MA Experiment ID: 108462 Result: Down-regulated in Transcription
  misc_feature: MA Experiment 108462 PARAMETER Experiment Name: At_Germinating_Seeds_cDNA_P Parameter: Age (day) Value: 2 vs. 0
  misc_feature: MA Experiment 108462 PARAMETER Experiment Name: At_Germinating_Seeds_cDNA_P Parameter: Tissue Value: Germinating Seeds
  misc_feature: MA Experiment ID: 108463 Result: Down-regulated in Transcription
  misc_feature: MA Experiment 108463 PARAMETER Experiment Name: At_Germinating_Seeds_cDNA_P Parameter: Age (day) Value: 3 vs. 0
  misc_feature: MA Experiment 108463 PARAMETER Experiment Name: At_Germinating_Seeds_cDNA_P Parameter: Tissue Value: Germinating Seeds
  misc_feature: MA Experiment ID: 108464 Result: Down-regulated in Transcription
  misc_feature: MA Experiment 108464 PARAMETER Experiment Name: At_Germinating_Seeds_cDNA_P Parameter: Age (day) Value: 4 vs. 0
  misc_feature: MA Experiment 108464 PARAMETER Experiment Name: At_Germinating_Seeds_cDNA_P Parameter: Tissue Value: Germinating Seeds
  misc_feature: MA Experiment ID: 20000113 Result: Down-regulated in Transcription
  misc_feature: MA Experiment 20000113 PARAMETER Experiment Name: At_42deg_Heat_cDNA_P Parameter: Temperature (deg C) Value: 42 vs. 22
  misc_feature: MA Experiment 20000113 PARAMETER Experiment Name: At_42deg_Heat_cDNA_P Parameter: Timepoint (hr) Value: 8
  misc_feature: MA Experiment 20000113 PARAMETER Experiment Name: At_42deg_Heat_cDNA_P Parameter: Tissue Value: Aerial
  misc_feature: MA Experiment ID: 20001911 Result: Down-regulated in Transcription
  misc_feature: MA Experiment 20001911 PARAMETER Experiment Name: At_Drought_Reproduction_P Parameter: Age (day) Value: 40
  misc_feature: MA Experiment 20001911 PARAMETER Experiment Name: At_Drought_Reproduction_P Parameter: Organism Value: A. thaliana
  misc_feature: MA Experiment 20001911 PARAMETER Experiment Name: At_Drought_Reproduction_P Parameter: Plant Line Value: WS
  misc_feature: MA Experiment 20001911 PARAMETER Experiment Name: At_Drought_Reproduction_P Parameter: Timepoint (day) Value: 10
  misc_feature: MA Experiment 20001911 PARAMETER Experiment Name: At_Drought_Reproduction_P Parameter: Tissue Value: Flowers
  misc_feature: MA Experiment 20001911 PARAMETER Experiment Name: At_Drought_Reproduction_P Parameter: Treatment Value: Drought vs. No Drought
ataaagtaggaaaaaattagggttagactcgatcattcatagctgcgactattctctgctctttctacattttctcattttctcttgggctacttttcgactactaacaaatccaacgatgaggggattggtgaacaagctcgtgtccagatctctctccatctccgggaaatggcagaaccaacagcttcgtcgtctcaacatccacgagtatcagggagctgaattgatggggaaatatggagttaatgtgccgaaaggagtagctgcttcttcgttggaagaagttaaaaaggctattcaagatgttttccctaatgaaagcgagttggttgttaagagccagattttggctggtggaagaggtcttggaacattcaagagtggtcttaagggtggtgttcacattgttaaacgtgatgaggctgaagagattgctggaaagatgctaggacaagtacttgtcaccaagcaaactggtcctcaaggcaaagtagttagcaaggtttacttgtgtgagaaattgtcactcgtcaatgagatgtacttttccattattctggaccgtaaatctgctggaccgttgatcattgcctgtaaaaagggtggtaccagtattgaagatcttgctgagaagttccctgacatgatcatcaaggtaccaattgatgtatttgcaggaatcactgatgaagatgctgctaaggttgtggatggtctggctcccaaagctgctgacagaaaagattcgattgaacaagtgaagaagctatacgaactcttccgcaagactgactgcacaatgttggaaatcaatccccttgcggagacatcaactaatcaattggtagctgctgatgccaaattgaacttcgatgataatgctgcgttccgacaaaaagaggttttcgccatgcgtgatccaacacaggaggatccacgagaggtggctgctgctaaagttgacctgaactacatcggtttagatggagagattggttgcatggtgaatggtgctggattggccatggcaaccatggacatcattaaattacacggtggaacacccgccaatttccttgacgttggtggaaatgcttctgagcaccaggtggtggaagcgtttaagatactgacatcggacgataaagtgaaagcaatcttggtgaacatatttggtgggataatgaaatgtgatgtgattgctagtggaatcgtgaacgctgcaaaagaggtcgcattgaaagtgccagtggtggttcgtctagaaggaacgaatgttgagcagggaaagagaatcctcaaggaaagtggaatgaaactcataacagctgatgatttggatgatgcagctgagaaagcggttaaagctttagctcactaatctctctatatataccaaaagccggtttgttaattgttttgtggttgacgcccaatttacactttcttgcggatatcatttcctcaaacagatcaataatgaactggtctcctttttttgtgtgatccatccaaagagattcaaatcagaattctcaatatctttttgtatttaaccaactcatatggttgatact

SEQ ID NO: 23683 - protein, 421 aa, Arabidopsis thaliana
  peptide (1)..(421): Ceres Seq. ID no. 12370394
  misc_feature (69)..(232): Pfam Name: ATP-grasp domain Pfam Description: ATP-grasp domain
  misc_feature (20)..(417): Homolog of NCBI NO: 11321583 NR Description: succinate-CoA ligase, ADP-forming, beta subunit
  misc_feature (20)..(417): Homolog of NCBI NO: 21263997 NR Description: Succinyl-CoA ligase
  misc_feature (20)..(417): Homolog of NCBI NO: 3766197 NR Description: ATP-specific succinyl-CoA synthetase beta subunit
  misc_feature (25)..(417): Homolog of NCBI NO: 3821927 NR Description: ATP-specific succinyl-CoA synthetase beta subunit
  misc_feature (20)..(417): Homolog of NCBI NO: 21263966 NR Description: Succinyl-CoA ligase
  misc_feature (6)..(419): Homolog of NCBI NO: 28829983 NR Description: similar to Sus scrofa (Pig). Succinyl-CoA ligase
  misc_feature (23)..(417): Homolog of NCBI NO: 28828953 NR Description: similar to Mus musculus (Mouse). 16 days embryo cDNA, RIKEN full-length enriched library, clone:C130090E04
  misc_feature (4)..(420): Homolog of NCBI NO: 27803873 NR Description: succinyl CoA ligase beta subunit [Lycopersicon
  misc_feature (1)..(421): Homolog of NCBI NO: 21593189 NR Description: succinyl-CoA ligase beta subunit [Arabidopsis
  misc_feature (1)..(421): Homolog of NCBI NO: 15225353 NR Description: succinyl-CoA ligase beta subunit
MRGLVNKLVSRSLSISGKWQNQQLRRLNIHEYQGAELMGKYGVNVPKGVAASSLEEVKKAIQDVFPNESELVVKSQILAGGRGLGTFKSGLKGGVHIVKRDEAEEIAGKMLGQVLVTKQTGPQGKVVSKVYLCEKLSLVNEMYFSIILDRKSAGPLIIACKKGGTSIEDLAEKFPDMIIKVPIDVFAGITDEDAAKVVDGLAPKAADRKDSIEQVKKLYELFRKTDCTMLEINPLAETSTNQLVAADAKLNFDDNAAFRQKEVFAMRDPTQEDPREVAAAKVDLNYIGLDGEIGCMVNGAGLAMATMDIIKLHGGTPANFLDVGGNASEHQVVEAFKILTSDDKVKAILVNIFGGIMKCDVIASGIVNAAKEVALKVPVVVRLEGTNVEQGKRILKESGMKLITADDLDDAAEKAVKALAH

SEQ ID NO: 23684 - protein, 384 aa, Arabidopsis thaliana
  peptide (1)..(384): Ceres Seq. ID no. 12370395
  misc_feature (32)..(195): Pfam Name: ATP-grasp domain Pfam Description: ATP-grasp domain
  misc_feature (1)..(380): Homolog of NCBI NO: 21263997 NR Description: Succinyl-CoA ligase
  misc_feature (1)..(380): Homolog of NCBI NO: 11321583 NR Description: succinate-CoA ligase, ADP-forming, beta subunit
  misc_feature (1)..(380): Homolog of NCBI NO: 3766197 NR Description: ATP-specific succinyl-CoA synthetase beta subunit
  misc_feature (1)..(380): Homolog of NCBI NO: 3821927 NR Description: ATP-specific succinyl-CoA synthetase beta subunit
  misc_feature (1)..(380): Homolog of NCBI NO: 21263966 NR Description: Succinyl-CoA ligase
  misc_feature (1)..(382): Homolog of NCBI NO: 28829983 NR Description: similar to Sus scrofa (Pig). Succinyl-CoA ligase
  misc_feature (1)..(380): Homolog of NCBI NO: 28828953 NR Description: similar to Mus musculus (Mouse). 16 days embryo cDNA, RIKEN full-length enriched library, clone:C130090E04
  misc_feature (1)..(383): Homolog of NCBI NO: 27803873 NR Description: succinyl CoA ligase beta subunit [Lycopersicon
  misc_feature (1)..(384): Homolog of NCBI NO: 21593189 NR Description: succinyl-CoA ligase beta subunit [Arabidopsis
  misc_feature (1)..(384): Homolog of NCBI NO: 15225353 NR Description: succinyl-CoA ligase beta subunit
MGKYGVNVPKGVAASSLEEVKKAIQDVFPNESELVVKSQILAGGRGLGTFKSGLKGGVHIVKRDEAEEIAGKMLGQVLVTKQTGPQGKVVSKVYLCEKLSLVNEMYFSIILDRKSAGPLIIACKKGGTSIEDLAEKFPDMIIKVPIDVFAGITDEDAAKVVDGLAPKAADRKDSIEQVKKLYELFRKTDCTMLEINPLAETSTNQLVAADAKLNFDDNAAFRQKEVFAMRDPTQEDPREVAAAKVDLNYIGLDGEIGCMVNGAGLAMATMDIIKLHGGTPANFLDVGGNASEHQVVEAFKILTSDDKVKAILVNIFGGIMKCDVIASGIVNAAKEVALKVPVVVRLEGTNVEQGKRILKESGMKLITADDLDDAAEKAVKALAH

SEQ ID NO: 23685 - protein, 312 aa, Arabidopsis thaliana
  peptide (1)..(312): Ceres Seq. ID no. 12370396
  misc_feature (1)..(123): Pfam Name: ATP-grasp domain Pfam Description: ATP-grasp domain
  misc_feature (1)..(308): Homolog of NCBI NO: 11321583 NR Description: succinate-CoA ligase, ADP-forming, beta subunit
  misc_feature (1)..(308): Homolog of NCBI NO: 21263997 NR Description: Succinyl-CoA ligase
  misc_feature (1)..(308): Homolog of NCBI NO: 3766197 NR Description: ATP-specific succinyl-CoA synthetase beta subunit
  misc_feature (1)..(308): Homolog of NCBI NO: 3821927 NR Description: ATP-specific succinyl-CoA synthetase beta subunit
  misc_feature (1)..(308): Homolog of NCBI NO: 21263966 NR Description: Succinyl-CoA ligase
  misc_feature (1)..(310): Homolog of NCBI NO: 28829983 NR Description: similar to Sus scrofa (Pig). Succinyl-CoA ligase
  misc_feature (1)..(308): Homolog of NCBI NO: 28828953 NR Description: similar to Mus musculus (Mouse). 16 days embryo cDNA, RIKEN full-length enriched library, clone:C130090E04
  misc_feature (1)..(311): Homolog of NCBI NO: 27803873 NR Description: succinyl CoA ligase beta subunit [Lycopersicon
  misc_feature (1)..(312): Homolog of NCBI NO: 21593189 NR Description: succinyl-CoA ligase beta subunit [Arabidopsis
  misc_feature (1)..(312): Homolog of NCBI NO: 15225353 NR Description: succinyl-CoA ligase beta subunit
MLGQVLVTKQTGPQGKVVSKVYLCEKLSLVNEMYFSIILDRKSAGPLIIACKKGGTSIEDLAEKFPDMIIKVPIDVFAGITDEDAAKVVDGLAPKAADRKDSIEQVKKLYELFRKTDCTMLEINPLAETSTNQLVAADAKLNFDDNAAFRQKEVFAMRDPTQEDPREVAAAKVDLNYIGLDGEIGCMVNGAGLAMATMDIIKLHGGTPANFLDVGGNASEHQVVEAFKILTSDDKVKAILVNIFGGIMKCDVIASGIVNAAKEVALKVPVVVRLEGTNVEQGKRILKESGMKLITADDLDDAAEKAVKALAH

SEQ ID NO: 23686 - DNA, 1179 bp, Arabidopsis thaliana
  misc_feature (1)..(1179): Ceres Seq. ID no. 12396477
  misc_feature: MA Experiment ID: 108434 Result: Down-regulated in Transcription
  misc_feature: MA Experiment 108434 PARAMETER Experiment Name: At_Root_Tips_cDNA_P Parameter: Tissue Value: Root Tips
  misc_feature: MA Experiment ID: 108488 Result: Down-regulated in Transcription
  misc_feature: MA Experiment ID: 20000111 Result: Down-regulated in Transcription
  misc_feature: MA Experiment 20000111 PARAMETER Experiment Name: At_42deg_Heat_cDNA_P Parameter: Temperature (deg C) Value: 42 vs. 22
  misc_feature: MA Experiment 20000111 PARAMETER Experiment Name: At_42deg_Heat_cDNA_P Parameter: Timepoint (hr) Value: 6
  misc_feature: MA Experiment 20000111 PARAMETER Experiment Name: At_42deg_Heat_cDNA_P Parameter: Tissue Value: Aerial
  misc_feature: MA Experiment ID: 20000112 Result: Down-regulated in Transcription
  misc_feature: MA Experiment 20000112 PARAMETER Experiment Name: At_42deg_Heat_cDNA_P Parameter: Temperature (deg C) Value: 42 vs. 22
  misc_feature: MA Experiment 20000112 PARAMETER Experiment Name: At_42deg_Heat_cDNA_P Parameter: Timepoint (hr) Value: 2
  misc_feature: MA Experiment 20000112 PARAMETER Experiment Name: At_42deg_Heat_cDNA_P Parameter: Tissue Value: Aerial
  misc_feature: MA Experiment ID: 20000113 Result: Down-regulated in Transcription
  misc_feature: MA Experiment 20000113 PARAMETER Experiment Name: At_42deg_Heat_cDNA_P Parameter: Temperature (deg C) Value: 42 vs. 22
  misc_feature: MA Experiment 20000113 PARAMETER Experiment Name: At_42deg_Heat_cDNA_P Parameter: Timepoint (hr) Value: 8
  misc_feature: MA Experiment 20000113 PARAMETER Experiment Name: At_42deg_Heat_cDNA_P Parameter: Tissue Value: Aerial
  misc_feature: MA Experiment ID: 20000144 Result: Down-regulated in Transcription
  misc_feature: MA Experiment 20000144 PARAMETER Experiment Name: At_42deg_Heat_cDNA_P Parameter: Temperature (deg C) Value: 42 vs. 22
  misc_feature: MA Experiment 20000144 PARAMETER Experiment Name: At_42deg_Heat_cDNA_P Parameter: Timepoint (hr) Value: 1
  misc_feature: MA Experiment 20000144 PARAMETER Experiment Name: At_42deg_Heat_cDNA_P Parameter: Tissue Value: Aerial
  misc_feature: MA Experiment ID: 20000171 Result: Down-regulated in Transcription
  misc_feature: MA Experiment 20000171 PARAMETER Experiment Name: At_42deg_Heat_P Parameter: Age (day) Value: 14
  misc_feature: MA Experiment 20000171 PARAMETER Experiment Name: At_42deg_Heat_P Parameter: Organism Value: A. thaliana
  misc_feature: MA Experiment 20000171 PARAMETER Experiment Name: At_42deg_Heat_P Parameter: Plant Line Value: WS
  misc_feature: MA Experiment 20000171 PARAMETER Experiment Name: At_42deg_Heat_P Parameter: Temperature (deg C) Value: 42 vs. 22
  misc_feature: MA Experiment 20000171 PARAMETER Experiment Name: At_42deg_Heat_P Parameter: Timepoint (hr) Value: 1
  misc_feature: MA Experiment 20000171 PARAMETER Experiment Name: At_42deg_Heat_P Parameter: Tissue Value: Aerial
  misc_feature: MA Experiment ID: 20000173 Result: Down-regulated in Transcription
  misc_feature: MA Experiment 20000173 PARAMETER Experiment Name: At_42deg_Heat_P Parameter: Age (day) Value: 14
  misc_feature: MA Experiment 20000173 PARAMETER Experiment Name: At_42deg_Heat_P Parameter: Organism Value: A. thaliana
  misc_feature: MA Experiment 20000173 PARAMETER Experiment Name: At_42deg_Heat_P Parameter: Plant Line Value: WS
  misc_feature: MA Experiment 20000173 PARAMETER Experiment Name: At_42deg_Heat_P Parameter: Temperature (deg C) Value: 42 vs. 22
  misc_feature: MA Experiment 20000173 PARAMETER Experiment Name: At_42deg_Heat_P Parameter: Timepoint (hr) Value: 6
  misc_feature: MA Experiment 20000173 PARAMETER Experiment Name: At_42deg_Heat_P Parameter: Tissue Value: Aerial
  misc_feature: MA Experiment ID: 20000265 Result: Down-regulated in Transcription
  misc_feature: MA Experiment 20000265 PARAMETER Experiment Name: At_Open_Flower_P Parameter: Age (day) Value: 21
  misc_feature: MA Experiment 20000265 PARAMETER Experiment Name: At_Open_Flower_P Parameter: Plant Line Value: WS
  misc_feature: MA Experiment 20000265 PARAMETER Experiment Name: At_Open_Flower_P Parameter: Tissue Value: Closed Flower vs. Whole Plant
  misc_feature: MA Experiment ID: 20000496 Result: Up-regulated in Transcription
  misc_feature: MA Experiment 20000496 PARAMETER Experiment Name: At_Guard_Cells_P Parameter: Harvest Date Value: 7/19/2002
  misc_feature: MA Experiment 20000496 PARAMETER Experiment Name: At_Guard_Cells_P Parameter: Organism Value: Canola
  misc_feature: MA Experiment 20000496 PARAMETER Experiment Name: At_Guard_Cells_P Parameter: Tissue Value: Guard Cells vs. Leaves
tttttcgaaattaaagaaaaccctaaacgccgttgtctgatattgagagagagagagagagagattaaaaacttcttctggttccttttatcaacattttttctctctcttaaaacttcgaagcgatttttgatttacagactatggaaatggaatcattcatggacgaccttttgaacttctctgtaccggaagaggaagaagacgacgacgaacatacgcaaccaccgaggaatattactcgccggaaaactggattacggccaacagactccttcggtctctttaataccgacgaccttggagtggttgaagaagaggatttggaatggatttcaaacaaaaatgcttttccggtgattgaaacattcgtcggtgtattaccgtcggagcattttcctataacgtctcttctggaaagagaagcgactgaggtaaaacagctgagtccggtttcagtacttgagacgagtagccatagctccacaacgactacctcaaacagtagcggcggaagtaacggaagcacggccgtggctacgaccaccaccactccaacaataatgagctgttgcgttggttttaaagcgccggctaaagcgagaagcaagcgtcgtcgtacaggacgccgtgatttacgagttttgtggacaggaaacgagcaaggaggaatacagaagaagaagacgatgactgtggcggcggctgcgttgattatgggaaggaagtgtcaacactgtggagcggagaagactccgcaatggagggcaggaccagcggggcctaagactctgtgtaacgcttgtggcgtgaggtataagtccgggaggctagttccggagtatcgtccagcgaacagtccaactttcacggcggagttacattcgaattctcaccggaagattgtagagatgaggaagcagtatcagtccggtgacggtgacggtgatcggaaagattgtggataaaaagtgattaggattaatttttattttttcggagaaacttttttttttttttttcgtttaatttctctttatttgtttttaaagtctgttttagggttttgcagttggaatttaggtttttaattttttgcttatcttttttatttgtgaaattagtggtaattacttatttagggaatattatggtcatggaatggaagataactttctc

SEQ ID NO: 23687 - protein, 274 aa, Arabidopsis thaliana
  peptide (1)..(274): Ceres Seq. ID no. 12396478
  misc_feature (99)..(260): Homolog of NCBI NO: 8778844 NR Description: T6D22.9 [Arabidopsis thaliana]
  misc_feature (168)..(265): Homolog of NCBI NO: 37572449 NR Description: AG-motif binding protein-4 [Nicotiana tabacum]
  misc_feature (1)..(260): Homolog of NCBI NO: 15223086 NR Description: GATA zinc finger protein; protein id: At1g08010.1
  misc_feature (148)..(269): Homolog of NCBI NO: 15236172 NR Description: GATA transcription factor 3
  misc_feature (148)..(269): Homolog of NCBI NO: 20466648 NR Description: GATA transcription factor 3 [Arabidopsis
  misc_feature (148)..(269): Homolog of NCBI NO: 7484970 NR Description: GATA-binding transcription factor homolog 3
  misc_feature (7)..(266): Homolog of NCBI NO: 15230393 NR Description: GATA zinc finger protein
  misc_feature (8)..(274): Homolog of NCBI NO: 37572445 NR Description: AG-motif binding protein-2 [Nicotiana tabacum]
  misc_feature (7)..(274): Homolog of NCBI NO: 21593190 NR Description: GATA transcription factor 1 (AtGATA-1)
  misc_feature (1)..(274): Homolog of NCBI NO: 15229571 NR Description: GATA transcription factor 1 (AtGATA-1)
MEMESFMDDLLNFSVPEEEEDDDEHTQPPRNITRRKTGLRPTDSFGLFNTDDLGVVEEEDLEWISNKNAFPVIETFVGVLPSEHFPITSLLEREATEVKQLSPVSVLETSSHSSTTTTSNSSGGSNGSTAVATTTTTPTIMSCCVGFKAPAKARSKRRRTGRRDLRVLWTGNEQGGIQKKKTMTVAAAALIMGRKCQHCGAEKTPQWRAGPAGPKTLCNACGVRYKSGRLVPEYRPANSPTFTAELHSNSHRKIVEMRKQYQSGDGDGDRKDCG

SEQ ID NO: 23688 - protein, 272 aa, Arabidopsis thaliana
  peptide (1)..(272): Ceres Seq. ID no. 12396479
  misc_feature (5)..(264): Homolog of NCBI NO: 15230393 NR Description: GATA zinc finger protein
  misc_feature (6)..(272): Homolog of NCBI NO: 37572445 NR Description: AG-motif binding protein-2 [Nicotiana tabacum]
  misc_feature (5)..(272): Homolog of NCBI NO: 21593190 NR Description: GATA transcription factor 1 (AtGATA-1)
  misc_feature (1)..(272): Homolog of NCBI NO: 15229571 NR Description: GATA transcription factor 1 (AtGATA-1)
  misc_feature (146)..(267): Homolog of NCBI NO: 15236172 NR Description: GATA transcription factor 3
  misc_feature (146)..(267): Homolog of NCBI NO: 7484970 NR Description: GATA-binding transcription factor homolog 3
  misc_feature (97)..(258): Homolog of NCBI NO: 8778844 NR Description: T6D22.9 [Arabidopsis thaliana]
  misc_feature (166)..(263): Homolog of NCBI NO: 37572449 NR Description: AG-motif binding protein-4 [Nicotiana tabacum]
  misc_feature (1)..(258): Homolog of NCBI NO: 15223086 NR Description: GATA zinc finger protein; protein id: At1g08010.1
  misc_feature (146)..(267): Homolog of NCBI NO: 20466648 NR Description: GATA transcription factor 3 [Arabidopsis
MESFMDDLLNFSVPEEEEDDDEHTQPPRNITRRKTGLRPTDSFGLFNTDDLGVVEEEDLEWISNKNAFPVIETFVGVLPSEHFPITSLLEREATEVKQLSPVSVLETSSHSSTTTTSNSSGGSNGSTAVATTTTTPTIMSCCVGFKAPAKARSKRRRTGRRDLRVLWTGNEQGGIQKKKTMTVAAAALIMGRKCQHCGAEKTPQWRAGPAGPKTLCNACGVRYKSGRLVPEYRPANSPTFTAELHSNSHRKIVEMRKQYQSGDGDGDRKDCG

SEQ ID NO: 23689 - protein, 268 aa, Arabidopsis thaliana
  peptide (1)..(268): Ceres Seq. ID no. 12396480
  misc_feature (93)..(254): Homolog of NCBI NO: 8778844 NR Description: T6D22.9 [Arabidopsis thaliana]
  misc_feature (162)..(259): Homolog of NCBI NO: 37572449 NR Description: AG-motif binding protein-4 [Nicotiana tabacum]
  misc_feature (1)..(254): Homolog of NCBI NO: 15223086 NR Description: GATA zinc finger protein; protein id: At1g08010.1
  misc_feature (142)..(263): Homolog of NCBI NO: 15236172 NR Description: GATA transcription factor 3
  misc_feature (142)..(263): Homolog of NCBI NO: 20466648 NR Description: GATA transcription factor 3 [Arabidopsis
  misc_feature (142)..(263): Homolog of NCBI NO: 7484970 NR Description: GATA-binding transcription factor homolog 3
  misc_feature (1)..(260): Homolog of NCBI NO: 15230393 NR Description: GATA zinc finger protein
  misc_feature (2)..(268): Homolog of NCBI NO: 37572445 NR Description: AG-motif binding protein-2 [Nicotiana tabacum]
  misc_feature (1)..(268): Homolog of NCBI NO: 21593190 NR Description: GATA transcription factor 1 (AtGATA-1)
  misc_feature (1)..(268): Homolog of NCBI NO: 15229571 NR Description: GATA transcription factor 1 (AtGATA-1)
MDDLLNFSVPEEEEDDDEHTQPPRNITRRKTGLRPTDSFGLFNTDDLGVVEEEDLEWISNKNAFPVIETFVGVLPSEHFPITSLLEREATEVKQLSPVSVLETSSHSSTTTTSNSSGGSNGSTAVATTTTTPTIMSCCVGFKAPAKARSKRRRTGRRDLRVLWTGNEQGGIQKKKTMTVAAAALIMGRKCQHCGAEKTPQWRAGPAGPKTLCNACGVRYKSGRLVPEYRPANSPTFTAELHSNSHRKIVEMRKQYQSGDGDGDRKDCG

SEQ ID NO: 23690 - DNA, 1128 bp, Arabidopsis thaliana
  misc_feature (1)..(1128): Ceres Seq. ID no. 12321547
  misc_feature: MA Experiment ID: 108461 Result: Down-regulated in Transcription
  misc_feature: MA Experiment 108461 PARAMETER Experiment Name: At_Germinating_Seeds_cDNA_P Parameter: Age (day) Value: 1 vs. 0
  misc_feature: MA Experiment 108461 PARAMETER Experiment Name: At_Germinating_Seeds_cDNA_P Parameter: Tissue Value: Germinating Seeds
  misc_feature: MA Experiment ID: 108463 Result: Up-regulated in Transcription
  misc_feature: MA Experiment 108463 PARAMETER Experiment Name: At_Germinating_Seeds_cDNA_P Parameter: Age (day) Value: 3 vs. 0
  misc_feature: MA Experiment 108463 PARAMETER Experiment Name: At_Germinating_Seeds_cDNA_P Parameter: Tissue Value: Germinating Seeds
  misc_feature: MA Experiment ID: 108464 Result: Up-regulated in Transcription
  misc_feature: MA Experiment 108464 PARAMETER Experiment Name: At_Germinating_Seeds_cDNA_P Parameter: Age (day) Value: 4 vs. 0
  misc_feature: MA Experiment 108464 PARAMETER Experiment Name: At_Germinating_Seeds_cDNA_P Parameter: Tissue Value: Germinating Seeds
  misc_feature: MA Experiment ID: 108474 Result: Down-regulated in Transcription
  misc_feature: MA Experiment 108474 PARAMETER Experiment Name: At_Drought_Flowers_cDNA_P Parameter: Timepoint (hr) Value: null
  misc_feature: MA Experiment 108474 PARAMETER Experiment Name: At_Drought_Flowers_cDNA_P Parameter: Treatment Value: Drought vs. No Drought
  misc_feature: MA Experiment ID: 108501 Result: Down-regulated in Transcription
  misc_feature: MA Experiment 108501 PARAMETER Experiment Name: At_ap2_floral_buds_cDNA_P Parameter: Plant Line Value: ap2 (Ler.)
  misc_feature: MA Experiment 108501 PARAMETER Experiment Name: At_ap2_floral_buds_cDNA_P Parameter: Tissue Value: Closed Flower
  misc_feature: MA Experiment ID: 108668 Result: Down-regulated in Transcription
  misc_feature: MA Experiment 108668 PARAMETER Experiment Name: At_2mM_SA_cDNA_P Parameter: Plant Line Value: WS
  misc_feature: MA Experiment 108668 PARAMETER Experiment Name: At_2mM_SA_cDNA_P Parameter: Timepoint (hr) Value: 6
  misc_feature: MA Experiment 108668 PARAMETER Experiment Name: At_2mM_SA_cDNA_P Parameter: Treatment Value: 2mM SA vs. No Treatment
  misc_feature: MA Experiment ID: 20000224 Result: Up-regulated in Transcription
  misc_feature: MA Experiment ID: 20000265 Result: Up-regulated in Transcription
  misc_feature: MA Experiment 20000265 PARAMETER Experiment Name: At_Open_Flower_P Parameter: Age (day) Value: 21
  misc_feature: MA Experiment 20000265 PARAMETER Experiment Name: At_Open_Flower_P Parameter: Plant Line Value: WS
  misc_feature: MA Experiment 20000265 PARAMETER Experiment Name: At_Open_Flower_P Parameter: Tissue Value: Closed Flower vs. Whole Plant
  misc_feature: MA Experiment ID: 20000437 Result: Up-regulated in Transcription
  misc_feature: MA Experiment 20000437 PARAMETER Experiment Name: At_Drought_P Parameter: Age (day) Value: 8
  misc_feature: MA Experiment 20000437 PARAMETER Experiment Name: At_Drought_P Parameter: Organism Value: A. thaliana
  misc_feature: MA Experiment 20000437 PARAMETER Experiment Name: At_Drought_P Parameter: Plant Line Value: WS
  misc_feature: MA Experiment 20000437 PARAMETER Experiment Name: At_Drought_P Parameter: Timepoint (hr) Value: 24
  misc_feature: MA Experiment 20000437 PARAMETER Experiment Name: At_Drought_P Parameter: Tissue Value: Whole Plant
  misc_feature: MA Experiment 20000437 PARAMETER Experiment Name: At_Drought_P Parameter: Treatment Value: Drought vs. No Drought
  misc_feature: MA Experiment ID: 20001904 Result: Up-regulated in Transcription
  misc_feature: MA Experiment 20001904 PARAMETER Experiment Name: At_Drought_Reproduction_P Parameter: Age (day) Value: 37
  misc_feature: MA Experiment 20001904 PARAMETER Experiment Name: At_Drought_Reproduction_P Parameter: Organism Value: A. thaliana
  misc_feature: MA Experiment 20001904 PARAMETER Experiment Name: At_Drought_Reproduction_P Parameter: Plant Line Value: WS
  misc_feature: MA Experiment 20001904 PARAMETER Experiment Name: At_Drought_Reproduction_P Parameter: Timepoint (day) Value: 7
  misc_feature: MA Experiment 20001904 PARAMETER Experiment Name: At_Drought_Reproduction_P Parameter: Tissue Value: Rosettes
  misc_feature: MA Experiment 20001904 PARAMETER Experiment Name: At_Drought_Reproduction_P Parameter: Treatment Value: Drought vs. No Drought
  misc_feature: MA Experiment ID: 20001905 Result: Up-regulated in Transcription
  misc_feature: MA Experiment 20001905 PARAMETER Experiment Name: At_Drought_Reproduction_P Parameter: Age (day) Value: 40
  misc_feature: MA Experiment 20001905 PARAMETER Experiment Name: At_Drought_Reproduction_P Parameter: Organism Value: A. thaliana
  misc_feature: MA Experiment 20001905 PARAMETER Experiment Name: At_Drought_Reproduction_P Parameter: Plant Line Value: WS
  misc_feature: MA Experiment 20001905 PARAMETER Experiment Name: At_Drought_Reproduction_P Parameter: Timepoint (day) Value: 10
  misc_feature: MA Experiment 20001905 PARAMETER Experiment Name: At_Drought_Reproduction_P Parameter: Tissue Value: Rosettes
  misc_feature: MA Experiment 20001905 PARAMETER Experiment Name: At_Drought_Reproduction_P Parameter: Treatment Value: Drought vs. No Drought
  misc_feature: MA Experiment ID: 20001906 Result: Up-regulated in Transcription
  misc_feature: MA Experiment 20001906 PARAMETER Experiment Name: At_Drought_Reproduction_P Parameter: Age (day) Value: 35
  misc_feature: MA Experiment 20001906 PARAMETER Experiment Name: At_Drought_Reproduction_P Parameter: Organism Value: A. thaliana
  misc_feature: MA Experiment 20001906 PARAMETER Experiment Name: At_Drought_Reproduction_P Parameter: Plant Line Value: WS
  misc_feature: MA Experiment 20001906 PARAMETER Experiment Name: At_Drought_Reproduction_P Parameter: Timepoint (day) Value: 5
  misc_feature: MA Experiment 20001906 PARAMETER Experiment Name: At_Drought_Reproduction_P Parameter: Tissue Value: Siliques
  misc_feature: MA Experiment 20001906 PARAMETER Experiment Name: At_Drought_Reproduction_P Parameter: Treatment Value: Drought vs. No Drought
  misc_feature: MA Experiment ID: 20001911 Result: Up-regulated in Transcription
  misc_feature: MA Experiment 20001911 PARAMETER Experiment Name: At_Drought_Reproduction_P Parameter: Age (day) Value: 40
  misc_feature: MA Experiment 20001911 PARAMETER Experiment Name: At_Drought_Reproduction_P Parameter: Organism Value: A. thaliana
  misc_feature: MA Experiment 20001911 PARAMETER Experiment Name: At_Drought_Reproduction_P Parameter: Plant Line Value: WS
  misc_feature: MA Experiment 20001911 PARAMETER Experiment Name: At_Drought_Reproduction_P Parameter: Timepoint (day) Value: 10
  misc_feature: MA Experiment 20001911 PARAMETER Experiment Name: At_Drought_Reproduction_P Parameter: Tissue Value: Flowers
  misc_feature: MA Experiment 20001911 PARAMETER Experiment Name: At_Drought_Reproduction_P Parameter: Treatment Value: Drought vs. No Drought
agatcataaagaaccaaaaataaaagccaaaacgtttttagacatggcactcacaaaagagagaagaagcttgttggtttcaatggtgttggtgttcttcttcttcaactttcaccatcttcaagtcacgagttgtccagatcaggcgacgacaaactgtacggaccaggacaggaaattattggagtttccattgaatttggagtaccttgaagctgagtttttcttgttcggggcgttagggtttggtcttgataaggtcgcaccaaatctaacaatgggagggccaagtcctattggagctcagaaagccaatctcgatcctttgacaagagatattattttgcagtttgcttggcaagaggttggccacttgagggcaatcaagaaaacggtgaaaggatttgcaaggccacaacttgatttgagtaagaaagcatttgctaaagtgatggataaagcatttggagtaaaatttgtgccgccgttcaatccttatgccaattcttacaattacctcattgcatcgtatttggtcccttatgttggtctcaccggatacgttggcgctaaccctaaactgcaatgtccagcctcaagaaagttagtagcaggacttttgggagtagaatcgggtcaagacgcggtgattagaggtatgttatatgctcgagcggcacacatagtctatccttatggtgtcacggttgcggctttcacggataagatttcggatctaaggaacaaattgggaaaagcgggtgtgaaagatgagggattgatcgtacctaaattcatgggtgcagaaggacaagtgattgggaatgtattggtcggtaatgagctctcgctttcgtttgatagaacacctgaggagattctacggattgtgtatggaagtggaaatgaaagtgttcccggtggattttaccctaaaggagcggatggagaaatcgctaagtcttatttggttactgttgggagtgagtgaggtttagttttgctttggagtttaatttcctttgtagttcttaggtttttggttatataggagactaatgaaaataattgtcgtattattgtaataaatgttgtgagagtgacatttccataatcgataaaaagttc

SEQ ID NO: 23691 - protein, 329 aa, Arabidopsis thaliana
  peptide (1)..(329): Ceres Seq. ID no. 12321548
  misc_feature (70)..(318): Homolog of NCBI NO: 16263242 NR Description: Conserved hypothetical protein [Sinorhizobium
  misc_feature (49)..(321): Homolog of NCBI NO: 22984403 NR Description: hypothetical protein [Burkholderia fungorum]
  misc_feature (44)..(182): Homolog of NCBI NO: 12083528 NR Description: similar to Arabidopsis thaliana hypothetical
  misc_feature (184)..(322): Homolog of NCBI NO: 12083528 NR Description: similar to Arabidopsis thaliana hypothetical
  misc_feature (44)..(323): Homolog of NCBI NO: 15228845 NR Description: putative protein
  misc_feature (27)..(317): Homolog of NCBI NO: 118926 NR Description: Desiccation-related protein PCC13-62 precursor
  misc_feature (57)..(323): Homolog of NCBI NO: 38346151 NR Description: OSJNBb0118P14.11 [Oryza sativa (japonica
  misc_feature (28)..(329): Homolog of NCBI NO: 25357137 NR Description: hypothetical protein T2J15.11 [imported] -
  misc_feature (15)..(329): Homolog of NCBI NO: 18401988 NR Description: dessication-related protein, putative
  misc_feature (15)..(329): Homolog of NCBI NO: 21593191 NR Description: dessication-related protein, putative
DHKEPKIKAKTFLDMALTKERRSLLVSMVLVFFFFNFHHLQVTSCPDQATTNCTDQDRKLLEFPLNLEYLEAEFFLFGALGFGLDKVAPNLTMGGPSPIGAQKANLDPLTRDIILQFAWQEVGHLRAIKKTVKGFARPQLDLSKKAFAKVMDKAFGVKFVPPFNPYANSYNYLIASYLVPYVGLTGYVGANPKLQCPASRKLVAGLLGVESGQDAVIRGMLYARAAHIVYPYGVTVAAFTDKISDLRNKLGKAGVKDEGLIVPKFMGAEGQVIGNVLVGNELSLSFDRTPEEILRIVYGSGNESVPGGFYPKGADGEIAKSYLVTVGSE

SEQ ID NO: 23692 - protein, 315 aa, Arabidopsis thaliana
  peptide (1)..(315): Ceres Seq. ID no. 12321549
  misc_feature (56)..(304): Homolog of NCBI NO: 16263242 NR Description: Conserved hypothetical protein [Sinorhizobium
  misc_feature (35)..(307): Homolog of NCBI NO: 22984403 NR Description: hypothetical protein [Burkholderia fungorum]
  misc_feature (30)..(168): Homolog of NCBI NO: 12083528 NR Description: similar to Arabidopsis thaliana hypothetical
  misc_feature (170)..(308): Homolog of NCBI NO: 12083528 NR Description: similar to Arabidopsis thaliana hypothetical
  misc_feature (30)..(309): Homolog of NCBI NO: 15228845 NR Description: putative protein
  misc_feature (13)..(303): Homolog of NCBI NO: 118926 NR Description: Desiccation-related protein PCC13-62 precursor
  misc_feature (43)..(309): Homolog of NCBI NO: 38346151 NR Description: OSJNBb0118P14.11 [Oryza sativa (japonica
  misc_feature (14)..(315): Homolog of NCBI NO: 25357137 NR Description: hypothetical protein T2J15.11 [imported] -
  misc_feature (1)..(315): Homolog of NCBI NO: 18401988 NR Description: dessication-related protein, putative
  misc_feature (1)..(315): Homolog of NCBI NO: 21593191 NR Description: dessication-related protein, putative
MALTKERRSLLVSMVLVFFFFNFHHLQVTSCPDQATTNCTDQDRKLLEFPLNLEYLEAEFFLFGALGFGLDKVAPNLTMGGPSPIGAQKANLDPLTRDIILQFAWQEVGHLRAIKKTVKGFARPQLDLSKKAFAKVMDKAFGVKFVPPFNPYANSYNYLIASYLVPYVGLTGYVGANPKLQCPASRKLVAGLLGVESGQDAVIRGMLYARAAHIVYPYGVTVAAFTDKISDLRNKLGKAGVKDEGLIVPKFMGAEGQVIGNVLVGNELSLSFDRTPEEILRIVYGSGNESVPGGFYPKGADGEIAKSYLVTVGSE

SEQ ID NO: 23693 - protein, 302 aa, Arabidopsis thaliana
  peptide (1)..(302): Ceres Seq. ID no. 12321550
  misc_feature (43)..(291): Homolog of NCBI NO: 16263242 NR Description: Conserved hypothetical protein [Sinorhizobium
  misc_feature (22)..(294): Homolog of NCBI NO: 22984403 NR Description: hypothetical protein [Burkholderia fungorum]
  misc_feature (17)..(155): Homolog of NCBI NO: 12083528 NR Description: similar to Arabidopsis thaliana hypothetical
  misc_feature (157)..(295): Homolog of NCBI NO: 12083528 NR Description: similar to Arabidopsis thaliana hypothetical
  misc_feature (17)..(296): Homolog of NCBI NO: 15228845 NR Description: putative protein
  misc_feature (1)..(290): Homolog of NCBI NO: 118926 NR Description: Desiccation-related protein PCC13-62 precursor
  misc_feature (30)..(296): Homolog of NCBI NO: 38346151 NR Description: OSJNBb0118P14.11 [Oryza sativa (japonica
  misc_feature (1)..(302): Homolog of NCBI NO: 25357137 NR Description: hypothetical protein T2J15.11 [imported] -
  misc_feature (1)..(302): Homolog of NCBI NO: 18401988 NR Description: dessication-related protein, putative
  misc_feature (1)..(302): Homolog of NCBI NO: 21593191 NR Description: dessication-related protein, putative
MVLVFFFFNFHHLQVTSCPDQATTNCTDQDRKLLEFPLNLEYLEAEFFLFGALGFGLDKVAPNLTMGGPSPIGAQKANLDPLTRDIILQFAWQEVGHLRAIKKTVKGFARPQLDLSKKAFAKVMDKAFGVKFVPPFNPYANSYNYLIASYLVPYVGLTGYVGANPKLQCPASRKLVAGLLGVESGQDAVIRGMLYARAAHIVYPYGVTVAAFTDKISDLRNKLGKAGVKDEGLIVPKFMGAEGQVIGNVLVGNELSLSFDRTPEEILRIVYGSGNESVPGGFYPKGADGEIAKSYLVTVGSE

SEQ ID NO: 23694 - DNA, 1110 bp, Arabidopsis thaliana
  misc_feature (1)..(1110): Ceres Seq. ID no. 12321543
  misc_feature: MA Experiment ID: 108576 Result: Down-regulated in Transcription
  misc_feature: MA Experiment 108576 PARAMETER Experiment Name: At_42deg_Heat_cDNA_P Parameter: Temperature (deg C) Value: 42 vs. 22
  misc_feature: MA Experiment 108576 PARAMETER Experiment Name: At_42deg_Heat_cDNA_P Parameter: Timepoint (hr) Value: 1
  misc_feature: MA Experiment 108576 PARAMETER Experiment Name: At_42deg_Heat_cDNA_P Parameter: Tissue Value: Aerial
  misc_feature: MA Experiment ID: 108595 Result: Down-regulated in Transcription
  misc_feature: MA Experiment 108595 PARAMETER Experiment Name: At_Ler-pi_Ovule_cDNA_P Parameter: Plant Line Value: null
  misc_feature: MA Experiment ID: 20000071 Result: Down-regulated in Transcription
  misc_feature: MA Experiment 20000071 PARAMETER Experiment Name: At_100uM_ABA_Mutants_cDNA_P Parameter: Plant Line Value: CS8104
  misc_feature: MA Experiment 20000071 PARAMETER Experiment Name: At_100uM_ABA_Mutants_cDNA_P Parameter: Timepoint (hr) Value: 6
  misc_feature: MA Experiment 20000071 PARAMETER Experiment Name: At_100uM_ABA_Mutants_cDNA_P Parameter: Tissue Value: Aerial
  misc_feature: MA Experiment 20000071 PARAMETER Experiment Name: At_100uM_ABA_Mutants_cDNA_P Parameter: Treatment Value: 100uM ABA vs. No Treatment
  misc_feature: MA Experiment ID: 20000087 Result: Down-regulated in Transcription
  misc_feature: MA Experiment 20000087 PARAMETER Experiment Name: At_100uM_ABA_Mutants_cDNA_P Parameter: Plant Line Value: WS
  misc_feature: MA Experiment 20000087 PARAMETER Experiment Name: At_100uM_ABA_Mutants_cDNA_P Parameter: Timepoint (hr) Value: 6
  misc_feature: MA Experiment 20000087 PARAMETER Experiment Name: At_100uM_ABA_Mutants_cDNA_P Parameter: Tissue Value: Aerial
  misc_feature: MA Experiment 20000087 PARAMETER Experiment Name: At_100uM_ABA_Mutants_cDNA_P Parameter: Treatment Value: 100uM ABA vs. No Treatment
  misc_feature: MA Experiment ID: 20000117 Result: Down-regulated in Transcription
  misc_feature: MA Experiment 20000117 PARAMETER Experiment Name: At_100uM_ABA_Mutants_cDNA_P Parameter: Plant Line Value: Columbia
  misc_feature: MA Experiment 20000117 PARAMETER Experiment Name: At_100uM_ABA_Mutants_cDNA_P Parameter: Timepoint (hr) Value: 6
  misc_feature: MA Experiment 20000117 PARAMETER Experiment Name: At_100uM_ABA_Mutants_cDNA_P Parameter: Tissue Value: Aerial
  misc_feature: MA Experiment 20000117 PARAMETER Experiment Name: At_100uM_ABA_Mutants_cDNA_P Parameter: Treatment Value: 100uM ABA vs. No Treatment
  misc_feature: MA Experiment ID: 20000179 Result: Up-regulated in Transcription
  misc_feature: MA Experiment 20000179 PARAMETER Experiment Name: At_Germinating_Seeds_P Parameter: Age (hr) Value: 6 vs. 0
  misc_feature: MA Experiment 20000179 PARAMETER Experiment Name: At_Germinating_Seeds_P Parameter: Tissue Value: Germinating Seeds
  misc_feature: MA Experiment ID: 20000180 Result: Up-regulated in Transcription
  misc_feature: MA Experiment 20000180 PARAMETER Experiment Name: At_Germinating_Seeds_P Parameter: Age (hr) Value: 24 vs. 0
  misc_feature: MA Experiment 20000180 PARAMETER Experiment Name: At_Germinating_Seeds_P Parameter: Tissue Value: Germinating Seeds
  misc_feature: MA Experiment ID: 20000185 Result: Up-regulated in Transcription
  misc_feature: MA Experiment 20000185 PARAMETER Experiment Name: At_Roots__P Parameter: Age (day) Value: 7 vs. 21
  misc_feature: MA Experiment 20000185 PARAMETER Experiment Name: At_Roots__P Parameter: Organism Value: A. thaliana
  misc_feature: MA Experiment 20000185 PARAMETER Experiment Name: At_Roots__P Parameter: Tissue Value: Roots vs. Whole Plant
  misc_feature: MA Experiment ID: 20000227 Result: Up-regulated in Transcription
  misc_feature: MA Experiment 20000227 PARAMETER Experiment Name: At_Root-Tips-vs-Tops_P Parameter: Tissue Value: Root Tips vs. Root Tops
  misc_feature: MA Experiment ID: 20000234 Result: Up-regulated in Transcription
  misc_feature: MA Experiment 20000234 PARAMETER Experiment Name: At_Siliques_P Parameter: Age (day) Value: 21
  misc_feature: MA Experiment 20000234 PARAMETER Experiment Name: At_Siliques_P Parameter: Organism Value: A. thaliana
  misc_feature: MA Experiment 20000234 PARAMETER Experiment Name: At_Siliques_P Parameter: Plant Line Value: WS
  misc_feature: MA Experiment 20000234 PARAMETER Experiment Name: At_Siliques_P Parameter: Tissue Value: Less Than 5mm Siliques vs. Whole Plant
  misc_feature: MA Experiment ID: 20000265 Result: Up-regulated in Transcription
  misc_feature: MA Experiment 20000265 PARAMETER Experiment Name: At_Open_Flower_P Parameter: Age (day) Value: 21
  misc_feature: MA Experiment 20000265 PARAMETER Experiment Name: At_Open_Flower_P Parameter: Plant Line Value: WS
  misc_feature: MA Experiment 20000265 PARAMETER Experiment Name: At_Open_Flower_P Parameter: Tissue Value: Closed Flower vs. Whole Plant
  misc_feature: MA Experiment ID: 20000286 Result: Up-regulated in Transcription
  misc_feature: MA Experiment 20000286 PARAMETER Experiment Name: At_Open_Flower_P Parameter: Age (day) Value: 21
  misc_feature: MA Experiment 20000286 PARAMETER Experiment Name: At_Open_Flower_P Parameter: Plant Line Value: WS
  misc_feature: MA Experiment 20000286 PARAMETER Experiment Name: At_Open_Flower_P Parameter: Tissue Value: Half Open vs. Whole Plant
  misc_feature: MA Experiment ID: 20001451 Result: Down-regulated in Transcription
  misc_feature: MA Experiment 20001451 PARAMETER Experiment Name: At_Far-red-induction_P Parameter: Age (day) Value: 7
  misc_feature: MA Experiment 20001451 PARAMETER Experiment Name: At_Far-red-induction_P Parameter: Light Value: Far-red vs. White
  misc_feature: MA Experiment 20001451 PARAMETER Experiment Name: At_Far-red-induction_P Parameter: Organism Value: A. thaliana
  misc_feature: MA Experiment 20001451 PARAMETER Experiment Name: At_Far-red-induction_P Parameter: Plant Line Value: Columbia
  misc_feature: MA Experiment 20001451 PARAMETER Experiment Name: At_Far-red-induction_P Parameter: Timepoint (hr) Value: 24
  misc_feature: MA Experiment 20001451 PARAMETER Experiment Name: At_Far-red-induction_P Parameter: Tissue Value: Whole Plant
  misc_feature: MA Experiment ID: 20001558 Result: Up-regulated in Transcription
  misc_feature: MA Experiment 20001558 PARAMETER Experiment Name: At_Drought_Soil_Dry_P Parameter: Age (day) Value: 27
  misc_feature: MA Experiment 20001558 PARAMETER Experiment Name: At_Drought_Soil_Dry_P Parameter: Organism Value: A. thaliana
  misc_feature: MA Experiment 20001558 PARAMETER Experiment Name: At_Drought_Soil_Dry_P Parameter: Plant Line Value: WS
  misc_feature: MA Experiment 20001558 PARAMETER Experiment Name: At_Drought_Soil_Dry_P Parameter: Post Timepoint (hr) Value: 6
  misc_feature: MA Experiment 20001558 PARAMETER Experiment Name: At_Drought_Soil_Dry_P Parameter: Post-Treatment Value: Re-Water vs. No Drought
  misc_feature: MA Experiment 20001558 PARAMETER Experiment Name: At_Drought_Soil_Dry_P Parameter: Timepoint (day) Value: 13
  misc_feature: MA Experiment 20001558 PARAMETER Experiment Name: At_Drought_Soil_Dry_P Parameter: Treatment Value: Drought vs. No Drought
  misc_feature: MA Experiment ID: 20001911 Result: Down-regulated in Transcription
  misc_feature: MA Experiment 20001911 PARAMETER Experiment Name: At_Drought_Reproduction_P Parameter: Age (day) Value: 40
  misc_feature: MA Experiment 20001911 PARAMETER Experiment Name: At_Drought_Reproduction_P Parameter: Organism Value: A. thaliana
  misc_feature: MA Experiment 20001911 PARAMETER Experiment Name: At_Drought_Reproduction_P Parameter: Plant Line Value: WS
  misc_feature: MA Experiment 20001911 PARAMETER Experiment Name: At_Drought_Reproduction_P Parameter: Timepoint (day) Value: 10
  misc_feature: MA Experiment 20001911 PARAMETER Experiment Name: At_Drought_Reproduction_P Parameter: Tissue Value: Flowers
  misc_feature: MA Experiment 20001911 PARAMETER Experiment Name: At_Drought_Reproduction_P Parameter: Treatment Value: Drought vs. No Drought
agcagagcactcgataattaatactagggacgaagaagctctcgtttattaaattttagcttagaacacagaagaagcattttttcggatctgagatctttagatccgaacatcgtttatctcaaatcgtttattcaaggtctaaaaaaaagttttgaagaatcatagccatgtcaagaaggcaagtaaggcgtgtaggggatagtggaagcttcccatttgtaggagctctgcattcaaaatcacgttcgtctcctctgttatcagtttgccttgttctcgtgggagcatgccttctcattggttatgcttacagtggtccaggtatgttcaaaagtatcagagaagtcagcaagattacaggtgactattcttgcacagcagaagttcaaagagccattcctattcttaagagtgcgtatggagatagcatgcgcaaagtcctgcacgtgggtcctgaaacatgctcagtggtctcgagtctgttgaatgaagaagagacagaagcatggggtgttgaaccatatgatgtggaggatgcagactctaactgcaaaagtcttttgcacaaaggccttgtacgtgtggctgacatcaaattccctcttccttaccggtcaaagtcgttttctcttgtgatcgtctcagacgctttggattacctctcacccaggtacctgaacaaaactgtgcctgaacttgctcgcgtcgcttcagatggtgtcgttcttttagcaggtaaccctggtcaacaaaaggctaaaggtgcggaattgtcgaaatttggacggcctgctaaaatgcgtagctcgtcgtggtggatccgtttcttctcacagacgaacttagaggaaaacgaagcagcaagcaagaaattcgaacaagcagcttccaagagttcatacaaaccagcttgtcaagttttccacctcaagccattacattagtacacactattattactggtcttaagacatgaaaccagatatctctcctctctgtttaatacccttttttccgctatagaaagaaactaaactcccacaaattgtaattcattctcaacgatttgattcataatttaactatttaataaatttgcctcttctc

SEQ ID NO: 23695 - protein, 258 aa, Arabidopsis thaliana
  peptide (1)..(258): Ceres Seq. ID no. 12321544
  misc_feature (88)..(258): Homolog of NCBI NO: 16649137 NR Description: Unknown protein [Arabidopsis thaliana]
  misc_feature (1)..(254): Homolog of NCBI NO: 34895744 NR Description: P0019D06.30 [Oryza sativa (japonica
  misc_feature (1)..(208): Homolog of NCBI NO: 9758568 NR Description: emb|CAB66910.1~gene_id:K22J17.2~similar to
  misc_feature (1)..(258): Homolog of NCBI NO: 18408931 NR Description: expressed protein
  misc_feature (1)..(258): Homolog of NCBI NO: 18424995 NR Description: putative protein
  misc_feature (1)..(258): Homolog of NCBI NO: 21593192 NR Description: unknown [Arabidopsis thaliana]
MSRRQVRRVGDSGSFPFVGALHSKSRSSPLLSVCLVLVGACLLIGYAYSGPGMFKSIREVSKITGDYSCTAEVQRAIPILKSAYGDSMRKVLHVGPETCSVVSSLLNEEETEAWGVEPYDVEDADSNCKSLLHKGLVRVADIKFPLPYRSKSFSLVIVSDALDYLSPRYLNKTVPELARVASDGVVLLAGNPGQQKAKGAELSKFGRPAKMRSSSWWIRFFSQTNLEENEAASKKFEQAASKSSYKPACQVFHLKPLH

SEQ ID NO: 23696 - protein, 206 aa, Arabidopsis thaliana
  peptide (1)..(206): Ceres Seq. ID no. 12321545
  misc_feature (36)..(206): Homolog of NCBI NO: 16649137 NR Description: Unknown protein [Arabidopsis thaliana]
  misc_feature (1)..(202): Homolog of NCBI NO: 34895744 NR Description: P0019D06.30 [Oryza sativa (japonica
  misc_feature (1)..(156): Homolog of NCBI NO: 9758568 NR Description: emb|CAB66910.1~gene_id:K22J17.2~similar to
  misc_feature (1)..(206): Homolog of NCBI NO: 18408931 NR Description: expressed protein
  misc_feature (1)..(206): Homolog of NCBI NO: 18424995 NR Description: putative protein
  misc_feature (1)..(206): Homolog of NCBI NO: 21593192 NR Description: unknown [Arabidopsis thaliana]
MFKSIREVSKITGDYSCTAEVQRAIPILKSAYGDSMRKVLHVGPETCSVVSSLLNEEETEAWGVEPYDVEDADSNCKSLLHKGLVRVADIKFPLPYRSKSFSLVIVSDALDYLSPRYLNKTVPELARVASDGVVLLAGNPGQQKAKGAELSKFGRPAKMRSSSWWIRFFSQTNLEENEAASKKFEQAASKSSYKPACQVFHLKPLH

SEQ ID NO: 23697 - protein, 171 aa, Arabidopsis thaliana
  peptide (1)..(171): Ceres Seq. ID no. 12321546
  misc_feature (1)..(171): Homolog of NCBI NO: 16649137 NR Description: Unknown protein [Arabidopsis thaliana]
  misc_feature (1)..(167): Homolog of NCBI NO: 34895744 NR Description: P0019D06.30 [Oryza sativa (japonica
  misc_feature (1)..(121): Homolog of NCBI NO: 9758568 NR Description: emb|CAB66910.1~gene_id:K22J17.2~similar to
  misc_feature (1)..(171): Homolog of NCBI NO: 18408931 NR Description: expressed protein
  misc_feature (1)..(171): Homolog of NCBI NO: 18424995 NR Description: putative protein
  misc_feature (1)..(171): Homolog of NCBI NO: 21593192 NR Description: unknown [Arabidopsis thaliana]
MRKVLHVGPETCSVVSSLLNEEETEAWGVEPYDVEDADSNCKSLLHKGLVRVADIKFPLPYRSKSFSLVIVSDALDYLSPRYLNKTVPELARVASDGVVLLAGNPGQQKAKGAELSKFGRPAKMRSSSWWIRFFSQTNLEENEAASKKFEQAASKSSYKPACQVFHLKPLH

SEQ ID NO: 23698 - DNA, 1387 bp, Arabidopsis thaliana
  misc_feature (1)..(1387): Ceres Seq. ID no. 13486745
  misc_feature: MA Experiment ID: 108434 Result: Up-regulated in Transcription
  misc_feature: MA Experiment 108434 PARAMETER Experiment Name: At_Root_Tips_cDNA_P Parameter: Tissue Value: Root Tips
  misc_feature: MA Experiment ID: 108435 Result: Up-regulated in Transcription
  misc_feature: MA Experiment 108435 PARAMETER Experiment Name: At_stm_Mutants_cDNA_P Parameter: Plant Line Value: wt Landsburg vs stm
  misc_feature: MA Experiment 108435 PARAMETER Experiment Name: At_stm_Mutants_cDNA_P Parameter: Tissue Value: Shoot Apical Meristem Region
  misc_feature: MA Experiment ID: 108461 Result: Down-regulated in Transcription
  misc_feature: MA Experiment 108461 PARAMETER Experiment Name: At_Germinating_Seeds_cDNA_P Parameter: Age (day) Value: 1 vs. 0
  misc_feature: MA Experiment 108461 PARAMETER Experiment Name: At_Germinating_Seeds_cDNA_P Parameter: Tissue Value: Germinating Seeds
  misc_feature: MA Experiment ID: 108462 Result: Down-regulated in Transcription
  misc_feature: MA Experiment 108462 PARAMETER Experiment Name: At_Germinating_Seeds_cDNA_P Parameter: Age (day) Value: 2 vs. 0
  misc_feature: MA Experiment 108462 PARAMETER Experiment Name: At_Germinating_Seeds_cDNA_P Parameter: Tissue Value: Germinating Seeds
  misc_feature: MA Experiment ID: 108463 Result: Down-regulated in Transcription
  misc_feature: MA Experiment 108463 PARAMETER Experiment Name: At_Germinating_Seeds_cDNA_P Parameter: Age (day) Value: 3 vs. 0
  misc_feature: MA Experiment 108463 PARAMETER Experiment Name: At_Germinating_Seeds_cDNA_P Parameter: Tissue Value: Germinating Seeds
  misc_feature: MA Experiment ID: 108464 Result: Down-regulated in Transcription
  misc_feature: MA Experiment 108464 PARAMETER Experiment Name: At_Germinating_Seeds_cDNA_P Parameter: Age (day) Value: 4 vs. 0
  misc_feature: MA Experiment 108464 PARAMETER Experiment Name: At_Germinating_Seeds_cDNA_P Parameter: Tissue Value: Germinating Seeds
  misc_feature: MA Experiment ID: 108573 Result: Up-regulated in Transcription
  misc_feature: MA Experiment 108573 PARAMETER Experiment Name: At_Drought_cDNA_P Parameter: Timepoint (hr) Value: 6
  misc_feature: MA Experiment 108573 PARAMETER Experiment Name: At_Drought_cDNA_P Parameter: Tissue Value: Aerial
  misc_feature: MA Experiment 108573 PARAMETER Experiment Name: At_Drought_cDNA_P Parameter: Treatment Value: Drought vs. No Drought
  misc_feature: MA Experiment ID: 108585 Result: Up-regulated in Transcription
  misc_feature: MA Experiment 108585 PARAMETER Experiment Name: At_5mM_NaNP_cDNA_P Parameter: Timepoint (hr) Value: 6
  misc_feature: MA Experiment 108585 PARAMETER Experiment Name: At_5mM_NaNP_cDNA_P Parameter: Tissue Value: Aerial
  misc_feature: MA Experiment 108585 PARAMETER Experiment Name: At_5mM_NaNP_cDNA_P Parameter: Treatment Value: null
  misc_feature: MA Experiment ID: 20000093 Result: Up-regulated in Transcription
  misc_feature: MA Experiment 20000093 PARAMETER Experiment Name: At_42deg_Heat_cDNA_P Parameter: Temperature (deg C) Value: 42 vs. 22
  misc_feature: MA Experiment 20000093 PARAMETER Experiment Name: At_42deg_Heat_cDNA_P Parameter: Timepoint (hr) Value: 0.5
  misc_feature: MA Experiment 20000093 PARAMETER Experiment Name: At_42deg_Heat_cDNA_P Parameter: Tissue Value: Aerial
  misc_feature: MA Experiment ID: 20000111 Result: Up-regulated in Transcription
  misc_feature: MA Experiment 20000111 PARAMETER Experiment Name: At_42deg_Heat_cDNA_P Parameter: Temperature (deg C) Value: 42 vs. 22
  misc_feature: MA Experiment 20000111 PARAMETER Experiment Name: At_42deg_Heat_cDNA_P Parameter: Timepoint (hr) Value: 6
  misc_feature: MA Experiment 20000111 PARAMETER Experiment Name: At_42deg_Heat_cDNA_P Parameter: Tissue Value: Aerial
  misc_feature: MA Experiment ID: 20000112 Result: Up-regulated in Transcription
  misc_feature: MA Experiment 20000112 PARAMETER Experiment Name: At_42deg_Heat_cDNA_P Parameter: Temperature (deg C) Value: 42 vs. 22
  misc_feature: MA Experiment 20000112 PARAMETER Experiment Name: At_42deg_Heat_cDNA_P Parameter: Timepoint (hr) Value: 2
  misc_feature: MA Experiment 20000112 PARAMETER Experiment Name: At_42deg_Heat_cDNA_P Parameter: Tissue Value: Aerial
  misc_feature: MA Experiment ID: 20000113 Result: Up-regulated in Transcription
  misc_feature: MA Experiment 20000113 PARAMETER Experiment Name: At_42deg_Heat_cDNA_P Parameter: Temperature (deg C) Value: 42 vs. 22
  misc_feature: MA Experiment 20000113 PARAMETER Experiment Name: At_42deg_Heat_cDNA_P Parameter: Timepoint (hr) Value: 8
  misc_feature: MA Experiment 20000113 PARAMETER Experiment Name: At_42deg_Heat_cDNA_P Parameter: Tissue Value: Aerial
  misc_feature: MA Experiment ID: 20000144 Result: Up-regulated in Transcription
  misc_feature: MA Experiment 20000144 PARAMETER Experiment Name: At_42deg_Heat_cDNA_P Parameter: Temperature (deg C) Value: 42 vs. 22
  misc_feature: MA Experiment 20000144 PARAMETER Experiment Name: At_42deg_Heat_cDNA_P Parameter: Timepoint (hr) Value: 1
  misc_feature: MA Experiment 20000144 PARAMETER Experiment Name: At_42deg_Heat_cDNA_P Parameter: Tissue Value: Aerial
  misc_feature: MA Experiment ID: 20000179 Result: Down-regulated in Transcription
  misc_feature: MA Experiment 20000179 PARAMETER Experiment Name: At_Germinating_Seeds_P Parameter: Age (hr) Value: 6 vs. 0
  misc_feature: MA Experiment 20000179 PARAMETER Experiment Name: At_Germinating_Seeds_P Parameter: Tissue Value: Germinating Seeds
  misc_feature: MA Experiment ID: 20000180 Result: Down-regulated in Transcription
  misc_feature: MA Experiment 20000180 PARAMETER Experiment Name: At_Germinating_Seeds_P Parameter: Age (hr) Value: 24 vs. 0
  misc_feature: MA Experiment 20000180 PARAMETER Experiment Name: At_Germinating_Seeds_P Parameter: Tissue Value: Germinating Seeds
attgtttcagaaaagctttaacctaatttcacttcgtctctctctcgcgctcccaatttctccgccggcgggaaaaccatgtcgcacttcggaaggtcaggtccaccggatatcagcgacacctactcacttctcgtccttaacatcaccttccgtacgactgctgatgatctctatcctctattcgcaaagtatggaaaggtcgttgatgtgtttattcccagagatcgaaggactggtgattcgcgtggttttgcgtttgttcggtataagtataaagacgaagctcacaaagcagtggaaaggcttgatggaagagttgttgatggcagagaaataactgttcagtttgcgaaatatgggccaaatgctgaaaaaatttccaaaggaagagttgtggaaccaccgccgaagtcacgaagatctagaagccgtagtcctaggcggagtcgtagtcctaggaggagccgtagcccgcctagacgtcgtagtcccagaagaagccgcagtcctcgtaggaggtcccgagatgactatagggaaaaagactaccggaagcagagcaggagcagaagctatgacaggcgtgaaaggcatgaggagaaggatagagatcatcgtcgtcgcactaggtctcgtagtgccagcccagatgaaaaacgcagagtcagaggccgttatgataatgagagccgcagtcacagtcgttccttgagtgcatctcctgctcgccgcagccctagaagttcctccccacagaaaacctctcctgctagagaagtttctcctgataagcgtagcaatgagaggtctccatctcctcgtcgcagcctcagcccaagaagccctgctttgcaaaaggcctctccttctaaggagatgtctcctgaaaggcgtagcaatgagaggtccccatctcctggtagccctgctcctctgcgcaaagttgatgctgcttctcgaagtcaatctccttatgctgcggaatgactgcagccacttgtgaaagtgatacggtgtatgatgaaaaacacgtttgcttgtactgatgatgtttcatcattaagcactggaacgtctaccctctgtagtattacttgctttccgtaggtgccctcaaactactgagtactgactgtatctttgtttcctgttatcgttctggtttagtgttcatgtgcaagaattattactgtttgaacagcctttttagtctctgttttatttgaatcttctctggtttggaattcatagcattctaactccattcccctggcttgtcttggatttttctagtctggttcgagaaaagaattgactgggaagatggcacaaccatgttgagattgtagctgttgatggctgtttatgaaactgtagatgatct

SEQ ID NO: 23699 - protein, 303 aa, Arabidopsis thaliana
  peptide (1)..(303): Ceres Seq. ID no. 13486746
  misc_feature (18)..(89): Pfam Name: RNA recognition motif. (a.k.a. RRM, RBD, or RNP domain) Pfam Description: RNA recognition motif. (a.k.a. RRM, RBD, or RNP
  misc_feature (18)..(89): Pfam Name: RNA recognition motif. (a.k.a. RRM, RBD, or RNP domain) Pfam Description: RNA recognition motif. (a.k.a. RRM, RBD, or RNP
  misc_feature (5)..(298): Homolog of NCBI NO: 29735276 NR Description: similar to 46kD arginine/serine-rich splicing
  misc_feature (5)..(279): Homolog of NCBI NO: 15055543 NR Description: Splicing factor, arginine/serine-rich, 46kD [Homo
  misc_feature (4)..(234): Homolog of NCBI NO: 4506899 NR Description: splicing factor, arginine/serine-rich 2 [Homo
  misc_feature (4)..(234): Homolog of NCBI NO: 6755478 NR Description: splicing factor, arginine/serine-rich 2
  misc_feature (4)..(234): Homolog of NCBI NO: 266991 NR Description: Splicing factor, arginine/serine-rich 2 (Splicing
  misc_feature (5)..(298): Homolog of NCBI NO: 29735276 NR Description: similar to 46kD arginine/serine-rich splicing
  misc_feature (4)..(234): Homolog of NCBI NO: 4506899 NR Description: splicing factor, arginine/serine-rich 2 [Homo
  misc_feature (4)..(234): Homolog of NCBI NO: 266991 NR Description: Splicing factor, arginine/serine-rich 2 (Splicing
  misc_feature (1)..(303): Homolog of NCBI NO: 15237641 NR Description: arginine/serine-rich splicing factor SC35
  misc_feature (1)..(303): Homolog of NCBI NO: 9843653 NR Description: splicing factor SC35 [Arabidopsis thaliana]
  misc_feature (1)..(280): Homolog of NCBI NO: 33146621 NR Description: putative splicing factor, arginine/serine-rich 2
  misc_feature (1)..(288): Homolog of NCBI NO: 7446336 NR Description: probable arginine/serine-rich splicing factor -
  misc_feature (4)..(216): Homolog of NCBI NO: 28279759 NR Description: Similar to splicing factor, arginine/serine-rich
  misc_feature (4)..(234): Homolog of NCBI NO: 6755478 NR Description: splicing factor, arginine/serine-rich 2
  misc_feature (5)..(279): Homolog of NCBI NO: 15055543 NR Description: Splicing factor, arginine/serine-rich, 46kD [Homo
  misc_feature (4)..(216): Homolog of NCBI NO: 28279759 NR Description: Similar to splicing factor, arginine/serine-rich
  misc_feature (1)..(288): Homolog of NCBI NO: 7446336 NR Description: probable arginine/serine-rich splicing factor -
  misc_feature (1)..(280): Homolog of NCBI NO: 33146621 NR Description: putative splicing factor, arginine/serine-rich 2
  misc_feature (1)..(303): Homolog of NCBI NO: 9843653 NR Description: splicing factor SC35 [Arabidopsis thaliana]
  misc_feature (1)..(303): Homolog of NCBI NO: 15237641 NR Description: arginine/serine-rich splicing factor SC35
MSHFGRSGPPDISDTYSLLVLNITFRTTADDLYPLFAKYGKVVDVFIPRDRRTGDSRGFAFVRYKYKDEAHKAVERLDGRVVDGREITVQFAKYGPNAEKISKGRVVEPPPKSRRSRSRSPRRSRSPRRSRSPPRRRSPRRSRSPRRRSRDDYREKDYRKQSRSRSYDRRERHEEKDRDHRRRTRSRSASPDEKRRVRGRYDNESRSHSRSLSASPARRSPRSSSPQKTSPAREVSPDKRSNERSPSPRRSLSPRSPALQKASPSKEMSPERRSNERSPSPGSPAPLRKVDAASRSQSPYAAE

SEQ ID NO: 23700 - DNA, 1429 bp, Arabidopsis thaliana
  misc_feature (1)..(1429): Ceres Seq. ID no. 13487883
  misc_feature: MA Experiment ID: 108435 Result: Down-regulated in Transcription
  misc_feature: MA Experiment 108435 PARAMETER Experiment Name: At_stm_Mutants_cDNA_P Parameter: Plant Line Value: wt Landsburg vs stm
  misc_feature: MA Experiment 108435 PARAMETER Experiment Name: At_stm_Mutants_cDNA_P Parameter: Tissue Value: Shoot Apical Meristem Region
  misc_feature: MA Experiment ID: 108461 Result: Up-regulated in Transcription
  misc_feature: MA Experiment 108461 PARAMETER Experiment Name: At_Germinating_Seeds_cDNA_P Parameter: Age (day) Value: 1 vs. 0
  misc_feature: MA Experiment 108461 PARAMETER Experiment Name: At_Germinating_Seeds_cDNA_P Parameter: Tissue Value: Germinating Seeds
  misc_feature: MA Experiment ID: 108462 Result: Up-regulated in Transcription
  misc_feature: MA Experiment 108462 PARAMETER Experiment Name: At_Germinating_Seeds_cDNA_P Parameter: Age (day) Value: 2 vs. 0
  misc_feature: MA Experiment 108462 PARAMETER Experiment Name: At_Germinating_Seeds_cDNA_P Parameter: Tissue Value: Germinating Seeds
  misc_feature: MA Experiment ID: 108463 Result: Up-regulated in Transcription
  misc_feature: MA Experiment 108463 PARAMETER Experiment Name: At_Germinating_Seeds_cDNA_P Parameter: Age (day) Value: 3 vs. 0
  misc_feature: MA Experiment 108463 PARAMETER Experiment Name: At_Germinating_Seeds_cDNA_P Parameter: Tissue Value: Germinating Seeds
  misc_feature: MA Experiment ID: 108573 Result: Up-regulated in Transcription
  misc_feature: MA Experiment 108573 PARAMETER Experiment Name: At_Drought_cDNA_P Parameter: Timepoint (hr) Value: 6
  misc_feature: MA Experiment 108573 PARAMETER Experiment Name: At_Drought_cDNA_P Parameter: Tissue Value: Aerial
  misc_feature: MA Experiment 108573 PARAMETER Experiment Name: At_Drought_cDNA_P Parameter: Treatment Value: Drought vs. No Drought
  misc_feature: MA Experiment ID: 108595 Result: Down-regulated in Transcription
  misc_feature: MA Experiment 108595 PARAMETER Experiment Name: At_Ler-pi_Ovule_cDNA_P Parameter: Plant Line Value: null
  misc_feature: MA Experiment ID: 20000069 Result: Up-regulated in Transcription
  misc_feature: MA Experiment 20000069 PARAMETER Experiment Name: At_100uM_ABA_Mutants_cDNA_P Parameter: Plant Line Value: CS23
  misc_feature: MA Experiment 20000069 PARAMETER Experiment Name: At_100uM_ABA_Mutants_cDNA_P Parameter: Timepoint (hr) Value: 6
  misc_feature: MA Experiment 20000069 PARAMETER Experiment Name: At_100uM_ABA_Mutants_cDNA_P Parameter: Tissue Value: Aerial
  misc_feature: MA Experiment 20000069 PARAMETER Experiment Name: At_100uM_ABA_Mutants_cDNA_P Parameter: Treatment Value: 100uM ABA vs. No Treatment
  misc_feature: MA Experiment ID: 20000071 Result: Up-regulated in Transcription
  misc_feature: MA Experiment 20000071 PARAMETER Experiment Name: At_100uM_ABA_Mutants_cDNA_P Parameter: Plant Line Value: CS8104
  misc_feature: MA Experiment 20000071 PARAMETER Experiment Name: At_100uM_ABA_Mutants_cDNA_P Parameter: Timepoint (hr) Value: 6
  misc_feature: MA Experiment 20000071 PARAMETER Experiment Name: At_100uM_ABA_Mutants_cDNA_P Parameter: Tissue Value: Aerial
  misc_feature: MA Experiment 20000071 PARAMETER Experiment Name: At_100uM_ABA_Mutants_cDNA_P Parameter: Treatment Value: 100uM ABA vs. No Treatment
  misc_feature: MA Experiment ID: 20000072 Result: Up-regulated in Transcription
  misc_feature: MA Experiment 20000072 PARAMETER Experiment Name: At_100uM_ABA_Mutants_cDNA_P Parameter: Plant Line Value: CS8105
  misc_feature: MA Experiment 20000072 PARAMETER Experiment Name: At_100uM_ABA_Mutants_cDNA_P Parameter: Timepoint (hr) Value: 6
  misc_feature: MA Experiment 20000072 PARAMETER Experiment Name: At_100uM_ABA_Mutants_cDNA_P Parameter: Tissue Value: Aerial
  misc_feature: MA Experiment 20000072 PARAMETER Experiment Name: At_100uM_ABA_Mutants_cDNA_P Parameter: Treatment Value: 100uM ABA vs. No Treatment
  misc_feature: MA Experiment ID: 20000086 Result: Up-regulated in Transcription
  misc_feature: MA Experiment 20000086 PARAMETER Experiment Name: At_100uM_ABA_Mutants_cDNA_P Parameter: Plant Line Value: CS22
  misc_feature: MA Experiment 20000086 PARAMETER Experiment Name: At_100uM_ABA_Mutants_cDNA_P Parameter: Timepoint (hr) Value: 6
  misc_feature: MA Experiment 20000086 PARAMETER Experiment Name: At_100uM_ABA_Mutants_cDNA_P Parameter: Tissue Value: Aerial
  misc_feature: MA Experiment 20000086 PARAMETER Experiment Name: At_100uM_ABA_Mutants_cDNA_P Parameter: Treatment Value: 100uM ABA vs. No Treatment
  misc_feature: MA Experiment ID: 20000090 Result: Up-regulated in Transcription
  misc_feature: MA Experiment ID: 20000111 Result: Down-regulated in Transcription
  misc_feature: MA Experiment 20000111 PARAMETER Experiment Name: At_42deg_Heat_cDNA_P Parameter: Temperature (deg C) Value: 42 vs. 22
  misc_feature: MA Experiment 20000111 PARAMETER Experiment Name: At_42deg_Heat_cDNA_P Parameter: Timepoint (hr) Value: 6
  misc_feature: MA Experiment 20000111 PARAMETER Experiment Name: At_42deg_Heat_cDNA_P Parameter: Tissue Value: Aerial
  misc_feature: MA Experiment ID: 20000113 Result: Down-regulated in Transcription
  misc_feature: MA Experiment 20000113 PARAMETER Experiment Name: At_42deg_Heat_cDNA_P Parameter: Temperature (deg C) Value: 42 vs. 22
  misc_feature: MA Experiment 20000113 PARAMETER Experiment Name: At_42deg_Heat_cDNA_P Parameter: Timepoint (hr) Value: 8
  misc_feature: MA Experiment 20000113 PARAMETER Experiment Name: At_42deg_Heat_cDNA_P Parameter: Tissue Value: Aerial
  misc_feature: MA Experiment ID: 20000117 Result: Up-regulated in Transcription
  misc_feature: MA Experiment 20000117 PARAMETER Experiment Name: At_100uM_ABA_Mutants_cDNA_P Parameter: Plant Line Value: Columbia
  misc_feature: MA Experiment 20000117 PARAMETER Experiment Name: At_100uM_ABA_Mutants_cDNA_P Parameter: Timepoint (hr) Value: 6
  misc_feature: MA Experiment 20000117 PARAMETER Experiment Name: At_100uM_ABA_Mutants_cDNA_P Parameter: Tissue Value: Aerial
  misc_feature: MA Experiment 20000117 PARAMETER Experiment Name: At_100uM_ABA_Mutants_cDNA_P Parameter: Treatment Value: 100uM ABA vs. No Treatment
  misc_feature: MA Experiment ID: 20000173 Result: Down-regulated in Transcription
  misc_feature: MA Experiment 20000173 PARAMETER Experiment Name: At_42deg_Heat_P Parameter: Age (day) Value: 14
  misc_feature: MA Experiment 20000173 PARAMETER Experiment Name: At_42deg_Heat_P Parameter: Organism Value: A. thaliana
  misc_feature: MA Experiment 20000173 PARAMETER Experiment Name: At_42deg_Heat_P Parameter: Plant Line Value: WS
  misc_feature: MA Experiment 20000173 PARAMETER Experiment Name: At_42deg_Heat_P Parameter: Temperature (deg C) Value: 42 vs. 22
  misc_feature: MA Experiment 20000173 PARAMETER Experiment Name: At_42deg_Heat_P Parameter: Timepoint (hr) Value: 6
  misc_feature: MA Experiment 20000173 PARAMETER Experiment Name: At_42deg_Heat_P Parameter: Tissue Value: Aerial
  misc_feature: MA Experiment ID: 20000184 Result: Down-regulated in Transcription
  misc_feature: MA Experiment 20000184 PARAMETER Experiment Name: At_Shoots__P Parameter: Age (day) Value: 7
  misc_feature: MA Experiment 20000184 PARAMETER Experiment Name: At_Shoots__P Parameter: Tissue Value: Shoots vs. Whole Plant
  misc_feature: MA Experiment ID: 20000185 Result: Down-regulated in Transcription
  misc_feature: MA Experiment 20000185 PARAMETER Experiment Name: At_Roots__P Parameter: Age (day) Value: 7 vs. 21
  misc_feature: MA Experiment 20000185 PARAMETER Experiment Name: At_Roots__P Parameter: Organism Value: A. thaliana
  misc_feature: MA Experiment 20000185 PARAMETER Experiment Name: At_Roots__P Parameter: Tissue Value: Roots vs. Whole Plant
  misc_feature: MA Experiment ID: 20000234 Result: Down-regulated in Transcription
  misc_feature: MA Experiment 20000234 PARAMETER Experiment Name: At_Siliques_P Parameter: Age (day) Value: 21
  misc_feature: MA Experiment 20000234 PARAMETER Experiment Name: At_Siliques_P Parameter: Organism Value: A. thaliana
  misc_feature: MA Experiment 20000234 PARAMETER Experiment Name: At_Siliques_P Parameter: Plant Line Value: WS
  misc_feature: MA Experiment 20000234 PARAMETER Experiment Name: At_Siliques_P Parameter: Tissue Value: Less Than 5mm Siliques vs. Whole Plant
  misc_feature: MA Experiment ID: 20000286 Result: Down-regulated in Transcription
  misc_feature: MA Experiment 20000286 PARAMETER Experiment Name: At_Open_Flower_P Parameter: Age (day) Value: 21
  misc_feature: MA Experiment 20000286 PARAMETER Experiment Name: At_Open_Flower_P Parameter: Plant Line Value: WS
  misc_feature: MA Experiment 20000286 PARAMETER Experiment Name: At_Open_Flower_P Parameter: Tissue Value: Half Open vs. Whole Plant
  misc_feature: MA Experiment ID: 20000439 Result: Down-regulated in Transcription
  misc_feature: MA Experiment 20000439 PARAMETER Experiment Name: At_Roots__P Parameter: Age (day) Value: 14 vs. 21
  misc_feature: MA Experiment 20000439 PARAMETER Experiment Name: At_Roots__P Parameter: Organism Value: A. thaliana
  misc_feature: MA Experiment 20000439 PARAMETER Experiment Name: At_Roots__P Parameter: Tissue Value: Roots vs. Whole Plant
  misc_feature: MA Experiment ID: 20001557 Result: Down-regulated in Transcription
  misc_feature: MA Experiment 20001557 PARAMETER Experiment Name: At_Drought_Soil_Dry_P Parameter: Age (day) Value: 27
  misc_feature: MA Experiment 20001557 PARAMETER Experiment Name: At_Drought_Soil_Dry_P Parameter: Organism Value: A. thaliana
  misc_feature: MA Experiment 20001557 PARAMETER Experiment Name: At_Drought_Soil_Dry_P Parameter: Plant Line Value: WS
  misc_feature: MA Experiment 20001557 PARAMETER Experiment Name: At_Drought_Soil_Dry_P Parameter: Post Timepoint (hr) Value: 3
  misc_feature: MA Experiment 20001557 PARAMETER Experiment Name: At_Drought_Soil_Dry_P Parameter: Post-Treatment Value: Re-Water vs. No Drought
  misc_feature: MA Experiment 20001557 PARAMETER Experiment Name: At_Drought_Soil_Dry_P Parameter: Timepoint (day) Value: 13
  misc_feature: MA Experiment 20001557 PARAMETER Experiment Name: At_Drought_Soil_Dry_P Parameter: Treatment Value: Drought vs. No Drought
  misc_feature: MA Experiment ID: 20001558 Result: Down-regulated in Transcription
  misc_feature: MA Experiment 20001558 PARAMETER Experiment Name: At_Drought_Soil_Dry_P Parameter: Age (day) Value: 27
  misc_feature: MA Experiment 20001558 PARAMETER Experiment Name: At_Drought_Soil_Dry_P Parameter: Organism Value: A. thaliana
  misc_feature: MA Experiment 20001558 PARAMETER Experiment Name: At_Drought_Soil_Dry_P Parameter: Plant Line Value: WS
  misc_feature: MA Experiment 20001558 PARAMETER Experiment Name: At_Drought_Soil_Dry_P Parameter: Post Timepoint (hr) Value: 6
  misc_feature: MA Experiment 20001558 PARAMETER Experiment Name: At_Drought_Soil_Dry_P Parameter: Post-Treatment Value: Re-Water vs. No Drought
  misc_feature: MA Experiment 20001558 PARAMETER Experiment Name: At_Drought_Soil_Dry_P Parameter: Timepoint (day) Value: 13
  misc_feature: MA Experiment 20001558 PARAMETER Experiment Name: At_Drought_Soil_Dry_P Parameter: Treatment Value: Drought vs. No Drought
  misc_feature: MA Experiment ID: 20001560 Result: Down-regulated in Transcription
  misc_feature: MA Experiment 20001560 PARAMETER Experiment Name: At_Drought_Soil_Dry_P Parameter: Age (day) Value: 28
  misc_feature: MA Experiment 20001560 PARAMETER Experiment Name: At_Drought_Soil_Dry_P Parameter: Organism Value: A. thaliana
  misc_feature: MA Experiment 20001560 PARAMETER Experiment Name: At_Drought_Soil_Dry_P Parameter: Plant Line Value: WS
  misc_feature: MA Experiment 20001560 PARAMETER Experiment Name: At_Drought_Soil_Dry_P Parameter: Post Timepoint (hr) Value: None
  misc_feature: MA Experiment 20001560 PARAMETER Experiment Name: At_Drought_Soil_Dry_P Parameter: Post-Treatment Value: None
  misc_feature: MA Experiment 20001560 PARAMETER Experiment Name: At_Drought_Soil_Dry_P Parameter: Timepoint (day) Value: 14
  misc_feature: MA Experiment 20001560 PARAMETER Experiment Name: At_Drought_Soil_Dry_P Parameter: Treatment Value: Drought vs. No Drought
  misc_feature: MA Experiment ID: 20001905 Result: Down-regulated in Transcription
  misc_feature: MA Experiment 20001905 PARAMETER Experiment Name: At_Drought_Reproduction_P Parameter: Age (day) Value: 40
  misc_feature: MA Experiment 20001905 PARAMETER Experiment Name: At_Drought_Reproduction_P Parameter: Organism Value: A. thaliana
  misc_feature: MA Experiment 20001905 PARAMETER Experiment Name: At_Drought_Reproduction_P Parameter: Plant Line Value: WS
  misc_feature: MA Experiment 20001905 PARAMETER Experiment Name: At_Drought_Reproduction_P Parameter: Timepoint (day) Value: 10
  misc_feature: MA Experiment 20001905 PARAMETER Experiment Name: At_Drought_Reproduction_P Parameter: Tissue Value: Rosettes
  misc_feature: MA Experiment 20001905 PARAMETER Experiment Name: At_Drought_Reproduction_P Parameter: Treatment Value: Drought vs. No Drought
agatatttttttacgaaaatccacggccactaaccgtaaaggacactcttttgatttttctcttcttctacttaactcgctttgcctgactcactgagtcatggcgcttctgaggccgcatcttcatcgctttcactccaacactctccgccactcagcctatccttccgccgacgctggcggtggccttgtcgtctatcccacgtatggtcgtcaccgttgctccgcgattgcgatcgacgctccgtcgtctctgactggcgtgacgccgattcgttggggttacacgagtgttcaaggattccgagatgagatggaagacgacatcgtaatccgttctgatgctgtcgatagcttctcctacgcagcggtcttcgacggccacgctgggtcgtcctctgtcaaattcctcagggaagagctgtataaagagtgtgttggtgcattgcaagctggatcgttgttgaatggaggcgatttcgcagcaatcaaggaagctttgattaaggcctttgaaagcgttgaccgcaatttgctcaaatggctagaagctaacggtgacgaagaagatgaatcaggttcaacagccactgtaatgatcatcagaaatgatgtttccttcattgctcatattggtgattcgtgtgcagtcttatctcgatctgggcaaatcgaggaattgactgattatcaccgtccatatggaagcagtagagcagctattcaggaagtgaaaagggtcaaagaagcaggtggatggattgtcaatggaaggatttgtggagacatagctgtatctcgtgcttttggtgacatccggtttaagacaaagaagaatgatatgttaaagaagggtgttgatgaaggaagatggtccgagaagtttgtttccagaatcgagtttaaaggggacatggttgtggcgactccagatatcttccaagtacctctgacatctgatgtggaattcattattttagcttctgatggattatgggactacatgaagagctcagatgtggttagttatgttagggatcagctccggaaacatgggaatgtgcagcttgcttgtgaatctcttgcgcaagtagctttggaccggcgatctcaggacaacattagcatcattattgctgatctaggaagaacagagtggaagaatctccccgcgcagcgacaaaacgtagtggttgaactggttcaggctgcaacgactatcggtttagttactgttggcatatggatgtcttcacatctatcttaagtgaattgaacattctatctctttcgttagtgtatataaaacctgtaactatgtctaacactctagtcttcccatagaaatggagatatgaagatacctcacaaacagaaccagctttatattattatatatcccactttcacaagcgttgaaactacattt

SEQ ID NO: 23701 - protein, 388 aa, Arabidopsis thaliana
  peptide (1)..(388): Ceres Seq. ID no. 13487884
  misc_feature (58)..(341): Pfam Name: Protein phosphatase 2C Pfam Description: Protein phosphatase 2C
  misc_feature (58)..(242): Homolog of NCBI NO: 20161939 NR Description: PP alpha 2 [Mus musculus]
  misc_feature (273)..(345): Homolog of NCBI NO: 38345197 NR Description: OSJNBa0015K02.7 [Oryza sativa (japonica
  misc_feature (60)..(238): Homolog of NCBI NO: 38345197 NR Description: OSJNBa0015K02.7 [Oryza sativa (japonica
  misc_feature (1)..(225): Homolog of NCBI NO: 34913920 NR Description: putative protein phosphatase-2C
  misc_feature (41)..(387): Homolog of NCBI NO: 3643090 NR Description: protein phosphatase-2C; PP2C [Mesembryanthemum
  misc_feature (1)..(325): Homolog of NCBI NO: 30687740 NR Description: Protein phosphatase 2C PPH1 (PPH1) (PP2C)
  misc_feature (1)..(333): Homolog of NCBI NO: 30687733 NR Description: Protein phosphatase 2C PPH1 (PPH1) (PP2C)
  misc_feature (5)..(359): Homolog of NCBI NO: 995839 NR Description: protein phosphatase homolog
  misc_feature (1)..(388): Homolog of NCBI NO: 7488010 NR Description: phosphoprotein phosphatase homolog T27E11.40 -
  misc_feature (1)..(388): Homolog of NCBI NO: 15234274 NR Description: Protein phosphatase 2C PPH1 (PPH1) (PP2C)
MALLRPHLHRFHSNTLRHSAYPSADAGGGLVVYPTYGRHRCSAIAIDAPSSLTGVTPIRWGYTSVQGFRDEMEDDIVIRSDAVDSFSYAAVFDGHAGSSSVKFLREELYKECVGALQAGSLLNGGDFAAIKEALIKAFESVDRNLLKWLEANGDEEDESGSTATVMIIRNDVSFIAHIGDSCAVLSRSGQIEELTDYHRPYGSSRAAIQEVKRVKEAGGWIVNGRICGDIAVSRAFGDIRFKTKKNDMLKKGVDEGRWSEKFVSRIEFKGDMVVATPDIFQVPLTSDVEFIILASDGLWDYMKSSDVVSYVRDQLRKHGNVQLACESLAQVALDRRSQDNISIIIADLGRTEWKNLPAQRQNVVVELVQAATTIGLVTVGIWMSSHLS

SEQ ID NO: 23702 - protein, 317 aa, Arabidopsis thaliana
  peptide (1)..(317): Ceres Seq. ID no. 13487885
  misc_feature (1)..(270): Pfam Name: Protein phosphatase 2C Pfam Description: Protein phosphatase 2C
  misc_feature (1)..(317): Homolog of NCBI NO: 15234274 NR Description: Protein phosphatase 2C PPH1 (PPH1) (PP2C)
  misc_feature (1)..(171): Homolog of NCBI NO: 20161939 NR Description: PP alpha 2 [Mus musculus]
  misc_feature (202)..(274): Homolog of NCBI NO: 38345197 NR Description: OSJNBa0015K02.7 [Oryza sativa (japonica
  misc_feature (1)..(167): Homolog of NCBI NO: 38345197 NR Description: OSJNBa0015K02.7 [Oryza sativa (japonica
  misc_feature (1)..(154): Homolog of NCBI NO: 34913920 NR Description: putative protein phosphatase-2C
  misc_feature (1)..(316): Homolog of NCBI NO: 3643090 NR Description: protein phosphatase-2C; PP2C [Mesembryanthemum
  misc_feature (1)..(254): Homolog of NCBI NO: 30687740 NR Description: Protein phosphatase 2C PPH1 (PPH1) (PP2C)
  misc_feature (1)..(262): Homolog of NCBI NO: 30687733 NR Description: Protein phosphatase 2C PPH1 (PPH1) (PP2C)
  misc_feature (1)..(288): Homolog of NCBI NO: 995839 NR Description: protein phosphatase homolog
  misc_feature (1)..(317): Homolog of NCBI NO: 7488010 NR Description: phosphoprotein phosphatase homolog T27E11.40 -
MEDDIVIRSDAVDSFSYAAVFDGHAGSSSVKFLREELYKECVGALQAGSLLNGGDFAAIKEALIKAFESVDRNLLKWLEANGDEEDESGSTATVMIIRNDVSFIAHIGDSCAVLSRSGQIEELTDYHRPYGSSRAAIQEVKRVKEAGGWIVNGRICGDIAVSRAFGDIRFKTKKNDMLKKGVDEGRWSEKFVSRIEFKGDMVVATPDIFQVPLTSDVEFIILASDGLWDYMKSSDVVSYVRDQLRKHGNVQLACESLAQVALDRRSQDNISIIIADLGRTEWKNLPAQRQNVVVELVQAATTIGLVTVGIWMSSHLS

SEQ ID NO: 23703 - protein, 223 aa, Arabidopsis thaliana
  peptide (1)..(223): Ceres Seq. ID no. 13487886
  misc_feature (1)..(176): Pfam Name: Protein phosphatase 2C Pfam Description: Protein phosphatase 2C
  misc_feature (1)..(77): Homolog of NCBI NO: 20161939 NR Description: PP alpha 2 [Mus musculus]
  misc_feature (108)..(180): Homolog of NCBI NO: 38345197 NR Description: OSJNBa0015K02.7 [Oryza sativa (japonica
  misc_feature (1)..(73): Homolog of NCBI NO: 38345197 NR Description: OSJNBa0015K02.7 [Oryza sativa (japonica
  misc_feature (1)..(60): Homolog of NCBI NO: 34913920 NR Description: putative protein phosphatase-2C
  misc_feature (1)..(222): Homolog of NCBI NO: 3643090 NR Description: protein phosphatase-2C; PP2C [Mesembryanthemum
  misc_feature (1)..(160): Homolog of NCBI NO: 30687740 NR Description: Protein phosphatase 2C PPH1 (PPH1) (PP2C)
  misc_feature (1)..(168): Homolog of NCBI NO: 30687733 NR Description: Protein phosphatase 2C PPH1 (PPH1) (PP2C)
  misc_feature (1)..(194): Homolog of NCBI NO: 995839 NR Description: protein phosphatase homolog
  misc_feature (1)..(223): Homolog of NCBI NO: 7488010 NR Description: phosphoprotein phosphatase homolog T27E11.40 -
  misc_feature (1)..(223): Homolog of NCBI NO: 15234274 NR Description: Protein phosphatase 2C PPH1 (PPH1) (PP2C)
MIIRNDVSFIAHIGDSCAVLSRSGQIEELTDYHRPYGSSRAAIQEVKRVKEAGGWIVNGRICGDIAVSRAFGDIRFKTKKNDMLKKGVDEGRWSEKFVSRIEFKGDMVVATPDIFQVPLTSDVEFIILASDGLWDYMKSSDVVSYVRDQLRKHGNVQLACESLAQVALDRRSQDNISIIIADLGRTEWKNLPAQRQNVVVELVQAATTIGLVTVGIWMSSHLS

SEQ ID NO: 23704 - DNA, 1372 bp, Arabidopsis thaliana
  misc_feature (1)..(1372): Ceres Seq. ID no. 12321831
  misc_feature: MA Experiment ID: 108573 Result: Up-regulated in Transcription
  misc_feature: MA Experiment 108573 PARAMETER Experiment Name: At_Drought_cDNA_P Parameter: Timepoint (hr) Value: 6
  misc_feature: MA Experiment 108573 PARAMETER Experiment Name: At_Drought_cDNA_P Parameter: Tissue Value: Aerial
  misc_feature: MA Experiment 108573 PARAMETER Experiment Name: At_Drought_cDNA_P Parameter: Treatment Value: Drought vs. No Drought
  misc_feature: MA Experiment ID: 20000182 Result: Up-regulated in Transcription
  misc_feature: MA Experiment 20000182 PARAMETER Experiment Name: At_2mM_SA_P Parameter: Age (day) Value: 14
  misc_feature: MA Experiment 20000182 PARAMETER Experiment Name: At_2mM_SA_P Parameter: Organism Value: A. thaliana
  misc_feature: MA Experiment 20000182 PARAMETER Experiment Name: At_2mM_SA_P Parameter: Plant Line Value: WS
  misc_feature: MA Experiment 20000182 PARAMETER Experiment Name: At_2mM_SA_P Parameter: Timepoint (hr) Value: 6
  misc_feature: MA Experiment 20000182 PARAMETER Experiment Name: At_2mM_SA_P Parameter: Tissue Value: Aerial
  misc_feature: MA Experiment 20000182 PARAMETER Experiment Name: At_2mM_SA_P Parameter: Treatment Value: 2mM SA vs. No Treatment
  misc_feature: MA Experiment ID: 20000227 Result: Down-regulated in Transcription
  misc_feature: MA Experiment 20000227 PARAMETER Experiment Name: At_Root-Tips-vs-Tops_P Parameter: Tissue Value: Root Tips vs. Root Tops
aaatcaaaggatctcaatttcttcagtcaacaggtgttccttctcttcctctccaatttggaggtatacggagagagggaagaaaaatggcagctccggcgatcctaaacggcggagatgcgacggagagagaaacacgaatggctcactctgcaatgacattggttcaggtcataaatggaggataccatgtggttacgaaagtagctcttaacgttggtgtaaatcagctcgtcttttgtgtctttcgcgatcttcttgctctctccattctcgcacctctcgcttttttccgtgaaagaaggatcagacctcctatgaatagaagcatcttcttttcactcttctttcttggtttagcagggatatttgggaaccagttactatttcttatgggtttatcgtacacgaatccaacttatgccgctgctatacaaccatcaatccctgtctttacatttctcttggctgtcttgatgggtacagaaaaagtgaacttgtttaaagtcgagggccaaacgaaagttggaggtactcttgtttgtgtttcgggtgctatagcgatggctttgtttcgtggtccagccttgtttggaggtaaagatgcagcagactcggcaaatagtgttataatcgatagaggtcaaccagagattaatgggtggttagtctctagttttcttggttttgggtttgatcaatggcacataggagttttatgcttgattggaaactgtatgtgtatggctgcttttctcgctgtccaagcaccggttttgaagaagtatcctgcctacctttcggttgctgcatattcatacttcttcggtgcatcaataatgatcacaacagctatcttgtttgttagagagcctaaagattggagcttaacacaatctgaggttcttgctattatattcgctggagtgtttgcctcagctctaaactatggactcttgacttggtccaataaaattcttggagctgctttggtttccctatacaatcctcttcagcctgcaacatccgcctttttatcgacaattttcctcggcagcccgatctatcttggaagcgttttgggtggaaccctcatcatttgcgggctttatatggttacttgggcatcttacagagagcaacaaacaacatcagctgggaatgagattgcttcttctagtaatgtaagaatctcggaacctttcatttacagagatgagactggtaaataaataagaaaaggtaaagaaaggatacttgtaccgttgtacgtagttaatatcagacaaaaacttgacaaatcatacaattttttcgagttcaaacattgattctttaaacggtaaataagtcaaaataattacttcgcccc

SEQ ID NO: 23705 - protein, 409 aa, Arabidopsis thaliana
  peptide (1)..(409): Ceres Seq. ID no. 12321832
  misc_feature (247)..(374): Pfam Name: Integral membrane protein DUF6 Pfam Description: Integral membrane protein DUF6
  misc_feature (254)..(357): Homolog of NCBI NO: 7487133 NR Description: hypothetical protein T18B16.150 - Arabidopsis
  misc_feature (29)..(248): Homolog of NCBI NO: 7487133 NR Description: hypothetical protein T18B16.150 - Arabidopsis
  misc_feature (254)..(409): Homolog of NCBI NO: 15231274 NR Description: putative protein; protein id: At3g45870.1
  misc_feature (42)..(202): Homolog of NCBI NO: 15231274 NR Description: putative protein; protein id: At3g45870.1
  misc_feature (52)..(403): Homolog of NCBI NO: 21593145 NR Description: unknown [Arabidopsis thaliana]
  misc_feature (29)..(403): Homolog of NCBI NO: 18415262 NR Description: Expressed protein
  misc_feature (29)..(198): Homolog of NCBI NO: 30694751 NR Description: nodulin N21 family protein [Arabidopsis thaliana]
  misc_feature (193)..(409): Homolog of NCBI NO: 30694751 NR Description: nodulin N21 family protein [Arabidopsis thaliana]
  misc_feature (29)..(100): Homolog of NCBI NO: 9758727 NR Description: nodulin-like protein [Arabidopsis thaliana]
  misc_feature (122)..(409): Homolog of NCBI NO: 9758727 NR Description: nodulin-like protein [Arabidopsis thaliana]
IKGSQFLQSTGVPSLPLQFGGIRREGRKMAAPAILNGGDATERETRMAHSAMTLVQVINGGYHVVTKVALNVGVNQLVFCVFRDLLALSILAPLAFFRERRIRPPMNRSIFFSLFFLGLAGIFGNQLLFLMGLSYTNPTYAAAIQPSIPVFTFLLAVLMGTEKVNLFKVEGQTKVGGTLVCVSGAIAMALFRGPALFGGKDAADSANSVIIDRGQPEINGWLVSSFLGFGFDQWHIGVLCLIGNCMCMAAFLAVQAPVLKKYPAYLSVAAYSYFFGASIMITTAILFVREPKDWSLTQSEVLAIIFAGVFASALNYGLLTWSNKILGAALVSLYNPLQPATSAFLSTIFLGSPIYLGSVLGGTLIICGLYMVTWASYREQQTTSAGNEIASSSNVRISEPFIYRDETGK

SEQ ID NO: 23706 - protein, 381 aa, Arabidopsis thaliana
  peptide (1)..(381): Ceres Seq. ID no. 12321833
  misc_feature (219)..(346): Pfam Name: Integral membrane protein DUF6 Pfam Description: Integral membrane protein DUF6
  misc_feature (226)..(329): Homolog of NCBI NO: 7487133 NR Description: hypothetical protein T18B16.150 - Arabidopsis
  misc_feature (1)..(220): Homolog of NCBI NO: 7487133 NR Description: hypothetical protein T18B16.150 - Arabidopsis
  misc_feature (226)..(381): Homolog of NCBI NO: 15231274 NR Description: putative protein; protein id: At3g45870.1
  misc_feature (14)..(174): Homolog of NCBI NO: 15231274 NR Description: putative protein; protein id: At3g45870.1
  misc_feature (24)..(375): Homolog of NCBI NO: 21593145 NR Description: unknown [Arabidopsis thaliana]
  misc_feature (1)..(375): Homolog of NCBI NO: 18415262 NR Description: Expressed protein
  misc_feature (1)..(170): Homolog of NCBI NO: 30694751 NR Description: nodulin N21 family protein [Arabidopsis thaliana]
  misc_feature (165)..(381): Homolog of NCBI NO: 30694751 NR Description: nodulin N21 family protein [Arabidopsis thaliana]
  misc_feature (1)..(72): Homolog of NCBI NO: 9758727 NR Description: nodulin-like protein [Arabidopsis thaliana]
  misc_feature (94)..(381): Homolog of NCBI NO: 9758727 NR Description: nodulin-like protein [Arabidopsis thaliana]
MAAPAILNGGDATERETRMAHSAMTLVQVINGGYHVVTKVALNVGVNQLVFCVFRDLLALSILAPLAFFRERRIRPPMNRSIFFSLFFLGLAGIFGNQLLFLMGLSYTNPTYAAAIQPSIPVFTFLLAVLMGTEKVNLFKVEGQTKVGGTLVCVSGAIAMALFRGPALFGGKDAADSANSVIIDRGQPEINGWLVSSFLGFGFDQWHIGVLCLIGNCMCMAAFLAVQAPVLKKYPAYLSVAAYSYFFGASIMITTAILFVREPKDWSLTQSEVLAIIFAGVFASALNYGLLTWSNKILGAALVSLYNPLQPATSAFLSTIFLGSPIYLGSVLGGTLIICGLYMVTWASYREQQTTSAGNEIASSSNVRISEPFIYRDETGK

SEQ ID NO: 23707 - protein, 363 aa, Arabidopsis thaliana
  peptide (1)..(363): Ceres Seq. ID no. 12321834
  misc_feature (201)..(328): Pfam Name: Integral membrane protein DUF6 Pfam Description: Integral membrane protein DUF6
  misc_feature (208)..(311): Homolog of NCBI NO: 7487133 NR Description: hypothetical protein T18B16.150 - Arabidopsis
  misc_feature (1)..(202): Homolog of NCBI NO: 7487133 NR Description: hypothetical protein T18B16.150 - Arabidopsis
  misc_feature (208)..(363): Homolog of NCBI NO: 15231274 NR Description: putative protein; protein id: At3g45870.1
  misc_feature (1)..(156): Homolog of NCBI NO: 15231274 NR Description: putative protein; protein id: At3g45870.1
  misc_feature (6)..(357): Homolog of NCBI NO: 21593145 NR Description: unknown [Arabidopsis thaliana]
  misc_feature (1)..(357): Homolog of NCBI NO: 18415262 NR Description: Expressed protein
  misc_feature (1)..(152): Homolog of NCBI NO: 30694751 NR Description: nodulin N21 family protein [Arabidopsis thaliana]
  misc_feature (147)..(363): Homolog of NCBI NO: 30694751 NR Description: nodulin N21 family protein [Arabidopsis thaliana]
  misc_feature (1)..(54): Homolog of NCBI NO: 9758727 NR Description: nodulin-like protein [Arabidopsis thaliana]
  misc_feature (76)..(363): Homolog of NCBI NO: 9758727 NR Description: nodulin-like protein [Arabidopsis thaliana]
MAHSAMTLVQVINGGYHVVTKVALNVGVNQLVFCVFRDLLALSILAPLAFFRERRIRPPMNRSIFFSLFFLGLAGIFGNQLLFLMGLSYTNPTYAAAIQPSIPVFTFLLAVLMGTEKVNLFKVEGQTKVGGTLVCVSGAIAMALFRGPALFGGKDAADSANSVIIDRGQPEINGWLVSSFLGFGFDQWHIGVLCLIGNCMCMAAFLAVQAPVLKKYPAYLSVAAYSYFFGASIMITTAILFVREPKDWSLTQSEVLAIIFAGVFASALNYGLLTWSNKILGAALVSLYNPLQPATSAFLSTIFLGSPIYLGSVLGGTLIICGLYMVTWASYREQQTTSAGNEIASSSNVRISEPFIYRDETGK

SEQ ID NO: 23708 - DNA, 1387 bp, Arabidopsis thaliana
  misc_feature (1)..(1387): Ceres Seq. ID no. 12324912
  misc_feature: MA Experiment ID: 108462 Result: Down-regulated in Transcription
  misc_feature: MA Experiment 108462 PARAMETER Experiment Name: At_Germinating_Seeds_cDNA_P Parameter: Age (day) Value: 2 vs. 0
  misc_feature: MA Experiment 108462 PARAMETER Experiment Name: At_Germinating_Seeds_cDNA_P Parameter: Tissue Value: Germinating Seeds
  misc_feature: MA Experiment ID: 108464 Result: Down-regulated in Transcription
  misc_feature: MA Experiment 108464 PARAMETER Experiment Name: At_Germinating_Seeds_cDNA_P Parameter: Age (day) Value: 4 vs. 0
  misc_feature: MA Experiment 108464 PARAMETER Experiment Name: At_Germinating_Seeds_cDNA_P Parameter: Tissue Value: Germinating Seeds
  misc_feature: MA Experiment ID: 108561 Result: Down-regulated in Transcription
  misc_feature: MA Experiment 108561 PARAMETER Experiment Name: At_100uM_ABA_cDNA_P Parameter: Timepoint (hr) Value: 6
  misc_feature: MA Experiment 108561 PARAMETER Experiment Name: At_100uM_ABA_cDNA_P Parameter: Tissue Value: Aerial
  misc_feature: MA Experiment 108561 PARAMETER Experiment Name: At_100uM_ABA_cDNA_P Parameter: Treatment Value: 100uM ABA vs. No Treatment
  misc_feature: MA Experiment ID: 108595 Result: Down-regulated in Transcription
  misc_feature: MA Experiment 108595 PARAMETER Experiment Name: At_Ler-pi_Ovule_cDNA_P Parameter: Plant Line Value: null
  misc_feature: MA Experiment ID: 108668 Result: Down-regulated in Transcription
  misc_feature: MA Experiment 108668 PARAMETER Experiment Name: At_2mM_SA_cDNA_P Parameter: Plant Line Value: WS
  misc_feature: MA Experiment 108668 PARAMETER Experiment Name: At_2mM_SA_cDNA_P Parameter: Timepoint (hr) Value: 6
  misc_feature: MA Experiment 108668 PARAMETER Experiment Name: At_2mM_SA_cDNA_P Parameter: Treatment Value: 2mM SA vs. No Treatment
  misc_feature: MA Experiment ID: 20000087 Result: Down-regulated in Transcription
  misc_feature: MA Experiment 20000087 PARAMETER Experiment Name: At_100uM_ABA_Mutants_cDNA_P Parameter: Plant Line Value: WS
  misc_feature: MA Experiment 20000087 PARAMETER Experiment Name: At_100uM_ABA_Mutants_cDNA_P Parameter: Timepoint (hr) Value: 6
  misc_feature: MA Experiment 20000087 PARAMETER Experiment Name: At_100uM_ABA_Mutants_cDNA_P Parameter: Tissue Value: Aerial
  misc_feature: MA Experiment 20000087 PARAMETER Experiment Name: At_100uM_ABA_Mutants_cDNA_P Parameter: Treatment Value: 100uM ABA vs. No Treatment
  misc_feature: MA Experiment ID: 20000451 Result: Up-regulated in Transcription
  misc_feature: MA Experiment 20000451 PARAMETER Experiment Name: At_CS6879_Shoots-Roots_P Parameter: Age (day) Value: 14
  misc_feature: MA Experiment 20000451 PARAMETER Experiment Name: At_CS6879_Shoots-Roots_P Parameter: Organism Value: A. thaliana
  misc_feature: MA Experiment 20000451 PARAMETER Experiment Name: At_CS6879_Shoots-Roots_P Parameter: Plant Line Value: CS6879 vs. WS
  misc_feature: MA Experiment 20000451 PARAMETER Experiment Name: At_CS6879_Shoots-Roots_P Parameter: Tissue Value: Roots
  misc_feature: MA Experiment ID: 20000573 Result: Down-regulated in Transcription
  misc_feature: MA Experiment 20000573 PARAMETER Experiment Name: At_100uM_ABA_Mutants__P Parameter: Organism Value: A. thaliana
  misc_feature: MA Experiment 20000573 PARAMETER Experiment Name: At_100uM_ABA_Mutants__P Parameter: Plant Line Value: CS22 vs. Ler wt
  misc_feature: MA Experiment 20000573 PARAMETER Experiment Name: At_100uM_ABA_Mutants__P Parameter: Timepoint (hr) Value: N/A
  misc_feature: MA Experiment 20000573 PARAMETER Experiment Name: At_100uM_ABA_Mutants__P Parameter: Tissue Value: Whole Plant
  misc_feature: MA Experiment 20000573 PARAMETER Experiment Name: At_100uM_ABA_Mutants__P Parameter: Treatment Value: None
  misc_feature: MA Experiment ID: 20000574 Result: Down-regulated in Transcription
  misc_feature: MA Experiment 20000574 PARAMETER Experiment Name: At_100uM_ABA_Mutants__P Parameter: Organism Value: A. thaliana
  misc_feature: MA Experiment 20000574 PARAMETER Experiment Name: At_100uM_ABA_Mutants__P Parameter: Plant Line Value: CS23 vs. Ler wt
  misc_feature: MA Experiment 20000574 PARAMETER Experiment Name: At_100uM_ABA_Mutants__P Parameter: Timepoint (hr) Value: N/A
  misc_feature: MA Experiment 20000574 PARAMETER Experiment Name: At_100uM_ABA_Mutants__P Parameter: Tissue Value: Whole Plant
  misc_feature: MA Experiment 20000574 PARAMETER Experiment Name: At_100uM_ABA_Mutants__P Parameter: Treatment Value: None
  misc_feature: MA Experiment ID: 20001905 Result: Down-regulated in Transcription
  misc_feature: MA Experiment 20001905 PARAMETER Experiment Name: At_Drought_Reproduction_P Parameter: Age (day) Value: 40
  misc_feature: MA Experiment 20001905 PARAMETER Experiment Name: At_Drought_Reproduction_P Parameter: Organism Value: A. thaliana
  misc_feature: MA Experiment 20001905 PARAMETER Experiment Name: At_Drought_Reproduction_P Parameter: Plant Line Value: WS
  misc_feature: MA Experiment 20001905 PARAMETER Experiment Name: At_Drought_Reproduction_P Parameter: Timepoint (day) Value: 10
  misc_feature: MA Experiment 20001905 PARAMETER Experiment Name: At_Drought_Reproduction_P Parameter: Tissue Value: Rosettes
  misc_feature: MA Experiment 20001905 PARAMETER Experiment Name: At_Drought_Reproduction_P Parameter: Treatment Value: Drought vs. No Drought
atctatctgattctcactctcactactgacacaaatccttttccttttgttcctctttctctaaaccaatctttaaaacaacttattcgtcttcaagatttctccaacaagtcctaccatgtccggcgaaggagacacgaccctcaaagctatctgttacaagcctggctctctccagttactcgatcagaggaagcttcctttagagactatttacttagagattcgtgatgcttcagatggatggagtgctattcaggaaatggttgtacgtggtgctcctgctatagctattgctgctgctctttctttggctgttgaagttttcaactttcatggttttgatggatcagcttcagatgctgttgcttttcttgagaacaagttggattatttagtgtcaagccgtccaacagcagttaatcttgcagatgctgctttgaaacttaaacatgttatagcaaaggccttggctactgccaccgaagccaaatccattttcaaggcatatattgaagctagtgaggatatgcttgaagatgatgttgtttcaaacaaagctataggaaactttggtttaagcttgttgaggcaacaagccaagaatcctgataagctttctgttttgacccattgcaacactggcagccttgctaccgccggatatggtactgccctcggtgtcatccgtgcactccatactcaaggaatcttagaaagagcatactgcacagaaactcgtccatttaatcaaggatcgaggcttacagcgtttgagttggtgcatgagaaaatccctgcaactctcattgcagactcagctgcagctgcactgatgaaagatggtcgtgttgatggtgtcatcgttggagctgatcgtgtggcttcaaatggcgatactgctaacaagattgggacttacagtctcgccttgtgcgcaaaacatcacgggatcccattttatgttgctgcacctcttacctcagttgatctgtcactttcatccgggaaagaaatcgtgatagaggaaagatctccaaaggagttgatgcacacacacggaggacttggtgaacgcattgcagcaccagggatctcagtttggaacccagcttttgatatgactccagcagagctgattgcaggaatcataaccgagaaaggggtcataacaaagaatggcaatgatacatttgacataagcagctttgccaagaagataacaggaaactcatctcgttgaagttagagtcagcattgcgacttgcggatgttcccctctctctatatacttgcaacaaagcaaattactttgtaatgtttgagctactaagtacactgtggtaaaaattgtcaaaaataagaaataatcgatacgttttagcct

SEQ ID NO: 23709 - protein, 374 aa, Arabidopsis thaliana
  peptide (1)..(374): Ceres Seq. ID no. 12324913
  misc_feature (36)..(355): Pfam Name: Initiation factor 2 subunit family Pfam Description: Initiation factor 2 subunit family
  misc_feature (51)..(351): Homolog of NCBI NO: 31242173 NR Description: ENSANGP00000017411 [Anopheles gambiae]
  misc_feature (9)..(361): Homolog of NCBI NO: 40740852 NR Description: hypothetical protein AN4290.2 [Aspergillus
  misc_feature (8)..(351): Homolog of NCBI NO: 19577378 NR Description: putative translation initiation factor [Anopheles
  misc_feature (8)..(351): Homolog of NCBI NO: 31242175 NR Description: ENSANGP00000023010 [Anopheles gambiae]
  misc_feature (3)..(364): Homolog of NCBI NO: 12407304 NR Description: IDI2 [Hordeum vulgare subsp. vulgare]
  misc_feature (4)..(371): Homolog of NCBI NO: 15216226 NR Description: CIG2 [Nicotiana tabacum]
  misc_feature (49)..(374): Homolog of NCBI NO: 20466258 NR Description: putative translation initiation factor eIF-2B
  misc_feature (1)..(348): Homolog of NCBI NO: 25315908 NR Description: hypothetical protein At2g05830 [imported] -
  misc_feature (1)..(374): Homolog of NCBI NO: 21593194 NR Description: putative translation initiation factor eIF-2B
  misc_feature (1)..(374): Homolog of NCBI NO: 18396170 NR Description: putative translation initiation factor eIF-2B
MSGEGDTTLKAICYKPGSLQLLDQRKLPLETIYLEIRDASDGWSAIQEMVVRGAPAIAIAAALSLAVEVFNFHGFDGSASDAVAFLENKLDYLVSSRPTAVNLADAALKLKHVIAKALATATEAKSIFKAYIEASEDMLEDDVVSNKAIGNFGLSLLRQQAKNPDKLSVLTHCNTGSLATAGYGTALGVIRALHTQGILERAYCTETRPFNQGSRLTAFELVHEKIPATLIADSAAAALMKDGRVDGVIVGADRVASNGDTANKIGTYSLALCAKHHGIPFYVAAPLTSVDLSLSSGKEIVIEERSPKELMHTHGGLGERIAAPGISVWNPAFDMTPAELIAGIITEKGVITKNGNDTFDISSFAKKITGNSSR

SEQ ID NO: 23710 - protein, 326 aa, Arabidopsis thaliana
  peptide (1)..(326): Ceres Seq. ID no. 12324914
  misc_feature (1)..(307): Pfam Name: Initiation factor 2 subunit family Pfam Description: Initiation factor 2 subunit family
  misc_feature (3)..(303): Homolog of NCBI NO: 31242173 NR Description: ENSANGP00000017411 [Anopheles gambiae]
  misc_feature (1)..(313): Homolog of NCBI NO: 40740852 NR Description: hypothetical protein AN4290.2 [Aspergillus
  misc_feature (1)..(303): Homolog of NCBI NO: 19577378 NR Description: putative translation initiation factor [Anopheles
  misc_feature (1)..(303): Homolog of NCBI NO: 31242175 NR Description: ENSANGP00000023010 [Anopheles gambiae]
  misc_feature (1)..(316): Homolog of NCBI NO: 12407304 NR Description: IDI2 [Hordeum vulgare subsp. vulgare]
  misc_feature (1)..(323): Homolog of NCBI NO: 15216226 NR Description: CIG2 [Nicotiana tabacum]
  misc_feature (1)..(326): Homolog of NCBI NO: 20466258 NR Description: putative translation initiation factor eIF-2B
  misc_feature (1)..(300): Homolog of NCBI NO: 25315908 NR Description: hypothetical protein At2g05830 [imported] -
  misc_feature (1)..(326): Homolog of NCBI NO: 21593194 NR Description: putative translation initiation factor eIF-2B
  misc_feature (1)..(326): Homolog of NCBI NO: 18396170 NR Description: putative translation initiation factor eIF-2B
MVVRGAPAIAIAAALSLAVEVFNFHGFDGSASDAVAFLENKLDYLVSSRPTAVNLADAALKLKHVIAKALATATEAKSIFKAYIEASEDMLEDDVVSNKAIGNFGLSLLRQQAKNPDKLSVLTHCNTGSLATAGYGTALGVIRALHTQGILERAYCTETRPFNQGSRLTAFELVHEKIPATLIADSAAAALMKDGRVDGVIVGADRVASNGDTANKIGTYSLALCAKHHGIPFYVAAPLTSVDLSLSSGKEIVIEERSPKELMHTHGGLGERIAAPGISVWNPAFDMTPAELIAGIITEKGVITKNGNDTFDISSFAKKITGNSSR

SEQ ID NO: 23711 - protein, 237 aa, Arabidopsis thaliana
  peptide (1)..(237): Ceres Seq. ID no. 12324915
  misc_feature (1)..(218): Pfam Name: Initiation factor 2 subunit family Pfam Description: Initiation factor 2 subunit family
  misc_feature (1)..(214): Homolog of NCBI NO: 31242173 NR Description: ENSANGP00000017411 [Anopheles gambiae]
  misc_feature (1)..(224): Homolog of NCBI NO: 40740852 NR Description: hypothetical protein AN4290.2 [Aspergillus
  misc_feature (1)..(214): Homolog of NCBI NO: 19577378 NR Description: putative translation initiation factor [Anopheles
  misc_feature (1)..(214): Homolog of NCBI NO: 31242175 NR Description: ENSANGP00000023010 [Anopheles gambiae]
  misc_feature (1)..(227): Homolog of NCBI NO: 12407304 NR Description: IDI2 [Hordeum vulgare subsp. vulgare]
  misc_feature (1)..(234): Homolog of NCBI NO: 15216226 NR Description: CIG2 [Nicotiana tabacum]
  misc_feature (1)..(237): Homolog of NCBI NO: 20466258 NR Description: putative translation initiation factor eIF-2B
  misc_feature (1)..(211): Homolog of NCBI NO: 25315908 NR Description: hypothetical protein At2g05830 [imported] -
  misc_feature (1)..(237): Homolog of NCBI NO: 21593194 NR Description: putative translation initiation factor eIF-2B
  misc_feature (1)..(237): Homolog of NCBI NO: 18396170 NR Description: putative translation initiation factor eIF-2B
MLEDDVVSNKAIGNFGLSLLRQQAKNPDKLSVLTHCNTGSLATAGYGTALGVIRALHTQGILERAYCTETRPFNQGSRLTAFELVHEKIPATLIADSAAAALMKDGRVDGVIVGADRVASNGDTANKIGTYSLALCAKHHGIPFYVAAPLTSVDLSLSSGKEIVIEERSPKELMHTHGGLGERIAAPGISVWNPAFDMTPAELIAGIITEKGVITKNGNDTFDISSFAKKITGNSSR

SEQ ID NO: 23712 - DNA, 1317 bp, Arabidopsis thaliana
  misc_feature (1)..(1317): Ceres Seq. ID no. 12396481
  misc_feature: MA Experiment ID: 108574 Result: Up-regulated in Transcription
  misc_feature: MA Experiment 108574 PARAMETER Experiment Name: At_Wounding__cDNA_P Parameter: Timepoint (hr) Value: 1
  misc_feature: MA Experiment 108574 PARAMETER Experiment Name: At_Wounding__cDNA_P Parameter: Tissue Value: Aerial
  misc_feature: MA Experiment 108574 PARAMETER Experiment Name: At_Wounding__cDNA_P Parameter: Treatment Value: Wounding vs. No Wounding
  misc_feature: MA Experiment ID: 108579 Result: Up-regulated in Transcription
  misc_feature: MA Experiment 108579 PARAMETER Experiment Name: At_4deg_Cold_cDNA_P Parameter: Temperature (deg C) Value: 4 vs. 22
  misc_feature: MA Experiment 108579 PARAMETER Experiment Name: At_4deg_Cold_cDNA_P Parameter: Timepoint (hr) Value: 6
  misc_feature: MA Experiment 108579 PARAMETER Experiment Name: At_4deg_Cold_cDNA_P Parameter: Tissue Value: Aerial
  misc_feature: MA Experiment ID: 108667 Result: Up-regulated in Transcription
  misc_feature: MA Experiment 108667 PARAMETER Experiment Name: At_2mM_SA_cDNA_P Parameter: Plant Line Value: WS
  misc_feature: MA Experiment 108667 PARAMETER Experiment Name: At_2mM_SA_cDNA_P Parameter: Timepoint (hr) Value: 1
  misc_feature: MA Experiment 108667 PARAMETER Experiment Name: At_2mM_SA_cDNA_P Parameter: Treatment Value: 2mM SA vs. No Treatment
  misc_feature: MA Experiment ID: 20000069 Result: Down-regulated in Transcription
  misc_feature: MA Experiment 20000069 PARAMETER Experiment Name: At_100uM_ABA_Mutants_cDNA_P Parameter: Plant Line Value: CS23
  misc_feature: MA Experiment 20000069 PARAMETER Experiment Name: At_100uM_ABA_Mutants_cDNA_P Parameter: Timepoint (hr) Value: 6
  misc_feature: MA Experiment 20000069 PARAMETER Experiment Name: At_100uM_ABA_Mutants_cDNA_P Parameter: Tissue Value: Aerial
  misc_feature: MA Experiment 20000069 PARAMETER Experiment Name: At_100uM_ABA_Mutants_cDNA_P Parameter: Treatment Value: 100uM ABA vs. No Treatment
  misc_feature: MA Experiment ID: 20000070 Result: Down-regulated in Transcription
  misc_feature: MA Experiment 20000070 PARAMETER Experiment Name: At_100uM_ABA_Mutants_cDNA_P Parameter: Plant Line Value: CS24
  misc_feature: MA Experiment 20000070 PARAMETER Experiment Name: At_100uM_ABA_Mutants_cDNA_P Parameter: Timepoint (hr) Value: 6
  misc_feature: MA Experiment 20000070 PARAMETER Experiment Name: At_100uM_ABA_Mutants_cDNA_P Parameter: Tissue Value: Aerial
  misc_feature: MA Experiment 20000070 PARAMETER Experiment Name: At_100uM_ABA_Mutants_cDNA_P Parameter: Treatment Value: 100uM ABA vs. No Treatment
  misc_feature: MA Experiment ID: 20000071 Result: Down-regulated in Transcription
  misc_feature: MA Experiment 20000071 PARAMETER Experiment Name: At_100uM_ABA_Mutants_cDNA_P Parameter: Plant Line Value: CS8104
  misc_feature: MA Experiment 20000071 PARAMETER Experiment Name: At_100uM_ABA_Mutants_cDNA_P Parameter: Timepoint (hr) Value: 6
  misc_feature: MA Experiment 20000071 PARAMETER Experiment Name: At_100uM_ABA_Mutants_cDNA_P Parameter: Tissue Value: Aerial
  misc_feature: MA Experiment 20000071 PARAMETER Experiment Name: At_100uM_ABA_Mutants_cDNA_P Parameter: Treatment Value: 100uM ABA vs. No Treatment
  misc_feature: MA Experiment ID: 20000086 Result: Down-regulated in Transcription
  misc_feature: MA Experiment 20000086 PARAMETER Experiment Name: At_100uM_ABA_Mutants_cDNA_P Parameter: Plant Line Value: CS22
  misc_feature: MA Experiment 20000086 PARAMETER Experiment Name: At_100uM_ABA_Mutants_cDNA_P Parameter: Timepoint (hr) Value: 6
  misc_feature: MA Experiment 20000086 PARAMETER Experiment Name: At_100uM_ABA_Mutants_cDNA_P Parameter: Tissue Value: Aerial
  misc_feature: MA Experiment 20000086 PARAMETER Experiment Name: At_100uM_ABA_Mutants_cDNA_P Parameter: Treatment Value: 100uM ABA vs. No Treatment
  misc_feature: MA Experiment ID: 20000088 Result: Down-regulated in Transcription
  misc_feature: MA Experiment 20000088 PARAMETER Experiment Name: At_100uM_ABA_Mutants_cDNA_P Parameter: Plant Line Value: Landsberg
  misc_feature: MA Experiment 20000088 PARAMETER Experiment Name: At_100uM_ABA_Mutants_cDNA_P Parameter: Timepoint (hr) Value: 6
  misc_feature: MA Experiment 20000088 PARAMETER Experiment Name: At_100uM_ABA_Mutants_cDNA_P Parameter: Tissue Value: Aerial
  misc_feature: MA Experiment 20000088 PARAMETER Experiment Name: At_100uM_ABA_Mutants_cDNA_P Parameter: Treatment Value: 100uM ABA vs. No Treatment
  misc_feature: MA Experiment ID: 20000090 Result: Down-regulated in Transcription
  misc_feature: MA Experiment ID: 20000117 Result: Down-regulated in Transcription
  misc_feature: MA Experiment 20000117 PARAMETER Experiment Name: At_100uM_ABA_Mutants_cDNA_P Parameter: Plant Line Value: Columbia
  misc_feature: MA Experiment 20000117 PARAMETER Experiment Name: At_100uM_ABA_Mutants_cDNA_P Parameter: Timepoint (hr) Value: 6
  misc_feature: MA Experiment 20000117 PARAMETER Experiment Name: At_100uM_ABA_Mutants_cDNA_P Parameter: Tissue Value: Aerial
  misc_feature: MA Experiment 20000117 PARAMETER Experiment Name: At_100uM_ABA_Mutants_cDNA_P Parameter: Treatment Value: 100uM ABA vs. No Treatment
  misc_feature: MA Experiment ID: 20000171 Result: Down-regulated in Transcription
  misc_feature: MA Experiment 20000171 PARAMETER Experiment Name: At_42deg_Heat_P Parameter: Age (day) Value: 14
  misc_feature: MA Experiment 20000171 PARAMETER Experiment Name: At_42deg_Heat_P Parameter: Organism Value: A. thaliana
  misc_feature: MA Experiment 20000171 PARAMETER Experiment Name: At_42deg_Heat_P Parameter: Plant Line Value: WS
  misc_feature: MA Experiment 20000171 PARAMETER Experiment Name: At_42deg_Heat_P Parameter: Temperature (deg C) Value: 42 vs. 22
  misc_feature: MA Experiment 20000171 PARAMETER Experiment Name: At_42deg_Heat_P Parameter: Timepoint (hr) Value: 1
  misc_feature: MA Experiment 20000171 PARAMETER Experiment Name: At_42deg_Heat_P Parameter: Tissue Value: Aerial
  misc_feature: MA Experiment ID: 20000264 Result: Down-regulated in Transcription
  misc_feature: MA Experiment 20000264 PARAMETER Experiment Name: At_Open_Flower_P Parameter: Age (day) Value: 21
  misc_feature: MA Experiment 20000264 PARAMETER Experiment Name: At_Open_Flower_P Parameter: Plant Line Value: WS
  misc_feature: MA Experiment 20000264 PARAMETER Experiment Name: At_Open_Flower_P Parameter: Tissue Value: Open Flower vs. Whole Plant
  misc_feature: MA Experiment ID: 20000265 Result: Down-regulated in Transcription
  misc_feature: MA Experiment 20000265 PARAMETER Experiment Name: At_Open_Flower_P Parameter: Age (day) Value: 21
  misc_feature: MA Experiment 20000265 PARAMETER Experiment Name: At_Open_Flower_P Parameter: Plant Line Value: WS
  misc_feature: MA Experiment 20000265 PARAMETER Experiment Name: At_Open_Flower_P Parameter: Tissue Value: Closed Flower vs. Whole Plant
  misc_feature: MA Experiment ID: 20000436 Result: Down-regulated in Transcription
  misc_feature: MA Experiment 20000436 PARAMETER Experiment Name: At_Drought_P Parameter: Age (day) Value: 7
  misc_feature: MA Experiment 20000436 PARAMETER Experiment Name: At_Drought_P Parameter: Organism Value: A. thaliana
  misc_feature: MA Experiment 20000436 PARAMETER Experiment Name: At_Drought_P Parameter: Plant Line Value: WS
  misc_feature: MA Experiment 20000436 PARAMETER Experiment Name: At_Drought_P Parameter: Timepoint (hr) Value: 12
  misc_feature: MA Experiment 20000436 PARAMETER Experiment Name: At_Drought_P Parameter: Tissue Value: Whole Plant
  misc_feature: MA Experiment 20000436 PARAMETER Experiment Name: At_Drought_P Parameter: Treatment Value: Drought vs. No Drought
  misc_feature: MA Experiment ID: 20000437 Result: Down-regulated in Transcription
  misc_feature: MA Experiment 20000437 PARAMETER Experiment Name: At_Drought_P Parameter: Age (day) Value: 8
  misc_feature: MA Experiment 20000437 PARAMETER Experiment Name: At_Drought_P Parameter: Organism Value: A. thaliana
  misc_feature: MA Experiment 20000437 PARAMETER Experiment Name: At_Drought_P Parameter: Plant Line Value: WS
  misc_feature: MA Experiment 20000437 PARAMETER Experiment Name: At_Drought_P Parameter: Timepoint (hr) Value: 24
  misc_feature: MA Experiment 20000437 PARAMETER Experiment Name: At_Drought_P Parameter: Tissue Value: Whole Plant
  misc_feature: MA Experiment 20000437 PARAMETER Experiment Name: At_Drought_P Parameter: Treatment Value: Drought vs. No Drought
  misc_feature: MA Experiment ID: 20000438 Result: Down-regulated in Transcription
  misc_feature: MA Experiment 20000438 PARAMETER Experiment Name: At_Shoots__P Parameter: Age (day) Value: 14
  misc_feature: MA Experiment 20000438 PARAMETER Experiment Name: At_Shoots__P Parameter: Tissue Value: Shoots vs. Whole Plant
  misc_feature: MA Experiment ID: 20000456 Result: Up-regulated in Transcription
  misc_feature: MA Experiment 20000456 PARAMETER Experiment Name: At_100uM_BA_P Parameter: Age (day) Value: 14
  misc_feature: MA Experiment 20000456 PARAMETER Experiment Name: At_100uM_BA_P Parameter: Organism Value: A. thaliana
  misc_feature: MA Experiment 20000456 PARAMETER Experiment Name: At_100uM_BA_P Parameter: Plant Line Value: WS
  misc_feature: MA Experiment 20000456 PARAMETER Experiment Name: At_100uM_BA_P Parameter: Timepoint (hr) Value: 6
  misc_feature: MA Experiment 20000456 PARAMETER Experiment Name: At_100uM_BA_P Parameter: Tissue Value: Aerial
  misc_feature: MA Experiment 20000456 PARAMETER Experiment Name: At_100uM_BA_P Parameter: Treatment Value: 100uM BA vs. No Treatment
  misc_feature: MA Experiment ID: 20000495 Result: Down-regulated in Transcription
  misc_feature: MA Experiment 20000495 PARAMETER Experiment Name: At_Guard_Cells_P Parameter: Harvest Date Value: 8/2/2002
  misc_feature: MA Experiment 20000495 PARAMETER Experiment Name: At_Guard_Cells_P Parameter: Organism Value: A. thaliana
  misc_feature: MA Experiment 20000495 PARAMETER Experiment Name: At_Guard_Cells_P Parameter: Tissue Value: Guard Cells vs. Leaves
  misc_feature: MA Experiment ID: 20000496 Result: Up-regulated in Transcription
  misc_feature: MA Experiment 20000496 PARAMETER Experiment Name: At_Guard_Cells_P Parameter: Harvest Date Value: 7/19/2002
  misc_feature: MA Experiment 20000496 PARAMETER Experiment Name: At_Guard_Cells_P Parameter: Organism Value: Canola
  misc_feature: MA Experiment 20000496 PARAMETER Experiment Name: At_Guard_Cells_P Parameter: Tissue Value: Guard Cells vs. Leaves
  misc_feature: MA Experiment ID: 20001248 Result: Down-regulated in Transcription
  misc_feature: MA Experiment 20001248 PARAMETER Experiment Name: At_Far-red-induction_P Parameter: Age (day) Value: 7
  misc_feature: MA Experiment 20001248 PARAMETER Experiment Name: At_Far-red-induction_P Parameter: Light Value: Far-red vs. White
  misc_feature: MA Experiment 20001248 PARAMETER Experiment Name: At_Far-red-induction_P Parameter: Organism Value: A. thaliana
  misc_feature: MA Experiment 20001248 PARAMETER Experiment Name: At_Far-red-induction_P Parameter: Plant Line Value: Columbia
  misc_feature: MA Experiment 20001248 PARAMETER Experiment Name: At_Far-red-induction_P Parameter: Timepoint (hr) Value: 4
  misc_feature: MA Experiment 20001248 PARAMETER Experiment Name: At_Far-red-induction_P Parameter: Tissue Value: Whole Plant
  misc_feature: MA Experiment ID: 20001450 Result: Down-regulated in Transcription
  misc_feature: MA Experiment 20001450 PARAMETER Experiment Name: At_Far-red-induction_P Parameter: Age (day) Value: 7
  misc_feature: MA Experiment 20001450 PARAMETER Experiment Name: At_Far-red-induction_P Parameter: Light Value: Far-red vs. White
  misc_feature: MA Experiment 20001450 PARAMETER Experiment Name: At_Far-red-induction_P Parameter: Organism Value: A. thaliana
  misc_feature: MA Experiment 20001450 PARAMETER Experiment Name: At_Far-red-induction_P Parameter: Plant Line Value: Columbia
  misc_feature: MA Experiment 20001450 PARAMETER Experiment Name: At_Far-red-induction_P Parameter: Timepoint (hr) Value: 8
  misc_feature: MA Experiment 20001450 PARAMETER Experiment Name: At_Far-red-induction_P Parameter: Tissue Value: Whole Plant
  misc_feature: MA Experiment ID: 20001451 Result: Down-regulated in Transcription
  misc_feature: MA Experiment 20001451 PARAMETER Experiment Name: At_Far-red-induction_P Parameter: Age (day) Value: 7
  misc_feature: MA Experiment 20001451 PARAMETER Experiment Name: At_Far-red-induction_P Parameter: Light Value: Far-red vs. White
  misc_feature: MA Experiment 20001451 PARAMETER Experiment Name: At_Far-red-induction_P Parameter: Organism Value: A. thaliana
  misc_feature: MA Experiment 20001451 PARAMETER Experiment Name: At_Far-red-induction_P Parameter: Plant Line Value: Columbia
  misc_feature: MA Experiment 20001451 PARAMETER Experiment Name: At_Far-red-induction_P Parameter: Timepoint (hr) Value: 24
  misc_feature: MA Experiment 20001451 PARAMETER Experiment Name: At_Far-red-induction_P Parameter: Tissue Value: Whole Plant
  misc_feature: MA Experiment ID: 20001560 Result: Up-regulated in Transcription
  misc_feature: MA Experiment 20001560 PARAMETER Experiment Name: At_Drought_Soil_Dry_P Parameter: Age (day) Value: 28
  misc_feature: MA Experiment 20001560 PARAMETER Experiment Name: At_Drought_Soil_Dry_P Parameter: Organism Value: A. thaliana
  misc_feature: MA Experiment 20001560 PARAMETER Experiment Name: At_Drought_Soil_Dry_P Parameter: Plant Line Value: WS
  misc_feature: MA Experiment 20001560 PARAMETER Experiment Name: At_Drought_Soil_Dry_P Parameter: Post Timepoint (hr) Value: None
  misc_feature: MA Experiment 20001560 PARAMETER Experiment Name: At_Drought_Soil_Dry_P Parameter: Post-Treatment Value: None
  misc_feature: MA Experiment 20001560 PARAMETER Experiment Name: At_Drought_Soil_Dry_P Parameter: Timepoint (day) Value: 14
  misc_feature: MA Experiment 20001560 PARAMETER Experiment Name: At_Drought_Soil_Dry_P Parameter: Treatment Value: Drought vs. No Drought
  misc_feature: MA Experiment ID: 20001770 Result: Down-regulated in Transcription
  misc_feature: MA Experiment 20001770 PARAMETER Experiment Name: At_Far-red-enriched-adult_P Parameter: Age (day) Value: 28
  misc_feature: MA Experiment 20001770 PARAMETER Experiment Name: At_Far-red-enriched-adult_P Parameter: Light Value: Far-red enriched vs. White
  misc_feature: MA Experiment 20001770 PARAMETER Experiment Name: At_Far-red-enriched-adult_P Parameter: Organism Value: A. thaliana
  misc_feature: MA Experiment 20001770 PARAMETER Experiment Name: At_Far-red-enriched-adult_P Parameter: Plant Line Value: Columbia
  misc_feature: MA Experiment 20001770 PARAMETER Experiment Name: At_Far-red-enriched-adult_P Parameter: Timepoint (hr) Value: 8
  misc_feature: MA Experiment 20001770 PARAMETER Experiment Name: At_Far-red-enriched-adult_P Parameter: Tissue Value: Aerial
  misc_feature: MA Experiment ID: 20001906 Result: Down-regulated in Transcription
  misc_feature: MA Experiment 20001906 PARAMETER Experiment Name: At_Drought_Reproduction_P Parameter: Age (day) Value: 35
  misc_feature: MA Experiment 20001906 PARAMETER Experiment Name: At_Drought_Reproduction_P Parameter: Organism Value: A. thaliana
  misc_feature: MA Experiment 20001906 PARAMETER Experiment Name: At_Drought_Reproduction_P Parameter: Plant Line Value: WS
  misc_feature: MA Experiment 20001906 PARAMETER Experiment Name: At_Drought_Reproduction_P Parameter: Timepoint (day) Value: 5
  misc_feature: MA Experiment 20001906 PARAMETER Experiment Name: At_Drought_Reproduction_P Parameter: Tissue Value: Siliques
  misc_feature: MA Experiment 20001906 PARAMETER Experiment Name: At_Drought_Reproduction_P Parameter: Treatment Value: Drought vs. No Drought
  misc_feature: MA Experiment ID: 20001911 Result: Down-regulated in Transcription
  misc_feature: MA Experiment 20001911 PARAMETER Experiment Name: At_Drought_Reproduction_P Parameter: Age (day) Value: 40
  misc_feature: MA Experiment 20001911 PARAMETER Experiment Name: At_Drought_Reproduction_P Parameter: Organism Value: A. thaliana
  misc_feature: MA Experiment 20001911 PARAMETER Experiment Name: At_Drought_Reproduction_P Parameter: Plant Line Value: WS
  misc_feature: MA Experiment 20001911 PARAMETER Experiment Name: At_Drought_Reproduction_P Parameter: Timepoint (day) Value: 10
  misc_feature: MA Experiment 20001911 PARAMETER Experiment Name: At_Drought_Reproduction_P Parameter: Tissue Value: Flowers
  misc_feature: MA Experiment 20001911 PARAMETER Experiment Name: At_Drought_Reproduction_P Parameter: Treatment Value: Drought vs. No Drought
acaaagaaaaaacactatctctatcgacaaagataagagaactcagaagcttctactcttaaaatggcaactttctcttatttccaaaactaccctcattcccttcttgatcctcttctcttccctacacctcactcctccattaatctcactagtttcatcgatcaaaaccatctctatccactaccaaacatttccacagttgaagacatttcctttcttgaatataatgttgacaaaactgaaaactctggttcagagaaactggccaacacaaccaaaacagcaaccaccggttcttcttcctgcgaccagctcagccacggaccatcagccatcaccaacaccggaaaaacccgtgggaggaaggccagaaacagtaataactccaaggaaggagtagagggaagaaaaagcaaaaaacagaagagaggaagcaaagaagagcctccaacagattacattcacgttcgagctagaagaggccaagctactgatagccacagccttgctgagagggtgagaagggaaaagataagtgagcggatgaggactctgcaaaaccttgttccgggctgtgataaggtaacagggaaggccctcatgttggatgagattataaattatgtccagaccttgcagactcaagttgagtttctctcaatgaagctaacttctataagtccggtggtctatgactttggctccgaccttgatggcctcatacttcaatctgagatgggttctccagaagtaggaacgtcttttaccaatgcaatgccaacaactactcctatctttccttcactattggataattctgtagttcccacacatgcacaagttcaggaagagggagaagaaagagagaactttgtagacagaagtgggttcaacaacaacaacttctgttctttcccttgataaaattacatgtcgacacaaacacaaaagcctgctttcgttgatttaatctcctcccatttgcacggagggaataaaatctacgtaaaccaggttttgtaaaagtggatgtacttatttgttccgtttatatagtttgaagaaataaagtattttagagacttaaaaagctcattttctctatttgtcccgagagtttcaacataatcattacataaaatcaatggataaattcatactaaaagagaatggtatatgaggcagaggcaaattcgatggaggaaagaaagacatataaactaagaagacctatcagcttaatcattgttttttttaatataattgaattttgatgtatccactcattaattttataagttcttgtattttcac

SEQ ID NO: 23713 - protein, 286 aa, Arabidopsis thaliana
  peptide (1)..(286): Ceres Seq. ID no. 12396482
  misc_feature (143)..(193): Pfam Name: Helix-loop-helix DNA-binding domain Pfam Description: Helix-loop-helix DNA-binding domain
  misc_feature (97)..(275): Homolog of NCBI NO: 29647487 NR Description: OJ1191_A10.7 [Oryza sativa (japonica
  misc_feature (43)..(281): Homolog of NCBI NO: 22331295 NR Description: bHLH protein
  misc_feature (40)..(221): Homolog of NCBI NO: 34906952 NR Description: DNA-binding protein-like protein
  misc_feature (59)..(226): Homolog of NCBI NO: 20127085 NR Description: putative bHLH transcription factor [Arabidopsis
  misc_feature (59)..(226): Homolog of NCBI NO: 15239013 NR Description: putative protein
  misc_feature (42)..(249): Homolog of NCBI NO: 20127044 NR Description: putative bHLH transcription factor [Arabidopsis
  misc_feature (42)..(249): Homolog of NCBI NO: 15221563 NR Description: putative DNA-binding protein; protein id:
  misc_feature (42)..(249): Homolog of NCBI NO: 30697769 NR Description: DNA-binding protein -related [Arabidopsis
  misc_feature (1)..(228): Homolog of NCBI NO: 5923912 NR Description: bHLH transcription factor GBOF-1 [Tulipa
  misc_feature (1)..(286): Homolog of NCBI NO: 18423212 NR Description: Expressed protein
MATFSYFQNYPHSLLDPLLFPTPHSSINLTSFIDQNHLYPLPNISTVEDISFLEYNVDKTENSGSEKLANTTKTATTGSSSCDQLSHGPSAITNTGKTRGRKARNSNNSKEGVEGRKSKKQKRGSKEEPPTDYIHVRARRGQATDSHSLAERVRREKISERMRTLQNLVPGCDKVTGKALMLDEIINYVQTLQTQVEFLSMKLTSISPVVYDFGSDLDGLILQSEMGSPEVGTSFTNAMPTTTPIFPSLLDNSVVPTHAQVQEEGEERENFVDRSGFNNNNFCSFP

SEQ ID NO: 23714 - DNA, 1809 bp, Arabidopsis thaliana
  misc_feature (1)..(1809): Ceres Seq. ID no. 13591810
  misc_feature: MA Experiment ID: 108434 Result: Down-regulated in Transcription
  misc_feature: MA Experiment 108434 PARAMETER Experiment Name: At_Root_Tips_cDNA_P Parameter: Tissue Value: Root Tips
  misc_feature: MA Experiment ID: 108461 Result: Up-regulated in Transcription
  misc_feature: MA Experiment 108461 PARAMETER Experiment Name: At_Germinating_Seeds_cDNA_P Parameter: Age (day) Value: 1 vs. 0
  misc_feature: MA Experiment 108461 PARAMETER Experiment Name: At_Germinating_Seeds_cDNA_P Parameter: Tissue Value: Germinating Seeds
  misc_feature: MA Experiment ID: 108462 Result: Up-regulated in Transcription
  misc_feature: MA Experiment 108462 PARAMETER Experiment Name: At_Germinating_Seeds_cDNA_P Parameter: Age (day) Value: 2 vs. 0
  misc_feature: MA Experiment 108462 PARAMETER Experiment Name: At_Germinating_Seeds_cDNA_P Parameter: Tissue Value: Germinating Seeds
  misc_feature: MA Experiment ID: 108463 Result: Up-regulated in Transcription
  misc_feature: MA Experiment 108463 PARAMETER Experiment Name: At_Germinating_Seeds_cDNA_P Parameter: Age (day) Value: 3 vs. 0
  misc_feature: MA Experiment 108463 PARAMETER Experiment Name: At_Germinating_Seeds_cDNA_P Parameter: Tissue Value: Germinating Seeds
  misc_feature: MA Experiment ID: 108577 Result: Down-regulated in Transcription
  misc_feature: MA Experiment 108577 PARAMETER Experiment Name: At_42deg_Heat_cDNA_P Parameter: Temperature (deg C) Value: 42 vs. 22
  misc_feature: MA Experiment 108577 PARAMETER Experiment Name: At_42deg_Heat_cDNA_P Parameter: Timepoint (hr) Value: 6
  misc_feature: MA Experiment 108577 PARAMETER Experiment Name: At_42deg_Heat_cDNA_P Parameter: Tissue Value: Aerial
  misc_feature: MA Experiment ID: 20000180 Result: Up-regulated in Transcription
  misc_feature: MA Experiment 20000180 PARAMETER Experiment Name: At_Germinating_Seeds_P Parameter: Age (hr) Value: 24 vs. 0
  misc_feature: MA Experiment 20000180 PARAMETER Experiment Name: At_Germinating_Seeds_P Parameter: Tissue Value: Germinating Seeds
  misc_feature: MA Experiment ID: 20000185 Result: Down-regulated in Transcription
  misc_feature: MA Experiment 20000185 PARAMETER Experiment Name: At_Roots__P Parameter: Age (day) Value: 7 vs. 21
  misc_feature: MA Experiment 20000185 PARAMETER Experiment Name: At_Roots__P Parameter: Organism Value: A. thaliana
  misc_feature: MA Experiment 20000185 PARAMETER Experiment Name: At_Roots__P Parameter: Tissue Value: Roots vs. Whole Plant
  misc_feature: MA Experiment ID: 20000224 Result: Up-regulated in Transcription
  misc_feature: MA Experiment ID: 20000234 Result: Up-regulated in Transcription
  misc_feature: MA Experiment 20000234 PARAMETER Experiment Name: At_Siliques_P Parameter: Age (day) Value: 21
  misc_feature: MA Experiment 20000234 PARAMETER Experiment Name: At_Siliques_P Parameter: Organism Value: A. thaliana
  misc_feature: MA Experiment 20000234 PARAMETER Experiment Name: At_Siliques_P Parameter: Plant Line Value: WS
  misc_feature: MA Experiment 20000234 PARAMETER Experiment Name: At_Siliques_P Parameter: Tissue Value: Less Than 5mm Siliques vs. Whole Plant
  misc_feature: MA Experiment ID: 20000235 Result: Up-regulated in Transcription
  misc_feature: MA Experiment 20000235 PARAMETER Experiment Name: At_Siliques_P Parameter: Age (day) Value: 21
  misc_feature: MA Experiment 20000235 PARAMETER Experiment Name: At_Siliques_P Parameter: Organism Value: A. thaliana
  misc_feature: MA Experiment 20000235 PARAMETER Experiment Name: At_Siliques_P Parameter: Plant Line Value: WS
  misc_feature: MA Experiment 20000235 PARAMETER Experiment Name: At_Siliques_P Parameter: Tissue Value: 5-10mm Siliques vs. Whole Plant
  misc_feature: MA Experiment ID: 20000265 Result: Up-regulated in Transcription
  misc_feature: MA Experiment 20000265 PARAMETER Experiment Name: At_Open_Flower_P Parameter: Age (day) Value: 21
  misc_feature: MA Experiment 20000265 PARAMETER Experiment Name: At_Open_Flower_P Parameter: Plant Line Value: WS
  misc_feature: MA Experiment 20000265 PARAMETER Experiment Name: At_Open_Flower_P Parameter: Tissue Value: Closed Flower vs. Whole Plant
  misc_feature: MA Experiment ID: 20000439 Result: Down-regulated in Transcription
  misc_feature: MA Experiment 20000439 PARAMETER Experiment Name: At_Roots__P Parameter: Age (day) Value: 14 vs. 21
  misc_feature: MA Experiment 20000439 PARAMETER Experiment Name: At_Roots__P Parameter: Organism Value: A. thaliana
  misc_feature: MA Experiment 20000439 PARAMETER Experiment Name: At_Roots__P Parameter: Tissue Value: Roots vs. Whole Plant
  misc_feature: MA Experiment ID: 20000573 Result: Down-regulated in Transcription
  misc_feature: MA Experiment 20000573 PARAMETER Experiment Name: At_100uM_ABA_Mutants__P Parameter: Organism Value: A. thaliana
  misc_feature: MA Experiment 20000573 PARAMETER Experiment Name: At_100uM_ABA_Mutants__P Parameter: Plant Line Value: CS22 vs. Ler wt
  misc_feature: MA Experiment 20000573 PARAMETER Experiment Name: At_100uM_ABA_Mutants__P Parameter: Timepoint (hr) Value: N/A
  misc_feature: MA Experiment 20000573 PARAMETER Experiment Name: At_100uM_ABA_Mutants__P Parameter: Tissue Value: Whole Plant
  misc_feature: MA Experiment 20000573 PARAMETER Experiment Name: At_100uM_ABA_Mutants__P Parameter: Treatment Value: None
  misc_feature: MA Experiment ID: 20000574 Result: Down-regulated in Transcription
  misc_feature: MA Experiment 20000574 PARAMETER Experiment Name: At_100uM_ABA_Mutants__P Parameter: Organism Value: A. thaliana
  misc_feature: MA Experiment 20000574 PARAMETER Experiment Name: At_100uM_ABA_Mutants__P Parameter: Plant Line Value: CS23 vs. Ler wt
  misc_feature: MA Experiment 20000574 PARAMETER Experiment Name: At_100uM_ABA_Mutants__P Parameter: Timepoint (hr) Value: N/A
  misc_feature: MA Experiment 20000574 PARAMETER Experiment Name: At_100uM_ABA_Mutants__P Parameter: Tissue Value: Whole Plant
  misc_feature: MA Experiment 20000574 PARAMETER Experiment Name: At_100uM_ABA_Mutants__P Parameter: Treatment Value: None
  misc_feature: MA Experiment ID: 20000794 Result: Up-regulated in Transcription
  misc_feature: MA Experiment 20000794 PARAMETER Experiment Name: At_Petals_P Parameter: Age (day) Value: 23-25 days
  misc_feature: MA Experiment 20000794 PARAMETER Experiment Name: At_Petals_P Parameter: Plant Line Value: WS
  misc_feature: MA Experiment 20000794 PARAMETER Experiment Name: At_Petals_P Parameter: Tissue Value: Petals vs. Whole plant
  misc_feature: MA Experiment ID: 20001451 Result: Down-regulated in Transcription
  misc_feature: MA Experiment 20001451 PARAMETER Experiment Name: At_Far-red-induction_P Parameter: Age (day) Value: 7
  misc_feature: MA Experiment 20001451 PARAMETER Experiment Name: At_Far-red-induction_P Parameter: Light Value: Far-red vs. White
  misc_feature: MA Experiment 20001451 PARAMETER Experiment Name: At_Far-red-induction_P Parameter: Organism Value: A. thaliana
  misc_feature: MA Experiment 20001451 PARAMETER Experiment Name: At_Far-red-induction_P Parameter: Plant Line Value: Columbia
  misc_feature: MA Experiment 20001451 PARAMETER Experiment Name: At_Far-red-induction_P Parameter: Timepoint (hr) Value: 24
  misc_feature: MA Experiment 20001451 PARAMETER Experiment Name: At_Far-red-induction_P Parameter: Tissue Value: Whole Plant
  misc_feature: MA Experiment ID: 20001557 Result: Down-regulated in Transcription
  misc_feature: MA Experiment 20001557 PARAMETER Experiment Name: At_Drought_Soil_Dry_P Parameter: Age (day) Value: 27
  misc_feature: MA Experiment 20001557 PARAMETER Experiment Name: At_Drought_Soil_Dry_P Parameter: Organism Value: A. thaliana
  misc_feature: MA Experiment 20001557 PARAMETER Experiment Name: At_Drought_Soil_Dry_P Parameter: Plant Line Value: WS
  misc_feature: MA Experiment 20001557 PARAMETER Experiment Name: At_Drought_Soil_Dry_P Parameter: Post Timepoint (hr) Value: 3
  misc_feature: MA Experiment 20001557 PARAMETER Experiment Name: At_Drought_Soil_Dry_P Parameter: Post-Treatment Value: Re-Water vs. No Drought
  misc_feature: MA Experiment 20001557 PARAMETER Experiment Name: At_Drought_Soil_Dry_P Parameter: Timepoint (day) Value: 13
  misc_feature: MA Experiment 20001557 PARAMETER Experiment Name: At_Drought_Soil_Dry_P Parameter: Treatment Value: Drought vs. No Drought
  misc_feature: MA Experiment ID: 20001558 Result: Down-regulated in Transcription
  misc_feature: MA Experiment 20001558 PARAMETER Experiment Name: At_Drought_Soil_Dry_P Parameter: Age (day) Value: 27
  misc_feature: MA Experiment 20001558 PARAMETER Experiment Name: At_Drought_Soil_Dry_P Parameter: Organism Value: A. thaliana
  misc_feature: MA Experiment 20001558 PARAMETER Experiment Name: At_Drought_Soil_Dry_P Parameter: Plant Line Value: WS
  misc_feature: MA Experiment 20001558 PARAMETER Experiment Name: At_Drought_Soil_Dry_P Parameter: Post Timepoint (hr) Value: 6
  misc_feature: MA Experiment 20001558 PARAMETER Experiment Name: At_Drought_Soil_Dry_P Parameter: Post-Treatment Value: Re-Water vs. No Drought
  misc_feature: MA Experiment 20001558 PARAMETER Experiment Name: At_Drought_Soil_Dry_P Parameter: Timepoint (day) Value: 13
  misc_feature: MA Experiment 20001558 PARAMETER Experiment Name: At_Drought_Soil_Dry_P Parameter: Treatment Value: Drought vs. No Drought
  misc_feature: MA Experiment ID: 20001560 Result: Down-regulated in Transcription
  misc_feature: MA Experiment 20001560 PARAMETER Experiment Name: At_Drought_Soil_Dry_P Parameter: Age (day) Value: 28
  misc_feature: MA Experiment 20001560 PARAMETER Experiment Name: At_Drought_Soil_Dry_P Parameter: Organism Value: A. thaliana
  misc_feature: MA Experiment 20001560 PARAMETER Experiment Name: At_Drought_Soil_Dry_P Parameter: Plant Line Value: WS
  misc_feature: MA Experiment 20001560 PARAMETER Experiment Name: At_Drought_Soil_Dry_P Parameter: Post Timepoint (hr) Value: None
  misc_feature: MA Experiment 20001560 PARAMETER Experiment Name: At_Drought_Soil_Dry_P Parameter: Post-Treatment Value: None
  misc_feature: MA Experiment 20001560 PARAMETER Experiment Name: At_Drought_Soil_Dry_P Parameter: Timepoint (day) Value: 14
  misc_feature: MA Experiment 20001560 PARAMETER Experiment Name: At_Drought_Soil_Dry_P Parameter: Treatment Value: Drought vs. No Drought
  misc_feature: MA Experiment ID: 20001757 Result: Up-regulated in Transcription
  misc_feature: MA Experiment 20001757 PARAMETER Experiment Name: At_50mM_NH4NO3_L-to-H_P Parameter: Timepoint (hr) Value: 6
  misc_feature: MA Experiment 20001757 PARAMETER Experiment Name: At_50mM_NH4NO3_L-to-H_P Parameter: Tissue Value: Leaf
  misc_feature: MA Experiment 20001757 PARAMETER Experiment Name: At_50mM_NH4NO3_L-to-H_P Parameter: Treatment Value: 50mM NH4NO3 vs 100mM Mannitol
  misc_feature: MA Experiment ID: 20001904 Result: Down-regulated in Transcription
  misc_feature: MA Experiment 20001904 PARAMETER Experiment Name: At_Drought_Reproduction_P Parameter: Age (day) Value: 37
  misc_feature: MA Experiment 20001904 PARAMETER Experiment Name: At_Drought_Reproduction_P Parameter: Organism Value: A. thaliana
  misc_feature: MA Experiment 20001904 PARAMETER Experiment Name: At_Drought_Reproduction_P Parameter: Plant Line Value: WS
  misc_feature: MA Experiment 20001904 PARAMETER Experiment Name: At_Drought_Reproduction_P Parameter: Timepoint (day) Value: 7
  misc_feature: MA Experiment 20001904 PARAMETER Experiment Name: At_Drought_Reproduction_P Parameter: Tissue Value: Rosettes
  misc_feature: MA Experiment 20001904 PARAMETER Experiment Name: At_Drought_Reproduction_P Parameter: Treatment Value: Drought vs. No Drought
  misc_feature: MA Experiment ID: 20001905 Result: Down-regulated in Transcription
  misc_feature: MA Experiment 20001905 PARAMETER Experiment Name: At_Drought_Reproduction_P Parameter: Age (day) Value: 40
  misc_feature: MA Experiment 20001905 PARAMETER Experiment Name: At_Drought_Reproduction_P Parameter: Organism Value: A. thaliana
  misc_feature: MA Experiment 20001905 PARAMETER Experiment Name: At_Drought_Reproduction_P Parameter: Plant Line Value: WS
  misc_feature: MA Experiment 20001905 PARAMETER Experiment Name: At_Drought_Reproduction_P Parameter: Timepoint (day) Value: 10
  misc_feature: MA Experiment 20001905 PARAMETER Experiment Name: At_Drought_Reproduction_P Parameter: Tissue Value: Rosettes
  misc_feature: MA Experiment 20001905 PARAMETER Experiment Name: At_Drought_Reproduction_P Parameter: Treatment Value: Drought vs. No Drought
  misc_feature: MA Experiment ID: 20001906 Result: Down-regulated in Transcription
  misc_feature: MA Experiment 20001906 PARAMETER Experiment Name: At_Drought_Reproduction_P Parameter: Age (day) Value: 35
  misc_feature: MA Experiment 20001906 PARAMETER Experiment Name: At_Drought_Reproduction_P Parameter: Organism Value: A. thaliana
  misc_feature: MA Experiment 20001906 PARAMETER Experiment Name: At_Drought_Reproduction_P Parameter: Plant Line Value: WS
  misc_feature: MA Experiment 20001906 PARAMETER Experiment Name: At_Drought_Reproduction_P Parameter: Timepoint (day) Value: 5
  misc_feature: MA Experiment 20001906 PARAMETER Experiment Name: At_Drought_Reproduction_P Parameter: Tissue Value: Siliques
  misc_feature: MA Experiment 20001906 PARAMETER Experiment Name: At_Drought_Reproduction_P Parameter: Treatment Value: Drought vs. No Drought
  misc_feature: MA Experiment ID: 20001908 Result: Down-regulated in Transcription
  misc_feature: MA Experiment 20001908 PARAMETER Experiment Name: At_Drought_Reproduction_P Parameter: Age (day) Value: 40
  misc_feature: MA Experiment 20001908 PARAMETER Experiment Name: At_Drought_Reproduction_P Parameter: Organism Value: A. thaliana
  misc_feature: MA Experiment 20001908 PARAMETER Experiment Name: At_Drought_Reproduction_P Parameter: Plant Line Value: WS
  misc_feature: MA Experiment 20001908 PARAMETER Experiment Name: At_Drought_Reproduction_P Parameter: Timepoint (day) Value: 10
  misc_feature: MA Experiment 20001908 PARAMETER Experiment Name: At_Drought_Reproduction_P Parameter: Tissue Value: Siliques
  misc_feature: MA Experiment 20001908 PARAMETER Experiment Name: At_Drought_Reproduction_P Parameter: Treatment Value: Drought vs. No Drought
tggcaacacaaaaacatacacactactaataaaccatgaagcttcttatgctcgcctttgtttttctattagctttggcgacttgtaaaggtgacgagtttgtttgtgaagagaacgagccattcacatgtaaccaaactaaacttttcaacagtggcaatttcgaaaaaggcttcatcttcggtgttgcatcttctgcttaccaggtggaaggcggtagaggccgtggacttaacgtttgggatagcttcactcaccgattcccagagaaaggtggagctgatttgggaaatggagacactacttgtgactcatatactctttggcagaaagatatagacgtgatggacgagctcaactctactggctacagattctccattgcgtggtcaagactccttccaaaaggaaagaggagcaggggagtgaacccaggagctattaagtactacaacggtctcatagatggcctcgtcgcaaagaatatgacgccctttgttaccctctttcattgggaccttcctcaaacactacaagatgaatataacggtttcttgaacaaaacgatcgtagacgatttcaaggattacgcggatctatgtttcgagttatttggtgatagggtaaagaactggatcaccatcaaccagctatacacagtgcctactagaggatatgcattgggaacagatgcacccggtcgatgttctcctaagattgacgttagatgtcccggcggaaattcgtcaacagaaccctatattgttgcacataaccagcttcttgctcatgcagcggccgttgatgtttacaggacgaaatataaggatgaccaaaaaggtatgattggaccagtgatgataactagatggtttcttccatttgatcatagtcaagagagcaaagatgcaactgagcgggctaaaatatttttccatggatggttcatggggcctctaacagaaggtaaatacccagacatcatgagggaatatgttggtgatcggcttccagagttcagtgaaacagaagccgcacttgtaaagggttcatatgattttcttggtctcaactattacgtcactcaatacgcccaaaataatcagacgattgttccttcggacgtacacactgccttgatggactcacgcacaactctcacatctaaaaatgcaactggtcatgctcctggtccaccgttcaatgcagccagttactactacccaaaaggcatttactacgtaatggattacttcaaaaccacttacggtgaccctttaatatatgtcactgagaatggatttagtaccccaggtgatgaggactttgagaaggctactgccgattacaagcggattgattatctctgtagtcatctctgtttcctcagtaaagtcatcaaggagaagaatgtcaacgtgaaaggatattttgcttggtctcttggggataattacgaattctgtaacggatttaccgtcagattcggactaagttacgttgatttcgcaaatatcactggtgatagagacctcaaagcatctggcaaatggttccagaagttcataaacgttaccgacgaagactctacgaaccaagatctactccgctcaagcgtctcctccaagaaccgtgatcggaagagtcttgcagatgcatgaaatatccaatccactatatgtccaccaagatcatcttcatgtttcctctttctacttgctccatagataaggagctttttctaccatatgtattaaaataaaatcctaataaaagatgatcaataataataaagactttgtttactgc

SEQ ID NO: 23715 - protein, 541 aa, Arabidopsis thaliana
  peptide (1)..(541): Ceres Seq. ID no. 13591811
  misc_feature (1)..(541): Homolog of NCBI NO: 11034736 NR Description: myrosinase [Raphanus sativus]
  misc_feature (2)..(538): Homolog of NCBI NO: 27261134 NR Description: carboxypeptidase Y/myrosinase fusion protein
  misc_feature (1)..(538): Homolog of NCBI NO: 13605680 NR Description: AT5g25980/T1N24_18 [Arabidopsis thaliana]
  misc_feature (1)..(541): Homolog of NCBI NO: 127733 NR Description: Myrosinase precursor (Sinigrinase)
  misc_feature (1)..(538): Homolog of NCBI NO: 1362007 NR Description: thioglucosidase (EC 3.2.1.147) 2 - Arabidopsis
  misc_feature (1)..(538): Homolog of NCBI NO: 18420974 NR Description: glycosyl hydrolase family 1 [Arabidopsis
  misc_feature (1)..(456): Homolog of NCBI NO: 30690089 NR Description: glycosyl hydrolase family 1, myrosinase precursor
  misc_feature (1)..(541): Homolog of NCBI NO: 15809938 NR Description: AT5g26000/T1N24_7 [Arabidopsis thaliana]
  misc_feature (1)..(541): Homolog of NCBI NO: 16648811 NR Description: AT5g26000/T1N24_7 [Arabidopsis thaliana]
  misc_feature (1)..(541): Homolog of NCBI NO: 30690085 NR Description: glycosyl hydrolase family 1, myrosinase precursor
  misc_feature (1)..(541): Homolog of NCBI NO: 11034736 NR Description: myrosinase [Raphanus sativus]
  misc_feature (2)..(538): Homolog of NCBI NO: 27261134 NR Description: carboxypeptidase Y/myrosinase fusion protein
  misc_feature (1)..(538): Homolog of NCBI NO: 13605680 NR Description: AT5g25980/T1N24_18 [Arabidopsis thaliana]
  misc_feature (1)..(541): Homolog of NCBI NO: 127733 NR Description: Myrosinase precursor (Sinigrinase)
  misc_feature (1)..(538): Homolog of NCBI NO: 1362007 NR Description: thioglucosidase (EC 3.2.1.147) 2 - Arabidopsis
  misc_feature (1)..(538): Homolog of NCBI NO: 18420974 NR Description: glycosyl hydrolase family 1 [Arabidopsis
  misc_feature (1)..(456): Homolog of NCBI NO: 30690089 NR Description: glycosyl hydrolase family 1, myrosinase precursor
  misc_feature (1)..(541): Homolog of NCBI NO: 15809938 NR Description: AT5g26000/T1N24_7 [Arabidopsis thaliana]
  misc_feature (1)..(541): Homolog of NCBI NO: 16648811 NR Description: AT5g26000/T1N24_7 [Arabidopsis thaliana]
  misc_feature (1)..(541): Homolog of NCBI NO: 30690085 NR Description: glycosyl hydrolase family 1, myrosinase precursor
  misc_feature (1)..(541): Homolog of NCBI NO: 30690085 NR Description: glycosyl hydrolase family 1, myrosinase precursor
  misc_feature (1)..(541): Homolog of NCBI NO: 15809938 NR Description: AT5g26000/T1N24_7 [Arabidopsis thaliana]
  misc_feature (1)..(541): Homolog of NCBI NO: 16648811 NR Description: AT5g26000/T1N24_7 [Arabidopsis thaliana]
  misc_feature (1)..(541): Homolog of NCBI NO: 11034736 NR Description: myrosinase [Raphanus sativus]
  misc_feature (2)..(538): Homolog of NCBI NO: 27261134 NR Description: carboxypeptidase Y/myrosinase fusion protein
  misc_feature (1)..(538): Homolog of NCBI NO: 13605680 NR Description: AT5g25980/T1N24_18 [Arabidopsis thaliana]
  misc_feature (1)..(541): Homolog of NCBI NO: 127733 NR Description: Myrosinase precursor (Sinigrinase)
  misc_feature (1)..(538): Homolog of NCBI NO: 1362007 NR Description: thioglucosidase (EC 3.2.1.147) 2 - Arabidopsis
  misc_feature (1)..(538): Homolog of NCBI NO: 18420974 NR Description: glycosyl hydrolase family 1 [Arabidopsis
  misc_feature (1)..(456): Homolog of NCBI NO: 30690089 NR Description: glycosyl hydrolase family 1, myrosinase precursor
MKLLMLAFVFLLALATCKGDEFVCEENEPFTCNQTKLFNSGNFEKGFIFGVASSAYQVEGGRGRGLNVWDSFTHRFPEKGGADLGNGDTTCDSYTLWQKDIDVMDELNSTGYRFSIAWSRLLPKGKRSRGVNPGAIKYYNGLIDGLVAKNMTPFVTLFHWDLPQTLQDEYNGFLNKTIVDDFKDYADLCFELFGDRVKNWITINQLYTVPTRGYALGTDAPGRCSPKIDVRCPGGNSSTEPYIVAHNQLLAHAAAVDVYRTKYKDDQKGMIGPVMITRWFLPFDHSQESKDATERAKIFFHGWFMGPLTEGKYPDIMREYVGDRLPEFSETEAALVKGSYDFLGLNYYVTQYAQNNQTIVPSDVHTALMDSRTTLTSKNATGHAPGPPFNAASYYYPKGIYYVMDYFKTTYGDPLIYVTENGFSTPGDEDFEKATADYKRIDYLCSHLCFLSKVIKEKNVNVKGYFAWSLGDNYEFCNGFTVRFGLSYVDFANITGDRDLKASGKWFQKFINVTDEDSTNQDLLRSSVSSKNRDRKSLADA

SEQ ID NO: 23716 - protein, 537 aa, Arabidopsis thaliana
  peptide (1)..(537): Ceres Seq. ID no. 13591812
  misc_feature (1)..(537): Homolog of NCBI NO: 11034736 NR Description: myrosinase [Raphanus sativus]
  misc_feature (1)..(534): Homolog of NCBI NO: 27261134 NR Description: carboxypeptidase Y/myrosinase fusion protein
  misc_feature (1)..(534): Homolog of NCBI NO: 13605680 NR Description: AT5g25980/T1N24_18 [Arabidopsis thaliana]
  misc_feature (1)..(537): Homolog of NCBI NO: 127733 NR Description: Myrosinase precursor (Sinigrinase)
  misc_feature (1)..(534): Homolog of NCBI NO: 1362007 NR Description: thioglucosidase (EC 3.2.1.147) 2 - Arabidopsis
  misc_feature (1)..(534): Homolog of NCBI NO: 18420974 NR Description: glycosyl hydrolase family 1 [Arabidopsis
  misc_feature (1)..(452): Homolog of NCBI NO: 30690089 NR Description: glycosyl hydrolase family 1, myrosinase precursor
  misc_feature (1)..(537): Homolog of NCBI NO: 15809938 NR Description: AT5g26000/T1N24_7 [Arabidopsis thaliana]
  misc_feature (1)..(537): Homolog of NCBI NO: 16648811 NR Description: AT5g26000/T1N24_7 [Arabidopsis thaliana]
  misc_feature (1)..(537): Homolog of NCBI NO: 30690085 NR Description: glycosyl hydrolase family 1, myrosinase precursor
  misc_feature (1)..(537): Homolog of NCBI NO: 11034736 NR Description: myrosinase [Raphanus sativus]
  misc_feature (1)..(534): Homolog of NCBI NO: 27261134 NR Description: carboxypeptidase Y/myrosinase fusion protein
  misc_feature (1)..(534): Homolog of NCBI NO: 13605680 NR Description: AT5g25980/T1N24_18 [Arabidopsis thaliana]
  misc_feature (1)..(537): Homolog of NCBI NO: 127733 NR Description: Myrosinase precursor (Sinigrinase)
  misc_feature (1)..(534): Homolog of NCBI NO: 1362007 NR Description: thioglucosidase (EC 3.2.1.147) 2 - Arabidopsis
  misc_feature (1)..(534): Homolog of NCBI NO: 18420974 NR Description: glycosyl hydrolase family 1 [Arabidopsis
  misc_feature (1)..(452): Homolog of NCBI NO: 30690089 NR Description: glycosyl hydrolase family 1, myrosinase precursor
  misc_feature (1)..(537): Homolog of NCBI NO: 15809938 NR Description: AT5g26000/T1N24_7 [Arabidopsis thaliana]
  misc_feature (1)..(537): Homolog of NCBI NO: 16648811 NR Description: AT5g26000/T1N24_7 [Arabidopsis thaliana]
  misc_feature (1)..(537): Homolog of NCBI NO: 30690085 NR Description: glycosyl hydrolase family 1, myrosinase precursor
  misc_feature (1)..(537): Homolog of NCBI NO: 11034736 NR Description: myrosinase [Raphanus sativus]
  misc_feature (1)..(534): Homolog of NCBI NO: 27261134 NR Description: carboxypeptidase Y/myrosinase fusion protein
  misc_feature (1)..(534): Homolog of NCBI NO: 13605680 NR Description: AT5g25980/T1N24_18 [Arabidopsis thaliana]
  misc_feature (1)..(537): Homolog of NCBI NO: 127733 NR Description: Myrosinase precursor (Sinigrinase)
  misc_feature (1)..(534): Homolog of NCBI NO: 1362007 NR Description: thioglucosidase (EC 3.2.1.147) 2 - Arabidopsis
  misc_feature (1)..(534): Homolog of NCBI NO: 18420974 NR Description: glycosyl hydrolase family 1 [Arabidopsis
  misc_feature (1)..(452): Homolog of NCBI NO: 30690089 NR Description: glycosyl hydrolase family 1, myrosinase precursor
  misc_feature (1)..(537): Homolog of NCBI NO: 15809938 NR Description: AT5g26000/T1N24_7 [Arabidopsis thaliana]
  misc_feature (1)..(537): Homolog of NCBI NO: 16648811 NR Description: AT5g26000/T1N24_7 [Arabidopsis thaliana]
  misc_feature (1)..(537): Homolog of NCBI NO: 30690085 NR Description: glycosyl hydrolase family 1, myrosinase precursor
MLAFVFLLALATCKGDEFVCEENEPFTCNQTKLFNSGNFEKGFIFGVASSAYQVEGGRGRGLNVWDSFTHRFPEKGGADLGNGDTTCDSYTLWQKDIDVMDELNSTGYRFSIAWSRLLPKGKRSRGVNPGAIKYYNGLIDGLVAKNMTPFVTLFHWDLPQTLQDEYNGFLNKTIVDDFKDYADLCFELFGDRVKNWITINQLYTVPTRGYALGTDAPGRCSPKIDVRCPGGNSSTEPYIVAHNQLLAHAAAVDVYRTKYKDDQKGMIGPVMITRWFLPFDHSQESKDATERAKIFFHGWFMGPLTEGKYPDIMREYVGDRLPEFSETEAALVKGSYDFLGLNYYVTQYAQNNQTIVPSDVHTALMDSRTTLTSKNATGHAPGPPFNAASYYYPKGIYYVMDYFKTTYGDPLIYVTENGFSTPGDEDFEKATADYKRIDYLCSHLCFLSKVIKEKNVNVKGYFAWSLGDNYEFCNGFTVRFGLSYVDFANITGDRDLKASGKWFQKFINVTDEDSTNQDLLRSSVSSKNRDRKSLADA

SEQ ID NO: 23717 - protein, 438 aa, Arabidopsis thaliana
  peptide (1)..(438): Ceres Seq. ID no. 13591813
  misc_feature (1)..(438): Homolog of NCBI NO: 11034736 NR Description: myrosinase [Raphanus sativus]
  misc_feature (1)..(435): Homolog of NCBI NO: 27261134 NR Description: carboxypeptidase Y/myrosinase fusion protein
  misc_feature (1)..(435): Homolog of NCBI NO: 13605680 NR Description: AT5g25980/T1N24_18 [Arabidopsis thaliana]
  misc_feature (1)..(438): Homolog of NCBI NO: 127733 NR Description: Myrosinase precursor (Sinigrinase)
  misc_feature (1)..(435): Homolog of NCBI NO: 1362007 NR Description: thioglucosidase (EC 3.2.1.147) 2 - Arabidopsis
  misc_feature (1)..(435): Homolog of NCBI NO: 18420974 NR Description: glycosyl hydrolase family 1 [Arabidopsis
  misc_feature (1)..(353): Homolog of NCBI NO: 30690089 NR Description: glycosyl hydrolase family 1, myrosinase precursor
  misc_feature (1)..(438): Homolog of NCBI NO: 15809938 NR Description: AT5g26000/T1N24_7 [Arabidopsis thaliana]
  misc_feature (1)..(438): Homolog of NCBI NO: 16648811 NR Description: AT5g26000/T1N24_7 [Arabidopsis thaliana]
  misc_feature (1)..(438): Homolog of NCBI NO: 30690085 NR Description: glycosyl hydrolase family 1, myrosinase precursor
  misc_feature (1)..(438): Homolog of NCBI NO: 11034736 NR Description: myrosinase [Raphanus sativus]
  misc_feature (1)..(435): Homolog of NCBI NO: 27261134 NR Description: carboxypeptidase Y/myrosinase fusion protein
  misc_feature (1)..(435): Homolog of NCBI NO: 13605680 NR Description: AT5g25980/T1N24_18 [Arabidopsis thaliana]
  misc_feature (1)..(438): Homolog of NCBI NO: 127733 NR Description: Myrosinase precursor (Sinigrinase)
  misc_feature (1)..(435): Homolog of NCBI NO: 1362007 NR Description: thioglucosidase (EC 3.2.1.147) 2 - Arabidopsis
  misc_feature (1)..(435): Homolog of NCBI NO: 18420974 NR Description: glycosyl hydrolase family 1 [Arabidopsis
  misc_feature (1)..(353): Homolog of NCBI NO: 30690089 NR Description: glycosyl hydrolase family 1, myrosinase precursor
  misc_feature (1)..(438): Homolog of NCBI NO: 15809938 NR Description: AT5g26000/T1N24_7 [Arabidopsis thaliana]
  misc_feature (1)..(438): Homolog of NCBI NO: 16648811 NR Description: AT5g26000/T1N24_7 [Arabidopsis thaliana]
  misc_feature (1)..(438): Homolog of NCBI NO: 30690085 NR Description: glycosyl hydrolase family 1, myrosinase precursor
  misc_feature (1)..(438): Homolog of NCBI NO: 11034736 NR Description: myrosinase [Raphanus sativus]
  misc_feature (1)..(435): Homolog of NCBI NO: 27261134 NR Description: carboxypeptidase Y/myrosinase fusion protein
  misc_feature (1)..(435): Homolog of NCBI NO: 13605680 NR Description: AT5g25980/T1N24_18 [Arabidopsis thaliana]
  misc_feature (1)..(438): Homolog of NCBI NO: 127733 NR Description: Myrosinase precursor (Sinigrinase)
  misc_feature (1)..(435): Homolog of NCBI NO: 1362007 NR Description: thioglucosidase (EC 3.2.1.147) 2 - Arabidopsis
  misc_feature (1)..(435): Homolog of NCBI NO: 18420974 NR Description: glycosyl hydrolase family 1 [Arabidopsis
  misc_feature (1)..(353): Homolog of NCBI NO: 30690089 NR Description: glycosyl hydrolase family 1, myrosinase precursor
  misc_feature (1)..(438): Homolog of NCBI NO: 15809938 NR Description: AT5g26000/T1N24_7 [Arabidopsis thaliana]
  misc_feature (1)..(438): Homolog of NCBI NO: 16648811 NR Description: AT5g26000/T1N24_7 [Arabidopsis thaliana]
  misc_feature (1)..(438): Homolog of NCBI NO: 30690085 NR Description: glycosyl hydrolase family 1, myrosinase precursor
MDELNSTGYRFSIAWSRLLPKGKRSRGVNPGAIKYYNGLIDGLVAKNMTPFVTLFHWDLPQTLQDEYNGFLNKTIVDDFKDYADLCFELFGDRVKNWITINQLYTVPTRGYALGTDAPGRCSPKIDVRCPGGNSSTEPYIVAHNQLLAHAAAVDVYRTKYKDDQKGMIGPVMITRWFLPFDHSQESKDATERAKIFFHGWFMGPLTEGKYPDIMREYVGDRLPEFSETEAALVKGSYDFLGLNYYVTQYAQNNQTIVPSDVHTALMDSRTTLTSKNATGHAPGPPFNAASYYYPKGIYYVMDYFKTTYGDPLIYVTENGFSTPGDEDFEKATADYKRIDYLCSHLCFLSKVIKEKNVNVKGYFAWSLGDNYEFCNGFTVRFGLSYVDFANITGDRDLKASGKWFQKFINVTDEDSTNQDLLRSSVSSKNRDRKSLADA

SEQ ID NO: 23718 - DNA, 1291 bp, Arabidopsis thaliana
  misc_feature (1)..(1291): Ceres Seq. ID no. 12396032
  misc_feature: MA Experiment ID: 108434 Result: Down-regulated in Transcription
  misc_feature: MA Experiment 108434 PARAMETER Experiment Name: At_Root_Tips_cDNA_P Parameter: Tissue Value: Root Tips
  misc_feature: MA Experiment ID: 108461 Result: Up-regulated in Transcription
  misc_feature: MA Experiment 108461 PARAMETER Experiment Name: At_Germinating_Seeds_cDNA_P Parameter: Age (day) Value: 1 vs. 0
  misc_feature: MA Experiment 108461 PARAMETER Experiment Name: At_Germinating_Seeds_cDNA_P Parameter: Tissue Value: Germinating Seeds
  misc_feature: MA Experiment ID: 108462 Result: Up-regulated in Transcription
  misc_feature: MA Experiment 108462 PARAMETER Experiment Name: At_Germinating_Seeds_cDNA_P Parameter: Age (day) Value: 2 vs. 0
  misc_feature: MA Experiment 108462 PARAMETER Experiment Name: At_Germinating_Seeds_cDNA_P Parameter: Tissue Value: Germinating Seeds
  misc_feature: MA Experiment ID: 108463 Result: Up-regulated in Transcription
  misc_feature: MA Experiment 108463 PARAMETER Experiment Name: At_Germinating_Seeds_cDNA_P Parameter: Age (day) Value: 3 vs. 0
  misc_feature: MA Experiment 108463 PARAMETER Experiment Name: At_Germinating_Seeds_cDNA_P Parameter: Tissue Value: Germinating Seeds
  misc_feature: MA Experiment ID: 108464 Result: Up-regulated in Transcription
  misc_feature: MA Experiment 108464 PARAMETER Experiment Name: At_Germinating_Seeds_cDNA_P Parameter: Age (day) Value: 4 vs. 0
  misc_feature: MA Experiment 108464 PARAMETER Experiment Name: At_Germinating_Seeds_cDNA_P Parameter: Tissue Value: Germinating Seeds
  misc_feature: MA Experiment ID: 108561 Result: Up-regulated in Transcription
  misc_feature: MA Experiment 108561 PARAMETER Experiment Name: At_100uM_ABA_cDNA_P Parameter: Timepoint (hr) Value: 6
  misc_feature: MA Experiment 108561 PARAMETER Experiment Name: At_100uM_ABA_cDNA_P Parameter: Tissue Value: Aerial
  misc_feature: MA Experiment 108561 PARAMETER Experiment Name: At_100uM_ABA_cDNA_P Parameter: Treatment Value: 100uM ABA vs. No Treatment
  misc_feature: MA Experiment ID: 108569 Result: Up-regulated in Transcription
  misc_feature: MA Experiment 108569 PARAMETER Experiment Name: At_0.001%_MeJA__cDNA_P Parameter: Timepoint (hr) Value: 6
  misc_feature: MA Experiment 108569 PARAMETER Experiment Name: At_0.001%_MeJA__cDNA_P Parameter: Tissue Value: Aerial
  misc_feature: MA Experiment 108569 PARAMETER Experiment Name: At_0.001%_MeJA__cDNA_P Parameter: Treatment Value: 0.001% MeJA vs. No Treatment
  misc_feature: MA Experiment ID: 108573 Result: Up-regulated in Transcription
  misc_feature: MA Experiment 108573 PARAMETER Experiment Name: At_Drought_cDNA_P Parameter: Timepoint (hr) Value: 6
  misc_feature: MA Experiment 108573 PARAMETER Experiment Name: At_Drought_cDNA_P Parameter: Tissue Value: Aerial
  misc_feature: MA Experiment 108573 PARAMETER Experiment Name: At_Drought_cDNA_P Parameter: Treatment Value: Drought vs. No Drought
  misc_feature: MA Experiment ID: 108574 Result: Up-regulated in Transcription
  misc_feature: MA Experiment 108574 PARAMETER Experiment Name: At_Wounding__cDNA_P Parameter: Timepoint (hr) Value: 1
  misc_feature: MA Experiment 108574 PARAMETER Experiment Name: At_Wounding__cDNA_P Parameter: Tissue Value: Aerial
  misc_feature: MA Experiment 108574 PARAMETER Experiment Name: At_Wounding__cDNA_P Parameter: Treatment Value: Wounding vs. No Wounding
  misc_feature: MA Experiment ID: 108577 Result: Up-regulated in Transcription
  misc_feature: MA Experiment 108577 PARAMETER Experiment Name: At_42deg_Heat_cDNA_P Parameter: Temperature (deg C) Value: 42 vs. 22
  misc_feature: MA Experiment 108577 PARAMETER Experiment Name: At_42deg_Heat_cDNA_P Parameter: Timepoint (hr) Value: 6
  misc_feature: MA Experiment 108577 PARAMETER Experiment Name: At_42deg_Heat_cDNA_P Parameter: Tissue Value: Aerial
  misc_feature: MA Experiment ID: 108585 Result: Up-regulated in Transcription
  misc_feature: MA Experiment 108585 PARAMETER Experiment Name: At_5mM_NaNP_cDNA_P Parameter: Timepoint (hr) Value: 6
  misc_feature: MA Experiment 108585 PARAMETER Experiment Name: At_5mM_NaNP_cDNA_P Parameter: Tissue Value: Aerial
  misc_feature: MA Experiment 108585 PARAMETER Experiment Name: At_5mM_NaNP_cDNA_P Parameter: Treatment Value: null
  misc_feature: MA Experiment ID: 108605 Result: Up-regulated in Transcription
  misc_feature: MA Experiment 108605 PARAMETER Experiment Name: At_100uM_ABA_cDNA_P Parameter: Timepoint (hr) Value: 6
  misc_feature: MA Experiment 108605 PARAMETER Experiment Name: At_100uM_ABA_cDNA_P Parameter: Tissue Value: Aerial
  misc_feature: MA Experiment 108605 PARAMETER Experiment Name: At_100uM_ABA_cDNA_P Parameter: Treatment Value: 100uM ABA vs. No Treatment
  misc_feature: MA Experiment ID: 108607 Result: Up-regulated in Transcription
  misc_feature: MA Experiment 108607 PARAMETER Experiment Name: At_100uM_ABA_cDNA_P Parameter: Timepoint (hr) Value: 4
  misc_feature: MA Experiment 108607 PARAMETER Experiment Name: At_100uM_ABA_cDNA_P Parameter: Tissue Value: Aerial
  misc_feature: MA Experiment 108607 PARAMETER Experiment Name: At_100uM_ABA_cDNA_P Parameter: Treatment Value: 100uM ABA vs. No Treatment
  misc_feature: MA Experiment ID: 108608 Result: Up-regulated in Transcription
  misc_feature: MA Experiment 108608 PARAMETER Experiment Name: At_100uM_ABA_cDNA_P Parameter: Timepoint (hr) Value: 1
  misc_feature: MA Experiment 108608 PARAMETER Experiment Name: At_100uM_ABA_cDNA_P Parameter: Tissue Value: Aerial
  misc_feature: MA Experiment 108608 PARAMETER Experiment Name: At_100uM_ABA_cDNA_P Parameter: Treatment Value: 100uM ABA vs. No Treatment
  misc_feature: MA Experiment ID: 108609 Result: Up-regulated in Transcription
  misc_feature: MA Experiment 108609 PARAMETER Experiment Name: At_100uM_ABA_cDNA_P Parameter: Timepoint (hr) Value: 24
  misc_feature: MA Experiment 108609 PARAMETER Experiment Name: At_100uM_ABA_cDNA_P Parameter: Tissue Value: Aerial
  misc_feature: MA Experiment 108609 PARAMETER Experiment Name: At_100uM_ABA_cDNA_P Parameter: Treatment Value: 100uM ABA vs. No Treatment
  misc_feature: MA Experiment ID: 108668 Result: Up-regulated in Transcription
  misc_feature: MA Experiment 108668 PARAMETER Experiment Name: At_2mM_SA_cDNA_P Parameter: Plant Line Value: WS
  misc_feature: MA Experiment 108668 PARAMETER Experiment Name: At_2mM_SA_cDNA_P Parameter: Timepoint (hr) Value: 6
  misc_feature: MA Experiment 108668 PARAMETER Experiment Name: At_2mM_SA_cDNA_P Parameter: Treatment Value: 2mM SA vs. No Treatment
  misc_feature: MA Experiment ID: 20000069 Result: Up-regulated in Transcription
  misc_feature: MA Experiment 20000069 PARAMETER Experiment Name: At_100uM_ABA_Mutants_cDNA_P Parameter: Plant Line Value: CS23
  misc_feature: MA Experiment 20000069 PARAMETER Experiment Name: At_100uM_ABA_Mutants_cDNA_P Parameter: Timepoint (hr) Value: 6
  misc_feature: MA Experiment 20000069 PARAMETER Experiment Name: At_100uM_ABA_Mutants_cDNA_P Parameter: Tissue Value: Aerial
  misc_feature: MA Experiment 20000069 PARAMETER Experiment Name: At_100uM_ABA_Mutants_cDNA_P Parameter: Treatment Value: 100uM ABA vs. No Treatment
  misc_feature: MA Experiment ID: 20000070 Result: Up-regulated in Transcription
  misc_feature: MA Experiment 20000070 PARAMETER Experiment Name: At_100uM_ABA_Mutants_cDNA_P Parameter: Plant Line Value: CS24
  misc_feature: MA Experiment 20000070 PARAMETER Experiment Name: At_100uM_ABA_Mutants_cDNA_P Parameter: Timepoint (hr) Value: 6
  misc_feature: MA Experiment 20000070 PARAMETER Experiment Name: At_100uM_ABA_Mutants_cDNA_P Parameter: Tissue Value: Aerial
  misc_feature: MA Experiment 20000070 PARAMETER Experiment Name: At_100uM_ABA_Mutants_cDNA_P Parameter: Treatment Value: 100uM ABA vs. No Treatment
  misc_feature: MA Experiment ID: 20000071 Result: Up-regulated in Transcription
  misc_feature: MA Experiment 20000071 PARAMETER Experiment Name: At_100uM_ABA_Mutants_cDNA_P Parameter: Plant Line Value: CS8104
  misc_feature: MA Experiment 20000071 PARAMETER Experiment Name: At_100uM_ABA_Mutants_cDNA_P Parameter: Timepoint (hr) Value: 6
  misc_feature: MA Experiment 20000071 PARAMETER Experiment Name: At_100uM_ABA_Mutants_cDNA_P Parameter: Tissue Value: Aerial
  misc_feature: MA Experiment 20000071 PARAMETER Experiment Name: At_100uM_ABA_Mutants_cDNA_P Parameter: Treatment Value: 100uM ABA vs. No Treatment
  misc_feature: MA Experiment ID: 20000072 Result: Up-regulated in Transcription
  misc_feature: MA Experiment 20000072 PARAMETER Experiment Name: At_100uM_ABA_Mutants_cDNA_P Parameter: Plant Line Value: CS8105
  misc_feature: MA Experiment 20000072 PARAMETER Experiment Name: At_100uM_ABA_Mutants_cDNA_P Parameter: Timepoint (hr) Value: 6
  misc_feature: MA Experiment 20000072 PARAMETER Experiment Name: At_100uM_ABA_Mutants_cDNA_P Parameter: Tissue Value: Aerial
  misc_feature: MA Experiment 20000072 PARAMETER Experiment Name: At_100uM_ABA_Mutants_cDNA_P Parameter: Treatment Value: 100uM ABA vs. No Treatment
  misc_feature: MA Experiment ID: 20000086 Result: Up-regulated in Transcription
  misc_feature: MA Experiment 20000086 PARAMETER Experiment Name: At_100uM_ABA_Mutants_cDNA_P Parameter: Plant Line Value: CS22
  misc_feature: MA Experiment 20000086 PARAMETER Experiment Name: At_100uM_ABA_Mutants_cDNA_P Parameter: Timepoint (hr) Value: 6
  misc_feature: MA Experiment 20000086 PARAMETER Experiment Name: At_100uM_ABA_Mutants_cDNA_P Parameter: Tissue Value: Aerial
  misc_feature: MA Experiment 20000086 PARAMETER Experiment Name: At_100uM_ABA_Mutants_cDNA_P Parameter: Treatment Value: 100uM ABA vs. No Treatment
  misc_feature: MA Experiment ID: 20000087 Result: Up-regulated in Transcription
  misc_feature: MA Experiment 20000087 PARAMETER Experiment Name: At_100uM_ABA_Mutants_cDNA_P Parameter: Plant Line Value: WS
  misc_feature: MA Experiment 20000087 PARAMETER Experiment Name: At_100uM_ABA_Mutants_cDNA_P Parameter: Timepoint (hr) Value: 6
  misc_feature: MA Experiment 20000087 PARAMETER Experiment Name: At_100uM_ABA_Mutants_cDNA_P Parameter: Tissue Value: Aerial
  misc_feature: MA Experiment 20000087 PARAMETER Experiment Name: At_100uM_ABA_Mutants_cDNA_P Parameter: Treatment Value: 100uM ABA vs. No Treatment
  misc_feature: MA Experiment ID: 20000088 Result: Up-regulated in Transcription
  misc_feature: MA Experiment 20000088 PARAMETER Experiment Name: At_100uM_ABA_Mutants_cDNA_P Parameter: Plant Line Value: Landsberg
  misc_feature: MA Experiment 20000088 PARAMETER Experiment Name: At_100uM_ABA_Mutants_cDNA_P Parameter: Timepoint (hr) Value: 6
  misc_feature: MA Experiment 20000088 PARAMETER Experiment Name: At_100uM_ABA_Mutants_cDNA_P Parameter: Tissue Value: Aerial
  misc_feature: MA Experiment 20000088 PARAMETER Experiment Name: At_100uM_ABA_Mutants_cDNA_P Parameter: Treatment Value: 100uM ABA vs. No Treatment
  misc_feature: MA Experiment ID: 20000089 Result: Up-regulated in Transcription
  misc_feature: MA Experiment ID: 20000093 Result: Up-regulated in Transcription
  misc_feature: MA Experiment 20000093 PARAMETER Experiment Name: At_42deg_Heat_cDNA_P Parameter: Temperature (deg C) Value: 42 vs. 22
  misc_feature: MA Experiment 20000093 PARAMETER Experiment Name: At_42deg_Heat_cDNA_P Parameter: Timepoint (hr) Value: 0.5
  misc_feature: MA Experiment 20000093 PARAMETER Experiment Name: At_42deg_Heat_cDNA_P Parameter: Tissue Value: Aerial
  misc_feature: MA Experiment ID: 20000111 Result: Up-regulated in Transcription
  misc_feature: MA Experiment 20000111 PARAMETER Experiment Name: At_42deg_Heat_cDNA_P Parameter: Temperature (deg C) Value: 42 vs. 22
  misc_feature: MA Experiment 20000111 PARAMETER Experiment Name: At_42deg_Heat_cDNA_P Parameter: Timepoint (hr) Value: 6
  misc_feature: MA Experiment 20000111 PARAMETER Experiment Name: At_42deg_Heat_cDNA_P Parameter: Tissue Value: Aerial
  misc_feature: MA Experiment ID: 20000112 Result: Up-regulated in Transcription
  misc_feature: MA Experiment 20000112 PARAMETER Experiment Name: At_42deg_Heat_cDNA_P Parameter: Temperature (deg C) Value: 42 vs. 22
  misc_feature: MA Experiment 20000112 PARAMETER Experiment Name: At_42deg_Heat_cDNA_P Parameter: Timepoint (hr) Value: 2
  misc_feature: MA Experiment 20000112 PARAMETER Experiment Name: At_42deg_Heat_cDNA_P Parameter: Tissue Value: Aerial
  misc_feature: MA Experiment ID: 20000117 Result: Up-regulated in Transcription
  misc_feature: MA Experiment 20000117 PARAMETER Experiment Name: At_100uM_ABA_Mutants_cDNA_P Parameter: Plant Line Value: Columbia
  misc_feature: MA Experiment 20000117 PARAMETER Experiment Name: At_100uM_ABA_Mutants_cDNA_P Parameter: Timepoint (hr) Value: 6
  misc_feature: MA Experiment 20000117 PARAMETER Experiment Name: At_100uM_ABA_Mutants_cDNA_P Parameter: Tissue Value: Aerial
  misc_feature: MA Experiment 20000117 PARAMETER Experiment Name: At_100uM_ABA_Mutants_cDNA_P Parameter: Treatment Value: 100uM ABA vs. No Treatment
  misc_feature: MA Experiment ID: 20000144 Result: Up-regulated in Transcription
  misc_feature: MA Experiment 20000144 PARAMETER Experiment Name: At_42deg_Heat_cDNA_P Parameter: Temperature (deg C) Value: 42 vs. 22
  misc_feature: MA Experiment 20000144 PARAMETER Experiment Name: At_42deg_Heat_cDNA_P Parameter: Timepoint (hr) Value: 1
  misc_feature: MA Experiment 20000144 PARAMETER Experiment Name: At_42deg_Heat_cDNA_P Parameter: Tissue Value: Aerial
  misc_feature: MA Experiment ID: 20000166 Result: Up-regulated in Transcription
  misc_feature: MA Experiment 20000166 PARAMETER Experiment Name: At_100uM_ABA_P Parameter: Age (day) Value: 14
  misc_feature: MA Experiment 20000166 PARAMETER Experiment Name: At_100uM_ABA_P Parameter: Organism Value: A. thaliana
  misc_feature: MA Experiment 20000166 PARAMETER Experiment Name: At_100uM_ABA_P Parameter: Plant Line Value: WS
  misc_feature: MA Experiment 20000166 PARAMETER Experiment Name: At_100uM_ABA_P Parameter: Timepoint (hr) Value: 1
  misc_feature: MA Experiment 20000166 PARAMETER Experiment Name: At_100uM_ABA_P Parameter: Tissue Value: Aerial
  misc_feature: MA Experiment 20000166 PARAMETER Experiment Name: At_100uM_ABA_P Parameter: Treatment Value: 100uM ABA vs. No Treatment
  misc_feature: MA Experiment ID: 20000169 Result: Up-regulated in Transcription
  misc_feature: MA Experiment 20000169 PARAMETER Experiment Name: At_100uM_ABA_P Parameter: Age (day) Value: 14
  misc_feature: MA Experiment 20000169 PARAMETER Experiment Name: At_100uM_ABA_P Parameter: Organism Value: A. thaliana
  misc_feature: MA Experiment 20000169 PARAMETER Experiment Name: At_100uM_ABA_P Parameter: Plant Line Value: WS
  misc_feature: MA Experiment 20000169 PARAMETER Experiment Name: At_100uM_ABA_P Parameter: Timepoint (hr) Value: 6
  misc_feature: MA Experiment 20000169 PARAMETER Experiment Name: At_100uM_ABA_P Parameter: Tissue Value: Aerial
  misc_feature: MA Experiment 20000169 PARAMETER Experiment Name: At_100uM_ABA_P Parameter: Treatment Value: 100uM ABA vs. No Treatment
  misc_feature: MA Experiment ID: 20000182 Result: Up-regulated in Transcription
  misc_feature: MA Experiment 20000182 PARAMETER Experiment Name: At_2mM_SA_P Parameter: Age (day) Value: 14
  misc_feature: MA Experiment 20000182 PARAMETER Experiment Name: At_2mM_SA_P Parameter: Organism Value: A. thaliana
  misc_feature: MA Experiment 20000182 PARAMETER Experiment Name: At_2mM_SA_P Parameter: Plant Line Value: WS
  misc_feature: MA Experiment 20000182 PARAMETER Experiment Name: At_2mM_SA_P Parameter: Timepoint (hr) Value: 6
  misc_feature: MA Experiment 20000182 PARAMETER Experiment Name: At_2mM_SA_P Parameter: Tissue Value: Aerial
  misc_feature: MA Experiment 20000182 PARAMETER Experiment Name: At_2mM_SA_P Parameter: Treatment Value: 2mM SA vs. No Treatment
  misc_feature: MA Experiment ID: 20000224 Result: Up-regulated in Transcription
  misc_feature: MA Experiment ID: 20000234 Result: Down-regulated in Transcription
  misc_feature: MA Experiment 20000234 PARAMETER Experiment Name: At_Siliques_P Parameter: Age (day) Value: 21
  misc_feature: MA Experiment 20000234 PARAMETER Experiment Name: At_Siliques_P Parameter: Organism Value: A. thaliana
  misc_feature: MA Experiment 20000234 PARAMETER Experiment Name: At_Siliques_P Parameter: Plant Line Value: WS
  misc_feature: MA Experiment 20000234 PARAMETER Experiment Name: At_Siliques_P Parameter: Tissue Value: Less Than 5mm Siliques vs. Whole Plant
  misc_feature: MA Experiment ID: 20000264 Result: Down-regulated in Transcription
  misc_feature: MA Experiment 20000264 PARAMETER Experiment Name: At_Open_Flower_P Parameter: Age (day) Value: 21
  misc_feature: MA Experiment 20000264 PARAMETER Experiment Name: At_Open_Flower_P Parameter: Plant Line Value: WS
  misc_feature: MA Experiment 20000264 PARAMETER Experiment Name: At_Open_Flower_P Parameter: Tissue Value: Open Flower vs. Whole Plant
  misc_feature: MA Experiment ID: 20000267 Result: Up-regulated in Transcription
  misc_feature: MA Experiment 20000267 PARAMETER Experiment Name: At_Drought_P Parameter: Age (day) Value: 7
  misc_feature: MA Experiment 20000267 PARAMETER Experiment Name: At_Drought_P Parameter: Organism Value: A. thaliana
  misc_feature: MA Experiment 20000267 PARAMETER Experiment Name: At_Drought_P Parameter: Plant Line Value: WS
  misc_feature: MA Experiment 20000267 PARAMETER Experiment Name: At_Drought_P Parameter: Timepoint (hr) Value: 6
  misc_feature: MA Experiment 20000267 PARAMETER Experiment Name: At_Drought_P Parameter: Tissue Value: Whole Plant
  misc_feature: MA Experiment 20000267 PARAMETER Experiment Name: At_Drought_P Parameter: Treatment Value: Drought vs. No Drought
  misc_feature: MA Experiment ID: 20000268 Result: Up-regulated in Transcription
  misc_feature: MA Experiment 20000268 PARAMETER Experiment Name: At_100mM_NaCl__P Parameter: Age (day) Value: 14
  misc_feature: MA Experiment 20000268 PARAMETER Experiment Name: At_100mM_NaCl__P Parameter: Organism Value: A. thaliana
  misc_feature: MA Experiment 20000268 PARAMETER Experiment Name: At_100mM_NaCl__P Parameter: Plant Line Value: WS
  misc_feature: MA Experiment 20000268 PARAMETER Experiment Name: At_100mM_NaCl__P Parameter: Timepoint (hr) Value: 6
  misc_feature: MA Experiment 20000268 PARAMETER Experiment Name: At_100mM_NaCl__P Parameter: Tissue Value: Whole Plant
  misc_feature: MA Experiment 20000268 PARAMETER Experiment Name: At_100mM_NaCl__P Parameter: Treatment Value: 100mM NaCl vs. No Treatment
  misc_feature: MA Experiment ID: 20000436 Result: Up-regulated in Transcription
  misc_feature: MA Experiment 20000436 PARAMETER Experiment Name: At_Drought_P Parameter: Age (day) Value: 7
  misc_feature: MA Experiment 20000436 PARAMETER Experiment Name: At_Drought_P Parameter: Organism Value: A. thaliana
  misc_feature: MA Experiment 20000436 PARAMETER Experiment Name: At_Drought_P Parameter: Plant Line Value: WS
  misc_feature: MA Experiment 20000436 PARAMETER Experiment Name: At_Drought_P Parameter: Timepoint (hr) Value: 12
  misc_feature: MA Experiment 20000436 PARAMETER Experiment Name: At_Drought_P Parameter: Tissue Value: Whole Plant
  misc_feature: MA Experiment 20000436 PARAMETER Experiment Name: At_Drought_P Parameter: Treatment Value: Drought vs. No Drought
  misc_feature: MA Experiment ID: 20000438 Result: Down-regulated in Transcription
  misc_feature: MA Experiment 20000438 PARAMETER Experiment Name: At_Shoots__P Parameter: Age (day) Value: 14
  misc_feature: MA Experiment 20000438 PARAMETER Experiment Name: At_Shoots__P Parameter: Tissue Value: Shoots vs. Whole Plant
  misc_feature: MA Experiment ID: 20000453 Result: Up-regulated in Transcription
  misc_feature: MA Experiment 20000453 PARAMETER Experiment Name: At_100uM_ABA_P Parameter: Age (day) Value: 15
  misc_feature: MA Experiment 20000453 PARAMETER Experiment Name: At_100uM_ABA_P Parameter: Organism Value: A. thaliana
  misc_feature: MA Experiment 20000453 PARAMETER Experiment Name: At_100uM_ABA_P Parameter: Plant Line Value: WS
  misc_feature: MA Experiment 20000453 PARAMETER Experiment Name: At_100uM_ABA_P Parameter: Timepoint (hr) Value: 24
  misc_feature: MA Experiment 20000453 PARAMETER Experiment Name: At_100uM_ABA_P Parameter: Tissue Value: Aerial
  misc_feature: MA Experiment 20000453 PARAMETER Experiment Name: At_100uM_ABA_P Parameter: Treatment Value: 100uM ABA vs. No Treatment
  misc_feature: MA Experiment ID: 20000455 Result: Up-regulated in Transcription
  misc_feature: MA Experiment 20000455 PARAMETER Experiment Name: At_100uM_ABA_P Parameter: Age (day) Value: 16
  misc_feature: MA Experiment 20000455 PARAMETER Experiment Name: At_100uM_ABA_P Parameter: Organism Value: A. thaliana
  misc_feature: MA Experiment 20000455 PARAMETER Experiment Name: At_100uM_ABA_P Parameter: Plant Line Value: WS
  misc_feature: MA Experiment 20000455 PARAMETER Experiment Name: At_100uM_ABA_P Parameter: Timepoint (hr) Value: 48
  misc_feature: MA Experiment 20000455 PARAMETER Experiment Name: At_100uM_ABA_P Parameter: Tissue Value: Aerial
  misc_feature: MA Experiment 20000455 PARAMETER Experiment Name: At_100uM_ABA_P Parameter: Treatment Value: 100uM ABA vs. No Treatment
  misc_feature: MA Experiment ID: 20000506 Result: Up-regulated in Transcription
  misc_feature: MA Experiment 20000506 PARAMETER Experiment Name: At_Wounding_P Parameter: Organism Value: A. thaliana
  misc_feature: MA Experiment 20000506 PARAMETER Experiment Name: At_Wounding_P Parameter: Plant Line Value: WS
  misc_feature: MA Experiment 20000506 PARAMETER Experiment Name: At_Wounding_P Parameter: Timepoint (hr) Value: 6
  misc_feature: MA Experiment 20000506 PARAMETER Experiment Name: At_Wounding_P Parameter: Tissue Value: Aerial
  misc_feature: MA Experiment 20000506 PARAMETER Experiment Name: At_Wounding_P Parameter: Treatment Value: Wounding vs. No Wounding
  misc_feature: MA Experiment ID: 20000527 Result: Down-regulated in Transcription
  misc_feature: MA Experiment 20000527 PARAMETER Experiment Name: At_10percent_PEG_P Parameter: Age (day) Value: 20
  misc_feature: MA Experiment 20000527 PARAMETER Experiment Name: At_10percent_PEG_P Parameter: Organism Value: A. thaliana
  misc_feature: MA Experiment 20000527 PARAMETER Experiment Name: At_10percent_PEG_P Parameter: Plant Line Value: WS
  misc_feature: MA Experiment 20000527 PARAMETER Experiment Name: At_10percent_PEG_P Parameter: Timepoint (day) Value: 20
  misc_feature: MA Experiment 20000527 PARAMETER Experiment Name: At_10percent_PEG_P Parameter: Tissue Value: Whole Plant
  misc_feature: MA Experiment 20000527 PARAMETER Experiment Name: At_10percent_PEG_P Parameter: Treatment Value: 10percent PEG vs. No Treatment
  misc_feature: MA Experiment ID: 20001554 Result: Up-regulated in Transcription
  misc_feature: MA Experiment 20001554 PARAMETER Experiment Name: At_Drought_Soil_Dry_P Parameter: Age (day) Value: 21
  misc_feature: MA Experiment 20001554 PARAMETER Experiment Name: At_Drought_Soil_Dry_P Parameter: Organism Value: A. thaliana
  misc_feature: MA Experiment 20001554 PARAMETER Experiment Name: At_Drought_Soil_Dry_P Parameter: Plant Line Value: WS
  misc_feature: MA Experiment 20001554 PARAMETER Experiment Name: At_Drought_Soil_Dry_P Parameter: Post Timepoint (hr) Value: None
  misc_feature: MA Experiment 20001554 PARAMETER Experiment Name: At_Drought_Soil_Dry_P Parameter: Post-Treatment Value: None
  misc_feature: MA Experiment 20001554 PARAMETER Experiment Name: At_Drought_Soil_Dry_P Parameter: Timepoint (day) Value: 7
  misc_feature: MA Experiment 20001554 PARAMETER Experiment Name: At_Drought_Soil_Dry_P Parameter: Treatment Value: Drought vs. No Drought
  misc_feature: MA Experiment ID: 20001555 Result: Up-regulated in Transcription
  misc_feature: MA Experiment 20001555 PARAMETER Experiment Name: At_Drought_Soil_Dry_P Parameter: Age (day) Value: 24
  misc_feature: MA Experiment 20001555 PARAMETER Experiment Name: At_Drought_Soil_Dry_P Parameter: Organism Value: A. thaliana
  misc_feature: MA Experiment 20001555 PARAMETER Experiment Name: At_Drought_Soil_Dry_P Parameter: Plant Line Value: WS
  misc_feature: MA Experiment 20001555 PARAMETER Experiment Name: At_Drought_Soil_Dry_P Parameter: Post Timepoint (hr) Value: None
  misc_feature: MA Experiment 20001555 PARAMETER Experiment Name: At_Drought_Soil_Dry_P Parameter: Post-Treatment Value: None
  misc_feature: MA Experiment 20001555 PARAMETER Experiment Name: At_Drought_Soil_Dry_P Parameter: Timepoint (day) Value: 10
  misc_feature: MA Experiment 20001555 PARAMETER Experiment Name: At_Drought_Soil_Dry_P Parameter: Treatment Value: Drought vs. No Drought
  misc_feature: MA Experiment ID: 20001757 Result: Down-regulated in Transcription
  misc_feature: MA Experiment 20001757 PARAMETER Experiment Name: At_50mM_NH4NO3_L-to-H_P Parameter: Timepoint (hr) Value: 6
  misc_feature: MA Experiment 20001757 PARAMETER Experiment Name: At_50mM_NH4NO3_L-to-H_P Parameter: Tissue Value: Leaf
  misc_feature: MA Experiment 20001757 PARAMETER Experiment Name: At_50mM_NH4NO3_L-to-H_P Parameter: Treatment Value: 50mM NH4NO3 vs 100mM Mannitol
  misc_feature: MA Experiment ID: 20001904 Result: Up-regulated in Transcription
  misc_feature: MA Experiment 20001904 PARAMETER Experiment Name: At_Drought_Reproduction_P Parameter: Age (day) Value: 37
  misc_feature: MA Experiment 20001904 PARAMETER Experiment Name: At_Drought_Reproduction_P Parameter: Organism Value: A. thaliana
  misc_feature: MA Experiment 20001904 PARAMETER Experiment Name: At_Drought_Reproduction_P Parameter: Plant Line Value: WS
  misc_feature: MA Experiment 20001904 PARAMETER Experiment Name: At_Drought_Reproduction_P Parameter: Timepoint (day) Value: 7
  misc_feature: MA Experiment 20001904 PARAMETER Experiment Name: At_Drought_Reproduction_P Parameter: Tissue Value: Rosettes
  misc_feature: MA Experiment 20001904 PARAMETER Experiment Name: At_Drought_Reproduction_P Parameter: Treatment Value: Drought vs. No Drought
  misc_feature: MA Experiment ID: 20001911 Result: Up-regulated in Transcription
  misc_feature: MA Experiment 20001911 PARAMETER Experiment Name: At_Drought_Reproduction_P Parameter: Age (day) Value: 40
  misc_feature: MA Experiment 20001911 PARAMETER Experiment Name: At_Drought_Reproduction_P Parameter: Organism Value: A. thaliana
  misc_feature: MA Experiment 20001911 PARAMETER Experiment Name: At_Drought_Reproduction_P Parameter: Plant Line Value: WS
  misc_feature: MA Experiment 20001911 PARAMETER Experiment Name: At_Drought_Reproduction_P Parameter: Timepoint (day) Value: 10
  misc_feature: MA Experiment 20001911 PARAMETER Experiment Name: At_Drought_Reproduction_P Parameter: Tissue Value: Flowers
  misc_feature: MA Experiment 20001911 PARAMETER Experiment Name: At_Drought_Reproduction_P Parameter: Treatment Value: Drought vs. No Drought
aaaagcgtgaaagcagcagatcaagataagaaagaagaaagaatcatcaaaaaatgggaataatggaggcagagaggaaaacaacaggctgggctgccagagacccatctgggatcctctctccttacacttacactcttagagagactggaccagaggatgtgaacataagaatcatttgctgtggaatctgccacaccgatcttcatcaaactaaaaatgatcttggcatgtctaattaccccatggttcctgggcatgaagtggtaggggaagtagtggaggtgggatcagatgtgagcaagttcaccgtaggggacatagttggagttggttgcctcgttggatgttgcggaggttgtagcccctgcgagagagatctggaacagtattgtccaaagaagatttggagctacaatgatgtttacatcaatggtcaacctacacaaggcggcttcgctaaagccaccgtcgttcaccaaaagtttgtggtcaagattccagaaggaatggcggttgagcaggctgcgccgctactgtgcgctggtgtgactgtgtacagtccactgagccactttggtctgaaacaaccaggcctaagaggaggtatactagggttaggtggagtcggtcacatgggtgtgaaaatagccaaagcaatgggtcaccatgtgactgtcataagctcatcaaacaagaagagagaagaggcattgcaagatcttggagctgatgattacgtgatcggatccgaccaagcgaagatgagcgaattggctgattcgttggattacgtaattgacacggtgcctgttcatcatgcacttgagccatatttgtctctgcttaagcttgatggtaaactcattctcatgggagttatcaacaatccattacagtttctcactcctctgcttatgcttgggaggaaagtgataacggggagcttcatagggagcatgaaggagacagaggagatgcttgagttctgtaaagaaaagggtttgagttcgattatcgaagttgtgaagatggattatgttaacactgcgtttgagagactcgagaagaacgatgtgcgttataggttcgtcgttgatgtcgaaggaagcaatctcgacgcttgatatcatgaaactcgaggctttttatacatactcgaatactcgatttaaacactcttatgtttgtttgtgagctttttcattcgtgtgtcactatttttcatgagaaagtggtaaaagatataatgatattggatttctaatcatgaatcatatgatatatgtgc

SEQ ID NO: 23719 - protein, 357 aa, Arabidopsis thaliana
  peptide (1)..(357): Ceres Seq. ID no. 12396033
  misc_feature (1)..(356): Homolog of NCBI NO: 231676 NR Description: Cinnamyl-alcohol dehydrogenase (CAD)
  misc_feature (1)..(355): Homolog of NCBI NO: 629510 NR Description: cinnamyl-alcohol dehydrogenase (EC 1.1.1.195) CAD
  misc_feature (1)..(355): Homolog of NCBI NO: 7239226 NR Description: cinnamyl alcohol dehydrogenase; CAD [Populus
  misc_feature (1)..(355): Homolog of NCBI NO: 9998899 NR Description: cinnamyl alcohol dehydrogenase
  misc_feature (1)..(355): Homolog of NCBI NO: 1168734 NR Description: Cinnamyl-alcohol dehydrogenase (CAD)
  misc_feature (1)..(355): Homolog of NCBI NO: 21593794 NR Description: cinnamyl alcohol dehydrogenase [Arabidopsis
  misc_feature (1)..(355): Homolog of NCBI NO: 15230382 NR Description: cinnamyl alcohol dehydrogenase
  misc_feature (1)..(356): Homolog of NCBI NO: 1168727 NR Description: Cinnamyl-alcohol dehydrogenase 1 (CAD)
  misc_feature (1)..(356): Homolog of NCBI NO: 231675 NR Description: Cinnamyl-alcohol dehydrogenase (CAD)
  misc_feature (1)..(357): Homolog of NCBI NO: 15235295 NR Description: cinnamyl alcohol dehydrogenase - like protein
MGIMEAERKTTGWAARDPSGILSPYTYTLRETGPEDVNIRIICCGICHTDLHQTKNDLGMSNYPMVPGHEVVGEVVEVGSDVSKFTVGDIVGVGCLVGCCGGCSPCERDLEQYCPKKIWSYNDVYINGQPTQGGFAKATVVHQKFVVKIPEGMAVEQAAPLLCAGVTVYSPLSHFGLKQPGLRGGILGLGGVGHMGVKIAKAMGHHVTVISSSNKKREEALQDLGADDYVIGSDQAKMSELADSLDYVIDTVPVHHALEPYLSLLKLDGKLILMGVINNPLQFLTPLLMLGRKVITGSFIGSMKETEEMLEFCKEKGLSSIIEVVKMDYVNTAFERLEKNDVRYRFVVDVEGSNLDA

SEQ ID NO: 23720 - protein, 354 aa, Arabidopsis thaliana
  peptide (1)..(354): Ceres Seq. ID no. 12396034
  misc_feature (1)..(353): Homolog of NCBI NO: 231676 NR Description: Cinnamyl-alcohol dehydrogenase (CAD)
  misc_feature (1)..(352): Homolog of NCBI NO: 629510 NR Description: cinnamyl-alcohol dehydrogenase (EC 1.1.1.195) CAD
  misc_feature (1)..(352): Homolog of NCBI NO: 7239226 NR Description: cinnamyl alcohol dehydrogenase; CAD [Populus
  misc_feature (1)..(352): Homolog of NCBI NO: 9998899 NR Description: cinnamyl alcohol dehydrogenase
  misc_feature (1)..(352): Homolog of NCBI NO: 1168734 NR Description: Cinnamyl-alcohol dehydrogenase (CAD)
  misc_feature (1)..(352): Homolog of NCBI NO: 21593794 NR Description: cinnamyl alcohol dehydrogenase [Arabidopsis
  misc_feature (1)..(352): Homolog of NCBI NO: 15230382 NR Description: cinnamyl alcohol dehydrogenase
  misc_feature (1)..(353): Homolog of NCBI NO: 1168727 NR Description: Cinnamyl-alcohol dehydrogenase 1 (CAD)
  misc_feature (1)..(353): Homolog of NCBI NO: 231675 NR Description: Cinnamyl-alcohol dehydrogenase (CAD)
  misc_feature (1)..(354): Homolog of NCBI NO: 15235295 NR Description: cinnamyl alcohol dehydrogenase - like protein
MEAERKTTGWAARDPSGILSPYTYTLRETGPEDVNIRIICCGICHTDLHQTKNDLGMSNYPMVPGHEVVGEVVEVGSDVSKFTVGDIVGVGCLVGCCGGCSPCERDLEQYCPKKIWSYNDVYINGQPTQGGFAKATVVHQKFVVKIPEGMAVEQAAPLLCAGVTVYSPLSHFGLKQPGLRGGILGLGGVGHMGVKIAKAMGHHVTVISSSNKKREEALQDLGADDYVIGSDQAKMSELADSLDYVIDTVPVHHALEPYLSLLKLDGKLILMGVINNPLQFLTPLLMLGRKVITGSFIGSMKETEEMLEFCKEKGLSSIIEVVKMDYVNTAFERLEKNDVRYRFVVDVEGSNLDA

SEQ ID NO: 23721 - protein, 298 aa, Arabidopsis thaliana
  peptide (1)..(298): Ceres Seq. ID no. 12396035
  misc_feature (1)..(297): Homolog of NCBI NO: 231676 NR Description: Cinnamyl-alcohol dehydrogenase (CAD)
  misc_feature (1)..(296): Homolog of NCBI NO: 629510 NR Description: cinnamyl-alcohol dehydrogenase (EC 1.1.1.195) CAD
  misc_feature (1)..(296): Homolog of NCBI NO: 7239226 NR Description: cinnamyl alcohol dehydrogenase; CAD [Populus
  misc_feature (1)..(296): Homolog of NCBI NO: 9998899 NR Description: cinnamyl alcohol dehydrogenase
  misc_feature (1)..(296): Homolog of NCBI NO: 1168734 NR Description: Cinnamyl-alcohol dehydrogenase (CAD)
  misc_feature (1)..(296): Homolog of NCBI NO: 21593794 NR Description: cinnamyl alcohol dehydrogenase [Arabidopsis
  misc_feature (1)..(296): Homolog of NCBI NO: 15230382 NR Description: cinnamyl alcohol dehydrogenase
  misc_feature (1)..(297): Homolog of NCBI NO: 1168727 NR Description: Cinnamyl-alcohol dehydrogenase 1 (CAD)
  misc_feature (1)..(297): Homolog of NCBI NO: 231675 NR Description: Cinnamyl-alcohol dehydrogenase (CAD)
  misc_feature (1)..(298): Homolog of NCBI NO: 15235295 NR Description: cinnamyl alcohol dehydrogenase - like protein
MSNYPMVPGHEVVGEVVEVGSDVSKFTVGDIVGVGCLVGCCGGCSPCERDLEQYCPKKIWSYNDVYINGQPTQGGFAKATVVHQKFVVKIPEGMAVEQAAPLLCAGVTVYSPLSHFGLKQPGLRGGILGLGGVGHMGVKIAKAMGHHVTVISSSNKKREEALQDLGADDYVIGSDQAKMSELADSLDYVIDTVPVHHALEPYLSLLKLDGKLILMGVINNPLQFLTPLLMLGRKVITGSFIGSMKETEEMLEFCKEKGLSSIIEVVKMDYVNTAFERLEKNDVRYRFVVDVEGSNLDA

SEQ ID NO: 23722 - DNA, 1445 bp, Arabidopsis thaliana
  misc_feature (1)..(1445): Ceres Seq. ID no. 13509190
  misc_feature: MA Experiment ID: 20000180 Result: Down-regulated in Transcription
  misc_feature: MA Experiment 20000180 PARAMETER Experiment Name: At_Germinating_Seeds_P Parameter: Age (hr) Value: 24 vs. 0
  misc_feature: MA Experiment 20000180 PARAMETER Experiment Name: At_Germinating_Seeds_P Parameter: Tissue Value: Germinating Seeds
  misc_feature: MA Experiment ID: 20000235 Result: Up-regulated in Transcription
  misc_feature: MA Experiment 20000235 PARAMETER Experiment Name: At_Siliques_P Parameter: Age (day) Value: 21
  misc_feature: MA Experiment 20000235 PARAMETER Experiment Name: At_Siliques_P Parameter: Organism Value: A. thaliana
  misc_feature: MA Experiment 20000235 PARAMETER Experiment Name: At_Siliques_P Parameter: Plant Line Value: WS
  misc_feature: MA Experiment 20000235 PARAMETER Experiment Name: At_Siliques_P Parameter: Tissue Value: 5-10mm Siliques vs. Whole Plant
  misc_feature: MA Experiment ID: 20000527 Result: Down-regulated in Transcription
  misc_feature: MA Experiment 20000527 PARAMETER Experiment Name: At_10percent_PEG_P Parameter: Age (day) Value: 20
  misc_feature: MA Experiment 20000527 PARAMETER Experiment Name: At_10percent_PEG_P Parameter: Organism Value: A. thaliana
  misc_feature: MA Experiment 20000527 PARAMETER Experiment Name: At_10percent_PEG_P Parameter: Plant Line Value: WS
  misc_feature: MA Experiment 20000527 PARAMETER Experiment Name: At_10percent_PEG_P Parameter: Timepoint (day) Value: 20
  misc_feature: MA Experiment 20000527 PARAMETER Experiment Name: At_10percent_PEG_P Parameter: Tissue Value: Whole Plant
  misc_feature: MA Experiment 20000527 PARAMETER Experiment Name: At_10percent_PEG_P Parameter: Treatment Value: 10percent PEG vs. No Treatment
  misc_feature: MA Experiment ID: 20000794 Result: Down-regulated in Transcription
  misc_feature: MA Experiment 20000794 PARAMETER Experiment Name: At_Petals_P Parameter: Age (day) Value: 23-25 days
  misc_feature: MA Experiment 20000794 PARAMETER Experiment Name: At_Petals_P Parameter: Plant Line Value: WS
  misc_feature: MA Experiment 20000794 PARAMETER Experiment Name: At_Petals_P Parameter: Tissue Value: Petals vs. Whole plant
  misc_feature: MA Experiment ID: 20001555 Result: Down-regulated in Transcription
  misc_feature: MA Experiment 20001555 PARAMETER Experiment Name: At_Drought_Soil_Dry_P Parameter: Age (day) Value: 24
  misc_feature: MA Experiment 20001555 PARAMETER Experiment Name: At_Drought_Soil_Dry_P Parameter: Organism Value: A. thaliana
  misc_feature: MA Experiment 20001555 PARAMETER Experiment Name: At_Drought_Soil_Dry_P Parameter: Plant Line Value: WS
  misc_feature: MA Experiment 20001555 PARAMETER Experiment Name: At_Drought_Soil_Dry_P Parameter: Post Timepoint (hr) Value: None
  misc_feature: MA Experiment 20001555 PARAMETER Experiment Name: At_Drought_Soil_Dry_P Parameter: Post-Treatment Value: None
  misc_feature: MA Experiment 20001555 PARAMETER Experiment Name: At_Drought_Soil_Dry_P Parameter: Timepoint (day) Value: 10
  misc_feature: MA Experiment 20001555 PARAMETER Experiment Name: At_Drought_Soil_Dry_P Parameter: Treatment Value: Drought vs. No Drought
aatcgaaaaatcatcaaaccctttcttcaccacattattttcactgagcgcataacatttttgagacaagagactctctctctctctcttctctctttctctccccctctctccggcgatggttgttgctatggaccaacgcaccaatgtgaacggagatcccggcgccggagaccggaagaaagaagaaaggtttgatccgagtgcacaaccaccgttcaagatcggagatataagggcggcgattcctaagcactgttgggttaagagtcctttgagatcaatgagttacgtcgtcagagacattatcgccgtcgcggctttggccatcgctgccgtgtatgttgatagctggttcctttggcctctttattgggccgcccaaggaacacttttctgggccatctttgttctcggccacgactgtggacatgggagtttctcagacattcctctactgaatagtgtggttggtcacattcttcattctttcatcctcgttccttaccatggttggagaataagccaccggacacaccaccagaaccatggccatgttgaaaacgacgagtcatgggttccgttaccagaaagggtgtacaagaaattgccccacagtactcggatgctcagatacactgtccctctccccatgctcgcatatcctctctatttgtgctacagaagtcctggaaaagaaggatcacattttaacccatacagtagtttatttgctccaagcgagagaaagcttattgcaacttcaactacttgttggtccataatgttcgtcagtcttatcgctctatctttcgtcttcggtccactcgcggttcttaaagtctacggtgtaccgtacattatctttgtgatgtggttggatgctgtcacgtatttgcatcatcatggtcacgatgagaagttgccttggtatagaggcaaggaatggagttatctacgtggaggattaacaacaattgatagagattacggaatctttaacaacattcatcacgacattggaactcacgtgatccatcatctcttcccacaaatccctcactatcacttggtcgacgccacgaaagcagctaaacatgtgttgggaagatactacagagaaccaaagacgtcaggagcaataccgatccacttggtggagagtttggtcgcaagtattaagaaagatcattacgtcagcgacactggtgatattgtcttctacgagacagatccagatctctacgtttacgcttctgacaaatctaaaatcaattaatctccatttgtttagctctattaggaataaaccagcccacttttaaaatttttatttcttgttgtttttaagttaaaagtgtactcgtgaaactcttttttttttcttttttttttattaatgtatttacattacaaggcgtaaagttttgttatttctcttttct

SEQ ID NO: 23723 - protein, 386 aa, Arabidopsis thaliana
  peptide (1)..(386): Ceres Seq. ID no. 13509191
  misc_feature (85)..(329): Pfam Name: Fatty acid desaturase Pfam Description: Fatty acid desaturase
  misc_feature (85)..(329): Pfam Name: Fatty acid desaturase Pfam Description: Fatty acid desaturase
  misc_feature (1)..(275): Homolog of NCBI NO: 30684423 NR Description: omega-3 fatty acid desaturase, endoplasmic
  misc_feature (11)..(386): Homolog of NCBI NO: 4091113 NR Description: omega-3 fatty acid desaturase [Vernicia fordii]
  misc_feature (22)..(383): Homolog of NCBI NO: 23345025 NR Description: microsomal omega-3 fatty acid desaturase [Betula
  misc_feature (26)..(385): Homolog of NCBI NO: 3133289 NR Description: omega-3 desaturase [Pelargonium x hortorum]
  misc_feature (1)..(275): Homolog of NCBI NO: 30684423 NR Description: omega-3 fatty acid desaturase, endoplasmic
  misc_feature (22)..(383): Homolog of NCBI NO: 23345025 NR Description: microsomal omega-3 fatty acid desaturase [Betula
  misc_feature (37)..(338): Homolog of NCBI NO: 15811218 NR Description: omega-3 fatty acid desaturase [Brassica rapa
  misc_feature (1)..(386): Homolog of NCBI NO: 1345967 NR Description: Omega-3 fatty acid desaturase, endoplasmic
  misc_feature (1)..(386): Homolog of NCBI NO: 15227683 NR Description: omega-3 fatty acid desaturase, endoplasmic
  misc_feature (1)..(386): Homolog of NCBI NO: 541915 NR Description: omega-3 fatty acid desaturase (EC 1.14.99.-) BN3
  misc_feature (26)..(385): Homolog of NCBI NO: 3133289 NR Description: omega-3 desaturase [Pelargonium x hortorum]
  misc_feature (11)..(386): Homolog of NCBI NO: 4091113 NR Description: omega-3 fatty acid desaturase [Vernicia fordii]
  misc_feature (37)..(338): Homolog of NCBI NO: 15811218 NR Description: omega-3 fatty acid desaturase [Brassica rapa
  misc_feature (1)..(386): Homolog of NCBI NO: 541915 NR Description: omega-3 fatty acid desaturase (EC 1.14.99.-) BN3
  misc_feature (1)..(386): Homolog of NCBI NO: 1345967 NR Description: Omega-3 fatty acid desaturase, endoplasmic
  misc_feature (1)..(386): Homolog of NCBI NO: 15227683 NR Description: omega-3 fatty acid desaturase, endoplasmic
MVVAMDQRTNVNGDPGAGDRKKEERFDPSAQPPFKIGDIRAAIPKHCWVKSPLRSMSYVVRDIIAVAALAIAAVYVDSWFLWPLYWAAQGTLFWAIFVLGHDCGHGSFSDIPLLNSVVGHILHSFILVPYHGWRISHRTHHQNHGHVENDESWVPLPERVYKKLPHSTRMLRYTVPLPMLAYPLYLCYRSPGKEGSHFNPYSSLFAPSERKLIATSTTCWSIMFVSLIALSFVFGPLAVLKVYGVPYIIFVMWLDAVTYLHHHGHDEKLPWYRGKEWSYLRGGLTTIDRDYGIFNNIHHDIGTHVIHHLFPQIPHYHLVDATKAAKHVLGRYYREPKTSGAIPIHLVESLVASIKKDHYVSDTGDIVFYETDPDLYVYASDKSKIN

SEQ ID NO: 23724 - protein, 382 aa, Arabidopsis thaliana
  peptide (1)..(382): Ceres Seq. ID no. 13509192
  misc_feature (81)..(325): Pfam Name: Fatty acid desaturase Pfam Description: Fatty acid desaturase
  misc_feature (81)..(325): Pfam Name: Fatty acid desaturase Pfam Description: Fatty acid desaturase
  misc_feature (1)..(271): Homolog of NCBI NO: 30684423 NR Description: omega-3 fatty acid desaturase, endoplasmic
  misc_feature (7)..(382): Homolog of NCBI NO: 4091113 NR Description: omega-3 fatty acid desaturase [Vernicia fordii]
  misc_feature (18)..(379): Homolog of NCBI NO: 23345025 NR Description: microsomal omega-3 fatty acid desaturase [Betula
  misc_feature (22)..(381): Homolog of NCBI NO: 3133289 NR Description: omega-3 desaturase [Pelargonium x hortorum]
  misc_feature (1)..(271): Homolog of NCBI NO: 30684423 NR Description: omega-3 fatty acid desaturase, endoplasmic
  misc_feature (18)..(379): Homolog of NCBI NO: 23345025 NR Description: microsomal omega-3 fatty acid desaturase [Betula
  misc_feature (33)..(334): Homolog of NCBI NO: 15811218 NR Description: omega-3 fatty acid desaturase [Brassica rapa
  misc_feature (1)..(382): Homolog of NCBI NO: 1345967 NR Description: Omega-3 fatty acid desaturase, endoplasmic
  misc_feature (1)..(382): Homolog of NCBI NO: 15227683 NR Description: omega-3 fatty acid desaturase, endoplasmic
  misc_feature (1)..(382): Homolog of NCBI NO: 541915 NR Description: omega-3 fatty acid desaturase (EC 1.14.99.-) BN3
  misc_feature (22)..(381): Homolog of NCBI NO: 3133289 NR Description: omega-3 desaturase [Pelargonium x hortorum]
  misc_feature (7)..(382): Homolog of NCBI NO: 4091113 NR Description: omega-3 fatty acid desaturase [Vernicia fordii]
  misc_feature (33)..(334): Homolog of NCBI NO: 15811218 NR Description: omega-3 fatty acid desaturase [Brassica rapa
  misc_feature (1)..(382): Homolog of NCBI NO: 541915 NR Description: omega-3 fatty acid desaturase (EC 1.14.99.-) BN3
  misc_feature (1)..(382): Homolog of NCBI NO: 1345967 NR Description: Omega-3 fatty acid desaturase, endoplasmic
  misc_feature (1)..(382): Homolog of NCBI NO: 15227683 NR Description: omega-3 fatty acid desaturase, endoplasmic
MDQRTNVNGDPGAGDRKKEERFDPSAQPPFKIGDIRAAIPKHCWVKSPLRSMSYVVRDIIAVAALAIAAVYVDSWFLWPLYWAAQGTLFWAIFVLGHDCGHGSFSDIPLLNSVVGHILHSFILVPYHGWRISHRTHHQNHGHVENDESWVPLPERVYKKLPHSTRMLRYTVPLPMLAYPLYLCYRSPGKEGSHFNPYSSLFAPSERKLIATSTTCWSIMFVSLIALSFVFGPLAVLKVYGVPYIIFVMWLDAVTYLHHHGHDEKLPWYRGKEWSYLRGGLTTIDRDYGIFNNIHHDIGTHVIHHLFPQIPHYHLVDATKAAKHVLGRYYREPKTSGAIPIHLVESLVASIKKDHYVSDTGDIVFYETDPDLYVYASDKSKIN

SEQ ID NO: 23725 - protein, 331 aa, Arabidopsis thaliana
  peptide (1)..(331): Ceres Seq. ID no. 13509193
  misc_feature (30)..(274): Pfam Name: Fatty acid desaturase Pfam Description: Fatty acid desaturase
  misc_feature (30)..(274): Pfam Name: Fatty acid desaturase Pfam Description: Fatty acid desaturase
  misc_feature (1)..(220): Homolog of NCBI NO: 30684423 NR Description: omega-3 fatty acid desaturase, endoplasmic
  misc_feature (1)..(331): Homolog of NCBI NO: 4091113 NR Description: omega-3 fatty acid desaturase [Vernicia fordii]
  misc_feature (1)..(328): Homolog of NCBI NO: 23345025 NR Description: microsomal omega-3 fatty acid desaturase [Betula
  misc_feature (1)..(330): Homolog of NCBI NO: 3133289 NR Description: omega-3 desaturase [Pelargonium x hortorum]
  misc_feature (1)..(220): Homolog of NCBI NO: 30684423 NR Description: omega-3 fatty acid desaturase, endoplasmic
  misc_feature (1)..(328): Homolog of NCBI NO: 23345025 NR Description: microsomal omega-3 fatty acid desaturase [Betula
  misc_feature (1)..(283): Homolog of NCBI NO: 15811218 NR Description: omega-3 fatty acid desaturase [Brassica rapa
  misc_feature (1)..(331): Homolog of NCBI NO: 1345967 NR Description: Omega-3 fatty acid desaturase, endoplasmic
  misc_feature (1)..(331): Homolog of NCBI NO: 15227683 NR Description: omega-3 fatty acid desaturase, endoplasmic
  misc_feature (1)..(331): Homolog of NCBI NO: 541915 NR Description: omega-3 fatty acid desaturase (EC 1.14.99.-) BN3
  misc_feature (1)..(330): Homolog of NCBI NO: 3133289 NR Description: omega-3 desaturase [Pelargonium x hortorum]
  misc_feature (1)..(331): Homolog of NCBI NO: 4091113 NR Description: omega-3 fatty acid desaturase [Vernicia fordii]
  misc_feature (1)..(283): Homolog of NCBI NO: 15811218 NR Description: omega-3 fatty acid desaturase [Brassica rapa
  misc_feature (1)..(331): Homolog of NCBI NO: 541915 NR Description: omega-3 fatty acid desaturase (EC 1.14.99.-) BN3
  misc_feature (1)..(331): Homolog of NCBI NO: 1345967 NR Description: Omega-3 fatty acid desaturase, endoplasmic
  misc_feature (1)..(331): Homolog of NCBI NO: 15227683 NR Description: omega-3 fatty acid desaturase, endoplasmic
MSYVVRDIIAVAALAIAAVYVDSWFLWPLYWAAQGTLFWAIFVLGHDCGHGSFSDIPLLNSVVGHILHSFILVPYHGWRISHRTHHQNHGHVENDESWVPLPERVYKKLPHSTRMLRYTVPLPMLAYPLYLCYRSPGKEGSHFNPYSSLFAPSERKLIATSTTCWSIMFVSLIALSFVFGPLAVLKVYGVPYIIFVMWLDAVTYLHHHGHDEKLPWYRGKEWSYLRGGLTTIDRDYGIFNNIHHDIGTHVIHHLFPQIPHYHLVDATKAAKHVLGRYYREPKTSGAIPIHLVESLVASIKKDHYVSDTGDIVFYETDPDLYVYASDKSKIN

SEQ ID NO: 23726 - DNA, 1108 bp, Arabidopsis thaliana
  misc_feature (1)..(1108): Ceres Seq. ID no. 12385437
  misc_feature: MA Experiment ID: 108434 Result: Down-regulated in Transcription
  misc_feature: MA Experiment 108434 PARAMETER Experiment Name: At_Root_Tips_cDNA_P Parameter: Tissue Value: Root Tips
  misc_feature: MA Experiment ID: 108576 Result: Up-regulated in Transcription
  misc_feature: MA Experiment 108576 PARAMETER Experiment Name: At_42deg_Heat_cDNA_P Parameter: Temperature (deg C) Value: 42 vs. 22
  misc_feature: MA Experiment 108576 PARAMETER Experiment Name: At_42deg_Heat_cDNA_P Parameter: Timepoint (hr) Value: 1
  misc_feature: MA Experiment 108576 PARAMETER Experiment Name: At_42deg_Heat_cDNA_P Parameter: Tissue Value: Aerial
  misc_feature: MA Experiment ID: 108577 Result: Up-regulated in Transcription
  misc_feature: MA Experiment 108577 PARAMETER Experiment Name: At_42deg_Heat_cDNA_P Parameter: Temperature (deg C) Value: 42 vs. 22
  misc_feature: MA Experiment 108577 PARAMETER Experiment Name: At_42deg_Heat_cDNA_P Parameter: Timepoint (hr) Value: 6
  misc_feature: MA Experiment 108577 PARAMETER Experiment Name: At_42deg_Heat_cDNA_P Parameter: Tissue Value: Aerial
  misc_feature: MA Experiment ID: 20000111 Result: Up-regulated in Transcription
  misc_feature: MA Experiment 20000111 PARAMETER Experiment Name: At_42deg_Heat_cDNA_P Parameter: Temperature (deg C) Value: 42 vs. 22
  misc_feature: MA Experiment 20000111 PARAMETER Experiment Name: At_42deg_Heat_cDNA_P Parameter: Timepoint (hr) Value: 6
  misc_feature: MA Experiment 20000111 PARAMETER Experiment Name: At_42deg_Heat_cDNA_P Parameter: Tissue Value: Aerial
  misc_feature: MA Experiment ID: 20000113 Result: Up-regulated in Transcription
  misc_feature: MA Experiment 20000113 PARAMETER Experiment Name: At_42deg_Heat_cDNA_P Parameter: Temperature (deg C) Value: 42 vs. 22
  misc_feature: MA Experiment 20000113 PARAMETER Experiment Name: At_42deg_Heat_cDNA_P Parameter: Timepoint (hr) Value: 8
  misc_feature: MA Experiment 20000113 PARAMETER Experiment Name: At_42deg_Heat_cDNA_P Parameter: Tissue Value: Aerial
  misc_feature: MA Experiment ID: 20000144 Result: Up-regulated in Transcription
  misc_feature: MA Experiment 20000144 PARAMETER Experiment Name: At_42deg_Heat_cDNA_P Parameter: Temperature (deg C) Value: 42 vs. 22
  misc_feature: MA Experiment 20000144 PARAMETER Experiment Name: At_42deg_Heat_cDNA_P Parameter: Timepoint (hr) Value: 1
  misc_feature: MA Experiment 20000144 PARAMETER Experiment Name: At_42deg_Heat_cDNA_P Parameter: Tissue Value: Aerial
  misc_feature: MA Experiment ID: 20000171 Result: Up-regulated in Transcription
  misc_feature: MA Experiment 20000171 PARAMETER Experiment Name: At_42deg_Heat_P Parameter: Age (day) Value: 14
  misc_feature: MA Experiment 20000171 PARAMETER Experiment Name: At_42deg_Heat_P Parameter: Organism Value: A. thaliana
  misc_feature: MA Experiment 20000171 PARAMETER Experiment Name: At_42deg_Heat_P Parameter: Plant Line Value: WS
  misc_feature: MA Experiment 20000171 PARAMETER Experiment Name: At_42deg_Heat_P Parameter: Temperature (deg C) Value: 42 vs. 22
  misc_feature: MA Experiment 20000171 PARAMETER Experiment Name: At_42deg_Heat_P Parameter: Timepoint (hr) Value: 1
  misc_feature: MA Experiment 20000171 PARAMETER Experiment Name: At_42deg_Heat_P Parameter: Tissue Value: Aerial
  misc_feature: MA Experiment ID: 20000173 Result: Up-regulated in Transcription
  misc_feature: MA Experiment 20000173 PARAMETER Experiment Name: At_42deg_Heat_P Parameter: Age (day) Value: 14
  misc_feature: MA Experiment 20000173 PARAMETER Experiment Name: At_42deg_Heat_P Parameter: Organism Value: A. thaliana
  misc_feature: MA Experiment 20000173 PARAMETER Experiment Name: At_42deg_Heat_P Parameter: Plant Line Value: WS
  misc_feature: MA Experiment 20000173 PARAMETER Experiment Name: At_42deg_Heat_P Parameter: Temperature (deg C) Value: 42 vs. 22
  misc_feature: MA Experiment 20000173 PARAMETER Experiment Name: At_42deg_Heat_P Parameter: Timepoint (hr) Value: 6
  misc_feature: MA Experiment 20000173 PARAMETER Experiment Name: At_42deg_Heat_P Parameter: Tissue Value: Aerial
  misc_feature: MA Experiment ID: 20000184 Result: Down-regulated in Transcription
  misc_feature: MA Experiment 20000184 PARAMETER Experiment Name: At_Shoots__P Parameter: Age (day) Value: 7
  misc_feature: MA Experiment 20000184 PARAMETER Experiment Name: At_Shoots__P Parameter: Tissue Value: Shoots vs. Whole Plant
  misc_feature: MA Experiment ID: 20000265 Result: Down-regulated in Transcription
  misc_feature: MA Experiment 20000265 PARAMETER Experiment Name: At_Open_Flower_P Parameter: Age (day) Value: 21
  misc_feature: MA Experiment 20000265 PARAMETER Experiment Name: At_Open_Flower_P Parameter: Plant Line Value: WS
  misc_feature: MA Experiment 20000265 PARAMETER Experiment Name: At_Open_Flower_P Parameter: Tissue Value: Closed Flower vs. Whole Plant
  misc_feature: MA Experiment ID: 20000286 Result: Down-regulated in Transcription
  misc_feature: MA Experiment 20000286 PARAMETER Experiment Name: At_Open_Flower_P Parameter: Age (day) Value: 21
  misc_feature: MA Experiment 20000286 PARAMETER Experiment Name: At_Open_Flower_P Parameter: Plant Line Value: WS
  misc_feature: MA Experiment 20000286 PARAMETER Experiment Name: At_Open_Flower_P Parameter: Tissue Value: Half Open vs. Whole Plant
aaaaacactagagataaccctagaaagatctctctcgatctctggttcgaagaaaatccaccatttccgattgttctttctctttgacaaaacccagatagataaaaattcgttccaattccagtgagctccggaaatggcgtccttcaagttgatgtcttcttccaattccgacttgtctcgccgtaattcttcttctgcttcatcttccccttctataagatcatcgcaccatctccgaccaaatcctcacgccgatcactccagaatcagtttcgcttacggcggaggagtcaacgattacactttcgcgtctgattcaaagcccttcgagatggcgattgatgttgatcggagtatcggagatcggaacagcgttaacaacggaaagagtgttgacgatgtttggaaagagattgtatctggagagcaaaagacgatcatgatgaaggaagaagaaccagaagatataatgacacttgaggatttcttagcgaaagcagaaatggacgagggagcttcagatgaaatcgatgtgaagattccaacggagagactcaacaacgacggtagctatacatttgattttccgatgcagcgacacagttcgttccagatggttgaaggatcaatgggtggaggagtaacgagaggaaagagagggagagtgatgatggaggcaatggataaagctgcagctcagagacagaagaggatgatcaagaaccgtgaatccgctgctaggtctcgagagaggaaacaggcttatcaggttgagttagagactttggctgccaagttagaggaggagaatgagcagcttttgaaggagattgaagagagcactaaagagagatacaagaagctcatggaggttctgattccggtcgatgagaaaccaaggccaccgtcgaggcccttaagcaggagccattccttggaatggtgaagtgtggtaaaaaaaacttttgtatgtaaaaaaaataaaaacatatgggcttgattactatattataatctatatagtaaagtgatggtgatatggttagtacttagttacctttaatgtatctaagggatgtaatggataatacatagctttttgctg

SEQ ID NO: 23727 - protein, 270 aa, Arabidopsis thaliana
  peptide (1)..(270): Ceres Seq. ID no. 12385438
  misc_feature (185)..(249): Pfam Name: bZIP transcription factor Pfam Description: bZIP transcription factor
  misc_feature (68)..(270): Homolog of NCBI NO: 15240086 NR Description: bZIP transcription factor, G-box binding factor
  misc_feature (68)..(270): Homolog of NCBI NO: 21554353 NR Description: unknown [Arabidopsis thaliana]
  misc_feature (85)..(235): Homolog of NCBI NO: 7487620 NR Description: probable bZIP transcription factor
  misc_feature (113)..(270): Homolog of NCBI NO: 34908608 NR Description: putative DNA binding protein
  misc_feature (113)..(270): Homolog of NCBI NO: 7638404 NR Description: OSE2 [Oryza sativa]
  misc_feature (113)..(270): Homolog of NCBI NO: 7489466 NR Description: DNA binding protein - rice
  misc_feature (109)..(270): Homolog of NCBI NO: 29367541 NR Description: OSE2-like protein [Oryza sativa (japonica
  misc_feature (85)..(235): Homolog of NCBI NO: 26451276 NR Description: putative bZIP transcription factor AtbZIP12 /
  misc_feature (85)..(235): Homolog of NCBI NO: 18405590 NR Description: bZIP family transcription factor
  misc_feature (1)..(270): Homolog of NCBI NO: 15219608 NR Description: G-box binding factor 4, GBF4
MASFKLMSSSNSDLSRRNSSSASSSPSIRSSHHLRPNPHADHSRISFAYGGGVNDYTFASDSKPFEMAIDVDRSIGDRNSVNNGKSVDDVWKEIVSGEQKTIMMKEEEPEDIMTLEDFLAKAEMDEGASDEIDVKIPTERLNNDGSYTFDFPMQRHSSFQMVEGSMGGGVTRGKRGRVMMEAMDKAAAQRQKRMIKNRESAARSRERKQAYQVELETLAAKLEEENEQLLKEIEESTKERYKKLMEVLIPVDEKPRPPSRPLSRSHSLEW

SEQ ID NO: 23728 - protein, 264 aa, Arabidopsis thaliana
  peptide (1)..(264): Ceres Seq. ID no. 12385439
  misc_feature (179)..(243): Pfam Name: bZIP transcription factor Pfam Description: bZIP transcription factor
  misc_feature (79)..(229): Homolog of NCBI NO: 18405590 NR Description: bZIP family transcription factor
  misc_feature (79)..(229): Homolog of NCBI NO: 7487620 NR Description: probable bZIP transcription factor
  misc_feature (79)..(229): Homolog of NCBI NO: 26451276 NR Description: putative bZIP transcription factor AtbZIP12 /
  misc_feature (107)..(264): Homolog of NCBI NO: 34908608 NR Description: putative DNA binding protein
  misc_feature (103)..(264): Homolog of NCBI NO: 29367541 NR Description: OSE2-like protein [Oryza sativa (japonica
  misc_feature (107)..(264): Homolog of NCBI NO: 7638404 NR Description: OSE2 [Oryza sativa]
  misc_feature (107)..(264): Homolog of NCBI NO: 7489466 NR Description: DNA binding protein - rice
  misc_feature (62)..(264): Homolog of NCBI NO: 15240086 NR Description: bZIP transcription factor, G-box binding factor
  misc_feature (62)..(264): Homolog of NCBI NO: 21554353 NR Description: unknown [Arabidopsis thaliana]
  misc_feature (1)..(264): Homolog of NCBI NO: 15219608 NR Description: G-box binding factor 4, GBF4
MSSSNSDLSRRNSSSASSSPSIRSSHHLRPNPHADHSRISFAYGGGVNDYTFASDSKPFEMAIDVDRSIGDRNSVNNGKSVDDVWKEIVSGEQKTIMMKEEEPEDIMTLEDFLAKAEMDEGASDEIDVKIPTERLNNDGSYTFDFPMQRHSSFQMVEGSMGGGVTRGKRGRVMMEAMDKAAAQRQKRMIKNRESAARSRERKQAYQVELETLAAKLEEENEQLLKEIEESTKERYKKLMEVLIPVDEKPRPPSRPLSRSHSLEW

SEQ ID NO: 23729 - protein, 204 aa, Arabidopsis thaliana
  peptide (1)..(204): Ceres Seq. ID no. 12385440
  misc_feature (119)..(183): Pfam Name: bZIP transcription factor Pfam Description: bZIP transcription factor
  misc_feature (19)..(169): Homolog of NCBI NO: 18405590 NR Description: bZIP family transcription factor
  misc_feature (19)..(169): Homolog of NCBI NO: 7487620 NR Description: probable bZIP transcription factor
  misc_feature (19)..(169): Homolog of NCBI NO: 26451276 NR Description: putative bZIP transcription factor AtbZIP12 /
  misc_feature (47)..(204): Homolog of NCBI NO: 34908608 NR Description: putative DNA binding protein
  misc_feature (43)..(204): Homolog of NCBI NO: 29367541 NR Description: OSE2-like protein [Oryza sativa (japonica
  misc_feature (47)..(204): Homolog of NCBI NO: 7638404 NR Description: OSE2 [Oryza sativa]
  misc_feature (47)..(204): Homolog of NCBI NO: 7489466 NR Description: DNA binding protein - rice
  misc_feature (2)..(204): Homolog of NCBI NO: 15240086 NR Description: bZIP transcription factor, G-box binding factor
  misc_feature (2)..(204): Homolog of NCBI NO: 21554353 NR Description: unknown [Arabidopsis thaliana]
  misc_feature (1)..(204): Homolog of NCBI NO: 15219608 NR Description: G-box binding factor 4, GBF4
MAIDVDRSIGDRNSVNNGKSVDDVWKEIVSGEQKTIMMKEEEPEDIMTLEDFLAKAEMDEGASDEIDVKIPTERLNNDGSYTFDFPMQRHSSFQMVEGSMGGGVTRGKRGRVMMEAMDKAAAQRQKRMIKNRESAARSRERKQAYQVELETLAAKLEEENEQLLKEIEESTKERYKKLMEVLIPVDEKPRPPSRPLSRSHSLEW

SEQ ID NO: 23730 - DNA, 1216 bp, Arabidopsis thaliana
  misc_feature (1)..(1216): Ceres Seq. ID no. 12324317
  misc_feature: MA Experiment ID: 108434 Result: Up-regulated in Transcription
  misc_feature: MA Experiment 108434 PARAMETER Experiment Name: At_Root_Tips_cDNA_P Parameter: Tissue Value: Root Tips
  misc_feature: MA Experiment ID: 108576 Result: Down-regulated in Transcription
  misc_feature: MA Experiment 108576 PARAMETER Experiment Name: At_42deg_Heat_cDNA_P Parameter: Temperature (deg C) Value: 42 vs. 22
  misc_feature: MA Experiment 108576 PARAMETER Experiment Name: At_42deg_Heat_cDNA_P Parameter: Timepoint (hr) Value: 1
  misc_feature: MA Experiment 108576 PARAMETER Experiment Name: At_42deg_Heat_cDNA_P Parameter: Tissue Value: Aerial
  misc_feature: MA Experiment ID: 108577 Result: Down-regulated in Transcription
  misc_feature: MA Experiment 108577 PARAMETER Experiment Name: At_42deg_Heat_cDNA_P Parameter: Temperature (deg C) Value: 42 vs. 22
  misc_feature: MA Experiment 108577 PARAMETER Experiment Name: At_42deg_Heat_cDNA_P Parameter: Timepoint (hr) Value: 6
  misc_feature: MA Experiment 108577 PARAMETER Experiment Name: At_42deg_Heat_cDNA_P Parameter: Tissue Value: Aerial
tcatttcattgattacttgaaggatgatgtccgaattgttcgagacatacctgactggttcactgacaaagcagagctattctctagtataagaagaacagtcaaaaacattcccaaatatgcagcagcccaattttatattgacaatgttttacctcggataaaggagaagaagataatggccttgaagccttttgtcgatcgacttgggtatgacaatgtacctcaagaaatcaacagattacgatgccgtgtaaattatcatgctctcaaatttcttccagagatagagcagatggctgattcacttgtttctagaatgagaaatcgcactggaaatccaaatccatatatggctcttcatcttagattcgagaaaggaatggttggtctatcgttctgtgattttgtggggacaagggaagagaaagttaaaatggcagaatacagacaaaaggaatggcctcggcgtttcaagaatggttcccatctctggcagctcgccttgcagaagcgcaaagaaggtcgatgccctcttgagccaggagaagttgctgtgatcctacgtgcaatgggctatccaaaagaaacacaaatctatgttgcatctggtcaagtctatggcgggcaaaaccgtatggctccactaagaaacatgttcccaaatttggtaacaaaggaggatttagcaggcaaagaggaactaacaacctttagaaaacacgttacaagtcttgcggctctagatttcttggtgtgcttgaaatcagatgtatttgtgatgacacacggtggaaactttgcaaaactgatcatcggagcgcgtagatatatggggcatcgccagaaatcaatcaaaccggataaagggttgatgtcgaaatcatttggggatccttacatgggatgggcaacttttgtggaagatgtagttgtaacccatcaaacacgaaccggtttacctgaagaaactttccctaactatgatctttgggaaaatcctctcactccatgcatgtgtaaagcttgatgatgatgcttttgtttggtcttggattttgtctgatgaggagcaacaaactatagagattcgtagttttcttcttcttcttcttcttttttgacctttcaaatctttgaagtcttcacttaccatctttgtaatcattttgatattatgtaaagttcctagtgatgaaaaaaaagtttctttttt

SEQ ID NO: 23731 - protein, 342 aa, Arabidopsis thaliana
  peptide (1)..(342): Ceres Seq. ID no. 12324318
  misc_feature (1)..(306): Pfam Name: Plant protein family Pfam Description: Plant protein family
  misc_feature (1)..(109): Homolog of NCBI NO: 31711716 NR Description: At4g24530 [Arabidopsis thaliana]
  misc_feature (88)..(341): Homolog of NCBI NO: 31711716 NR Description: At4g24530 [Arabidopsis thaliana]
  misc_feature (1)..(109): Homolog of NCBI NO: 15233855 NR Description: PsRT17-1 like protein; protein id: At4g24530.1
  misc_feature (88)..(341): Homolog of NCBI NO: 15233855 NR Description: PsRT17-1 like protein; protein id: At4g24530.1
  misc_feature (1)..(123): Homolog of NCBI NO: 15144512 NR Description: putative auxin growth promotor protein
  misc_feature (90)..(342): Homolog of NCBI NO: 15144512 NR Description: putative auxin growth promotor protein
  misc_feature (2)..(341): Homolog of NCBI NO: 15226282 NR Description: similar to axi 1 protein from Nicotiana tabacum
  misc_feature (60)..(342): Homolog of NCBI NO: 18404918 NR Description: expressed protein
  misc_feature (1)..(342): Homolog of NCBI NO: 21618319 NR Description: unknown [Arabidopsis thaliana]
  misc_feature (1)..(342): Homolog of NCBI NO: 9294295 NR Description: contains similarity to the auxin-independent
HFIDYLKDDVRIVRDIPDWFTDKAELFSSIRRTVKNIPKYAAAQFYIDNVLPRIKEKKIMALKPFVDRLGYDNVPQEINRLRCRVNYHALKFLPEIEQMADSLVSRMRNRTGNPNPYMALHLRFEKGMVGLSFCDFVGTREEKVKMAEYRQKEWPRRFKNGSHLWQLALQKRKEGRCPLEPGEVAVILRAMGYPKETQIYVASGQVYGGQNRMAPLRNMFPNLVTKEDLAGKEELTTFRKHVTSLAALDFLVCLKSDVFVMTHGGNFAKLIIGARRYMGHRQKSIKPDKGLMSKSFGDPYMGWATFVEDVVVTHQTRTGLPEETFPNYDLWENPLTPCMCKA

SEQ ID NO: 23732 - protein, 283 aa, Arabidopsis thaliana
  peptide (1)..(283): Ceres Seq. ID no. 12324319
  misc_feature (1)..(247): Pfam Name: Plant protein family Pfam Description: Plant protein family
  misc_feature (1)..(50): Homolog of NCBI NO: 31711716 NR Description: At4g24530 [Arabidopsis thaliana]
  misc_feature (29)..(282): Homolog of NCBI NO: 31711716 NR Description: At4g24530 [Arabidopsis thaliana]
  misc_feature (1)..(50): Homolog of NCBI NO: 15233855 NR Description: PsRT17-1 like protein; protein id: At4g24530.1
  misc_feature (29)..(282): Homolog of NCBI NO: 15233855 NR Description: PsRT17-1 like protein; protein id: At4g24530.1
  misc_feature (1)..(64): Homolog of NCBI NO: 15144512 NR Description: putative auxin growth promotor protein
  misc_feature (31)..(283): Homolog of NCBI NO: 15144512 NR Description: putative auxin growth promotor protein
  misc_feature (1)..(282): Homolog of NCBI NO: 15226282 NR Description: similar to axi 1 protein from Nicotiana tabacum
  misc_feature (1)..(283): Homolog of NCBI NO: 18404918 NR Description: expressed protein
  misc_feature (1)..(283): Homolog of NCBI NO: 21618319 NR Description: unknown [Arabidopsis thaliana]
  misc_feature (1)..(283): Homolog of NCBI NO: 9294295 NR Description: contains similarity to the auxin-independent
MALKPFVDRLGYDNVPQEINRLRCRVNYHALKFLPEIEQMADSLVSRMRNRTGNPNPYMALHLRFEKGMVGLSFCDFVGTREEKVKMAEYRQKEWPRRFKNGSHLWQLALQKRKEGRCPLEPGEVAVILRAMGYPKETQIYVASGQVYGGQNRMAPLRNMFPNLVTKEDLAGKEELTTFRKHVTSLAALDFLVCLKSDVFVMTHGGNFAKLIIGARRYMGHRQKSIKPDKGLMSKSFGDPYMGWATFVEDVVVTHQTRTGLPEETFPNYDLWENPLTPCMCKA

SEQ ID NO: 23733 - protein, 244 aa, Arabidopsis thaliana
  peptide (1)..(244): Ceres Seq. ID no. 12324320
  misc_feature (1)..(208): Pfam Name: Plant protein family Pfam Description: Plant protein family
  misc_feature (1)..(11): Homolog of NCBI NO: 31711716 NR Description: At4g24530 [Arabidopsis thaliana]
  misc_feature (1)..(243): Homolog of NCBI NO: 31711716 NR Description: At4g24530 [Arabidopsis thaliana]
  misc_feature (1)..(11): Homolog of NCBI NO: 15233855 NR Description: PsRT17-1 like protein; protein id: At4g24530.1
  misc_feature (1)..(243): Homolog of NCBI NO: 15233855 NR Description: PsRT17-1 like protein; protein id: At4g24530.1
  misc_feature (1)..(25): Homolog of NCBI NO: 15144512 NR Description: putative auxin growth promotor protein
  misc_feature (1)..(244): Homolog of NCBI NO: 15144512 NR Description: putative auxin growth promotor protein
  misc_feature (1)..(243): Homolog of NCBI NO: 15226282 NR Description: similar to axi 1 protein from Nicotiana tabacum
  misc_feature (1)..(244): Homolog of NCBI NO: 18404918 NR Description: expressed protein
  misc_feature (1)..(244): Homolog of NCBI NO: 21618319 NR Description: unknown [Arabidopsis thaliana]
  misc_feature (1)..(244): Homolog of NCBI NO: 9294295 NR Description: contains similarity to the auxin-independent
MADSLVSRMRNRTGNPNPYMALHLRFEKGMVGLSFCDFVGTREEKVKMAEYRQKEWPRRFKNGSHLWQLALQKRKEGRCPLEPGEVAVILRAMGYPKETQIYVASGQVYGGQNRMAPLRNMFPNLVTKEDLAGKEELTTFRKHVTSLAALDFLVCLKSDVFVMTHGGNFAKLIIGARRYMGHRQKSIKPDKGLMSKSFGDPYMGWATFVEDVVVTHQTRTGLPEETFPNYDLWENPLTPCMCKA

SEQ ID NO: 23734 - DNA, 1257 bp, Arabidopsis thaliana
  misc_feature (1)..(1257): Ceres Seq. ID no. 12324939
  misc_feature: MA Experiment ID: 108462 Result: Up-regulated in Transcription
  misc_feature: MA Experiment 108462 PARAMETER Experiment Name: At_Germinating_Seeds_cDNA_P Parameter: Age (day) Value: 2 vs. 0
  misc_feature: MA Experiment 108462 PARAMETER Experiment Name: At_Germinating_Seeds_cDNA_P Parameter: Tissue Value: Germinating Seeds
  misc_feature: MA Experiment ID: 108463 Result: Up-regulated in Transcription
  misc_feature: MA Experiment 108463 PARAMETER Experiment Name: At_Germinating_Seeds_cDNA_P Parameter: Age (day) Value: 3 vs. 0
  misc_feature: MA Experiment 108463 PARAMETER Experiment Name: At_Germinating_Seeds_cDNA_P Parameter: Tissue Value: Germinating Seeds
  misc_feature: MA Experiment ID: 108464 Result: Up-regulated in Transcription
  misc_feature: MA Experiment 108464 PARAMETER Experiment Name: At_Germinating_Seeds_cDNA_P Parameter: Age (day) Value: 4 vs. 0
  misc_feature: MA Experiment 108464 PARAMETER Experiment Name: At_Germinating_Seeds_cDNA_P Parameter: Tissue Value: Germinating Seeds
  misc_feature: MA Experiment ID: 108488 Result: Up-regulated in Transcription
  misc_feature: MA Experiment ID: 108501 Result: Up-regulated in Transcription
  misc_feature: MA Experiment 108501 PARAMETER Experiment Name: At_ap2_floral_buds_cDNA_P Parameter: Plant Line Value: ap2 (Ler.)
  misc_feature: MA Experiment 108501 PARAMETER Experiment Name: At_ap2_floral_buds_cDNA_P Parameter: Tissue Value: Closed Flower
  misc_feature: MA Experiment ID: 108573 Result: Down-regulated in Transcription
  misc_feature: MA Experiment 108573 PARAMETER Experiment Name: At_Drought_cDNA_P Parameter: Timepoint (hr) Value: 6
  misc_feature: MA Experiment 108573 PARAMETER Experiment Name: At_Drought_cDNA_P Parameter: Tissue Value: Aerial
  misc_feature: MA Experiment 108573 PARAMETER Experiment Name: At_Drought_cDNA_P Parameter: Treatment Value: Drought vs. No Drought
  misc_feature: MA Experiment ID: 108576 Result: Down-regulated in Transcription
  misc_feature: MA Experiment 108576 PARAMETER Experiment Name: At_42deg_Heat_cDNA_P Parameter: Temperature (deg C) Value: 42 vs. 22
  misc_feature: MA Experiment 108576 PARAMETER Experiment Name: At_42deg_Heat_cDNA_P Parameter: Timepoint (hr) Value: 1
  misc_feature: MA Experiment 108576 PARAMETER Experiment Name: At_42deg_Heat_cDNA_P Parameter: Tissue Value: Aerial
  misc_feature: MA Experiment ID: 108577 Result: Down-regulated in Transcription
  misc_feature: MA Experiment 108577 PARAMETER Experiment Name: At_42deg_Heat_cDNA_P Parameter: Temperature (deg C) Value: 42 vs. 22
  misc_feature: MA Experiment 108577 PARAMETER Experiment Name: At_42deg_Heat_cDNA_P Parameter: Timepoint (hr) Value: 6
  misc_feature: MA Experiment 108577 PARAMETER Experiment Name: At_42deg_Heat_cDNA_P Parameter: Tissue Value: Aerial
  misc_feature: MA Experiment ID: 108668 Result: Down-regulated in Transcription
  misc_feature: MA Experiment 108668 PARAMETER Experiment Name: At_2mM_SA_cDNA_P Parameter: Plant Line Value: WS
  misc_feature: MA Experiment 108668 PARAMETER Experiment Name: At_2mM_SA_cDNA_P Parameter: Timepoint (hr) Value: 6
  misc_feature: MA Experiment 108668 PARAMETER Experiment Name: At_2mM_SA_cDNA_P Parameter: Treatment Value: 2mM SA vs. No Treatment
  misc_feature: MA Experiment ID: 20000090 Result: Down-regulated in Transcription
  misc_feature: MA Experiment ID: 20000111 Result: Down-regulated in Transcription
  misc_feature: MA Experiment 20000111 PARAMETER Experiment Name: At_42deg_Heat_cDNA_P Parameter: Temperature (deg C) Value: 42 vs. 22
  misc_feature: MA Experiment 20000111 PARAMETER Experiment Name: At_42deg_Heat_cDNA_P Parameter: Timepoint (hr) Value: 6
  misc_feature: MA Experiment 20000111 PARAMETER Experiment Name: At_42deg_Heat_cDNA_P Parameter: Tissue Value: Aerial
  misc_feature: MA Experiment ID: 20000113 Result: Down-regulated in Transcription
  misc_feature: MA Experiment 20000113 PARAMETER Experiment Name: At_42deg_Heat_cDNA_P Parameter: Temperature (deg C) Value: 42 vs. 22
  misc_feature: MA Experiment 20000113 PARAMETER Experiment Name: At_42deg_Heat_cDNA_P Parameter: Timepoint (hr) Value: 8
  misc_feature: MA Experiment 20000113 PARAMETER Experiment Name: At_42deg_Heat_cDNA_P Parameter: Tissue Value: Aerial
  misc_feature: MA Experiment ID: 20000171 Result: Down-regulated in Transcription
  misc_feature: MA Experiment 20000171 PARAMETER Experiment Name: At_42deg_Heat_P Parameter: Age (day) Value: 14
  misc_feature: MA Experiment 20000171 PARAMETER Experiment Name: At_42deg_Heat_P Parameter: Organism Value: A. thaliana
  misc_feature: MA Experiment 20000171 PARAMETER Experiment Name: At_42deg_Heat_P Parameter: Plant Line Value: WS
  misc_feature: MA Experiment 20000171 PARAMETER Experiment Name: At_42deg_Heat_P Parameter: Temperature (deg C) Value: 42 vs. 22
  misc_feature: MA Experiment 20000171 PARAMETER Experiment Name: At_42deg_Heat_P Parameter: Timepoint (hr) Value: 1
  misc_feature: MA Experiment 20000171 PARAMETER Experiment Name: At_42deg_Heat_P Parameter: Tissue Value: Aerial
  misc_feature: MA Experiment ID: 20000173 Result: Down-regulated in Transcription
  misc_feature: MA Experiment 20000173 PARAMETER Experiment Name: At_42deg_Heat_P Parameter: Age (day) Value: 14
  misc_feature: MA Experiment 20000173 PARAMETER Experiment Name: At_42deg_Heat_P Parameter: Organism Value: A. thaliana
  misc_feature: MA Experiment 20000173 PARAMETER Experiment Name: At_42deg_Heat_P Parameter: Plant Line Value: WS
  misc_feature: MA Experiment 20000173 PARAMETER Experiment Name: At_42deg_Heat_P Parameter: Temperature (deg C) Value: 42 vs. 22
  misc_feature: MA Experiment 20000173 PARAMETER Experiment Name: At_42deg_Heat_P Parameter: Timepoint (hr) Value: 6
  misc_feature: MA Experiment 20000173 PARAMETER Experiment Name: At_42deg_Heat_P Parameter: Tissue Value: Aerial
  misc_feature: MA Experiment ID: 20000179 Result: Up-regulated in Transcription
  misc_feature: MA Experiment 20000179 PARAMETER Experiment Name: At_Germinating_Seeds_P Parameter: Age (hr) Value: 6 vs. 0
  misc_feature: MA Experiment 20000179 PARAMETER Experiment Name: At_Germinating_Seeds_P Parameter: Tissue Value: Germinating Seeds
  misc_feature: MA Experiment ID: 20000180 Result: Up-regulated in Transcription
  misc_feature: MA Experiment 20000180 PARAMETER Experiment Name: At_Germinating_Seeds_P Parameter: Age (hr) Value: 24 vs. 0
  misc_feature: MA Experiment 20000180 PARAMETER Experiment Name: At_Germinating_Seeds_P Parameter: Tissue Value: Germinating Seeds
  misc_feature: MA Experiment ID: 20000182 Result: Down-regulated in Transcription
  misc_feature: MA Experiment 20000182 PARAMETER Experiment Name: At_2mM_SA_P Parameter: Age (day) Value: 14
  misc_feature: MA Experiment 20000182 PARAMETER Experiment Name: At_2mM_SA_P Parameter: Organism Value: A. thaliana
  misc_feature: MA Experiment 20000182 PARAMETER Experiment Name: At_2mM_SA_P Parameter: Plant Line Value: WS
  misc_feature: MA Experiment 20000182 PARAMETER Experiment Name: At_2mM_SA_P Parameter: Timepoint (hr) Value: 6
  misc_feature: MA Experiment 20000182 PARAMETER Experiment Name: At_2mM_SA_P Parameter: Tissue Value: Aerial
  misc_feature: MA Experiment 20000182 PARAMETER Experiment Name: At_2mM_SA_P Parameter: Treatment Value: 2mM SA vs. No Treatment
  misc_feature: MA Experiment ID: 20000438 Result: Up-regulated in Transcription
  misc_feature: MA Experiment 20000438 PARAMETER Experiment Name: At_Shoots__P Parameter: Age (day) Value: 14
  misc_feature: MA Experiment 20000438 PARAMETER Experiment Name: At_Shoots__P Parameter: Tissue Value: Shoots vs. Whole Plant
  misc_feature: MA Experiment ID: 20001247 Result: Down-regulated in Transcription
  misc_feature: MA Experiment 20001247 PARAMETER Experiment Name: At_Far-red-induction_P Parameter: Age (day) Value: 7
  misc_feature: MA Experiment 20001247 PARAMETER Experiment Name: At_Far-red-induction_P Parameter: Light Value: Far-red vs. White
  misc_feature: MA Experiment 20001247 PARAMETER Experiment Name: At_Far-red-induction_P Parameter: Organism Value: A. thaliana
  misc_feature: MA Experiment 20001247 PARAMETER Experiment Name: At_Far-red-induction_P Parameter: Plant Line Value: Columbia
  misc_feature: MA Experiment 20001247 PARAMETER Experiment Name: At_Far-red-induction_P Parameter: Timepoint (hr) Value: 1
  misc_feature: MA Experiment 20001247 PARAMETER Experiment Name: At_Far-red-induction_P Parameter: Tissue Value: Whole Plant
  misc_feature: MA Experiment ID: 20001450 Result: Down-regulated in Transcription
  misc_feature: MA Experiment 20001450 PARAMETER Experiment Name: At_Far-red-induction_P Parameter: Age (day) Value: 7
  misc_feature: MA Experiment 20001450 PARAMETER Experiment Name: At_Far-red-induction_P Parameter: Light Value: Far-red vs. White
  misc_feature: MA Experiment 20001450 PARAMETER Experiment Name: At_Far-red-induction_P Parameter: Organism Value: A. thaliana
  misc_feature: MA Experiment 20001450 PARAMETER Experiment Name: At_Far-red-induction_P Parameter: Plant Line Value: Columbia
  misc_feature: MA Experiment 20001450 PARAMETER Experiment Name: At_Far-red-induction_P Parameter: Timepoint (hr) Value: 8
  misc_feature: MA Experiment 20001450 PARAMETER Experiment Name: At_Far-red-induction_P Parameter: Tissue Value: Whole Plant
  misc_feature: MA Experiment ID: 20001555 Result: Up-regulated in Transcription
  misc_feature: MA Experiment 20001555 PARAMETER Experiment Name: At_Drought_Soil_Dry_P Parameter: Age (day) Value: 24
  misc_feature: MA Experiment 20001555 PARAMETER Experiment Name: At_Drought_Soil_Dry_P Parameter: Organism Value: A. thaliana
  misc_feature: MA Experiment 20001555 PARAMETER Experiment Name: At_Drought_Soil_Dry_P Parameter: Plant Line Value: WS
  misc_feature: MA Experiment 20001555 PARAMETER Experiment Name: At_Drought_Soil_Dry_P Parameter: Post Timepoint (hr) Value: None
  misc_feature: MA Experiment 20001555 PARAMETER Experiment Name: At_Drought_Soil_Dry_P Parameter: Post-Treatment Value: None
  misc_feature: MA Experiment 20001555 PARAMETER Experiment Name: At_Drought_Soil_Dry_P Parameter: Timepoint (day) Value: 10
  misc_feature: MA Experiment 20001555 PARAMETER Experiment Name: At_Drought_Soil_Dry_P Parameter: Treatment Value: Drought vs. No Drought
atcgatatctccaaagcctactctaaaaaataaccacaagaatcactgccaaaactgccatgggagaactcgacgaagcttttatccaagctccagaacacagacccaacactcacctcacaaactccggtgatttcattttctccgacgagatcccgaccatcgacctctcttctctcgaagatactcatcatgacaagactgcgatcgccaaggagattgcagaggcatgcaagagatggggattttttcaagtgatcaaccatggcttgccttcagctttaaggcatcgtgtagagaagacagctgctgagtttttcaatctaacgacggaggagaagaggaaagtgaaaagagacgaagtgaatcctatgggttatcacgacgaagaacacactaagaacgttagagattggaaggaaattttcgatttcttcttacaagattccacgatcgttccggcgtcaccggagccggaagatactgagctccgaaagctcacgaaccagtggcctcaaaacccttctcatttcagagaggtatgccaagaatatgcaagagaagttgagaagttagcttttaggctattggaacttgtctccattagtttgggtctacctggtgatcggctaaccggtttcttcaatgagcaaactagttttttgcggtttaaccattaccctccttgcccgaaccccgagctagcattaggtgttggacgtcacaaagatggaggagctttaaccgtcctggcccaagatagtgtaggtggattacaagtgagtcgtagatcggatggacaatggatccccgtgaaaccgatctcggatgctttgatcattaacatgggcaattgtattcaggtgtggacaaatgatgagtattggagtgctgaacatagagtggtcgtgaatacaagcaaagagagattctcaataccattcttcttcttcccatcacatgaagccaatattgagccattggaggagcttataagtgaggaaaacccgccttgttataaaaagtacaattggggaaagttctttgtttcaagaaacagaagtgatttcaagaaactcgaggttgagaatatccagattgatcacttcaaggcttagttaatcacattataattaaaccttatgttgatttctattcgttctttttatataagttagccaagttcatatttcccaaaatgcacgcgagattttacatgtttatgtttaaaataaacggtcatcagaatgttgngcc

SEQ ID NO: 23735 - protein, 352 aa, Arabidopsis thaliana
  peptide (1)..(352): Ceres Seq. ID no. 12324940
  misc_feature (198)..(299): Pfam Name: 2OG-Fe(II) oxygenase superfamily Pfam Description: 2OG-Fe(II) oxygenase superfamily
  misc_feature (6)..(345): Homolog of NCBI NO: 34907194 NR Description: putative ethylene-forming enzyme
  misc_feature (1)..(344): Homolog of NCBI NO: 15229694 NR Description: putative leucoanthocyanidin dioxygenase; protein
  misc_feature (1)..(345): Homolog of NCBI NO: 18402992 NR Description: expressed protein
  misc_feature (49)..(254): Homolog of NCBI NO: 18103924 NR Description: putative oxylase protein [Pinus pinaster]
  misc_feature (224)..(351): Homolog of NCBI NO: 40253917 NR Description: putative Isopenicillin N synthase and related
  misc_feature (4)..(159): Homolog of NCBI NO: 40253917 NR Description: putative Isopenicillin N synthase and related
  misc_feature (1)..(269): Homolog of NCBI NO: 30685157 NR Description: flavonol synthase family [Arabidopsis thaliana]
  misc_feature (1)..(351): Homolog of NCBI NO: 21593702 NR Description: unknown [Arabidopsis thaliana]
  misc_feature (1)..(351): Homolog of NCBI NO: 18402081 NR Description: expressed protein
  misc_feature (1)..(352): Homolog of NCBI NO: 18402079 NR Description: expressed protein
MGELDEAFIQAPEHRPNTHLTNSGDFIFSDEIPTIDLSSLEDTHHDKTAIAKEIAEACKRWGFFQVINHGLPSALRHRVEKTAAEFFNLTTEEKRKVKRDEVNPMGYHDEEHTKNVRDWKEIFDFFLQDSTIVPASPEPEDTELRKLTNQWPQNPSHFREVCQEYAREVEKLAFRLLELVSISLGLPGDRLTGFFNEQTSFLRFNHYPPCPNPELALGVGRHKDGGALTVLAQDSVGGLQVSRRSDGQWIPVKPISDALIINMGNCIQVWTNDEYWSAEHRVVVNTSKERFSIPFFFFPSHEANIEPLEELISEENPPCYKKYNWGKFFVSRNRSDFKKLEVENIQIDHFKA

SEQ ID NO: 23736 - protein, 248 aa, Arabidopsis thaliana
  peptide (1)..(248): Ceres Seq. ID no. 12324941
  misc_feature (94)..(195): Pfam Name: 2OG-Fe(II) oxygenase superfamily Pfam Description: 2OG-Fe(II) oxygenase superfamily
  misc_feature (1)..(241): Homolog of NCBI NO: 34907194 NR Description: putative ethylene-forming enzyme
  misc_feature (1)..(240): Homolog of NCBI NO: 15229694 NR Description: putative leucoanthocyanidin dioxygenase; protein
  misc_feature (1)..(241): Homolog of NCBI NO: 18402992 NR Description: expressed protein
  misc_feature (1)..(150): Homolog of NCBI NO: 18103924 NR Description: putative oxylase protein [Pinus pinaster]
  misc_feature (120)..(247): Homolog of NCBI NO: 40253917 NR Description: putative Isopenicillin N synthase and related
  misc_feature (1)..(55): Homolog of NCBI NO: 40253917 NR Description: putative Isopenicillin N synthase and related
  misc_feature (1)..(165): Homolog of NCBI NO: 30685157 NR Description: flavonol synthase family [Arabidopsis thaliana]
  misc_feature (1)..(247): Homolog of NCBI NO: 21593702 NR Description: unknown [Arabidopsis thaliana]
  misc_feature (1)..(247): Homolog of NCBI NO: 18402081 NR Description: expressed protein
  misc_feature (1)..(248): Homolog of NCBI NO: 18402079 NR Description: expressed protein
MGYHDEEHTKNVRDWKEIFDFFLQDSTIVPASPEPEDTELRKLTNQWPQNPSHFREVCQEYAREVEKLAFRLLELVSISLGLPGDRLTGFFNEQTSFLRFNHYPPCPNPELALGVGRHKDGGALTVLAQDSVGGLQVSRRSDGQWIPVKPISDALIINMGNCIQVWTNDEYWSAEHRVVVNTSKERFSIPFFFFPSHEANIEPLEELISEENPPCYKKYNWGKFFVSRNRSDFKKLEVENIQIDHFKA

SEQ ID NO: 23737 - DNA, 1607 bp, Arabidopsis thaliana
  misc_feature (1)..(1607): Ceres Seq. ID no. 12324865
  misc_feature: MA Experiment ID: 108461 Result: Up-regulated in Transcription
  misc_feature: MA Experiment 108461 PARAMETER Experiment Name: At_Germinating_Seeds_cDNA_P Parameter: Age (day) Value: 1 vs. 0
  misc_feature: MA Experiment 108461 PARAMETER Experiment Name: At_Germinating_Seeds_cDNA_P Parameter: Tissue Value: Germinating Seeds
  misc_feature: MA Experiment ID: 108462 Result: Up-regulated in Transcription
  misc_feature: MA Experiment 108462 PARAMETER Experiment Name: At_Germinating_Seeds_cDNA_P Parameter: Age (day) Value: 2 vs. 0
  misc_feature: MA Experiment 108462 PARAMETER Experiment Name: At_Germinating_Seeds_cDNA_P Parameter: Tissue Value: Germinating Seeds
  misc_feature: MA Experiment ID: 108463 Result: Up-regulated in Transcription
  misc_feature: MA Experiment 108463 PARAMETER Experiment Name: At_Germinating_Seeds_cDNA_P Parameter: Age (day) Value: 3 vs. 0
  misc_feature: MA Experiment 108463 PARAMETER Experiment Name: At_Germinating_Seeds_cDNA_P Parameter: Tissue Value: Germinating Seeds
  misc_feature: MA Experiment ID: 108573 Result: Up-regulated in Transcription
  misc_feature: MA Experiment 108573 PARAMETER Experiment Name: At_Drought_cDNA_P Parameter: Timepoint (hr) Value: 6
  misc_feature: MA Experiment 108573 PARAMETER Experiment Name: At_Drought_cDNA_P Parameter: Tissue Value: Aerial
  misc_feature: MA Experiment 108573 PARAMETER Experiment Name: At_Drought_cDNA_P Parameter: Treatment Value: Drought vs. No Drought
  misc_feature: MA Experiment ID: 108576 Result: Down-regulated in Transcription
  misc_feature: MA Experiment 108576 PARAMETER Experiment Name: At_42deg_Heat_cDNA_P Parameter: Temperature (deg C) Value: 42 vs. 22
  misc_feature: MA Experiment 108576 PARAMETER Experiment Name: At_42deg_Heat_cDNA_P Parameter: Timepoint (hr) Value: 1
  misc_feature: MA Experiment 108576 PARAMETER Experiment Name: At_42deg_Heat_cDNA_P Parameter: Tissue Value: Aerial
  misc_feature: MA Experiment ID: 108577 Result: Down-regulated in Transcription
  misc_feature: MA Experiment 108577 PARAMETER Experiment Name: At_42deg_Heat_cDNA_P Parameter: Temperature (deg C) Value: 42 vs. 22
  misc_feature: MA Experiment 108577 PARAMETER Experiment Name: At_42deg_Heat_cDNA_P Parameter: Timepoint (hr) Value: 6
  misc_feature: MA Experiment 108577 PARAMETER Experiment Name: At_42deg_Heat_cDNA_P Parameter: Tissue Value: Aerial
  misc_feature: MA Experiment ID: 20000224 Result: Down-regulated in Transcription
  misc_feature: MA Experiment ID: 20000286 Result: Up-regulated in Transcription
  misc_feature: MA Experiment 20000286 PARAMETER Experiment Name: At_Open_Flower_P Parameter: Age (day) Value: 21
  misc_feature: MA Experiment 20000286 PARAMETER Experiment Name: At_Open_Flower_P Parameter: Plant Line Value: WS
  misc_feature: MA Experiment 20000286 PARAMETER Experiment Name: At_Open_Flower_P Parameter: Tissue Value: Half Open vs. Whole Plant
  misc_feature: MA Experiment ID: 20000794 Result: Up-regulated in Transcription
  misc_feature: MA Experiment 20000794 PARAMETER Experiment Name: At_Petals_P Parameter: Age (day) Value: 23-25 days
  misc_feature: MA Experiment 20000794 PARAMETER Experiment Name: At_Petals_P Parameter: Plant Line Value: WS
  misc_feature: MA Experiment 20000794 PARAMETER Experiment Name: At_Petals_P Parameter: Tissue Value: Petals vs. Whole plant
  misc_feature: MA Experiment ID: 20001757 Result: Down-regulated in Transcription
  misc_feature: MA Experiment 20001757 PARAMETER Experiment Name: At_50mM_NH4NO3_L-to-H_P Parameter: Timepoint (hr) Value: 6
  misc_feature: MA Experiment 20001757 PARAMETER Experiment Name: At_50mM_NH4NO3_L-to-H_P Parameter: Tissue Value: Leaf
  misc_feature: MA Experiment 20001757 PARAMETER Experiment Name: At_50mM_NH4NO3_L-to-H_P Parameter: Treatment Value: 50mM NH4NO3 vs 100mM Mannitol
atttccaaacctccaaacaattaaagaaacggcaaaaatttatgctgaaatctttttttcttccttattctcctctttcgcttgatttcgccgtccgattatctctatcgccgataaatatccggcgtcactcagtagatcttgaagctgttgctttcttgctttgctcttcgcgcaagattctctttctctgttttcattgaggattcgaagttgatcgctatttgattcgattggttttgagttttcgatcctcgacggatggagattttgaagtgaatcggaggagcgaataagagaaagtgagagatggatgatagagaaggctcgttcgtagctgttaggcggatttctcagggtctcgaacgaggaagcgtttacaattcatcatctgctgaggctgtgcctggatcagcagcttggttaggccgaggtctttcttgtgtttgtgctcagagaagagatagtgacgcaaattctacgtttgatctaacacctgctcaggaggaatgcttgcagagtttgcagaaccgcattgacgtagcttatgatagcacaatacccttgcatcaggaagctctaagggagctgtggaaactttcctttcctgaagaagagcttcatggattaatatctgagcagtggaaagagatgggttggcagggcaaagatccgtcaacagattttaggggtggtggtttcatatctcttgaaaacttgctgtactttgccaggaactttcagaaatccttccaggaccttctgaggaaacaggttggggatcggtctgtgtgggaatacccctttgctgtcgctggtatcaacttaacattcatgctcatccaaatgcttgaccttgaagcagtgaaaccgcgaacaattgttggggcaacttttctgaaatttctttctgagaacgaatctgcatttgaccttctttattgcattgcattcaagctaatggatcagcaatggctttcaatgcgtgcctcatacatggagtttaacacggtgatgaaatcaacaaggagacagctggagagagagctgatgctggaagacataatgcatcttgaggacttaccctcctacgctcttctcaatcaatagcccttatgatgatattaaatagtaagaagagtttctaacctcaggataacacaaggttgctctactctctctctctcttcacttttcatcttcaacgctttcggttctacctcttcgttgaccttttcttgtgtttggtggttctaagaaacaacttcaacaccgagttgttacttgttatattaaaacaagaaaaagagtgtgagagagacggggagaggttgggataaatctcaatttggttgcaaggagtgtgtagctaaaatggaattgttttctaacaacgttcaggttttttagttactgtgtgggtgattgatcttattgtgtggggataataatcatttggtgatgtccacaagttcaaaagcagtctctgttaaagactctacacgaggttaaaacttcatttgtttgtgtattaaaaaaaagaagttactttgattgtttatagctgtgaaaattctgcgtgaataatagagacggccttcacaagc

SEQ ID NO: 23738 - protein, 266 aa, Arabidopsis thaliana
  peptide (1)..(266): Ceres Seq. ID no. 12324866
  misc_feature (85)..(246): Pfam Name: Protein of unknown function, DUF609 Pfam Description: Protein of unknown function, DUF609
  misc_feature (28)..(266): Homolog of NCBI NO: 15218859 NR Description: hypothetical protein; protein id: At1g03620.1
  misc_feature (34)..(264): Homolog of NCBI NO: 38344760 NR Description: OSJNBa0068L06.3 [Oryza sativa (japonica
  misc_feature (25)..(265): Homolog of NCBI NO: 18408759 NR Description: hypothetical protein; protein id: At1g67400.1
  misc_feature (1)..(266): Homolog of NCBI NO: 38345956 NR Description: OSJNBb0038F03.14 [Oryza sativa (japonica
  misc_feature (1)..(264): Homolog of NCBI NO: 14140119 NR Description: putative protein [Oryza sativa]
  misc_feature (1)..(266): Homolog of NCBI NO: 11288393 NR Description: hypothetical protein F27H5.50 - Arabidopsis
  misc_feature (1)..(266): Homolog of NCBI NO: 18411543 NR Description: putative protein
  misc_feature (1)..(266): Homolog of NCBI NO: 7485547 NR Description: hypothetical protein At2g44770 [imported] -
  misc_feature (1)..(266): Homolog of NCBI NO: 15810014 NR Description: At2g44770/F16B22.26 [Arabidopsis thaliana]
  misc_feature (1)..(266): Homolog of NCBI NO: 18406626 NR Description: expressed protein
MDDREGSFVAVRRISQGLERGSVYNSSSAEAVPGSAAWLGRGLSCVCAQRRDSDANSTFDLTPAQEECLQSLQNRIDVAYDSTIPLHQEALRELWKLSFPEEELHGLISEQWKEMGWQGKDPSTDFRGGGFISLENLLYFARNFQKSFQDLLRKQVGDRSVWEYPFAVAGINLTFMLIQMLDLEAVKPRTIVGATFLKFLSENESAFDLLYCIAFKLMDQQWLSMRASYMEFNTVMKSTRRQLERELMLEDIMHLEDLPSYALLNQ

SEQ ID NO: 23739 - protein, 152 aa, Arabidopsis thaliana
  peptide (1)..(152): Ceres Seq. ID no. 12324867
  misc_feature (1)..(132): Pfam Name: Protein of unknown function, DUF609 Pfam Description: Protein of unknown function, DUF609
  misc_feature (1)..(152): Homolog of NCBI NO: 18406626 NR Description: expressed protein
  misc_feature (1)..(152): Homolog of NCBI NO: 15218859 NR Description: hypothetical protein; protein id: At1g03620.1
  misc_feature (1)..(150): Homolog of NCBI NO: 38344760 NR Description: OSJNBa0068L06.3 [Oryza sativa (japonica
  misc_feature (1)..(151): Homolog of NCBI NO: 18408759 NR Description: hypothetical protein; protein id: At1g67400.1
  misc_feature (1)..(152): Homolog of NCBI NO: 38345956 NR Description: OSJNBb0038F03.14 [Oryza sativa (japonica
  misc_feature (1)..(150): Homolog of NCBI NO: 14140119 NR Description: putative protein [Oryza sativa]
  misc_feature (1)..(152): Homolog of NCBI NO: 11288393 NR Description: hypothetical protein F27H5.50 - Arabidopsis
  misc_feature (1)..(152): Homolog of NCBI NO: 18411543 NR Description: putative protein
  misc_feature (1)..(152): Homolog of NCBI NO: 7485547 NR Description: hypothetical protein At2g44770 [imported] -
  misc_feature (1)..(152): Homolog of NCBI NO: 15810014 NR Description: At2g44770/F16B22.26 [Arabidopsis thaliana]
MGWQGKDPSTDFRGGGFISLENLLYFARNFQKSFQDLLRKQVGDRSVWEYPFAVAGINLTFMLIQMLDLEAVKPRTIVGATFLKFLSENESAFDLLYCIAFKLMDQQWLSMRASYMEFNTVMKSTRRQLERELMLEDIMHLEDLPSYALLNQ

SEQ ID NO: 23740 - DNA, 1345 bp, Arabidopsis thaliana
  misc_feature (1)..(1345): Ceres Seq. ID no. 12348347
  misc_feature: MA Experiment ID: 108434 Result: Down-regulated in Transcription
  misc_feature: MA Experiment 108434 PARAMETER Experiment Name: At_Root_Tips_cDNA_P Parameter: Tissue Value: Root Tips
  misc_feature: MA Experiment ID: 108435 Result: Up-regulated in Transcription
  misc_feature: MA Experiment 108435 PARAMETER Experiment Name: At_stm_Mutants_cDNA_P Parameter: Plant Line Value: wt Landsburg vs stm
  misc_feature: MA Experiment 108435 PARAMETER Experiment Name: At_stm_Mutants_cDNA_P Parameter: Tissue Value: Shoot Apical Meristem Region
  misc_feature: MA Experiment ID: 108462 Result: Up-regulated in Transcription
  misc_feature: MA Experiment 108462 PARAMETER Experiment Name: At_Germinating_Seeds_cDNA_P Parameter: Age (day) Value: 2 vs. 0
  misc_feature: MA Experiment 108462 PARAMETER Experiment Name: At_Germinating_Seeds_cDNA_P Parameter: Tissue Value: Germinating Seeds
  misc_feature: MA Experiment ID: 108463 Result: Up-regulated in Transcription
  misc_feature: MA Experiment 108463 PARAMETER Experiment Name: At_Germinating_Seeds_cDNA_P Parameter: Age (day) Value: 3 vs. 0
  misc_feature: MA Experiment 108463 PARAMETER Experiment Name: At_Germinating_Seeds_cDNA_P Parameter: Tissue Value: Germinating Seeds
  misc_feature: MA Experiment ID: 108464 Result: Up-regulated in Transcription
  misc_feature: MA Experiment 108464 PARAMETER Experiment Name: At_Germinating_Seeds_cDNA_P Parameter: Age (day) Value: 4 vs. 0
  misc_feature: MA Experiment 108464 PARAMETER Experiment Name: At_Germinating_Seeds_cDNA_P Parameter: Tissue Value: Germinating Seeds
  misc_feature: MA Experiment ID: 108469 Result: Down-regulated in Transcription
  misc_feature: MA Experiment ID: 108488 Result: Up-regulated in Transcription
  misc_feature: MA Experiment ID: 108569 Result: Up-regulated in Transcription
  misc_feature: MA Experiment 108569 PARAMETER Experiment Name: At_0.001%_MeJA__cDNA_P Parameter: Timepoint (hr) Value: 6
  misc_feature: MA Experiment 108569 PARAMETER Experiment Name: At_0.001%_MeJA__cDNA_P Parameter: Tissue Value: Aerial
  misc_feature: MA Experiment 108569 PARAMETER Experiment Name: At_0.001%_MeJA__cDNA_P Parameter: Treatment Value: 0.001% MeJA vs. No Treatment
  misc_feature: MA Experiment ID: 108573 Result: Down-regulated in Transcription
  misc_feature: MA Experiment 108573 PARAMETER Experiment Name: At_Drought_cDNA_P Parameter: Timepoint (hr) Value: 6
  misc_feature: MA Experiment 108573 PARAMETER Experiment Name: At_Drought_cDNA_P Parameter: Tissue Value: Aerial
  misc_feature: MA Experiment 108573 PARAMETER Experiment Name: At_Drought_cDNA_P Parameter: Treatment Value: Drought vs. No Drought
  misc_feature: MA Experiment ID: 108576 Result: Down-regulated in Transcription
  misc_feature: MA Experiment 108576 PARAMETER Experiment Name: At_42deg_Heat_cDNA_P Parameter: Temperature (deg C) Value: 42 vs. 22
  misc_feature: MA Experiment 108576 PARAMETER Experiment Name: At_42deg_Heat_cDNA_P Parameter: Timepoint (hr) Value: 1
  misc_feature: MA Experiment 108576 PARAMETER Experiment Name: At_42deg_Heat_cDNA_P Parameter: Tissue Value: Aerial
  misc_feature: MA Experiment ID: 108577 Result: Down-regulated in Transcription
  misc_feature: MA Experiment 108577 PARAMETER Experiment Name: At_42deg_Heat_cDNA_P Parameter: Temperature (deg C) Value: 42 vs. 22
  misc_feature: MA Experiment 108577 PARAMETER Experiment Name: At_42deg_Heat_cDNA_P Parameter: Timepoint (hr) Value: 6
  misc_feature: MA Experiment 108577 PARAMETER Experiment Name: At_42deg_Heat_cDNA_P Parameter: Tissue Value: Aerial
  misc_feature: MA Experiment ID: 108579 Result: Up-regulated in Transcription
  misc_feature: MA Experiment 108579 PARAMETER Experiment Name: At_4deg_Cold_cDNA_P Parameter: Temperature (deg C) Value: 4 vs. 22
  misc_feature: MA Experiment 108579 PARAMETER Experiment Name: At_4deg_Cold_cDNA_P Parameter: Timepoint (hr) Value: 6
  misc_feature: MA Experiment 108579 PARAMETER Experiment Name: At_4deg_Cold_cDNA_P Parameter: Tissue Value: Aerial
  misc_feature: MA Experiment ID: 108585 Result: Down-regulated in Transcription
  misc_feature: MA Experiment 108585 PARAMETER Experiment Name: At_5mM_NaNP_cDNA_P Parameter: Timepoint (hr) Value: 6
  misc_feature: MA Experiment 108585 PARAMETER Experiment Name: At_5mM_NaNP_cDNA_P Parameter: Tissue Value: Aerial
  misc_feature: MA Experiment 108585 PARAMETER Experiment Name: At_5mM_NaNP_cDNA_P Parameter: Treatment Value: null
  misc_feature: MA Experiment ID: 108595 Result: Down-regulated in Transcription
  misc_feature: MA Experiment 108595 PARAMETER Experiment Name: At_Ler-pi_Ovule_cDNA_P Parameter: Plant Line Value: null
  misc_feature: MA Experiment ID: 108668 Result: Down-regulated in Transcription
  misc_feature: MA Experiment 108668 PARAMETER Experiment Name: At_2mM_SA_cDNA_P Parameter: Plant Line Value: WS
  misc_feature: MA Experiment 108668 PARAMETER Experiment Name: At_2mM_SA_cDNA_P Parameter: Timepoint (hr) Value: 6
  misc_feature: MA Experiment 108668 PARAMETER Experiment Name: At_2mM_SA_cDNA_P Parameter: Treatment Value: 2mM SA vs. No Treatment
  misc_feature: MA Experiment ID: 20000087 Result: Down-regulated in Transcription
  misc_feature: MA Experiment 20000087 PARAMETER Experiment Name: At_100uM_ABA_Mutants_cDNA_P Parameter: Plant Line Value: WS
  misc_feature: MA Experiment 20000087 PARAMETER Experiment Name: At_100uM_ABA_Mutants_cDNA_P Parameter: Timepoint (hr) Value: 6
  misc_feature: MA Experiment 20000087 PARAMETER Experiment Name: At_100uM_ABA_Mutants_cDNA_P Parameter: Tissue Value: Aerial
  misc_feature: MA Experiment 20000087 PARAMETER Experiment Name: At_100uM_ABA_Mutants_cDNA_P Parameter: Treatment Value: 100uM ABA vs. No Treatment
  misc_feature: MA Experiment ID: 20000090 Result: Down-regulated in Transcription
  misc_feature: MA Experiment ID: 20000111 Result: Down-regulated in Transcription
  misc_feature: MA Experiment 20000111 PARAMETER Experiment Name: At_42deg_Heat_cDNA_P Parameter: Temperature (deg C) Value: 42 vs. 22
  misc_feature: MA Experiment 20000111 PARAMETER Experiment Name: At_42deg_Heat_cDNA_P Parameter: Timepoint (hr) Value: 6
  misc_feature: MA Experiment 20000111 PARAMETER Experiment Name: At_42deg_Heat_cDNA_P Parameter: Tissue Value: Aerial
  misc_feature: MA Experiment ID: 20000112 Result: Down-regulated in Transcription
  misc_feature: MA Experiment 20000112 PARAMETER Experiment Name: At_42deg_Heat_cDNA_P Parameter: Temperature (deg C) Value: 42 vs. 22
  misc_feature: MA Experiment 20000112 PARAMETER Experiment Name: At_42deg_Heat_cDNA_P Parameter: Timepoint (hr) Value: 2
  misc_feature: MA Experiment 20000112 PARAMETER Experiment Name: At_42deg_Heat_cDNA_P Parameter: Tissue Value: Aerial
  misc_feature: MA Experiment ID: 20000113 Result: Down-regulated in Transcription
  misc_feature: MA Experiment 20000113 PARAMETER Experiment Name: At_42deg_Heat_cDNA_P Parameter: Temperature (deg C) Value: 42 vs. 22
  misc_feature: MA Experiment 20000113 PARAMETER Experiment Name: At_42deg_Heat_cDNA_P Parameter: Timepoint (hr) Value: 8
  misc_feature: MA Experiment 20000113 PARAMETER Experiment Name: At_42deg_Heat_cDNA_P Parameter: Tissue Value: Aerial
  misc_feature: MA Experiment ID: 20000224 Result: Up-regulated in Transcription
  misc_feature: MA Experiment ID: 20000328 Result: Down-regulated in Transcription
  misc_feature: MA Experiment 20000328 PARAMETER Experiment Name: At_42deg_Heat_Sub_P Parameter: Age (day) Value: 14
  misc_feature: MA Experiment 20000328 PARAMETER Experiment Name: At_42deg_Heat_Sub_P Parameter: Organism Value: A. thaliana
  misc_feature: MA Experiment 20000328 PARAMETER Experiment Name: At_42deg_Heat_Sub_P Parameter: Plant Line Value: WS
  misc_feature: MA Experiment 20000328 PARAMETER Experiment Name: At_42deg_Heat_Sub_P Parameter: Temperature (deg C) Value: 42 vs. 22
  misc_feature: MA Experiment 20000328 PARAMETER Experiment Name: At_42deg_Heat_Sub_P Parameter: Timepoint (hr) Value: 6
  misc_feature: MA Experiment 20000328 PARAMETER Experiment Name: At_42deg_Heat_Sub_P Parameter: Tissue Value: Aerial
  misc_feature: MA Experiment ID: 20000347 Result: Down-regulated in Transcription
  misc_feature: MA Experiment 20000347 PARAMETER Experiment Name: At_2mM_SA_Sub_P Parameter: Age (day) Value: 14
  misc_feature: MA Experiment 20000347 PARAMETER Experiment Name: At_2mM_SA_Sub_P Parameter: Organism Value: A. thaliana
  misc_feature: MA Experiment 20000347 PARAMETER Experiment Name: At_2mM_SA_Sub_P Parameter: Plant Line Value: WS
  misc_feature: MA Experiment 20000347 PARAMETER Experiment Name: At_2mM_SA_Sub_P Parameter: Timepoint (hr) Value: 6
  misc_feature: MA Experiment 20000347 PARAMETER Experiment Name: At_2mM_SA_Sub_P Parameter: Tissue Value: Aerial
  misc_feature: MA Experiment 20000347 PARAMETER Experiment Name: At_2mM_SA_Sub_P Parameter: Treatment Value: 2mM SA vs. No Treatment
  misc_feature: MA Experiment ID: 20000355 Result: Down-regulated in Transcription
  misc_feature: MA Experiment 20000355 PARAMETER Experiment Name: At_Siliques_Sub_P Parameter: Age (day) Value: 21
  misc_feature: MA Experiment 20000355 PARAMETER Experiment Name: At_Siliques_Sub_P Parameter: Organism Value: A. thaliana
  misc_feature: MA Experiment 20000355 PARAMETER Experiment Name: At_Siliques_Sub_P Parameter: Plant Line Value: WS
  misc_feature: MA Experiment 20000355 PARAMETER Experiment Name: At_Siliques_Sub_P Parameter: Tissue Value: Less Than 5mm Siliques vs. Whole Plant
  misc_feature: MA Experiment ID: 20001806 Result: Up-regulated in Transcription
  misc_feature: MA Experiment 20001806 PARAMETER Experiment Name: At_50mM_NH4NO3_L-to-H_Sub_P Parameter: Timepoint (hr) Value: 4
  misc_feature: MA Experiment 20001806 PARAMETER Experiment Name: At_50mM_NH4NO3_L-to-H_Sub_P Parameter: Tissue Value: Leaf
  misc_feature: MA Experiment 20001806 PARAMETER Experiment Name: At_50mM_NH4NO3_L-to-H_Sub_P Parameter: Treatment Value: 50mM NH4NO3 vs 100mM Mannitol
  misc_feature: MA Experiment ID: 20001807 Result: Up-regulated in Transcription
  misc_feature: MA Experiment 20001807 PARAMETER Experiment Name: At_50mM_NH4NO3_L-to-H_Sub_P Parameter: Timepoint (hr) Value: 6
  misc_feature: MA Experiment 20001807 PARAMETER Experiment Name: At_50mM_NH4NO3_L-to-H_Sub_P Parameter: Tissue Value: Leaf
  misc_feature: MA Experiment 20001807 PARAMETER Experiment Name: At_50mM_NH4NO3_L-to-H_Sub_P Parameter: Treatment Value: 50mM NH4NO3 vs 100mM Mannitol
aagaaaaaacaatgggatcaatggctcagaaatcggttttgatgttatgcggagagttcatggaagcctacgagactatagtacctctctacgtcctccaagcgtttggtgttagcgtccactgcgtttctcctggtcgcaaaactggcgacaagtgcgtcatggccgctcacgatctccttggcctcgagatatacaccgaactggtggttgaccatctaacactaaacgctaacttcgatggcgtcatccccgaccaatacgacgccatcatcattcccggtggacgtttcacggaacttttgagcgccgacgagaaatgcgtgagtcttgttgctagattcgccgaactcaagaagctcatcttcacgagctgccacagccagctgtttcttgcggcggcaggtctgctcaccggtggaatgaagtgcacggcgttcgaaagcatgaaaccgtttatcgagctctccggcggcgcatggtggcaacagcctggagtccagacccttttcgaaatcactgattgtgtcaaggacggcagtttcatgtccactatggggtggccaacgcttggccatagtctcaaagttttgttagaatcacttggctccaagatttctagctctaaagagaatcatcagacttctttgcttttcttgattggggattgtgttgaagattatagtatcaacgtaccatttaaagcgtttcaagctttgggatgtaaagtggatgcagtgacgccaaccaagaagagaggtgagaaatgcgctacaatcgtacacgaccttgaagacggacggcaacttcctactgagaagtttggtcacaacttctatgtgaccgttgcgtgggatgatgtctctgtggatgattacgactgcattgtggttcccggaggaagatctccggagctcttggtgatgaaccccaaggccgtcgaattggtcagaaagtttgttgagaaaggcaagtttgttgctgccattggaatgggaaattggctacttgccgccacaggcgcccttaagaagaagagatgtgcaagtagttatgggacaaaggtggctgtgaaggttgctggtggtgagatcgtggaatctgaacggtgcgtgaccgacgacaagctggtcacagccgcatcaacttccgatcttcctgcctttttgtatgcattgtcgactgcacttggtctctctgttgtattctaatgtcaagtggtgctttaacgtctaatgcctaaaaaaataaaaacatatctttgtatgtcgaaatataaggtcgtccctctaattatttatgtacaagcttggatttgcatatatatatgggaagaagagttgcc

SEQ ID NO: 23741 - protein, 402 aa, Arabidopsis thaliana
  peptide (1)..(402): Ceres Seq. ID no. 12348348
  misc_feature (216)..(400): Homolog of NCBI NO: 33595226 NR Description: conserved hypothetical protein [Bordetella
  misc_feature (216)..(400): Homolog of NCBI NO: 33591328 NR Description: conserved hypothetical protein [Bordetella
  misc_feature (7)..(206): Homolog of NCBI NO: 23502074 NR Description: ThiJ/PfpI family protein [Brucella suis 1330]
  misc_feature (6)..(206): Homolog of NCBI NO: 17987076 NR Description: PROTEASE I [Brucella melitensis]
  misc_feature (72)..(402): Homolog of NCBI NO: 21954064 NR Description: unknown protein [Arabidopsis thaliana]
  misc_feature (10)..(402): Homolog of NCBI NO: 15232958 NR Description: expressed protein; protein id: At3g02720.1
  misc_feature (7)..(402): Homolog of NCBI NO: 32488724 NR Description: OSJNBb0004A17.3 [Oryza sativa (japonica
  misc_feature (4)..(402): Homolog of NCBI NO: 18404881 NR Description: expressed protein
  misc_feature (4)..(402): Homolog of NCBI NO: 30687679 NR Description: (YLS5) proteaseI (pfpI)-like protein, complete
  misc_feature (4)..(402): Homolog of NCBI NO: 15232554 NR Description: putative protein
EKTMGSMAQKSVLMLCGEFMEAYETIVPLYVLQAFGVSVHCVSPGRKTGDKCVMAAHDLLGLEIYTELVVDHLTLNANFDGVIPDQYDAIIIPGGRFTELLSADEKCVSLVARFAELKKLIFTSCHSQLFLAAAGLLTGGMKCTAFESMKPFIELSGGAWWQQPGVQTLFEITDCVKDGSFMSTMGWPTLGHSLKVLLESLGSKISSSKENHQTSLLFLIGDCVEDYSINVPFKAFQALGCKVDAVTPTKKRGEKCATIVHDLEDGRQLPTEKFGHNFYVTVAWDDVSVDDYDCIVVPGGRSPELLVMNPKAVELVRKFVEKGKFVAAIGMGNWLLAATGALKKKRCASSYGTKVAVKVAGGEIVESERCVTDDKLVTAASTSDLPAFLYALSTALGLSVVF

SEQ ID NO: 23742 - protein, 399 aa, Arabidopsis thaliana
  peptide (1)..(399): Ceres Seq. ID no. 12348349
  misc_feature (213)..(397): Homolog of NCBI NO: 33595226 NR Description: conserved hypothetical protein [Bordetella
  misc_feature (213)..(397): Homolog of NCBI NO: 33591328 NR Description: conserved hypothetical protein [Bordetella
  misc_feature (4)..(203): Homolog of NCBI NO: 23502074 NR Description: ThiJ/PfpI family protein [Brucella suis 1330]
  misc_feature (3)..(203): Homolog of NCBI NO: 17987076 NR Description: PROTEASE I [Brucella melitensis]
  misc_feature (69)..(399): Homolog of NCBI NO: 21954064 NR Description: unknown protein [Arabidopsis thaliana]
  misc_feature (7)..(399): Homolog of NCBI NO: 15232958 NR Description: expressed protein; protein id: At3g02720.1
  misc_feature (4)..(399): Homolog of NCBI NO: 32488724 NR Description: OSJNBb0004A17.3 [Oryza sativa (japonica
  misc_feature (1)..(399): Homolog of NCBI NO: 18404881 NR Description: expressed protein
  misc_feature (1)..(399): Homolog of NCBI NO: 30687679 NR Description: (YLS5) proteaseI (pfpI)-like protein, complete
  misc_feature (1)..(399): Homolog of NCBI NO: 15232554 NR Description: putative protein
MGSMAQKSVLMLCGEFMEAYETIVPLYVLQAFGVSVHCVSPGRKTGDKCVMAAHDLLGLEIYTELVVDHLTLNANFDGVIPDQYDAIIIPGGRFTELLSADEKCVSLVARFAELKKLIFTSCHSQLFLAAAGLLTGGMKCTAFESMKPFIELSGGAWWQQPGVQTLFEITDCVKDGSFMSTMGWPTLGHSLKVLLESLGSKISSSKENHQTSLLFLIGDCVEDYSINVPFKAFQALGCKVDAVTPTKKRGEKCATIVHDLEDGRQLPTEKFGHNFYVTVAWDDVSVDDYDCIVVPGGRSPELLVMNPKAVELVRKFVEKGKFVAAIGMGNWLLAATGALKKKRCASSYGTKVAVKVAGGEIVESERCVTDDKLVTAASTSDLPAFLYALSTALGLSVVF

SEQ ID NO: 23743 - protein, 396 aa, Arabidopsis thaliana
  peptide (1)..(396): Ceres Seq. ID no. 12348350
  misc_feature (210)..(394): Homolog of NCBI NO: 33595226 NR Description: conserved hypothetical protein [Bordetella
  misc_feature (210)..(394): Homolog of NCBI NO: 33591328 NR Description: conserved hypothetical protein [Bordetella
  misc_feature (1)..(200): Homolog of NCBI NO: 23502074 NR Description: ThiJ/PfpI family protein [Brucella suis 1330]
  misc_feature (1)..(200): Homolog of NCBI NO: 17987076 NR Description: PROTEASE I [Brucella melitensis]
  misc_feature (66)..(396): Homolog of NCBI NO: 21954064 NR Description: unknown protein [Arabidopsis thaliana]
  misc_feature (4)..(396): Homolog of NCBI NO: 15232958 NR Description: expressed protein; protein id: At3g02720.1
  misc_feature (1)..(396): Homolog of NCBI NO: 32488724 NR Description: OSJNBb0004A17.3 [Oryza sativa (japonica
  misc_feature (1)..(396): Homolog of NCBI NO: 18404881 NR Description: expressed protein
  misc_feature (1)..(396): Homolog of NCBI NO: 30687679 NR Description: (YLS5) proteaseI (pfpI)-like protein, complete
  misc_feature (1)..(396): Homolog of NCBI NO: 15232554 NR Description: putative protein
MAQKSVLMLCGEFMEAYETIVPLYVLQAFGVSVHCVSPGRKTGDKCVMAAHDLLGLEIYTELVVDHLTLNANFDGVIPDQYDAIIIPGGRFTELLSADEKCVSLVARFAELKKLIFTSCHSQLFLAAAGLLTGGMKCTAFESMKPFIELSGGAWWQQPGVQTLFEITDCVKDGSFMSTMGWPTLGHSLKVLLESLGSKISSSKENHQTSLLFLIGDCVEDYSINVPFKAFQALGCKVDAVTPTKKRGEKCATIVHDLEDGRQLPTEKFGHNFYVTVAWDDVSVDDYDCIVVPGGRSPELLVMNPKAVELVRKFVEKGKFVAAIGMGNWLLAATGALKKKRCASSYGTKVAVKVAGGEIVESERCVTDDKLVTAASTSDLPAFLYALSTALGLSVVF

SEQ ID NO: 23744 - DNA, 779 bp, Arabidopsis thaliana
  misc_feature (1)..(779): Ceres Seq. ID no. 13497399
  misc_feature: MA Experiment ID: 108434 Result: Up-regulated in Transcription
  misc_feature: MA Experiment 108434 PARAMETER Experiment Name: At_Root_Tips_cDNA_P Parameter: Tissue Value: Root Tips
  misc_feature: MA Experiment ID: 108461 Result: Down-regulated in Transcription
  misc_feature: MA Experiment 108461 PARAMETER Experiment Name: At_Germinating_Seeds_cDNA_P Parameter: Age (day) Value: 1 vs. 0
  misc_feature: MA Experiment 108461 PARAMETER Experiment Name: At_Germinating_Seeds_cDNA_P Parameter: Tissue Value: Germinating Seeds
  misc_feature: MA Experiment ID: 108462 Result: Down-regulated in Transcription
  misc_feature: MA Experiment 108462 PARAMETER Experiment Name: At_Germinating_Seeds_cDNA_P Parameter: Age (day) Value: 2 vs. 0
  misc_feature: MA Experiment 108462 PARAMETER Experiment Name: At_Germinating_Seeds_cDNA_P Parameter: Tissue Value: Germinating Seeds
  misc_feature: MA Experiment ID: 108463 Result: Down-regulated in Transcription
  misc_feature: MA Experiment 108463 PARAMETER Experiment Name: At_Germinating_Seeds_cDNA_P Parameter: Age (day) Value: 3 vs. 0
  misc_feature: MA Experiment 108463 PARAMETER Experiment Name: At_Germinating_Seeds_cDNA_P Parameter: Tissue Value: Germinating Seeds
  misc_feature: MA Experiment ID: 108488 Result: Up-regulated in Transcription
  misc_feature: MA Experiment ID: 108573 Result: Down-regulated in Transcription
  misc_feature: MA Experiment 108573 PARAMETER Experiment Name: At_Drought_cDNA_P Parameter: Timepoint (hr) Value: 6
  misc_feature: MA Experiment 108573 PARAMETER Experiment Name: At_Drought_cDNA_P Parameter: Tissue Value: Aerial
  misc_feature: MA Experiment 108573 PARAMETER Experiment Name: At_Drought_cDNA_P Parameter: Treatment Value: Drought vs. No Drought
  misc_feature: MA Experiment ID: 20000224 Result: Up-regulated in Transcription
  misc_feature: MA Experiment ID: 20000227 Result: Up-regulated in Transcription
  misc_feature: MA Experiment 20000227 PARAMETER Experiment Name: At_Root-Tips-vs-Tops_P Parameter: Tissue Value: Root Tips vs. Root Tops
  misc_feature: MA Experiment ID: 20000794 Result: Down-regulated in Transcription
  misc_feature: MA Experiment 20000794 PARAMETER Experiment Name: At_Petals_P Parameter: Age (day) Value: 23-25 days
  misc_feature: MA Experiment 20000794 PARAMETER Experiment Name: At_Petals_P Parameter: Plant Line Value: WS
  misc_feature: MA Experiment 20000794 PARAMETER Experiment Name: At_Petals_P Parameter: Tissue Value: Petals vs. Whole plant
  misc_feature: MA Experiment ID: 20001560 Result: Up-regulated in Transcription
  misc_feature: MA Experiment 20001560 PARAMETER Experiment Name: At_Drought_Soil_Dry_P Parameter: Age (day) Value: 28
  misc_feature: MA Experiment 20001560 PARAMETER Experiment Name: At_Drought_Soil_Dry_P Parameter: Organism Value: A. thaliana
  misc_feature: MA Experiment 20001560 PARAMETER Experiment Name: At_Drought_Soil_Dry_P Parameter: Plant Line Value: WS
  misc_feature: MA Experiment 20001560 PARAMETER Experiment Name: At_Drought_Soil_Dry_P Parameter: Post Timepoint (hr) Value: None
  misc_feature: MA Experiment 20001560 PARAMETER Experiment Name: At_Drought_Soil_Dry_P Parameter: Post-Treatment Value: None
  misc_feature: MA Experiment 20001560 PARAMETER Experiment Name: At_Drought_Soil_Dry_P Parameter: Timepoint (day) Value: 14
  misc_feature: MA Experiment 20001560 PARAMETER Experiment Name: At_Drought_Soil_Dry_P Parameter: Treatment Value: Drought vs. No Drought
  misc_feature: MA Experiment ID: 20001757 Result: Up-regulated in Transcription
  misc_feature: MA Experiment 20001757 PARAMETER Experiment Name: At_50mM_NH4NO3_L-to-H_P Parameter: Timepoint (hr) Value: 6
  misc_feature: MA Experiment 20001757 PARAMETER Experiment Name: At_50mM_NH4NO3_L-to-H_P Parameter: Tissue Value: Leaf
  misc_feature: MA Experiment 20001757 PARAMETER Experiment Name: At_50mM_NH4NO3_L-to-H_P Parameter: Treatment Value: 50mM NH4NO3 vs 100mM Mannitol
aaaacctcacagccacacaaagaagagaagaaatggcttgcaccgtagatttccggtgccttgacgaaggattcggcggcaaaacctacaaacgcaaacgcgaatctcaagaacaagccgccgccgaagcaatcgccgatgaagcttccatggacatcgatggtgctcctcctgccgcgaaacgtagcgccgtcgcttcctctgaaaatccagacaaacctattgctctagctgtcgagagaccaacctacgacggtgtaatcgccgggaaagtctccggacggaactggaaacagccgcgaactcatagatcttcagggaggtttgtgaagaacaggaaaccagatctggaggagatgaagaggcaaagggagattaagaaagcgtataaggagagggtgaatgagctgaaggaagagattaggagtaataaggttgagaagaggaagaagaaggaagagagagagaagcggaagaaggagaatgttttgagaactggtactaagttgcagaagattacaaatcccaagactttgaagaaaatttctatgtctaagaagcagaggaagcagcttaagaaaattcctgacgagatgttgagtggtggtagcaagaagagtatcacgaattagtggttttttgttccttctctttaaaggcaagtgttttcagttttttgtatttcctcatgaggtttattcgatgttgtttagttaacaatctgcagctaagaactaaatgttatgaaagtttaatagtgagaaactgtgttttgcttc

SEQ ID NO: 23745 - protein, 209 aa, Arabidopsis thaliana
  peptide (1)..(209): Ceres Seq. ID no. 13497400
  misc_feature (11)..(209): Homolog of NCBI NO: 18402657 NR Description: expressed protein [Arabidopsis thaliana]
  misc_feature (11)..(209): Homolog of NCBI NO: 18402657 NR Description: expressed protein [Arabidopsis thaliana]
NLTATQRREEMACTVDFRCLDEGFGGKTYKRKRESQEQAAAEAIADEASMDIDGAPPAAKRSAVASSENPDKPIALAVERPTYDGVIAGKVSGRNWKQPRTHRSSGRFVKNRKPDLEEMKRQREIKKAYKERVNELKEEIRSNKVEKRKKKEEREKRKKENVLRTGTKLQKITNPKTLKKISMSKKQRKQLKKIPDEMLSGGSKKSITN

SEQ ID NO: 23746 - protein, 199 aa, Arabidopsis thaliana
  peptide (1)..(199): Ceres Seq. ID no. 13497401
  misc_feature (1)..(199): Homolog of NCBI NO: 18402657 NR Description: expressed protein [Arabidopsis thaliana]
  misc_feature (1)..(199): Homolog of NCBI NO: 18402657 NR Description: expressed protein [Arabidopsis thaliana]
MACTVDFRCLDEGFGGKTYKRKRESQEQAAAEAIADEASMDIDGAPPAAKRSAVASSENPDKPIALAVERPTYDGVIAGKVSGRNWKQPRTHRSSGRFVKNRKPDLEEMKRQREIKKAYKERVNELKEEIRSNKVEKRKKKEEREKRKKENVLRTGTKLQKITNPKTLKKISMSKKQRKQLKKIPDEMLSGGSKKSITN

SEQ ID NO: 23747 - protein, 160 aa, Arabidopsis thaliana
  peptide (1)..(160): Ceres Seq. ID no. 13497402
  misc_feature (1)..(160): Homolog of NCBI NO: 18402657 NR Description: expressed protein [Arabidopsis thaliana]
  misc_feature (1)..(160): Homolog of NCBI NO: 18402657 NR Description: expressed protein [Arabidopsis thaliana]
MDIDGAPPAAKRSAVASSENPDKPIALAVERPTYDGVIAGKVSGRNWKQPRTHRSSGRFVKNRKPDLEEMKRQREIKKAYKERVNELKEEIRSNKVEKRKKKEEREKRKKENVLRTGTKLQKITNPKTLKKISMSKKQRKQLKKIPDEMLSGGSKKSITN

SEQ ID NO: 23748 - DNA, 1294 bp, Arabidopsis thaliana
  misc_feature (1)..(1294): Ceres Seq. ID no. 12371856
  misc_feature: MA Experiment ID: 108433 Result: Down-regulated in Transcription
  misc_feature: MA Experiment 108433 PARAMETER Experiment Name: At_rhl_Mutant2_cDNA_P Parameter: Age (day) Value: 7
  misc_feature: MA Experiment 108433 PARAMETER Experiment Name: At_rhl_Mutant2_cDNA_P Parameter: Organism Value: A. thaliana
  misc_feature: MA Experiment 108433 PARAMETER Experiment Name: At_rhl_Mutant2_cDNA_P Parameter: Plant Line Value: rhl Mutant vs. wt landsburg
  misc_feature: MA Experiment 108433 PARAMETER Experiment Name: At_rhl_Mutant2_cDNA_P Parameter: Tissue Value: Roots
  misc_feature: MA Experiment ID: 108434 Result: Up-regulated in Transcription
  misc_feature: MA Experiment 108434 PARAMETER Experiment Name: At_Root_Tips_cDNA_P Parameter: Tissue Value: Root Tips
  misc_feature: MA Experiment ID: 108461 Result: Up-regulated in Transcription
  misc_feature: MA Experiment 108461 PARAMETER Experiment Name: At_Germinating_Seeds_cDNA_P Parameter: Age (day) Value: 1 vs. 0
  misc_feature: MA Experiment 108461 PARAMETER Experiment Name: At_Germinating_Seeds_cDNA_P Parameter: Tissue Value: Germinating Seeds
  misc_feature: MA Experiment ID: 108573 Result: Up-regulated in Transcription
  misc_feature: MA Experiment 108573 PARAMETER Experiment Name: At_Drought_cDNA_P Parameter: Timepoint (hr) Value: 6
  misc_feature: MA Experiment 108573 PARAMETER Experiment Name: At_Drought_cDNA_P Parameter: Tissue Value: Aerial
  misc_feature: MA Experiment 108573 PARAMETER Experiment Name: At_Drought_cDNA_P Parameter: Treatment Value: Drought vs. No Drought
  misc_feature: MA Experiment ID: 108577 Result: Down-regulated in Transcription
  misc_feature: MA Experiment 108577 PARAMETER Experiment Name: At_42deg_Heat_cDNA_P Parameter: Temperature (deg C) Value: 42 vs. 22
  misc_feature: MA Experiment 108577 PARAMETER Experiment Name: At_42deg_Heat_cDNA_P Parameter: Timepoint (hr) Value: 6
  misc_feature: MA Experiment 108577 PARAMETER Experiment Name: At_42deg_Heat_cDNA_P Parameter: Tissue Value: Aerial
  misc_feature: MA Experiment ID: 108595 Result: Down-regulated in Transcription
  misc_feature: MA Experiment 108595 PARAMETER Experiment Name: At_Ler-pi_Ovule_cDNA_P Parameter: Plant Line Value: null
  misc_feature: MA Experiment ID: 20000087 Result: Down-regulated in Transcription
  misc_feature: MA Experiment 20000087 PARAMETER Experiment Name: At_100uM_ABA_Mutants_cDNA_P Parameter: Plant Line Value: WS
  misc_feature: MA Experiment 20000087 PARAMETER Experiment Name: At_100uM_ABA_Mutants_cDNA_P Parameter: Timepoint (hr) Value: 6
  misc_feature: MA Experiment 20000087 PARAMETER Experiment Name: At_100uM_ABA_Mutants_cDNA_P Parameter: Tissue Value: Aerial
  misc_feature: MA Experiment 20000087 PARAMETER Experiment Name: At_100uM_ABA_Mutants_cDNA_P Parameter: Treatment Value: 100uM ABA vs. No Treatment
  misc_feature: MA Experiment ID: 20000113 Result: Down-regulated in Transcription
  misc_feature: MA Experiment 20000113 PARAMETER Experiment Name: At_42deg_Heat_cDNA_P Parameter: Temperature (deg C) Value: 42 vs. 22
  misc_feature: MA Experiment 20000113 PARAMETER Experiment Name: At_42deg_Heat_cDNA_P Parameter: Timepoint (hr) Value: 8
  misc_feature: MA Experiment 20000113 PARAMETER Experiment Name: At_42deg_Heat_cDNA_P Parameter: Tissue Value: Aerial
ggagaagagatcacagagatctgagagcttgaaacaatggagtaccggaaaatcaaagatgaggacgatcatgacgttgcttctgatatcgagagtgtgaaaggaaaatctcataccgttgcttcgagtaacattgcaatggctactctgggtgttggatccagtgaacggatcaactggaaacgaaagggtgtagtaacatgtgcactgacgattctgacgagttctcaagcgatacttatcgtgtggtcaaaacgagctgggaagtatgagtatagtgttacaaccgccaactttttggttgagactctgaaatgtgcgttatctcttcttgctttgacaaggatatggaaaaatgaaggtgttactgacgacaacaggttaagcacaacatttgatgaagttaaagtctttccaattcccgcagcattgtatctttttaagaatttgttacagtattatatttttgcatatgtagacgccccaggctatcagatattgaagaacttgaacatcataagtaccggtgtcttgtacagaattatactgaagagaaaattgagcgagattcagtgggcgggtttcattctattgtgttgcggatgcaccactgctcagttgaattcaaattctgatcgtgttcttcagacatctcttcctggctggactatggcaattgtcatggctcttttaagtggtttcgccggagtgtacacagaggccattattaaaaagcgaccttcaaggaatataaatgtacagaacttctggctatatgtctttgggatggctttcaatgctgttgctatagtgatccaagattttgatgccgttgcaaataagggattcttccatggttactccttcatcacattactcatgattcttaaccatgctctcagtggcattgctgtgtcgatggtgatgaaatatgcagacaatatcgtgaaggtttattcgacatcagtggcgatgcttctcaccgcagttgtctctgtattcctcttcaattttcatctttccttagccttcttcttgggttcaacggtcgtctctgtttcagtatatttacattccgcagggaagctacgatagtaaagatcttcacacttacatctaccaagaaaacaccattattctagtacagagataaagcttttgaacgattacgattttgtttttcgtgtaggtatattcacatttgtgcttctgtattgatttttttttccgtctcatgaaaccttctattctcatttgtacgataccaaaacttatcaagaatagttacaatttc

SEQ ID NO: 23749 - protein, 352 aa, Arabidopsis thaliana
  peptide (1)..(352): Ceres Seq. ID no. 12371857
  misc_feature (114)..(335): Pfam Name: Nucleotide-sugar transporter Pfam Description: Nucleotide-sugar transporter
  misc_feature (23)..(347): Homolog of NCBI NO: 32189326 NR Description: solute carrier family 35, member 2; UDP-galactose
  misc_feature (21)..(347): Homolog of NCBI NO: 17530971 NR Description: solute carrier family 35 (UDP-galactose
  misc_feature (21)..(347): Homolog of NCBI NO: 9087203 NR Description: UDP-galactose translocator (UDP-galactose
  misc_feature (26)..(348): Homolog of NCBI NO: 39579880 NR Description: Hypothetical protein CBG24372 [Caenorhabditis
  misc_feature (251)..(352): Homolog of NCBI NO: 7488414 NR Description: UDP-galactose transport protein homolog
  misc_feature (35)..(140): Homolog of NCBI NO: 7486015 NR Description: hypothetical protein F23E12.110 - Arabidopsis
  misc_feature (65)..(348): Homolog of NCBI NO: 10177360 NR Description: CMP-sialic acid transporter-like protein
  misc_feature (54)..(348): Homolog of NCBI NO: 18422134 NR Description: CMP-sialic acid transporter-like protein
  misc_feature (1)..(288): Homolog of NCBI NO: 30690310 NR Description: hypothetical protein [Arabidopsis thaliana]
  misc_feature (1)..(350): Homolog of NCBI NO: 34393556 NR Description: putative CMP-sialic acid transporter
MEYRKIKDEDDHDVASDIESVKGKSHTVASSNIAMATLGVGSSERINWKRKGVVTCALTILTSSQAILIVWSKRAGKYEYSVTTANFLVETLKCALSLLALTRIWKNEGVTDDNRLSTTFDEVKVFPIPAALYLFKNLLQYYIFAYVDAPGYQILKNLNIISTGVLYRIILKRKLSEIQWAGFILLCCGCTTAQLNSNSDRVLQTSLPGWTMAIVMALLSGFAGVYTEAIIKKRPSRNINVQNFWLYVFGMAFNAVAIVIQDFDAVANKGFFHGYSFITLLMILNHALSGIAVSMVMKYADNIVKVYSTSVAMLLTAVVSVFLFNFHLSLAFFLGSTVVSVSVYLHSAGKLR

SEQ ID NO: 23750 - protein, 318 aa, Arabidopsis thaliana
  peptide (1)..(318): Ceres Seq. ID no. 12371858
  misc_feature (80)..(301): Pfam Name: Nucleotide-sugar transporter Pfam Description: Nucleotide-sugar transporter
  misc_feature (1)..(313): Homolog of NCBI NO: 32189326 NR Description: solute carrier family 35, member 2; UDP-galactose
  misc_feature (1)..(313): Homolog of NCBI NO: 17530971 NR Description: solute carrier family 35 (UDP-galactose
  misc_feature (1)..(313): Homolog of NCBI NO: 9087203 NR Description: UDP-galactose translocator (UDP-galactose
  misc_feature (1)..(314): Homolog of NCBI NO: 39579880 NR Description: Hypothetical protein CBG24372 [Caenorhabditis
  misc_feature (217)..(318): Homolog of NCBI NO: 7488414 NR Description: UDP-galactose transport protein homolog
  misc_feature (1)..(106): Homolog of NCBI NO: 7486015 NR Description: hypothetical protein F23E12.110 - Arabidopsis
  misc_feature (31)..(314): Homolog of NCBI NO: 10177360 NR Description: CMP-sialic acid transporter-like protein
  misc_feature (20)..(314): Homolog of NCBI NO: 18422134 NR Description: CMP-sialic acid transporter-like protein
  misc_feature (1)..(254): Homolog of NCBI NO: 30690310 NR Description: hypothetical protein [Arabidopsis thaliana]
  misc_feature (1)..(316): Homolog of NCBI NO: 34393556 NR Description: putative CMP-sialic acid transporter
MATLGVGSSERINWKRKGVVTCALTILTSSQAILIVWSKRAGKYEYSVTTANFLVETLKCALSLLALTRIWKNEGVTDDNRLSTTFDEVKVFPIPAALYLFKNLLQYYIFAYVDAPGYQILKNLNIISTGVLYRIILKRKLSEIQWAGFILLCCGCTTAQLNSNSDRVLQTSLPGWTMAIVMALLSGFAGVYTEAIIKKRPSRNINVQNFWLYVFGMAFNAVAIVIQDFDAVANKGFFHGYSFITLLMILNHALSGIAVSMVMKYADNIVKVYSTSVAMLLTAVVSVFLFNFHLSLAFFLGSTVVSVSVYLHSAGKLR

SEQ ID NO: 23751 - DNA, 1490 bp, Arabidopsis thaliana
  misc_feature (1)..(1490): Ceres Seq. ID no. 12321559
  misc_feature: MA Experiment ID: 108434 Result: Down-regulated in Transcription
  misc_feature: MA Experiment 108434 PARAMETER Experiment Name: At_Root_Tips_cDNA_P Parameter: Tissue Value: Root Tips
  misc_feature: MA Experiment ID: 108488 Result: Down-regulated in Transcription
  misc_feature: MA Experiment ID: 108573 Result: Up-regulated in Transcription
  misc_feature: MA Experiment 108573 PARAMETER Experiment Name: At_Drought_cDNA_P Parameter: Timepoint (hr) Value: 6
  misc_feature: MA Experiment 108573 PARAMETER Experiment Name: At_Drought_cDNA_P Parameter: Tissue Value: Aerial
  misc_feature: MA Experiment 108573 PARAMETER Experiment Name: At_Drought_cDNA_P Parameter: Treatment Value: Drought vs. No Drought
  misc_feature: MA Experiment ID: 108585 Result: Up-regulated in Transcription
  misc_feature: MA Experiment 108585 PARAMETER Experiment Name: At_5mM_NaNP_cDNA_P Parameter: Timepoint (hr) Value: 6
  misc_feature: MA Experiment 108585 PARAMETER Experiment Name: At_5mM_NaNP_cDNA_P Parameter: Tissue Value: Aerial
  misc_feature: MA Experiment 108585 PARAMETER Experiment Name: At_5mM_NaNP_cDNA_P Parameter: Treatment Value: null
  misc_feature: MA Experiment ID: 20000182 Result: Up-regulated in Transcription
  misc_feature: MA Experiment 20000182 PARAMETER Experiment Name: At_2mM_SA_P Parameter: Age (day) Value: 14
  misc_feature: MA Experiment 20000182 PARAMETER Experiment Name: At_2mM_SA_P Parameter: Organism Value: A. thaliana
  misc_feature: MA Experiment 20000182 PARAMETER Experiment Name: At_2mM_SA_P Parameter: Plant Line Value: WS
  misc_feature: MA Experiment 20000182 PARAMETER Experiment Name: At_2mM_SA_P Parameter: Timepoint (hr) Value: 6
  misc_feature: MA Experiment 20000182 PARAMETER Experiment Name: At_2mM_SA_P Parameter: Tissue Value: Aerial
  misc_feature: MA Experiment 20000182 PARAMETER Experiment Name: At_2mM_SA_P Parameter: Treatment Value: 2mM SA vs. No Treatment
  misc_feature: MA Experiment ID: 20000265 Result: Down-regulated in Transcription
  misc_feature: MA Experiment 20000265 PARAMETER Experiment Name: At_Open_Flower_P Parameter: Age (day) Value: 21
  misc_feature: MA Experiment 20000265 PARAMETER Experiment Name: At_Open_Flower_P Parameter: Plant Line Value: WS
  misc_feature: MA Experiment 20000265 PARAMETER Experiment Name: At_Open_Flower_P Parameter: Tissue Value: Closed Flower vs. Whole Plant
  misc_feature: MA Experiment ID: 20001558 Result: Down-regulated in Transcription
  misc_feature: MA Experiment 20001558 PARAMETER Experiment Name: At_Drought_Soil_Dry_P Parameter: Age (day) Value: 27
  misc_feature: MA Experiment 20001558 PARAMETER Experiment Name: At_Drought_Soil_Dry_P Parameter: Organism Value: A. thaliana
  misc_feature: MA Experiment 20001558 PARAMETER Experiment Name: At_Drought_Soil_Dry_P Parameter: Plant Line Value: WS
  misc_feature: MA Experiment 20001558 PARAMETER Experiment Name: At_Drought_Soil_Dry_P Parameter: Post Timepoint (hr) Value: 6
  misc_feature: MA Experiment 20001558 PARAMETER Experiment Name: At_Drought_Soil_Dry_P Parameter: Post-Treatment Value: Re-Water vs. No Drought
  misc_feature: MA Experiment 20001558 PARAMETER Experiment Name: At_Drought_Soil_Dry_P Parameter: Timepoint (day) Value: 13
  misc_feature: MA Experiment 20001558 PARAMETER Experiment Name: At_Drought_Soil_Dry_P Parameter: Treatment Value: Drought vs. No Drought
  misc_feature: MA Experiment ID: 20001560 Result: Down-regulated in Transcription
  misc_feature: MA Experiment 20001560 PARAMETER Experiment Name: At_Drought_Soil_Dry_P Parameter: Age (day) Value: 28
  misc_feature: MA Experiment 20001560 PARAMETER Experiment Name: At_Drought_Soil_Dry_P Parameter: Organism Value: A. thaliana
  misc_feature: MA Experiment 20001560 PARAMETER Experiment Name: At_Drought_Soil_Dry_P Parameter: Plant Line Value: WS
  misc_feature: MA Experiment 20001560 PARAMETER Experiment Name: At_Drought_Soil_Dry_P Parameter: Post Timepoint (hr) Value: None
  misc_feature: MA Experiment 20001560 PARAMETER Experiment Name: At_Drought_Soil_Dry_P Parameter: Post-Treatment Value: None
  misc_feature: MA Experiment 20001560 PARAMETER Experiment Name: At_Drought_Soil_Dry_P Parameter: Timepoint (day) Value: 14
  misc_feature: MA Experiment 20001560 PARAMETER Experiment Name: At_Drought_Soil_Dry_P Parameter: Treatment Value: Drought vs. No Drought
gacacgatccatcctaagaaacttcaattttggggtttctcttcgtcttcttcttcttcttcttcttctagatcgagagggacatgggtcttaccagccgccgttgacgactacgacgaccattctcttcctcttcatcttctctccttctgcttttctctatttcctattctctccaaattcaccatttccttccaccactcagagatctccctttcttattagctatgtcttcttctaacacgccatcttctagcgccgccgctgccggatcgatagattcttccgccgcccggagaaattccaagagacccaagtattcgaaatttactcagcaggagcttcctgcttgcaaaccaattcttacgcctggttgggtgatttcaacgtttttgatcattagtgttatcttcattccccttggtgttatttctctctttgcttctcaggatgttgttgagatcgttgatcggtatgatagtgcatgcatacctctatctgatagggctaacaaggttgcatacattcaaggaactggaaataaatcttgtacccggacgctaattgtgcctaagcgtatgaagcagcctatctacgtatattaccagcttgagaacttctaccagaatcaccgcaggtatgtgaaaagccgaagtgattcgcaattgagaagtgtgaaagatgagaatcaaatagacgcatgcaagcctgaggatgattttggtgggcagccaattgtgccatgtggtctaattgcttggagtctctttaatgacacatacgttctatcaagaaataaccagggtttaacggtaaacaagaaaggaattgcatggaagagcgacaaggaacacaagtttgggaaaaatgtgtttcccaagaactttcagaagggcaatctcactggtggtgccagtctagatccaaataaaccattgagtgatcaagaggatctgatcgtgtggatgaggactgctgcgttgccaacatttagaaaattatacgggaagatagagagtgacttggagaagggtgagaacatacaagtgactctgcagaacaactacaacacatacagtttcagtgggaagaagaagcttgttctgtcaacaacaagttggcttggtggaaagaacgacttcctcggcattgcttacctcaccgttgggggaatctgtttcgtcttggcacttgcatttaccgtcatgtatcttgtgaaacccaggcgactcggtgatcctacctacttgtcgtggaacagaattcctggaggtcgttaaacagatgactgcatcatctgcgtatataaatctacttatctctggttgtaatttgatccaaaattgaaagtgatgatctttttttttttaatatagatgtgaaatgtatgtatgatgttacagttggaatatgctcattacatagaatgattgatgcttcctatcatgctcattaccttttctctttttctcccaaaaagcagtccctcg

SEQ ID NO: 23752 - protein, 350 aa, Arabidopsis thaliana
  peptide (1)..(350): Ceres Seq. ID no. 12321560
  misc_feature (69)..(339): Pfam Name: LEM3 (ligand-effect modulator 3) family / CDC50 family Pfam Description: LEM3 (ligand-effect modulator 3) family / CDC50
  misc_feature (18)..(333): Homolog of NCBI NO: 9757735 NR Description: gb|AAD25612.1~gene_id:MCL19.21~similar to unknown
  misc_feature (18)..(345): Homolog of NCBI NO: 21554054 NR Description: unknown [Arabidopsis thaliana]
  misc_feature (18)..(345): Homolog of NCBI NO: 18422638 NR Description: membrane protein common family
  misc_feature (46)..(349): Homolog of NCBI NO: 15219220 NR Description: membrane protein common family; protein id:
  misc_feature (34)..(349): Homolog of NCBI NO: 25347301 NR Description: T8K14.13 [imported] - Arabidopsis thaliana
  misc_feature (32)..(76): Homolog of NCBI NO: 25347303 NR Description: protein F3O9.16 [imported] - Arabidopsis thaliana
  misc_feature (76)..(349): Homolog of NCBI NO: 25347303 NR Description: protein F3O9.16 [imported] - Arabidopsis thaliana
  misc_feature (3)..(349): Homolog of NCBI NO: 18412377 NR Description: membrane protein common family
  misc_feature (3)..(350): Homolog of NCBI NO: 18404877 NR Description: membrane protein common family
  misc_feature (1)..(350): Homolog of NCBI NO: 18399730 NR Description: membrane protein common family
MSSSNTPSSSAAAAGSIDSSAARRNSKRPKYSKFTQQELPACKPILTPGWVISTFLIISVIFIPLGVISLFASQDVVEIVDRYDSACIPLSDRANKVAYIQGTGNKSCTRTLIVPKRMKQPIYVYYQLENFYQNHRRYVKSRSDSQLRSVKDENQIDACKPEDDFGGQPIVPCGLIAWSLFNDTYVLSRNNQGLTVNKKGIAWKSDKEHKFGKNVFPKNFQKGNLTGGASLDPNKPLSDQEDLIVWMRTAALPTFRKLYGKIESDLEKGENIQVTLQNNYNTYSFSGKKKLVLSTTSWLGGKNDFLGIAYLTVGGICFVLALAFTVMYLVKPRRLGDPTYLSWNRIPGGR

SEQ ID NO: 23753 - protein, 233 aa, Arabidopsis thaliana
  peptide (1)..(233): Ceres Seq. ID no. 12321561
  misc_feature (1)..(222): Pfam Name: LEM3 (ligand-effect modulator 3) family / CDC50 family Pfam Description: LEM3 (ligand-effect modulator 3) family / CDC50
  misc_feature (1)..(232): Homolog of NCBI NO: 25347301 NR Description: T8K14.13 [imported] - Arabidopsis thaliana
  misc_feature (1)..(232): Homolog of NCBI NO: 25347303 NR Description: protein F3O9.16 [imported] - Arabidopsis thaliana
  misc_feature (1)..(232): Homolog of NCBI NO: 18412377 NR Description: membrane protein common family
  misc_feature (1)..(232): Homolog of NCBI NO: 15219220 NR Description: membrane protein common family; protein id:
  misc_feature (1)..(216): Homolog of NCBI NO: 9757735 NR Description: gb|AAD25612.1~gene_id:MCL19.21~similar to unknown
  misc_feature (1)..(228): Homolog of NCBI NO: 21554054 NR Description: unknown [Arabidopsis thaliana]
  misc_feature (1)..(225): Homolog of NCBI NO: 19570056 NR Description: similar to membrane protein common family
  misc_feature (1)..(228): Homolog of NCBI NO: 18422638 NR Description: membrane protein common family
  misc_feature (1)..(233): Homolog of NCBI NO: 18404877 NR Description: membrane protein common family
  misc_feature (1)..(233): Homolog of NCBI NO: 18399730 NR Description: membrane protein common family
MKQPIYVYYQLENFYQNHRRYVKSRSDSQLRSVKDENQIDACKPEDDFGGQPIVPCGLIAWSLFNDTYVLSRNNQGLTVNKKGIAWKSDKEHKFGKNVFPKNFQKGNLTGGASLDPNKPLSDQEDLIVWMRTAALPTFRKLYGKIESDLEKGENIQVTLQNNYNTYSFSGKKKLVLSTTSWLGGKNDFLGIAYLTVGGICFVLALAFTVMYLVKPRRLGDPTYLSWNRIPGGR

SEQ ID NO: 23754 - DNA, 1423 bp, Arabidopsis thaliana
  misc_feature (1)..(1423): Ceres Seq. ID no. 12396036
  misc_feature: MA Experiment ID: 108435 Result: Down-regulated in Transcription
  misc_feature: MA Experiment 108435 PARAMETER Experiment Name: At_stm_Mutants_cDNA_P Parameter: Plant Line Value: wt Landsburg vs stm
  misc_feature: MA Experiment 108435 PARAMETER Experiment Name: At_stm_Mutants_cDNA_P Parameter: Tissue Value: Shoot Apical Meristem Region
  misc_feature: MA Experiment ID: 108461 Result: Up-regulated in Transcription
  misc_feature: MA Experiment 108461 PARAMETER Experiment Name: At_Germinating_Seeds_cDNA_P Parameter: Age (day) Value: 1 vs. 0
  misc_feature: MA Experiment 108461 PARAMETER Experiment Name: At_Germinating_Seeds_cDNA_P Parameter: Tissue Value: Germinating Seeds
  misc_feature: MA Experiment ID: 108462 Result: Up-regulated in Transcription
  misc_feature: MA Experiment 108462 PARAMETER Experiment Name: At_Germinating_Seeds_cDNA_P Parameter: Age (day) Value: 2 vs. 0
  misc_feature: MA Experiment 108462 PARAMETER Experiment Name: At_Germinating_Seeds_cDNA_P Parameter: Tissue Value: Germinating Seeds
  misc_feature: MA Experiment ID: 108463 Result: Up-regulated in Transcription
  misc_feature: MA Experiment 108463 PARAMETER Experiment Name: At_Germinating_Seeds_cDNA_P Parameter: Age (day) Value: 3 vs. 0
  misc_feature: MA Experiment 108463 PARAMETER Experiment Name: At_Germinating_Seeds_cDNA_P Parameter: Tissue Value: Germinating Seeds
  misc_feature: MA Experiment ID: 108464 Result: Up-regulated in Transcription
  misc_feature: MA Experiment 108464 PARAMETER Experiment Name: At_Germinating_Seeds_cDNA_P Parameter: Age (day) Value: 4 vs. 0
  misc_feature: MA Experiment 108464 PARAMETER Experiment Name: At_Germinating_Seeds_cDNA_P Parameter: Tissue Value: Germinating Seeds
  misc_feature: MA Experiment ID: 108488 Result: Up-regulated in Transcription
  misc_feature: MA Experiment ID: 108577 Result: Up-regulated in Transcription
  misc_feature: MA Experiment 108577 PARAMETER Experiment Name: At_42deg_Heat_cDNA_P Parameter: Temperature (deg C) Value: 42 vs. 22
  misc_feature: MA Experiment 108577 PARAMETER Experiment Name: At_42deg_Heat_cDNA_P Parameter: Timepoint (hr) Value: 6
  misc_feature: MA Experiment 108577 PARAMETER Experiment Name: At_42deg_Heat_cDNA_P Parameter: Tissue Value: Aerial
  misc_feature: MA Experiment ID: 108595 Result: Down-regulated in Transcription
  misc_feature: MA Experiment 108595 PARAMETER Experiment Name: At_Ler-pi_Ovule_cDNA_P Parameter: Plant Line Value: null
  misc_feature: MA Experiment ID: 20000069 Result: Down-regulated in Transcription
  misc_feature: MA Experiment 20000069 PARAMETER Experiment Name: At_100uM_ABA_Mutants_cDNA_P Parameter: Plant Line Value: CS23
  misc_feature: MA Experiment 20000069 PARAMETER Experiment Name: At_100uM_ABA_Mutants_cDNA_P Parameter: Timepoint (hr) Value: 6
  misc_feature: MA Experiment 20000069 PARAMETER Experiment Name: At_100uM_ABA_Mutants_cDNA_P Parameter: Tissue Value: Aerial
  misc_feature: MA Experiment 20000069 PARAMETER Experiment Name: At_100uM_ABA_Mutants_cDNA_P Parameter: Treatment Value: 100uM ABA vs. No Treatment
  misc_feature: MA Experiment ID: 20000070 Result: Down-regulated in Transcription
  misc_feature: MA Experiment 20000070 PARAMETER Experiment Name: At_100uM_ABA_Mutants_cDNA_P Parameter: Plant Line Value: CS24
  misc_feature: MA Experiment 20000070 PARAMETER Experiment Name: At_100uM_ABA_Mutants_cDNA_P Parameter: Timepoint (hr) Value: 6
  misc_feature: MA Experiment 20000070 PARAMETER Experiment Name: At_100uM_ABA_Mutants_cDNA_P Parameter: Tissue Value: Aerial
  misc_feature: MA Experiment 20000070 PARAMETER Experiment Name: At_100uM_ABA_Mutants_cDNA_P Parameter: Treatment Value: 100uM ABA vs. No Treatment
  misc_feature: MA Experiment ID: 20000071 Result: Down-regulated in Transcription
  misc_feature: MA Experiment 20000071 PARAMETER Experiment Name: At_100uM_ABA_Mutants_cDNA_P Parameter: Plant Line Value: CS8104
  misc_feature: MA Experiment 20000071 PARAMETER Experiment Name: At_100uM_ABA_Mutants_cDNA_P Parameter: Timepoint (hr) Value: 6
  misc_feature: MA Experiment 20000071 PARAMETER Experiment Name: At_100uM_ABA_Mutants_cDNA_P Parameter: Tissue Value: Aerial
  misc_feature: MA Experiment 20000071 PARAMETER Experiment Name: At_100uM_ABA_Mutants_cDNA_P Parameter: Treatment Value: 100uM ABA vs. No Treatment
  misc_feature: MA Experiment ID: 20000072 Result: Down-regulated in Transcription
  misc_feature: MA Experiment 20000072 PARAMETER Experiment Name: At_100uM_ABA_Mutants_cDNA_P Parameter: Plant Line Value: CS8105
  misc_feature: MA Experiment 20000072 PARAMETER Experiment Name: At_100uM_ABA_Mutants_cDNA_P Parameter: Timepoint (hr) Value: 6
  misc_feature: MA Experiment 20000072 PARAMETER Experiment Name: At_100uM_ABA_Mutants_cDNA_P Parameter: Tissue Value: Aerial
  misc_feature: MA Experiment 20000072 PARAMETER Experiment Name: At_100uM_ABA_Mutants_cDNA_P Parameter: Treatment Value: 100uM ABA vs. No Treatment
  misc_feature: MA Experiment ID: 20000086 Result: Down-regulated in Transcription
  misc_feature: MA Experiment 20000086 PARAMETER Experiment Name: At_100uM_ABA_Mutants_cDNA_P Parameter: Plant Line Value: CS22
  misc_feature: MA Experiment 20000086 PARAMETER Experiment Name: At_100uM_ABA_Mutants_cDNA_P Parameter: Timepoint (hr) Value: 6
  misc_feature: MA Experiment 20000086 PARAMETER Experiment Name: At_100uM_ABA_Mutants_cDNA_P Parameter: Tissue Value: Aerial
  misc_feature: MA Experiment 20000086 PARAMETER Experiment Name: At_100uM_ABA_Mutants_cDNA_P Parameter: Treatment Value: 100uM ABA vs. No Treatment
  misc_feature: MA Experiment ID: 20000087 Result: Down-regulated in Transcription
  misc_feature: MA Experiment 20000087 PARAMETER Experiment Name: At_100uM_ABA_Mutants_cDNA_P Parameter: Plant Line Value: WS
  misc_feature: MA Experiment 20000087 PARAMETER Experiment Name: At_100uM_ABA_Mutants_cDNA_P Parameter: Timepoint (hr) Value: 6
  misc_feature: MA Experiment 20000087 PARAMETER Experiment Name: At_100uM_ABA_Mutants_cDNA_P Parameter: Tissue Value: Aerial
  misc_feature: MA Experiment 20000087 PARAMETER Experiment Name: At_100uM_ABA_Mutants_cDNA_P Parameter: Treatment Value: 100uM ABA vs. No Treatment
  misc_feature: MA Experiment ID: 20000088 Result: Down-regulated in Transcription
  misc_feature: MA Experiment 20000088 PARAMETER Experiment Name: At_100uM_ABA_Mutants_cDNA_P Parameter: Plant Line Value: Landsberg
  misc_feature: MA Experiment 20000088 PARAMETER Experiment Name: At_100uM_ABA_Mutants_cDNA_P Parameter: Timepoint (hr) Value: 6
  misc_feature: MA Experiment 20000088 PARAMETER Experiment Name: At_100uM_ABA_Mutants_cDNA_P Parameter: Tissue Value: Aerial
  misc_feature: MA Experiment 20000088 PARAMETER Experiment Name: At_100uM_ABA_Mutants_cDNA_P Parameter: Treatment Value: 100uM ABA vs. No Treatment
  misc_feature: MA Experiment ID: 20000089 Result: Down-regulated in Transcription
  misc_feature: MA Experiment ID: 20000090 Result: Down-regulated in Transcription
  misc_feature: MA Experiment ID: 20000117 Result: Down-regulated in Transcription
  misc_feature: MA Experiment 20000117 PARAMETER Experiment Name: At_100uM_ABA_Mutants_cDNA_P Parameter: Plant Line Value: Columbia
  misc_feature: MA Experiment 20000117 PARAMETER Experiment Name: At_100uM_ABA_Mutants_cDNA_P Parameter: Timepoint (hr) Value: 6
  misc_feature: MA Experiment 20000117 PARAMETER Experiment Name: At_100uM_ABA_Mutants_cDNA_P Parameter: Tissue Value: Aerial
  misc_feature: MA Experiment 20000117 PARAMETER Experiment Name: At_100uM_ABA_Mutants_cDNA_P Parameter: Treatment Value: 100uM ABA vs. No Treatment
  misc_feature: MA Experiment ID: 20000173 Result: Up-regulated in Transcription
  misc_feature: MA Experiment 20000173 PARAMETER Experiment Name: At_42deg_Heat_P Parameter: Age (day) Value: 14
  misc_feature: MA Experiment 20000173 PARAMETER Experiment Name: At_42deg_Heat_P Parameter: Organism Value: A. thaliana
  misc_feature: MA Experiment 20000173 PARAMETER Experiment Name: At_42deg_Heat_P Parameter: Plant Line Value: WS
  misc_feature: MA Experiment 20000173 PARAMETER Experiment Name: At_42deg_Heat_P Parameter: Temperature (deg C) Value: 42 vs. 22
  misc_feature: MA Experiment 20000173 PARAMETER Experiment Name: At_42deg_Heat_P Parameter: Timepoint (hr) Value: 6
  misc_feature: MA Experiment 20000173 PARAMETER Experiment Name: At_42deg_Heat_P Parameter: Tissue Value: Aerial
  misc_feature: MA Experiment ID: 20000179 Result: Up-regulated in Transcription
  misc_feature: MA Experiment 20000179 PARAMETER Experiment Name: At_Germinating_Seeds_P Parameter: Age (hr) Value: 6 vs. 0
  misc_feature: MA Experiment 20000179 PARAMETER Experiment Name: At_Germinating_Seeds_P Parameter: Tissue Value: Germinating Seeds
  misc_feature: MA Experiment ID: 20000180 Result: Up-regulated in Transcription
  misc_feature: MA Experiment 20000180 PARAMETER Experiment Name: At_Germinating_Seeds_P Parameter: Age (hr) Value: 24 vs. 0
  misc_feature: MA Experiment 20000180 PARAMETER Experiment Name: At_Germinating_Seeds_P Parameter: Tissue Value: Germinating Seeds
  misc_feature: MA Experiment ID: 20000184 Result: Up-regulated in Transcription
  misc_feature: MA Experiment 20000184 PARAMETER Experiment Name: At_Shoots__P Parameter: Age (day) Value: 7
  misc_feature: MA Experiment 20000184 PARAMETER Experiment Name: At_Shoots__P Parameter: Tissue Value: Shoots vs. Whole Plant
  misc_feature: MA Experiment ID: 20000185 Result: Down-regulated in Transcription
  misc_feature: MA Experiment 20000185 PARAMETER Experiment Name: At_Roots__P Parameter: Age (day) Value: 7 vs. 21
  misc_feature: MA Experiment 20000185 PARAMETER Experiment Name: At_Roots__P Parameter: Organism Value: A. thaliana
  misc_feature: MA Experiment 20000185 PARAMETER Experiment Name: At_Roots__P Parameter: Tissue Value: Roots vs. Whole Plant
  misc_feature: MA Experiment ID: 20000214 Result: Up-regulated in Transcription
  misc_feature: MA Experiment 20000214 PARAMETER Experiment Name: At_4deg_Cold_P Parameter: Timepoint (hr) Value: 6
  misc_feature: MA Experiment ID: 20000437 Result: Down-regulated in Transcription
  misc_feature: MA Experiment 20000437 PARAMETER Experiment Name: At_Drought_P Parameter: Age (day) Value: 8
  misc_feature: MA Experiment 20000437 PARAMETER Experiment Name: At_Drought_P Parameter: Organism Value: A. thaliana
  misc_feature: MA Experiment 20000437 PARAMETER Experiment Name: At_Drought_P Parameter: Plant Line Value: WS
  misc_feature: MA Experiment 20000437 PARAMETER Experiment Name: At_Drought_P Parameter: Timepoint (hr) Value: 24
  misc_feature: MA Experiment 20000437 PARAMETER Experiment Name: At_Drought_P Parameter: Tissue Value: Whole Plant
  misc_feature: MA Experiment 20000437 PARAMETER Experiment Name: At_Drought_P Parameter: Treatment Value: Drought vs. No Drought
  misc_feature: MA Experiment ID: 20000438 Result: Up-regulated in Transcription
  misc_feature: MA Experiment 20000438 PARAMETER Experiment Name: At_Shoots__P Parameter: Age (day) Value: 14
  misc_feature: MA Experiment 20000438 PARAMETER Experiment Name: At_Shoots__P Parameter: Tissue Value: Shoots vs. Whole Plant
  misc_feature: MA Experiment ID: 20000439 Result: Down-regulated in Transcription
  misc_feature: MA Experiment 20000439 PARAMETER Experiment Name: At_Roots__P Parameter: Age (day) Value: 14 vs. 21
  misc_feature: MA Experiment 20000439 PARAMETER Experiment Name: At_Roots__P Parameter: Organism Value: A. thaliana
  misc_feature: MA Experiment 20000439 PARAMETER Experiment Name: At_Roots__P Parameter: Tissue Value: Roots vs. Whole Plant
  misc_feature: MA Experiment ID: 20000794 Result: Down-regulated in Transcription
  misc_feature: MA Experiment 20000794 PARAMETER Experiment Name: At_Petals_P Parameter: Age (day) Value: 23-25 days
  misc_feature: MA Experiment 20000794 PARAMETER Experiment Name: At_Petals_P Parameter: Plant Line Value: WS
  misc_feature: MA Experiment 20000794 PARAMETER Experiment Name: At_Petals_P Parameter: Tissue Value: Petals vs. Whole plant
  misc_feature: MA Experiment ID: 20001247 Result: Up-regulated in Transcription
  misc_feature: MA Experiment 20001247 PARAMETER Experiment Name: At_Far-red-induction_P Parameter: Age (day) Value: 7
  misc_feature: MA Experiment 20001247 PARAMETER Experiment Name: At_Far-red-induction_P Parameter: Light Value: Far-red vs. White
  misc_feature: MA Experiment 20001247 PARAMETER Experiment Name: At_Far-red-induction_P Parameter: Organism Value: A. thaliana
  misc_feature: MA Experiment 20001247 PARAMETER Experiment Name: At_Far-red-induction_P Parameter: Plant Line Value: Columbia
  misc_feature: MA Experiment 20001247 PARAMETER Experiment Name: At_Far-red-induction_P Parameter: Timepoint (hr) Value: 1
  misc_feature: MA Experiment 20001247 PARAMETER Experiment Name: At_Far-red-induction_P Parameter: Tissue Value: Whole Plant
  misc_feature: MA Experiment ID: 20001248 Result: Down-regulated in Transcription
  misc_feature: MA Experiment 20001248 PARAMETER Experiment Name: At_Far-red-induction_P Parameter: Age (day) Value: 7
  misc_feature: MA Experiment 20001248 PARAMETER Experiment Name: At_Far-red-induction_P Parameter: Light Value: Far-red vs. White
  misc_feature: MA Experiment 20001248 PARAMETER Experiment Name: At_Far-red-induction_P Parameter: Organism Value: A. thaliana
  misc_feature: MA Experiment 20001248 PARAMETER Experiment Name: At_Far-red-induction_P Parameter: Plant Line Value: Columbia
  misc_feature: MA Experiment 20001248 PARAMETER Experiment Name: At_Far-red-induction_P Parameter: Timepoint (hr) Value: 4
  misc_feature: MA Experiment 20001248 PARAMETER Experiment Name: At_Far-red-induction_P Parameter: Tissue Value: Whole Plant
  misc_feature: MA Experiment ID: 20001450 Result: Down-regulated in Transcription
  misc_feature: MA Experiment 20001450 PARAMETER Experiment Name: At_Far-red-induction_P Parameter: Age (day) Value: 7
  misc_feature: MA Experiment 20001450 PARAMETER Experiment Name: At_Far-red-induction_P Parameter: Light Value: Far-red vs. White
  misc_feature: MA Experiment 20001450 PARAMETER Experiment Name: At_Far-red-induction_P Parameter: Organism Value: A. thaliana
  misc_feature: MA Experiment 20001450 PARAMETER Experiment Name: At_Far-red-induction_P Parameter: Plant Line Value: Columbia
  misc_feature: MA Experiment 20001450 PARAMETER Experiment Name: At_Far-red-induction_P Parameter: Timepoint (hr) Value: 8
  misc_feature: MA Experiment 20001450 PARAMETER Experiment Name: At_Far-red-induction_P Parameter: Tissue Value: Whole Plant
  misc_feature: MA Experiment ID: 20001555 Result: Down-regulated in Transcription
  misc_feature: MA Experiment 20001555 PARAMETER Experiment Name: At_Drought_Soil_Dry_P Parameter: Age (day) Value: 24
  misc_feature: MA Experiment 20001555 PARAMETER Experiment Name: At_Drought_Soil_Dry_P Parameter: Organism Value: A. thaliana
  misc_feature: MA Experiment 20001555 PARAMETER Experiment Name: At_Drought_Soil_Dry_P Parameter: Plant Line Value: WS
  misc_feature: MA Experiment 20001555 PARAMETER Experiment Name: At_Drought_Soil_Dry_P Parameter: Post Timepoint (hr) Value: None
  misc_feature: MA Experiment 20001555 PARAMETER Experiment Name: At_Drought_Soil_Dry_P Parameter: Post-Treatment Value: None
  misc_feature: MA Experiment 20001555 PARAMETER Experiment Name: At_Drought_Soil_Dry_P Parameter: Timepoint (day) Value: 10
  misc_feature: MA Experiment 20001555 PARAMETER Experiment Name: At_Drought_Soil_Dry_P Parameter: Treatment Value: Drought vs. No Drought
  misc_feature: MA Experiment ID: 20001559 Result: Down-regulated in Transcription
  misc_feature: MA Experiment 20001559 PARAMETER Experiment Name: At_Drought_Soil_Dry_P Parameter: Age (day) Value: 28
  misc_feature: MA Experiment 20001559 PARAMETER Experiment Name: At_Drought_Soil_Dry_P Parameter: Organism Value: A. thaliana
  misc_feature: MA Experiment 20001559 PARAMETER Experiment Name: At_Drought_Soil_Dry_P Parameter: Plant Line Value: WS
  misc_feature: MA Experiment 20001559 PARAMETER Experiment Name: At_Drought_Soil_Dry_P Parameter: Post Timepoint (hr) Value: 29
  misc_feature: MA Experiment 20001559 PARAMETER Experiment Name: At_Drought_Soil_Dry_P Parameter: Post-Treatment Value: Re-Water vs. No Drought
  misc_feature: MA Experiment 20001559 PARAMETER Experiment Name: At_Drought_Soil_Dry_P Parameter: Timepoint (day) Value: 14
  misc_feature: MA Experiment 20001559 PARAMETER Experiment Name: At_Drought_Soil_Dry_P Parameter: Treatment Value: Drought vs. No Drought
  misc_feature: MA Experiment ID: 20001757 Result: Up-regulated in Transcription
  misc_feature: MA Experiment 20001757 PARAMETER Experiment Name: At_50mM_NH4NO3_L-to-H_P Parameter: Timepoint (hr) Value: 6
  misc_feature: MA Experiment 20001757 PARAMETER Experiment Name: At_50mM_NH4NO3_L-to-H_P Parameter: Tissue Value: Leaf
  misc_feature: MA Experiment 20001757 PARAMETER Experiment Name: At_50mM_NH4NO3_L-to-H_P Parameter: Treatment Value: 50mM NH4NO3 vs 100mM Mannitol
  misc_feature: MA Experiment ID: 20001904 Result: Down-regulated in Transcription
  misc_feature: MA Experiment 20001904 PARAMETER Experiment Name: At_Drought_Reproduction_P Parameter: Age (day) Value: 37
  misc_feature: MA Experiment 20001904 PARAMETER Experiment Name: At_Drought_Reproduction_P Parameter: Organism Value: A. thaliana
  misc_feature: MA Experiment 20001904 PARAMETER Experiment Name: At_Drought_Reproduction_P Parameter: Plant Line Value: WS
  misc_feature: MA Experiment 20001904 PARAMETER Experiment Name: At_Drought_Reproduction_P Parameter: Timepoint (day) Value: 7
  misc_feature: MA Experiment 20001904 PARAMETER Experiment Name: At_Drought_Reproduction_P Parameter: Tissue Value: Rosettes
  misc_feature: MA Experiment 20001904 PARAMETER Experiment Name: At_Drought_Reproduction_P Parameter: Treatment Value: Drought vs. No Drought
  misc_feature: MA Experiment ID: 20001906 Result: Down-regulated in Transcription
  misc_feature: MA Experiment 20001906 PARAMETER Experiment Name: At_Drought_Reproduction_P Parameter: Age (day) Value: 35
  misc_feature: MA Experiment 20001906 PARAMETER Experiment Name: At_Drought_Reproduction_P Parameter: Organism Value: A. thaliana
  misc_feature: MA Experiment 20001906 PARAMETER Experiment Name: At_Drought_Reproduction_P Parameter: Plant Line Value: WS
  misc_feature: MA Experiment 20001906 PARAMETER Experiment Name: At_Drought_Reproduction_P Parameter: Timepoint (day) Value: 5
  misc_feature: MA Experiment 20001906 PARAMETER Experiment Name: At_Drought_Reproduction_P Parameter: Tissue Value: Siliques
  misc_feature: MA Experiment 20001906 PARAMETER Experiment Name: At_Drought_Reproduction_P Parameter: Treatment Value: Drought vs. No Drought
  misc_feature: MA Experiment ID: 20001911 Result: Down-regulated in Transcription
  misc_feature: MA Experiment 20001911 PARAMETER Experiment Name: At_Drought_Reproduction_P Parameter: Age (day) Value: 40
  misc_feature: MA Experiment 20001911 PARAMETER Experiment Name: At_Drought_Reproduction_P Parameter: Organism Value: A. thaliana
  misc_feature: MA Experiment 20001911 PARAMETER Experiment Name: At_Drought_Reproduction_P Parameter: Plant Line Value: WS
  misc_feature: MA Experiment 20001911 PARAMETER Experiment Name: At_Drought_Reproduction_P Parameter: Timepoint (day) Value: 10
  misc_feature: MA Experiment 20001911 PARAMETER Experiment Name: At_Drought_Reproduction_P Parameter: Tissue Value: Flowers
  misc_feature: MA Experiment 20001911 PARAMETER Experiment Name: At_Drought_Reproduction_P Parameter: Treatment Value: Drought vs. No Drought
gacgaggtcccacgaaccaccatacacacttcaatttcaaataagagcttttcttcagttgttgctcagagacttaaccaatcaaccatggcgaagatgatgatgttgcaacagcatcagccttctttctctctccttacttcttctctgtctgacttcaatggcgctaagctccatttacaagtccagtacaagaggaaggttcatcagccaaaaggagcactctatgtttcagcgtcgagcgaaaagaagattctgataatgggtggtactcgattcattggtctgttcttgtccaggatccttgtcaaagagggacatcaggttacattgttcacaaggggtaaatctcctattgccaaacaattgcccggtgaatctgaccaagactttgctgatttctcttctaagattcttcacttgaaaggagacagaaaggactatgactttgtgaagtcaagtctttcagcagaaggcttcgatgttgtttatgatatcaacgggagggaggccgaagaagttgagcccatactagaagcactacccaaactagagcagtacatctactgttcttcagctggtgtttatctgaaatctgatatcttgccacattgtgaggaggatgcagttgatccgaagagcaggcacaaggggaagctggagactgagagcttactgcaatcaaaaggtgtaaactggacttctatacgtcctgtctacatctacggtccattgaattacaaccccgtcgaagaatggtttttccaccgtctaaaggcaggtcgcccaatcccggttccaaactctgggatacagatctcacaactcggtcacgttaaggacttggcaacagcctttctcaacgtgcttggtaacgagaaagccagcagagagatattcaacatctcgggggagaaatatgttacctttgatgggttagcaaaagcttgcgcaaaggccggtgggtttccggagccagagattgttcattacaacccgaaagagttcgactttgggaagaagaaggcattccctttccgtgatcagcatttctttgcatcggtggagaaagcaaagcatgtcctcggatggaaaccggagttcgacttagtggagggtctcactgactcatacaaccttgatttcggtcgcggaacattccggaaagaagcggatttcaccactgacgacatgattctgagcaagaaacttgttcttcaataatcgaaatcctaagagttgctcattcttggcttgtatgattctgatcacccggttctcttaaagttctgaactttattgtcatctcacgtatgttatggtccggattttgttcgacttttctctaaagaagtcaagctagggacgatgaagaaaccgagaaagtaagtacacgagaaagagacggtctggctcttgactt

SEQ ID NO: 23755 - protein, 407 aa, Arabidopsis thaliana
  peptide (1)..(407): Ceres Seq. ID no. 12396037
  misc_feature (85)..(377): Pfam Name: NAD dependent epimerase/dehydratase family Pfam Description: NAD dependent epimerase/dehydratase family
  misc_feature (84)..(401): Homolog of NCBI NO: 16330056 NR Description: hypothetical protein [Synechocystis sp. PCC 6803]
  misc_feature (84)..(400): Homolog of NCBI NO: 23128166 NR Description: hypothetical protein [Nostoc punctiforme]
  misc_feature (84)..(400): Homolog of NCBI NO: 23040971 NR Description: hypothetical protein [Trichodesmium erythraeum
  misc_feature (84)..(400): Homolog of NCBI NO: 17232323 NR Description: mRNA-binding protein [Nostoc sp. PCC 7120]
  misc_feature (76)..(403): Homolog of NCBI NO: 34398360 NR Description: 38 kDa ribosome-associated protein precursor
  misc_feature (34)..(407): Homolog of NCBI NO: 25456171 NR Description: probable RNA binding protein [imported] -
  misc_feature (30)..(407): Homolog of NCBI NO: 25454619 NR Description: hypothetical protein g5bf [imported] -
  misc_feature (30)..(407): Homolog of NCBI NO: 21593201 NR Description: putative RNA-binding protein [Arabidopsis
  misc_feature (30)..(407): Homolog of NCBI NO: 17064988 NR Description: g5bf protein [Arabidopsis thaliana]
  misc_feature (30)..(407): Homolog of NCBI NO: 15217485 NR Description: putative RNA-binding protein
DEVPRTTIHTSISNKSFSSVVAQRLNQSTMAKMMMLQQHQPSFSLLTSSLSDFNGAKLHLQVQYKRKVHQPKGALYVSASSEKKILIMGGTRFIGLFLSRILVKEGHQVTLFTRGKSPIAKQLPGESDQDFADFSSKILHLKGDRKDYDFVKSSLSAEGFDVVYDINGREAEEVEPILEALPKLEQYIYCSSAGVYLKSDILPHCEEDAVDPKSRHKGKLETESLLQSKGVNWTSIRPVYIYGPLNYNPVEEWFFHRLKAGRPIPVPNSGIQISQLGHVKDLATAFLNVLGNEKASREIFNISGEKYVTFDGLAKACAKAGGFPEPEIVHYNPKEFDFGKKKAFPFRDQHFFASVEKAKHVLGWKPEFDLVEGLTDSYNLDFGRGTFRKEADFTTDDMILSKKLVLQ

SEQ ID NO: 23756 - protein, 378 aa, Arabidopsis thaliana
  peptide (1)..(378): Ceres Seq. ID no. 12396038
  misc_feature (56)..(348): Pfam Name: NAD dependent epimerase/dehydratase family Pfam Description: NAD dependent epimerase/dehydratase family
  misc_feature (55)..(372): Homolog of NCBI NO: 16330056 NR Description: hypothetical protein [Synechocystis sp. PCC 6803]
  misc_feature (55)..(371): Homolog of NCBI NO: 23128166 NR Description: hypothetical protein [Nostoc punctiforme]
  misc_feature (55)..(371): Homolog of NCBI NO: 23040971 NR Description: hypothetical protein [Trichodesmium erythraeum
  misc_feature (55)..(371): Homolog of NCBI NO: 17232323 NR Description: mRNA-binding protein [Nostoc sp. PCC 7120]
  misc_feature (47)..(374): Homolog of NCBI NO: 34398360 NR Description: 38 kDa ribosome-associated protein precursor
  misc_feature (5)..(378): Homolog of NCBI NO: 25456171 NR Description: probable RNA binding protein [imported] -
  misc_feature (1)..(378): Homolog of NCBI NO: 25454619 NR Description: hypothetical protein g5bf [imported] -
  misc_feature (1)..(378): Homolog of NCBI NO: 21593201 NR Description: putative RNA-binding protein [Arabidopsis
  misc_feature (1)..(378): Homolog of NCBI NO: 17064988 NR Description: g5bf protein [Arabidopsis thaliana]
  misc_feature (1)..(378): Homolog of NCBI NO: 15217485 NR Description: putative RNA-binding protein
MAKMMMLQQHQPSFSLLTSSLSDFNGAKLHLQVQYKRKVHQPKGALYVSASSEKKILIMGGTRFIGLFLSRILVKEGHQVTLFTRGKSPIAKQLPGESDQDFADFSSKILHLKGDRKDYDFVKSSLSAEGFDVVYDINGREAEEVEPILEALPKLEQYIYCSSAGVYLKSDILPHCEEDAVDPKSRHKGKLETESLLQSKGVNWTSIRPVYIYGPLNYNPVEEWFFHRLKAGRPIPVPNSGIQISQLGHVKDLATAFLNVLGNEKASREIFNISGEKYVTFDGLAKACAKAGGFPEPEIVHYNPKEFDFGKKKAFPFRDQHFFASVEKAKHVLGWKPEFDLVEGLTDSYNLDFGRGTFRKEADFTTDDMILSKKLVLQ

SEQ ID NO: 23757 - protein, 375 aa, Arabidopsis thaliana
  peptide (1)..(375): Ceres Seq. ID no. 12396039
  misc_feature (53)..(345): Pfam Name: NAD dependent epimerase/dehydratase family Pfam Description: NAD dependent epimerase/dehydratase family
  misc_feature (52)..(369): Homolog of NCBI NO: 16330056 NR Description: hypothetical protein [Synechocystis sp. PCC 6803]
  misc_feature (52)..(368): Homolog of NCBI NO: 23128166 NR Description: hypothetical protein [Nostoc punctiforme]
  misc_feature (52)..(368): Homolog of NCBI NO: 23040971 NR Description: hypothetical protein [Trichodesmium erythraeum
  misc_feature (52)..(368): Homolog of NCBI NO: 17232323 NR Description: mRNA-binding protein [Nostoc sp. PCC 7120]
  misc_feature (44)..(371): Homolog of NCBI NO: 34398360 NR Description: 38 kDa ribosome-associated protein precursor
  misc_feature (2)..(375): Homolog of NCBI NO: 25456171 NR Description: probable RNA binding protein [imported] -
  misc_feature (1)..(375): Homolog of NCBI NO: 25454619 NR Description: hypothetical protein g5bf [imported] -
  misc_feature (1)..(375): Homolog of NCBI NO: 21593201 NR Description: putative RNA-binding protein [Arabidopsis
  misc_feature (1)..(375): Homolog of NCBI NO: 17064988 NR Description: g5bf protein [Arabidopsis thaliana]
  misc_feature (1)..(375): Homolog of NCBI NO: 15217485 NR Description: putative RNA-binding protein
MMMLQQHQPSFSLLTSSLSDFNGAKLHLQVQYKRKVHQPKGALYVSASSEKKILIMGGTRFIGLFLSRILVKEGHQVTLFTRGKSPIAKQLPGESDQDFADFSSKILHLKGDRKDYDFVKSSLSAEGFDVVYDINGREAEEVEPILEALPKLEQYIYCSSAGVYLKSDILPHCEEDAVDPKSRHKGKLETESLLQSKGVNWTSIRPVYIYGPLNYNPVEEWFFHRLKAGRPIPVPNSGIQISQLGHVKDLATAFLNVLGNEKASREIFNISGEKYVTFDGLAKACAKAGGFPEPEIVHYNPKEFDFGKKKAFPFRDQHFFASVEKAKHVLGWKPEFDLVEGLTDSYNLDFGRGTFRKEADFTTDDMILSKKLVLQ

SEQ ID NO: 23758 - DNA, 1325 bp, Arabidopsis thaliana
  misc_feature (1)..(1325): Ceres Seq. ID no. 12335697
  misc_feature: MA Experiment ID: 108434 Result: Up-regulated in Transcription
  misc_feature: MA Experiment 108434 PARAMETER Experiment Name: At_Root_Tips_cDNA_P Parameter: Tissue Value: Root Tips
  misc_feature: MA Experiment ID: 108462 Result: Up-regulated in Transcription
  misc_feature: MA Experiment 108462 PARAMETER Experiment Name: At_Germinating_Seeds_cDNA_P Parameter: Age (day) Value: 2 vs. 0
  misc_feature: MA Experiment 108462 PARAMETER Experiment Name: At_Germinating_Seeds_cDNA_P Parameter: Tissue Value: Germinating Seeds
  misc_feature: MA Experiment ID: 108463 Result: Up-regulated in Transcription
  misc_feature: MA Experiment 108463 PARAMETER Experiment Name: At_Germinating_Seeds_cDNA_P Parameter: Age (day) Value: 3 vs. 0
  misc_feature: MA Experiment 108463 PARAMETER Experiment Name: At_Germinating_Seeds_cDNA_P Parameter: Tissue Value: Germinating Seeds
  misc_feature: MA Experiment ID: 108464 Result: Up-regulated in Transcription
  misc_feature: MA Experiment 108464 PARAMETER Experiment Name: At_Germinating_Seeds_cDNA_P Parameter: Age (day) Value: 4 vs. 0
  misc_feature: MA Experiment 108464 PARAMETER Experiment Name: At_Germinating_Seeds_cDNA_P Parameter: Tissue Value: Germinating Seeds
  misc_feature: MA Experiment ID: 108501 Result: Down-regulated in Transcription
  misc_feature: MA Experiment 108501 PARAMETER Experiment Name: At_ap2_floral_buds_cDNA_P Parameter: Plant Line Value: ap2 (Ler.)
  misc_feature: MA Experiment 108501 PARAMETER Experiment Name: At_ap2_floral_buds_cDNA_P Parameter: Tissue Value: Closed Flower
  misc_feature: MA Experiment ID: 108561 Result: Up-regulated in Transcription
  misc_feature: MA Experiment 108561 PARAMETER Experiment Name: At_100uM_ABA_cDNA_P Parameter: Timepoint (hr) Value: 6
  misc_feature: MA Experiment 108561 PARAMETER Experiment Name: At_100uM_ABA_cDNA_P Parameter: Tissue Value: Aerial
  misc_feature: MA Experiment 108561 PARAMETER Experiment Name: At_100uM_ABA_cDNA_P Parameter: Treatment Value: 100uM ABA vs. No Treatment
  misc_feature: MA Experiment ID: 108573 Result: Up-regulated in Transcription
  misc_feature: MA Experiment 108573 PARAMETER Experiment Name: At_Drought_cDNA_P Parameter: Timepoint (hr) Value: 6
  misc_feature: MA Experiment 108573 PARAMETER Experiment Name: At_Drought_cDNA_P Parameter: Tissue Value: Aerial
  misc_feature: MA Experiment 108573 PARAMETER Experiment Name: At_Drought_cDNA_P Parameter: Treatment Value: Drought vs. No Drought
  misc_feature: MA Experiment ID: 108574 Result: Down-regulated in Transcription
  misc_feature: MA Experiment 108574 PARAMETER Experiment Name: At_Wounding__cDNA_P Parameter: Timepoint (hr) Value: 1
  misc_feature: MA Experiment 108574 PARAMETER Experiment Name: At_Wounding__cDNA_P Parameter: Tissue Value: Aerial
  misc_feature: MA Experiment 108574 PARAMETER Experiment Name: At_Wounding__cDNA_P Parameter: Treatment Value: Wounding vs. No Wounding
  misc_feature: MA Experiment ID: 108579 Result: Down-regulated in Transcription
  misc_feature: MA Experiment 108579 PARAMETER Experiment Name: At_4deg_Cold_cDNA_P Parameter: Temperature (deg C) Value: 4 vs. 22
  misc_feature: MA Experiment 108579 PARAMETER Experiment Name: At_4deg_Cold_cDNA_P Parameter: Timepoint (hr) Value: 6
  misc_feature: MA Experiment 108579 PARAMETER Experiment Name: At_4deg_Cold_cDNA_P Parameter: Tissue Value: Aerial
  misc_feature: MA Experiment ID: 20000069 Result: Up-regulated in Transcription
  misc_feature: MA Experiment 20000069 PARAMETER Experiment Name: At_100uM_ABA_Mutants_cDNA_P Parameter: Plant Line Value: CS23
  misc_feature: MA Experiment 20000069 PARAMETER Experiment Name: At_100uM_ABA_Mutants_cDNA_P Parameter: Timepoint (hr) Value: 6
  misc_feature: MA Experiment 20000069 PARAMETER Experiment Name: At_100uM_ABA_Mutants_cDNA_P Parameter: Tissue Value: Aerial
  misc_feature: MA Experiment 20000069 PARAMETER Experiment Name: At_100uM_ABA_Mutants_cDNA_P Parameter: Treatment Value: 100uM ABA vs. No Treatment
  misc_feature: MA Experiment ID: 20000071 Result: Up-regulated in Transcription
  misc_feature: MA Experiment 20000071 PARAMETER Experiment Name: At_100uM_ABA_Mutants_cDNA_P Parameter: Plant Line Value: CS8104
  misc_feature: MA Experiment 20000071 PARAMETER Experiment Name: At_100uM_ABA_Mutants_cDNA_P Parameter: Timepoint (hr) Value: 6
  misc_feature: MA Experiment 20000071 PARAMETER Experiment Name: At_100uM_ABA_Mutants_cDNA_P Parameter: Tissue Value: Aerial
  misc_feature: MA Experiment 20000071 PARAMETER Experiment Name: At_100uM_ABA_Mutants_cDNA_P Parameter: Treatment Value: 100uM ABA vs. No Treatment
  misc_feature: MA Experiment ID: 20000086 Result: Up-regulated in Transcription
  misc_feature: MA Experiment 20000086 PARAMETER Experiment Name: At_100uM_ABA_Mutants_cDNA_P Parameter: Plant Line Value: CS22
  misc_feature: MA Experiment 20000086 PARAMETER Experiment Name: At_100uM_ABA_Mutants_cDNA_P Parameter: Timepoint (hr) Value: 6
  misc_feature: MA Experiment 20000086 PARAMETER Experiment Name: At_100uM_ABA_Mutants_cDNA_P Parameter: Tissue Value: Aerial
  misc_feature: MA Experiment 20000086 PARAMETER Experiment Name: At_100uM_ABA_Mutants_cDNA_P Parameter: Treatment Value: 100uM ABA vs. No Treatment
  misc_feature: MA Experiment ID: 20000111 Result: Down-regulated in Transcription
  misc_feature: MA Experiment 20000111 PARAMETER Experiment Name: At_42deg_Heat_cDNA_P Parameter: Temperature (deg C) Value: 42 vs. 22
  misc_feature: MA Experiment 20000111 PARAMETER Experiment Name: At_42deg_Heat_cDNA_P Parameter: Timepoint (hr) Value: 6
  misc_feature: MA Experiment 20000111 PARAMETER Experiment Name: At_42deg_Heat_cDNA_P Parameter: Tissue Value: Aerial
  misc_feature: MA Experiment ID: 20000117 Result: Up-regulated in Transcription
  misc_feature: MA Experiment 20000117 PARAMETER Experiment Name: At_100uM_ABA_Mutants_cDNA_P Parameter: Plant Line Value: Columbia
  misc_feature: MA Experiment 20000117 PARAMETER Experiment Name: At_100uM_ABA_Mutants_cDNA_P Parameter: Timepoint (hr) Value: 6
  misc_feature: MA Experiment 20000117 PARAMETER Experiment Name: At_100uM_ABA_Mutants_cDNA_P Parameter: Tissue Value: Aerial
  misc_feature: MA Experiment 20000117 PARAMETER Experiment Name: At_100uM_ABA_Mutants_cDNA_P Parameter: Treatment Value: 100uM ABA vs. No Treatment
  misc_feature: MA Experiment ID: 20000185 Result: Down-regulated in Transcription
  misc_feature: MA Experiment 20000185 PARAMETER Experiment Name: At_Roots__P Parameter: Age (day) Value: 7 vs. 21
  misc_feature: MA Experiment 20000185 PARAMETER Experiment Name: At_Roots__P Parameter: Organism Value: A. thaliana
  misc_feature: MA Experiment 20000185 PARAMETER Experiment Name: At_Roots__P Parameter: Tissue Value: Roots vs. Whole Plant
  misc_feature: MA Experiment ID: 20000213 Result: Down-regulated in Transcription
  misc_feature: MA Experiment 20000213 PARAMETER Experiment Name: At_4deg_Cold_P Parameter: Timepoint (hr) Value: 2
  misc_feature: MA Experiment ID: 20000224 Result: Down-regulated in Transcription
  misc_feature: MA Experiment ID: 20000234 Result: Down-regulated in Transcription
  misc_feature: MA Experiment 20000234 PARAMETER Experiment Name: At_Siliques_P Parameter: Age (day) Value: 21
  misc_feature: MA Experiment 20000234 PARAMETER Experiment Name: At_Siliques_P Parameter: Organism Value: A. thaliana
  misc_feature: MA Experiment 20000234 PARAMETER Experiment Name: At_Siliques_P Parameter: Plant Line Value: WS
  misc_feature: MA Experiment 20000234 PARAMETER Experiment Name: At_Siliques_P Parameter: Tissue Value: Less Than 5mm Siliques vs. Whole Plant
  misc_feature: MA Experiment ID: 20000438 Result: Down-regulated in Transcription
  misc_feature: MA Experiment 20000438 PARAMETER Experiment Name: At_Shoots__P Parameter: Age (day) Value: 14
  misc_feature: MA Experiment 20000438 PARAMETER Experiment Name: At_Shoots__P Parameter: Tissue Value: Shoots vs. Whole Plant
  misc_feature: MA Experiment ID: 20000439 Result: Down-regulated in Transcription
  misc_feature: MA Experiment 20000439 PARAMETER Experiment Name: At_Roots__P Parameter: Age (day) Value: 14 vs. 21
  misc_feature: MA Experiment 20000439 PARAMETER Experiment Name: At_Roots__P Parameter: Organism Value: A. thaliana
  misc_feature: MA Experiment 20000439 PARAMETER Experiment Name: At_Roots__P Parameter: Tissue Value: Roots vs. Whole Plant
  misc_feature: MA Experiment ID: 20000441 Result: Up-regulated in Transcription
  misc_feature: MA Experiment 20000441 PARAMETER Experiment Name: At_1uM_BR-BRZ__P Parameter: Tissue Value: Shoot Apices
  misc_feature: MA Experiment 20000441 PARAMETER Experiment Name: At_1uM_BR-BRZ__P Parameter: Treatment Value: 1uM BR vs. No Treatment
  misc_feature: MA Experiment ID: 20000573 Result: Up-regulated in Transcription
  misc_feature: MA Experiment 20000573 PARAMETER Experiment Name: At_100uM_ABA_Mutants__P Parameter: Organism Value: A. thaliana
  misc_feature: MA Experiment 20000573 PARAMETER Experiment Name: At_100uM_ABA_Mutants__P Parameter: Plant Line Value: CS22 vs. Ler wt
  misc_feature: MA Experiment 20000573 PARAMETER Experiment Name: At_100uM_ABA_Mutants__P Parameter: Timepoint (hr) Value: N/A
  misc_feature: MA Experiment 20000573 PARAMETER Experiment Name: At_100uM_ABA_Mutants__P Parameter: Tissue Value: Whole Plant
  misc_feature: MA Experiment 20000573 PARAMETER Experiment Name: At_100uM_ABA_Mutants__P Parameter: Treatment Value: None
  misc_feature: MA Experiment ID: 20000574 Result: Up-regulated in Transcription
  misc_feature: MA Experiment 20000574 PARAMETER Experiment Name: At_100uM_ABA_Mutants__P Parameter: Organism Value: A. thaliana
  misc_feature: MA Experiment 20000574 PARAMETER Experiment Name: At_100uM_ABA_Mutants__P Parameter: Plant Line Value: CS23 vs. Ler wt
  misc_feature: MA Experiment 20000574 PARAMETER Experiment Name: At_100uM_ABA_Mutants__P Parameter: Timepoint (hr) Value: N/A
  misc_feature: MA Experiment 20000574 PARAMETER Experiment Name: At_100uM_ABA_Mutants__P Parameter: Tissue Value: Whole Plant
  misc_feature: MA Experiment 20000574 PARAMETER Experiment Name: At_100uM_ABA_Mutants__P Parameter: Treatment Value: None
  misc_feature: MA Experiment ID: 20001248 Result: Up-regulated in Transcription
  misc_feature: MA Experiment 20001248 PARAMETER Experiment Name: At_Far-red-induction_P Parameter: Age (day) Value: 7
  misc_feature: MA Experiment 20001248 PARAMETER Experiment Name: At_Far-red-induction_P Parameter: Light Value: Far-red vs. White
  misc_feature: MA Experiment 20001248 PARAMETER Experiment Name: At_Far-red-induction_P Parameter: Organism Value: A. thaliana
  misc_feature: MA Experiment 20001248 PARAMETER Experiment Name: At_Far-red-induction_P Parameter: Plant Line Value: Columbia
  misc_feature: MA Experiment 20001248 PARAMETER Experiment Name: At_Far-red-induction_P Parameter: Timepoint (hr) Value: 4
  misc_feature: MA Experiment 20001248 PARAMETER Experiment Name: At_Far-red-induction_P Parameter: Tissue Value: Whole Plant
  misc_feature: MA Experiment ID: 20001450 Result: Up-regulated in Transcription
  misc_feature: MA Experiment 20001450 PARAMETER Experiment Name: At_Far-red-induction_P Parameter: Age (day) Value: 7
  misc_feature: MA Experiment 20001450 PARAMETER Experiment Name: At_Far-red-induction_P Parameter: Light Value: Far-red vs. White
  misc_feature: MA Experiment 20001450 PARAMETER Experiment Name: At_Far-red-induction_P Parameter: Organism Value: A. thaliana
  misc_feature: MA Experiment 20001450 PARAMETER Experiment Name: At_Far-red-induction_P Parameter: Plant Line Value: Columbia
  misc_feature: MA Experiment 20001450 PARAMETER Experiment Name: At_Far-red-induction_P Parameter: Timepoint (hr) Value: 8
  misc_feature: MA Experiment 20001450 PARAMETER Experiment Name: At_Far-red-induction_P Parameter: Tissue Value: Whole Plant
  misc_feature: MA Experiment ID: 20001451 Result: Up-regulated in Transcription
  misc_feature: MA Experiment 20001451 PARAMETER Experiment Name: At_Far-red-induction_P Parameter: Age (day) Value: 7
  misc_feature: MA Experiment 20001451 PARAMETER Experiment Name: At_Far-red-induction_P Parameter: Light Value: Far-red vs. White
  misc_feature: MA Experiment 20001451 PARAMETER Experiment Name: At_Far-red-induction_P Parameter: Organism Value: A. thaliana
  misc_feature: MA Experiment 20001451 PARAMETER Experiment Name: At_Far-red-induction_P Parameter: Plant Line Value: Columbia
  misc_feature: MA Experiment 20001451 PARAMETER Experiment Name: At_Far-red-induction_P Parameter: Timepoint (hr) Value: 24
  misc_feature: MA Experiment 20001451 PARAMETER Experiment Name: At_Far-red-induction_P Parameter: Tissue Value: Whole Plant
  misc_feature: MA Experiment ID: 20001557 Result: Down-regulated in Transcription
  misc_feature: MA Experiment 20001557 PARAMETER Experiment Name: At_Drought_Soil_Dry_P Parameter: Age (day) Value: 27
  misc_feature: MA Experiment 20001557 PARAMETER Experiment Name: At_Drought_Soil_Dry_P Parameter: Organism Value: A. thaliana
  misc_feature: MA Experiment 20001557 PARAMETER Experiment Name: At_Drought_Soil_Dry_P Parameter: Plant Line Value: WS
  misc_feature: MA Experiment 20001557 PARAMETER Experiment Name: At_Drought_Soil_Dry_P Parameter: Post Timepoint (hr) Value: 3
  misc_feature: MA Experiment 20001557 PARAMETER Experiment Name: At_Drought_Soil_Dry_P Parameter: Post-Treatment Value: Re-Water vs. No Drought
  misc_feature: MA Experiment 20001557 PARAMETER Experiment Name: At_Drought_Soil_Dry_P Parameter: Timepoint (day) Value: 13
  misc_feature: MA Experiment 20001557 PARAMETER Experiment Name: At_Drought_Soil_Dry_P Parameter: Treatment Value: Drought vs. No Drought
atcaaatttgtgtgatcttctccagaagaaacttgaggaactttaagctaaacctctgtagttttcagattgattcgttggtggaaagcgtctaaattttgcgtaaatggcggcagctcttgtacgcagattctgccggggatcatcttttccggtctctggtcatggatataggatgctatcgacggttgaaaatgtatctgaaagtggtaaatcgatgaatctatactctgctattaatcaagctcttcacatcgctttagagaccgatcctcggtcttatgtttttggggaagatgttggatttggtggtgtcttccgatgtacaacaggattagctgaacgttttgggaaatctcgagttttcaacactcctctctgcgagcaaggcattgttggctttggcattggtttagctgcaatgggaaatcgagttattgcggaaattcagtttgcggattatattttcccggcttttgatcagattgttaatgaggctgcaaagttcagataccgaagtggaaaccagtttaactgtggaggactcactattagggcaccgtacggagcagttggtcacggtggacattaccactcgcagtcccctgaagctttcttttgtcatgtccctggtatcaaagttgttattcctcgaagtccacgggaagctaagggattattattgtcatccatccgtgatccgaatcccgttgtctttttcgaaccaaagtggctatatcgtcaagcggtagaggatgtccctgaagatgactatatgatacctttatctgaggcagaggttatgcgagaaggttccgacataactcttgttggatggggagcacagctcactatcatggaacaagcatgtcttgacgcagaaaacgaaggaatatcgtgtgaattgatagatctcaagactctgatcccttgggataaggaaatcgttgagacctcagtgagaaagactggcagacttcttattagccatgaagctcctgttacaggaggctttggggccgagatcgctgcaactatagttgagcgttgcttcttgaggttagaagcacctgtaagcagagtttgtggcctggacactcctttccctctagtgttcgaacctttctacatgccaaccaagaacaagatattggatgcaatcagatccactgtgaattactagcccatcttagcattgtacacatgattctctgtctcctatcttcgaaataattattgatgctggtggttcagacatgtaatggatactgtaatcaccacttttgttatttaatctatgatcttgaaactctccatctttgttc

SEQ ID NO: 23759 - protein, 358 aa, Arabidopsis thaliana
  peptide (1)..(358): Ceres Seq. ID no. 12335698
  misc_feature (228)..(348): Pfam Name: Transketolase, C-terminal domain Pfam Description: Transketolase, C-terminal domain
  misc_feature (36)..(358): Homolog of NCBI NO: 4557353 NR Description: branched chain keto acid dehydrogenase E1, beta
  misc_feature (36)..(358): Homolog of NCBI NO: 346979 NR Description: 3-methyl-2-oxobutanoate dehydrogenase (lipoamide)
  misc_feature (38)..(358): Homolog of NCBI NO: 40353220 NR Description: branched chain ketoacid dehydrogenase E1, beta
  misc_feature (36)..(358): Homolog of NCBI NO: 481864 NR Description: 3-methyl-2-oxobutanoate dehydrogenase (lipoamide)
  misc_feature (6)..(358): Homolog of NCBI NO: 162640 NR Description: branched chain alpha-keto acid dehydrogenase
  misc_feature (36)..(358): Homolog of NCBI NO: 12964600 NR Description: branched-chain alpha-keto acid dehydrogenase
  misc_feature (34)..(358): Homolog of NCBI NO: 34395021 NR Description: putative branched-chain alpha-keto acid
  misc_feature (3)..(358): Homolog of NCBI NO: 11252215 NR Description: 3-methyl-2-oxobutanoate dehydrogenase (lipoamide)
  misc_feature (3)..(358): Homolog of NCBI NO: 15222731 NR Description: branched-chain alpha-keto acid decarboxylase E1
  misc_feature (1)..(358): Homolog of NCBI NO: 15231242 NR Description: branched chain alpha-keto acid dehydrogenase E1
MAAALVRRFCRGSSFPVSGHGYRMLSTVENVSESGKSMNLYSAINQALHIALETDPRSYVFGEDVGFGGVFRCTTGLAERFGKSRVFNTPLCEQGIVGFGIGLAAMGNRVIAEIQFADYIFPAFDQIVNEAAKFRYRSGNQFNCGGLTIRAPYGAVGHGGHYHSQSPEAFFCHVPGIKVVIPRSPREAKGLLLSSIRDPNPVVFFEPKWLYRQAVEDVPEDDYMIPLSEAEVMREGSDITLVGWGAQLTIMEQACLDAENEGISCELIDLKTLIPWDKEIVETSVRKTGRLLISHEAPVTGGFGAEIAATIVERCFLRLEAPVSRVCGLDTPFPLVFEPFYMPTKNKILDAIRSTVNY

SEQ ID NO: 23760 - protein, 335 aa, Arabidopsis thaliana
  peptide (1)..(335): Ceres Seq. ID no. 12335699
  misc_feature (205)..(325): Pfam Name: Transketolase, C-terminal domain Pfam Description: Transketolase, C-terminal domain
  misc_feature (13)..(335): Homolog of NCBI NO: 4557353 NR Description: branched chain keto acid dehydrogenase E1, beta
  misc_feature (13)..(335): Homolog of NCBI NO: 346979 NR Description: 3-methyl-2-oxobutanoate dehydrogenase (lipoamide)
  misc_feature (15)..(335): Homolog of NCBI NO: 40353220 NR Description: branched chain ketoacid dehydrogenase E1, beta
  misc_feature (13)..(335): Homolog of NCBI NO: 481864 NR Description: 3-methyl-2-oxobutanoate dehydrogenase (lipoamide)
  misc_feature (1)..(335): Homolog of NCBI NO: 162640 NR Description: branched chain alpha-keto acid dehydrogenase
  misc_feature (13)..(335): Homolog of NCBI NO: 12964600 NR Description: branched-chain alpha-keto acid dehydrogenase
  misc_feature (11)..(335): Homolog of NCBI NO: 34395021 NR Description: putative branched-chain alpha-keto acid
  misc_feature (1)..(335): Homolog of NCBI NO: 11252215 NR Description: 3-methyl-2-oxobutanoate dehydrogenase (lipoamide)
  misc_feature (1)..(335): Homolog of NCBI NO: 15222731 NR Description: branched-chain alpha-keto acid decarboxylase E1
  misc_feature (1)..(335): Homolog of NCBI NO: 15231242 NR Description: branched chain alpha-keto acid dehydrogenase E1
MLSTVENVSESGKSMNLYSAINQALHIALETDPRSYVFGEDVGFGGVFRCTTGLAERFGKSRVFNTPLCEQGIVGFGIGLAAMGNRVIAEIQFADYIFPAFDQIVNEAAKFRYRSGNQFNCGGLTIRAPYGAVGHGGHYHSQSPEAFFCHVPGIKVVIPRSPREAKGLLLSSIRDPNPVVFFEPKWLYRQAVEDVPEDDYMIPLSEAEVMREGSDITLVGWGAQLTIMEQACLDAENEGISCELIDLKTLIPWDKEIVETSVRKTGRLLISHEAPVTGGFGAEIAATIVERCFLRLEAPVSRVCGLDTPFPLVFEPFYMPTKNKILDAIRSTVNY

SEQ ID NO: 23761 - protein, 321 aa, Arabidopsis thaliana
  peptide (1)..(321): Ceres Seq. ID no. 12335700
  misc_feature (191)..(311): Pfam Name: Transketolase, C-terminal domain Pfam Description: Transketolase, C-terminal domain
  misc_feature (1)..(321): Homolog of NCBI NO: 4557353 NR Description: branched chain keto acid dehydrogenase E1, beta
  misc_feature (1)..(321): Homolog of NCBI NO: 346979 NR Description: 3-methyl-2-oxobutanoate dehydrogenase (lipoamide)
  misc_feature (1)..(321): Homolog of NCBI NO: 40353220 NR Description: branched chain ketoacid dehydrogenase E1, beta
  misc_feature (1)..(321): Homolog of NCBI NO: 481864 NR Description: 3-methyl-2-oxobutanoate dehydrogenase (lipoamide)
  misc_feature (1)..(321): Homolog of NCBI NO: 162640 NR Description: branched chain alpha-keto acid dehydrogenase
  misc_feature (1)..(321): Homolog of NCBI NO: 12964600 NR Description: branched-chain alpha-keto acid dehydrogenase
  misc_feature (1)..(321): Homolog of NCBI NO: 34395021 NR Description: putative branched-chain alpha-keto acid
  misc_feature (1)..(321): Homolog of NCBI NO: 11252215 NR Description: 3-methyl-2-oxobutanoate dehydrogenase (lipoamide)
  misc_feature (1)..(321): Homolog of NCBI NO: 15222731 NR Description: branched-chain alpha-keto acid decarboxylase E1
  misc_feature (1)..(321): Homolog of NCBI NO: 15231242 NR Description: branched chain alpha-keto acid dehydrogenase E1
MNLYSAINQALHIALETDPRSYVFGEDVGFGGVFRCTTGLAERFGKSRVFNTPLCEQGIVGFGIGLAAMGNRVIAEIQFADYIFPAFDQIVNEAAKFRYRSGNQFNCGGLTIRAPYGAVGHGGHYHSQSPEAFFCHVPGIKVVIPRSPREAKGLLLSSIRDPNPVVFFEPKWLYRQAVEDVPEDDYMIPLSEAEVMREGSDITLVGWGAQLTIMEQACLDAENEGISCELIDLKTLIPWDKEIVETSVRKTGRLLISHEAPVTGGFGAEIAATIVERCFLRLEAPVSRVCGLDTPFPLVFEPFYMPTKNKILDAIRSTVNY

SEQ ID NO: 23762 - DNA, 1386 bp, Arabidopsis thaliana
  misc_feature (1)..(1386): Ceres Seq. ID no. 13487609
  misc_feature: MA Experiment ID: 108461 Result: Up-regulated in Transcription
  misc_feature: MA Experiment 108461 PARAMETER Experiment Name: At_Germinating_Seeds_cDNA_P Parameter: Age (day) Value: 1 vs. 0
  misc_feature: MA Experiment 108461 PARAMETER Experiment Name: At_Germinating_Seeds_cDNA_P Parameter: Tissue Value: Germinating Seeds
  misc_feature: MA Experiment ID: 108462 Result: Up-regulated in Transcription
  misc_feature: MA Experiment 108462 PARAMETER Experiment Name: At_Germinating_Seeds_cDNA_P Parameter: Age (day) Value: 2 vs. 0
  misc_feature: MA Experiment 108462 PARAMETER Experiment Name: At_Germinating_Seeds_cDNA_P Parameter: Tissue Value: Germinating Seeds
  misc_feature: MA Experiment ID: 108463 Result: Up-regulated in Transcription
  misc_feature: MA Experiment 108463 PARAMETER Experiment Name: At_Germinating_Seeds_cDNA_P Parameter: Age (day) Value: 3 vs. 0
  misc_feature: MA Experiment 108463 PARAMETER Experiment Name: At_Germinating_Seeds_cDNA_P Parameter: Tissue Value: Germinating Seeds
  misc_feature: MA Experiment ID: 108464 Result: Up-regulated in Transcription
  misc_feature: MA Experiment 108464 PARAMETER Experiment Name: At_Germinating_Seeds_cDNA_P Parameter: Age (day) Value: 4 vs. 0
  misc_feature: MA Experiment 108464 PARAMETER Experiment Name: At_Germinating_Seeds_cDNA_P Parameter: Tissue Value: Germinating Seeds
  misc_feature: MA Experiment ID: 20000069 Result: Up-regulated in Transcription
  misc_feature: MA Experiment 20000069 PARAMETER Experiment Name: At_100uM_ABA_Mutants_cDNA_P Parameter: Plant Line Value: CS23
  misc_feature: MA Experiment 20000069 PARAMETER Experiment Name: At_100uM_ABA_Mutants_cDNA_P Parameter: Timepoint (hr) Value: 6
  misc_feature: MA Experiment 20000069 PARAMETER Experiment Name: At_100uM_ABA_Mutants_cDNA_P Parameter: Tissue Value: Aerial
  misc_feature: MA Experiment 20000069 PARAMETER Experiment Name: At_100uM_ABA_Mutants_cDNA_P Parameter: Treatment Value: 100uM ABA vs. No Treatment
  misc_feature: MA Experiment ID: 20000071 Result: Up-regulated in Transcription
  misc_feature: MA Experiment 20000071 PARAMETER Experiment Name: At_100uM_ABA_Mutants_cDNA_P Parameter: Plant Line Value: CS8104
  misc_feature: MA Experiment 20000071 PARAMETER Experiment Name: At_100uM_ABA_Mutants_cDNA_P Parameter: Timepoint (hr) Value: 6
  misc_feature: MA Experiment 20000071 PARAMETER Experiment Name: At_100uM_ABA_Mutants_cDNA_P Parameter: Tissue Value: Aerial
  misc_feature: MA Experiment 20000071 PARAMETER Experiment Name: At_100uM_ABA_Mutants_cDNA_P Parameter: Treatment Value: 100uM ABA vs. No Treatment
  misc_feature: MA Experiment ID: 20000086 Result: Up-regulated in Transcription
  misc_feature: MA Experiment 20000086 PARAMETER Experiment Name: At_100uM_ABA_Mutants_cDNA_P Parameter: Plant Line Value: CS22
  misc_feature: MA Experiment 20000086 PARAMETER Experiment Name: At_100uM_ABA_Mutants_cDNA_P Parameter: Timepoint (hr) Value: 6
  misc_feature: MA Experiment 20000086 PARAMETER Experiment Name: At_100uM_ABA_Mutants_cDNA_P Parameter: Tissue Value: Aerial
  misc_feature: MA Experiment 20000086 PARAMETER Experiment Name: At_100uM_ABA_Mutants_cDNA_P Parameter: Treatment Value: 100uM ABA vs. No Treatment
  misc_feature: MA Experiment ID: 20000179 Result: Up-regulated in Transcription
  misc_feature: MA Experiment 20000179 PARAMETER Experiment Name: At_Germinating_Seeds_P Parameter: Age (hr) Value: 6 vs. 0
  misc_feature: MA Experiment 20000179 PARAMETER Experiment Name: At_Germinating_Seeds_P Parameter: Tissue Value: Germinating Seeds
  misc_feature: MA Experiment ID: 20000180 Result: Up-regulated in Transcription
  misc_feature: MA Experiment 20000180 PARAMETER Experiment Name: At_Germinating_Seeds_P Parameter: Age (hr) Value: 24 vs. 0
  misc_feature: MA Experiment 20000180 PARAMETER Experiment Name: At_Germinating_Seeds_P Parameter: Tissue Value: Germinating Seeds
  misc_feature: MA Experiment ID: 20000184 Result: Down-regulated in Transcription
  misc_feature: MA Experiment 20000184 PARAMETER Experiment Name: At_Shoots__P Parameter: Age (day) Value: 7
  misc_feature: MA Experiment 20000184 PARAMETER Experiment Name: At_Shoots__P Parameter: Tissue Value: Shoots vs. Whole Plant
gaaaaatatctcgaatccgattccttttttctcttctgcaatctctttgaaatctcaagcttctcttcaaaatttcgattacagctgaagattctctcgattttctggttttgactttttttttgtttggtttggtgaaagatttggatcaaatgggggtggattactacaatgttctgaaagtgaatcgaaatgctaacgaagatgatctgaagaagtcttaccggcgaatggctatgaaatggcaccctgacaaaaaccctacgagcaagaaagaagctgaagctaagttcaagcagatctctgaagcttacgacgtcttgagcgatcctcagagacgtcagatctacgatcagtacggagaagaaggtcttaaatccaccgatttacctactgcggcggagacggcggcgcatcagcagcagcggagctactcttctagcaactctgagtttcggtattatccgcgtgatgctgaagatatctttgctgagtttttcggcgaatccggtgatgcttttggcggagggagtagcggaaggacacgtggagatggcggtgatggtggcggtcggagatttaaaagtgcagaagcagggagccaggctaatagaaagacgccgccgacgaacaaaaaaacgacgccgccggcgaataggaaggctccggctattgagagtaaattggcttgcacattggaggagctctacaaaggtgcaaagaagaagatgcgaatttctcgcgttgttcctgatgattttggaaagccaaagacagtccaagagatattgaagatagacataaaaccaggttggaagaaaggcacaaagatcacttttccagagaaaggcaaccaagaacctggtgtcactcctgcggatcttatattcgtggttgacgagaaaccgcattcggtattcaagagagacggtaacgatctgattctcgagaagaaagtctctcttatagatgctttaaccggtctcaccattagcgtaacgactctagacgggaggagcctaactatcccggtgctggatatcgtaaaaccgggtcaggagattgtgatcccgaatgagggaatgcctactaaagaccctttgaagagaggagaccttagagttacctttgaaatcttgttcccgtcaaggctaacgtcagaacagaagaatgacctcaagagagttcttggtggaagctgatgagttgacgtttagttttcaagtaagctattgatcttctttaacaacggattccacaggaagttgctagtcatttgagtgtacatacatttacgtttttcctttgtaaacttgtgttataagaaaaacaagaaaacccaaatcgaataagactggatatgcgggatctaataatggctgccac

SEQ ID NO: 23763 - protein, 349 aa, Arabidopsis thaliana
  peptide (1)..(349): Ceres Seq. ID no. 13487610
  misc_feature (225)..(346): Pfam Name: DnaJ C terminal region Pfam Description: DnaJ C terminal region
  misc_feature (1)..(348): Homolog of NCBI NO: 34905276 NR Description: putative heat shock protein
  misc_feature (1)..(347): Homolog of NCBI NO: 6179940 NR Description: DnaJ-like protein [Nicotiana tabacum]
  misc_feature (1)..(348): Homolog of NCBI NO: 15228294 NR Description: heat shock protein, putative [Arabidopsis
  misc_feature (1)..(346): Homolog of NCBI NO: 15240968 NR Description: DnaJ protein family [Arabidopsis thaliana]
  misc_feature (1)..(347): Homolog of NCBI NO: 15235310 NR Description: heat shock protein, putative [Arabidopsis
  misc_feature (1)..(132): Homolog of NCBI NO: 15231987 NR Description: DnaJ protein family [Arabidopsis thaliana]
  misc_feature (115)..(349): Homolog of NCBI NO: 15231987 NR Description: DnaJ protein family [Arabidopsis thaliana]
  misc_feature (1)..(347): Homolog of NCBI NO: 15225377 NR Description: heat shock protein, putative [Arabidopsis
  misc_feature (1)..(349): Homolog of NCBI NO: 21593202 NR Description: putative heat-shock protein [Arabidopsis thaliana]
  misc_feature (1)..(349): Homolog of NCBI NO: 15218515 NR Description: heat shock protein, putative [Arabidopsis
MGVDYYNVLKVNRNANEDDLKKSYRRMAMKWHPDKNPTSKKEAEAKFKQISEAYDVLSDPQRRQIYDQYGEEGLKSTDLPTAAETAAHQQQRSYSSSNSEFRYYPRDAEDIFAEFFGESGDAFGGGSSGRTRGDGGDGGGRRFKSAEAGSQANRKTPPTNKKTTPPANRKAPAIESKLACTLEELYKGAKKKMRISRVVPDDFGKPKTVQEILKIDIKPGWKKGTKITFPEKGNQEPGVTPADLIFVVDEKPHSVFKRDGNDLILEKKVSLIDALTGLTISVTTLDGRSLTIPVLDIVKPGQEIVIPNEGMPTKDPLKRGDLRVTFEILFPSRLTSEQKNDLKRVLGGS

SEQ ID NO: 23764 - protein, 323 aa, Arabidopsis thaliana
  peptide (1)..(323): Ceres Seq. ID no. 13487611
  misc_feature (199)..(320): Pfam Name: DnaJ C terminal region Pfam Description: DnaJ C terminal region
  misc_feature (1)..(321): Homolog of NCBI NO: 15225377 NR Description: heat shock protein, putative [Arabidopsis
  misc_feature (1)..(323): Homolog of NCBI NO: 21593202 NR Description: putative heat-shock protein [Arabidopsis thaliana]
  misc_feature (1)..(321): Homolog of NCBI NO: 6179940 NR Description: DnaJ-like protein [Nicotiana tabacum]
  misc_feature (1)..(320): Homolog of NCBI NO: 15240968 NR Description: DnaJ protein family [Arabidopsis thaliana]
  misc_feature (1)..(106): Homolog of NCBI NO: 15231987 NR Description: DnaJ protein family [Arabidopsis thaliana]
  misc_feature (89)..(323): Homolog of NCBI NO: 15231987 NR Description: DnaJ protein family [Arabidopsis thaliana]
  misc_feature (1)..(321): Homolog of NCBI NO: 15235310 NR Description: heat shock protein, putative [Arabidopsis
  misc_feature (1)..(322): Homolog of NCBI NO: 15228294 NR Description: heat shock protein, putative [Arabidopsis
  misc_feature (1)..(322): Homolog of NCBI NO: 34905276 NR Description: putative heat shock protein
  misc_feature (1)..(323): Homolog of NCBI NO: 15218515 NR Description: heat shock protein, putative [Arabidopsis
MAMKWHPDKNPTSKKEAEAKFKQISEAYDVLSDPQRRQIYDQYGEEGLKSTDLPTAAETAAHQQQRSYSSSNSEFRYYPRDAEDIFAEFFGESGDAFGGGSSGRTRGDGGDGGGRRFKSAEAGSQANRKTPPTNKKTTPPANRKAPAIESKLACTLEELYKGAKKKMRISRVVPDDFGKPKTVQEILKIDIKPGWKKGTKITFPEKGNQEPGVTPADLIFVVDEKPHSVFKRDGNDLILEKKVSLIDALTGLTISVTTLDGRSLTIPVLDIVKPGQEIVIPNEGMPTKDPLKRGDLRVTFEILFPSRLTSEQKNDLKRVLGGS

SEQ ID NO: 23765 - protein, 321 aa, Arabidopsis thaliana
  peptide (1)..(321): Ceres Seq. ID no. 13487612
  misc_feature (197)..(318): Pfam Name: DnaJ C terminal region Pfam Description: DnaJ C terminal region
  misc_feature (1)..(320): Homolog of NCBI NO: 34905276 NR Description: putative heat shock protein
  misc_feature (1)..(319): Homolog of NCBI NO: 6179940 NR Description: DnaJ-like protein [Nicotiana tabacum]
  misc_feature (1)..(320): Homolog of NCBI NO: 15228294 NR Description: heat shock protein, putative [Arabidopsis
  misc_feature (1)..(318): Homolog of NCBI NO: 15240968 NR Description: DnaJ protein family [Arabidopsis thaliana]
  misc_feature (1)..(319): Homolog of NCBI NO: 15235310 NR Description: heat shock protein, putative [Arabidopsis
  misc_feature (1)..(104): Homolog of NCBI NO: 15231987 NR Description: DnaJ protein family [Arabidopsis thaliana]
  misc_feature (87)..(321): Homolog of NCBI NO: 15231987 NR Description: DnaJ protein family [Arabidopsis thaliana]
  misc_feature (1)..(319): Homolog of NCBI NO: 15225377 NR Description: heat shock protein, putative [Arabidopsis
  misc_feature (1)..(321): Homolog of NCBI NO: 21593202 NR Description: putative heat-shock protein [Arabidopsis thaliana]
  misc_feature (1)..(321): Homolog of NCBI NO: 15218515 NR Description: heat shock protein, putative [Arabidopsis
MKWHPDKNPTSKKEAEAKFKQISEAYDVLSDPQRRQIYDQYGEEGLKSTDLPTAAETAAHQQQRSYSSSNSEFRYYPRDAEDIFAEFFGESGDAFGGGSSGRTRGDGGDGGGRRFKSAEAGSQANRKTPPTNKKTTPPANRKAPAIESKLACTLEELYKGAKKKMRISRVVPDDFGKPKTVQEILKIDIKPGWKKGTKITFPEKGNQEPGVTPADLIFVVDEKPHSVFKRDGNDLILEKKVSLIDALTGLTISVTTLDGRSLTIPVLDIVKPGQEIVIPNEGMPTKDPLKRGDLRVTFEILFPSRLTSEQKNDLKRVLGGS

SEQ ID NO: 23766 - DNA, 330 bp, Arabidopsis thaliana
  misc_feature (1)..(330): Ceres Seq. ID no. 12396439
  misc_feature: MA Experiment ID: 20000111 Result: Down-regulated in Transcription
  misc_feature: MA Experiment 20000111 PARAMETER Experiment Name: At_42deg_Heat_cDNA_P Parameter: Temperature (deg C) Value: 42 vs. 22
  misc_feature: MA Experiment 20000111 PARAMETER Experiment Name: At_42deg_Heat_cDNA_P Parameter: Timepoint (hr) Value: 6
  misc_feature: MA Experiment 20000111 PARAMETER Experiment Name: At_42deg_Heat_cDNA_P Parameter: Tissue Value: Aerial
atttcagaattaagatatggtcttctgtccaacttaattctcaaatggtgcgagggacaggttaccgagtacctcgtggcaactttcggtgattatttcacagatgtgaaaatgtatgtcgaagaaagatcatttagaagatttgtcgaagcatgtttggaagaaacagtcgttgtatgttgaccatctcctaactcagaaaaactacatcaaggaagaaactattgaacggatgaggctagatgaagaggttctcatggatttctttagggagtatataagtgcatctaaagtggagagcagaatcagaataatgagcgatctgagaga

SEQ ID NO: 23767 - protein, 71 aa, Arabidopsis thaliana
  peptide (1)..(71): Ceres Seq. ID no. 12396440
  misc_feature (20)..(70): Homolog of NCBI NO: 18409922 NR Description: expressed protein
  misc_feature (20)..(70): Homolog of NCBI NO: 19387172 NR Description: SEC6 [Arabidopsis thaliana]
  misc_feature (20)..(70): Homolog of NCBI NO: 25406122 NR Description: hypothetical protein F14O23.20 [imported] -
MSKKDHLEDLSKHVWKKQSLYVDHLLTQKNYIKEETIERMRLDEEVLMDFFREYISASKVESRIRIMSDLR

SEQ ID NO: 23768 - protein, 60 aa, Arabidopsis thaliana
  peptide (1)..(60): Ceres Seq. ID no. 12396441
  misc_feature (8)..(59): Homolog of NCBI NO: 18409922 NR Description: expressed protein
  misc_feature (8)..(59): Homolog of NCBI NO: 19387172 NR Description: SEC6 [Arabidopsis thaliana]
  misc_feature (8)..(59): Homolog of NCBI NO: 25406122 NR Description: hypothetical protein F14O23.20 [imported] -
ISELRYGLLSNLILKWCEGQVTEYLVATFGDYFTDVKMYVEERSFRRFVEACLEETVVVC

SEQ ID NO: 23769 - DNA, 827 bp, Arabidopsis thaliana
  misc_feature (1)..(827): Ceres Seq. ID no. 12337933
  misc_feature: MA Experiment ID: 20001451 Result: Down-regulated in Transcription
  misc_feature: MA Experiment 20001451 PARAMETER Experiment Name: At_Far-red-induction_P Parameter: Age (day) Value: 7
  misc_feature: MA Experiment 20001451 PARAMETER Experiment Name: At_Far-red-induction_P Parameter: Light Value: Far-red vs. White
  misc_feature: MA Experiment 20001451 PARAMETER Experiment Name: At_Far-red-induction_P Parameter: Organism Value: A. thaliana
  misc_feature: MA Experiment 20001451 PARAMETER Experiment Name: At_Far-red-induction_P Parameter: Plant Line Value: Columbia
  misc_feature: MA Experiment 20001451 PARAMETER Experiment Name: At_Far-red-induction_P Parameter: Timepoint (hr) Value: 24
  misc_feature: MA Experiment 20001451 PARAMETER Experiment Name: At_Far-red-induction_P Parameter: Tissue Value: Whole Plant
atcaaaagattcttggtctccgatccagtcacctgaagattctcggagcttcttttgaccacacactttcaatggcggatgctgtgaacgctcaaactccatcgctctccgagcaatatcatttggagaaagaagtgaagcaagacacaagtgcaaagcctgttgaagtgaaagaggtggcaccagaagttactacacaagctgaagaggttaagacggagcaagctaaggaagaatctcctgttgaggaagcggtttctgtagttgaagagaagtctgaatctgctcctgaatcaacggaagtggcttctgaggctcctgctgcagcggaagacaatgctgaagagactcctgctgctgctgaagaaaataatgacgaaaacgctagtgaagaagttgctgaagaaacccctgatgagatcaagcttgagacagctcctgctgatttccgtttccctacaacaaaccaaacaaggcattgtttcactcgctacgttgaatatcacagatgtgtagctgctaagggtgatgatgctccagaatgcgataagtttgcaaagttttatcgatctctttgccccagcgaatgggttgataggtggaacgagcaaagagaaaatggaacattccctggtcctctaccctgaagaaaaatcatattgccatcattcctcttttgctgttaccttcatgagattacactgcagagtttaataagattttacaaaaccagcacttctggttcccatcatcataaaatgtgagaatttaacaaaactttatgaatctcaaatttttctcttatataagtttttgaggatcatctg

SEQ ID NO: 23770 - protein, 214 aa, Arabidopsis thaliana
  peptide (1)..(214): Ceres Seq. ID no. 12337934
  misc_feature (139)..(212): Pfam Name: Cytochrome oxidase c subunit VIb Pfam Description: Cytochrome oxidase c subunit VIb
  misc_feature (141)..(211): Homolog of NCBI NO: 38048151 NR Description: similar to Drosophila melanogaster CG14235
  misc_feature (140)..(213): Homolog of NCBI NO: 15234375 NR Description: putative protein; protein id: At4g28060.1
  misc_feature (139)..(213): Homolog of NCBI NO: 9967162 NR Description: cytochrome c oxidase subunit 6b
  misc_feature (138)..(213): Homolog of NCBI NO: 21592329 NR Description: cytochrome c oxidase subunit 6b [Arabidopsis
  misc_feature (138)..(213): Homolog of NCBI NO: 18424030 NR Description: Expressed protein
  misc_feature (62)..(213): Homolog of NCBI NO: 22204116 NR Description: putative cytochrome c oxidase subunit [Triticum
  misc_feature (53)..(213): Homolog of NCBI NO: 34906824 NR Description: putative cytochrome c oxidase subunit 6b-1
  misc_feature (51)..(213): Homolog of NCBI NO: 4586449 NR Description: cytochrome c oxidase subunit 6b-1
  misc_feature (24)..(214): Homolog of NCBI NO: 21554378 NR Description: cytochrome c oxidase subunit, putative
  misc_feature (24)..(214): Homolog of NCBI NO: 15219886 NR Description: cytochrome c oxidase subunit, putative
QKILGLRSSHLKILGASFDHTLSMADAVNAQTPSLSEQYHLEKEVKQDTSAKPVEVKEVAPEVTTQAEEVKTEQAKEESPVEEAVSVVEEKSESAPESTEVASEAPAAAEDNAEETPAAAEENNDENASEEVAEETPDEIKLETAPADFRFPTTNQTRHCFTRYVEYHRCVAAKGDDAPECDKFAKFYRSLCPSEWVDRWNEQRENGTFPGPLP

SEQ ID NO: 23771 - protein, 191 aa, Arabidopsis thaliana
  peptide (1)..(191): Ceres Seq. ID no. 12337935
  misc_feature (116)..(189): Pfam Name: Cytochrome oxidase c subunit VIb Pfam Description: Cytochrome oxidase c subunit VIb
  misc_feature (118)..(188): Homolog of NCBI NO: 38048151 NR Description: similar to Drosophila melanogaster CG14235
  misc_feature (117)..(190): Homolog of NCBI NO: 15234375 NR Description: putative protein; protein id: At4g28060.1
  misc_feature (116)..(190): Homolog of NCBI NO: 9967162 NR Description: cytochrome c oxidase subunit 6b
  misc_feature (115)..(190): Homolog of NCBI NO: 21592329 NR Description: cytochrome c oxidase subunit 6b [Arabidopsis
  misc_feature (115)..(190): Homolog of NCBI NO: 18424030 NR Description: Expressed protein
  misc_feature (39)..(190): Homolog of NCBI NO: 22204116 NR Description: putative cytochrome c oxidase subunit [Triticum
  misc_feature (30)..(190): Homolog of NCBI NO: 34906824 NR Description: putative cytochrome c oxidase subunit 6b-1
  misc_feature (28)..(190): Homolog of NCBI NO: 4586449 NR Description: cytochrome c oxidase subunit 6b-1
  misc_feature (1)..(191): Homolog of NCBI NO: 21554378 NR Description: cytochrome c oxidase subunit, putative
  misc_feature (1)..(191): Homolog of NCBI NO: 15219886 NR Description: cytochrome c oxidase subunit, putative
MADAVNAQTPSLSEQYHLEKEVKQDTSAKPVEVKEVAPEVTTQAEEVKTEQAKEESPVEEAVSVVEEKSESAPESTEVASEAPAAAEDNAEETPAAAEENNDENASEEVAEETPDEIKLETAPADFRFPTTNQTRHCFTRYVEYHRCVAAKGDDAPECDKFAKFYRSLCPSEWVDRWNEQRENGTFPGPLP

SEQ ID NO: 23772 - DNA, 1155 bp, Arabidopsis thaliana
  misc_feature (1)..(1155): Ceres Seq. ID no. 13497499
  misc_feature: MA Experiment ID: 108434 Result: Up-regulated in Transcription
  misc_feature: MA Experiment 108434 PARAMETER Experiment Name: At_Root_Tips_cDNA_P Parameter: Tissue Value: Root Tips
  misc_feature: MA Experiment ID: 108461 Result: Up-regulated in Transcription
  misc_feature: MA Experiment 108461 PARAMETER Experiment Name: At_Germinating_Seeds_cDNA_P Parameter: Age (day) Value: 1 vs. 0
  misc_feature: MA Experiment 108461 PARAMETER Experiment Name: At_Germinating_Seeds_cDNA_P Parameter: Tissue Value: Germinating Seeds
  misc_feature: MA Experiment ID: 108462 Result: Up-regulated in Transcription
  misc_feature: MA Experiment 108462 PARAMETER Experiment Name: At_Germinating_Seeds_cDNA_P Parameter: Age (day) Value: 2 vs. 0
  misc_feature: MA Experiment 108462 PARAMETER Experiment Name: At_Germinating_Seeds_cDNA_P Parameter: Tissue Value: Germinating Seeds
  misc_feature: MA Experiment ID: 108463 Result: Up-regulated in Transcription
  misc_feature: MA Experiment 108463 PARAMETER Experiment Name: At_Germinating_Seeds_cDNA_P Parameter: Age (day) Value: 3 vs. 0
  misc_feature: MA Experiment 108463 PARAMETER Experiment Name: At_Germinating_Seeds_cDNA_P Parameter: Tissue Value: Germinating Seeds
  misc_feature: MA Experiment ID: 108464 Result: Up-regulated in Transcription
  misc_feature: MA Experiment 108464 PARAMETER Experiment Name: At_Germinating_Seeds_cDNA_P Parameter: Age (day) Value: 4 vs. 0
  misc_feature: MA Experiment 108464 PARAMETER Experiment Name: At_Germinating_Seeds_cDNA_P Parameter: Tissue Value: Germinating Seeds
  misc_feature: MA Experiment ID: 108579 Result: Down-regulated in Transcription
  misc_feature: MA Experiment 108579 PARAMETER Experiment Name: At_4deg_Cold_cDNA_P Parameter: Temperature (deg C) Value: 4 vs. 22
  misc_feature: MA Experiment 108579 PARAMETER Experiment Name: At_4deg_Cold_cDNA_P Parameter: Timepoint (hr) Value: 6
  misc_feature: MA Experiment 108579 PARAMETER Experiment Name: At_4deg_Cold_cDNA_P Parameter: Tissue Value: Aerial
  misc_feature: MA Experiment ID: 20000113 Result: Down-regulated in Transcription
  misc_feature: MA Experiment 20000113 PARAMETER Experiment Name: At_42deg_Heat_cDNA_P Parameter: Temperature (deg C) Value: 42 vs. 22
  misc_feature: MA Experiment 20000113 PARAMETER Experiment Name: At_42deg_Heat_cDNA_P Parameter: Timepoint (hr) Value: 8
  misc_feature: MA Experiment 20000113 PARAMETER Experiment Name: At_42deg_Heat_cDNA_P Parameter: Tissue Value: Aerial
  misc_feature: MA Experiment ID: 20000179 Result: Up-regulated in Transcription
  misc_feature: MA Experiment 20000179 PARAMETER Experiment Name: At_Germinating_Seeds_P Parameter: Age (hr) Value: 6 vs. 0
  misc_feature: MA Experiment 20000179 PARAMETER Experiment Name: At_Germinating_Seeds_P Parameter: Tissue Value: Germinating Seeds
  misc_feature: MA Experiment ID: 20000184 Result: Down-regulated in Transcription
  misc_feature: MA Experiment 20000184 PARAMETER Experiment Name: At_Shoots__P Parameter: Age (day) Value: 7
  misc_feature: MA Experiment 20000184 PARAMETER Experiment Name: At_Shoots__P Parameter: Tissue Value: Shoots vs. Whole Plant
  misc_feature: MA Experiment ID: 20000573 Result: Down-regulated in Transcription
  misc_feature: MA Experiment 20000573 PARAMETER Experiment Name: At_100uM_ABA_Mutants__P Parameter: Organism Value: A. thaliana
  misc_feature: MA Experiment 20000573 PARAMETER Experiment Name: At_100uM_ABA_Mutants__P Parameter: Plant Line Value: CS22 vs. Ler wt
  misc_feature: MA Experiment 20000573 PARAMETER Experiment Name: At_100uM_ABA_Mutants__P Parameter: Timepoint (hr) Value: N/A
  misc_feature: MA Experiment 20000573 PARAMETER Experiment Name: At_100uM_ABA_Mutants__P Parameter: Tissue Value: Whole Plant
  misc_feature: MA Experiment 20000573 PARAMETER Experiment Name: At_100uM_ABA_Mutants__P Parameter: Treatment Value: None
  misc_feature: MA Experiment ID: 20000574 Result: Down-regulated in Transcription
  misc_feature: MA Experiment 20000574 PARAMETER Experiment Name: At_100uM_ABA_Mutants__P Parameter: Organism Value: A. thaliana
  misc_feature: MA Experiment 20000574 PARAMETER Experiment Name: At_100uM_ABA_Mutants__P Parameter: Plant Line Value: CS23 vs. Ler wt
  misc_feature: MA Experiment 20000574 PARAMETER Experiment Name: At_100uM_ABA_Mutants__P Parameter: Timepoint (hr) Value: N/A
  misc_feature: MA Experiment 20000574 PARAMETER Experiment Name: At_100uM_ABA_Mutants__P Parameter: Tissue Value: Whole Plant
  misc_feature: MA Experiment 20000574 PARAMETER Experiment Name: At_100uM_ABA_Mutants__P Parameter: Treatment Value: None
gaagacactcctccaatggcgcctcagcttctctcctccagtaacttcaaatctctctttgactctgtcgatacgttcctcttcgactgcgatggtgttatatggaagggtgaaacgctcatcgatggcgtctcccaaactctcgaccttatccgttctaagggtaaaaatgttgtctttgtgaccaacaattccgtaaaatcgaggaggcaatacgctgaaaagttccgatctttgggtgtcacttctattactcaggatgagatcttctcttcgtcatttgcggcagctatgtatctcaaagtcaataactttcctaaggacaagaaggtttatgtgattggtggagagggtgttcttgaggagctgcagattgccggttttacaggtcttggtggtcctgaagatggtgaaaagaaggcacaatggaaatcaaactctctctttgaacatgataaaagtgtgggagcagttgtagttggactagaccccaacattaactactataagcttcagtacgggactctctgtgtacgcgagaatccgggatgtctcttcattgcgaccaaccgtgatgcagtaggacatatgacggatctgcaagagtggcctggtgctgggtgtatggttgctgccatgtgtggatcgactgaaagagaaccaatagttgttgggaaaccatctactttcatgatggactttctgctacaaaaatttgggacggaaacgtcaagaatgtgcatggtaggtgataggctagatactgatatcttgtttgggcagaatgctggctgcaaaactctcctcgtcctaacaggggtgacaagtgaatctaatctactagataagggcaacaagatagaaccagactattacacaagcacagtctctgatatcataaaactgatggagtccccctagtaagtaagggcatcatcattcatcatcttgctttacactttggaacagtgatttacgtcctgttgcaagatgaaatttttctgattctttgtcttggttagtaatctgatgaagcatcagaaaacatgatttcattttgttatgttgctgaataaaggatttgagaagtcgatgaagagttgaaagattggtaataagcaaatagtaagattatcatggggaaagtccaaaagc

SEQ ID NO: 23773 - protein, 306 aa, Arabidopsis thaliana
  peptide (1)..(306): Ceres Seq. ID no. 13497500
  misc_feature (23)..(273): Pfam Name: haloacid dehalogenase-like hydrolase Pfam Description: haloacid dehalogenase-like hydrolase
  misc_feature (19)..(304): Homolog of NCBI NO: 15982558 NR Description: phosphoglycolate phosphatase precursor
  misc_feature (3)..(276): Homolog of NCBI NO: 8953699 NR Description: 4-nitrophenylphosphatase-like [Arabidopsis
  misc_feature (3)..(134): Homolog of NCBI NO: 8885622 NR Description: N-glyceraldehyde-2-phosphotransferase-like
  misc_feature (155)..(300): Homolog of NCBI NO: 8885622 NR Description: N-glyceraldehyde-2-phosphotransferase-like
  misc_feature (15)..(302): Homolog of NCBI NO: 38345235 NR Description: OSJNBa0084K20.14 [Oryza sativa (japonica
  misc_feature (3)..(300): Homolog of NCBI NO: 26450878 NR Description: putative p-nitrophenylphosphatase [Arabidopsis
  misc_feature (3)..(300): Homolog of NCBI NO: 15239406 NR Description: phosphoglycolate phosphatase, putative
  misc_feature (6)..(306): Homolog of NCBI NO: 21593203 NR Description: 4-nitrophenylphosphatase-like protein
  misc_feature (6)..(306): Homolog of NCBI NO: 15238800 NR Description: phosphoglycolate phosphatase, putative
  misc_feature (6)..(306): Homolog of NCBI NO: 10177912 NR Description: 4-nitrophenylphosphatase-like protein
EDTPPMAPQLLSSSNFKSLFDSVDTFLFDCDGVIWKGETLIDGVSQTLDLIRSKGKNVVFVTNNSVKSRRQYAEKFRSLGVTSITQDEIFSSSFAAAMYLKVNNFPKDKKVYVIGGEGVLEELQIAGFTGLGGPEDGEKKAQWKSNSLFEHDKSVGAVVVGLDPNINYYKLQYGTLCVRENPGCLFIATNRDAVGHMTDLQEWPGAGCMVAAMCGSTEREPIVVGKPSTFMMDFLLQKFGTETSRMCMVGDRLDTDILFGQNAGCKTLLVLTGVTSESNLLDKGNKIEPDYYTSTVSDIIKLMESP

SEQ ID NO: 23774 - protein, 301 aa, Arabidopsis thaliana
  peptide (1)..(301): Ceres Seq. ID no. 13497501
  misc_feature (18)..(268): Pfam Name: haloacid dehalogenase-like hydrolase Pfam Description: haloacid dehalogenase-like hydrolase
  misc_feature (14)..(299): Homolog of NCBI NO: 15982558 NR Description: phosphoglycolate phosphatase precursor
  misc_feature (1)..(271): Homolog of NCBI NO: 8953699 NR Description: 4-nitrophenylphosphatase-like [Arabidopsis
  misc_feature (1)..(129): Homolog of NCBI NO: 8885622 NR Description: N-glyceraldehyde-2-phosphotransferase-like
  misc_feature (150)..(295): Homolog of NCBI NO: 8885622 NR Description: N-glyceraldehyde-2-phosphotransferase-like
  misc_feature (10)..(297): Homolog of NCBI NO: 38345235 NR Description: OSJNBa0084K20.14 [Oryza sativa (japonica
  misc_feature (1)..(295): Homolog of NCBI NO: 26450878 NR Description: putative p-nitrophenylphosphatase [Arabidopsis
  misc_feature (1)..(295): Homolog of NCBI NO: 15239406 NR Description: phosphoglycolate phosphatase, putative
  misc_feature (1)..(301): Homolog of NCBI NO: 21593203 NR Description: 4-nitrophenylphosphatase-like protein
  misc_feature (1)..(301): Homolog of NCBI NO: 15238800 NR Description: phosphoglycolate phosphatase, putative
  misc_feature (1)..(301): Homolog of NCBI NO: 10177912 NR Description: 4-nitrophenylphosphatase-like protein
MAPQLLSSSNFKSLFDSVDTFLFDCDGVIWKGETLIDGVSQTLDLIRSKGKNVVFVTNNSVKSRRQYAEKFRSLGVTSITQDEIFSSSFAAAMYLKVNNFPKDKKVYVIGGEGVLEELQIAGFTGLGGPEDGEKKAQWKSNSLFEHDKSVGAVVVGLDPNINYYKLQYGTLCVRENPGCLFIATNRDAVGHMTDLQEWPGAGCMVAAMCGSTEREPIVVGKPSTFMMDFLLQKFGTETSRMCMVGDRLDTDILFGQNAGCKTLLVLTGVTSESNLLDKGNKIEPDYYTSTVSDIIKLMESP

SEQ ID NO: 23775 - protein, 209 aa, Arabidopsis thaliana
  peptide (1)..(209): Ceres Seq. ID no. 13497502
  misc_feature (1)..(176): Pfam Name: haloacid dehalogenase-like hydrolase Pfam Description: haloacid dehalogenase-like hydrolase
  misc_feature (1)..(207): Homolog of NCBI NO: 15982558 NR Description: phosphoglycolate phosphatase precursor
  misc_feature (1)..(179): Homolog of NCBI NO: 8953699 NR Description: 4-nitrophenylphosphatase-like [Arabidopsis
  misc_feature (1)..(37): Homolog of NCBI NO: 8885622 NR Description: N-glyceraldehyde-2-phosphotransferase-like
  misc_feature (58)..(203): Homolog of NCBI NO: 8885622 NR Description: N-glyceraldehyde-2-phosphotransferase-like
  misc_feature (1)..(205): Homolog of NCBI NO: 38345235 NR Description: OSJNBa0084K20.14 [Oryza sativa (japonica
  misc_feature (1)..(203): Homolog of NCBI NO: 26450878 NR Description: putative p-nitrophenylphosphatase [Arabidopsis
  misc_feature (1)..(203): Homolog of NCBI NO: 15239406 NR Description: phosphoglycolate phosphatase, putative
  misc_feature (1)..(209): Homolog of NCBI NO: 21593203 NR Description: 4-nitrophenylphosphatase-like protein
  misc_feature (1)..(209): Homolog of NCBI NO: 15238800 NR Description: phosphoglycolate phosphatase, putative
  misc_feature (1)..(209): Homolog of NCBI NO: 10177912 NR Description: 4-nitrophenylphosphatase-like protein
MYLKVNNFPKDKKVYVIGGEGVLEELQIAGFTGLGGPEDGEKKAQWKSNSLFEHDKSVGAVVVGLDPNINYYKLQYGTLCVRENPGCLFIATNRDAVGHMTDLQEWPGAGCMVAAMCGSTEREPIVVGKPSTFMMDFLLQKFGTETSRMCMVGDRLDTDILFGQNAGCKTLLVLTGVTSESNLLDKGNKIEPDYYTSTVSDIIKLMESP

SEQ ID NO: 23776 - DNA, 1401 bp, Arabidopsis thaliana
  misc_feature (1)..(1401): Ceres Seq. ID no. 12396060
  misc_feature: MA Experiment ID: 108434 Result: Up-regulated in Transcription
  misc_feature: MA Experiment 108434 PARAMETER Experiment Name: At_Root_Tips_cDNA_P Parameter: Tissue Value: Root Tips
  misc_feature: MA Experiment ID: 108569 Result: Up-regulated in Transcription
  misc_feature: MA Experiment 108569 PARAMETER Experiment Name: At_0.001%_MeJA__cDNA_P Parameter: Timepoint (hr) Value: 6
  misc_feature: MA Experiment 108569 PARAMETER Experiment Name: At_0.001%_MeJA__cDNA_P Parameter: Tissue Value: Aerial
  misc_feature: MA Experiment 108569 PARAMETER Experiment Name: At_0.001%_MeJA__cDNA_P Parameter: Treatment Value: 0.001% MeJA vs. No Treatment
  misc_feature: MA Experiment ID: 108573 Result: Up-regulated in Transcription
  misc_feature: MA Experiment 108573 PARAMETER Experiment Name: At_Drought_cDNA_P Parameter: Timepoint (hr) Value: 6
  misc_feature: MA Experiment 108573 PARAMETER Experiment Name: At_Drought_cDNA_P Parameter: Tissue Value: Aerial
  misc_feature: MA Experiment 108573 PARAMETER Experiment Name: At_Drought_cDNA_P Parameter: Treatment Value: Drought vs. No Drought
  misc_feature: MA Experiment ID: 108595 Result: Down-regulated in Transcription
  misc_feature: MA Experiment 108595 PARAMETER Experiment Name: At_Ler-pi_Ovule_cDNA_P Parameter: Plant Line Value: null
tttgttttgatttcctctctcactctgcacacgaaggcgagagagagagagaaagaaaaaagcgaagaatacgcagaatccatccaatttagggttagggctgcccctaatctggaaacctttgcctcgtttctgatctgttttccggatccgacttgaaggaaagaagacgacgacgcactaccaaaaacatgggcgcgaattcgcttccaacggatgcaaccctcgatctagatgagcagatctcgcagctcatgcagtgcaagcctctctccgagcaacaggtcagagcattatgtgagaaagctaaggagatcttaatggatgaaagcaacgttcagcctgttaaaagccctgtgacaatctgcggtgatattcatggacagttccatgatcttgcagagcttttccgtattgggggaaagtgtcctgataccaactatctgtttatgggagactatgtcgaccgtggatattattctgtggaaactgttacgctgttggttggcttgaaagtacggtatccacagcgaatcactattcttagaggaaaccatgaaagtcgtcagattactcaggtttatggattttatgatgaatgtctgcgaaagtatggcaatgcaaatgtttggaagatatttacagacctctttgactatttcccactgacagccttggtggagtcggaaatattctgccttcacggtggattatcaccatccatcgagacccttgacaacattaggaactttgatcgggttcaagaagttccacatgaagggcctatgtgtgacttattatggtctgatcctgatgacagatgtggctggggaatctctcctcgtggtgctggatatacatttggtcaggatatttcggaacaattcaatcacactaacaacttaaagctgatcgcccgagcgcatcagctcgttatggatggattcaattgggcacacgagcaaaaagtggttactatattcagtgcaccaaactattgctatcgctgtggaaacatggcctcaattcttgaggtcgatgactgcaggaaccacacgttcattcagtttgaaccagcaccgaggagaggagagccagatgtaacccgaaggacacctgactatttcctttgaagatactcagctcctcctgcagcttccggttgttggtttttgaagatctctgcttattccatttggttcaacgcatttgtgttccaggttgcttctctttaaaatcaatttagccctctcccttggaatagtgtaatataggcaaagaggtcaatgaactttaaaacctctcatgaacatgtgtttggctgaacttattagctcccttctgcatcagaatctgtttattgtgagatattttttcgatttatttcacgtaatttttcct

SEQ ID NO: 23777 - protein, 313 aa, Arabidopsis thaliana
  peptide (1)..(313): Ceres Seq. ID no. 12396061
  misc_feature (54)..(249): Pfam Name: Calcineurin-like phosphoesterase Pfam Description: Calcineurin-like phosphoesterase
  misc_feature (1)..(313): Homolog of NCBI NO: 7248363 NR Description: type 2A protein phosphatase-3 [Vicia faba]
  misc_feature (1)..(313): Homolog of NCBI NO: 548441 NR Description: SERINE/THREONINE PROTEIN PHOSPHATASE PP2A
  misc_feature (6)..(313): Homolog of NCBI NO: 418777 NR Description: phosphoprotein phosphatase (EC 3.1.3.16) 2A-alpha
  misc_feature (1)..(292): Homolog of NCBI NO: 11262975 NR Description: phosphoprotein phosphatase (EC 3.1.3.16) 2A-4
  misc_feature (5)..(313): Homolog of NCBI NO: 81694 NR Description: phosphoprotein phosphatase (EC 3.1.3.16) 2A
  misc_feature (5)..(313): Homolog of NCBI NO: 1352668 NR Description: SERINE/THREONINE PROTEIN PHOSPHATASE PP2A
  misc_feature (27)..(313): Homolog of NCBI NO: 21593204 NR Description: phosphoprotein phosphatase 2A isoform 4
  misc_feature (14)..(313): Homolog of NCBI NO: 11134218 NR Description: Serine/threonine protein phosphatase PP2A-2
  misc_feature (1)..(313): Homolog of NCBI NO: 18405985 NR Description: protein phosphatase 2A (PP2A)
  misc_feature (1)..(313): Homolog of NCBI NO: 18410971 NR Description: protein phosphatase PP2A catalytic subunit
MGANSLPTDATLDLDEQISQLMQCKPLSEQQVRALCEKAKEILMDESNVQPVKSPVTICGDIHGQFHDLAELFRIGGKCPDTNYLFMGDYVDRGYYSVETVTLLVGLKVRYPQRITILRGNHESRQITQVYGFYDECLRKYGNANVWKIFTDLFDYFPLTALVESEIFCLHGGLSPSIETLDNIRNFDRVQEVPHEGPMCDLLWSDPDDRCGWGISPRGAGYTFGQDISEQFNHTNNLKLIARAHQLVMDGFNWAHEQKVVTIFSAPNYCYRCGNMASILEVDDCRNHTFIQFEPAPRRGEPDVTRRTPDYFL

SEQ ID NO: 23778 - protein, 292 aa, Arabidopsis thaliana
  peptide (1)..(292): Ceres Seq. ID no. 12396062
  misc_feature (33)..(228): Pfam Name: Calcineurin-like phosphoesterase Pfam Description: Calcineurin-like phosphoesterase
  misc_feature (1)..(292): Homolog of NCBI NO: 11134218 NR Description: Serine/threonine protein phosphatase PP2A-2
  misc_feature (1)..(271): Homolog of NCBI NO: 11262975 NR Description: phosphoprotein phosphatase (EC 3.1.3.16) 2A-4
  misc_feature (6)..(292): Homolog of NCBI NO: 21593204 NR Description: phosphoprotein phosphatase 2A isoform 4
  misc_feature (1)..(292): Homolog of NCBI NO: 81694 NR Description: phosphoprotein phosphatase (EC 3.1.3.16) 2A
  misc_feature (1)..(292): Homolog of NCBI NO: 1352668 NR Description: SERINE/THREONINE PROTEIN PHOSPHATASE PP2A
  misc_feature (1)..(292): Homolog of NCBI NO: 7248363 NR Description: type 2A protein phosphatase-3 [Vicia faba]
  misc_feature (1)..(292): Homolog of NCBI NO: 548441 NR Description: SERINE/THREONINE PROTEIN PHOSPHATASE PP2A
  misc_feature (1)..(292): Homolog of NCBI NO: 418777 NR Description: phosphoprotein phosphatase (EC 3.1.3.16) 2A-alpha
  misc_feature (1)..(292): Homolog of NCBI NO: 18405985 NR Description: protein phosphatase 2A (PP2A)
  misc_feature (1)..(292): Homolog of NCBI NO: 18410971 NR Description: protein phosphatase PP2A catalytic subunit
MQCKPLSEQQVRALCEKAKEILMDESNVQPVKSPVTICGDIHGQFHDLAELFRIGGKCPDTNYLFMGDYVDRGYYSVETVTLLVGLKVRYPQRITILRGNHESRQITQVYGFYDECLRKYGNANVWKIFTDLFDYFPLTALVESEIFCLHGGLSPSIETLDNIRNFDRVQEVPHEGPMCDLLWSDPDDRCGWGISPRGAGYTFGQDISEQFNHTNNLKLIARAHQLVMDGFNWAHEQKVVTIFSAPNYCYRCGNMASILEVDDCRNHTFIQFEPAPRRGEPDVTRRTPDYFL

SEQ ID NO: 23779 - protein, 270 aa, Arabidopsis thaliana
  peptide (1)..(270): Ceres Seq. ID no. 12396063
  misc_feature (11)..(206): Pfam Name: Calcineurin-like phosphoesterase Pfam Description: Calcineurin-like phosphoesterase
  misc_feature (1)..(270): Homolog of NCBI NO: 11134218 NR Description: Serine/threonine protein phosphatase PP2A-2
  misc_feature (1)..(249): Homolog of NCBI NO: 11262975 NR Description: phosphoprotein phosphatase (EC 3.1.3.16) 2A-4
  misc_feature (1)..(270): Homolog of NCBI NO: 21593204 NR Description: phosphoprotein phosphatase 2A isoform 4
  misc_feature (1)..(270): Homolog of NCBI NO: 81694 NR Description: phosphoprotein phosphatase (EC 3.1.3.16) 2A
  misc_feature (1)..(270): Homolog of NCBI NO: 1352668 NR Description: SERINE/THREONINE PROTEIN PHOSPHATASE PP2A
  misc_feature (1)..(270): Homolog of NCBI NO: 7248363 NR Description: type 2A protein phosphatase-3 [Vicia faba]
  misc_feature (1)..(270): Homolog of NCBI NO: 548441 NR Description: SERINE/THREONINE PROTEIN PHOSPHATASE PP2A
  misc_feature (1)..(270): Homolog of NCBI NO: 418777 NR Description: phosphoprotein phosphatase (EC 3.1.3.16) 2A-alpha
  misc_feature (1)..(270): Homolog of NCBI NO: 18405985 NR Description: protein phosphatase 2A (PP2A)
  misc_feature (1)..(270): Homolog of NCBI NO: 18410971 NR Description: protein phosphatase PP2A catalytic subunit
MDESNVQPVKSPVTICGDIHGQFHDLAELFRIGGKCPDTNYLFMGDYVDRGYYSVETVTLLVGLKVRYPQRITILRGNHESRQITQVYGFYDECLRKYGNANVWKIFTDLFDYFPLTALVESEIFCLHGGLSPSIETLDNIRNFDRVQEVPHEGPMCDLLWSDPDDRCGWGISPRGAGYTFGQDISEQFNHTNNLKLIARAHQLVMDGFNWAHEQKVVTIFSAPNYCYRCGNMASILEVDDCRNHTFIQFEPAPRRGEPDVTRRTPDYFL

SEQ ID NO: 23780 - DNA, 912 bp, Arabidopsis thaliana
  misc_feature (1)..(912): Ceres Seq. ID no. 12336102
  misc_feature: MA Experiment ID: 108433 Result: Down-regulated in Transcription
  misc_feature: MA Experiment 108433 PARAMETER Experiment Name: At_rhl_Mutant2_cDNA_P Parameter: Age (day) Value: 7
  misc_feature: MA Experiment 108433 PARAMETER Experiment Name: At_rhl_Mutant2_cDNA_P Parameter: Organism Value: A. thaliana
  misc_feature: MA Experiment 108433 PARAMETER Experiment Name: At_rhl_Mutant2_cDNA_P Parameter: Plant Line Value: rhl Mutant vs. wt landsburg
  misc_feature: MA Experiment 108433 PARAMETER Experiment Name: At_rhl_Mutant2_cDNA_P Parameter: Tissue Value: Roots
  misc_feature: MA Experiment ID: 108434 Result: Up-regulated in Transcription
  misc_feature: MA Experiment 108434 PARAMETER Experiment Name: At_Root_Tips_cDNA_P Parameter: Tissue Value: Root Tips
  misc_feature: MA Experiment ID: 108573 Result: Up-regulated in Transcription
  misc_feature: MA Experiment 108573 PARAMETER Experiment Name: At_Drought_cDNA_P Parameter: Timepoint (hr) Value: 6
  misc_feature: MA Experiment 108573 PARAMETER Experiment Name: At_Drought_cDNA_P Parameter: Tissue Value: Aerial
  misc_feature: MA Experiment 108573 PARAMETER Experiment Name: At_Drought_cDNA_P Parameter: Treatment Value: Drought vs. No Drought
  misc_feature: MA Experiment ID: 20000087 Result: Up-regulated in Transcription
  misc_feature: MA Experiment 20000087 PARAMETER Experiment Name: At_100uM_ABA_Mutants_cDNA_P Parameter: Plant Line Value: WS
  misc_feature: MA Experiment 20000087 PARAMETER Experiment Name: At_100uM_ABA_Mutants_cDNA_P Parameter: Timepoint (hr) Value: 6
  misc_feature: MA Experiment 20000087 PARAMETER Experiment Name: At_100uM_ABA_Mutants_cDNA_P Parameter: Tissue Value: Aerial
  misc_feature: MA Experiment 20000087 PARAMETER Experiment Name: At_100uM_ABA_Mutants_cDNA_P Parameter: Treatment Value: 100uM ABA vs. No Treatment
  misc_feature: MA Experiment ID: 20000111 Result: Up-regulated in Transcription
  misc_feature: MA Experiment 20000111 PARAMETER Experiment Name: At_42deg_Heat_cDNA_P Parameter: Temperature (deg C) Value: 42 vs. 22
  misc_feature: MA Experiment 20000111 PARAMETER Experiment Name: At_42deg_Heat_cDNA_P Parameter: Timepoint (hr) Value: 6
  misc_feature: MA Experiment 20000111 PARAMETER Experiment Name: At_42deg_Heat_cDNA_P Parameter: Tissue Value: Aerial
  misc_feature: MA Experiment ID: 20000112 Result: Up-regulated in Transcription
  misc_feature: MA Experiment 20000112 PARAMETER Experiment Name: At_42deg_Heat_cDNA_P Parameter: Temperature (deg C) Value: 42 vs. 22
  misc_feature: MA Experiment 20000112 PARAMETER Experiment Name: At_42deg_Heat_cDNA_P Parameter: Timepoint (hr) Value: 2
  misc_feature: MA Experiment 20000112 PARAMETER Experiment Name: At_42deg_Heat_cDNA_P Parameter: Tissue Value: Aerial
  misc_feature: MA Experiment ID: 20000113 Result: Up-regulated in Transcription
  misc_feature: MA Experiment 20000113 PARAMETER Experiment Name: At_42deg_Heat_cDNA_P Parameter: Temperature (deg C) Value: 42 vs. 22
  misc_feature: MA Experiment 20000113 PARAMETER Experiment Name: At_42deg_Heat_cDNA_P Parameter: Timepoint (hr) Value: 8
  misc_feature: MA Experiment 20000113 PARAMETER Experiment Name: At_42deg_Heat_cDNA_P Parameter: Tissue Value: Aerial
  misc_feature: MA Experiment ID: 20000173 Result: Up-regulated in Transcription
  misc_feature: MA Experiment 20000173 PARAMETER Experiment Name: At_42deg_Heat_P Parameter: Age (day) Value: 14
  misc_feature: MA Experiment 20000173 PARAMETER Experiment Name: At_42deg_Heat_P Parameter: Organism Value: A. thaliana
  misc_feature: MA Experiment 20000173 PARAMETER Experiment Name: At_42deg_Heat_P Parameter: Plant Line Value: WS
  misc_feature: MA Experiment 20000173 PARAMETER Experiment Name: At_42deg_Heat_P Parameter: Temperature (deg C) Value: 42 vs. 22
  misc_feature: MA Experiment 20000173 PARAMETER Experiment Name: At_42deg_Heat_P Parameter: Timepoint (hr) Value: 6
  misc_feature: MA Experiment 20000173 PARAMETER Experiment Name: At_42deg_Heat_P Parameter: Tissue Value: Aerial
  misc_feature: MA Experiment ID: 20000224 Result: Down-regulated in Transcription
  misc_feature: MA Experiment ID: 20000227 Result: Down-regulated in Transcription
  misc_feature: MA Experiment 20000227 PARAMETER Experiment Name: At_Root-Tips-vs-Tops_P Parameter: Tissue Value: Root Tips vs. Root Tops
  misc_feature: MA Experiment ID: 20000437 Result: Up-regulated in Transcription
  misc_feature: MA Experiment 20000437 PARAMETER Experiment Name: At_Drought_P Parameter: Age (day) Value: 8
  misc_feature: MA Experiment 20000437 PARAMETER Experiment Name: At_Drought_P Parameter: Organism Value: A. thaliana
  misc_feature: MA Experiment 20000437 PARAMETER Experiment Name: At_Drought_P Parameter: Plant Line Value: WS
  misc_feature: MA Experiment 20000437 PARAMETER Experiment Name: At_Drought_P Parameter: Timepoint (hr) Value: 24
  misc_feature: MA Experiment 20000437 PARAMETER Experiment Name: At_Drought_P Parameter: Tissue Value: Whole Plant
  misc_feature: MA Experiment 20000437 PARAMETER Experiment Name: At_Drought_P Parameter: Treatment Value: Drought vs. No Drought
  misc_feature: MA Experiment ID: 20001451 Result: Up-regulated in Transcription
  misc_feature: MA Experiment 20001451 PARAMETER Experiment Name: At_Far-red-induction_P Parameter: Age (day) Value: 7
  misc_feature: MA Experiment 20001451 PARAMETER Experiment Name: At_Far-red-induction_P Parameter: Light Value: Far-red vs. White
  misc_feature: MA Experiment 20001451 PARAMETER Experiment Name: At_Far-red-induction_P Parameter: Organism Value: A. thaliana
  misc_feature: MA Experiment 20001451 PARAMETER Experiment Name: At_Far-red-induction_P Parameter: Plant Line Value: Columbia
  misc_feature: MA Experiment 20001451 PARAMETER Experiment Name: At_Far-red-induction_P Parameter: Timepoint (hr) Value: 24
  misc_feature: MA Experiment 20001451 PARAMETER Experiment Name: At_Far-red-induction_P Parameter: Tissue Value: Whole Plant
ataaattgaacaagggacctctccaatggccccttctctcgtccttcttcttctgtctaacaatacactaccacacactttcacgctctcttctctcacacctttcttcttcctcaccaaaattcttctctctatgttcttcttcatcttctagctctctcatctcttcttctcgccatagcttcaccttccttctcaagctgtacagttaaagcttaagattaattttcgttaattttaaattcgaagaaaagatgaatcactttgcggttcaaccaaacgcgttcgctgctggcggagatttgagaagcagctccgtttcagttgttgaaagagatcaaaccaccgtcgtttgtccaaaaccacgtcgtattggtctccgtaacaaccatcaccatccttctcgatctctccgttgttacttcagtcatcaattggagctttgtgaatccaaagcagagactgatatcttagatatcatactcaccaaggatggttatggtgcagaacaagttaataagcaggtaatagactcgccgtccccgtttttatgtgggtcgccgccgagcagagtcgctaacccattaacacaggatgctcgatttcgagatgagattgtatcggtttcttcagtgattccgcctcagttgggtttacctccttcttcatctccttcttcttcctctgggaggaaaggaggatgtgttgttagaggcaattttggtaacagcccaaaggttagagttgaagggtttgattgtcttgacagggatagcagaaactgcagcatccctgccttggcttagaaacgaaacccgaaacgaacccttttaggattttcatacatactcttttgagttaactcacaaaaaaaaaaaaacaattagtgcgtcgtaaatataagtgttaagg

SEQ ID NO: 23781 - protein, 183 aa, Arabidopsis thaliana
  peptide (1)..(183): Ceres Seq. ID no. 12336103
  misc_feature (1)..(183): Homolog of NCBI NO: 18396232 NR Description: Expressed protein
  misc_feature (1)..(183): Homolog of NCBI NO: 11762168 NR Description: AT5g16110 [Arabidopsis thaliana]
  misc_feature (1)..(183): Homolog of NCBI NO: 30685676 NR Description: expressed protein [Arabidopsis thaliana]
  misc_feature (1)..(183): Homolog of NCBI NO: 15222278 NR Description: unknown protein; protein id: At1g13390.1
  misc_feature (1)..(183): Homolog of NCBI NO: 18409044 NR Description: expressed protein
MNHFAVQPNAFAAGGDLRSSSVSVVERDQTTVVCPKPRRIGLRNNHHHPSRSLRCYFSHQLELCESKAETDILDIILTKDGYGAEQVNKQVIDSPSPFLCGSPPSRVANPLTQDARFRDEIVSVSSVIPPQLGLPPSSSPSSSSGRKGGCVVRGNFGNSPKVRVEGFDCLDRDSRNCSIPALA

SEQ ID NO: 23782 - DNA, 1103 bp, Arabidopsis thaliana
  misc_feature (1)..(1103): Ceres Seq. ID no. 13494136
  misc_feature: MA Experiment ID: 108577 Result: Down-regulated in Transcription
  misc_feature: MA Experiment 108577 PARAMETER Experiment Name: At_42deg_Heat_cDNA_P Parameter: Temperature (deg C) Value: 42 vs. 22
  misc_feature: MA Experiment 108577 PARAMETER Experiment Name: At_42deg_Heat_cDNA_P Parameter: Timepoint (hr) Value: 6
  misc_feature: MA Experiment 108577 PARAMETER Experiment Name: At_42deg_Heat_cDNA_P Parameter: Tissue Value: Aerial
  misc_feature: MA Experiment ID: 20000495 Result: Up-regulated in Transcription
  misc_feature: MA Experiment 20000495 PARAMETER Experiment Name: At_Guard_Cells_P Parameter: Harvest Date Value: 8/2/2002
  misc_feature: MA Experiment 20000495 PARAMETER Experiment Name: At_Guard_Cells_P Parameter: Organism Value: A. thaliana
  misc_feature: MA Experiment 20000495 PARAMETER Experiment Name: At_Guard_Cells_P Parameter: Tissue Value: Guard Cells vs. Leaves
gttaaggaaaaatctttgatctttggaaaggaagagagcaggcgcaatcgagtaatccaaaggagttgcgttgttctgcgatcacgaagcggtctctcggcaaatctttcgacgcaagacatcgattcgtgtatttcatttttgctttggaactctatgcggaagaaccctaattgattcgccatgggagattccgtttcttcttcatcccgcgtttctgttcatcaatctcttggtgctggttctgttgctgatttgctgctatggagaaaccggactggtgcagtcattttgctaatctcttctactgggttttggttcttattcgagagagctggatacaatctcttgtctttcgtctccaatgttctgcttcttctcgttgcgatcttcttcttatgggccaagtctgctacagttctcaaccgaccgctacctccagttccgaatatggaaatccctgaggagtttgcaaataaggctgctgatgatcttcgggtttggatcaattatgtactgtcaattgcaagtgatatcaccatagctagaaatccgattcgtctccttcaggtttctcttgtcttgtgggctatatcctatgttgggactttaatcaactccctcactcttgtttacattggagttcttctcagtctttcttttcctattgtgtatgagaagtaccaagaccacattgatgagaaagtgaactcgacttctaaattcgttcgaaatatctcaaggaagtttccattgcccataaacaaagagaagaaacatcagtaggtgaaaaacagtccatttggtcaccagactaattacagctacaagaaggagccattactgtaatgctacaagaggatagtcaaagagcagcggaaaaaagtgaatcacagtacagattttcgttcatttctttctgtttcgcttactaggagttttcttcttgtgtgtttttgttgtgttcaagattcatgagtttctggtttttttggtcttttagtttacacgaatgctttgttgcagtattgttccagtagaaacgagaaagatgaatctaatacaacttgagaggttattcaataattaatttgttgattatt

SEQ ID NO: 23783 - protein, 200 aa, Arabidopsis thaliana
  peptide (1)..(200): Ceres Seq. ID no. 13494137
  misc_feature (19)..(173): Homolog of NCBI NO: 30681541 NR Description: reticulon family [Arabidopsis thaliana]
  misc_feature (13)..(199): Homolog of NCBI NO: 34904202 NR Description: P0492F05.25 [Oryza sativa (japonica
  misc_feature (13)..(189): Homolog of NCBI NO: 15222616 NR Description: expressed protein [Arabidopsis thaliana]
  misc_feature (10)..(173): Homolog of NCBI NO: 26450318 NR Description: unknown protein [Arabidopsis thaliana]
  misc_feature (3)..(198): Homolog of NCBI NO: 15232423 NR Description: expressed protein [Arabidopsis thaliana]
  misc_feature (27)..(188): Homolog of NCBI NO: 25411624 NR Description: hypothetical protein At2g15280 [imported] -
  misc_feature (5)..(175): Homolog of NCBI NO: 38345298 NR Description: OSJNBa0043A12.26 [Oryza sativa (japonica
  misc_feature (12)..(188): Homolog of NCBI NO: 30679374 NR Description: expressed protein [Arabidopsis thaliana]
  misc_feature (1)..(200): Homolog of NCBI NO: 21593206 NR Description: unknown [Arabidopsis thaliana]
  misc_feature (1)..(200): Homolog of NCBI NO: 18402246 NR Description: expressed protein [Arabidopsis thaliana]
MGDSVSSSSRVSVHQSLGAGSVADLLLWRNRTGAVILLISSTGFWFLFERAGYNLLSFVSNVLLLLVAIFFLWAKSATVLNRPLPPVPNMEIPEEFANKAADDLRVWINYVLSIASDITIARNPIRLLQVSLVLWAISYVGTLINSLTLVYIGVLLSLSFPIVYEKYQDHIDEKVNSTSKFVRNISRKFPLPINKEKKHQ

SEQ ID NO: 23784 - protein, 111 aa, Arabidopsis thaliana
  peptide (1)..(111): Ceres Seq. ID no. 13494138
  misc_feature (1)..(84): Homolog of NCBI NO: 30681541 NR Description: reticulon family [Arabidopsis thaliana]
  misc_feature (1)..(110): Homolog of NCBI NO: 34904202 NR Description: P0492F05.25 [Oryza sativa (japonica
  misc_feature (1)..(100): Homolog of NCBI NO: 15222616 NR Description: expressed protein [Arabidopsis thaliana]
  misc_feature (1)..(84): Homolog of NCBI NO: 26450318 NR Description: unknown protein [Arabidopsis thaliana]
  misc_feature (1)..(109): Homolog of NCBI NO: 15232423 NR Description: expressed protein [Arabidopsis thaliana]
  misc_feature (1)..(99): Homolog of NCBI NO: 25411624 NR Description: hypothetical protein At2g15280 [imported] -
  misc_feature (1)..(86): Homolog of NCBI NO: 38345298 NR Description: OSJNBa0043A12.26 [Oryza sativa (japonica
  misc_feature (1)..(99): Homolog of NCBI NO: 30679374 NR Description: expressed protein [Arabidopsis thaliana]
  misc_feature (1)..(111): Homolog of NCBI NO: 21593206 NR Description: unknown [Arabidopsis thaliana]
  misc_feature (1)..(111): Homolog of NCBI NO: 18402246 NR Description: expressed protein [Arabidopsis thaliana]
MEIPEEFANKAADDLRVWINYVLSIASDITIARNPIRLLQVSLVLWAISYVGTLINSLTLVYIGVLLSLSFPIVYEKYQDHIDEKVNSTSKFVRNISRKFPLPINKEKKHQ

SEQ ID NO: 23785 - DNA, 458 bp, Arabidopsis thaliana
  misc_feature (1)..(458): Ceres Seq. ID no. 12321551
  misc_feature: MA Experiment ID: 108434 Result: Up-regulated in Transcription
  misc_feature: MA Experiment 108434 PARAMETER Experiment Name: At_Root_Tips_cDNA_P Parameter: Tissue Value: Root Tips
  misc_feature: MA Experiment ID: 108462 Result: Down-regulated in Transcription
  misc_feature: MA Experiment 108462 PARAMETER Experiment Name: At_Germinating_Seeds_cDNA_P Parameter: Age (day) Value: 2 vs. 0
  misc_feature: MA Experiment 108462 PARAMETER Experiment Name: At_Germinating_Seeds_cDNA_P Parameter: Tissue Value: Germinating Seeds
  misc_feature: MA Experiment ID: 108463 Result: Down-regulated in Transcription
  misc_feature: MA Experiment 108463 PARAMETER Experiment Name: At_Germinating_Seeds_cDNA_P Parameter: Age (day) Value: 3 vs. 0
  misc_feature: MA Experiment 108463 PARAMETER Experiment Name: At_Germinating_Seeds_cDNA_P Parameter: Tissue Value: Germinating Seeds
  misc_feature: MA Experiment ID: 108464 Result: Down-regulated in Transcription
  misc_feature: MA Experiment 108464 PARAMETER Experiment Name: At_Germinating_Seeds_cDNA_P Parameter: Age (day) Value: 4 vs. 0
  misc_feature: MA Experiment 108464 PARAMETER Experiment Name: At_Germinating_Seeds_cDNA_P Parameter: Tissue Value: Germinating Seeds
  misc_feature: MA Experiment ID: 108573 Result: Down-regulated in Transcription
  misc_feature: MA Experiment 108573 PARAMETER Experiment Name: At_Drought_cDNA_P Parameter: Timepoint (hr) Value: 6
  misc_feature: MA Experiment 108573 PARAMETER Experiment Name: At_Drought_cDNA_P Parameter: Tissue Value: Aerial
  misc_feature: MA Experiment 108573 PARAMETER Experiment Name: At_Drought_cDNA_P Parameter: Treatment Value: Drought vs. No Drought
  misc_feature: MA Experiment ID: 108577 Result: Down-regulated in Transcription
  misc_feature: MA Experiment 108577 PARAMETER Experiment Name: At_42deg_Heat_cDNA_P Parameter: Temperature (deg C) Value: 42 vs. 22
  misc_feature: MA Experiment 108577 PARAMETER Experiment Name: At_42deg_Heat_cDNA_P Parameter: Timepoint (hr) Value: 6
  misc_feature: MA Experiment 108577 PARAMETER Experiment Name: At_42deg_Heat_cDNA_P Parameter: Tissue Value: Aerial
  misc_feature: MA Experiment ID: 20000265 Result: Up-regulated in Transcription
  misc_feature: MA Experiment 20000265 PARAMETER Experiment Name: At_Open_Flower_P Parameter: Age (day) Value: 21
  misc_feature: MA Experiment 20000265 PARAMETER Experiment Name: At_Open_Flower_P Parameter: Plant Line Value: WS
  misc_feature: MA Experiment 20000265 PARAMETER Experiment Name: At_Open_Flower_P Parameter: Tissue Value: Closed Flower vs. Whole Plant
  misc_feature: MA Experiment ID: 20000794 Result: Down-regulated in Transcription
  misc_feature: MA Experiment 20000794 PARAMETER Experiment Name: At_Petals_P Parameter: Age (day) Value: 23-25 days
  misc_feature: MA Experiment 20000794 PARAMETER Experiment Name: At_Petals_P Parameter: Plant Line Value: WS
  misc_feature: MA Experiment 20000794 PARAMETER Experiment Name: At_Petals_P Parameter: Tissue Value: Petals vs. Whole plant
  misc_feature: MA Experiment ID: 20001558 Result: Up-regulated in Transcription
  misc_feature: MA Experiment 20001558 PARAMETER Experiment Name: At_Drought_Soil_Dry_P Parameter: Age (day) Value: 27
  misc_feature: MA Experiment 20001558 PARAMETER Experiment Name: At_Drought_Soil_Dry_P Parameter: Organism Value: A. thaliana
  misc_feature: MA Experiment 20001558 PARAMETER Experiment Name: At_Drought_Soil_Dry_P Parameter: Plant Line Value: WS
  misc_feature: MA Experiment 20001558 PARAMETER Experiment Name: At_Drought_Soil_Dry_P Parameter: Post Timepoint (hr) Value: 6
  misc_feature: MA Experiment 20001558 PARAMETER Experiment Name: At_Drought_Soil_Dry_P Parameter: Post-Treatment Value: Re-Water vs. No Drought
  misc_feature: MA Experiment 20001558 PARAMETER Experiment Name: At_Drought_Soil_Dry_P Parameter: Timepoint (day) Value: 13
  misc_feature: MA Experiment 20001558 PARAMETER Experiment Name: At_Drought_Soil_Dry_P Parameter: Treatment Value: Drought vs. No Drought
  misc_feature: MA Experiment ID: 20001757 Result: Up-regulated in Transcription
  misc_feature: MA Experiment 20001757 PARAMETER Experiment Name: At_50mM_NH4NO3_L-to-H_P Parameter: Timepoint (hr) Value: 6
  misc_feature: MA Experiment 20001757 PARAMETER Experiment Name: At_50mM_NH4NO3_L-to-H_P Parameter: Tissue Value: Leaf
  misc_feature: MA Experiment 20001757 PARAMETER Experiment Name: At_50mM_NH4NO3_L-to-H_P Parameter: Treatment Value: 50mM NH4NO3 vs 100mM Mannitol
aaaccacaagcgtatcgatatttgttctcccagatcttcgtttcgtctcttcgttctcaaactcatggcgactattccggttaacccgaaaccattcttgaacaacttgaccggcaagactgttatcgtcaagcttaaatggggaatggaatacaaaggttttctcgcctctgttgactcctacatgaacttgcagctgggaaacaccgaagaatatattgatggacaattgacagggaaccttggagagatcttgatcaggtgcaacaatgttttgtatgtccgtggtgtgccagaagatgaagagcttgaagacgctgatcaagactaacctgtattgagtacttagaaattgcaagtctgtgtgttttaatttttgtattctgtgagcactttaatcttagtgtgatgttgttgaatcttaagagtttgttgatcatattcataccttaaaaaac

SEQ ID NO: 23786 - protein, 109 aa, Arabidopsis thaliana
  peptide (1)..(109): Ceres Seq. ID no. 12321552
  misc_feature (31)..(87): Pfam Name: LSM domain Pfam Description: LSM domain
  misc_feature (21)..(96): Homolog of NCBI NO: 39589637 NR Description: Hypothetical protein CBG12250 [Caenorhabditis
  misc_feature (21)..(102): Homolog of NCBI NO: 22024001 NR Description: Developmental embryonic B CG16792-PA
  misc_feature (21)..(102): Homolog of NCBI NO: 495021 NR Description: membrane-associated protein
  misc_feature (22)..(107): Homolog of NCBI NO: 31212897 NR Description: ENSANGP00000002801 [Anopheles gambiae]
  misc_feature (21)..(102): Homolog of NCBI NO: 38079111 NR Description: similar to SNRPF protein [Mus musculus]
  misc_feature (24)..(102): Homolog of NCBI NO: 34864945 NR Description: similar to Small nuclear ribonucleoprotein F
  misc_feature (24)..(102): Homolog of NCBI NO: 4507131 NR Description: small nuclear ribonucleoprotein polypeptide F
  misc_feature (9)..(102): Homolog of NCBI NO: 39645845 NR Description: Unknown (protein for IMAGE:5176590) [Homo sapiens]
  misc_feature (9)..(102): Homolog of NCBI NO: 33876795 NR Description: SNRPF protein [Homo sapiens]
  misc_feature (22)..(109): Homolog of NCBI NO: 15234669 NR Description: snRNP Sm protein F - like
NHKRIDICSPRSSFRLFVLKLMATIPVNPKPFLNNLTGKTVIVKLKWGMEYKGFLASVDSYMNLQLGNTEEYIDGQLTGNLGEILIRCNNVLYVRGVPEDEELEDADQD

SEQ ID NO: 23787 - protein, 88 aa, Arabidopsis thaliana
  peptide (1)..(88): Ceres Seq. ID no. 12321553
  misc_feature (10)..(66): Pfam Name: LSM domain Pfam Description: LSM domain
  misc_feature (1)..(75): Homolog of NCBI NO: 39589637 NR Description: Hypothetical protein CBG12250 [Caenorhabditis
  misc_feature (1)..(81): Homolog of NCBI NO: 22024001 NR Description: Developmental embryonic B CG16792-PA
  misc_feature (1)..(81): Homolog of NCBI NO: 495021 NR Description: membrane-associated protein
  misc_feature (1)..(86): Homolog of NCBI NO: 31212897 NR Description: ENSANGP00000002801 [Anopheles gambiae]
  misc_feature (1)..(81): Homolog of NCBI NO: 38079111 NR Description: similar to SNRPF protein [Mus musculus]
  misc_feature (3)..(81): Homolog of NCBI NO: 34864945 NR Description: similar to Small nuclear ribonucleoprotein F
  misc_feature (3)..(81): Homolog of NCBI NO: 4507131 NR Description: small nuclear ribonucleoprotein polypeptide F
  misc_feature (1)..(81): Homolog of NCBI NO: 39645845 NR Description: Unknown (protein for IMAGE:5176590) [Homo sapiens]
  misc_feature (1)..(81): Homolog of NCBI NO: 33876795 NR Description: SNRPF protein [Homo sapiens]
  misc_feature (1)..(88): Homolog of NCBI NO: 15234669 NR Description: snRNP Sm protein F - like
MATIPVNPKPFLNNLTGKTVIVKLKWGMEYKGFLASVDSYMNLQLGNTEEYIDGQLTGNLGEILIRCNNVLYVRGVPEDEELEDADQD

SEQ ID NO: 23788 - protein, 61 aa, Arabidopsis thaliana
  peptide (1)..(61): Ceres Seq. ID no. 12321554
  misc_feature (1)..(48): Homolog of NCBI NO: 39589637 NR Description: Hypothetical protein CBG12250 [Caenorhabditis
  misc_feature (1)..(54): Homolog of NCBI NO: 22024001 NR Description: Developmental embryonic B CG16792-PA
  misc_feature (1)..(54): Homolog of NCBI NO: 495021 NR Description: membrane-associated protein
  misc_feature (1)..(59): Homolog of NCBI NO: 31212897 NR Description: ENSANGP00000002801 [Anopheles gambiae]
  misc_feature (1)..(54): Homolog of NCBI NO: 38079111 NR Description: similar to SNRPF protein [Mus musculus]
  misc_feature (1)..(54): Homolog of NCBI NO: 34864945 NR Description: similar to Small nuclear ribonucleoprotein F
  misc_feature (1)..(54): Homolog of NCBI NO: 4507131 NR Description: small nuclear ribonucleoprotein polypeptide F
  misc_feature (1)..(54): Homolog of NCBI NO: 39645845 NR Description: Unknown (protein for IMAGE:5176590) [Homo sapiens]
  misc_feature (1)..(54): Homolog of NCBI NO: 33876795 NR Description: SNRPF protein [Homo sapiens]
  misc_feature (1)..(61): Homolog of NCBI NO: 15234669 NR Description: snRNP Sm protein F - like
MEYKGFLASVDSYMNLQLGNTEEYIDGQLTGNLGEILIRCNNVLYVRGVPEDEELEDADQD

SEQ ID NO: 23789 - DNA, 746 bp, Arabidopsis thaliana
  misc_feature (1)..(746): Ceres Seq. ID no. 12396423
  misc_feature: MA Experiment ID: 108434 Result: Down-regulated in Transcription
  misc_feature: MA Experiment 108434 PARAMETER Experiment Name: At_Root_Tips_cDNA_P Parameter: Tissue Value: Root Tips
  misc_feature: MA Experiment ID: 108464 Result: Up-regulated in Transcription
  misc_feature: MA Experiment 108464 PARAMETER Experiment Name: At_Germinating_Seeds_cDNA_P Parameter: Age (day) Value: 4 vs. 0
  misc_feature: MA Experiment 108464 PARAMETER Experiment Name: At_Germinating_Seeds_cDNA_P Parameter: Tissue Value: Germinating Seeds
  misc_feature: MA Experiment ID: 108488 Result: Down-regulated in Transcription
  misc_feature: MA Experiment ID: 108489 Result: Down-regulated in Transcription
  misc_feature: MA Experiment ID: 108573 Result: Up-regulated in Transcription
  misc_feature: MA Experiment 108573 PARAMETER Experiment Name: At_Drought_cDNA_P Parameter: Timepoint (hr) Value: 6
  misc_feature: MA Experiment 108573 PARAMETER Experiment Name: At_Drought_cDNA_P Parameter: Tissue Value: Aerial
  misc_feature: MA Experiment 108573 PARAMETER Experiment Name: At_Drought_cDNA_P Parameter: Treatment Value: Drought vs. No Drought
  misc_feature: MA Experiment ID: 108576 Result: Down-regulated in Transcription
  misc_feature: MA Experiment 108576 PARAMETER Experiment Name: At_42deg_Heat_cDNA_P Parameter: Temperature (deg C) Value: 42 vs. 22
  misc_feature: MA Experiment 108576 PARAMETER Experiment Name: At_42deg_Heat_cDNA_P Parameter: Timepoint (hr) Value: 1
  misc_feature: MA Experiment 108576 PARAMETER Experiment Name: At_42deg_Heat_cDNA_P Parameter: Tissue Value: Aerial
  misc_feature: MA Experiment ID: 108577 Result: Down-regulated in Transcription
  misc_feature: MA Experiment 108577 PARAMETER Experiment Name: At_42deg_Heat_cDNA_P Parameter: Temperature (deg C) Value: 42 vs. 22
  misc_feature: MA Experiment 108577 PARAMETER Experiment Name: At_42deg_Heat_cDNA_P Parameter: Timepoint (hr) Value: 6
  misc_feature: MA Experiment 108577 PARAMETER Experiment Name: At_42deg_Heat_cDNA_P Parameter: Tissue Value: Aerial
  misc_feature: MA Experiment ID: 108579 Result: Down-regulated in Transcription
  misc_feature: MA Experiment 108579 PARAMETER Experiment Name: At_4deg_Cold_cDNA_P Parameter: Temperature (deg C) Value: 4 vs. 22
  misc_feature: MA Experiment 108579 PARAMETER Experiment Name: At_4deg_Cold_cDNA_P Parameter: Timepoint (hr) Value: 6
  misc_feature: MA Experiment 108579 PARAMETER Experiment Name: At_4deg_Cold_cDNA_P Parameter: Tissue Value: Aerial
  misc_feature: MA Experiment ID: 108595 Result: Down-regulated in Transcription
  misc_feature: MA Experiment 108595 PARAMETER Experiment Name: At_Ler-pi_Ovule_cDNA_P Parameter: Plant Line Value: null
  misc_feature: MA Experiment ID: 20000069 Result: Up-regulated in Transcription
  misc_feature: MA Experiment 20000069 PARAMETER Experiment Name: At_100uM_ABA_Mutants_cDNA_P Parameter: Plant Line Value: CS23
  misc_feature: MA Experiment 20000069 PARAMETER Experiment Name: At_100uM_ABA_Mutants_cDNA_P Parameter: Timepoint (hr) Value: 6
  misc_feature: MA Experiment 20000069 PARAMETER Experiment Name: At_100uM_ABA_Mutants_cDNA_P Parameter: Tissue Value: Aerial
  misc_feature: MA Experiment 20000069 PARAMETER Experiment Name: At_100uM_ABA_Mutants_cDNA_P Parameter: Treatment Value: 100uM ABA vs. No Treatment
  misc_feature: MA Experiment ID: 20000071 Result: Up-regulated in Transcription
  misc_feature: MA Experiment 20000071 PARAMETER Experiment Name: At_100uM_ABA_Mutants_cDNA_P Parameter: Plant Line Value: CS8104
  misc_feature: MA Experiment 20000071 PARAMETER Experiment Name: At_100uM_ABA_Mutants_cDNA_P Parameter: Timepoint (hr) Value: 6
  misc_feature: MA Experiment 20000071 PARAMETER Experiment Name: At_100uM_ABA_Mutants_cDNA_P Parameter: Tissue Value: Aerial
  misc_feature: MA Experiment 20000071 PARAMETER Experiment Name: At_100uM_ABA_Mutants_cDNA_P Parameter: Treatment Value: 100uM ABA vs. No Treatment
  misc_feature: MA Experiment ID: 20000089 Result: Up-regulated in Transcription
  misc_feature: MA Experiment ID: 20000111 Result: Down-regulated in Transcription
  misc_feature: MA Experiment 20000111 PARAMETER Experiment Name: At_42deg_Heat_cDNA_P Parameter: Temperature (deg C) Value: 42 vs. 22
  misc_feature: MA Experiment 20000111 PARAMETER Experiment Name: At_42deg_Heat_cDNA_P Parameter: Timepoint (hr) Value: 6
  misc_feature: MA Experiment 20000111 PARAMETER Experiment Name: At_42deg_Heat_cDNA_P Parameter: Tissue Value: Aerial
  misc_feature: MA Experiment ID: 20000113 Result: Down-regulated in Transcription
  misc_feature: MA Experiment 20000113 PARAMETER Experiment Name: At_42deg_Heat_cDNA_P Parameter: Temperature (deg C) Value: 42 vs. 22
  misc_feature: MA Experiment 20000113 PARAMETER Experiment Name: At_42deg_Heat_cDNA_P Parameter: Timepoint (hr) Value: 8
  misc_feature: MA Experiment 20000113 PARAMETER Experiment Name: At_42deg_Heat_cDNA_P Parameter: Tissue Value: Aerial
  misc_feature: MA Experiment ID: 20000117 Result: Up-regulated in Transcription
  misc_feature: MA Experiment 20000117 PARAMETER Experiment Name: At_100uM_ABA_Mutants_cDNA_P Parameter: Plant Line Value: Columbia
  misc_feature: MA Experiment 20000117 PARAMETER Experiment Name: At_100uM_ABA_Mutants_cDNA_P Parameter: Timepoint (hr) Value: 6
  misc_feature: MA Experiment 20000117 PARAMETER Experiment Name: At_100uM_ABA_Mutants_cDNA_P Parameter: Tissue Value: Aerial
  misc_feature: MA Experiment 20000117 PARAMETER Experiment Name: At_100uM_ABA_Mutants_cDNA_P Parameter: Treatment Value: 100uM ABA vs. No Treatment
  misc_feature: MA Experiment ID: 20000328 Result: Down-regulated in Transcription
  misc_feature: MA Experiment 20000328 PARAMETER Experiment Name: At_42deg_Heat_Sub_P Parameter: Age (day) Value: 14
  misc_feature: MA Experiment 20000328 PARAMETER Experiment Name: At_42deg_Heat_Sub_P Parameter: Organism Value: A. thaliana
  misc_feature: MA Experiment 20000328 PARAMETER Experiment Name: At_42deg_Heat_Sub_P Parameter: Plant Line Value: WS
  misc_feature: MA Experiment 20000328 PARAMETER Experiment Name: At_42deg_Heat_Sub_P Parameter: Temperature (deg C) Value: 42 vs. 22
  misc_feature: MA Experiment 20000328 PARAMETER Experiment Name: At_42deg_Heat_Sub_P Parameter: Timepoint (hr) Value: 6
  misc_feature: MA Experiment 20000328 PARAMETER Experiment Name: At_42deg_Heat_Sub_P Parameter: Tissue Value: Aerial
  misc_feature: MA Experiment ID: 20000332 Result: Down-regulated in Transcription
  misc_feature: MA Experiment 20000332 PARAMETER Experiment Name: At_4deg_Cold_Sub_P Parameter: Age (day) Value: 14
  misc_feature: MA Experiment 20000332 PARAMETER Experiment Name: At_4deg_Cold_Sub_P Parameter: Organism Value: A. thaliana
  misc_feature: MA Experiment 20000332 PARAMETER Experiment Name: At_4deg_Cold_Sub_P Parameter: Plant Line Value: WS
  misc_feature: MA Experiment 20000332 PARAMETER Experiment Name: At_4deg_Cold_Sub_P Parameter: Temperature (deg C) Value: 4 vs. 22
  misc_feature: MA Experiment 20000332 PARAMETER Experiment Name: At_4deg_Cold_Sub_P Parameter: Timepoint (hr) Value: 2
  misc_feature: MA Experiment 20000332 PARAMETER Experiment Name: At_4deg_Cold_Sub_P Parameter: Tissue Value: Aerial
  misc_feature: MA Experiment ID: 20000355 Result: Down-regulated in Transcription
  misc_feature: MA Experiment 20000355 PARAMETER Experiment Name: At_Siliques_Sub_P Parameter: Age (day) Value: 21
  misc_feature: MA Experiment 20000355 PARAMETER Experiment Name: At_Siliques_Sub_P Parameter: Organism Value: A. thaliana
  misc_feature: MA Experiment 20000355 PARAMETER Experiment Name: At_Siliques_Sub_P Parameter: Plant Line Value: WS
  misc_feature: MA Experiment 20000355 PARAMETER Experiment Name: At_Siliques_Sub_P Parameter: Tissue Value: Less Than 5mm Siliques vs. Whole Plant
  misc_feature: MA Experiment ID: 20000440 Result: Down-regulated in Transcription
  misc_feature: MA Experiment 20000440 PARAMETER Experiment Name: At_Closed-Flower__Sub_P Parameter: Tissue Value: Closed Flower vs. Whole Plant
atttcaagctttatctctttctttctctcgtctctatctttctctcacactcatgggtcttccaacagatttcaaagagcttcagattccaggttacgtactaaaaacactttacgtcatcggtttctttagagacatggtcgatgctctttgtccttacatcggtctaccaagttttcttgaccacaacgagacctctcgatccgacccgacccgactcgctctctccacgtcagcaactcttgccaacgagttaatcccggtggttcgtttctccgatcttttaaccgatccggaagattgctgcacggtttgcttatccgattttgtatccgacgataagattagacagctgccgaagtgtggacacgtgtttcatcatcgttgtttagaccgttggatcgttgactgtaataagataacgtgcccgatttgtcggaaccggttcttaccggaggaaaagtccacgccgtttgattggggtacttcagattggtttagagatgaagtggagagtaccaactaataatgatggttttacttttactttttacttttttcacggtaatatttttctactgtataattctttcttccaaactactgtataattcaagtataagattatgtaattgtgtatattagcatcaatcatctttctttgttaaagaaccgactgtataaaatcatccaatgtaatctgcttttcttttatttgaataaaaaagtggacagataaaacatct

SEQ ID NO: 23790 - protein, 174 aa, Arabidopsis thaliana
  peptide (1)..(174): Ceres Seq. ID no. 12396424
  misc_feature (102)..(145): Pfam Name: Zinc finger, C3HC4 type (RING finger) Pfam Description: Zinc finger, C3HC4 type (RING finger)
  misc_feature (18)..(174): Homolog of NCBI NO: 11358776 NR Description: RING-H2 finger protein RHA1a [imported] -
  misc_feature (18)..(174): Homolog of NCBI NO: 11358777 NR Description: RING-H2 finger protein RHA1b [imported] -
  misc_feature (70)..(152): Homolog of NCBI NO: 15234956 NR Description: putative protein; protein id: At4g10160.1
  misc_feature (6)..(164): Homolog of NCBI NO: 15238072 NR Description: RING zinc finger protein-like
  misc_feature (18)..(163): Homolog of NCBI NO: 15222553 NR Description: putative RING zinc finger protein
  misc_feature (18)..(174): Homolog of NCBI NO: 15233352 NR Description: RING-H2 finger protein RHA1a -like protein
  misc_feature (18)..(163): Homolog of NCBI NO: 15233117 NR Description: RING finger protein
  misc_feature (6)..(164): Homolog of NCBI NO: 21554155 NR Description: RING zinc finger protein-like [Arabidopsis
  misc_feature (70)..(152): Homolog of NCBI NO: 15234955 NR Description: putative protein; protein id: At4g10150.1
  misc_feature (18)..(174): Homolog of NCBI NO: 15233350 NR Description: RING-H2 finger protein RHA1b
FQALSLSFSRLYLSLTLMGLPTDFKELQIPGYVLKTLYVIGFFRDMVDALCPYIGLPSFLDHNETSRSDPTRLALSTSATLANELIPVVRFSDLLTDPEDCCTVCLSDFVSDDKIRQLPKCGHVFHHRCLDRWIVDCNKITCPICRNRFLPEEKSTPFDWGTSDWFRDEVESTN

SEQ ID NO: 23791 - protein, 157 aa, Arabidopsis thaliana
  peptide (1)..(157): Ceres Seq. ID no. 12396425
  misc_feature (85)..(128): Pfam Name: Zinc finger, C3HC4 type (RING finger) Pfam Description: Zinc finger, C3HC4 type (RING finger)
  misc_feature (53)..(135): Homolog of NCBI NO: 15234955 NR Description: putative protein; protein id: At4g10150.1
  misc_feature (53)..(135): Homolog of NCBI NO: 15234956 NR Description: putative protein; protein id: At4g10160.1
  misc_feature (1)..(147): Homolog of NCBI NO: 21554155 NR Description: RING zinc finger protein-like [Arabidopsis
  misc_feature (1)..(147): Homolog of NCBI NO: 15238072 NR Description: RING zinc finger protein-like
  misc_feature (1)..(146): Homolog of NCBI NO: 15233117 NR Description: RING finger protein
  misc_feature (1)..(146): Homolog of NCBI NO: 15222553 NR Description: putative RING zinc finger protein
  misc_feature (1)..(157): Homolog of NCBI NO: 15233352 NR Description: RING-H2 finger protein RHA1a -like protein
  misc_feature (1)..(157): Homolog of NCBI NO: 11358776 NR Description: RING-H2 finger protein RHA1a [imported] -
  misc_feature (1)..(157): Homolog of NCBI NO: 11358777 NR Description: RING-H2 finger protein RHA1b [imported] -
  misc_feature (1)..(157): Homolog of NCBI NO: 15233350 NR Description: RING-H2 finger protein RHA1b
MGLPTDFKELQIPGYVLKTLYVIGFFRDMVDALCPYIGLPSFLDHNETSRSDPTRLALSTSATLANELIPVVRFSDLLTDPEDCCTVCLSDFVSDDKIRQLPKCGHVFHHRCLDRWIVDCNKITCPICRNRFLPEEKSTPFDWGTSDWFRDEVESTN

SEQ ID NO: 23792 - protein, 129 aa, Arabidopsis thaliana
  peptide (1)..(129): Ceres Seq. ID no. 12396426
  misc_feature (57)..(100): Pfam Name: Zinc finger, C3HC4 type (RING finger) Pfam Description: Zinc finger, C3HC4 type (RING finger)
  misc_feature (25)..(107): Homolog of NCBI NO: 15234955 NR Description: putative protein; protein id: At4g10150.1
  misc_feature (25)..(107): Homolog of NCBI NO: 15234956 NR Description: putative protein; protein id: At4g10160.1
  misc_feature (1)..(119): Homolog of NCBI NO: 21554155 NR Description: RING zinc finger protein-like [Arabidopsis
  misc_feature (1)..(119): Homolog of NCBI NO: 15238072 NR Description: RING zinc finger protein-like
  misc_feature (1)..(118): Homolog of NCBI NO: 15233117 NR Description: RING finger protein
  misc_feature (1)..(118): Homolog of NCBI NO: 15222553 NR Description: putative RING zinc finger protein
  misc_feature (1)..(129): Homolog of NCBI NO: 15233352 NR Description: RING-H2 finger protein RHA1a -like protein
  misc_feature (1)..(129): Homolog of NCBI NO: 11358776 NR Description: RING-H2 finger protein RHA1a [imported] -
  misc_feature (1)..(129): Homolog of NCBI NO: 11358777 NR Description: RING-H2 finger protein RHA1b [imported] -
  misc_feature (1)..(129): Homolog of NCBI NO: 15233350 NR Description: RING-H2 finger protein RHA1b
MVDALCPYIGLPSFLDHNETSRSDPTRLALSTSATLANELIPVVRFSDLLTDPEDCCTVCLSDFVSDDKIRQLPKCGHVFHHRCLDRWIVDCNKITCPICRNRFLPEEKSTPFDWGTSDWFRDEVESTN

SEQ ID NO: 23793 - DNA, 1544 bp, Arabidopsis thaliana
  misc_feature (1)..(1544): Ceres Seq. ID no. 12321518
  misc_feature: MA Experiment ID: 108433 Result: Down-regulated in Transcription
  misc_feature: MA Experiment 108433 PARAMETER Experiment Name: At_rhl_Mutant2_cDNA_P Parameter: Age (day) Value: 7
  misc_feature: MA Experiment 108433 PARAMETER Experiment Name: At_rhl_Mutant2_cDNA_P Parameter: Organism Value: A. thaliana
  misc_feature: MA Experiment 108433 PARAMETER Experiment Name: At_rhl_Mutant2_cDNA_P Parameter: Plant Line Value: rhl Mutant vs. wt landsburg
  misc_feature: MA Experiment 108433 PARAMETER Experiment Name: At_rhl_Mutant2_cDNA_P Parameter: Tissue Value: Roots
  misc_feature: MA Experiment ID: 108434 Result: Up-regulated in Transcription
  misc_feature: MA Experiment 108434 PARAMETER Experiment Name: At_Root_Tips_cDNA_P Parameter: Tissue Value: Root Tips
  misc_feature: MA Experiment ID: 108462 Result: Down-regulated in Transcription
  misc_feature: MA Experiment 108462 PARAMETER Experiment Name: At_Germinating_Seeds_cDNA_P Parameter: Age (day) Value: 2 vs. 0
  misc_feature: MA Experiment 108462 PARAMETER Experiment Name: At_Germinating_Seeds_cDNA_P Parameter: Tissue Value: Germinating Seeds
  misc_feature: MA Experiment ID: 108463 Result: Down-regulated in Transcription
  misc_feature: MA Experiment 108463 PARAMETER Experiment Name: At_Germinating_Seeds_cDNA_P Parameter: Age (day) Value: 3 vs. 0
  misc_feature: MA Experiment 108463 PARAMETER Experiment Name: At_Germinating_Seeds_cDNA_P Parameter: Tissue Value: Germinating Seeds
  misc_feature: MA Experiment ID: 108464 Result: Down-regulated in Transcription
  misc_feature: MA Experiment 108464 PARAMETER Experiment Name: At_Germinating_Seeds_cDNA_P Parameter: Age (day) Value: 4 vs. 0
  misc_feature: MA Experiment 108464 PARAMETER Experiment Name: At_Germinating_Seeds_cDNA_P Parameter: Tissue Value: Germinating Seeds
  misc_feature: MA Experiment ID: 108488 Result: Up-regulated in Transcription
  misc_feature: MA Experiment ID: 108577 Result: Down-regulated in Transcription
  misc_feature: MA Experiment 108577 PARAMETER Experiment Name: At_42deg_Heat_cDNA_P Parameter: Temperature (deg C) Value: 42 vs. 22
  misc_feature: MA Experiment 108577 PARAMETER Experiment Name: At_42deg_Heat_cDNA_P Parameter: Timepoint (hr) Value: 6
  misc_feature: MA Experiment 108577 PARAMETER Experiment Name: At_42deg_Heat_cDNA_P Parameter: Tissue Value: Aerial
  misc_feature: MA Experiment ID: 108585 Result: Down-regulated in Transcription
  misc_feature: MA Experiment 108585 PARAMETER Experiment Name: At_5mM_NaNP_cDNA_P Parameter: Timepoint (hr) Value: 6
  misc_feature: MA Experiment 108585 PARAMETER Experiment Name: At_5mM_NaNP_cDNA_P Parameter: Tissue Value: Aerial
  misc_feature: MA Experiment 108585 PARAMETER Experiment Name: At_5mM_NaNP_cDNA_P Parameter: Treatment Value: null
  misc_feature: MA Experiment ID: 108595 Result: Down-regulated in Transcription
  misc_feature: MA Experiment 108595 PARAMETER Experiment Name: At_Ler-pi_Ovule_cDNA_P Parameter: Plant Line Value: null
  misc_feature: MA Experiment ID: 108668 Result: Down-regulated in Transcription
  misc_feature: MA Experiment 108668 PARAMETER Experiment Name: At_2mM_SA_cDNA_P Parameter: Plant Line Value: WS
  misc_feature: MA Experiment 108668 PARAMETER Experiment Name: At_2mM_SA_cDNA_P Parameter: Timepoint (hr) Value: 6
  misc_feature: MA Experiment 108668 PARAMETER Experiment Name: At_2mM_SA_cDNA_P Parameter: Treatment Value: 2mM SA vs. No Treatment
  misc_feature: MA Experiment ID: 20000087 Result: Down-regulated in Transcription
  misc_feature: MA Experiment 20000087 PARAMETER Experiment Name: At_100uM_ABA_Mutants_cDNA_P Parameter: Plant Line Value: WS
  misc_feature: MA Experiment 20000087 PARAMETER Experiment Name: At_100uM_ABA_Mutants_cDNA_P Parameter: Timepoint (hr) Value: 6
  misc_feature: MA Experiment 20000087 PARAMETER Experiment Name: At_100uM_ABA_Mutants_cDNA_P Parameter: Tissue Value: Aerial
  misc_feature: MA Experiment 20000087 PARAMETER Experiment Name: At_100uM_ABA_Mutants_cDNA_P Parameter: Treatment Value: 100uM ABA vs. No Treatment
  misc_feature: MA Experiment ID: 20000113 Result: Down-regulated in Transcription
  misc_feature: MA Experiment 20000113 PARAMETER Experiment Name: At_42deg_Heat_cDNA_P Parameter: Temperature (deg C) Value: 42 vs. 22
  misc_feature: MA Experiment 20000113 PARAMETER Experiment Name: At_42deg_Heat_cDNA_P Parameter: Timepoint (hr) Value: 8
  misc_feature: MA Experiment 20000113 PARAMETER Experiment Name: At_42deg_Heat_cDNA_P Parameter: Tissue Value: Aerial
  misc_feature: MA Experiment ID: 20000182 Result: Down-regulated in Transcription
  misc_feature: MA Experiment 20000182 PARAMETER Experiment Name: At_2mM_SA_P Parameter: Age (day) Value: 14
  misc_feature: MA Experiment 20000182 PARAMETER Experiment Name: At_2mM_SA_P Parameter: Organism Value: A. thaliana
  misc_feature: MA Experiment 20000182 PARAMETER Experiment Name: At_2mM_SA_P Parameter: Plant Line Value: WS
  misc_feature: MA Experiment 20000182 PARAMETER Experiment Name: At_2mM_SA_P Parameter: Timepoint (hr) Value: 6
  misc_feature: MA Experiment 20000182 PARAMETER Experiment Name: At_2mM_SA_P Parameter: Tissue Value: Aerial
  misc_feature: MA Experiment 20000182 PARAMETER Experiment Name: At_2mM_SA_P Parameter: Treatment Value: 2mM SA vs. No Treatment
  misc_feature: MA Experiment ID: 20000437 Result: Down-regulated in Transcription
  misc_feature: MA Experiment 20000437 PARAMETER Experiment Name: At_Drought_P Parameter: Age (day) Value: 8
  misc_feature: MA Experiment 20000437 PARAMETER Experiment Name: At_Drought_P Parameter: Organism Value: A. thaliana
  misc_feature: MA Experiment 20000437 PARAMETER Experiment Name: At_Drought_P Parameter: Plant Line Value: WS
  misc_feature: MA Experiment 20000437 PARAMETER Experiment Name: At_Drought_P Parameter: Timepoint (hr) Value: 24
  misc_feature: MA Experiment 20000437 PARAMETER Experiment Name: At_Drought_P Parameter: Tissue Value: Whole Plant
  misc_feature: MA Experiment 20000437 PARAMETER Experiment Name: At_Drought_P Parameter: Treatment Value: Drought vs. No Drought
  misc_feature: MA Experiment ID: 20000438 Result: Up-regulated in Transcription
  misc_feature: MA Experiment 20000438 PARAMETER Experiment Name: At_Shoots__P Parameter: Age (day) Value: 14
  misc_feature: MA Experiment 20000438 PARAMETER Experiment Name: At_Shoots__P Parameter: Tissue Value: Shoots vs. Whole Plant
  misc_feature: MA Experiment ID: 20000445 Result: Down-regulated in Transcription
  misc_feature: MA Experiment 20000445 PARAMETER Experiment Name: At_100uM_NAA__P Parameter: Age (day) Value: 14
  misc_feature: MA Experiment 20000445 PARAMETER Experiment Name: At_100uM_NAA__P Parameter: Organism Value: A. thaliana
  misc_feature: MA Experiment 20000445 PARAMETER Experiment Name: At_100uM_NAA__P Parameter: Plant Line Value: WS
  misc_feature: MA Experiment 20000445 PARAMETER Experiment Name: At_100uM_NAA__P Parameter: Timepoint (hr) Value: 6
  misc_feature: MA Experiment 20000445 PARAMETER Experiment Name: At_100uM_NAA__P Parameter: Tissue Value: Aerial
  misc_feature: MA Experiment 20000445 PARAMETER Experiment Name: At_100uM_NAA__P Parameter: Treatment Value: 100uM NAA vs. No Treatment
  misc_feature: MA Experiment ID: 20000794 Result: Down-regulated in Transcription
  misc_feature: MA Experiment 20000794 PARAMETER Experiment Name: At_Petals_P Parameter: Age (day) Value: 23-25 days
  misc_feature: MA Experiment 20000794 PARAMETER Experiment Name: At_Petals_P Parameter: Plant Line Value: WS
  misc_feature: MA Experiment 20000794 PARAMETER Experiment Name: At_Petals_P Parameter: Tissue Value: Petals vs. Whole plant
  misc_feature: MA Experiment ID: 20001248 Result: Down-regulated in Transcription
  misc_feature: MA Experiment 20001248 PARAMETER Experiment Name: At_Far-red-induction_P Parameter: Age (day) Value: 7
  misc_feature: MA Experiment 20001248 PARAMETER Experiment Name: At_Far-red-induction_P Parameter: Light Value: Far-red vs. White
  misc_feature: MA Experiment 20001248 PARAMETER Experiment Name: At_Far-red-induction_P Parameter: Organism Value: A. thaliana
  misc_feature: MA Experiment 20001248 PARAMETER Experiment Name: At_Far-red-induction_P Parameter: Plant Line Value: Columbia
  misc_feature: MA Experiment 20001248 PARAMETER Experiment Name: At_Far-red-induction_P Parameter: Timepoint (hr) Value: 4
  misc_feature: MA Experiment 20001248 PARAMETER Experiment Name: At_Far-red-induction_P Parameter: Tissue Value: Whole Plant
  misc_feature: MA Experiment ID: 20001450 Result: Down-regulated in Transcription
  misc_feature: MA Experiment 20001450 PARAMETER Experiment Name: At_Far-red-induction_P Parameter: Age (day) Value: 7
  misc_feature: MA Experiment 20001450 PARAMETER Experiment Name: At_Far-red-induction_P Parameter: Light Value: Far-red vs. White
  misc_feature: MA Experiment 20001450 PARAMETER Experiment Name: At_Far-red-induction_P Parameter: Organism Value: A. thaliana
  misc_feature: MA Experiment 20001450 PARAMETER Experiment Name: At_Far-red-induction_P Parameter: Plant Line Value: Columbia
  misc_feature: MA Experiment 20001450 PARAMETER Experiment Name: At_Far-red-induction_P Parameter: Timepoint (hr) Value: 8
  misc_feature: MA Experiment 20001450 PARAMETER Experiment Name: At_Far-red-induction_P Parameter: Tissue Value: Whole Plant
  misc_feature: MA Experiment ID: 20001451 Result: Down-regulated in Transcription
  misc_feature: MA Experiment 20001451 PARAMETER Experiment Name: At_Far-red-induction_P Parameter: Age (day) Value: 7
  misc_feature: MA Experiment 20001451 PARAMETER Experiment Name: At_Far-red-induction_P Parameter: Light Value: Far-red vs. White
  misc_feature: MA Experiment 20001451 PARAMETER Experiment Name: At_Far-red-induction_P Parameter: Organism Value: A. thaliana
  misc_feature: MA Experiment 20001451 PARAMETER Experiment Name: At_Far-red-induction_P Parameter: Plant Line Value: Columbia
  misc_feature: MA Experiment 20001451 PARAMETER Experiment Name: At_Far-red-induction_P Parameter: Timepoint (hr) Value: 24
  misc_feature: MA Experiment 20001451 PARAMETER Experiment Name: At_Far-red-induction_P Parameter: Tissue Value: Whole Plant
  misc_feature: MA Experiment ID: 20001757 Result: Up-regulated in Transcription
  misc_feature: MA Experiment 20001757 PARAMETER Experiment Name: At_50mM_NH4NO3_L-to-H_P Parameter: Timepoint (hr) Value: 6
  misc_feature: MA Experiment 20001757 PARAMETER Experiment Name: At_50mM_NH4NO3_L-to-H_P Parameter: Tissue Value: Leaf
  misc_feature: MA Experiment 20001757 PARAMETER Experiment Name: At_50mM_NH4NO3_L-to-H_P Parameter: Treatment Value: 50mM NH4NO3 vs 100mM Mannitol
aaaaacgaaaccacagagagaaagcctccgtctcccttatcaaagaagaagaagacgtgtataacaaaacactagacacattgtgaagatagaaaaaaatggagagagcagcaattctcccgagtgttaatcaaaattacctactttgtccttcacgcgccttctccacgcgcctccactcctctactcgtaacttatcgccgccgtcatttgcctccatcaagcttcagcattcttcttcctctgtttcttctaatggtggaatctctcttactcgatgcaacgctgtttcgtccaattcttccagtacgttggtaactgaattagccgacatagattgggataccgttggatttgggcttaagccagctgattatatgtatgtgatgaaatgtaacattgatggagagttctcaaaaggtgagttgcaacgttttgggaatattgaaattagcccatctgctggtgtactcaactatggacagggattgtttgaagggctaaaagcttacagaaagaaagatggtaataacatcctcctctttcgtcctgaggagaatgcaaagcgtatgagaaatggtgctgagaggatgtgtatgcctgctccaaccgttgagcagtttgtagaagctgtgacagaaactgtactagcaaacaaacgttgggttccaccaccaggtaaaggttccttatatgttagaccattgctaatgggaacaggagctgttcttggtcttgcgcctgcaccagaatatactttcattatctatgtttcgcctgttgggaactacttcaaggaaggtgtggcacctatcaatttgattgtggagaatgaatttcaccgtgcaactcctggtggtaccggaggtgttaaaaccataggcaattatgctgcagtactgaaggcacagtcaattgcgaaagctaaaggatattccgatgttttgtaccttgattgcatttacaaaagatatcttgaggaggtctcgtcttgcaatattttcatcgtgaaggacaatgtgatatctactcctgaaataaaaggaaccattttacccggtattactcgaaaaagtatgatagacgtggctcgaacacaagggtttcaggtggaggaacggaatgtgacagtggatgaattgttagaagcagacgaggttttctgcacaggaaccgccgtggttgtctctcctgttggaagcgtcacttacaaaggcaaaagagtgtcttacggagaaggtaccttcggaactgtgtcgaagcaactctacaccgttctgacaagcttgcagatgggtctgattgaagacaacatgaaatggactgtgaatcttagttaagccaggcgaatgcattgcatcaattcggctgcttggttttgctttcttttctttggtctgtggttctgattcgtgaaactatgagttggattgtttagaatctggttgatctagaacttagctggttcaagatcattagatgttgttgcatcataccaataatattatctttagatctctgtttctgattagatggttacatcc

SEQ ID NO: 23794 - protein, 413 aa, Arabidopsis thaliana
  peptide (1)..(413): Ceres Seq. ID no. 12321519
  misc_feature (107)..(395): Pfam Name: Aminotransferase class IV Pfam Description: Aminotransferase class IV
  misc_feature (153)..(413): Homolog of NCBI NO: 37536656 NR Description: putative aminotransferase
  misc_feature (44)..(375): Homolog of NCBI NO: 7486519 NR Description: hypothetical protein F6H11.110 - Arabidopsis
  misc_feature (16)..(413): Homolog of NCBI NO: 34902362 NR Description: Putative aminotransferase
  misc_feature (1)..(412): Homolog of NCBI NO: 6319165 NR Description: branched-chain amino acid aminotransferase
  misc_feature (42)..(412): Homolog of NCBI NO: 6319167 NR Description: branched-chain amino acid aminotransferase
  misc_feature (42)..(413): Homolog of NCBI NO: 15239157 NR Description: branched-chain amino acid aminotransferase
  misc_feature (1)..(413): Homolog of NCBI NO: 26391655 NR Description: Branched-chain amino acid aminotransferase 5,
  misc_feature (1)..(413): Homolog of NCBI NO: 11280250 NR Description: branched-chain-amino-acid transaminase-like
  misc_feature (1)..(413): Homolog of NCBI NO: 21593211 NR Description: branched-chain-amino-acid transaminase-like
  misc_feature (1)..(413): Homolog of NCBI NO: 18408919 NR Description: branched-chain-amino-acid transaminase -like
MERAAILPSVNQNYLLCPSRAFSTRLHSSTRNLSPPSFASIKLQHSSSSVSSNGGISLTRCNAVSSNSSSTLVTELADIDWDTVGFGLKPADYMYVMKCNIDGEFSKGELQRFGNIEISPSAGVLNYGQGLFEGLKAYRKKDGNNILLFRPEENAKRMRNGAERMCMPAPTVEQFVEAVTETVLANKRWVPPPGKGSLYVRPLLMGTGAVLGLAPAPEYTFIIYVSPVGNYFKEGVAPINLIVENEFHRATPGGTGGVKTIGNYAAVLKAQSIAKAKGYSDVLYLDCIYKRYLEEVSSCNIFIVKDNVISTPEIKGTILPGITRKSMIDVARTQGFQVEERNVTVDELLEADEVFCTGTAVVVSPVGSVTYKGKRVSYGEGTFGTVSKQLYTVLTSLQMGLIEDNMKWTVNLS

SEQ ID NO: 23795 - protein, 320 aa, Arabidopsis thaliana
  peptide (1)..(320): Ceres Seq. ID no. 12321520
  misc_feature (14)..(302): Pfam Name: Aminotransferase class IV Pfam Description: Aminotransferase class IV
  misc_feature (60)..(320): Homolog of NCBI NO: 37536656 NR Description: putative aminotransferase
  misc_feature (1)..(282): Homolog of NCBI NO: 7486519 NR Description: hypothetical protein F6H11.110 - Arabidopsis
  misc_feature (1)..(320): Homolog of NCBI NO: 34902362 NR Description: Putative aminotransferase
  misc_feature (1)..(319): Homolog of NCBI NO: 6319165 NR Description: branched-chain amino acid aminotransferase
  misc_feature (1)..(319): Homolog of NCBI NO: 6319167 NR Description: branched-chain amino acid aminotransferase
  misc_feature (1)..(320): Homolog of NCBI NO: 15239157 NR Description: branched-chain amino acid aminotransferase
  misc_feature (1)..(320): Homolog of NCBI NO: 26391655 NR Description: Branched-chain amino acid aminotransferase 5,
  misc_feature (1)..(320): Homolog of NCBI NO: 11280250 NR Description: branched-chain-amino-acid transaminase-like
  misc_feature (1)..(320): Homolog of NCBI NO: 21593211 NR Description: branched-chain-amino-acid transaminase-like
  misc_feature (1)..(320): Homolog of NCBI NO: 18408919 NR Description: branched-chain-amino-acid transaminase -like
MYVMKCNIDGEFSKGELQRFGNIEISPSAGVLNYGQGLFEGLKAYRKKDGNNILLFRPEENAKRMRNGAERMCMPAPTVEQFVEAVTETVLANKRWVPPPGKGSLYVRPLLMGTGAVLGLAPAPEYTFIIYVSPVGNYFKEGVAPINLIVENEFHRATPGGTGGVKTIGNYAAVLKAQSIAKAKGYSDVLYLDCIYKRYLEEVSSCNIFIVKDNVISTPEIKGTILPGITRKSMIDVARTQGFQVEERNVTVDELLEADEVFCTGTAVVVSPVGSVTYKGKRVSYGEGTFGTVSKQLYTVLTSLQMGLIEDNMKWTVNLS

SEQ ID NO: 23796 - protein, 317 aa, Arabidopsis thaliana
  peptide (1)..(317): Ceres Seq. ID no. 12321521
  misc_feature (11)..(299): Pfam Name: Aminotransferase class IV Pfam Description: Aminotransferase class IV
  misc_feature (57)..(317): Homolog of NCBI NO: 37536656 NR Description: putative aminotransferase
  misc_feature (1)..(279): Homolog of NCBI NO: 7486519 NR Description: hypothetical protein F6H11.110 - Arabidopsis
  misc_feature (1)..(317): Homolog of NCBI NO: 34902362 NR Description: Putative aminotransferase
  misc_feature (1)..(316): Homolog of NCBI NO: 6319165 NR Description: branched-chain amino acid aminotransferase
  misc_feature (1)..(316): Homolog of NCBI NO: 6319167 NR Description: branched-chain amino acid aminotransferase
  misc_feature (1)..(317): Homolog of NCBI NO: 15239157 NR Description: branched-chain amino acid aminotransferase
  misc_feature (1)..(317): Homolog of NCBI NO: 26391655 NR Description: Branched-chain amino acid aminotransferase 5,
  misc_feature (1)..(317): Homolog of NCBI NO: 11280250 NR Description: branched-chain-amino-acid transaminase-like
  misc_feature (1)..(317): Homolog of NCBI NO: 21593211 NR Description: branched-chain-amino-acid transaminase-like
  misc_feature (1)..(317): Homolog of NCBI NO: 18408919 NR Description: branched-chain-amino-acid transaminase -like
MKCNIDGEFSKGELQRFGNIEISPSAGVLNYGQGLFEGLKAYRKKDGNNILLFRPEENAKRMRNGAERMCMPAPTVEQFVEAVTETVLANKRWVPPPGKGSLYVRPLLMGTGAVLGLAPAPEYTFIIYVSPVGNYFKEGVAPINLIVENEFHRATPGGTGGVKTIGNYAAVLKAQSIAKAKGYSDVLYLDCIYKRYLEEVSSCNIFIVKDNVISTPEIKGTILPGITRKSMIDVARTQGFQVEERNVTVDELLEADEVFCTGTAVVVSPVGSVTYKGKRVSYGEGTFGTVSKQLYTVLTSLQMGLIEDNMKWTVNLS

SEQ ID NO: 23797 - DNA, 1197 bp, Arabidopsis thaliana
  misc_feature (1)..(1197): Ceres Seq. ID no. 13649307
  misc_feature: MA Experiment ID: 20000227 Result: Down-regulated in Transcription
  misc_feature: MA Experiment 20000227 PARAMETER Experiment Name: At_Root-Tips-vs-Tops_P Parameter: Tissue Value: Root Tips vs. Root Tops
  misc_feature: MA Experiment ID: 20000234 Result: Up-regulated in Transcription
  misc_feature: MA Experiment 20000234 PARAMETER Experiment Name: At_Siliques_P Parameter: Age (day) Value: 21
  misc_feature: MA Experiment 20000234 PARAMETER Experiment Name: At_Siliques_P Parameter: Organism Value: A. thaliana
  misc_feature: MA Experiment 20000234 PARAMETER Experiment Name: At_Siliques_P Parameter: Plant Line Value: WS
  misc_feature: MA Experiment 20000234 PARAMETER Experiment Name: At_Siliques_P Parameter: Tissue Value: Less Than 5mm Siliques vs. Whole Plant
  misc_feature: MA Experiment ID: 20000235 Result: Up-regulated in Transcription
  misc_feature: MA Experiment 20000235 PARAMETER Experiment Name: At_Siliques_P Parameter: Age (day) Value: 21
  misc_feature: MA Experiment 20000235 PARAMETER Experiment Name: At_Siliques_P Parameter: Organism Value: A. thaliana
  misc_feature: MA Experiment 20000235 PARAMETER Experiment Name: At_Siliques_P Parameter: Plant Line Value: WS
  misc_feature: MA Experiment 20000235 PARAMETER Experiment Name: At_Siliques_P Parameter: Tissue Value: 5-10mm Siliques vs. Whole Plant
  misc_feature: MA Experiment ID: 20000264 Result: Up-regulated in Transcription
  misc_feature: MA Experiment 20000264 PARAMETER Experiment Name: At_Open_Flower_P Parameter: Age (day) Value: 21
  misc_feature: MA Experiment 20000264 PARAMETER Experiment Name: At_Open_Flower_P Parameter: Plant Line Value: WS
  misc_feature: MA Experiment 20000264 PARAMETER Experiment Name: At_Open_Flower_P Parameter: Tissue Value: Open Flower vs. Whole Plant
  misc_feature: MA Experiment ID: 20000265 Result: Up-regulated in Transcription
  misc_feature: MA Experiment 20000265 PARAMETER Experiment Name: At_Open_Flower_P Parameter: Age (day) Value: 21
  misc_feature: MA Experiment 20000265 PARAMETER Experiment Name: At_Open_Flower_P Parameter: Plant Line Value: WS
  misc_feature: MA Experiment 20000265 PARAMETER Experiment Name: At_Open_Flower_P Parameter: Tissue Value: Closed Flower vs. Whole Plant
  misc_feature: MA Experiment ID: 20000286 Result: Up-regulated in Transcription
  misc_feature: MA Experiment 20000286 PARAMETER Experiment Name: At_Open_Flower_P Parameter: Age (day) Value: 21
  misc_feature: MA Experiment 20000286 PARAMETER Experiment Name: At_Open_Flower_P Parameter: Plant Line Value: WS
  misc_feature: MA Experiment 20000286 PARAMETER Experiment Name: At_Open_Flower_P Parameter: Tissue Value: Half Open vs. Whole Plant
  misc_feature: MA Experiment ID: 20000438 Result: Down-regulated in Transcription
  misc_feature: MA Experiment 20000438 PARAMETER Experiment Name: At_Shoots__P Parameter: Age (day) Value: 14
  misc_feature: MA Experiment 20000438 PARAMETER Experiment Name: At_Shoots__P Parameter: Tissue Value: Shoots vs. Whole Plant
  misc_feature: MA Experiment ID: 20000439 Result: Up-regulated in Transcription
  misc_feature: MA Experiment 20000439 PARAMETER Experiment Name: At_Roots__P Parameter: Age (day) Value: 14 vs. 21
  misc_feature: MA Experiment 20000439 PARAMETER Experiment Name: At_Roots__P Parameter: Organism Value: A. thaliana
  misc_feature: MA Experiment 20000439 PARAMETER Experiment Name: At_Roots__P Parameter: Tissue Value: Roots vs. Whole Plant
actccctattcttcagtaatgactaatattagaactctctatactactagctaaaactaaaaattgaagaaaaaacatgagtctcaccaccgacgaaatcgaagtgagagatttcgtggtgaaccaaaagaatggagtgaaaggactcgtcgactttctaaccctaaccacacttccttctccatacattcaacctcctcaagaacgcttcacttccgacaagatcctcctcggatcacctgtcccggtcattgacgtgtccaattggaatgaaccgcacgtggctagagagatctgccatgcagcgtcaaagctcggcttgtttcagatagtgaaccacgggatagctccggctgagttcaagggtgtgattgctgcggcgcgtgggtttttcgagttgccggcggaggagagaagaaggtattggagagggagttcagtgtcggagacggcgtggttgaccacaagtttcaatccttgcatagaaagtgttttggaatggagagatttcctcaagtttgagtatcttcctcaacgacatgacttcgctgccacgtggccttctgtctgcaaggaacaagtgatagaccatttcaaaaggatcaaaccaatcacagagaggatcttaaacatactcatcaacaatctaaacacaatcatcgatgagtccaataaagaaaccctaatgggaacaatgagaatgaacttcaactactatccgaaatgtcctgagccaagcctggccataggaactggtcgccactcagacatcaacactctcactctcctcctacaagaagatggtgtattaagcagtctttacgcccgagccactgaggatggagacaaatggattcatgtccctccaattccgggagctattgtcgttaatatcggagatgtattacagatattgagcaatgataggtataggagcgtggagcattgtgtggtggtcaataagtattgtagccgggtttccattccggttttctgcggaccggttcatgattcggttattgagccgttaccggaggtgttagataagaacaatgagatggctcggtatagaaagattgtgtattcggactacttgaagtttttttttggaagacctcatgatggaaagaagactattgagtcgataaaattaccatgatatgatttacgaagcttaaatcatcattatctacggcc

SEQ ID NO: 23798 - protein, 360 aa, Arabidopsis thaliana
  peptide (1)..(360): Ceres Seq. ID no. 13649308
  misc_feature (205)..(309): Pfam Name: 2OG-Fe(II) oxygenase superfamily Pfam Description: 2OG-Fe(II) oxygenase superfamily
  misc_feature (26)..(360): Homolog of NCBI NO: 15235126 NR Description: oxidoreductase, 2OG-Fe(II) oxygenase family
  misc_feature (32)..(358): Homolog of NCBI NO: 38345872 NR Description: OSJNBa0064M23.14 [Oryza sativa (japonica
  misc_feature (33)..(358): Homolog of NCBI NO: 15235124 NR Description: oxidoreductase, 2OG-Fe(II) oxygenase family
  misc_feature (6)..(355): Homolog of NCBI NO: 15230628 NR Description: oxidoreductase, 2OG-Fe(II) oxygenase family
  misc_feature (18)..(359): Homolog of NCBI NO: 119640 NR Description: 1-AMINOCYCLOPROPANE-1-CARBOXYLATE OXIDASE HOMOLOG
  misc_feature (32)..(355): Homolog of NCBI NO: 37536444 NR Description: unknown protein [Oryza sativa (japonica
  misc_feature (3)..(355): Homolog of NCBI NO: 15222690 NR Description: oxidoreductase, 2OG-Fe(II) oxygenase family
  misc_feature (9)..(359): Homolog of NCBI NO: 15231296 NR Description: oxidoreductase, 2OG-Fe(II) oxygenase family
  misc_feature (73)..(360): Homolog of NCBI NO: 11022649 NR Description: 1-aminocyclopropane-1-carboxylate oxidase-like
  misc_feature (1)..(360): Homolog of NCBI NO: 18416826 NR Description: oxidoreductase, 2OG-Fe(II) oxygenase family
MSLTTDEIEVRDFVVNQKNGVKGLVDFLTLTTLPSPYIQPPQERFTSDKILLGSPVPVIDVSNWNEPHVAREICHAASKLGLFQIVNHGIAPAEFKGVIAAARGFFELPAEERRRYWRGSSVSETAWLTTSFNPCIESVLEWRDFLKFEYLPQRHDFAATWPSVCKEQVIDHFKRIKPITERILNILINNLNTIIDESNKETLMGTMRMNFNYYPKCPEPSLAIGTGRHSDINTLTLLLQEDGVLSSLYARATEDGDKWIHVPPIPGAIVVNIGDVLQILSNDRYRSVEHCVVVNKYCSRVSIPVFCGPVHDSVIEPLPEVLDKNNEMARYRKIVYSDYLKFFFGRPHDGKKTIESIKLP

SEQ ID NO: 23799 - DNA, 1195 bp, Arabidopsis thaliana
  misc_feature (1)..(1195): Ceres Seq. ID no. 12738182
  misc_feature: MA Experiment ID: 108435 Result: Up-regulated in Transcription
  misc_feature: MA Experiment 108435 PARAMETER Experiment Name: At_stm_Mutants_cDNA_P Parameter: Plant Line Value: wt Landsburg vs stm
  misc_feature: MA Experiment 108435 PARAMETER Experiment Name: At_stm_Mutants_cDNA_P Parameter: Tissue Value: Shoot Apical Meristem Region
  misc_feature: MA Experiment ID: 108461 Result: Down-regulated in Transcription
  misc_feature: MA Experiment 108461 PARAMETER Experiment Name: At_Germinating_Seeds_cDNA_P Parameter: Age (day) Value: 1 vs. 0
  misc_feature: MA Experiment 108461 PARAMETER Experiment Name: At_Germinating_Seeds_cDNA_P Parameter: Tissue Value: Germinating Seeds
  misc_feature: MA Experiment ID: 108462 Result: Down-regulated in Transcription
  misc_feature: MA Experiment 108462 PARAMETER Experiment Name: At_Germinating_Seeds_cDNA_P Parameter: Age (day) Value: 2 vs. 0
  misc_feature: MA Experiment 108462 PARAMETER Experiment Name: At_Germinating_Seeds_cDNA_P Parameter: Tissue Value: Germinating Seeds
  misc_feature: MA Experiment ID: 108463 Result: Down-regulated in Transcription
  misc_feature: MA Experiment 108463 PARAMETER Experiment Name: At_Germinating_Seeds_cDNA_P Parameter: Age (day) Value: 3 vs. 0
  misc_feature: MA Experiment 108463 PARAMETER Experiment Name: At_Germinating_Seeds_cDNA_P Parameter: Tissue Value: Germinating Seeds
  misc_feature: MA Experiment ID: 108464 Result: Down-regulated in Transcription
  misc_feature: MA Experiment 108464 PARAMETER Experiment Name: At_Germinating_Seeds_cDNA_P Parameter: Age (day) Value: 4 vs. 0
  misc_feature: MA Experiment 108464 PARAMETER Experiment Name: At_Germinating_Seeds_cDNA_P Parameter: Tissue Value: Germinating Seeds
  misc_feature: MA Experiment ID: 20000111 Result: Down-regulated in Transcription
  misc_feature: MA Experiment 20000111 PARAMETER Experiment Name: At_42deg_Heat_cDNA_P Parameter: Temperature (deg C) Value: 42 vs. 22
  misc_feature: MA Experiment 20000111 PARAMETER Experiment Name: At_42deg_Heat_cDNA_P Parameter: Timepoint (hr) Value: 6
  misc_feature: MA Experiment 20000111 PARAMETER Experiment Name: At_42deg_Heat_cDNA_P Parameter: Tissue Value: Aerial
  misc_feature: MA Experiment ID: 20000112 Result: Down-regulated in Transcription
  misc_feature: MA Experiment 20000112 PARAMETER Experiment Name: At_42deg_Heat_cDNA_P Parameter: Temperature (deg C) Value: 42 vs. 22
  misc_feature: MA Experiment 20000112 PARAMETER Experiment Name: At_42deg_Heat_cDNA_P Parameter: Timepoint (hr) Value: 2
  misc_feature: MA Experiment 20000112 PARAMETER Experiment Name: At_42deg_Heat_cDNA_P Parameter: Tissue Value: Aerial
  misc_feature: MA Experiment ID: 20000113 Result: Down-regulated in Transcription
  misc_feature: MA Experiment 20000113 PARAMETER Experiment Name: At_42deg_Heat_cDNA_P Parameter: Temperature (deg C) Value: 42 vs. 22
  misc_feature: MA Experiment 20000113 PARAMETER Experiment Name: At_42deg_Heat_cDNA_P Parameter: Timepoint (hr) Value: 8
  misc_feature: MA Experiment 20000113 PARAMETER Experiment Name: At_42deg_Heat_cDNA_P Parameter: Tissue Value: Aerial
  misc_feature: MA Experiment ID: 20000144 Result: Down-regulated in Transcription
  misc_feature: MA Experiment 20000144 PARAMETER Experiment Name: At_42deg_Heat_cDNA_P Parameter: Temperature (deg C) Value: 42 vs. 22
  misc_feature: MA Experiment 20000144 PARAMETER Experiment Name: At_42deg_Heat_cDNA_P Parameter: Timepoint (hr) Value: 1
  misc_feature: MA Experiment 20000144 PARAMETER Experiment Name: At_42deg_Heat_cDNA_P Parameter: Tissue Value: Aerial
  misc_feature: MA Experiment ID: 20000179 Result: Down-regulated in Transcription
  misc_feature: MA Experiment 20000179 PARAMETER Experiment Name: At_Germinating_Seeds_P Parameter: Age (hr) Value: 6 vs. 0
  misc_feature: MA Experiment 20000179 PARAMETER Experiment Name: At_Germinating_Seeds_P Parameter: Tissue Value: Germinating Seeds
  misc_feature: MA Experiment ID: 20000180 Result: Down-regulated in Transcription
  misc_feature: MA Experiment 20000180 PARAMETER Experiment Name: At_Germinating_Seeds_P Parameter: Age (hr) Value: 24 vs. 0
  misc_feature: MA Experiment 20000180 PARAMETER Experiment Name: At_Germinating_Seeds_P Parameter: Tissue Value: Germinating Seeds
  misc_feature: MA Experiment ID: 20000227 Result: Down-regulated in Transcription
  misc_feature: MA Experiment 20000227 PARAMETER Experiment Name: At_Root-Tips-vs-Tops_P Parameter: Tissue Value: Root Tips vs. Root Tops
  misc_feature: MA Experiment ID: 20000234 Result: Up-regulated in Transcription
  misc_feature: MA Experiment 20000234 PARAMETER Experiment Name: At_Siliques_P Parameter: Age (day) Value: 21
  misc_feature: MA Experiment 20000234 PARAMETER Experiment Name: At_Siliques_P Parameter: Organism Value: A. thaliana
  misc_feature: MA Experiment 20000234 PARAMETER Experiment Name: At_Siliques_P Parameter: Plant Line Value: WS
  misc_feature: MA Experiment 20000234 PARAMETER Experiment Name: At_Siliques_P Parameter: Tissue Value: Less Than 5mm Siliques vs. Whole Plant
  misc_feature: MA Experiment ID: 20000235 Result: Up-regulated in Transcription
  misc_feature: MA Experiment 20000235 PARAMETER Experiment Name: At_Siliques_P Parameter: Age (day) Value: 21
  misc_feature: MA Experiment 20000235 PARAMETER Experiment Name: At_Siliques_P Parameter: Organism Value: A. thaliana
  misc_feature: MA Experiment 20000235 PARAMETER Experiment Name: At_Siliques_P Parameter: Plant Line Value: WS
  misc_feature: MA Experiment 20000235 PARAMETER Experiment Name: At_Siliques_P Parameter: Tissue Value: 5-10mm Siliques vs. Whole Plant
  misc_feature: MA Experiment ID: 20000264 Result: Up-regulated in Transcription
  misc_feature: MA Experiment 20000264 PARAMETER Experiment Name: At_Open_Flower_P Parameter: Age (day) Value: 21
  misc_feature: MA Experiment 20000264 PARAMETER Experiment Name: At_Open_Flower_P Parameter: Plant Line Value: WS
  misc_feature: MA Experiment 20000264 PARAMETER Experiment Name: At_Open_Flower_P Parameter: Tissue Value: Open Flower vs. Whole Plant
  misc_feature: MA Experiment ID: 20000265 Result: Up-regulated in Transcription
  misc_feature: MA Experiment 20000265 PARAMETER Experiment Name: At_Open_Flower_P Parameter: Age (day) Value: 21
  misc_feature: MA Experiment 20000265 PARAMETER Experiment Name: At_Open_Flower_P Parameter: Plant Line Value: WS
  misc_feature: MA Experiment 20000265 PARAMETER Experiment Name: At_Open_Flower_P Parameter: Tissue Value: Closed Flower vs. Whole Plant
  misc_feature: MA Experiment ID: 20000286 Result: Up-regulated in Transcription
  misc_feature: MA Experiment 20000286 PARAMETER Experiment Name: At_Open_Flower_P Parameter: Age (day) Value: 21
  misc_feature: MA Experiment 20000286 PARAMETER Experiment Name: At_Open_Flower_P Parameter: Plant Line Value: WS
  misc_feature: MA Experiment 20000286 PARAMETER Experiment Name: At_Open_Flower_P Parameter: Tissue Value: Half Open vs. Whole Plant
  misc_feature: MA Experiment ID: 20000439 Result: Up-regulated in Transcription
  misc_feature: MA Experiment 20000439 PARAMETER Experiment Name: At_Roots__P Parameter: Age (day) Value: 14 vs. 21
  misc_feature: MA Experiment 20000439 PARAMETER Experiment Name: At_Roots__P Parameter: Organism Value: A. thaliana
  misc_feature: MA Experiment 20000439 PARAMETER Experiment Name: At_Roots__P Parameter: Tissue Value: Roots vs. Whole Plant
  misc_feature: MA Experiment ID: 20000495 Result: Up-regulated in Transcription
  misc_feature: MA Experiment 20000495 PARAMETER Experiment Name: At_Guard_Cells_P Parameter: Harvest Date Value: 8/2/2002
  misc_feature: MA Experiment 20000495 PARAMETER Experiment Name: At_Guard_Cells_P Parameter: Organism Value: A. thaliana
  misc_feature: MA Experiment 20000495 PARAMETER Experiment Name: At_Guard_Cells_P Parameter: Tissue Value: Guard Cells vs. Leaves
  misc_feature: MA Experiment ID: 20001911 Result: Down-regulated in Transcription
  misc_feature: MA Experiment 20001911 PARAMETER Experiment Name: At_Drought_Reproduction_P Parameter: Age (day) Value: 40
  misc_feature: MA Experiment 20001911 PARAMETER Experiment Name: At_Drought_Reproduction_P Parameter: Organism Value: A. thaliana
  misc_feature: MA Experiment 20001911 PARAMETER Experiment Name: At_Drought_Reproduction_P Parameter: Plant Line Value: WS
  misc_feature: MA Experiment 20001911 PARAMETER Experiment Name: At_Drought_Reproduction_P Parameter: Timepoint (day) Value: 10
  misc_feature: MA Experiment 20001911 PARAMETER Experiment Name: At_Drought_Reproduction_P Parameter: Tissue Value: Flowers
  misc_feature: MA Experiment 20001911 PARAMETER Experiment Name: At_Drought_Reproduction_P Parameter: Treatment Value: Drought vs. No Drought
ttttcggcttcaacggaaccgccggaatatggagaatagcggcgataaatgaagctggtgggtggaaagatcggaccaccgtggaagatatggatctcgccgtccgagcaagtcttcgcggctggaaatttctctacctcggtgaccttcaggtgaaaagtgagcttccaagtacttttagagccttccgttttcagcaacatagatggtcttgtggacctgcaaatctctttaggaaaatggttatggagatcgtaagaaacaagaaagtgagattctggaagaaagtgtacgtgatatacagcttcttctttgtgaggaaaatcattgcacattgggtcacattttgtttctactgcgttgttcttcctctcacaattctcgtcccggaggttaaagttccgatttggggttcggtttatatcccatccatcatcactatcctcaattccgtcggtactccaaggtcaattcatctgctgttctattggattctattcgagaatgtgatgtcgctgcaccggacaaaggccactctcattggtctgtttgaggcaggaagggctaacgagttggtagtgactgctaagcttggaagcggtcagagcgctaaaggaaacactaaagggatcaaaaggttcccaagaatcttcaaattgcctgatcgattgaatacattggagcttggatttgcggctttcttgttcgtgtgcggatgctatgactttgtgcacgggaagaacaattacttcatctacctgtttcttcagacaatgtctttcttcatcagtgggctgggctggatcgggacttatgtcccgagttagtagttgtgttgtttcagagagaaaagagaatgttattaattttcttgagaaataaagacaattttcattgaaatgacaaaggaaaattgataggggagatagagacgtaccggtaacaacaagtaggaagaaaggagaagacttttatcaaagaccaggaaagaggagaagctccaagggttcttttgatttatttttattttttctgtgttttatttatatagctatgggatttgtgattcagttgttgtgagattttaattttcgttctttgttttttattttggtttttgggtattttttcgttttgaaagtgttagtctttttgttttgtttttaaattaaattccaagtaaaaattaaattcc

SEQ ID NO: 23800 - protein, 274 aa, Arabidopsis thaliana
  peptide (1)..(274): Ceres Seq. ID no. 12738183
  misc_feature (1)..(274): Homolog of NCBI NO: 30688416 NR Description: glycosyltransferase family 2 [Arabidopsis
  misc_feature (1)..(274): Homolog of NCBI NO: 30688411 NR Description: glycosyltransferase family 2 [Arabidopsis
  misc_feature (1)..(274): Homolog of NCBI NO: 15237519 NR Description: putative protein
  misc_feature (1)..(273): Homolog of NCBI NO: 16519223 NR Description: cellulose synthase-like protein OsCslA9 [Oryza
  misc_feature (1)..(273): Homolog of NCBI NO: 34419204 NR Description: TPA: cellulose synthase-like A1
  misc_feature (1)..(273): Homolog of NCBI NO: 5441877 NR Description: Similar to glycogenin glucosyltransferase (EC
  misc_feature (1)..(274): Homolog of NCBI NO: 34148021 NR Description: glycosyltransferase 1 [Ipomoea trifida]
  misc_feature (1)..(274): Homolog of NCBI NO: 34148023 NR Description: glycosyltransferase 5 [Ipomoea trifida]
  misc_feature (1)..(274): Homolog of NCBI NO: 34148025 NR Description: glycosyltransferase 10 [Ipomoea trifida]
  misc_feature (1)..(274): Homolog of NCBI NO: 15242959 NR Description: glucosyltransferase-like protein
FGFNGTAGIWRIAAINEAGGWKDRTTVEDMDLAVRASLRGWKFLYLGDLQVKSELPSTFRAFRFQQHRWSCGPANLFRKMVMEIVRNKKVRFWKKVYVIYSFFFVRKIIAHWVTFCFYCVVLPLTILVPEVKVPIWGSVYIPSIITILNSVGTPRSIHLLFYWILFENVMSLHRTKATLIGLFEAGRANELVVTAKLGSGQSAKGNTKGIKRFPRIFKLPDRLNTLELGFAAFLFVCGCYDFVHGKNNYFIYLFLQTMSFFISGLGWIGTYVPS

SEQ ID NO: 23801 - protein, 245 aa, Arabidopsis thaliana
  peptide (1)..(245): Ceres Seq. ID no. 12738184
  misc_feature (1)..(245): Homolog of NCBI NO: 30688416 NR Description: glycosyltransferase family 2 [Arabidopsis
  misc_feature (1)..(245): Homolog of NCBI NO: 30688411 NR Description: glycosyltransferase family 2 [Arabidopsis
  misc_feature (1)..(245): Homolog of NCBI NO: 15237519 NR Description: putative protein
  misc_feature (1)..(244): Homolog of NCBI NO: 16519223 NR Description: cellulose synthase-like protein OsCslA9 [Oryza
  misc_feature (1)..(244): Homolog of NCBI NO: 34419204 NR Description: TPA: cellulose synthase-like A1
  misc_feature (1)..(244): Homolog of NCBI NO: 5441877 NR Description: Similar to glycogenin glucosyltransferase (EC
  misc_feature (1)..(245): Homolog of NCBI NO: 34148021 NR Description: glycosyltransferase 1 [Ipomoea trifida]
  misc_feature (1)..(245): Homolog of NCBI NO: 34148023 NR Description: glycosyltransferase 5 [Ipomoea trifida]
  misc_feature (1)..(245): Homolog of NCBI NO: 34148025 NR Description: glycosyltransferase 10 [Ipomoea trifida]
  misc_feature (1)..(245): Homolog of NCBI NO: 15242959 NR Description: glucosyltransferase-like protein
MDLAVRASLRGWKFLYLGDLQVKSELPSTFRAFRFQQHRWSCGPANLFRKMVMEIVRNKKVRFWKKVYVIYSFFFVRKIIAHWVTFCFYCVVLPLTILVPEVKVPIWGSVYIPSIITILNSVGTPRSIHLLFYWILFENVMSLHRTKATLIGLFEAGRANELVVTAKLGSGQSAKGNTKGIKRFPRIFKLPDRLNTLELGFAAFLFVCGCYDFVHGKNNYFIYLFLQTMSFFISGLGWIGTYVPS

SEQ ID NO: 23802 - protein, 195 aa, Arabidopsis thaliana
  peptide (1)..(195): Ceres Seq. ID no. 12738185
  misc_feature (1)..(195): Homolog of NCBI NO: 30688416 NR Description: glycosyltransferase family 2 [Arabidopsis
  misc_feature (1)..(195): Homolog of NCBI NO: 30688411 NR Description: glycosyltransferase family 2 [Arabidopsis
  misc_feature (1)..(195): Homolog of NCBI NO: 15237519 NR Description: putative protein
  misc_feature (1)..(194): Homolog of NCBI NO: 16519223 NR Description: cellulose synthase-like protein OsCslA9 [Oryza
  misc_feature (1)..(194): Homolog of NCBI NO: 34419204 NR Description: TPA: cellulose synthase-like A1
  misc_feature (1)..(194): Homolog of NCBI NO: 5441877 NR Description: Similar to glycogenin glucosyltransferase (EC
  misc_feature (1)..(195): Homolog of NCBI NO: 34148021 NR Description: glycosyltransferase 1 [Ipomoea trifida]
  misc_feature (1)..(195): Homolog of NCBI NO: 34148023 NR Description: glycosyltransferase 5 [Ipomoea trifida]
  misc_feature (1)..(195): Homolog of NCBI NO: 34148025 NR Description: glycosyltransferase 10 [Ipomoea trifida]
  misc_feature (1)..(195): Homolog of NCBI NO: 15242959 NR Description: glucosyltransferase-like protein
MVMEIVRNKKVRFWKKVYVIYSFFFVRKIIAHWVTFCFYCVVLPLTILVPEVKVPIWGSVYIPSIITILNSVGTPRSIHLLFYWILFENVMSLHRTKATLIGLFEAGRANELVVTAKLGSGQSAKGNTKGIKRFPRIFKLPDRLNTLELGFAAFLFVCGCYDFVHGKNNYFIYLFLQTMSFFISGLGWIGTYVPS

SEQ ID NO: 23803 - DNA, 1214 bp, Arabidopsis thaliana
  misc_feature (1)..(1214): Ceres Seq. ID no. 13497259
  misc_feature: MA Experiment ID: 108434 Result: Down-regulated in Transcription
  misc_feature: MA Experiment 108434 PARAMETER Experiment Name: At_Root_Tips_cDNA_P Parameter: Tissue Value: Root Tips
  misc_feature: MA Experiment ID: 108461 Result: Up-regulated in Transcription
  misc_feature: MA Experiment 108461 PARAMETER Experiment Name: At_Germinating_Seeds_cDNA_P Parameter: Age (day) Value: 1 vs. 0
  misc_feature: MA Experiment 108461 PARAMETER Experiment Name: At_Germinating_Seeds_cDNA_P Parameter: Tissue Value: Germinating Seeds
  misc_feature: MA Experiment ID: 108464 Result: Up-regulated in Transcription
  misc_feature: MA Experiment 108464 PARAMETER Experiment Name: At_Germinating_Seeds_cDNA_P Parameter: Age (day) Value: 4 vs. 0
  misc_feature: MA Experiment 108464 PARAMETER Experiment Name: At_Germinating_Seeds_cDNA_P Parameter: Tissue Value: Germinating Seeds
  misc_feature: MA Experiment ID: 108488 Result: Down-regulated in Transcription
  misc_feature: MA Experiment ID: 108561 Result: Up-regulated in Transcription
  misc_feature: MA Experiment 108561 PARAMETER Experiment Name: At_100uM_ABA_cDNA_P Parameter: Timepoint (hr) Value: 6
  misc_feature: MA Experiment 108561 PARAMETER Experiment Name: At_100uM_ABA_cDNA_P Parameter: Tissue Value: Aerial
  misc_feature: MA Experiment 108561 PARAMETER Experiment Name: At_100uM_ABA_cDNA_P Parameter: Treatment Value: 100uM ABA vs. No Treatment
  misc_feature: MA Experiment ID: 108572 Result: Up-regulated in Transcription
  misc_feature: MA Experiment 108572 PARAMETER Experiment Name: At_Drought_cDNA_P Parameter: Timepoint (hr) Value: 1
  misc_feature: MA Experiment 108572 PARAMETER Experiment Name: At_Drought_cDNA_P Parameter: Tissue Value: Aerial
  misc_feature: MA Experiment 108572 PARAMETER Experiment Name: At_Drought_cDNA_P Parameter: Treatment Value: Drought vs. No Drought
  misc_feature: MA Experiment ID: 108573 Result: Up-regulated in Transcription
  misc_feature: MA Experiment 108573 PARAMETER Experiment Name: At_Drought_cDNA_P Parameter: Timepoint (hr) Value: 6
  misc_feature: MA Experiment 108573 PARAMETER Experiment Name: At_Drought_cDNA_P Parameter: Tissue Value: Aerial
  misc_feature: MA Experiment 108573 PARAMETER Experiment Name: At_Drought_cDNA_P Parameter: Treatment Value: Drought vs. No Drought
  misc_feature: MA Experiment ID: 108576 Result: Down-regulated in Transcription
  misc_feature: MA Experiment 108576 PARAMETER Experiment Name: At_42deg_Heat_cDNA_P Parameter: Temperature (deg C) Value: 42 vs. 22
  misc_feature: MA Experiment 108576 PARAMETER Experiment Name: At_42deg_Heat_cDNA_P Parameter: Timepoint (hr) Value: 1
  misc_feature: MA Experiment 108576 PARAMETER Experiment Name: At_42deg_Heat_cDNA_P Parameter: Tissue Value: Aerial
  misc_feature: MA Experiment ID: 108595 Result: Up-regulated in Transcription
  misc_feature: MA Experiment 108595 PARAMETER Experiment Name: At_Ler-pi_Ovule_cDNA_P Parameter: Plant Line Value: null
  misc_feature: MA Experiment ID: 108668 Result: Down-regulated in Transcription
  misc_feature: MA Experiment 108668 PARAMETER Experiment Name: At_2mM_SA_cDNA_P Parameter: Plant Line Value: WS
  misc_feature: MA Experiment 108668 PARAMETER Experiment Name: At_2mM_SA_cDNA_P Parameter: Timepoint (hr) Value: 6
  misc_feature: MA Experiment 108668 PARAMETER Experiment Name: At_2mM_SA_cDNA_P Parameter: Treatment Value: 2mM SA vs. No Treatment
  misc_feature: MA Experiment ID: 20000070 Result: Up-regulated in Transcription
  misc_feature: MA Experiment 20000070 PARAMETER Experiment Name: At_100uM_ABA_Mutants_cDNA_P Parameter: Plant Line Value: CS24
  misc_feature: MA Experiment 20000070 PARAMETER Experiment Name: At_100uM_ABA_Mutants_cDNA_P Parameter: Timepoint (hr) Value: 6
  misc_feature: MA Experiment 20000070 PARAMETER Experiment Name: At_100uM_ABA_Mutants_cDNA_P Parameter: Tissue Value: Aerial
  misc_feature: MA Experiment 20000070 PARAMETER Experiment Name: At_100uM_ABA_Mutants_cDNA_P Parameter: Treatment Value: 100uM ABA vs. No Treatment
  misc_feature: MA Experiment ID: 20000071 Result: Up-regulated in Transcription
  misc_feature: MA Experiment 20000071 PARAMETER Experiment Name: At_100uM_ABA_Mutants_cDNA_P Parameter: Plant Line Value: CS8104
  misc_feature: MA Experiment 20000071 PARAMETER Experiment Name: At_100uM_ABA_Mutants_cDNA_P Parameter: Timepoint (hr) Value: 6
  misc_feature: MA Experiment 20000071 PARAMETER Experiment Name: At_100uM_ABA_Mutants_cDNA_P Parameter: Tissue Value: Aerial
  misc_feature: MA Experiment 20000071 PARAMETER Experiment Name: At_100uM_ABA_Mutants_cDNA_P Parameter: Treatment Value: 100uM ABA vs. No Treatment
  misc_feature: MA Experiment ID: 20000087 Result: Down-regulated in Transcription
  misc_feature: MA Experiment 20000087 PARAMETER Experiment Name: At_100uM_ABA_Mutants_cDNA_P Parameter: Plant Line Value: WS
  misc_feature: MA Experiment 20000087 PARAMETER Experiment Name: At_100uM_ABA_Mutants_cDNA_P Parameter: Timepoint (hr) Value: 6
  misc_feature: MA Experiment 20000087 PARAMETER Experiment Name: At_100uM_ABA_Mutants_cDNA_P Parameter: Tissue Value: Aerial
  misc_feature: MA Experiment 20000087 PARAMETER Experiment Name: At_100uM_ABA_Mutants_cDNA_P Parameter: Treatment Value: 100uM ABA vs. No Treatment
  misc_feature: MA Experiment ID: 20000088 Result: Up-regulated in Transcription
  misc_feature: MA Experiment 20000088 PARAMETER Experiment Name: At_100uM_ABA_Mutants_cDNA_P Parameter: Plant Line Value: Landsberg
  misc_feature: MA Experiment 20000088 PARAMETER Experiment Name: At_100uM_ABA_Mutants_cDNA_P Parameter: Timepoint (hr) Value: 6
  misc_feature: MA Experiment 20000088 PARAMETER Experiment Name: At_100uM_ABA_Mutants_cDNA_P Parameter: Tissue Value: Aerial
  misc_feature: MA Experiment 20000088 PARAMETER Experiment Name: At_100uM_ABA_Mutants_cDNA_P Parameter: Treatment Value: 100uM ABA vs. No Treatment
  misc_feature: MA Experiment ID: 20000090 Result: Down-regulated in Transcription
  misc_feature: MA Experiment ID: 20000111 Result: Down-regulated in Transcription
  misc_feature: MA Experiment 20000111 PARAMETER Experiment Name: At_42deg_Heat_cDNA_P Parameter: Temperature (deg C) Value: 42 vs. 22
  misc_feature: MA Experiment 20000111 PARAMETER Experiment Name: At_42deg_Heat_cDNA_P Parameter: Timepoint (hr) Value: 6
  misc_feature: MA Experiment 20000111 PARAMETER Experiment Name: At_42deg_Heat_cDNA_P Parameter: Tissue Value: Aerial
  misc_feature: MA Experiment ID: 20000112 Result: Up-regulated in Transcription
  misc_feature: MA Experiment 20000112 PARAMETER Experiment Name: At_42deg_Heat_cDNA_P Parameter: Temperature (deg C) Value: 42 vs. 22
  misc_feature: MA Experiment 20000112 PARAMETER Experiment Name: At_42deg_Heat_cDNA_P Parameter: Timepoint (hr) Value: 2
  misc_feature: MA Experiment 20000112 PARAMETER Experiment Name: At_42deg_Heat_cDNA_P Parameter: Tissue Value: Aerial
  misc_feature: MA Experiment ID: 20000113 Result: Down-regulated in Transcription
  misc_feature: MA Experiment 20000113 PARAMETER Experiment Name: At_42deg_Heat_cDNA_P Parameter: Temperature (deg C) Value: 42 vs. 22
  misc_feature: MA Experiment 20000113 PARAMETER Experiment Name: At_42deg_Heat_cDNA_P Parameter: Timepoint (hr) Value: 8
  misc_feature: MA Experiment 20000113 PARAMETER Experiment Name: At_42deg_Heat_cDNA_P Parameter: Tissue Value: Aerial
  misc_feature: MA Experiment ID: 20000144 Result: Down-regulated in Transcription
  misc_feature: MA Experiment 20000144 PARAMETER Experiment Name: At_42deg_Heat_cDNA_P Parameter: Temperature (deg C) Value: 42 vs. 22
  misc_feature: MA Experiment 20000144 PARAMETER Experiment Name: At_42deg_Heat_cDNA_P Parameter: Timepoint (hr) Value: 1
  misc_feature: MA Experiment 20000144 PARAMETER Experiment Name: At_42deg_Heat_cDNA_P Parameter: Tissue Value: Aerial
  misc_feature: MA Experiment ID: 20000180 Result: Up-regulated in Transcription
  misc_feature: MA Experiment 20000180 PARAMETER Experiment Name: At_Germinating_Seeds_P Parameter: Age (hr) Value: 24 vs. 0
  misc_feature: MA Experiment 20000180 PARAMETER Experiment Name: At_Germinating_Seeds_P Parameter: Tissue Value: Germinating Seeds
  misc_feature: MA Experiment ID: 20000185 Result: Down-regulated in Transcription
  misc_feature: MA Experiment 20000185 PARAMETER Experiment Name: At_Roots__P Parameter: Age (day) Value: 7 vs. 21
  misc_feature: MA Experiment 20000185 PARAMETER Experiment Name: At_Roots__P Parameter: Organism Value: A. thaliana
  misc_feature: MA Experiment 20000185 PARAMETER Experiment Name: At_Roots__P Parameter: Tissue Value: Roots vs. Whole Plant
  misc_feature: MA Experiment ID: 20000234 Result: Down-regulated in Transcription
  misc_feature: MA Experiment 20000234 PARAMETER Experiment Name: At_Siliques_P Parameter: Age (day) Value: 21
  misc_feature: MA Experiment 20000234 PARAMETER Experiment Name: At_Siliques_P Parameter: Organism Value: A. thaliana
  misc_feature: MA Experiment 20000234 PARAMETER Experiment Name: At_Siliques_P Parameter: Plant Line Value: WS
  misc_feature: MA Experiment 20000234 PARAMETER Experiment Name: At_Siliques_P Parameter: Tissue Value: Less Than 5mm Siliques vs. Whole Plant
  misc_feature: MA Experiment ID: 20000235 Result: Down-regulated in Transcription
  misc_feature: MA Experiment 20000235 PARAMETER Experiment Name: At_Siliques_P Parameter: Age (day) Value: 21
  misc_feature: MA Experiment 20000235 PARAMETER Experiment Name: At_Siliques_P Parameter: Organism Value: A. thaliana
  misc_feature: MA Experiment 20000235 PARAMETER Experiment Name: At_Siliques_P Parameter: Plant Line Value: WS
  misc_feature: MA Experiment 20000235 PARAMETER Experiment Name: At_Siliques_P Parameter: Tissue Value: 5-10mm Siliques vs. Whole Plant
  misc_feature: MA Experiment ID: 20000527 Result: Down-regulated in Transcription
  misc_feature: MA Experiment 20000527 PARAMETER Experiment Name: At_10percent_PEG_P Parameter: Age (day) Value: 20
  misc_feature: MA Experiment 20000527 PARAMETER Experiment Name: At_10percent_PEG_P Parameter: Organism Value: A. thaliana
  misc_feature: MA Experiment 20000527 PARAMETER Experiment Name: At_10percent_PEG_P Parameter: Plant Line Value: WS
  misc_feature: MA Experiment 20000527 PARAMETER Experiment Name: At_10percent_PEG_P Parameter: Timepoint (day) Value: 20
  misc_feature: MA Experiment 20000527 PARAMETER Experiment Name: At_10percent_PEG_P Parameter: Tissue Value: Whole Plant
  misc_feature: MA Experiment 20000527 PARAMETER Experiment Name: At_10percent_PEG_P Parameter: Treatment Value: 10percent PEG vs. No Treatment
  misc_feature: MA Experiment ID: 20001560 Result: Down-regulated in Transcription
  misc_feature: MA Experiment 20001560 PARAMETER Experiment Name: At_Drought_Soil_Dry_P Parameter: Age (day) Value: 28
  misc_feature: MA Experiment 20001560 PARAMETER Experiment Name: At_Drought_Soil_Dry_P Parameter: Organism Value: A. thaliana
  misc_feature: MA Experiment 20001560 PARAMETER Experiment Name: At_Drought_Soil_Dry_P Parameter: Plant Line Value: WS
  misc_feature: MA Experiment 20001560 PARAMETER Experiment Name: At_Drought_Soil_Dry_P Parameter: Post Timepoint (hr) Value: None
  misc_feature: MA Experiment 20001560 PARAMETER Experiment Name: At_Drought_Soil_Dry_P Parameter: Post-Treatment Value: None
  misc_feature: MA Experiment 20001560 PARAMETER Experiment Name: At_Drought_Soil_Dry_P Parameter: Timepoint (day) Value: 14
  misc_feature: MA Experiment 20001560 PARAMETER Experiment Name: At_Drought_Soil_Dry_P Parameter: Treatment Value: Drought vs. No Drought
actaccacccgagaacacacgattattctccaaagagaaagagaaaaatcaataacctcatagtgtcgacatgggttgccaagacgaacaattggtgcaaacaatatgcgatctctacgaaaagatctcaaagcttgagagtctaaaaccatccgaagatgtcaacattctcttcaagcagctcgtttccacatgcataccaccaaaccctaacatcgatgtcaccaagatgtgtgacagagtccaagagattcgacttaatctcatcaagatttgtggtctagccgaaggtcacttagaaaaccatttctcttcgatcttgacctcttaccaagacaacccacttcatcatttaaacattttcccttattacaacaactatttgaaactcggaaagctcgagttcgacctcctcgaacaaaacctaaatggctttgtcccaaagagtgtggctttcattggatctggtcctcttcctctcacttccatcgttcttgcttcattccatctcaaagacacaatctttcacaactttgacatcgacccatcagcgaactcactcgcttctcttctggtttcctctgatccagacatctctcaacgcatgttcttccacaccgttgatataatggacgtgacagagagcttaaagagctttgatgtcgtgtttctagctgctcttgttggaatgaacaaagaggagaaagttaaagtgatcgagcatctgcagaaacacatggctcctggtgctgtgctcatgcttaggagtgctcatggtccgagagcgtttctttatccgatcgttgagccgtgtgatcttcaggggttcgaggttttgtctatttatcacccaacagatgatgttatcaactccgtggtgatctctaaaaagcatccagttgtttcaattgggaatgttggtggtcctaattcatgcttgctcaagccttgcaactgttccaagacccacgcgaaaatgaacaagaacatgatgatcgaggagttcggagctagggaggaacagttgtcttaaggaggacgtttcttgtttcctaattctctatcttatggaagcttcctaattatgatttgtgtctttgtgttgtgtgttggtgtcttttctcaattgttctttgtttgttttatttttctttctatattcctagaaatggatttgtttcgcgcgacactgttgggctgaaacagaacacgat

SEQ ID NO: 23804 - protein, 320 aa, Arabidopsis thaliana
  peptide (1)..(320): Ceres Seq. ID no. 13497260
  misc_feature (3)..(280): Pfam Name: Nicotianamine synthase protein Pfam Description: Nicotianamine synthase protein
  misc_feature (8)..(301): Homolog of NCBI NO: 19911064 NR Description: ZmNAS2 [Zea mays]
  misc_feature (1)..(316): Homolog of NCBI NO: 27151627 NR Description: Nicotianamine synthase
  misc_feature (1)..(316): Homolog of NCBI NO: 15241120 NR Description: nicotianamine synthase, putative [Arabidopsis
  misc_feature (1)..(316): Homolog of NCBI NO: 4220614 NR Description: nicotianamine synathase [Arabidopsis thaliana]
  misc_feature (1)..(316): Homolog of NCBI NO: 4220612 NR Description: nicotianamine synthase [Arabidopsis thaliana]
  misc_feature (1)..(316): Homolog of NCBI NO: 15238376 NR Description: nicotianamine synthase, putative [Arabidopsis
  misc_feature (1)..(320): Homolog of NCBI NO: 15223535 NR Description: nicotianamine synthase, putative [Arabidopsis
  misc_feature (1)..(320): Homolog of NCBI NO: 27528464 NR Description: nicotianamine synthase [Thlaspi caerulescens]
  misc_feature (1)..(320): Homolog of NCBI NO: 40782199 NR Description: putative nicotianamine synthase
  misc_feature (1)..(320): Homolog of NCBI NO: 15217462 NR Description: nicotianamine synthase, putative [Arabidopsis
MGCQDEQLVQTICDLYEKISKLESLKPSEDVNILFKQLVSTCIPPNPNIDVTKMCDRVQEIRLNLIKICGLAEGHLENHFSSILTSYQDNPLHHLNIFPYYNNYLKLGKLEFDLLEQNLNGFVPKSVAFIGSGPLPLTSIVLASFHLKDTIFHNFDIDPSANSLASLLVSSDPDISQRMFFHTVDIMDVTESLKSFDVVFLAALVGMNKEEKVKVIEHLQKHMAPGAVLMLRSAHGPRAFLYPIVEPCDLQGFEVLSIYHPTDDVINSVVISKKHPVVSIGNVGGPNSCLLKPCNCSKTHAKMNKNMMIEEFGAREEQLS

SEQ ID NO: 23805 - protein, 267 aa, Arabidopsis thaliana
  peptide (1)..(267): Ceres Seq. ID no. 13497261
  misc_feature (1)..(227): Pfam Name: Nicotianamine synthase protein Pfam Description: Nicotianamine synthase protein
  misc_feature (1)..(248): Homolog of NCBI NO: 19911064 NR Description: ZmNAS2 [Zea mays]
  misc_feature (1)..(263): Homolog of NCBI NO: 27151627 NR Description: Nicotianamine synthase
  misc_feature (1)..(263): Homolog of NCBI NO: 15241120 NR Description: nicotianamine synthase, putative [Arabidopsis
  misc_feature (1)..(263): Homolog of NCBI NO: 4220614 NR Description: nicotianamine synathase [Arabidopsis thaliana]
  misc_feature (1)..(263): Homolog of NCBI NO: 4220612 NR Description: nicotianamine synthase [Arabidopsis thaliana]
  misc_feature (1)..(263): Homolog of NCBI NO: 15238376 NR Description: nicotianamine synthase, putative [Arabidopsis
  misc_feature (1)..(267): Homolog of NCBI NO: 15223535 NR Description: nicotianamine synthase, putative [Arabidopsis
  misc_feature (1)..(267): Homolog of NCBI NO: 27528464 NR Description: nicotianamine synthase [Thlaspi caerulescens]
  misc_feature (1)..(267): Homolog of NCBI NO: 40782199 NR Description: putative nicotianamine synthase
  misc_feature (1)..(267): Homolog of NCBI NO: 15217462 NR Description: nicotianamine synthase, putative [Arabidopsis
MCDRVQEIRLNLIKICGLAEGHLENHFSSILTSYQDNPLHHLNIFPYYNNYLKLGKLEFDLLEQNLNGFVPKSVAFIGSGPLPLTSIVLASFHLKDTIFHNFDIDPSANSLASLLVSSDPDISQRMFFHTVDIMDVTESLKSFDVVFLAALVGMNKEEKVKVIEHLQKHMAPGAVLMLRSAHGPRAFLYPIVEPCDLQGFEVLSIYHPTDDVINSVVISKKHPVVSIGNVGGPNSCLLKPCNCSKTHAKMNKNMMIEEFGAREEQLS

SEQ ID NO: 23806 - DNA, 1461 bp, Arabidopsis thaliana
  misc_feature (1)..(1461): Ceres Seq. ID no. 12605099
  misc_feature: MA Experiment ID: 20000234 Result: Down-regulated in Transcription
  misc_feature: MA Experiment 20000234 PARAMETER Experiment Name: At_Siliques_P Parameter: Age (day) Value: 21
  misc_feature: MA Experiment 20000234 PARAMETER Experiment Name: At_Siliques_P Parameter: Organism Value: A. thaliana
  misc_feature: MA Experiment 20000234 PARAMETER Experiment Name: At_Siliques_P Parameter: Plant Line Value: WS
  misc_feature: MA Experiment 20000234 PARAMETER Experiment Name: At_Siliques_P Parameter: Tissue Value: Less Than 5mm Siliques vs. Whole Plant
  misc_feature: MA Experiment ID: 20000265 Result: Down-regulated in Transcription
  misc_feature: MA Experiment 20000265 PARAMETER Experiment Name: At_Open_Flower_P Parameter: Age (day) Value: 21
  misc_feature: MA Experiment 20000265 PARAMETER Experiment Name: At_Open_Flower_P Parameter: Plant Line Value: WS
  misc_feature: MA Experiment 20000265 PARAMETER Experiment Name: At_Open_Flower_P Parameter: Tissue Value: Closed Flower vs. Whole Plant
  misc_feature: MA Experiment ID: 20000438 Result: Down-regulated in Transcription
  misc_feature: MA Experiment 20000438 PARAMETER Experiment Name: At_Shoots__P Parameter: Age (day) Value: 14
  misc_feature: MA Experiment 20000438 PARAMETER Experiment Name: At_Shoots__P Parameter: Tissue Value: Shoots vs. Whole Plant
  misc_feature: MA Experiment ID: 20000794 Result: Up-regulated in Transcription
  misc_feature: MA Experiment 20000794 PARAMETER Experiment Name: At_Petals_P Parameter: Age (day) Value: 23-25 days
  misc_feature: MA Experiment 20000794 PARAMETER Experiment Name: At_Petals_P Parameter: Plant Line Value: WS
  misc_feature: MA Experiment 20000794 PARAMETER Experiment Name: At_Petals_P Parameter: Tissue Value: Petals vs. Whole plant
  misc_feature: MA Experiment ID: 20001248 Result: Up-regulated in Transcription
  misc_feature: MA Experiment 20001248 PARAMETER Experiment Name: At_Far-red-induction_P Parameter: Age (day) Value: 7
  misc_feature: MA Experiment 20001248 PARAMETER Experiment Name: At_Far-red-induction_P Parameter: Light Value: Far-red vs. White
  misc_feature: MA Experiment 20001248 PARAMETER Experiment Name: At_Far-red-induction_P Parameter: Organism Value: A. thaliana
  misc_feature: MA Experiment 20001248 PARAMETER Experiment Name: At_Far-red-induction_P Parameter: Plant Line Value: Columbia
  misc_feature: MA Experiment 20001248 PARAMETER Experiment Name: At_Far-red-induction_P Parameter: Timepoint (hr) Value: 4
  misc_feature: MA Experiment 20001248 PARAMETER Experiment Name: At_Far-red-induction_P Parameter: Tissue Value: Whole Plant
  misc_feature: MA Experiment ID: 20001558 Result: Down-regulated in Transcription
  misc_feature: MA Experiment 20001558 PARAMETER Experiment Name: At_Drought_Soil_Dry_P Parameter: Age (day) Value: 27
  misc_feature: MA Experiment 20001558 PARAMETER Experiment Name: At_Drought_Soil_Dry_P Parameter: Organism Value: A. thaliana
  misc_feature: MA Experiment 20001558 PARAMETER Experiment Name: At_Drought_Soil_Dry_P Parameter: Plant Line Value: WS
  misc_feature: MA Experiment 20001558 PARAMETER Experiment Name: At_Drought_Soil_Dry_P Parameter: Post Timepoint (hr) Value: 6
  misc_feature: MA Experiment 20001558 PARAMETER Experiment Name: At_Drought_Soil_Dry_P Parameter: Post-Treatment Value: Re-Water vs. No Drought
  misc_feature: MA Experiment 20001558 PARAMETER Experiment Name: At_Drought_Soil_Dry_P Parameter: Timepoint (day) Value: 13
  misc_feature: MA Experiment 20001558 PARAMETER Experiment Name: At_Drought_Soil_Dry_P Parameter: Treatment Value: Drought vs. No Drought
  misc_feature: MA Experiment ID: 20001560 Result: Down-regulated in Transcription
  misc_feature: MA Experiment 20001560 PARAMETER Experiment Name: At_Drought_Soil_Dry_P Parameter: Age (day) Value: 28
  misc_feature: MA Experiment 20001560 PARAMETER Experiment Name: At_Drought_Soil_Dry_P Parameter: Organism Value: A. thaliana
  misc_feature: MA Experiment 20001560 PARAMETER Experiment Name: At_Drought_Soil_Dry_P Parameter: Plant Line Value: WS
  misc_feature: MA Experiment 20001560 PARAMETER Experiment Name: At_Drought_Soil_Dry_P Parameter: Post Timepoint (hr) Value: None
  misc_feature: MA Experiment 20001560 PARAMETER Experiment Name: At_Drought_Soil_Dry_P Parameter: Post-Treatment Value: None
  misc_feature: MA Experiment 20001560 PARAMETER Experiment Name: At_Drought_Soil_Dry_P Parameter: Timepoint (day) Value: 14
  misc_feature: MA Experiment 20001560 PARAMETER Experiment Name: At_Drought_Soil_Dry_P Parameter: Treatment Value: Drought vs. No Drought
atcttaaaagaaaccgaaagctaatctccaaagggaaaaagacgtgtagcagagacctatacatacacctatacattcacgttgcgtgtgataatctactgagggttctatctatattaatccttctctgcttccttcaatctaattgcaaatcaaatggatcgtcttaagctttatttctccgttttcgttttgtctttctttatcgtctcggtttcgtcgtctgatgtcaacgacggcgatgatctcgtgatccgtcaggtggttggtggagccgagcctcaggttttgacctcagaggatcacttttctctcttcaagcggaagttcgggaaggtctacgcttccaacgaggagcatgactatagattctcggttttcaaagcgaatctcaggcgagcgaggcgtcaccagaagttagatccgtcggcgactcatggtgttacgcagttctcagatctgactcggtctgagttccgtaagaagcacttgggggttagaagtggctttaagcttcctaaagatgccaacaaggctccgattctccctaccgaaaatctccctgaggattttgattggagagatcatggcgccgttactcccgtcaaaaatcagggatcttgcggctcttgctggagtttcagcgccactggagctttggaaggtgctaacttcctcgctaccggcaaactcgtcagcctcagcgaacaacagctcgtcgactgtgatcacgagtgtgatcccgaggaggcagattcctgcgactctggttgcaatggtgggctaatgaacagcgcttttgaatacaccctcaaaaccggagggctcatgaaagaagaagactatccttacaccggaaaggacggcaagacctgcaagctagacaagtccaagatcgttgcctctgtctccaacttcagtgttatctccattgatgaagaacagattgctgcaaaccttgtcaagaacggacctcttgctgtagccatcaacgctggctatatgcagacttacattggaggagtctcatgcccttacatatgcaccaggaggctcaaccacggtgtcttattggttggctatggagcggcaggttacgctccggctaggttcaaggagaagccttactggatcatcaagaactcgtggggagagacttggggtgaaaatggtttctacaaaatctgcaaaggccgtaacatttgtggtgttgacagtatggtctccactgttgcagccaccgtctcaaccaccgcccattaagcatctcgtcaataagttttaattactttggtgatttgtatgagcgagctctctttgcgctgctgactctctctatttatctctgcttcttgcttgtaaataaaatgcgttctattgagcaaaaccgtacaatgctcattagcaatgagcccactttaacaagtatcagtttatggcccaatatatgaaagttaaatc

SEQ ID NO: 23807 - protein, 368 aa, Arabidopsis thaliana
  peptide (1)..(368): Ceres Seq. ID no. 12605100
  misc_feature (135)..(360): Pfam Name: Papain family cysteine protease Pfam Description: Papain family cysteine protease
  misc_feature (8)..(367): Homolog of NCBI NO: 7211743 NR Description: papain-like cysteine proteinase isoform II
  misc_feature (3)..(367): Homolog of NCBI NO: 7381221 NR Description: papain-like cysteine proteinase isoform II
  misc_feature (3)..(367): Homolog of NCBI NO: 7211745 NR Description: papain-like cysteine proteinase isoform III
  misc_feature (52)..(364): Homolog of NCBI NO: 516865 NR Description: putative thiol protease [Arabidopsis thaliana]
  misc_feature (8)..(367): Homolog of NCBI NO: 7381219 NR Description: papain-like cysteine proteinase isoform I
  misc_feature (8)..(367): Homolog of NCBI NO: 7211741 NR Description: papain-like cysteine proteinase isoform I
  misc_feature (1)..(364): Homolog of NCBI NO: 18399697 NR Description: cysteine proteinase
  misc_feature (1)..(368): Homolog of NCBI NO: 18141287 NR Description: senescence-associated cysteine protease [Brassica
  misc_feature (1)..(368): Homolog of NCBI NO: 21593213 NR Description: cysteine proteinase RD19A [Arabidopsis thaliana]
  misc_feature (1)..(368): Homolog of NCBI NO: 18420375 NR Description: cysteine proteinase RD19A
MDRLKLYFSVFVLSFFIVSVSSSDVNDGDDLVIRQVVGGAEPQVLTSEDHFSLFKRKFGKVYASNEEHDYRFSVFKANLRRARRHQKLDPSATHGVTQFSDLTRSEFRKKHLGVRSGFKLPKDANKAPILPTENLPEDFDWRDHGAVTPVKNQGSCGSCWSFSATGALEGANFLATGKLVSLSEQQLVDCDHECDPEEADSCDSGCNGGLMNSAFEYTLKTGGLMKEEDYPYTGKDGKTCKLDKSKIVASVSNFSVISIDEEQIAANLVKNGPLAVAINAGYMQTYIGGVSCPYICTRRLNHGVLLVGYGAAGYAPARFKEKPYWIIKNSWGETWGENGFYKICKGRNICGVDSMVSTVAATVSTTAH

SEQ ID NO: 23808 - DNA, 1459 bp, Arabidopsis thaliana
  misc_feature (1)..(1459): Ceres Seq. ID no. 12394733
  misc_feature: MA Experiment ID: 108461 Result: Down-regulated in Transcription
  misc_feature: MA Experiment 108461 PARAMETER Experiment Name: At_Germinating_Seeds_cDNA_P Parameter: Age (day) Value: 1 vs. 0
  misc_feature: MA Experiment 108461 PARAMETER Experiment Name: At_Germinating_Seeds_cDNA_P Parameter: Tissue Value: Germinating Seeds
atctgttttcacactctctcctagggttttatctgcgaagcccaatctagagcttccatggcgacgcataccatttctcgatccattctttgccgaccggcgaaatctctttcgtttctgttcacgcgatcctttgcttcatctgctcctctcgccaaatctccggcgtcttctctgctcagccggtcccgtcctctggtcgccgctttttcctccgttttccgtggcggccttgtgtctgtcaaaggtctctcgacgcaggctacatcgtcttctctgaacgacccgaatcccaactggtcgaacaggccacctaaggagacgatcctgctcgatggttgcgatttcgagcactggcttgtcgtcgtggagccacctcagggtgagcctactagagatgaaatcattgatagctacatcaaaaccctagctcagattgttggcagtgaagacgaagctaggatgaagatctactcggtttcaactaggtgctactatgcttttggggcacttgtgtcagaagatctttctcacaagttaaaagagttgtcaaatgtgcgctgggttcttcctgactcttacctggatgtgaggaacaaagactatggaggggaacctttcatcgatgggaaggctgttccttatgatcctaagtaccacgaggagtggataaggaacaatgctagagcaaatgaaaggaacagacgcaatgaccgtcctcgcaacaatgatagaagcagaaactttgagaggagaagagagaacatggcaggaggccctcctcctcaacgtcctcccatgggaggccctcctcctcctccgcacatcggtggctctgcacctcctccgcctcatatgggtggctctgcacctcctccacctcacatggggcagaactatggaccaccaccaccaaacaacatgggaggaccaaggcatccaccaccttatggagcaccaccgcaaaacaacatgggaggaccgaggccacctcagaactatggaggaacaccacctcccaactatggaggagcaccaccagcaaacaacatgggaggagcaccaccaccaaactatggaggaggaccaccacctcaatatggagcagtaccaccacctcaatacggaggagcacccccacagaacaacaactaccagcagcagggtagtggaatgcagcagccacagtaccagaacaactacccacctaaccgggatggcagtggcaacccctaccagggttaaagcagttgaagcagtcgtgggtttcctttttaatcatgcattctgggctgtgtatagataatttgaggaagagagagtgcagtagcaagactttaaaactccttttatctcgagtgtttatcagtctgggattatgtgagagagaatagcctaagttactgtggcatggttagaacttttcactcttgcgtttctttttagtagtttatatcct

SEQ ID NO: 23809 - protein, 395 aa, Arabidopsis thaliana
  peptide (1)..(395): Ceres Seq. ID no. 12394734
  misc_feature (228)..(362): Pfam Name: 7 transmembrane receptor (rhodopsin family) Pfam Description: 7 transmembrane receptor (rhodopsin family)
  misc_feature (228)..(362): Pfam Name: 7 transmembrane receptor (rhodopsin family) Pfam Description: 7 transmembrane receptor (rhodopsin family)
  misc_feature (69)..(236): Homolog of NCBI NO: 15226108 NR Description: plastid protein
  misc_feature (69)..(236): Homolog of NCBI NO: 2440029 NR Description: DAL1 protein [Arabidopsis thaliana]
  misc_feature (15)..(237): Homolog of NCBI NO: 15223247 NR Description: plastid protein, putative
  misc_feature (5)..(237): Homolog of NCBI NO: 15226934 NR Description: unknown protein
  misc_feature (71)..(207): Homolog of NCBI NO: 15218508 NR Description: DAG-like protein; protein id: At1g72530.1
  misc_feature (69)..(236): Homolog of NCBI NO: 15226108 NR Description: plastid protein
  misc_feature (15)..(237): Homolog of NCBI NO: 15223247 NR Description: plastid protein, putative
  misc_feature (71)..(207): Homolog of NCBI NO: 15218508 NR Description: DAG-like protein; protein id: At1g72530.1
  misc_feature (1)..(395): Homolog of NCBI NO: 18400602 NR Description: expressed protein
  misc_feature (113)..(377): Homolog of NCBI NO: 15219250 NR Description: plastid protein, putative; protein id:
  misc_feature (6)..(59): Homolog of NCBI NO: 15219250 NR Description: plastid protein, putative; protein id:
  misc_feature (16)..(237): Homolog of NCBI NO: 27754695 NR Description: putative DAG protein [Arabidopsis thaliana]
  misc_feature (16)..(237): Homolog of NCBI NO: 15230785 NR Description: DAG protein, putative; protein id: At3g06790.1
  misc_feature (5)..(237): Homolog of NCBI NO: 15226934 NR Description: unknown protein
  misc_feature (69)..(236): Homolog of NCBI NO: 2440029 NR Description: DAL1 protein [Arabidopsis thaliana]
  misc_feature (16)..(237): Homolog of NCBI NO: 15230785 NR Description: DAG protein, putative; protein id: At3g06790.1
  misc_feature (16)..(237): Homolog of NCBI NO: 27754695 NR Description: putative DAG protein [Arabidopsis thaliana]
  misc_feature (6)..(59): Homolog of NCBI NO: 15219250 NR Description: plastid protein, putative; protein id:
  misc_feature (113)..(377): Homolog of NCBI NO: 15219250 NR Description: plastid protein, putative; protein id:
  misc_feature (1)..(395): Homolog of NCBI NO: 18400602 NR Description: expressed protein
MATHTISRSILCRPAKSLSFLFTRSFASSAPLAKSPASSLLSRSRPLVAAFSSVFRGGLVSVKGLSTQATSSSLNDPNPNWSNRPPKETILLDGCDFEHWLVVVEPPQGEPTRDEIIDSYIKTLAQIVGSEDEARMKIYSVSTRCYYAFGALVSEDLSHKLKELSNVRWVLPDSYLDVRNKDYGGEPFIDGKAVPYDPKYHEEWIRNNARANERNRRNDRPRNNDRSRNFERRRENMAGGPPPQRPPMGGPPPPPHIGGSAPPPPHMGGSAPPPPHMGQNYGPPPPNNMGGPRHPPPYGAPPQNNMGGPRPPQNYGGTPPPNYGGAPPANNMGGAPPPNYGGGPPPQYGAVPPPQYGGAPPQNNNYQQQGSGMQQPQYQNNYPPNRDGSGNPYQG

SEQ ID NO: 23810 - protein, 260 aa, Arabidopsis thaliana
  peptide (1)..(260): Ceres Seq. ID no. 12394735
  misc_feature (93)..(227): Pfam Name: 7 transmembrane receptor (rhodopsin family) Pfam Description: 7 transmembrane receptor (rhodopsin family)
  misc_feature (93)..(227): Pfam Name: 7 transmembrane receptor (rhodopsin family) Pfam Description: 7 transmembrane receptor (rhodopsin family)
  misc_feature (1)..(101): Homolog of NCBI NO: 21617909 NR Description: plastid protein [Arabidopsis thaliana]
  misc_feature (1)..(101): Homolog of NCBI NO: 15226108 NR Description: plastid protein
  misc_feature (1)..(101): Homolog of NCBI NO: 2440029 NR Description: DAL1 protein [Arabidopsis thaliana]
  misc_feature (1)..(102): Homolog of NCBI NO: 15223247 NR Description: plastid protein, putative
  misc_feature (1)..(102): Homolog of NCBI NO: 15226934 NR Description: unknown protein
  misc_feature (1)..(101): Homolog of NCBI NO: 21617909 NR Description: plastid protein [Arabidopsis thaliana]
  misc_feature (1)..(101): Homolog of NCBI NO: 2440029 NR Description: DAL1 protein [Arabidopsis thaliana]
  misc_feature (1)..(102): Homolog of NCBI NO: 15226934 NR Description: unknown protein
  misc_feature (1)..(260): Homolog of NCBI NO: 18400602 NR Description: expressed protein
  misc_feature (1)..(242): Homolog of NCBI NO: 15219250 NR Description: plastid protein, putative; protein id:
  misc_feature (1)..(102): Homolog of NCBI NO: 27754695 NR Description: putative DAG protein [Arabidopsis thaliana]
  misc_feature (1)..(102): Homolog of NCBI NO: 15230785 NR Description: DAG protein, putative; protein id: At3g06790.1
  misc_feature (1)..(72): Homolog of NCBI NO: 15218508 NR Description: DAG-like protein; protein id: At1g72530.1
  misc_feature (1)..(102): Homolog of NCBI NO: 15223247 NR Description: plastid protein, putative
  misc_feature (1)..(101): Homolog of NCBI NO: 15226108 NR Description: plastid protein
  misc_feature (1)..(72): Homolog of NCBI NO: 15218508 NR Description: DAG-like protein; protein id: At1g72530.1
  misc_feature (1)..(102): Homolog of NCBI NO: 15230785 NR Description: DAG protein, putative; protein id: At3g06790.1
  misc_feature (1)..(102): Homolog of NCBI NO: 27754695 NR Description: putative DAG protein [Arabidopsis thaliana]
  misc_feature (1)..(242): Homolog of NCBI NO: 15219250 NR Description: plastid protein, putative; protein id:
  misc_feature (1)..(260): Homolog of NCBI NO: 18400602 NR Description: expressed protein
MKIYSVSTRCYYAFGALVSEDLSHKLKELSNVRWVLPDSYLDVRNKDYGGEPFIDGKAVPYDPKYHEEWIRNNARANERNRRNDRPRNNDRSRNFERRRENMAGGPPPQRPPMGGPPPPPHIGGSAPPPPHMGGSAPPPPHMGQNYGPPPPNNMGGPRHPPPYGAPPQNNMGGPRPPQNYGGTPPPNYGGAPPANNMGGAPPPNYGGGPPPQYGAVPPPQYGGAPPQNNNYQQQGSGMQQPQYQNNYPPNRDGSGNPYQG

SEQ ID NO: 23811 - protein, 208 aa, Arabidopsis thaliana
  peptide (1)..(208): Ceres Seq. ID no. 12394736
MLEQMKGTDAMTVLATMIEAETLRGEERTWQEALLLNVLPWEALLLLRTSVALHLLRLIWVALHLLHLTWGRTMDHHHQTTWEDQGIHHLMEHHRKTTWEDRGHLRTMEEHHLPTMEEHHQQTTWEEHHHQTMEEDHHLNMEQYHHLNTEEHPHRTTTTSSRVVECSSHSTRTTTHLTGMAVATPTRVKAVEAVVGFLFNHAFWAVYR

SEQ ID NO: 23812 - DNA, 1600 bp, Arabidopsis thaliana
  misc_feature (1)..(1600): Ceres Seq. ID no. 13490858
  misc_feature: MA Experiment ID: 108434 Result: Up-regulated in Transcription
  misc_feature: MA Experiment 108434 PARAMETER Experiment Name: At_Root_Tips_cDNA_P Parameter: Tissue Value: Root Tips
  misc_feature: MA Experiment ID: 108462 Result: Down-regulated in Transcription
  misc_feature: MA Experiment 108462 PARAMETER Experiment Name: At_Germinating_Seeds_cDNA_P Parameter: Age (day) Value: 2 vs. 0
  misc_feature: MA Experiment 108462 PARAMETER Experiment Name: At_Germinating_Seeds_cDNA_P Parameter: Tissue Value: Germinating Seeds
  misc_feature: MA Experiment ID: 20000184 Result: Down-regulated in Transcription
  misc_feature: MA Experiment 20000184 PARAMETER Experiment Name: At_Shoots__P Parameter: Age (day) Value: 7
  misc_feature: MA Experiment 20000184 PARAMETER Experiment Name: At_Shoots__P Parameter: Tissue Value: Shoots vs. Whole Plant
  misc_feature: MA Experiment ID: 20000224 Result: Up-regulated in Transcription
  misc_feature: MA Experiment ID: 20001451 Result: Up-regulated in Transcription
  misc_feature: MA Experiment 20001451 PARAMETER Experiment Name: At_Far-red-induction_P Parameter: Age (day) Value: 7
  misc_feature: MA Experiment 20001451 PARAMETER Experiment Name: At_Far-red-induction_P Parameter: Light Value: Far-red vs. White
  misc_feature: MA Experiment 20001451 PARAMETER Experiment Name: At_Far-red-induction_P Parameter: Organism Value: A. thaliana
  misc_feature: MA Experiment 20001451 PARAMETER Experiment Name: At_Far-red-induction_P Parameter: Plant Line Value: Columbia
  misc_feature: MA Experiment 20001451 PARAMETER Experiment Name: At_Far-red-induction_P Parameter: Timepoint (hr) Value: 24
  misc_feature: MA Experiment 20001451 PARAMETER Experiment Name: At_Far-red-induction_P Parameter: Tissue Value: Whole Plant
acttcttccaccttcttcttctcttcttcttctcttcttcttctacttccgcaaaaaccctttgagaaagagaagcaaaattctctaatcgttctttctctgccctaatccacgtatcgtttggtgttcttcttcatcgaatcgacatggcttcagatgctgacatggaggactatggattcgagtattctgatgaggagcaagaggaacaagatgttgacattgagaaccagtattataactctaaaggtatggttgagactgaacctgaagaagcactttctggatttgctgaggttgttcagatggaacctgagaaagctgactggggtttcaaagctcttaagcagactgtgaagatctattatcgtctaggtaaatacaaagaaatgatggaagcctatacagagatgcttacatatatcaagtcagcagtcaccaggaattacagcgaaaaatgtataaacaatatcatggatttcgtctctggatctgctagccagaacactggcctgctgcaagagttctatcagaccactttgaaagcccttgaagaggctaagaatgagagactctggttcaagacaaatcttaaactctgcaacatctggtttgacattggtgaatacagacggatgactaagattctgaaggaactccataagtcttgtcaaaaggaagatggaactgatgatcagaagaaaggaagtcagctgcttgaggtttatgcaattgaaattcagatttacactgaaacgaaggacaacaaaaagcttaagcaactataccataaggcacttgccatcaagtctgccatacctcatcctaggatcatgggtataatccgcgagtgtggtggaaaaatgcacatggcagaacgtcagtgggaagaagcagcgacagacttctttgaggcttttaaaaattacgatgaagctggcaaccaaagacgtatacagtgcctgaagtatcttgttctggcgaatatgctgatggagtcagaagtgaatccgtttgatggccaagaggcaaagccgtacaaaaacgaccctgagattttggcaatgacaaatttgatcgcagcatatcaacgaaatgagatcatagagtttgagagaatactaaagagtaaccggaggacgataatggatgatccattcatcagaaactacatggaagatctgctgaagaaagtgagaacacaagtgttactgaagctgattaagccatacacaaagatagggattccgttcatatcaaaggaactgaacgtgccagagacggatgtgacggagttactagtgtcgctgatactcgacagcagaatcgatggtcacattgatgaaatgaaccgttacttactgagaggcgacagtggcaatggaaggaagttgcataaggcggttgataaatggaactcacagctcaagtctctttcttcaaatatcaccagccgagtctgttaacttggaaacctctcttttggatagattttgtgatttggcgttgattctttgtggattatctgtttctcttcacatagctggatttgatggagtttataaaccacttcaatgccaagaaaaaggatttgaaactc

SEQ ID NO: 23813 - protein, 439 aa, Arabidopsis thaliana
  peptide (1)..(439): Ceres Seq. ID no. 13490859
  misc_feature (305)..(409): Pfam Name: PCI domain Pfam Description: PCI domain
  misc_feature (1)..(438): Homolog of NCBI NO: 13445486 NR Description: TRIP15-ISO [Homo sapiens]
  misc_feature (1)..(438): Homolog of NCBI NO: 5410310 NR Description: thyroid receptor interactor trip15 [Homo sapiens]
  misc_feature (1)..(438): Homolog of NCBI NO: 18606281 NR Description: COP9 (constitutive photomorphogenic) homolog,
  misc_feature (1)..(438): Homolog of NCBI NO: 6753486 NR Description: COP9 (constitutive photomorphogenic) homolog,
  misc_feature (1)..(438): Homolog of NCBI NO: 4759264 NR Description: thyroid receptor interacting protein 15 [Homo
  misc_feature (363)..(409): Homolog of NCBI NO: 34903328 NR Description: unnamed protein product [Oryza sativa (japonica
  misc_feature (7)..(390): Homolog of NCBI NO: 34903328 NR Description: unnamed protein product [Oryza sativa (japonica
  misc_feature (7)..(439): Homolog of NCBI NO: 25407849 NR Description: probable PCI domain protein [imported] -
  misc_feature (1)..(439): Homolog of NCBI NO: 15215816 NR Description: At2g26990/T20P8.4 [Arabidopsis thaliana]
  misc_feature (1)..(439): Homolog of NCBI NO: 18401293 NR Description: COP9 complex subunit CSN2, putative [Arabidopsis
MASDADMEDYGFEYSDEEQEEQDVDIENQYYNSKGMVETEPEEALSGFAEVVQMEPEKADWGFKALKQTVKIYYRLGKYKEMMEAYTEMLTYIKSAVTRNYSEKCINNIMDFVSGSASQNTGLLQEFYQTTLKALEEAKNERLWFKTNLKLCNIWFDIGEYRRMTKILKELHKSCQKEDGTDDQKKGSQLLEVYAIEIQIYTETKDNKKLKQLYHKALAIKSAIPHPRIMGIIRECGGKMHMAERQWEEAATDFFEAFKNYDEAGNQRRIQCLKYLVLANMLMESEVNPFDGQEAKPYKNDPEILAMTNLIAAYQRNEIIEFERILKSNRRTIMDDPFIRNYMEDLLKKVRTQVLLKLIKPYTKIGIPFISKELNVPETDVTELLVSLILDSRIDGHIDEMNRYLLRGDSGNGRKLHKAVDKWNSQLKSLSSNITSRVC

SEQ ID NO: 23814 - protein, 433 aa, Arabidopsis thaliana
  peptide (1)..(433): Ceres Seq. ID no. 13490860
  misc_feature (299)..(403): Pfam Name: PCI domain Pfam Description: PCI domain
  misc_feature (1)..(432): Homolog of NCBI NO: 13445486 NR Description: TRIP15-ISO [Homo sapiens]
  misc_feature (1)..(432): Homolog of NCBI NO: 5410310 NR Description: thyroid receptor interactor trip15 [Homo sapiens]
  misc_feature (1)..(432): Homolog of NCBI NO: 18606281 NR Description: COP9 (constitutive photomorphogenic) homolog,
  misc_feature (1)..(432): Homolog of NCBI NO: 6753486 NR Description: COP9 (constitutive photomorphogenic) homolog,
  misc_feature (1)..(432): Homolog of NCBI NO: 4759264 NR Description: thyroid receptor interacting protein 15 [Homo
  misc_feature (357)..(403): Homolog of NCBI NO: 34903328 NR Description: unnamed protein product [Oryza sativa (japonica
  misc_feature (1)..(384): Homolog of NCBI NO: 34903328 NR Description: unnamed protein product [Oryza sativa (japonica
  misc_feature (1)..(433): Homolog of NCBI NO: 25407849 NR Description: probable PCI domain protein [imported] -
  misc_feature (1)..(433): Homolog of NCBI NO: 15215816 NR Description: At2g26990/T20P8.4 [Arabidopsis thaliana]
  misc_feature (1)..(433): Homolog of NCBI NO: 18401293 NR Description: COP9 complex subunit CSN2, putative [Arabidopsis
MEDYGFEYSDEEQEEQDVDIENQYYNSKGMVETEPEEALSGFAEVVQMEPEKADWGFKALKQTVKIYYRLGKYKEMMEAYTEMLTYIKSAVTRNYSEKCINNIMDFVSGSASQNTGLLQEFYQTTLKALEEAKNERLWFKTNLKLCNIWFDIGEYRRMTKILKELHKSCQKEDGTDDQKKGSQLLEVYAIEIQIYTETKDNKKLKQLYHKALAIKSAIPHPRIMGIIRECGGKMHMAERQWEEAATDFFEAFKNYDEAGNQRRIQCLKYLVLANMLMESEVNPFDGQEAKPYKNDPEILAMTNLIAAYQRNEIIEFERILKSNRRTIMDDPFIRNYMEDLLKKVRTQVLLKLIKPYTKIGIPFISKELNVPETDVTELLVSLILDSRIDGHIDEMNRYLLRGDSGNGRKLHKAVDKWNSQLKSLSSNITSRVC

SEQ ID NO: 23815 - protein, 404 aa, Arabidopsis thaliana
  peptide (1)..(404): Ceres Seq. ID no. 13490861
  misc_feature (270)..(374): Pfam Name: PCI domain Pfam Description: PCI domain
  misc_feature (1)..(403): Homolog of NCBI NO: 13445486 NR Description: TRIP15-ISO [Homo sapiens]
  misc_feature (1)..(403): Homolog of NCBI NO: 5410310 NR Description: thyroid receptor interactor trip15 [Homo sapiens]
  misc_feature (1)..(403): Homolog of NCBI NO: 18606281 NR Description: COP9 (constitutive photomorphogenic) homolog,
  misc_feature (1)..(403): Homolog of NCBI NO: 6753486 NR Description: COP9 (constitutive photomorphogenic) homolog,
  misc_feature (1)..(403): Homolog of NCBI NO: 4759264 NR Description: thyroid receptor interacting protein 15 [Homo
  misc_feature (328)..(374): Homolog of NCBI NO: 34903328 NR Description: unnamed protein product [Oryza sativa (japonica
  misc_feature (1)..(355): Homolog of NCBI NO: 34903328 NR Description: unnamed protein product [Oryza sativa (japonica
  misc_feature (1)..(404): Homolog of NCBI NO: 25407849 NR Description: probable PCI domain protein [imported] -
  misc_feature (1)..(404): Homolog of NCBI NO: 15215816 NR Description: At2g26990/T20P8.4 [Arabidopsis thaliana]
  misc_feature (1)..(404): Homolog of NCBI NO: 18401293 NR Description: COP9 complex subunit CSN2, putative [Arabidopsis
MVETEPEEALSGFAEVVQMEPEKADWGFKALKQTVKIYYRLGKYKEMMEAYTEMLTYIKSAVTRNYSEKCINNIMDFVSGSASQNTGLLQEFYQTTLKALEEAKNERLWFKTNLKLCNIWFDIGEYRRMTKILKELHKSCQKEDGTDDQKKGSQLLEVYAIEIQIYTETKDNKKLKQLYHKALAIKSAIPHPRIMGIIRECGGKMHMAERQWEEAATDFFEAFKNYDEAGNQRRIQCLKYLVLANMLMESEVNPFDGQEAKPYKNDPEILAMTNLIAAYQRNEIIEFERILKSNRRTIMDDPFIRNYMEDLLKKVRTQVLLKLIKPYTKIGIPFISKELNVPETDVTELLVSLILDSRIDGHIDEMNRYLLRGDSGNGRKLHKAVDKWNSQLKSLSSNITSRVC

SEQ ID NO: 23816 - DNA, 1305 bp, Arabidopsis thaliana
  misc_feature (1)..(1305): Ceres Seq. ID no. 13490738
  misc_feature: MA Experiment ID: 108462 Result: Up-regulated in Transcription
  misc_feature: MA Experiment 108462 PARAMETER Experiment Name: At_Germinating_Seeds_cDNA_P Parameter: Age (day) Value: 2 vs. 0
  misc_feature: MA Experiment 108462 PARAMETER Experiment Name: At_Germinating_Seeds_cDNA_P Parameter: Tissue Value: Germinating Seeds
  misc_feature: MA Experiment ID: 20000182 Result: Up-regulated in Transcription
  misc_feature: MA Experiment 20000182 PARAMETER Experiment Name: At_2mM_SA_P Parameter: Age (day) Value: 14
  misc_feature: MA Experiment 20000182 PARAMETER Experiment Name: At_2mM_SA_P Parameter: Organism Value: A. thaliana
  misc_feature: MA Experiment 20000182 PARAMETER Experiment Name: At_2mM_SA_P Parameter: Plant Line Value: WS
  misc_feature: MA Experiment 20000182 PARAMETER Experiment Name: At_2mM_SA_P Parameter: Timepoint (hr) Value: 6
  misc_feature: MA Experiment 20000182 PARAMETER Experiment Name: At_2mM_SA_P Parameter: Tissue Value: Aerial
  misc_feature: MA Experiment 20000182 PARAMETER Experiment Name: At_2mM_SA_P Parameter: Treatment Value: 2mM SA vs. No Treatment
  misc_feature: MA Experiment ID: 20000264 Result: Up-regulated in Transcription
  misc_feature: MA Experiment 20000264 PARAMETER Experiment Name: At_Open_Flower_P Parameter: Age (day) Value: 21
  misc_feature: MA Experiment 20000264 PARAMETER Experiment Name: At_Open_Flower_P Parameter: Plant Line Value: WS
  misc_feature: MA Experiment 20000264 PARAMETER Experiment Name: At_Open_Flower_P Parameter: Tissue Value: Open Flower vs. Whole Plant
  misc_feature: MA Experiment ID: 20000794 Result: Up-regulated in Transcription
  misc_feature: MA Experiment 20000794 PARAMETER Experiment Name: At_Petals_P Parameter: Age (day) Value: 23-25 days
  misc_feature: MA Experiment 20000794 PARAMETER Experiment Name: At_Petals_P Parameter: Plant Line Value: WS
  misc_feature: MA Experiment 20000794 PARAMETER Experiment Name: At_Petals_P Parameter: Tissue Value: Petals vs. Whole plant
actcaatccaaactcaacccacaacgctacacattaaaaaataaaaaacctatggcaaccatttccttctctcacaaccaccaatcctccgacaaccgccgtggtggatcccatcaccaccgtcacggccccgtcgtggaagagatcgaaggactcatcaaagttttcaacgacggctgcgtcgaaagacctcccatagttcccatcgtctcaccaaccattcacccatcttctaaagccacagcctttgacatcaaactatccaacgacacatggacacgtgtctacatccccgatgccgcagcagcctcgccgtccgttactctccctctcctcgtttacttccacggcggtggtttctgcgttggctccgccgcttggagttgctaccatgacttcttgaccagccttgccgttaaagcccgttgcgtcatcgtttccgtaaactaccgtttagcccctgaacaccgtctcccggcggcgtacgacgacggcgttaatgtcgtctcgtggctagtcaagcaacaaatatctaccggtggtggatatccttcttggttgagtaaatgtaacctctcaaacgttttcttggccggagatagcgccggagccaacatagcttaccaagtcgccgtaagaatcatggccagtggcaaatacgcaaacactctacacctcaagggcattattctcatccaccctttcttcggcggcgaatcaagaacgtcttcggagaaacaacaacatcacaccaagtcatcggcgcttactctttcagcttccgacgcatattggcgtctagctctgccacgtggagcgagtagagaccatccatggtgtaaccctctgatgagctcggcgggagcgaagttaccgacgacgatggtgttcatggcggagtttgatatactaaaagaacgaaacttggagatgtgtaaagtgatgagaagccatgggaagagagttgaaggtatagttcatggaggtgttggtcacgcttttcatattctcgacaactcgtcggtgtcacgtgatcgaatccacgacatgatgtgtcgtcttcacaacttcatacatccatcataataattccctaaagaccttttttctgaaacctttaattgatttaaaatgttgttcttgaaaaataataagagataaaaacttgaaatgttgtgtttttattgtggattaaagtaagctttgctttgtagtgttttttcagtgaaggtgaatagtataaattatgtaatacaatagatggacttgtacttttaagttaagttatgtatccaatgcttgaat

SEQ ID NO: 23817 - protein, 361 aa, Arabidopsis thaliana
  peptide (1)..(361): Ceres Seq. ID no. 13490739
  misc_feature (45)..(347): Homolog of NCBI NO: 542058 NR Description: HSR203J protein - common tobacco
  misc_feature (45)..(347): Homolog of NCBI NO: 7417008 NR Description: cell death associated protein [Nicotiana tabacum]
  misc_feature (45)..(347): Homolog of NCBI NO: 15240090 NR Description: expressed protein [Arabidopsis thaliana]
  misc_feature (45)..(358): Homolog of NCBI NO: 34899932 NR Description: putative cell death associated protein
  misc_feature (45)..(338): Homolog of NCBI NO: 27819508 NR Description: putative esterase [Oryza sativa (japonica
  misc_feature (46)..(357): Homolog of NCBI NO: 26023941 NR Description: putative serine hydrolase [Vitis vinifera]
  misc_feature (45)..(357): Homolog of NCBI NO: 5487873 NR Description: PrMC3 [Pinus radiata]
  misc_feature (42)..(359): Homolog of NCBI NO: 18409077 NR Description: expressed protein [Arabidopsis thaliana]
  misc_feature (18)..(361): Homolog of NCBI NO: 21593215 NR Description: unknown [Arabidopsis thaliana]
  misc_feature (18)..(361): Homolog of NCBI NO: 15237267 NR Description: expressed protein [Arabidopsis thaliana]
TQSKLNPQRYTLKNKKPMATISFSHNHQSSDNRRGGSHHHRHGPVVEEIEGLIKVFNDGCVERPPIVPIVSPTIHPSSKATAFDIKLSNDTWTRVYIPDAAAASPSVTLPLLVYFHGGGFCVGSAAWSCYHDFLTSLAVKARCVIVSVNYRLAPEHRLPAAYDDGVNVVSWLVKQQISTGGGYPSWLSKCNLSNVFLAGDSAGANIAYQVAVRIMASGKYANTLHLKGIILIHPFFGGESRTSSEKQQHHTKSSALTLSASDAYWRLALPRGASRDHPWCNPLMSSAGAKLPTTMVFMAEFDILKERNLEMCKVMRSHGKRVEGIVHGGVGHAFHILDNSSVSRDRIHDMMCRLHNFIHPS

SEQ ID NO: 23818 - protein, 344 aa, Arabidopsis thaliana
  peptide (1)..(344): Ceres Seq. ID no. 13490740
  misc_feature (28)..(330): Homolog of NCBI NO: 542058 NR Description: HSR203J protein - common tobacco
  misc_feature (28)..(330): Homolog of NCBI NO: 7417008 NR Description: cell death associated protein [Nicotiana tabacum]
  misc_feature (28)..(330): Homolog of NCBI NO: 15240090 NR Description: expressed protein [Arabidopsis thaliana]
  misc_feature (28)..(341): Homolog of NCBI NO: 34899932 NR Description: putative cell death associated protein
  misc_feature (28)..(321): Homolog of NCBI NO: 27819508 NR Description: putative esterase [Oryza sativa (japonica
  misc_feature (29)..(340): Homolog of NCBI NO: 26023941 NR Description: putative serine hydrolase [Vitis vinifera]
  misc_feature (28)..(340): Homolog of NCBI NO: 5487873 NR Description: PrMC3 [Pinus radiata]
  misc_feature (25)..(342): Homolog of NCBI NO: 18409077 NR Description: expressed protein [Arabidopsis thaliana]
  misc_feature (1)..(344): Homolog of NCBI NO: 21593215 NR Description: unknown [Arabidopsis thaliana]
  misc_feature (1)..(344): Homolog of NCBI NO: 15237267 NR Description: expressed protein [Arabidopsis thaliana]
MATISFSHNHQSSDNRRGGSHHHRHGPVVEEIEGLIKVFNDGCVERPPIVPIVSPTIHPSSKATAFDIKLSNDTWTRVYIPDAAAASPSVTLPLLVYFHGGGFCVGSAAWSCYHDFLTSLAVKARCVIVSVNYRLAPEHRLPAAYDDGVNVVSWLVKQQISTGGGYPSWLSKCNLSNVFLAGDSAGANIAYQVAVRIMASGKYANTLHLKGIILIHPFFGGESRTSSEKQQHHTKSSALTLSASDAYWRLALPRGASRDHPWCNPLMSSAGAKLPTTMVFMAEFDILKERNLEMCKVMRSHGKRVEGIVHGGVGHAFHILDNSSVSRDRIHDMMCRLHNFIHPS

SEQ ID NO: 23819 - DNA, 1515 bp, Arabidopsis thaliana
  misc_feature (1)..(1515): Ceres Seq. ID no. 12324419
  misc_feature: MA Experiment ID: 108434 Result: Up-regulated in Transcription
  misc_feature: MA Experiment 108434 PARAMETER Experiment Name: At_Root_Tips_cDNA_P Parameter: Tissue Value: Root Tips
  misc_feature: MA Experiment ID: 108576 Result: Up-regulated in Transcription
  misc_feature: MA Experiment 108576 PARAMETER Experiment Name: At_42deg_Heat_cDNA_P Parameter: Temperature (deg C) Value: 42 vs. 22
  misc_feature: MA Experiment 108576 PARAMETER Experiment Name: At_42deg_Heat_cDNA_P Parameter: Timepoint (hr) Value: 1
  misc_feature: MA Experiment 108576 PARAMETER Experiment Name: At_42deg_Heat_cDNA_P Parameter: Tissue Value: Aerial
  misc_feature: MA Experiment ID: 108595 Result: Up-regulated in Transcription
  misc_feature: MA Experiment 108595 PARAMETER Experiment Name: At_Ler-pi_Ovule_cDNA_P Parameter: Plant Line Value: null
  misc_feature: MA Experiment ID: 20000093 Result: Up-regulated in Transcription
  misc_feature: MA Experiment 20000093 PARAMETER Experiment Name: At_42deg_Heat_cDNA_P Parameter: Temperature (deg C) Value: 42 vs. 22
  misc_feature: MA Experiment 20000093 PARAMETER Experiment Name: At_42deg_Heat_cDNA_P Parameter: Timepoint (hr) Value: 0.5
  misc_feature: MA Experiment 20000093 PARAMETER Experiment Name: At_42deg_Heat_cDNA_P Parameter: Tissue Value: Aerial
  misc_feature: MA Experiment ID: 20000111 Result: Up-regulated in Transcription
  misc_feature: MA Experiment 20000111 PARAMETER Experiment Name: At_42deg_Heat_cDNA_P Parameter: Temperature (deg C) Value: 42 vs. 22
  misc_feature: MA Experiment 20000111 PARAMETER Experiment Name: At_42deg_Heat_cDNA_P Parameter: Timepoint (hr) Value: 6
  misc_feature: MA Experiment 20000111 PARAMETER Experiment Name: At_42deg_Heat_cDNA_P Parameter: Tissue Value: Aerial
  misc_feature: MA Experiment ID: 20000112 Result: Up-regulated in Transcription
  misc_feature: MA Experiment 20000112 PARAMETER Experiment Name: At_42deg_Heat_cDNA_P Parameter: Temperature (deg C) Value: 42 vs. 22
  misc_feature: MA Experiment 20000112 PARAMETER Experiment Name: At_42deg_Heat_cDNA_P Parameter: Timepoint (hr) Value: 2
  misc_feature: MA Experiment 20000112 PARAMETER Experiment Name: At_42deg_Heat_cDNA_P Parameter: Tissue Value: Aerial
  misc_feature: MA Experiment ID: 20000227 Result: Up-regulated in Transcription
  misc_feature: MA Experiment 20000227 PARAMETER Experiment Name: At_Root-Tips-vs-Tops_P Parameter: Tissue Value: Root Tips vs. Root Tops
aagttcagcttcgtacctgagccaaagagtgtttcaggatggagctaaggtcgagaatgctcaaagactgtctcttggaagattccaactcatgttcctcaaacgggttcaaatcgattcccagacggcatcctctcaaccctttcccaatgataccaaagaggaaacaatccaatgcattgcaggctgtgattaacgccatcaagaacctccattccaacaccatcaaatccgctccatcggggatcttaccaaggagcctttctcggcggttagcaaccaagaacaaagcagaaaaccaagcaagcatcaccgttattcgggtcaaagacatcgtgcgatggcactcgtctaaggacctgcatgaggacatatcacattttgaacctcatcagtacacaaccaagaacacgacaacaaccacaggatcctccaccaccagcggcacatcctgcagcagttggtctgacttggattttacatcggagtttttaccatcatcatggggaagtaacgttgaggagtgcggtgaaaaacagagtgttaaaaacaacttacactgcgtcggcgaagattcttgcacagcagtaatactagccgacactgaagtgggacctgaggagaacttacagtgtgaaaaggagcacaacagccctgtctcagtgtttgagattcaacatgaggaatatgacgaaacatcagactcttctttcagtcaatgccttgacaatgtggaaagaaccaaacaaaagctcatgcaaacgattcagcggtttgagtctttggccaacattagtcctttcaatttggatgaatggggctcaatggatgaagcatcttgcatggaaggaggacaagagacagataccaagtatgatgatgatgagaattgtgatactgttgatagagaaagtgaagatgaatacaatgatgaggttgaagagaaggcagcacagctatggaaccgagtcaaagaaagacacgccatttggatccacgaagaacatctgataatggactatttcagagatgaattgatgcaaaggacaaactcattccacgaaactcaaacactttgagaaccaattggtatgcgaggcaaaaggatggttgcagggaaagagagaatcagagcttgaacgcggaacaagtgagcagaggagacaagcatgtgctagagaaatcgaaagacgagactggaatgagaaacagatagaggaggagcacgaagtggtggttacacagattgaggaagaactcttcagcctgttaatggacgaaactttaacaacgctctctaccaaaactgattccagtccacctgaacatcacaaaacagtaacatcaatgcttaagctttagaaattagaaagcaaaaacatttttgaataaggctttgacttaaaagctcaggtttttttagctctacttttgtaagaatgaagcaaacgaataatacaatgtatattgacctctaaaaccatatatatatatatgcctaattcatatttctgc

SEQ ID NO: 23820 - protein, 346 aa, Arabidopsis thaliana
  peptide (1)..(346): Ceres Seq. ID no. 12324420
  misc_feature (240)..(346): Homolog of NCBI NO: 7485281 NR Description: hypothetical protein A_TM018A10.11 - Arabidopsis
  misc_feature (7)..(346): Homolog of NCBI NO: 21593216 NR Description: unknown [Arabidopsis thaliana]
  misc_feature (1)..(346): Homolog of NCBI NO: 18411440 NR Description: expressed protein
MELRSRMLKDCLLEDSNSCSSNGFKSIPRRHPLNPFPMIPKRKQSNALQAVINAIKNLHSNTIKSAPSGILPRSLSRRLATKNKAENQASITVIRVKDIVRWHSSKDLHEDISHFEPHQYTTKNTTTTTGSSTTSGTSCSSWSDLDFTSEFLPSSWGSNVEECGEKQSVKNNLHCVGEDSCTAVILADTEVGPEENLQCEKEHNSPVSVFEIQHEEYDETSDSSFSQCLDNVERTKQKLMQTIQRFESLANISPFNLDEWGSMDEASCMEGGQETDTKYDDDENCDTVDRESEDEYNDEVEEKAAQLWNRVKERHAIWIHEEHLIMDYFRDELMQRTNSFHETQTL

SEQ ID NO: 23821 - protein, 340 aa, Arabidopsis thaliana
  peptide (1)..(340): Ceres Seq. ID no. 12324421
  misc_feature (234)..(340): Homolog of NCBI NO: 7485281 NR Description: hypothetical protein A_TM018A10.11 - Arabidopsis
  misc_feature (1)..(340): Homolog of NCBI NO: 21593216 NR Description: unknown [Arabidopsis thaliana]
  misc_feature (1)..(340): Homolog of NCBI NO: 18411440 NR Description: expressed protein
MLKDCLLEDSNSCSSNGFKSIPRRHPLNPFPMIPKRKQSNALQAVINAIKNLHSNTIKSAPSGILPRSLSRRLATKNKAENQASITVIRVKDIVRWHSSKDLHEDISHFEPHQYTTKNTTTTTGSSTTSGTSCSSWSDLDFTSEFLPSSWGSNVEECGEKQSVKNNLHCVGEDSCTAVILADTEVGPEENLQCEKEHNSPVSVFEIQHEEYDETSDSSFSQCLDNVERTKQKLMQTIQRFESLANISPFNLDEWGSMDEASCMEGGQETDTKYDDDENCDTVDRESEDEYNDEVEEKAAQLWNRVKERHAIWIHEEHLIMDYFRDELMQRTNSFHETQTL

SEQ ID NO: 23822 - protein, 309 aa, Arabidopsis thaliana
  peptide (1)..(309): Ceres Seq. ID no. 12324422
  misc_feature (203)..(309): Homolog of NCBI NO: 7485281 NR Description: hypothetical protein A_TM018A10.11 - Arabidopsis
  misc_feature (1)..(309): Homolog of NCBI NO: 21593216 NR Description: unknown [Arabidopsis thaliana]
  misc_feature (1)..(309): Homolog of NCBI NO: 18411440 NR Description: expressed protein
MIPKRKQSNALQAVINAIKNLHSNTIKSAPSGILPRSLSRRLATKNKAENQASITVIRVKDIVRWHSSKDLHEDISHFEPHQYTTKNTTTTTGSSTTSGTSCSSWSDLDFTSEFLPSSWGSNVEECGEKQSVKNNLHCVGEDSCTAVILADTEVGPEENLQCEKEHNSPVSVFEIQHEEYDETSDSSFSQCLDNVERTKQKLMQTIQRFESLANISPFNLDEWGSMDEASCMEGGQETDTKYDDDENCDTVDRESEDEYNDEVEEKAAQLWNRVKERHAIWIHEEHLIMDYFRDELMQRTNSFHETQTL

SEQ ID NO: 23823 - DNA, 1065 bp, Arabidopsis thaliana; identical to SEQ ID NO: 22230
  misc_feature (1)..(1065): Ceres Seq. ID no. 13500131
  misc_feature: MA Experiment ID: 108461 Result: Up-regulated in Transcription
  misc_feature: MA Experiment 108461 PARAMETER Experiment Name: At_Germinating_Seeds_cDNA_P Parameter: Age (day) Value: 1 vs. 0
  misc_feature: MA Experiment 108461 PARAMETER Experiment Name: At_Germinating_Seeds_cDNA_P Parameter: Tissue Value: Germinating Seeds
  misc_feature: MA Experiment ID: 108462 Result: Up-regulated in Transcription
  misc_feature: MA Experiment 108462 PARAMETER Experiment Name: At_Germinating_Seeds_cDNA_P Parameter: Age (day) Value: 2 vs. 0
  misc_feature: MA Experiment 108462 PARAMETER Experiment Name: At_Germinating_Seeds_cDNA_P Parameter: Tissue Value: Germinating Seeds
  misc_feature: MA Experiment ID: 108463 Result: Up-regulated in Transcription
  misc_feature: MA Experiment 108463 PARAMETER Experiment Name: At_Germinating_Seeds_cDNA_P Parameter: Age (day) Value: 3 vs. 0
  misc_feature: MA Experiment 108463 PARAMETER Experiment Name: At_Germinating_Seeds_cDNA_P Parameter: Tissue Value: Germinating Seeds
  misc_feature: MA Experiment ID: 108464 Result: Up-regulated in Transcription
  misc_feature: MA Experiment 108464 PARAMETER Experiment Name: At_Germinating_Seeds_cDNA_P Parameter: Age (day) Value: 4 vs. 0
  misc_feature: MA Experiment 108464 PARAMETER Experiment Name: At_Germinating_Seeds_cDNA_P Parameter: Tissue Value: Germinating Seeds
  misc_feature: MA Experiment ID: 108488 Result: Down-regulated in Transcription
  misc_feature: MA Experiment ID: 108489 Result: Up-regulated in Transcription
  misc_feature: MA Experiment ID: 108501 Result: Down-regulated in Transcription
  misc_feature: MA Experiment 108501 PARAMETER Experiment Name: At_ap2_floral_buds_cDNA_P Parameter: Plant Line Value: ap2 (Ler.)
  misc_feature: MA Experiment 108501 PARAMETER Experiment Name: At_ap2_floral_buds_cDNA_P Parameter: Tissue Value: Closed Flower
  misc_feature: MA Experiment ID: 108595 Result: Up-regulated in Transcription
  misc_feature: MA Experiment 108595 PARAMETER Experiment Name: At_Ler-pi_Ovule_cDNA_P Parameter: Plant Line Value: null
  misc_feature: MA Experiment ID: 108605 Result: Up-regulated in Transcription
  misc_feature: MA Experiment 108605 PARAMETER Experiment Name: At_100uM_ABA_cDNA_P Parameter: Timepoint (hr) Value: 6
  misc_feature: MA Experiment 108605 PARAMETER Experiment Name: At_100uM_ABA_cDNA_P Parameter: Tissue Value: Aerial
  misc_feature: MA Experiment 108605 PARAMETER Experiment Name: At_100uM_ABA_cDNA_P Parameter: Treatment Value: 100uM ABA vs. No Treatment
  misc_feature: MA Experiment ID: 108607 Result: Up-regulated in Transcription
  misc_feature: MA Experiment 108607 PARAMETER Experiment Name: At_100uM_ABA_cDNA_P Parameter: Timepoint (hr) Value: 4
  misc_feature: MA Experiment 108607 PARAMETER Experiment Name: At_100uM_ABA_cDNA_P Parameter: Tissue Value: Aerial
  misc_feature: MA Experiment 108607 PARAMETER Experiment Name: At_100uM_ABA_cDNA_P Parameter: Treatment Value: 100uM ABA vs. No Treatment
  misc_feature: MA Experiment ID: 108608 Result: Up-regulated in Transcription
  misc_feature: MA Experiment 108608 PARAMETER Experiment Name: At_100uM_ABA_cDNA_P Parameter: Timepoint (hr) Value: 1
  misc_feature: MA Experiment 108608 PARAMETER Experiment Name: At_100uM_ABA_cDNA_P Parameter: Tissue Value: Aerial
  misc_feature: MA Experiment 108608 PARAMETER Experiment Name: At_100uM_ABA_cDNA_P Parameter: Treatment Value: 100uM ABA vs. No Treatment
  misc_feature: MA Experiment ID: 108609 Result: Up-regulated in Transcription
  misc_feature: MA Experiment 108609 PARAMETER Experiment Name: At_100uM_ABA_cDNA_P Parameter: Timepoint (hr) Value: 24
  misc_feature: MA Experiment 108609 PARAMETER Experiment Name: At_100uM_ABA_cDNA_P Parameter: Tissue Value: Aerial
  misc_feature: MA Experiment 108609 PARAMETER Experiment Name: At_100uM_ABA_cDNA_P Parameter: Treatment Value: 100uM ABA vs. No Treatment
  misc_feature: MA Experiment ID: 20000069 Result: Up-regulated in Transcription
  misc_feature: MA Experiment 20000069 PARAMETER Experiment Name: At_100uM_ABA_Mutants_cDNA_P Parameter: Plant Line Value: CS23
  misc_feature: MA Experiment 20000069 PARAMETER Experiment Name: At_100uM_ABA_Mutants_cDNA_P Parameter: Timepoint (hr) Value: 6
  misc_feature: MA Experiment 20000069 PARAMETER Experiment Name: At_100uM_ABA_Mutants_cDNA_P Parameter: Tissue Value: Aerial
  misc_feature: MA Experiment 20000069 PARAMETER Experiment Name: At_100uM_ABA_Mutants_cDNA_P Parameter: Treatment Value: 100uM ABA vs. No Treatment
  misc_feature: MA Experiment ID: 20000070 Result: Up-regulated in Transcription
  misc_feature: MA Experiment 20000070 PARAMETER Experiment Name: At_100uM_ABA_Mutants_cDNA_P Parameter: Plant Line Value: CS24
  misc_feature: MA Experiment 20000070 PARAMETER Experiment Name: At_100uM_ABA_Mutants_cDNA_P Parameter: Timepoint (hr) Value: 6
  misc_feature: MA Experiment 20000070 PARAMETER Experiment Name: At_100uM_ABA_Mutants_cDNA_P Parameter: Tissue Value: Aerial
  misc_feature: MA Experiment 20000070 PARAMETER Experiment Name: At_100uM_ABA_Mutants_cDNA_P Parameter: Treatment Value: 100uM ABA vs. No Treatment
  misc_feature: MA Experiment ID: 20000071 Result: Up-regulated in Transcription
  misc_feature: MA Experiment 20000071 PARAMETER Experiment Name: At_100uM_ABA_Mutants_cDNA_P Parameter: Plant Line Value: CS8104
  misc_feature: MA Experiment 20000071 PARAMETER Experiment Name: At_100uM_ABA_Mutants_cDNA_P Parameter: Timepoint (hr) Value: 6
  misc_feature: MA Experiment 20000071 PARAMETER Experiment Name: At_100uM_ABA_Mutants_cDNA_P Parameter: Tissue Value: Aerial
  misc_feature: MA Experiment 20000071 PARAMETER Experiment Name: At_100uM_ABA_Mutants_cDNA_P Parameter: Treatment Value: 100uM ABA vs. No Treatment
  misc_feature: MA Experiment ID: 20000072 Result: Up-regulated in Transcription
  misc_feature: MA Experiment 20000072 PARAMETER Experiment Name: At_100uM_ABA_Mutants_cDNA_P Parameter: Plant Line Value: CS8105
  misc_feature: MA Experiment 20000072 PARAMETER Experiment Name: At_100uM_ABA_Mutants_cDNA_P Parameter: Timepoint (hr) Value: 6
  misc_feature: MA Experiment 20000072 PARAMETER Experiment Name: At_100uM_ABA_Mutants_cDNA_P Parameter: Tissue Value: Aerial
  misc_feature: MA Experiment 20000072 PARAMETER Experiment Name: At_100uM_ABA_Mutants_cDNA_P Parameter: Treatment Value: 100uM ABA vs. No Treatment
  misc_feature: MA Experiment ID: 20000086 Result: Up-regulated in Transcription
  misc_feature: MA Experiment 20000086 PARAMETER Experiment Name: At_100uM_ABA_Mutants_cDNA_P Parameter: Plant Line Value: CS22
  misc_feature: MA Experiment 20000086 PARAMETER Experiment Name: At_100uM_ABA_Mutants_cDNA_P Parameter: Timepoint (hr) Value: 6
  misc_feature: MA Experiment 20000086 PARAMETER Experiment Name: At_100uM_ABA_Mutants_cDNA_P Parameter: Tissue Value: Aerial
  misc_feature: MA Experiment 20000086 PARAMETER Experiment Name: At_100uM_ABA_Mutants_cDNA_P Parameter: Treatment Value: 100uM ABA vs. No Treatment
  misc_feature: MA Experiment ID: 20000087 Result: Up-regulated in Transcription
  misc_feature: MA Experiment 20000087 PARAMETER Experiment Name: At_100uM_ABA_Mutants_cDNA_P Parameter: Plant Line Value: WS
  misc_feature: MA Experiment 20000087 PARAMETER Experiment Name: At_100uM_ABA_Mutants_cDNA_P Parameter: Timepoint (hr) Value: 6
  misc_feature: MA Experiment 20000087 PARAMETER Experiment Name: At_100uM_ABA_Mutants_cDNA_P Parameter: Tissue Value: Aerial
  misc_feature: MA Experiment 20000087 PARAMETER Experiment Name: At_100uM_ABA_Mutants_cDNA_P Parameter: Treatment Value: 100uM ABA vs. No Treatment
  misc_feature: MA Experiment ID: 20000088 Result: Up-regulated in Transcription
  misc_feature: MA Experiment 20000088 PARAMETER Experiment Name: At_100uM_ABA_Mutants_cDNA_P Parameter: Plant Line Value: Landsberg
  misc_feature: MA Experiment 20000088 PARAMETER Experiment Name: At_100uM_ABA_Mutants_cDNA_P Parameter: Timepoint (hr) Value: 6
  misc_feature: MA Experiment 20000088 PARAMETER Experiment Name: At_100uM_ABA_Mutants_cDNA_P Parameter: Tissue Value: Aerial
  misc_feature: MA Experiment 20000088 PARAMETER Experiment Name: At_100uM_ABA_Mutants_cDNA_P Parameter: Treatment Value: 100uM ABA vs. No Treatment
  misc_feature: MA Experiment ID: 20000166 Result: Up-regulated in Transcription
  misc_feature: MA Experiment 20000166 PARAMETER Experiment Name: At_100uM_ABA_P Parameter: Age (day) Value: 14
  misc_feature: MA Experiment 20000166 PARAMETER Experiment Name: At_100uM_ABA_P Parameter: Organism Value: A. thaliana
  misc_feature: MA Experiment 20000166 PARAMETER Experiment Name: At_100uM_ABA_P Parameter: Plant Line Value: WS
  misc_feature: MA Experiment 20000166 PARAMETER Experiment Name: At_100uM_ABA_P Parameter: Timepoint (hr) Value: 1
  misc_feature: MA Experiment 20000166 PARAMETER Experiment Name: At_100uM_ABA_P Parameter: Tissue Value: Aerial
  misc_feature: MA Experiment 20000166 PARAMETER Experiment Name: At_100uM_ABA_P Parameter: Treatment Value: 100uM ABA vs. No Treatment
  misc_feature: MA Experiment ID: 20000211 Result: Up-regulated in Transcription
  misc_feature: MA Experiment 20000211 PARAMETER Experiment Name: At_0.001percent_MeJA__P Parameter: Age (day) Value: 14
  misc_feature: MA Experiment 20000211 PARAMETER Experiment Name: At_0.001percent_MeJA__P Parameter: Organism Value: A. thaliana
  misc_feature: MA Experiment 20000211 PARAMETER Experiment Name: At_0.001percent_MeJA__P Parameter: Plant Line Value: WS
  misc_feature: MA Experiment 20000211 PARAMETER Experiment Name: At_0.001percent_MeJA__P Parameter: Timepoint (hr) Value: 1
  misc_feature: MA Experiment 20000211 PARAMETER Experiment Name: At_0.001percent_MeJA__P Parameter: Tissue Value: Aerial
  misc_feature: MA Experiment 20000211 PARAMETER Experiment Name: At_0.001percent_MeJA__P Parameter: Treatment Value: 0.001percent MeJA vs. No Treatment
  misc_feature: MA Experiment ID: 20000213 Result: Down-regulated in Transcription
  misc_feature: MA Experiment 20000213 PARAMETER Experiment Name: At_4deg_Cold_P Parameter: Timepoint (hr) Value: 2
  misc_feature: MA Experiment ID: 20000224 Result: Down-regulated in Transcription
  misc_feature: MA Experiment ID: 20000234 Result: Down-regulated in Transcription
  misc_feature: MA Experiment 20000234 PARAMETER Experiment Name: At_Siliques_P Parameter: Age (day) Value: 21
  misc_feature: MA Experiment 20000234 PARAMETER Experiment Name: At_Siliques_P Parameter: Organism Value: A. thaliana
  misc_feature: MA Experiment 20000234 PARAMETER Experiment Name: At_Siliques_P Parameter: Plant Line Value: WS
  misc_feature: MA Experiment 20000234 PARAMETER Experiment Name: At_Siliques_P Parameter: Tissue Value: Less Than 5mm Siliques vs. Whole Plant
  misc_feature: MA Experiment ID: 20000235 Result: Down-regulated in Transcription
  misc_feature: MA Experiment 20000235 PARAMETER Experiment Name: At_Siliques_P Parameter: Age (day) Value: 21
  misc_feature: MA Experiment 20000235 PARAMETER Experiment Name: At_Siliques_P Parameter: Organism Value: A. thaliana
  misc_feature: MA Experiment 20000235 PARAMETER Experiment Name: At_Siliques_P Parameter: Plant Line Value: WS
  misc_feature: MA Experiment 20000235 PARAMETER Experiment Name: At_Siliques_P Parameter: Tissue Value: 5-10mm Siliques vs. Whole Plant
  misc_feature: MA Experiment ID: 20000264 Result: Down-regulated in Transcription
  misc_feature: MA Experiment 20000264 PARAMETER Experiment Name: At_Open_Flower_P Parameter: Age (day) Value: 21
  misc_feature: MA Experiment 20000264 PARAMETER Experiment Name: At_Open_Flower_P Parameter: Plant Line Value: WS
  misc_feature: MA Experiment 20000264 PARAMETER Experiment Name: At_Open_Flower_P Parameter: Tissue Value: Open Flower vs. Whole Plant
  misc_feature: MA Experiment ID: 20000265 Result: Down-regulated in Transcription
  misc_feature: MA Experiment 20000265 PARAMETER Experiment Name: At_Open_Flower_P Parameter: Age (day) Value: 21
  misc_feature: MA Experiment 20000265 PARAMETER Experiment Name: At_Open_Flower_P Parameter: Plant Line Value: WS
  misc_feature: MA Experiment 20000265 PARAMETER Experiment Name: At_Open_Flower_P Parameter: Tissue Value: Closed Flower vs. Whole Plant
  misc_feature: MA Experiment ID: 20000286 Result: Down-regulated in Transcription
  misc_feature: MA Experiment 20000286 PARAMETER Experiment Name: At_Open_Flower_P Parameter: Age (day) Value: 21
  misc_feature: MA Experiment 20000286 PARAMETER Experiment Name: At_Open_Flower_P Parameter: Plant Line Value: WS
  misc_feature: MA Experiment 20000286 PARAMETER Experiment Name: At_Open_Flower_P Parameter: Tissue Value: Half Open vs. Whole Plant
  misc_feature: MA Experiment ID: 20000453 Result: Up-regulated in Transcription
  misc_feature: MA Experiment 20000453 PARAMETER Experiment Name: At_100uM_ABA_P Parameter: Age (day) Value: 15
  misc_feature: MA Experiment 20000453 PARAMETER Experiment Name: At_100uM_ABA_P Parameter: Organism Value: A. thaliana
  misc_feature: MA Experiment 20000453 PARAMETER Experiment Name: At_100uM_ABA_P Parameter: Plant Line Value: WS
  misc_feature: MA Experiment 20000453 PARAMETER Experiment Name: At_100uM_ABA_P Parameter: Timepoint (hr) Value: 24
  misc_feature: MA Experiment 20000453 PARAMETER Experiment Name: At_100uM_ABA_P Parameter: Tissue Value: Aerial
  misc_feature: MA Experiment 20000453 PARAMETER Experiment Name: At_100uM_ABA_P Parameter: Treatment Value: 100uM ABA vs. No Treatment
  misc_feature: MA Experiment ID: 20000573 Result: Up-regulated in Transcription
  misc_feature: MA Experiment 20000573 PARAMETER Experiment Name: At_100uM_ABA_Mutants__P Parameter: Organism Value: A. thaliana
  misc_feature: MA Experiment 20000573 PARAMETER Experiment Name: At_100uM_ABA_Mutants__P Parameter: Plant Line Value: CS22 vs. Ler wt
  misc_feature: MA Experiment 20000573 PARAMETER Experiment Name: At_100uM_ABA_Mutants__P Parameter: Timepoint (hr) Value: N/A
  misc_feature: MA Experiment 20000573 PARAMETER Experiment Name: At_100uM_ABA_Mutants__P Parameter: Tissue Value: Whole Plant
  misc_feature: MA Experiment 20000573 PARAMETER Experiment Name: At_100uM_ABA_Mutants__P Parameter: Treatment Value: None
  misc_feature: MA Experiment ID: 20000574 Result: Up-regulated in Transcription
  misc_feature: MA Experiment 20000574 PARAMETER Experiment Name: At_100uM_ABA_Mutants__P Parameter: Organism Value: A. thaliana
  misc_feature: MA Experiment 20000574 PARAMETER Experiment Name: At_100uM_ABA_Mutants__P Parameter: Plant Line Value: CS23 vs. Ler wt
  misc_feature: MA Experiment 20000574 PARAMETER Experiment Name: At_100uM_ABA_Mutants__P Parameter: Timepoint (hr) Value: N/A
  misc_feature: MA Experiment 20000574 PARAMETER Experiment Name: At_100uM_ABA_Mutants__P Parameter: Tissue Value: Whole Plant
  misc_feature: MA Experiment 20000574 PARAMETER Experiment Name: At_100uM_ABA_Mutants__P Parameter: Treatment Value: None
  misc_feature: MA Experiment ID: 20001247 Result: Up-regulated in Transcription
  misc_feature: MA Experiment 20001247 PARAMETER Experiment Name: At_Far-red-induction_P Parameter: Age (day) Value: 7
  misc_feature: MA Experiment 20001247 PARAMETER Experiment Name: At_Far-red-induction_P Parameter: Light Value: Far-red vs. White
  misc_feature: MA Experiment 20001247 PARAMETER Experiment Name: At_Far-red-induction_P Parameter: Organism Value: A. thaliana
  misc_feature: MA Experiment 20001247 PARAMETER Experiment Name: At_Far-red-induction_P Parameter: Plant Line Value: Columbia
  misc_feature: MA Experiment 20001247 PARAMETER Experiment Name: At_Far-red-induction_P Parameter: Timepoint (hr) Value: 1
  misc_feature: MA Experiment 20001247 PARAMETER Experiment Name: At_Far-red-induction_P Parameter: Tissue Value: Whole Plant
  misc_feature: MA Experiment ID: 20001248 Result: Up-regulated in Transcription
  misc_feature: MA Experiment 20001248 PARAMETER Experiment Name: At_Far-red-induction_P Parameter: Age (day) Value: 7
  misc_feature: MA Experiment 20001248 PARAMETER Experiment Name: At_Far-red-induction_P Parameter: Light Value: Far-red vs. White
  misc_feature: MA Experiment 20001248 PARAMETER Experiment Name: At_Far-red-induction_P Parameter: Organism Value: A. thaliana
  misc_feature: MA Experiment 20001248 PARAMETER Experiment Name: At_Far-red-induction_P Parameter: Plant Line Value: Columbia
  misc_feature: MA Experiment 20001248 PARAMETER Experiment Name: At_Far-red-induction_P Parameter: Timepoint (hr) Value: 4
  misc_feature: MA Experiment 20001248 PARAMETER Experiment Name: At_Far-red-induction_P Parameter: Tissue Value: Whole Plant
  misc_feature: MA Experiment ID: 20001450 Result: Up-regulated in Transcription
  misc_feature: MA Experiment 20001450 PARAMETER Experiment Name: At_Far-red-induction_P Parameter: Age (day) Value: 7
  misc_feature: MA Experiment 20001450 PARAMETER Experiment Name: At_Far-red-induction_P Parameter: Light Value: Far-red vs. White
  misc_feature: MA Experiment 20001450 PARAMETER Experiment Name: At_Far-red-induction_P Parameter: Organism Value: A. thaliana
  misc_feature: MA Experiment 20001450 PARAMETER Experiment Name: At_Far-red-induction_P Parameter: Plant Line Value: Columbia
  misc_feature: MA Experiment 20001450 PARAMETER Experiment Name: At_Far-red-induction_P Parameter: Timepoint (hr) Value: 8
  misc_feature: MA Experiment 20001450 PARAMETER Experiment Name: At_Far-red-induction_P Parameter: Tissue Value: Whole Plant
  misc_feature: MA Experiment ID: 20001451 Result: Up-regulated in Transcription
  misc_feature: MA Experiment 20001451 PARAMETER Experiment Name: At_Far-red-induction_P Parameter: Age (day) Value: 7
  misc_feature: MA Experiment 20001451 PARAMETER Experiment Name: At_Far-red-induction_P Parameter: Light Value: Far-red vs. White
  misc_feature: MA Experiment 20001451 PARAMETER Experiment Name: At_Far-red-induction_P Parameter: Organism Value: A. thaliana
  misc_feature: MA Experiment 20001451 PARAMETER Experiment Name: At_Far-red-induction_P Parameter: Plant Line Value: Columbia
  misc_feature: MA Experiment 20001451 PARAMETER Experiment Name: At_Far-red-induction_P Parameter: Timepoint (hr) Value: 24
  misc_feature: MA Experiment 20001451 PARAMETER Experiment Name: At_Far-red-induction_P Parameter: Tissue Value: Whole Plant
  misc_feature: MA Experiment ID: 20001557 Result: Down-regulated in Transcription
  misc_feature: MA Experiment 20001557 PARAMETER Experiment Name: At_Drought_Soil_Dry_P Parameter: Age (day) Value: 27
  misc_feature: MA Experiment 20001557 PARAMETER Experiment Name: At_Drought_Soil_Dry_P Parameter: Organism Value: A. thaliana
  misc_feature: MA Experiment 20001557 PARAMETER Experiment Name: At_Drought_Soil_Dry_P Parameter: Plant Line Value: WS
  misc_feature: MA Experiment 20001557 PARAMETER Experiment Name: At_Drought_Soil_Dry_P Parameter: Post Timepoint (hr) Value: 3
  misc_feature: MA Experiment 20001557 PARAMETER Experiment Name: At_Drought_Soil_Dry_P Parameter: Post-Treatment Value: Re-Water vs. No Drought
  misc_feature: MA Experiment 20001557 PARAMETER Experiment Name: At_Drought_Soil_Dry_P Parameter: Timepoint (day) Value: 13
  misc_feature: MA Experiment 20001557 PARAMETER Experiment Name: At_Drought_Soil_Dry_P Parameter: Treatment Value: Drought vs. No Drought
  misc_feature: MA Experiment ID: 20001905 Result: Up-regulated in Transcription
  misc_feature: MA Experiment 20001905 PARAMETER Experiment Name: At_Drought_Reproduction_P Parameter: Age (day) Value: 40
  misc_feature: MA Experiment 20001905 PARAMETER Experiment Name: At_Drought_Reproduction_P Parameter: Organism Value: A. thaliana
  misc_feature: MA Experiment 20001905 PARAMETER Experiment Name: At_Drought_Reproduction_P Parameter: Plant Line Value: WS
  misc_feature: MA Experiment 20001905 PARAMETER Experiment Name: At_Drought_Reproduction_P Parameter: Timepoint (day) Value: 10
  misc_feature: MA Experiment 20001905 PARAMETER Experiment Name: At_Drought_Reproduction_P Parameter: Tissue Value: Rosettes
  misc_feature: MA Experiment 20001905 PARAMETER Experiment Name: At_Drought_Reproduction_P Parameter: Treatment Value: Drought vs. No Drought

SEQ ID NO: 23824 - protein, 276 aa, Arabidopsis thaliana; identical to SEQ ID NO: 22231
  peptide (1)..(276): Ceres Seq. ID no. 13500132
  misc_feature (19)..(218): Pfam Name: haloacid dehalogenase-like hydrolase Pfam Description: haloacid dehalogenase-like hydrolase
  misc_feature (19)..(218): Pfam Name: haloacid dehalogenase-like hydrolase Pfam Description: haloacid dehalogenase-like hydrolase
  misc_feature (17)..(276): Homolog of NCBI NO: 27528429 NR Description: putative phosphatase [Phaseolus vulgaris]
  misc_feature (14)..(276): Homolog of NCBI NO: 25408214 NR Description: probable hydrolase [imported] - Arabidopsis
  misc_feature (14)..(276): Homolog of NCBI NO: 25408214 NR Description: probable hydrolase [imported] - Arabidopsis
  misc_feature (14)..(276): Homolog of NCBI NO: 18402886 NR Description: haloacid dehalogenase-like hydrolase family
  misc_feature (17)..(276): Homolog of NCBI NO: 27528429 NR Description: putative phosphatase [Phaseolus vulgaris]
  misc_feature (14)..(276): Homolog of NCBI NO: 18402886 NR Description: haloacid dehalogenase-like hydrolase family

SEQ ID NO: 23825 - protein, 263 aa, Arabidopsis thaliana; identical to SEQ ID NO: 22232
  peptide (1)..(263): Ceres Seq. ID no. 13500133
  misc_feature (6)..(205): Pfam Name: haloacid dehalogenase-like hydrolase Pfam Description: haloacid dehalogenase-like hydrolase
  misc_feature (6)..(205): Pfam Name: haloacid dehalogenase-like hydrolase Pfam Description: haloacid dehalogenase-like hydrolase
  misc_feature (4)..(263): Homolog of NCBI NO: 27528429 NR Description: putative phosphatase [Phaseolus vulgaris]
  misc_feature (1)..(263): Homolog of NCBI NO: 25408214 NR Description: probable hydrolase [imported] - Arabidopsis
  misc_feature (1)..(263): Homolog of NCBI NO: 25408214 NR Description: probable hydrolase [imported] - Arabidopsis
  misc_feature (1)..(263): Homolog of NCBI NO: 18402886 NR Description: haloacid dehalogenase-like hydrolase family
  misc_feature (4)..(263): Homolog of NCBI NO: 27528429 NR Description: putative phosphatase [Phaseolus vulgaris]
  misc_feature (1)..(263): Homolog of NCBI NO: 18402886 NR Description: haloacid dehalogenase-like hydrolase family

SEQ ID NO: 23826 - DNA, 1453 bp, Arabidopsis thaliana
  misc_feature (1)..(1453): Ceres Seq. ID no. 12325387
  misc_feature: MA Experiment ID: 108488 Result: Up-regulated in Transcription
  misc_feature: MA Experiment ID: 108573 Result: Down-regulated in Transcription
  misc_feature: MA Experiment 108573 PARAMETER Experiment Name: At_Drought_cDNA_P Parameter: Timepoint (hr) Value: 6
  misc_feature: MA Experiment 108573 PARAMETER Experiment Name: At_Drought_cDNA_P Parameter: Tissue Value: Aerial
  misc_feature: MA Experiment 108573 PARAMETER Experiment Name: At_Drought_cDNA_P Parameter: Treatment Value: Drought vs. No Drought
  misc_feature: MA Experiment ID: 108595 Result: Down-regulated in Transcription
  misc_feature: MA Experiment 108595 PARAMETER Experiment Name: At_Ler-pi_Ovule_cDNA_P Parameter: Plant Line Value: null
  misc_feature: MA Experiment ID: 108607 Result: Down-regulated in Transcription
  misc_feature: MA Experiment 108607 PARAMETER Experiment Name: At_100uM_ABA_cDNA_P Parameter: Timepoint (hr) Value: 4
  misc_feature: MA Experiment 108607 PARAMETER Experiment Name: At_100uM_ABA_cDNA_P Parameter: Tissue Value: Aerial
  misc_feature: MA Experiment 108607 PARAMETER Experiment Name: At_100uM_ABA_cDNA_P Parameter: Treatment Value: 100uM ABA vs. No Treatment
  misc_feature: MA Experiment ID: 20000069 Result: Down-regulated in Transcription
  misc_feature: MA Experiment 20000069 PARAMETER Experiment Name: At_100uM_ABA_Mutants_cDNA_P Parameter: Plant Line Value: CS23
  misc_feature: MA Experiment 20000069 PARAMETER Experiment Name: At_100uM_ABA_Mutants_cDNA_P Parameter: Timepoint (hr) Value: 6
  misc_feature: MA Experiment 20000069 PARAMETER Experiment Name: At_100uM_ABA_Mutants_cDNA_P Parameter: Tissue Value: Aerial
  misc_feature: MA Experiment 20000069 PARAMETER Experiment Name: At_100uM_ABA_Mutants_cDNA_P Parameter: Treatment Value: 100uM ABA vs. No Treatment
  misc_feature: MA Experiment ID: 20000070 Result: Down-regulated in Transcription
  misc_feature: MA Experiment 20000070 PARAMETER Experiment Name: At_100uM_ABA_Mutants_cDNA_P Parameter: Plant Line Value: CS24
  misc_feature: MA Experiment 20000070 PARAMETER Experiment Name: At_100uM_ABA_Mutants_cDNA_P Parameter: Timepoint (hr) Value: 6
  misc_feature: MA Experiment 20000070 PARAMETER Experiment Name: At_100uM_ABA_Mutants_cDNA_P Parameter: Tissue Value: Aerial
  misc_feature: MA Experiment 20000070 PARAMETER Experiment Name: At_100uM_ABA_Mutants_cDNA_P Parameter: Treatment Value: 100uM ABA vs. No Treatment
  misc_feature: MA Experiment ID: 20000071 Result: Down-regulated in Transcription
  misc_feature: MA Experiment 20000071 PARAMETER Experiment Name: At_100uM_ABA_Mutants_cDNA_P Parameter: Plant Line Value: CS8104
  misc_feature: MA Experiment 20000071 PARAMETER Experiment Name: At_100uM_ABA_Mutants_cDNA_P Parameter: Timepoint (hr) Value: 6
  misc_feature: MA Experiment 20000071 PARAMETER Experiment Name: At_100uM_ABA_Mutants_cDNA_P Parameter: Tissue Value: Aerial
  misc_feature: MA Experiment 20000071 PARAMETER Experiment Name: At_100uM_ABA_Mutants_cDNA_P Parameter: Treatment Value: 100uM ABA vs. No Treatment
  misc_feature: MA Experiment ID: 20000072 Result: Down-regulated in Transcription
  misc_feature: MA Experiment 20000072 PARAMETER Experiment Name: At_100uM_ABA_Mutants_cDNA_P Parameter: Plant Line Value: CS8105
  misc_feature: MA Experiment 20000072 PARAMETER Experiment Name: At_100uM_ABA_Mutants_cDNA_P Parameter: Timepoint (hr) Value: 6
  misc_feature: MA Experiment 20000072 PARAMETER Experiment Name: At_100uM_ABA_Mutants_cDNA_P Parameter: Tissue Value: Aerial
  misc_feature: MA Experiment 20000072 PARAMETER Experiment Name: At_100uM_ABA_Mutants_cDNA_P Parameter: Treatment Value: 100uM ABA vs. No Treatment
  misc_feature: MA Experiment ID: 20000086 Result: Down-regulated in Transcription
  misc_feature: MA Experiment 20000086 PARAMETER Experiment Name: At_100uM_ABA_Mutants_cDNA_P Parameter: Plant Line Value: CS22
  misc_feature: MA Experiment 20000086 PARAMETER Experiment Name: At_100uM_ABA_Mutants_cDNA_P Parameter: Timepoint (hr) Value: 6
  misc_feature: MA Experiment 20000086 PARAMETER Experiment Name: At_100uM_ABA_Mutants_cDNA_P Parameter: Tissue Value: Aerial
  misc_feature: MA Experiment 20000086 PARAMETER Experiment Name: At_100uM_ABA_Mutants_cDNA_P Parameter: Treatment Value: 100uM ABA vs. No Treatment
  misc_feature: MA Experiment ID: 20000087 Result: Down-regulated in Transcription
  misc_feature: MA Experiment 20000087 PARAMETER Experiment Name: At_100uM_ABA_Mutants_cDNA_P Parameter: Plant Line Value: WS
  misc_feature: MA Experiment 20000087 PARAMETER Experiment Name: At_100uM_ABA_Mutants_cDNA_P Parameter: Timepoint (hr) Value: 6
  misc_feature: MA Experiment 20000087 PARAMETER Experiment Name: At_100uM_ABA_Mutants_cDNA_P Parameter: Tissue Value: Aerial
  misc_feature: MA Experiment 20000087 PARAMETER Experiment Name: At_100uM_ABA_Mutants_cDNA_P Parameter: Treatment Value: 100uM ABA vs. No Treatment
  misc_feature: MA Experiment ID: 20000113 Result: Up-regulated in Transcription
  misc_feature: MA Experiment 20000113 PARAMETER Experiment Name: At_42deg_Heat_cDNA_P Parameter: Temperature (deg C) Value: 42 vs. 22
  misc_feature: MA Experiment 20000113 PARAMETER Experiment Name: At_42deg_Heat_cDNA_P Parameter: Timepoint (hr) Value: 8
  misc_feature: MA Experiment 20000113 PARAMETER Experiment Name: At_42deg_Heat_cDNA_P Parameter: Tissue Value: Aerial
  misc_feature: MA Experiment ID: 20000117 Result: Down-regulated in Transcription
  misc_feature: MA Experiment 20000117 PARAMETER Experiment Name: At_100uM_ABA_Mutants_cDNA_P Parameter: Plant Line Value: Columbia
  misc_feature: MA Experiment 20000117 PARAMETER Experiment Name: At_100uM_ABA_Mutants_cDNA_P Parameter: Timepoint (hr) Value: 6
  misc_feature: MA Experiment 20000117 PARAMETER Experiment Name: At_100uM_ABA_Mutants_cDNA_P Parameter: Tissue Value: Aerial
  misc_feature: MA Experiment 20000117 PARAMETER Experiment Name: At_100uM_ABA_Mutants_cDNA_P Parameter: Treatment Value: 100uM ABA vs. No Treatment
  misc_feature: MA Experiment ID: 20000224 Result: Down-regulated in Transcription
  misc_feature: MA Experiment ID: 20000227 Result: Up-regulated in Transcription
  misc_feature: MA Experiment 20000227 PARAMETER Experiment Name: At_Root-Tips-vs-Tops_P Parameter: Tissue Value: Root Tips vs. Root Tops
  misc_feature: MA Experiment ID: 20000437 Result: Down-regulated in Transcription
  misc_feature: MA Experiment 20000437 PARAMETER Experiment Name: At_Drought_P Parameter: Age (day) Value: 8
  misc_feature: MA Experiment 20000437 PARAMETER Experiment Name: At_Drought_P Parameter: Organism Value: A. thaliana
  misc_feature: MA Experiment 20000437 PARAMETER Experiment Name: At_Drought_P Parameter: Plant Line Value: WS
  misc_feature: MA Experiment 20000437 PARAMETER Experiment Name: At_Drought_P Parameter: Timepoint (hr) Value: 24
  misc_feature: MA Experiment 20000437 PARAMETER Experiment Name: At_Drought_P Parameter: Tissue Value: Whole Plant
  misc_feature: MA Experiment 20000437 PARAMETER Experiment Name: At_Drought_P Parameter: Treatment Value: Drought vs. No Drought
  misc_feature: MA Experiment ID: 20000438 Result: Up-regulated in Transcription
  misc_feature: MA Experiment 20000438 PARAMETER Experiment Name: At_Shoots__P Parameter: Age (day) Value: 14
  misc_feature: MA Experiment 20000438 PARAMETER Experiment Name: At_Shoots__P Parameter: Tissue Value: Shoots vs. Whole Plant
  misc_feature: MA Experiment ID: 20001904 Result: Down-regulated in Transcription
  misc_feature: MA Experiment 20001904 PARAMETER Experiment Name: At_Drought_Reproduction_P Parameter: Age (day) Value: 37
  misc_feature: MA Experiment 20001904 PARAMETER Experiment Name: At_Drought_Reproduction_P Parameter: Organism Value: A. thaliana
  misc_feature: MA Experiment 20001904 PARAMETER Experiment Name: At_Drought_Reproduction_P Parameter: Plant Line Value: WS
  misc_feature: MA Experiment 20001904 PARAMETER Experiment Name: At_Drought_Reproduction_P Parameter: Timepoint (day) Value: 7
  misc_feature: MA Experiment 20001904 PARAMETER Experiment Name: At_Drought_Reproduction_P Parameter: Tissue Value: Rosettes
  misc_feature: MA Experiment 20001904 PARAMETER Experiment Name: At_Drought_Reproduction_P Parameter: Treatment Value: Drought vs. No Drought
  misc_feature: MA Experiment ID: 20001905 Result: Down-regulated in Transcription
  misc_feature: MA Experiment 20001905 PARAMETER Experiment Name: At_Drought_Reproduction_P Parameter: Age (day) Value: 40
  misc_feature: MA Experiment 20001905 PARAMETER Experiment Name: At_Drought_Reproduction_P Parameter: Organism Value: A. thaliana
  misc_feature: MA Experiment 20001905 PARAMETER Experiment Name: At_Drought_Reproduction_P Parameter: Plant Line Value: WS
  misc_feature: MA Experiment 20001905 PARAMETER Experiment Name: At_Drought_Reproduction_P Parameter: Timepoint (day) Value: 10
  misc_feature: MA Experiment 20001905 PARAMETER Experiment Name: At_Drought_Reproduction_P Parameter: Tissue Value: Rosettes
  misc_feature: MA Experiment 20001905 PARAMETER Experiment Name: At_Drought_Reproduction_P Parameter: Treatment Value: Drought vs. No Drought
aacgagtggtgttgctctctccatcttcctcttcatcttcttctgttctctctctataaatacaagtttactcttcctcttcctcaaatctctgactcttctctgcattatctcttcgatctctccaactctccaaaaccttcctcagatgggaactaccaatggaacagactatggagcatacacatacaaggagctagaaagagagcaatattggccatctgagaatctcaagatatcaataacaggagctggaggtttcattgcatctcacattgctcgtcgtttgaagcacgaaggtcattacgtgattgcttctgactggaaaaagaatgaacacatgactgaagacatgttctgtgatgagttccatcttgttgatcttagggttatggagaattgtctcaaagttactgaaggagttgatcatgtttttaacttagctgctgatatgggtggtatgggttttatccagagtaatcactctgtgattatgtataataatactatgattagtttcaatatgattgaggctgctaggatcaatgggattaagaggttcttttatgcttcgagtgcttgtatctatccagagtttaagcagttggagactactaatgtgagcttgaaggagtcagatgcttggcctgcagagcctcaagatgcttatggtttggagaagcttgctacggaggagttgtgtaagcattacaacaaagattttggtattgagtgtcgaattggaaggttccataacatttatggtccttttggaacatggaaaggtggaagggagaaggctccagctgctttctgtaggaaggctcagacttccactgataggtttgagatgtggggagacgggcttcagacccgttcttttacctttatcgatgagtgtgttgaaggtgtactcaggttgacaaaatcagatttccgtgagccggtgaacatcggaagcgatgagatggtgagcatgaatgagatggctgagatggttctcagctttgaggaaaagaagcttccaattcaccacattcctggcccggaaggtgttcgtggtcgtaactcagacaacaatctgatcaaagaaaagcttggttgggctcctaatatgagattgaaggaggggcttagaataacctacttctggataaaggaacagatcgagaaagagaaagcaaagggaagcgatgtgtcgctttacgggtcatcaaaggtggttggaactcaagcaccggttcagctaggctcactccgcgcggctgatggaaaagagtgaagttcaccaaagtataagtcaagctcaaatatggccttttaagttcagcaaaatgtttagatatatttttaggtagcttcctattaaaaaagcaataataagtgttttggattttggttccttctcttctgctaatccttgtttatgtttagttgaaaaagtttgcttgct

SEQ ID NO: 23827 - protein, 426 aa, Arabidopsis thaliana
  peptide (1)..(426): Ceres Seq. ID no. 12325388
  misc_feature (79)..(389): Pfam Name: NAD dependent epimerase/dehydratase family Pfam Description: NAD dependent epimerase/dehydratase family
  misc_feature (79)..(395): Homolog of NCBI NO: 23500289 NR Description: NAD-dependent epimerase/dehydratase family
  misc_feature (75)..(387): Homolog of NCBI NO: 17232318 NR Description: dTDP-glucose dehydratase [Nostoc sp. PCC 7120]
  misc_feature (75)..(391): Homolog of NCBI NO: 37523361 NR Description: similar to GDP-fucose synthetase [Gloeobacter
  misc_feature (78)..(390): Homolog of NCBI NO: 24212751 NR Description: dTDPglucose 4,6-dehydratase
  misc_feature (78)..(387): Homolog of NCBI NO: 22298175 NR Description: GDP-fucose synthetase [Thermosynechococcus
  misc_feature (81)..(228): Homolog of NCBI NO: 23008810 NR Description: hypothetical protein [Magnetospirillum
  misc_feature (81)..(395): Homolog of NCBI NO: 9937230 NR Description: sugar epimerase BlmG [Streptomyces verticillus]
  misc_feature (60)..(391): Homolog of NCBI NO: 28170704 NR Description: Ata17 protein [Saccharothrix mutabilis subsp.
  misc_feature (50)..(426): Homolog of NCBI NO: 37534380 NR Description: putative epimerase/dehydratase
  misc_feature (50)..(426): Homolog of NCBI NO: 15241945 NR Description: epimerase/dehydratase - like protein
TSGVALSIFLFIFFCSLSINTSLLFLFLKSLTLLCIISSISPTLQNLPQMGTTNGTDYGAYTYKELEREQYWPSENLKISITGAGGFIASHIARRLKHEGHYVIASDWKKNEHMTEDMFCDEFHLVDLRVMENCLKVTEGVDHVFNLAADMGGMGFIQSNHSVIMYNNTMISFNMIEAARINGIKRFFYASSACIYPEFKQLETTNVSLKESDAWPAEPQDAYGLEKLATEELCKHYNKDFGIECRIGRFHNIYGPFGTWKGGREKAPAAFCRKAQTSTDRFEMWGDGLQTRSFTFIDECVEGVLRLTKSDFREPVNIGSDEMVSMNEMAEMVLSFEEKKLPIHHIPGPEGVRGRNSDNNLIKEKLGWAPNMRLKEGLRITYFWIKEQIEKEKAKGSDVSLYGSSKVVGTQAPVQLGSLRAADGKE

SEQ ID NO: 23828 - protein, 377 aa, Arabidopsis thaliana
  peptide (1)..(377): Ceres Seq. ID no. 12325389
  misc_feature (30)..(340): Pfam Name: NAD dependent epimerase/dehydratase family Pfam Description: NAD dependent epimerase/dehydratase family
  misc_feature (26)..(338): Homolog of NCBI NO: 17232318 NR Description: dTDP-glucose dehydratase [Nostoc sp. PCC 7120]
  misc_feature (26)..(342): Homolog of NCBI NO: 37523361 NR Description: similar to GDP-fucose synthetase [Gloeobacter
  misc_feature (29)..(341): Homolog of NCBI NO: 24212751 NR Description: dTDPglucose 4,6-dehydratase
  misc_feature (29)..(338): Homolog of NCBI NO: 22298175 NR Description: GDP-fucose synthetase [Thermosynechococcus
  misc_feature (32)..(179): Homolog of NCBI NO: 23008810 NR Description: hypothetical protein [Magnetospirillum
  misc_feature (30)..(346): Homolog of NCBI NO: 23500289 NR Description: NAD-dependent epimerase/dehydratase family
  misc_feature (32)..(346): Homolog of NCBI NO: 9937230 NR Description: sugar epimerase BlmG [Streptomyces verticillus]
  misc_feature (11)..(342): Homolog of NCBI NO: 28170704 NR Description: Ata17 protein [Saccharothrix mutabilis subsp.
  misc_feature (1)..(377): Homolog of NCBI NO: 37534380 NR Description: putative epimerase/dehydratase
  misc_feature (1)..(377): Homolog of NCBI NO: 15241945 NR Description: epimerase/dehydratase - like protein
MGTTNGTDYGAYTYKELEREQYWPSENLKISITGAGGFIASHIARRLKHEGHYVIASDWKKNEHMTEDMFCDEFHLVDLRVMENCLKVTEGVDHVFNLAADMGGMGFIQSNHSVIMYNNTMISFNMIEAARINGIKRFFYASSACIYPEFKQLETTNVSLKESDAWPAEPQDAYGLEKLATEELCKHYNKDFGIECRIGRFHNIYGPFGTWKGGREKAPAAFCRKAQTSTDRFEMWGDGLQTRSFTFIDECVEGVLRLTKSDFREPVNIGSDEMVSMNEMAEMVLSFEEKKLPIHHIPGPEGVRGRNSDNNLIKEKLGWAPNMRLKEGLRITYFWIKEQIEKEKAKGSDVSLYGSSKVVGTQAPVQLGSLRAADGKE

SEQ ID NO: 23829 - protein, 313 aa, Arabidopsis thaliana
  peptide (1)..(313): Ceres Seq. ID no. 12325390
  misc_feature (1)..(276): Pfam Name: NAD dependent epimerase/dehydratase family Pfam Description: NAD dependent epimerase/dehydratase family
  misc_feature (1)..(282): Homolog of NCBI NO: 23500289 NR Description: NAD-dependent epimerase/dehydratase family
  misc_feature (1)..(274): Homolog of NCBI NO: 17232318 NR Description: dTDP-glucose dehydratase [Nostoc sp. PCC 7120]
  misc_feature (1)..(278): Homolog of NCBI NO: 37523361 NR Description: similar to GDP-fucose synthetase [Gloeobacter
  misc_feature (1)..(277): Homolog of NCBI NO: 24212751 NR Description: dTDPglucose 4,6-dehydratase
  misc_feature (1)..(274): Homolog of NCBI NO: 22298175 NR Description: GDP-fucose synthetase [Thermosynechococcus
  misc_feature (1)..(115): Homolog of NCBI NO: 23008810 NR Description: hypothetical protein [Magnetospirillum
  misc_feature (1)..(282): Homolog of NCBI NO: 9937230 NR Description: sugar epimerase BlmG [Streptomyces verticillus]
  misc_feature (1)..(278): Homolog of NCBI NO: 28170704 NR Description: Ata17 protein [Saccharothrix mutabilis subsp.
  misc_feature (1)..(313): Homolog of NCBI NO: 37534380 NR Description: putative epimerase/dehydratase
  misc_feature (1)..(313): Homolog of NCBI NO: 15241945 NR Description: epimerase/dehydratase - like protein
MTEDMFCDEFHLVDLRVMENCLKVTEGVDHVFNLAADMGGMGFIQSNHSVIMYNNTMISFNMIEAARINGIKRFFYASSACIYPEFKQLETTNVSLKESDAWPAEPQDAYGLEKLATEELCKHYNKDFGIECRIGRFHNIYGPFGTWKGGREKAPAAFCRKAQTSTDRFEMWGDGLQTRSFTFIDECVEGVLRLTKSDFREPVNIGSDEMVSMNEMAEMVLSFEEKKLPIHHIPGPEGVRGRNSDNNLIKEKLGWAPNMRLKEGLRITYFWIKEQIEKEKAKGSDVSLYGSSKVVGTQAPVQLGSLRAADGKE

SEQ ID NO: 23830 - DNA, 1313 bp, Arabidopsis thaliana
  misc_feature (1)..(1313): Ceres Seq. ID no. 12325272
  misc_feature: MA Experiment ID: 108573 Result: Up-regulated in Transcription
  misc_feature: MA Experiment 108573 PARAMETER Experiment Name: At_Drought_cDNA_P Parameter: Timepoint (hr) Value: 6
  misc_feature: MA Experiment 108573 PARAMETER Experiment Name: At_Drought_cDNA_P Parameter: Tissue Value: Aerial
  misc_feature: MA Experiment 108573 PARAMETER Experiment Name: At_Drought_cDNA_P Parameter: Treatment Value: Drought vs. No Drought
  misc_feature: MA Experiment ID: 108576 Result: Up-regulated in Transcription
  misc_feature: MA Experiment 108576 PARAMETER Experiment Name: At_42deg_Heat_cDNA_P Parameter: Temperature (deg C) Value: 42 vs. 22
  misc_feature: MA Experiment 108576 PARAMETER Experiment Name: At_42deg_Heat_cDNA_P Parameter: Timepoint (hr) Value: 1
  misc_feature: MA Experiment 108576 PARAMETER Experiment Name: At_42deg_Heat_cDNA_P Parameter: Tissue Value: Aerial
  misc_feature: MA Experiment ID: 108577 Result: Up-regulated in Transcription
  misc_feature: MA Experiment 108577 PARAMETER Experiment Name: At_42deg_Heat_cDNA_P Parameter: Temperature (deg C) Value: 42 vs. 22
  misc_feature: MA Experiment 108577 PARAMETER Experiment Name: At_42deg_Heat_cDNA_P Parameter: Timepoint (hr) Value: 6
  misc_feature: MA Experiment 108577 PARAMETER Experiment Name: At_42deg_Heat_cDNA_P Parameter: Tissue Value: Aerial
  misc_feature: MA Experiment ID: 108585 Result: Up-regulated in Transcription
  misc_feature: MA Experiment 108585 PARAMETER Experiment Name: At_5mM_NaNP_cDNA_P Parameter: Timepoint (hr) Value: 6
  misc_feature: MA Experiment 108585 PARAMETER Experiment Name: At_5mM_NaNP_cDNA_P Parameter: Tissue Value: Aerial
  misc_feature: MA Experiment 108585 PARAMETER Experiment Name: At_5mM_NaNP_cDNA_P Parameter: Treatment Value: null
  misc_feature: MA Experiment ID: 108595 Result: Down-regulated in Transcription
  misc_feature: MA Experiment 108595 PARAMETER Experiment Name: At_Ler-pi_Ovule_cDNA_P Parameter: Plant Line Value: null
  misc_feature: MA Experiment ID: 20000093 Result: Up-regulated in Transcription
  misc_feature: MA Experiment 20000093 PARAMETER Experiment Name: At_42deg_Heat_cDNA_P Parameter: Temperature (deg C) Value: 42 vs. 22
  misc_feature: MA Experiment 20000093 PARAMETER Experiment Name: At_42deg_Heat_cDNA_P Parameter: Timepoint (hr) Value: 0.5
  misc_feature: MA Experiment 20000093 PARAMETER Experiment Name: At_42deg_Heat_cDNA_P Parameter: Tissue Value: Aerial
  misc_feature: MA Experiment ID: 20000111 Result: Up-regulated in Transcription
  misc_feature: MA Experiment 20000111 PARAMETER Experiment Name: At_42deg_Heat_cDNA_P Parameter: Temperature (deg C) Value: 42 vs. 22
  misc_feature: MA Experiment 20000111 PARAMETER Experiment Name: At_42deg_Heat_cDNA_P Parameter: Timepoint (hr) Value: 6
  misc_feature: MA Experiment 20000111 PARAMETER Experiment Name: At_42deg_Heat_cDNA_P Parameter: Tissue Value: Aerial
  misc_feature: MA Experiment ID: 20000112 Result: Up-regulated in Transcription
  misc_feature: MA Experiment 20000112 PARAMETER Experiment Name: At_42deg_Heat_cDNA_P Parameter: Temperature (deg C) Value: 42 vs. 22
  misc_feature: MA Experiment 20000112 PARAMETER Experiment Name: At_42deg_Heat_cDNA_P Parameter: Timepoint (hr) Value: 2
  misc_feature: MA Experiment 20000112 PARAMETER Experiment Name: At_42deg_Heat_cDNA_P Parameter: Tissue Value: Aerial
  misc_feature: MA Experiment ID: 20000144 Result: Up-regulated in Transcription
  misc_feature: MA Experiment 20000144 PARAMETER Experiment Name: At_42deg_Heat_cDNA_P Parameter: Temperature (deg C) Value: 42 vs. 22
  misc_feature: MA Experiment 20000144 PARAMETER Experiment Name: At_42deg_Heat_cDNA_P Parameter: Timepoint (hr) Value: 1
  misc_feature: MA Experiment 20000144 PARAMETER Experiment Name: At_42deg_Heat_cDNA_P Parameter: Tissue Value: Aerial
  misc_feature: MA Experiment ID: 20000171 Result: Up-regulated in Transcription
  misc_feature: MA Experiment 20000171 PARAMETER Experiment Name: At_42deg_Heat_P Parameter: Age (day) Value: 14
  misc_feature: MA Experiment 20000171 PARAMETER Experiment Name: At_42deg_Heat_P Parameter: Organism Value: A. thaliana
  misc_feature: MA Experiment 20000171 PARAMETER Experiment Name: At_42deg_Heat_P Parameter: Plant Line Value: WS
  misc_feature: MA Experiment 20000171 PARAMETER Experiment Name: At_42deg_Heat_P Parameter: Temperature (deg C) Value: 42 vs. 22
  misc_feature: MA Experiment 20000171 PARAMETER Experiment Name: At_42deg_Heat_P Parameter: Timepoint (hr) Value: 1
  misc_feature: MA Experiment 20000171 PARAMETER Experiment Name: At_42deg_Heat_P Parameter: Tissue Value: Aerial
  misc_feature: MA Experiment ID: 20000173 Result: Up-regulated in Transcription
  misc_feature: MA Experiment 20000173 PARAMETER Experiment Name: At_42deg_Heat_P Parameter: Age (day) Value: 14
  misc_feature: MA Experiment 20000173 PARAMETER Experiment Name: At_42deg_Heat_P Parameter: Organism Value: A. thaliana
  misc_feature: MA Experiment 20000173 PARAMETER Experiment Name: At_42deg_Heat_P Parameter: Plant Line Value: WS
  misc_feature: MA Experiment 20000173 PARAMETER Experiment Name: At_42deg_Heat_P Parameter: Temperature (deg C) Value: 42 vs. 22
  misc_feature: MA Experiment 20000173 PARAMETER Experiment Name: At_42deg_Heat_P Parameter: Timepoint (hr) Value: 6
  misc_feature: MA Experiment 20000173 PARAMETER Experiment Name: At_42deg_Heat_P Parameter: Tissue Value: Aerial
acttcatcatcatcatcatcatcgtcatcactcgtgtcttcaagcgtctggacatctgtcacgtcgtctatatcaccgaatattctcgagctttccacgaaatcccgtcaaagatctcaactttcgtctaagtcttgccgatttctcgagtttttctttatctacacgtggcactgtgtttgctgtaagagctctgagtacagtcgcggtagaagagtcgtccgagaagaagatggtgaaagggattagggtttatgagcatggcggtcctgaggttctgaaatgggaagatgtggaagtaggggaaccaaaggagggtgagatacgtgtgaagaacaaggctatcgggcttaactttattgatgtttacttcaggaaaggtgtttacaagccagcttctatgcccttcacaccaggtatggaggctgttggagaggtggtagctgttgggtcgggattgactggcagaatgatcggtgatctcgttgcttatgctggaaatccgatgggtgcgtatgctgaggaacaaatccttccagcggataaagtggttcctgttccttcatctattgatcctatcgttgcagcatcaatcatgctcaagggtatgactgcacagtttctccttcgccgttgcttcaaggtcgaacctgggcacacaatccttgttcatgctgcagctggtggagttgggtctctgttgtgtcaatgggcaaatgcgcttggagccactgtgattggaactgtctcgaccaatgagaaagcggctcaagccaaagaagatggatgccaccatgttattatgtacaagaacgaggattttgtttcccgagtcaatgacattacatcgggtaaaggagtaaatgttgtttatgactctgtgggaaaagacacctttaagggatcgttagcatgtttgaagagccgaggatacatggtgagctttggacaatcctcaggatctccagatccgattccattatctgatcttgctccaaagtcgctcttcttgacaagaccttccatgatgcattacaatgaaactcgagatgagctcttggaatgtgcaggagaggttttcgctaatgttacctccggcatcttaaaggctcgtgtgaatcacaagtacccgttgtctcgagtcgctgacgcccacgcagatcttgagaataggatcacctctggctccgttgtgctcttgccatgaaaacatatacaatgatgttagtatctttcaataagggcaattagattcctttgtgatgtaaagaatattaaatgtaccttttggacctgaatgacaatttgagaat

SEQ ID NO: 23831 - protein, 401 aa, Arabidopsis thaliana
  peptide (1)..(401): Ceres Seq. ID no. 12325273
  misc_feature (78)..(400): Homolog of NCBI NO: 27381248 NR Description: quinone oxidoreductase [Bradyrhizobium japonicum]
  misc_feature (78)..(401): Homolog of NCBI NO: 22982287 NR Description: hypothetical protein [Burkholderia fungorum]
  misc_feature (78)..(401): Homolog of NCBI NO: 23500315 NR Description: quinone oxidoreductase [Brucella suis 1330]
  misc_feature (82)..(401): Homolog of NCBI NO: 23014744 NR Description: hypothetical protein [Magnetospirillum
  misc_feature (68)..(214): Homolog of NCBI NO: 37536850 NR Description: putative quinone oxidoreductase
  misc_feature (236)..(401): Homolog of NCBI NO: 37536850 NR Description: putative quinone oxidoreductase
  misc_feature (78)..(401): Homolog of NCBI NO: 531096 NR Description: TED2 [Zinnia elegans]
  misc_feature (79)..(401): Homolog of NCBI NO: 13570000 NR Description: putative quinone oxidoreductase [Oryza sativa]
  misc_feature (78)..(401): Homolog of NCBI NO: 7430955 NR Description: quinone oxidoreductase homolog - cowpea
  misc_feature (78)..(401): Homolog of NCBI NO: 15240274 NR Description: quinone oxidoreductase - like protein
LHHHHHHRHHSCLQASGHLSRRLYHRIFSSFPRNPVKDLNFRLSLADFSSFSLSTRGTVFAVRALSTVAVEESSEKKMVKGIRVYEHGGPEVLKWEDVEVGEPKEGEIRVKNKAIGLNFIDVYFRKGVYKPASMPFTPGMEAVGEVVAVGSGLTGRMIGDLVAYAGNPMGAYAEEQILPADKVVPVPSSIDPIVAASIMLKGMTAQFLLRRCFKVEPGHTILVHAAAGGVGSLLCQWANALGATVIGTVSTNEKAAQAKEDGCHHVIMYKNEDFVSRVNDITSGKGVNVVYDSVGKDTFKGSLACLKSRGYMVSFGQSSGSPDPIPLSDLAPKSLFLTRPSMMHYNETRDELLECAGEVFANVTSGILKARVNHKYPLSRVADAHADLENRITSGSVVLLP

SEQ ID NO: 23832 - protein, 324 aa, Arabidopsis thaliana
  peptide (1)..(324): Ceres Seq. ID no. 12325274
  misc_feature (1)..(323): Homolog of NCBI NO: 27381248 NR Description: quinone oxidoreductase [Bradyrhizobium japonicum]
  misc_feature (1)..(324): Homolog of NCBI NO: 22982287 NR Description: hypothetical protein [Burkholderia fungorum]
  misc_feature (1)..(324): Homolog of NCBI NO: 23500315 NR Description: quinone oxidoreductase [Brucella suis 1330]
  misc_feature (5)..(324): Homolog of NCBI NO: 23014744 NR Description: hypothetical protein [Magnetospirillum
  misc_feature (1)..(137): Homolog of NCBI NO: 37536850 NR Description: putative quinone oxidoreductase
  misc_feature (159)..(324): Homolog of NCBI NO: 37536850 NR Description: putative quinone oxidoreductase
  misc_feature (1)..(324): Homolog of NCBI NO: 531096 NR Description: TED2 [Zinnia elegans]
  misc_feature (2)..(324): Homolog of NCBI NO: 13570000 NR Description: putative quinone oxidoreductase [Oryza sativa]
  misc_feature (1)..(324): Homolog of NCBI NO: 7430955 NR Description: quinone oxidoreductase homolog - cowpea
  misc_feature (1)..(324): Homolog of NCBI NO: 15240274 NR Description: quinone oxidoreductase - like protein
MVKGIRVYEHGGPEVLKWEDVEVGEPKEGEIRVKNKAIGLNFIDVYFRKGVYKPASMPFTPGMEAVGEVVAVGSGLTGRMIGDLVAYAGNPMGAYAEEQILPADKVVPVPSSIDPIVAASIMLKGMTAQFLLRRCFKVEPGHTILVHAAAGGVGSLLCQWANALGATVIGTVSTNEKAAQAKEDGCHHVIMYKNEDFVSRVNDITSGKGVNVVYDSVGKDTFKGSLACLKSRGYMVSFGQSSGSPDPIPLSDLAPKSLFLTRPSMMHYNETRDELLECAGEVFANVTSGILKARVNHKYPLSRVADAHADLENRITSGSVVLLP

SEQ ID NO: 23833 - protein, 268 aa, Arabidopsis thaliana
  peptide (1)..(268): Ceres Seq. ID no. 12325275
  misc_feature (1)..(267): Homolog of NCBI NO: 27381248 NR Description: quinone oxidoreductase [Bradyrhizobium japonicum]
  misc_feature (1)..(268): Homolog of NCBI NO: 22982287 NR Description: hypothetical protein [Burkholderia fungorum]
  misc_feature (1)..(268): Homolog of NCBI NO: 23500315 NR Description: quinone oxidoreductase [Brucella suis 1330]
  misc_feature (1)..(268): Homolog of NCBI NO: 23014744 NR Description: hypothetical protein [Magnetospirillum
  misc_feature (1)..(81): Homolog of NCBI NO: 37536850 NR Description: putative quinone oxidoreductase
  misc_feature (103)..(268): Homolog of NCBI NO: 37536850 NR Description: putative quinone oxidoreductase
  misc_feature (1)..(268): Homolog of NCBI NO: 531096 NR Description: TED2 [Zinnia elegans]
  misc_feature (1)..(268): Homolog of NCBI NO: 13570000 NR Description: putative quinone oxidoreductase [Oryza sativa]
  misc_feature (1)..(268): Homolog of NCBI NO: 7430955 NR Description: quinone oxidoreductase homolog - cowpea
  misc_feature (1)..(268): Homolog of NCBI NO: 15240274 NR Description: quinone oxidoreductase - like protein
MPFTPGMEAVGEVVAVGSGLTGRMIGDLVAYAGNPMGAYAEEQILPADKVVPVPSSIDPIVAASIMLKGMTAQFLLRRCFKVEPGHTILVHAAAGGVGSLLCQWANALGATVIGTVSTNEKAAQAKEDGCHHVIMYKNEDFVSRVNDITSGKGVNVVYDSVGKDTFKGSLACLKSRGYMVSFGQSSGSPDPIPLSDLAPKSLFLTRPSMMHYNETRDELLECAGEVFANVTSGILKARVNHKYPLSRVADAHADLENRITSGSVVLLP

SEQ ID NO: 23834 - DNA, 1408 bp, Arabidopsis thaliana
  misc_feature (1)..(1408): Ceres Seq. ID no. 12397240
  misc_feature: MA Experiment ID: 20000227 Result: Down-regulated in Transcription
  misc_feature: MA Experiment 20000227 PARAMETER Experiment Name: At_Root-Tips-vs-Tops_P Parameter: Tissue Value: Root Tips vs. Root Tops
  misc_feature: MA Experiment ID: 20000234 Result: Down-regulated in Transcription
  misc_feature: MA Experiment 20000234 PARAMETER Experiment Name: At_Siliques_P Parameter: Age (day) Value: 21
  misc_feature: MA Experiment 20000234 PARAMETER Experiment Name: At_Siliques_P Parameter: Organism Value: A. thaliana
  misc_feature: MA Experiment 20000234 PARAMETER Experiment Name: At_Siliques_P Parameter: Plant Line Value: WS
  misc_feature: MA Experiment 20000234 PARAMETER Experiment Name: At_Siliques_P Parameter: Tissue Value: Less Than 5mm Siliques vs. Whole Plant
  misc_feature: MA Experiment ID: 20000264 Result: Down-regulated in Transcription
  misc_feature: MA Experiment 20000264 PARAMETER Experiment Name: At_Open_Flower_P Parameter: Age (day) Value: 21
  misc_feature: MA Experiment 20000264 PARAMETER Experiment Name: At_Open_Flower_P Parameter: Plant Line Value: WS
  misc_feature: MA Experiment 20000264 PARAMETER Experiment Name: At_Open_Flower_P Parameter: Tissue Value: Open Flower vs. Whole Plant
  misc_feature: MA Experiment ID: 20000286 Result: Down-regulated in Transcription
  misc_feature: MA Experiment 20000286 PARAMETER Experiment Name: At_Open_Flower_P Parameter: Age (day) Value: 21
  misc_feature: MA Experiment 20000286 PARAMETER Experiment Name: At_Open_Flower_P Parameter: Plant Line Value: WS
  misc_feature: MA Experiment 20000286 PARAMETER Experiment Name: At_Open_Flower_P Parameter: Tissue Value: Half Open vs. Whole Plant
  misc_feature: MA Experiment ID: 20000495 Result: Down-regulated in Transcription
  misc_feature: MA Experiment 20000495 PARAMETER Experiment Name: At_Guard_Cells_P Parameter: Harvest Date Value: 8/2/2002
  misc_feature: MA Experiment 20000495 PARAMETER Experiment Name: At_Guard_Cells_P Parameter: Organism Value: A. thaliana
  misc_feature: MA Experiment 20000495 PARAMETER Experiment Name: At_Guard_Cells_P Parameter: Tissue Value: Guard Cells vs. Leaves
  misc_feature: MA Experiment ID: 20001557 Result: Down-regulated in Transcription
  misc_feature: MA Experiment 20001557 PARAMETER Experiment Name: At_Drought_Soil_Dry_P Parameter: Age (day) Value: 27
  misc_feature: MA Experiment 20001557 PARAMETER Experiment Name: At_Drought_Soil_Dry_P Parameter: Organism Value: A. thaliana
  misc_feature: MA Experiment 20001557 PARAMETER Experiment Name: At_Drought_Soil_Dry_P Parameter: Plant Line Value: WS
  misc_feature: MA Experiment 20001557 PARAMETER Experiment Name: At_Drought_Soil_Dry_P Parameter: Post Timepoint (hr) Value: 3
  misc_feature: MA Experiment 20001557 PARAMETER Experiment Name: At_Drought_Soil_Dry_P Parameter: Post-Treatment Value: Re-Water vs. No Drought
  misc_feature: MA Experiment 20001557 PARAMETER Experiment Name: At_Drought_Soil_Dry_P Parameter: Timepoint (day) Value: 13
  misc_feature: MA Experiment 20001557 PARAMETER Experiment Name: At_Drought_Soil_Dry_P Parameter: Treatment Value: Drought vs. No Drought
  misc_feature: MA Experiment ID: 20001558 Result: Down-regulated in Transcription
  misc_feature: MA Experiment 20001558 PARAMETER Experiment Name: At_Drought_Soil_Dry_P Parameter: Age (day) Value: 27
  misc_feature: MA Experiment 20001558 PARAMETER Experiment Name: At_Drought_Soil_Dry_P Parameter: Organism Value: A. thaliana
  misc_feature: MA Experiment 20001558 PARAMETER Experiment Name: At_Drought_Soil_Dry_P Parameter: Plant Line Value: WS
  misc_feature: MA Experiment 20001558 PARAMETER Experiment Name: At_Drought_Soil_Dry_P Parameter: Post Timepoint (hr) Value: 6
  misc_feature: MA Experiment 20001558 PARAMETER Experiment Name: At_Drought_Soil_Dry_P Parameter: Post-Treatment Value: Re-Water vs. No Drought
  misc_feature: MA Experiment 20001558 PARAMETER Experiment Name: At_Drought_Soil_Dry_P Parameter: Timepoint (day) Value: 13
  misc_feature: MA Experiment 20001558 PARAMETER Experiment Name: At_Drought_Soil_Dry_P Parameter: Treatment Value: Drought vs. No Drought
  misc_feature: MA Experiment ID: 20001560 Result: Down-regulated in Transcription
  misc_feature: MA Experiment 20001560 PARAMETER Experiment Name: At_Drought_Soil_Dry_P Parameter: Age (day) Value: 28
  misc_feature: MA Experiment 20001560 PARAMETER Experiment Name: At_Drought_Soil_Dry_P Parameter: Organism Value: A. thaliana
  misc_feature: MA Experiment 20001560 PARAMETER Experiment Name: At_Drought_Soil_Dry_P Parameter: Plant Line Value: WS
  misc_feature: MA Experiment 20001560 PARAMETER Experiment Name: At_Drought_Soil_Dry_P Parameter: Post Timepoint (hr) Value: None
  misc_feature: MA Experiment 20001560 PARAMETER Experiment Name: At_Drought_Soil_Dry_P Parameter: Post-Treatment Value: None
  misc_feature: MA Experiment 20001560 PARAMETER Experiment Name: At_Drought_Soil_Dry_P Parameter: Timepoint (day) Value: 14
  misc_feature: MA Experiment 20001560 PARAMETER Experiment Name: At_Drought_Soil_Dry_P Parameter: Treatment Value: Drought vs. No Drought
  misc_feature: MA Experiment ID: 20001905 Result: Down-regulated in Transcription
  misc_feature: MA Experiment 20001905 PARAMETER Experiment Name: At_Drought_Reproduction_P Parameter: Age (day) Value: 40
  misc_feature: MA Experiment 20001905 PARAMETER Experiment Name: At_Drought_Reproduction_P Parameter: Organism Value: A. thaliana
  misc_feature: MA Experiment 20001905 PARAMETER Experiment Name: At_Drought_Reproduction_P Parameter: Plant Line Value: WS
  misc_feature: MA Experiment 20001905 PARAMETER Experiment Name: At_Drought_Reproduction_P Parameter: Timepoint (day) Value: 10
  misc_feature: MA Experiment 20001905 PARAMETER Experiment Name: At_Drought_Reproduction_P Parameter: Tissue Value: Rosettes
  misc_feature: MA Experiment 20001905 PARAMETER Experiment Name: At_Drought_Reproduction_P Parameter: Treatment Value: Drought vs. No Drought
aacaattcccgaaattctctcaaatcacagatccttttagggtttttccactgtttctaggttttttttattgctcaaatctgatcaatggatagttgtctctctaatcaaacggcgcttcagtttctcccgtcgcgttccaggagacagagcggcgatggaggcggtggttttgttattccggcgaagaggaagatccagtatagttcgatggttgtggttgcggcggcgggacagagtcggtgtgagcctggaagcagtctaaacgcgccgcttgagccacgatcggcgcaggggaggtttctgagaagcgtgttgctaaacaaacggcagctatttcattacgccgccgctgatgagctaaagcaactggctgatgatagggaagctgctttagctcgtatgtctctcagctctggttccgatgaggcttctctccacagaaggatagctgaactcaaggaacgctactgtaaaactgcagtccaagacataatgtacatgttaatcttttacaaatactccgagataagagtccctcttgttccaaagctatccagatgcatctataatggaagactcgagatctggccttcaaaagactgggagttagagtcaatttacagctgcgatacccttgagatcatcaaagaacacgttagcgcagtcatcggattacgggtcaactcatgtgtgactgacaattgggcaacaacgcagatacagaaactgcatctcaggaaagtatatgctgcctcgatcttgtacggttacttcttgaaatcagcttccctaaggcaccagcttgagtgttccttatcagatattcatggaagcggatatctgaaaagtcccatctttggatgctcattcacaacgggcactgcacagatctccaacaagcagcagctgagacattacatctcagactttgatcccgagacattgcagagatgcgcaaaaccaaggacagaggaggcaaggaatctgatagagaagcaaagtttggctctttttggcacggaagagagtgatgagaccatagtgacatcgttttcgagtctgaagcggttggttctcgaggctgtggcgtttgggacattcctgtgggacacggaattgtatgtagatggtgcatataagctgaaggagaatgggaatgcagaagaacaagaaggaaagaaaagcatatgatgaacaagtctggttagaagaaaagcttcatgatcttctggtagtgtatatatagagaaatgtatctgccgaatctctcaggcagttgttcagttcaatgtatagatcttgcttagaaatattttgatttctgaataagaatgtggtgtggttataaggaataagagatactgtagttgggttcaattttatgttatgtgttaagtttccttgt

SEQ ID NO: 23835 - protein, 368 aa, Arabidopsis thaliana
  peptide (1)..(368): Ceres Seq. ID no. 12397241
  misc_feature (11)..(356): Pfam Name: Protein of unknown function (DUF760) Pfam Description: Protein of unknown function (DUF760)
  misc_feature (133)..(249): Homolog of NCBI NO: 13561930 NR Description: unknown [Brassica napus]
  misc_feature (270)..(351): Homolog of NCBI NO: 18398302 NR Description: expressed protein
  misc_feature (43)..(247): Homolog of NCBI NO: 18398302 NR Description: expressed protein
  misc_feature (261)..(356): Homolog of NCBI NO: 28301943 NR Description: unknown protein [Oryza sativa (japonica
  misc_feature (55)..(247): Homolog of NCBI NO: 28301943 NR Description: unknown protein [Oryza sativa (japonica
  misc_feature (259)..(351): Homolog of NCBI NO: 15221185 NR Description: unknown protein
  misc_feature (36)..(249): Homolog of NCBI NO: 15221185 NR Description: unknown protein
  misc_feature (273)..(362): Homolog of NCBI NO: 15239021 NR Description: putative protein
  misc_feature (1)..(250): Homolog of NCBI NO: 15239021 NR Description: putative protein
  misc_feature (1)..(368): Homolog of NCBI NO: 18397912 NR Description: expressed protein
MDSCLSNQTALQFLPSRSRRQSGDGGGGFVIPAKRKIQYSSMVVVAAAGQSRCEPGSSLNAPLEPRSAQGRFLRSVLLNKRQLFHYAAADELKQLADDREAALARMSLSSGSDEASLHRRIAELKERYCKTAVQDIMYMLIFYKYSEIRVPLVPKLSRCIYNGRLEIWPSKDWELESIYSCDTLEIIKEHVSAVIGLRVNSCVTDNWATTQIQKLHLRKVYAASILYGYFLKSASLRHQLECSLSDIHGSGYLKSPIFGCSFTTGTAQISNKQQLRHYISDFDPETLQRCAKPRTEEARNLIEKQSLALFGTEESDETIVTSFSSLKRLVLEAVAFGTFLWDTELYVDGAYKLKENGNAEEQEGKKSI

SEQ ID NO: 23836 - protein, 327 aa, Arabidopsis thaliana
  peptide (1)..(327): Ceres Seq. ID no. 12397242
  misc_feature (1)..(315): Pfam Name: Protein of unknown function (DUF760) Pfam Description: Protein of unknown function (DUF760)
  misc_feature (92)..(208): Homolog of NCBI NO: 13561930 NR Description: unknown [Brassica napus]
  misc_feature (229)..(310): Homolog of NCBI NO: 18398302 NR Description: expressed protein
  misc_feature (2)..(206): Homolog of NCBI NO: 18398302 NR Description: expressed protein
  misc_feature (220)..(315): Homolog of NCBI NO: 28301943 NR Description: unknown protein [Oryza sativa (japonica
  misc_feature (14)..(206): Homolog of NCBI NO: 28301943 NR Description: unknown protein [Oryza sativa (japonica
  misc_feature (218)..(310): Homolog of NCBI NO: 15221185 NR Description: unknown protein
  misc_feature (1)..(208): Homolog of NCBI NO: 15221185 NR Description: unknown protein
  misc_feature (232)..(321): Homolog of NCBI NO: 15239021 NR Description: putative protein
  misc_feature (1)..(209): Homolog of NCBI NO: 15239021 NR Description: putative protein
  misc_feature (1)..(327): Homolog of NCBI NO: 18397912 NR Description: expressed protein
MVVVAAAGQSRCEPGSSLNAPLEPRSAQGRFLRSVLLNKRQLFHYAAADELKQLADDREAALARMSLSSGSDEASLHRRIAELKERYCKTAVQDIMYMLIFYKYSEIRVPLVPKLSRCIYNGRLEIWPSKDWELESIYSCDTLEIIKEHVSAVIGLRVNSCVTDNWATTQIQKLHLRKVYAASILYGYFLKSASLRHQLECSLSDIHGSGYLKSPIFGCSFTTGTAQISNKQQLRHYISDFDPETLQRCAKPRTEEARNLIEKQSLALFGTEESDETIVTSFSSLKRLVLEAVAFGTFLWDTELYVDGAYKLKENGNAEEQEGKKSI

SEQ ID NO: 23837 - protein, 263 aa, Arabidopsis thaliana
  peptide (1)..(263): Ceres Seq. ID no. 12397243
  misc_feature (1)..(251): Pfam Name: Protein of unknown function (DUF760) Pfam Description: Protein of unknown function (DUF760)
  misc_feature (28)..(144): Homolog of NCBI NO: 13561930 NR Description: unknown [Brassica napus]
  misc_feature (165)..(246): Homolog of NCBI NO: 18398302 NR Description: expressed protein
  misc_feature (1)..(142): Homolog of NCBI NO: 18398302 NR Description: expressed protein
  misc_feature (156)..(251): Homolog of NCBI NO: 28301943 NR Description: unknown protein [Oryza sativa (japonica
  misc_feature (1)..(142): Homolog of NCBI NO: 28301943 NR Description: unknown protein [Oryza sativa (japonica
  misc_feature (154)..(246): Homolog of NCBI NO: 15221185 NR Description: unknown protein
  misc_feature (1)..(144): Homolog of NCBI NO: 15221185 NR Description: unknown protein
  misc_feature (168)..(257): Homolog of NCBI NO: 15239021 NR Description: putative protein
  misc_feature (1)..(145): Homolog of NCBI NO: 15239021 NR Description: putative protein
  misc_feature (1)..(263): Homolog of NCBI NO: 18397912 NR Description: expressed protein
MSLSSGSDEASLHRRIAELKERYCKTAVQDIMYMLIFYKYSEIRVPLVPKLSRCIYNGRLEIWPSKDWELESIYSCDTLEIIKEHVSAVIGLRVNSCVTDNWATTQIQKLHLRKVYAASILYGYFLKSASLRHQLECSLSDIHGSGYLKSPIFGCSFTTGTAQISNKQQLRHYISDFDPETLQRCAKPRTEEARNLIEKQSLALFGTEESDETIVTSFSSLKRLVLEAVAFGTFLWDTELYVDGAYKLKENGNAEEQEGKKSI

SEQ ID NO: 23838 - DNA, 1355 bp, Arabidopsis thaliana
  misc_feature (1)..(1355): Ceres Seq. ID no. 12385811
  misc_feature: MA Experiment ID: 108434 Result: Down-regulated in Transcription
  misc_feature: MA Experiment 108434 PARAMETER Experiment Name: At_Root_Tips_cDNA_P Parameter: Tissue Value: Root Tips
  misc_feature: MA Experiment ID: 108435 Result: Down-regulated in Transcription
  misc_feature: MA Experiment 108435 PARAMETER Experiment Name: At_stm_Mutants_cDNA_P Parameter: Plant Line Value: wt Landsburg vs stm
  misc_feature: MA Experiment 108435 PARAMETER Experiment Name: At_stm_Mutants_cDNA_P Parameter: Tissue Value: Shoot Apical Meristem Region
  misc_feature: MA Experiment ID: 108461 Result: Down-regulated in Transcription
  misc_feature: MA Experiment 108461 PARAMETER Experiment Name: At_Germinating_Seeds_cDNA_P Parameter: Age (day) Value: 1 vs. 0
  misc_feature: MA Experiment 108461 PARAMETER Experiment Name: At_Germinating_Seeds_cDNA_P Parameter: Tissue Value: Germinating Seeds
  misc_feature: MA Experiment ID: 108462 Result: Down-regulated in Transcription
  misc_feature: MA Experiment 108462 PARAMETER Experiment Name: At_Germinating_Seeds_cDNA_P Parameter: Age (day) Value: 2 vs. 0
  misc_feature: MA Experiment 108462 PARAMETER Experiment Name: At_Germinating_Seeds_cDNA_P Parameter: Tissue Value: Germinating Seeds
  misc_feature: MA Experiment ID: 108488 Result: Down-regulated in Transcription
  misc_feature: MA Experiment ID: 108577 Result: Down-regulated in Transcription
  misc_feature: MA Experiment 108577 PARAMETER Experiment Name: At_42deg_Heat_cDNA_P Parameter: Temperature (deg C) Value: 42 vs. 22
  misc_feature: MA Experiment 108577 PARAMETER Experiment Name: At_42deg_Heat_cDNA_P Parameter: Timepoint (hr) Value: 6
  misc_feature: MA Experiment 108577 PARAMETER Experiment Name: At_42deg_Heat_cDNA_P Parameter: Tissue Value: Aerial
  misc_feature: MA Experiment ID: 108607 Result: Up-regulated in Transcription
  misc_feature: MA Experiment 108607 PARAMETER Experiment Name: At_100uM_ABA_cDNA_P Parameter: Timepoint (hr) Value: 4
  misc_feature: MA Experiment 108607 PARAMETER Experiment Name: At_100uM_ABA_cDNA_P Parameter: Tissue Value: Aerial
  misc_feature: MA Experiment 108607 PARAMETER Experiment Name: At_100uM_ABA_cDNA_P Parameter: Treatment Value: 100uM ABA vs. No Treatment
  misc_feature: MA Experiment ID: 20000069 Result: Up-regulated in Transcription
  misc_feature: MA Experiment 20000069 PARAMETER Experiment Name: At_100uM_ABA_Mutants_cDNA_P Parameter: Plant Line Value: CS23
  misc_feature: MA Experiment 20000069 PARAMETER Experiment Name: At_100uM_ABA_Mutants_cDNA_P Parameter: Timepoint (hr) Value: 6
  misc_feature: MA Experiment 20000069 PARAMETER Experiment Name: At_100uM_ABA_Mutants_cDNA_P Parameter: Tissue Value: Aerial
  misc_feature: MA Experiment 20000069 PARAMETER Experiment Name: At_100uM_ABA_Mutants_cDNA_P Parameter: Treatment Value: 100uM ABA vs. No Treatment
  misc_feature: MA Experiment ID: 20000070 Result: Up-regulated in Transcription
  misc_feature: MA Experiment 20000070 PARAMETER Experiment Name: At_100uM_ABA_Mutants_cDNA_P Parameter: Plant Line Value: CS24
  misc_feature: MA Experiment 20000070 PARAMETER Experiment Name: At_100uM_ABA_Mutants_cDNA_P Parameter: Timepoint (hr) Value: 6
  misc_feature: MA Experiment 20000070 PARAMETER Experiment Name: At_100uM_ABA_Mutants_cDNA_P Parameter: Tissue Value: Aerial
  misc_feature: MA Experiment 20000070 PARAMETER Experiment Name: At_100uM_ABA_Mutants_cDNA_P Parameter: Treatment Value: 100uM ABA vs. No Treatment
  misc_feature: MA Experiment ID: 20000071 Result: Up-regulated in Transcription
  misc_feature: MA Experiment 20000071 PARAMETER Experiment Name: At_100uM_ABA_Mutants_cDNA_P Parameter: Plant Line Value: CS8104
  misc_feature: MA Experiment 20000071 PARAMETER Experiment Name: At_100uM_ABA_Mutants_cDNA_P Parameter: Timepoint (hr) Value: 6
  misc_feature: MA Experiment 20000071 PARAMETER Experiment Name: At_100uM_ABA_Mutants_cDNA_P Parameter: Tissue Value: Aerial
  misc_feature: MA Experiment 20000071 PARAMETER Experiment Name: At_100uM_ABA_Mutants_cDNA_P Parameter: Treatment Value: 100uM ABA vs. No Treatment
  misc_feature: MA Experiment ID: 20000086 Result: Up-regulated in Transcription
  misc_feature: MA Experiment 20000086 PARAMETER Experiment Name: At_100uM_ABA_Mutants_cDNA_P Parameter: Plant Line Value: CS22
  misc_feature: MA Experiment 20000086 PARAMETER Experiment Name: At_100uM_ABA_Mutants_cDNA_P Parameter: Timepoint (hr) Value: 6
  misc_feature: MA Experiment 20000086 PARAMETER Experiment Name: At_100uM_ABA_Mutants_cDNA_P Parameter: Tissue Value: Aerial
  misc_feature: MA Experiment 20000086 PARAMETER Experiment Name: At_100uM_ABA_Mutants_cDNA_P Parameter: Treatment Value: 100uM ABA vs. No Treatment
  misc_feature: MA Experiment ID: 20000087 Result: Up-regulated in Transcription
  misc_feature: MA Experiment 20000087 PARAMETER Experiment Name: At_100uM_ABA_Mutants_cDNA_P Parameter: Plant Line Value: WS
  misc_feature: MA Experiment 20000087 PARAMETER Experiment Name: At_100uM_ABA_Mutants_cDNA_P Parameter: Timepoint (hr) Value: 6
  misc_feature: MA Experiment 20000087 PARAMETER Experiment Name: At_100uM_ABA_Mutants_cDNA_P Parameter: Tissue Value: Aerial
  misc_feature: MA Experiment 20000087 PARAMETER Experiment Name: At_100uM_ABA_Mutants_cDNA_P Parameter: Treatment Value: 100uM ABA vs. No Treatment
  misc_feature: MA Experiment ID: 20000089 Result: Up-regulated in Transcription
  misc_feature: MA Experiment ID: 20000090 Result: Up-regulated in Transcription
  misc_feature: MA Experiment ID: 20000111 Result: Down-regulated in Transcription
  misc_feature: MA Experiment 20000111 PARAMETER Experiment Name: At_42deg_Heat_cDNA_P Parameter: Temperature (deg C) Value: 42 vs. 22
  misc_feature: MA Experiment 20000111 PARAMETER Experiment Name: At_42deg_Heat_cDNA_P Parameter: Timepoint (hr) Value: 6
  misc_feature: MA Experiment 20000111 PARAMETER Experiment Name: At_42deg_Heat_cDNA_P Parameter: Tissue Value: Aerial
  misc_feature: MA Experiment ID: 20000117 Result: Up-regulated in Transcription
  misc_feature: MA Experiment 20000117 PARAMETER Experiment Name: At_100uM_ABA_Mutants_cDNA_P Parameter: Plant Line Value: Columbia
  misc_feature: MA Experiment 20000117 PARAMETER Experiment Name: At_100uM_ABA_Mutants_cDNA_P Parameter: Timepoint (hr) Value: 6
  misc_feature: MA Experiment 20000117 PARAMETER Experiment Name: At_100uM_ABA_Mutants_cDNA_P Parameter: Tissue Value: Aerial
  misc_feature: MA Experiment 20000117 PARAMETER Experiment Name: At_100uM_ABA_Mutants_cDNA_P Parameter: Treatment Value: 100uM ABA vs. No Treatment
  misc_feature: MA Experiment ID: 20000173 Result: Down-regulated in Transcription
  misc_feature: MA Experiment 20000173 PARAMETER Experiment Name: At_42deg_Heat_P Parameter: Age (day) Value: 14
  misc_feature: MA Experiment 20000173 PARAMETER Experiment Name: At_42deg_Heat_P Parameter: Organism Value: A. thaliana
  misc_feature: MA Experiment 20000173 PARAMETER Experiment Name: At_42deg_Heat_P Parameter: Plant Line Value: WS
  misc_feature: MA Experiment 20000173 PARAMETER Experiment Name: At_42deg_Heat_P Parameter: Temperature (deg C) Value: 42 vs. 22
  misc_feature: MA Experiment 20000173 PARAMETER Experiment Name: At_42deg_Heat_P Parameter: Timepoint (hr) Value: 6
  misc_feature: MA Experiment 20000173 PARAMETER Experiment Name: At_42deg_Heat_P Parameter: Tissue Value: Aerial
  misc_feature: MA Experiment ID: 20000179 Result: Down-regulated in Transcription
  misc_feature: MA Experiment 20000179 PARAMETER Experiment Name: At_Germinating_Seeds_P Parameter: Age (hr) Value: 6 vs. 0
  misc_feature: MA Experiment 20000179 PARAMETER Experiment Name: At_Germinating_Seeds_P Parameter: Tissue Value: Germinating Seeds
  misc_feature: MA Experiment ID: 20000180 Result: Down-regulated in Transcription
  misc_feature: MA Experiment 20000180 PARAMETER Experiment Name: At_Germinating_Seeds_P Parameter: Age (hr) Value: 24 vs. 0
  misc_feature: MA Experiment 20000180 PARAMETER Experiment Name: At_Germinating_Seeds_P Parameter: Tissue Value: Germinating Seeds
  misc_feature: MA Experiment ID: 20000184 Result: Down-regulated in Transcription
  misc_feature: MA Experiment 20000184 PARAMETER Experiment Name: At_Shoots__P Parameter: Age (day) Value: 7
  misc_feature: MA Experiment 20000184 PARAMETER Experiment Name: At_Shoots__P Parameter: Tissue Value: Shoots vs. Whole Plant
  misc_feature: MA Experiment ID: 20000227 Result: Down-regulated in Transcription
  misc_feature: MA Experiment 20000227 PARAMETER Experiment Name: At_Root-Tips-vs-Tops_P Parameter: Tissue Value: Root Tips vs. Root Tops
  misc_feature: MA Experiment ID: 20000437 Result: Up-regulated in Transcription
  misc_feature: MA Experiment 20000437 PARAMETER Experiment Name: At_Drought_P Parameter: Age (day) Value: 8
  misc_feature: MA Experiment 20000437 PARAMETER Experiment Name: At_Drought_P Parameter: Organism Value: A. thaliana
  misc_feature: MA Experiment 20000437 PARAMETER Experiment Name: At_Drought_P Parameter: Plant Line Value: WS
  misc_feature: MA Experiment 20000437 PARAMETER Experiment Name: At_Drought_P Parameter: Timepoint (hr) Value: 24
  misc_feature: MA Experiment 20000437 PARAMETER Experiment Name: At_Drought_P Parameter: Tissue Value: Whole Plant
  misc_feature: MA Experiment 20000437 PARAMETER Experiment Name: At_Drought_P Parameter: Treatment Value: Drought vs. No Drought
  misc_feature: MA Experiment ID: 20000438 Result: Down-regulated in Transcription
  misc_feature: MA Experiment 20000438 PARAMETER Experiment Name: At_Shoots__P Parameter: Age (day) Value: 14
  misc_feature: MA Experiment 20000438 PARAMETER Experiment Name: At_Shoots__P Parameter: Tissue Value: Shoots vs. Whole Plant
  misc_feature: MA Experiment ID: 20000794 Result: Up-regulated in Transcription
  misc_feature: MA Experiment 20000794 PARAMETER Experiment Name: At_Petals_P Parameter: Age (day) Value: 23-25 days
  misc_feature: MA Experiment 20000794 PARAMETER Experiment Name: At_Petals_P Parameter: Plant Line Value: WS
  misc_feature: MA Experiment 20000794 PARAMETER Experiment Name: At_Petals_P Parameter: Tissue Value: Petals vs. Whole plant
  misc_feature: MA Experiment ID: 20001557 Result: Down-regulated in Transcription
  misc_feature: MA Experiment 20001557 PARAMETER Experiment Name: At_Drought_Soil_Dry_P Parameter: Age (day) Value: 27
  misc_feature: MA Experiment 20001557 PARAMETER Experiment Name: At_Drought_Soil_Dry_P Parameter: Organism Value: A. thaliana
  misc_feature: MA Experiment 20001557 PARAMETER Experiment Name: At_Drought_Soil_Dry_P Parameter: Plant Line Value: WS
  misc_feature: MA Experiment 20001557 PARAMETER Experiment Name: At_Drought_Soil_Dry_P Parameter: Post Timepoint (hr) Value: 3
  misc_feature: MA Experiment 20001557 PARAMETER Experiment Name: At_Drought_Soil_Dry_P Parameter: Post-Treatment Value: Re-Water vs. No Drought
  misc_feature: MA Experiment 20001557 PARAMETER Experiment Name: At_Drought_Soil_Dry_P Parameter: Timepoint (day) Value: 13
  misc_feature: MA Experiment 20001557 PARAMETER Experiment Name: At_Drought_Soil_Dry_P Parameter: Treatment Value: Drought vs. No Drought
  misc_feature: MA Experiment ID: 20001558 Result: Down-regulated in Transcription
  misc_feature: MA Experiment 20001558 PARAMETER Experiment Name: At_Drought_Soil_Dry_P Parameter: Age (day) Value: 27
  misc_feature: MA Experiment 20001558 PARAMETER Experiment Name: At_Drought_Soil_Dry_P Parameter: Organism Value: A. thaliana
  misc_feature: MA Experiment 20001558 PARAMETER Experiment Name: At_Drought_Soil_Dry_P Parameter: Plant Line Value: WS
  misc_feature: MA Experiment 20001558 PARAMETER Experiment Name: At_Drought_Soil_Dry_P Parameter: Post Timepoint (hr) Value: 6
  misc_feature: MA Experiment 20001558 PARAMETER Experiment Name: At_Drought_Soil_Dry_P Parameter: Post-Treatment Value: Re-Water vs. No Drought
  misc_feature: MA Experiment 20001558 PARAMETER Experiment Name: At_Drought_Soil_Dry_P Parameter: Timepoint (day) Value: 13
  misc_feature: MA Experiment 20001558 PARAMETER Experiment Name: At_Drought_Soil_Dry_P Parameter: Treatment Value: Drought vs. No Drought
  misc_feature: MA Experiment ID: 20001757 Result: Down-regulated in Transcription
  misc_feature: MA Experiment 20001757 PARAMETER Experiment Name: At_50mM_NH4NO3_L-to-H_P Parameter: Timepoint (hr) Value: 6
  misc_feature: MA Experiment 20001757 PARAMETER Experiment Name: At_50mM_NH4NO3_L-to-H_P Parameter: Tissue Value: Leaf
  misc_feature: MA Experiment 20001757 PARAMETER Experiment Name: At_50mM_NH4NO3_L-to-H_P Parameter: Treatment Value: 50mM NH4NO3 vs 100mM Mannitol
gtcgctttagcttctccggtttttaagcaagtaatcttctttcgtctctatcttctttacttgattgcttattcatctgttgattctgtggttaggtttgattcttctgactctgttttgttctgtttttggtgtttaattcttcttagcaagcaagtaatattcgatcgtcactgtttttgctttgattttgtgatttctctatcaaagattagaactttacgtgaccctttaagcgatcgacaattatctcactgttttttcagataagggtatatgagtttgttggacatgggtggagatatgatggaagatgattgggaatttgcgtcatcatcaaaccctaaaagaaccctagttcttgtgggccgtactggaaacggaaagagtgcgacaggtaacagtatccttgggaggaaagcttttaggtcaagagctagaactgtaggagtgacaagcacgtgcgagtcacagagagttgttcaagaagatggtgatatcattaatgttgttgatactcctggtttgtttgatttgtctactgcagctgattttattggtaaagagattgtgaggtgtataagtttggcagaagatgggattcatgcgatcttgttggtattctctgtgaggcggcttgctgaagaggagcaaactgtgcttagtttcttgcaagcgctattcggcagtaagatcgctgactatatgatcgttgtttttaccggtggcgatgagttggaagagaatgaggagacattggaggagtatttggctgactattgccctgagtttcttaaagaaattcttgggatatgtgacaatcggttggtgttgtttaataacaagactactgataaggtgaagaaagctgagcaagttcagaagcttctctcacttgttgaatctgttgttaaacagaacaatggaaaaccgtattcagatgagttgttccatgagctacaggaagaggctatcaagctaagggaccagaaaaaggaggttgagttacttcagggttactctaataatgagatagatgagttcaagaagcaaatcgatatgtcctatgataggcagcttagccgcatcaccgagatggtggagactaagctgagagacactgctaagagactagagcagcaactaggtgaagagcaagctgcaagacttgaagcggagaagagggcaaacgaagttcagaagcggtcaagcgatgagattaagaaactcagagagaatctggagagggcggagaaagagacgaaggaactccagaagaaactgggaaagtgcatcaatctatgatatattgagatgttgtagctccagtgaaatctgataagattattcatgtc

SEQ ID NO: 23839 - protein, 342 aa, Arabidopsis thaliana
  peptide (1)..(342): Ceres Seq. ID no. 12385812
  misc_feature (25)..(239): Pfam Name: AIG1 family Pfam Description: AIG1 family
  misc_feature (8)..(330): Homolog of NCBI NO: 15234855 NR Description: AIG1-like protein; protein id: At4g09940.1
  misc_feature (3)..(338): Homolog of NCBI NO: 15234871 NR Description: AIG1-like protein; protein id: At4g09950.1
  misc_feature (6)..(333): Homolog of NCBI NO: 4097585 NR Description: NTGP4 [Nicotiana tabacum]
  misc_feature (49)..(342): Homolog of NCBI NO: 12324509 NR Description: AIG1-like protein, 5' partial; 1-1205
  misc_feature (16)..(335): Homolog of NCBI NO: 10092442 NR Description: disease resistance protein AIG1; 916-2572
  misc_feature (16)..(335): Homolog of NCBI NO: 15217731 NR Description: AIG1; protein id: At1g33960.1, supported by cDNA:
  misc_feature (11)..(314): Homolog of NCBI NO: 15217719 NR Description: AIG1-like protein; protein id: At1g33900.1
  misc_feature (6)..(342): Homolog of NCBI NO: 24417378 NR Description: unknown [Arabidopsis thaliana]
  misc_feature (6)..(342): Homolog of NCBI NO: 25373414 NR Description: hypothetical protein F12G12.21 - Arabidopsis
  misc_feature (1)..(342): Homolog of NCBI NO: 18399081 NR Description: expressed protein
MSLLDMGGDMMEDDWEFASSSNPKRTLVLVGRTGNGKSATGNSILGRKAFRSRARTVGVTSTCESQRVVQEDGDIINVVDTPGLFDLSTAADFIGKEIVRCISLAEDGIHAILLVFSVRRLAEEEQTVLSFLQALFGSKIADYMIVVFTGGDELEENEETLEEYLADYCPEFLKEILGICDNRLVLFNNKTTDKVKKAEQVQKLLSLVESVVKQNNGKPYSDELFHELQEEAIKLRDQKKEVELLQGYSNNEIDEFKKQIDMSYDRQLSRITEMVETKLRDTAKRLEQQLGEEQAARLEAEKRANEVQKRSSDEIKKLRENLERAEKETKELQKKLGKCINL

SEQ ID NO: 23840 - protein, 337 aa, Arabidopsis thaliana
  peptide (1)..(337): Ceres Seq. ID no. 12385813
  misc_feature (20)..(234): Pfam Name: AIG1 family Pfam Description: AIG1 family
  misc_feature (6)..(309): Homolog of NCBI NO: 15217719 NR Description: AIG1-like protein; protein id: At1g33900.1
  misc_feature (11)..(330): Homolog of NCBI NO: 10092442 NR Description: disease resistance protein AIG1; 916-2572
  misc_feature (11)..(330): Homolog of NCBI NO: 15217731 NR Description: AIG1; protein id: At1g33960.1, supported by cDNA:
  misc_feature (3)..(325): Homolog of NCBI NO: 15234855 NR Description: AIG1-like protein; protein id: At4g09940.1
  misc_feature (1)..(333): Homolog of NCBI NO: 15234871 NR Description: AIG1-like protein; protein id: At4g09950.1
  misc_feature (1)..(328): Homolog of NCBI NO: 4097585 NR Description: NTGP4 [Nicotiana tabacum]
  misc_feature (44)..(337): Homolog of NCBI NO: 12324509 NR Description: AIG1-like protein, 5' partial; 1-1205
  misc_feature (1)..(337): Homolog of NCBI NO: 24417378 NR Description: unknown [Arabidopsis thaliana]
  misc_feature (1)..(337): Homolog of NCBI NO: 25373414 NR Description: hypothetical protein F12G12.21 - Arabidopsis
  misc_feature (1)..(337): Homolog of NCBI NO: 18399081 NR Description: expressed protein
MGGDMMEDDWEFASSSNPKRTLVLVGRTGNGKSATGNSILGRKAFRSRARTVGVTSTCESQRVVQEDGDIINVVDTPGLFDLSTAADFIGKEIVRCISLAEDGIHAILLVFSVRRLAEEEQTVLSFLQALFGSKIADYMIVVFTGGDELEENEETLEEYLADYCPEFLKEILGICDNRLVLFNNKTTDKVKKAEQVQKLLSLVESVVKQNNGKPYSDELFHELQEEAIKLRDQKKEVELLQGYSNNEIDEFKKQIDMSYDRQLSRITEMVETKLRDTAKRLEQQLGEEQAARLEAEKRANEVQKRSSDEIKKLRENLERAEKETKELQKKLGKCINL

SEQ ID NO: 23841 - protein, 333 aa, Arabidopsis thaliana
  peptide (1)..(333): Ceres Seq. ID no. 12385814
  misc_feature (16)..(230): Pfam Name: AIG1 family Pfam Description: AIG1 family
  misc_feature (2)..(305): Homolog of NCBI NO: 15217719 NR Description: AIG1-like protein; protein id: At1g33900.1
  misc_feature (7)..(326): Homolog of NCBI NO: 10092442 NR Description: disease resistance protein AIG1; 916-2572
  misc_feature (7)..(326): Homolog of NCBI NO: 15217731 NR Description: AIG1; protein id: At1g33960.1, supported by cDNA:
  misc_feature (1)..(321): Homolog of NCBI NO: 15234855 NR Description: AIG1-like protein; protein id: At4g09940.1
  misc_feature (1)..(329): Homolog of NCBI NO: 15234871 NR Description: AIG1-like protein; protein id: At4g09950.1
  misc_feature (1)..(324): Homolog of NCBI NO: 4097585 NR Description: NTGP4 [Nicotiana tabacum]
  misc_feature (40)..(333): Homolog of NCBI NO: 12324509 NR Description: AIG1-like protein, 5' partial; 1-1205
  misc_feature (1)..(333): Homolog of NCBI NO: 24417378 NR Description: unknown [Arabidopsis thaliana]
  misc_feature (1)..(333): Homolog of NCBI NO: 25373414 NR Description: hypothetical protein F12G12.21 - Arabidopsis
  misc_feature (1)..(333): Homolog of NCBI NO: 18399081 NR Description: expressed protein
MMEDDWEFASSSNPKRTLVLVGRTGNGKSATGNSILGRKAFRSRARTVGVTSTCESQRVVQEDGDIINVVDTPGLFDLSTAADFIGKEIVRCISLAEDGIHAILLVFSVRRLAEEEQTVLSFLQALFGSKIADYMIVVFTGGDELEENEETLEEYLADYCPEFLKEILGICDNRLVLFNNKTTDKVKKAEQVQKLLSLVESVVKQNNGKPYSDELFHELQEEAIKLRDQKKEVELLQGYSNNEIDEFKKQIDMSYDRQLSRITEMVETKLRDTAKRLEQQLGEEQAARLEAEKRANEVQKRSSDEIKKLRENLERAEKETKELQKKLGKCINL

SEQ ID NO: 23842 - DNA, 1458 bp, Arabidopsis thaliana
  misc_feature (1)..(1458): Ceres Seq. ID no. 12422463
  misc_feature: MA Experiment ID: 108434 Result: Up-regulated in Transcription
  misc_feature: MA Experiment 108434 PARAMETER Experiment Name: At_Root_Tips_cDNA_P Parameter: Tissue Value: Root Tips
  misc_feature: MA Experiment ID: 108435 Result: Up-regulated in Transcription
  misc_feature: MA Experiment 108435 PARAMETER Experiment Name: At_stm_Mutants_cDNA_P Parameter: Plant Line Value: wt Landsburg vs stm
  misc_feature: MA Experiment 108435 PARAMETER Experiment Name: At_stm_Mutants_cDNA_P Parameter: Tissue Value: Shoot Apical Meristem Region
  misc_feature: MA Experiment ID: 108462 Result: Down-regulated in Transcription
  misc_feature: MA Experiment 108462 PARAMETER Experiment Name: At_Germinating_Seeds_cDNA_P Parameter: Age (day) Value: 2 vs. 0
  misc_feature: MA Experiment 108462 PARAMETER Experiment Name: At_Germinating_Seeds_cDNA_P Parameter: Tissue Value: Germinating Seeds
  misc_feature: MA Experiment ID: 108463 Result: Down-regulated in Transcription
  misc_feature: MA Experiment 108463 PARAMETER Experiment Name: At_Germinating_Seeds_cDNA_P Parameter: Age (day) Value: 3 vs. 0
  misc_feature: MA Experiment 108463 PARAMETER Experiment Name: At_Germinating_Seeds_cDNA_P Parameter: Tissue Value: Germinating Seeds
  misc_feature: MA Experiment ID: 108464 Result: Down-regulated in Transcription
  misc_feature: MA Experiment 108464 PARAMETER Experiment Name: At_Germinating_Seeds_cDNA_P Parameter: Age (day) Value: 4 vs. 0
  misc_feature: MA Experiment 108464 PARAMETER Experiment Name: At_Germinating_Seeds_cDNA_P Parameter: Tissue Value: Germinating Seeds
  misc_feature: MA Experiment ID: 20000111 Result: Down-regulated in Transcription
  misc_feature: MA Experiment 20000111 PARAMETER Experiment Name: At_42deg_Heat_cDNA_P Parameter: Temperature (deg C) Value: 42 vs. 22
  misc_feature: MA Experiment 20000111 PARAMETER Experiment Name: At_42deg_Heat_cDNA_P Parameter: Timepoint (hr) Value: 6
  misc_feature: MA Experiment 20000111 PARAMETER Experiment Name: At_42deg_Heat_cDNA_P Parameter: Tissue Value: Aerial
  misc_feature: MA Experiment ID: 20000113 Result: Down-regulated in Transcription
  misc_feature: MA Experiment 20000113 PARAMETER Experiment Name: At_42deg_Heat_cDNA_P Parameter: Temperature (deg C) Value: 42 vs. 22
  misc_feature: MA Experiment 20000113 PARAMETER Experiment Name: At_42deg_Heat_cDNA_P Parameter: Timepoint (hr) Value: 8
  misc_feature: MA Experiment 20000113 PARAMETER Experiment Name: At_42deg_Heat_cDNA_P Parameter: Tissue Value: Aerial
  misc_feature: MA Experiment ID: 20000171 Result: Down-regulated in Transcription
  misc_feature: MA Experiment 20000171 PARAMETER Experiment Name: At_42deg_Heat_P Parameter: Age (day) Value: 14
  misc_feature: MA Experiment 20000171 PARAMETER Experiment Name: At_42deg_Heat_P Parameter: Organism Value: A. thaliana
  misc_feature: MA Experiment 20000171 PARAMETER Experiment Name: At_42deg_Heat_P Parameter: Plant Line Value: WS
  misc_feature: MA Experiment 20000171 PARAMETER Experiment Name: At_42deg_Heat_P Parameter: Temperature (deg C) Value: 42 vs. 22
  misc_feature: MA Experiment 20000171 PARAMETER Experiment Name: At_42deg_Heat_P Parameter: Timepoint (hr) Value: 1
  misc_feature: MA Experiment 20000171 PARAMETER Experiment Name: At_42deg_Heat_P Parameter: Tissue Value: Aerial
  misc_feature: MA Experiment ID: 20000173 Result: Down-regulated in Transcription
  misc_feature: MA Experiment 20000173 PARAMETER Experiment Name: At_42deg_Heat_P Parameter: Age (day) Value: 14
  misc_feature: MA Experiment 20000173 PARAMETER Experiment Name: At_42deg_Heat_P Parameter: Organism Value: A. thaliana
  misc_feature: MA Experiment 20000173 PARAMETER Experiment Name: At_42deg_Heat_P Parameter: Plant Line Value: WS
  misc_feature: MA Experiment 20000173 PARAMETER Experiment Name: At_42deg_Heat_P Parameter: Temperature (deg C) Value: 42 vs. 22
  misc_feature: MA Experiment 20000173 PARAMETER Experiment Name: At_42deg_Heat_P Parameter: Timepoint (hr) Value: 6
  misc_feature: MA Experiment 20000173 PARAMETER Experiment Name: At_42deg_Heat_P Parameter: Tissue Value: Aerial
aaaaatttcgaaatcggaaaatttacacagagaagcgccatgacctaaaaatctcaaaacttccccaacaaaaatggcgcttttactcaacccatttccttttacctaccttgtacattaccccttttctcaaatctcactttcccactgaaataaccccatggcggagaatcagaactgtgcgaggatgacgagagcggcggcgaaacgaaaagcgtcgtccatggcgttagacgaaaacccagttagtaagaagagagttgttctcggagagcttccgaatatgtccaatgtcgttgctgtacccaatcaagaaagagagacccttaaggctaaaacaagtgttaatacctcgaagaggcagatgaagaaggctttgatgattcctgaagctagcgtactaatcgaatcgagatctgttgatcctcagatgtgtgagccttttgctagtgatatttgtgcttatctccgtgaaatggaggggaagccgaaacatagaccactacctgattatattgaaaaggttcagagtgatttaactccacacatgagagcggttttggtggattggttagtggaggttgctgaggagtacaagcttgtttcggatacgctttatctcactatctcctatgttgatagattcttgtctgtgaagcctattaacaggcagaagcttcagcttgtgggagtttctgcaatgcttattgcgtcgaaatatgaagagataggtcctcctaaagttgaagatttttgttacattacggataatacatttactaaacaagaagtggtgtcgatggaggcggatatacttcttgctctgcagtttgaattaggaagcccaaccatcaaaacattcctaagacggtttacacgggttgcacaagaagatttcaaagactcacaattgcagatagagttcctttgttgctatctatcagaattgagtatgttagattacacctgtgtgaagtatttgccatctcttttgtctgcttcagctgtatttcttgcccggttcatcatccgtccaaaacaacatccttggaatcaaatgctagaagaatacacaaagtacaaagcagctgatctacaagtgtgcgtgggtatcatacatgacttgtatctaagcagaagaggaaacactctagaagctgttagaaataagtacaagcaacacaagtacaagtgcgttgcgaccatgcctgtttcaccggagctacctcttgctttctttgaagatattaccattagaggaatggcgtaaaagaagcttgaagcttatgtattggaagtgttagttacctgaattttgggttgtatatatctgttagaatggcagattagtattgagtattatctcttttagcgtatgttcaatgattttttgctaacactagttaagaaactttttttttttgcttgaccattttttcaatggtttattagattttt

SEQ ID NO: 23843 - protein, 369 aa, Arabidopsis thaliana
  peptide (1)..(369): Ceres Seq. ID no. 12422464
  misc_feature (229)..(356): Pfam Name: Cyclin, C-terminal domain Pfam Description: Cyclin, C-terminal domain
  misc_feature (1)..(309): Homolog of NCBI NO: 7438512 NR Description: cyclin A-type (clone 13) - common tobacco
  misc_feature (1)..(363): Homolog of NCBI NO: 40538955 NR Description: putative A-type cyclin [Oryza sativa (japonica
  misc_feature (82)..(363): Homolog of NCBI NO: 15220145 NR Description: Cyclin A3;3; protein id: At1g47220.1 [Arabidopsis
  misc_feature (1)..(361): Homolog of NCBI NO: 7242793 NR Description: cyclin A3.1 [Pisum sativum]
  misc_feature (1)..(363): Homolog of NCBI NO: 7438516 NR Description: cyclin A-type - Madagascar periwinkle
  misc_feature (1)..(363): Homolog of NCBI NO: 7438513 NR Description: cyclin A-type (clone 59) - common tobacco
  misc_feature (3)..(365): Homolog of NCBI NO: 15239172 NR Description: Cyclin A3;1; protein id: At5g43080.1 [Arabidopsis
  misc_feature (1)..(365): Homolog of NCBI NO: 30694019 NR Description: cyclin family [Arabidopsis thaliana]
  misc_feature (1)..(369): Homolog of NCBI NO: 15220147 NR Description: Cyclin A3;4; protein id: At1g47230.1, supported
MAENQNCARMTRAAAKRKASSMALDENPVSKKRVVLGELPNMSNVVAVPNQERETLKAKTSVNTSKRQMKKALMIPEASVLIESRSVDPQMCEPFASDICAYLREMEGKPKHRPLPDYIEKVQSDLTPHMRAVLVDWLVEVAEEYKLVSDTLYLTISYVDRFLSVKPINRQKLQLVGVSAMLIASKYEEIGPPKVEDFCYITDNTFTKQEVVSMEADILLALQFELGSPTIKTFLRRFTRVAQEDFKDSQLQIEFLCCYLSELSMLDYTCVKYLPSLLSASAVFLARFIIRPKQHPWNQMLEEYTKYKAADLQVCVGIIHDLYLSRRGNTLEAVRNKYKQHKYKCVATMPVSPELPLAFFEDITIRGMA

SEQ ID NO: 23844 - protein, 360 aa, Arabidopsis thaliana
  peptide (1)..(360): Ceres Seq. ID no. 12422465
  misc_feature (220)..(347): Pfam Name: Cyclin, C-terminal domain Pfam Description: Cyclin, C-terminal domain
  misc_feature (1)..(300): Homolog of NCBI NO: 7438512 NR Description: cyclin A-type (clone 13) - common tobacco
  misc_feature (1)..(354): Homolog of NCBI NO: 40538955 NR Description: putative A-type cyclin [Oryza sativa (japonica
  misc_feature (73)..(354): Homolog of NCBI NO: 15220145 NR Description: Cyclin A3;3; protein id: At1g47220.1 [Arabidopsis
  misc_feature (1)..(352): Homolog of NCBI NO: 7242793 NR Description: cyclin A3.1 [Pisum sativum]
  misc_feature (1)..(354): Homolog of NCBI NO: 7438516 NR Description: cyclin A-type - Madagascar periwinkle
  misc_feature (1)..(354): Homolog of NCBI NO: 7438513 NR Description: cyclin A-type (clone 59) - common tobacco
  misc_feature (1)..(356): Homolog of NCBI NO: 15239172 NR Description: Cyclin A3;1; protein id: At5g43080.1 [Arabidopsis
  misc_feature (1)..(356): Homolog of NCBI NO: 30694019 NR Description: cyclin family [Arabidopsis thaliana]
  misc_feature (1)..(360): Homolog of NCBI NO: 15220147 NR Description: Cyclin A3;4; protein id: At1g47230.1, supported
MTRAAAKRKASSMALDENPVSKKRVVLGELPNMSNVVAVPNQERETLKAKTSVNTSKRQMKKALMIPEASVLIESRSVDPQMCEPFASDICAYLREMEGKPKHRPLPDYIEKVQSDLTPHMRAVLVDWLVEVAEEYKLVSDTLYLTISYVDRFLSVKPINRQKLQLVGVSAMLIASKYEEIGPPKVEDFCYITDNTFTKQEVVSMEADILLALQFELGSPTIKTFLRRFTRVAQEDFKDSQLQIEFLCCYLSELSMLDYTCVKYLPSLLSASAVFLARFIIRPKQHPWNQMLEEYTKYKAADLQVCVGIIHDLYLSRRGNTLEAVRNKYKQHKYKCVATMPVSPELPLAFFEDITIRGMA

SEQ ID NO: 23845 - protein, 348 aa, Arabidopsis thaliana
  peptide (1)..(348): Ceres Seq. ID no. 12422466
  misc_feature (208)..(335): Pfam Name: Cyclin, C-terminal domain Pfam Description: Cyclin, C-terminal domain
  misc_feature (1)..(288): Homolog of NCBI NO: 7438512 NR Description: cyclin A-type (clone 13) - common tobacco
  misc_feature (1)..(342): Homolog of NCBI NO: 40538955 NR Description: putative A-type cyclin [Oryza sativa (japonica
  misc_feature (61)..(342): Homolog of NCBI NO: 15220145 NR Description: Cyclin A3;3; protein id: At1g47220.1 [Arabidopsis
  misc_feature (1)..(340): Homolog of NCBI NO: 7242793 NR Description: cyclin A3.1 [Pisum sativum]
  misc_feature (1)..(342): Homolog of NCBI NO: 7438516 NR Description: cyclin A-type - Madagascar periwinkle
  misc_feature (1)..(342): Homolog of NCBI NO: 7438513 NR Description: cyclin A-type (clone 59) - common tobacco
  misc_feature (1)..(344): Homolog of NCBI NO: 15239172 NR Description: Cyclin A3;1; protein id: At5g43080.1 [Arabidopsis
  misc_feature (1)..(344): Homolog of NCBI NO: 30694019 NR Description: cyclin family [Arabidopsis thaliana]
  misc_feature (1)..(348): Homolog of NCBI NO: 15220147 NR Description: Cyclin A3;4; protein id: At1g47230.1, supported
MALDENPVSKKRVVLGELPNMSNVVAVPNQERETLKAKTSVNTSKRQMKKALMIPEASVLIESRSVDPQMCEPFASDICAYLREMEGKPKHRPLPDYIEKVQSDLTPHMRAVLVDWLVEVAEEYKLVSDTLYLTISYVDRFLSVKPINRQKLQLVGVSAMLIASKYEEIGPPKVEDFCYITDNTFTKQEVVSMEADILLALQFELGSPTIKTFLRRFTRVAQEDFKDSQLQIEFLCCYLSELSMLDYTCVKYLPSLLSASAVFLARFIIRPKQHPWNQMLEEYTKYKAADLQVCVGIIHDLYLSRRGNTLEAVRNKYKQHKYKCVATMPVSPELPLAFFEDITIRGMA

SEQ ID NO: 23846 - DNA, 1174 bp, Arabidopsis thaliana
  misc_feature (1)..(1174): Ceres Seq. ID no. 12323560
  misc_feature: MA Experiment ID: 108434 Result: Up-regulated in Transcription
  misc_feature: MA Experiment 108434 PARAMETER Experiment Name: At_Root_Tips_cDNA_P Parameter: Tissue Value: Root Tips
  misc_feature: MA Experiment ID: 108576 Result: Down-regulated in Transcription
  misc_feature: MA Experiment 108576 PARAMETER Experiment Name: At_42deg_Heat_cDNA_P Parameter: Temperature (deg C) Value: 42 vs. 22
  misc_feature: MA Experiment 108576 PARAMETER Experiment Name: At_42deg_Heat_cDNA_P Parameter: Timepoint (hr) Value: 1
  misc_feature: MA Experiment 108576 PARAMETER Experiment Name: At_42deg_Heat_cDNA_P Parameter: Tissue Value: Aerial
  misc_feature: MA Experiment ID: 20000090 Result: Up-regulated in Transcription
  misc_feature: MA Experiment ID: 20000234 Result: Up-regulated in Transcription
  misc_feature: MA Experiment 20000234 PARAMETER Experiment Name: At_Siliques_P Parameter: Age (day) Value: 21
  misc_feature: MA Experiment 20000234 PARAMETER Experiment Name: At_Siliques_P Parameter: Organism Value: A. thaliana
  misc_feature: MA Experiment 20000234 PARAMETER Experiment Name: At_Siliques_P Parameter: Plant Line Value: WS
  misc_feature: MA Experiment 20000234 PARAMETER Experiment Name: At_Siliques_P Parameter: Tissue Value: Less Than 5mm Siliques vs. Whole Plant
  misc_feature: MA Experiment ID: 20000495 Result: Up-regulated in Transcription
  misc_feature: MA Experiment 20000495 PARAMETER Experiment Name: At_Guard_Cells_P Parameter: Harvest Date Value: 8/2/2002
  misc_feature: MA Experiment 20000495 PARAMETER Experiment Name: At_Guard_Cells_P Parameter: Organism Value: A. thaliana
  misc_feature: MA Experiment 20000495 PARAMETER Experiment Name: At_Guard_Cells_P Parameter: Tissue Value: Guard Cells vs. Leaves
aaaccaaaattaaatcatcaaaaatcaaaatctctaaaatcaaaaattcgcattttctctctcgccggagagatgcaacggtttcttctacctttactcttccttgcactatcgccgccggcgatttgtcattactcttcctcaacctcttcaccttcttcgtcctccgtttcttccgacgcctcagaatggcgtccagctcgagccacctactacgccgctacgaatcctcgagacgcggtgggcggtgcgtgtggatacggagatctcgtcaaatctgggtacggtatggctactgttggtctaagcgagactctgtttgagcgtggtcagatctgtggtgcttgtttcgagctcagatgtgttgatgatctccgttggtgtatccctggaacttcaattatactcaccgctacgaatttctgtgctcctaattacggatttgatcccgacggtggtggtcattgtaatccacctaacaaacatttcgtgcttccgatcgaagcgtttgagaagatcgctatttggaaagctgggaacatgccggtgcagtatcgaaggatcaactgtagaaaggaagggagcatgcggtttacagtcgatggtggaggcattttcatttcggttttgatcaccaatgttgcagggtccggtgatatagctgctgtgaagatcaaagggtcgagaaccgggtggttacctatgggtcgtaattggggacaaaattggcatattaatgctgatctcaggaaccaagctctctcatttgaagtaacttctagtgacaggtcaaccgtgacatcttacaatgtctccccgaaaaactggaattatggacagaccttcgaagggaaacaattcgagactccgtgagacagagacggacacattgagatacaatcccatgattctttttttccgggtcagaattttttgatggcaagtatatcgatcttggtctaaggttatctttagggttgaaaaggaaagaacttgggtcagacttttgcatttcatagttctctctctcccacgcataggtacaaaaactcaccaatgtactaagaacagtgatcacacaaacatcactattgtatctatttgtttacattactaaggagcgaaagcttccttcaagtgcttaaagctaatgatgagtactgagtcttatcgt

SEQ ID NO: 23847 - protein, 290 aa, Arabidopsis thaliana
  peptide (1)..(290): Ceres Seq. ID no. 12323561
  misc_feature (196)..(273): Pfam Name: Pollen allergen Pfam Description: Pollen allergen
  misc_feature (64)..(287): Homolog of NCBI NO: 21314549 NR Description: alpha-expansin precursor [Gossypium hirsutum]
  misc_feature (31)..(287): Homolog of NCBI NO: 15233283 NR Description: expansin, putative; protein id: At3g55500.1
  misc_feature (41)..(287): Homolog of NCBI NO: 20135554 NR Description: expansin 1 [Musa acuminata]
  misc_feature (64)..(287): Homolog of NCBI NO: 29467509 NR Description: expansin [Pyrus communis]
  misc_feature (29)..(287): Homolog of NCBI NO: 7407665 NR Description: alpha-expansin OsEXP10 [Oryza sativa]
  misc_feature (27)..(289): Homolog of NCBI NO: 4138912 NR Description: expansin precursor [Lycopersicon esculentum]
  misc_feature (187)..(290): Homolog of NCBI NO: 6714416 NR Description: putative expansin precursor [Arabidopsis thaliana]
  misc_feature (25)..(187): Homolog of NCBI NO: 6714416 NR Description: putative expansin precursor [Arabidopsis thaliana]
  misc_feature (25)..(290): Homolog of NCBI NO: 21618283 NR Description: Alpha-expansin 13 precursor (At-EXP13) (AtEx13)
  misc_feature (25)..(290): Homolog of NCBI NO: 18396479 NR Description: expansin, putative
KPKLNHQKSKSLKSKIRIFSLAGEMQRFLLPLLFLALSPPAICHYSSSTSSPSSSSVSSDASEWRPARATYYAATNPRDAVGGACGYGDLVKSGYGMATVGLSETLFERGQICGACFELRCVDDLRWCIPGTSIILTATNFCAPNYGFDPDGGGHCNPPNKHFVLPIEAFEKIAIWKAGNMPVQYRRINCRKEGSMRFTVDGGGIFISVLITNVAGSGDIAAVKIKGSRTGWLPMGRNWGQNWHINADLRNQALSFEVTSSDRSTVTSYNVSPKNWNYGQTFEGKQFETP

SEQ ID NO: 23848 - protein, 266 aa, Arabidopsis thaliana
  peptide (1)..(266): Ceres Seq. ID no. 12323562
  misc_feature (172)..(249): Pfam Name: Pollen allergen Pfam Description: Pollen allergen
  misc_feature (40)..(263): Homolog of NCBI NO: 21314549 NR Description: alpha-expansin precursor [Gossypium hirsutum]
  misc_feature (7)..(263): Homolog of NCBI NO: 15233283 NR Description: expansin, putative; protein id: At3g55500.1
  misc_feature (17)..(263): Homolog of NCBI NO: 20135554 NR Description: expansin 1 [Musa acuminata]
  misc_feature (40)..(263): Homolog of NCBI NO: 29467509 NR Description: expansin [Pyrus communis]
  misc_feature (5)..(263): Homolog of NCBI NO: 7407665 NR Description: alpha-expansin OsEXP10 [Oryza sativa]
  misc_feature (3)..(265): Homolog of NCBI NO: 4138912 NR Description: expansin precursor [Lycopersicon esculentum]
  misc_feature (163)..(266): Homolog of NCBI NO: 6714416 NR Description: putative expansin precursor [Arabidopsis thaliana]
  misc_feature (1)..(163): Homolog of NCBI NO: 6714416 NR Description: putative expansin precursor [Arabidopsis thaliana]
  misc_feature (1)..(266): Homolog of NCBI NO: 21618283 NR Description: Alpha-expansin 13 precursor (At-EXP13) (AtEx13)
  misc_feature (1)..(266): Homolog of NCBI NO: 18396479 NR Description: expansin, putative
MQRFLLPLLFLALSPPAICHYSSSTSSPSSSSVSSDASEWRPARATYYAATNPRDAVGGACGYGDLVKSGYGMATVGLSETLFERGQICGACFELRCVDDLRWCIPGTSIILTATNFCAPNYGFDPDGGGHCNPPNKHFVLPIEAFEKIAIWKAGNMPVQYRRINCRKEGSMRFTVDGGGIFISVLITNVAGSGDIAAVKIKGSRTGWLPMGRNWGQNWHINADLRNQALSFEVTSSDRSTVTSYNVSPKNWNYGQTFEGKQFETP

SEQ ID NO: 23849 - protein, 194 aa, Arabidopsis thaliana
  peptide (1)..(194): Ceres Seq. ID no. 12323563
  misc_feature (100)..(177): Pfam Name: Pollen allergen Pfam Description: Pollen allergen
  misc_feature (1)..(191): Homolog of NCBI NO: 21314549 NR Description: alpha-expansin precursor [Gossypium hirsutum]
  misc_feature (1)..(191): Homolog of NCBI NO: 15233283 NR Description: expansin, putative; protein id: At3g55500.1
  misc_feature (1)..(191): Homolog of NCBI NO: 20135554 NR Description: expansin 1 [Musa acuminata]
  misc_feature (1)..(191): Homolog of NCBI NO: 29467509 NR Description: expansin [Pyrus communis]
  misc_feature (1)..(191): Homolog of NCBI NO: 7407665 NR Description: alpha-expansin OsEXP10 [Oryza sativa]
  misc_feature (1)..(193): Homolog of NCBI NO: 4138912 NR Description: expansin precursor [Lycopersicon esculentum]
  misc_feature (91)..(194): Homolog of NCBI NO: 6714416 NR Description: putative expansin precursor [Arabidopsis thaliana]
  misc_feature (1)..(91): Homolog of NCBI NO: 6714416 NR Description: putative expansin precursor [Arabidopsis thaliana]
  misc_feature (1)..(194): Homolog of NCBI NO: 21618283 NR Description: Alpha-expansin 13 precursor (At-EXP13) (AtEx13)
  misc_feature (1)..(194): Homolog of NCBI NO: 18396479 NR Description: expansin, putative
MATVGLSETLFERGQICGACFELRCVDDLRWCIPGTSIILTATNFCAPNYGFDPDGGGHCNPPNKHFVLPIEAFEKIAIWKAGNMPVQYRRINCRKEGSMRFTVDGGGIFISVLITNVAGSGDIAAVKIKGSRTGWLPMGRNWGQNWHINADLRNQALSFEVTSSDRSTVTSYNVSPKNWNYGQTFEGKQFETP

SEQ ID NO: 23850 - DNA, 1204 bp, Arabidopsis thaliana
  misc_feature (1)..(1204): Ceres Seq. ID no. 12337922
  misc_feature: MA Experiment ID: 20000227 Result: Up-regulated in Transcription
  misc_feature: MA Experiment 20000227 PARAMETER Experiment Name: At_Root-Tips-vs-Tops_P Parameter: Tissue Value: Root Tips vs. Root Tops
atctagggttccagatttactcttcgtcttcctctcttcgcttcttccccactgggattttccttttcttctccttttttctctacccatcgatctacacatcctgatcttcttagaagccccaatccttatacattccgggaacaaaaaacctagctttttttttattccggcttaaccagttttcgaaaaaccctagcttccatggcgaaaactcgacctggtgtcgcctccaaaattaagacgggaaggaaggggactcttataccatcaagggcaccaacaaagttgtgagagcgggagactgtgtgttgatgcgcccatcagatgctggtaaaccaccatatgtggcccgtgttgagaagattgaagctgatgcgaggaacaatgtgaaggtgcactgtcgatggtattaccgccctgaggagtcacttggtggtaggagacaatttcatggagccaaagagcttttcttgtctgaccattttgatgttcaaagtgcacacaccattgagggaaaatgcattgttcacaccttcaaaaactacacgaggcttgaaaacgttggggcagaggattattattgtagattcgagtacaaggctgctactggcgcatttacccctgatcgagttgctgtgtactgcaaatgtgaaatgccttacaatccagacgatctcatggtgcagtgtgaaggctgcaaagactggtatcatcctgcgtgtgttggcatgacgattgaagaagcaaagaagcttgatcactttgtatgtgctgaatgcagttctgatgacgatgtcaaaaaatcgcagaatgggtttacttcatctccagctgatgatgttaaggtggaaacgaagcgcagaaaaaggtaatcgcgagttcttggggataaaagccacaagagatgataagttatataacttgggaagctctttggtgcagattttagtaagttagggtttatctttgtcggtctttgtcgtctatggttgtgatgtctgtatggtgcgttccaaaacttagagaaatgtgaaaaagaggagagatcagagagatgatgaagaaaactatgttggtagaatcagttgtatagacttccgtggggtttaagttaactttaggtttgtttattgttatggtctgttgttattttgtggctgatgagaacagatgaacatgaacaacgcttttgacttgggtc

SEQ ID NO: 23851 - protein, 186 aa, Arabidopsis thaliana
  peptide (1)..(186): Ceres Seq. ID no. 12337923
  misc_feature (1)..(106): Pfam Name: BAH domain Pfam Description: BAH domain
  misc_feature (1)..(186): Homolog of NCBI NO: 34897170 NR Description: putative DNA-binding protein
  misc_feature (1)..(183): Homolog of NCBI NO: 22328317 NR Description: putative ES43-like protein; protein id:
  misc_feature (1)..(186): Homolog of NCBI NO: 33146914 NR Description: putative ES43 protein [Oryza sativa (japonica
  misc_feature (1)..(172): Homolog of NCBI NO: 34904940 NR Description: OSJNBa0077M12.13 [Oryza sativa (japonica
  misc_feature (1)..(183): Homolog of NCBI NO: 21595796 NR Description: ES43 like protein [Arabidopsis thaliana]
  misc_feature (1)..(183): Homolog of NCBI NO: 18420377 NR Description: ES43 like protein
  misc_feature (1)..(179): Homolog of NCBI NO: 7484948 NR Description: ES43 protein homolog F19H22.200 - Arabidopsis
  misc_feature (1)..(186): Homolog of NCBI NO: 37573088 NR Description: receptor like protein [Oryza sativa (japonica
  misc_feature (1)..(179): Homolog of NCBI NO: 15234729 NR Description: receptor like protein (fragment); protein id:
  misc_feature (1)..(179): Homolog of NCBI NO: 11292613 NR Description: receptor like protein - Arabidopsis thaliana
MRPSDAGKPPYVARVEKIEADARNNVKVHCRWYYRPEESLGGRRQFHGAKELFLSDHFDVQSAHTIEGKCIVHTFKNYTRLENVGAEDYYCRFEYKAATGAFTPDRVAVYCKCEMPYNPDDLMVQCEGCKDWYHPACVGMTIEEAKKLDHFVCAECSSDDDVKKSQNGFTSSPADDVKVETKRRKR

SEQ ID NO: 23852 - protein, 93 aa, Arabidopsis thaliana
  peptide (1)..(93): Ceres Seq. ID no. 12337924
MEPKSFSCLTILMFKVHTPLRENALFTPSKTTRGLKTLGQRIIIVDSSTRLLLAHLPLIELLCTANVKCLTIQTISWCSVKAAKTGIILRVLA

SEQ ID NO: 23853 - DNA, 1202 bp, Arabidopsis thaliana
  misc_feature (1)..(1202): Ceres Seq. ID no. 12602498
  misc_feature: MA Experiment ID: 108434 Result: Down-regulated in Transcription
  misc_feature: MA Experiment 108434 PARAMETER Experiment Name: At_Root_Tips_cDNA_P Parameter: Tissue Value: Root Tips
  misc_feature: MA Experiment ID: 108462 Result: Up-regulated in Transcription
  misc_feature: MA Experiment 108462 PARAMETER Experiment Name: At_Germinating_Seeds_cDNA_P Parameter: Age (day) Value: 2 vs. 0
  misc_feature: MA Experiment 108462 PARAMETER Experiment Name: At_Germinating_Seeds_cDNA_P Parameter: Tissue Value: Germinating Seeds
  misc_feature: MA Experiment ID: 108464 Result: Up-regulated in Transcription
  misc_feature: MA Experiment 108464 PARAMETER Experiment Name: At_Germinating_Seeds_cDNA_P Parameter: Age (day) Value: 4 vs. 0
  misc_feature: MA Experiment 108464 PARAMETER Experiment Name: At_Germinating_Seeds_cDNA_P Parameter: Tissue Value: Germinating Seeds
  misc_feature: MA Experiment ID: 108488 Result: Up-regulated in Transcription
  misc_feature: MA Experiment ID: 108595 Result: Down-regulated in Transcription
  misc_feature: MA Experiment 108595 PARAMETER Experiment Name: At_Ler-pi_Ovule_cDNA_P Parameter: Plant Line Value: null
  misc_feature: MA Experiment ID: 20000072 Result: Down-regulated in Transcription
  misc_feature: MA Experiment 20000072 PARAMETER Experiment Name: At_100uM_ABA_Mutants_cDNA_P Parameter: Plant Line Value: CS8105
  misc_feature: MA Experiment 20000072 PARAMETER Experiment Name: At_100uM_ABA_Mutants_cDNA_P Parameter: Timepoint (hr) Value: 6
  misc_feature: MA Experiment 20000072 PARAMETER Experiment Name: At_100uM_ABA_Mutants_cDNA_P Parameter: Tissue Value: Aerial
  misc_feature: MA Experiment 20000072 PARAMETER Experiment Name: At_100uM_ABA_Mutants_cDNA_P Parameter: Treatment Value: 100uM ABA vs. No Treatment
  misc_feature: MA Experiment ID: 20000087 Result: Down-regulated in Transcription
  misc_feature: MA Experiment 20000087 PARAMETER Experiment Name: At_100uM_ABA_Mutants_cDNA_P Parameter: Plant Line Value: WS
  misc_feature: MA Experiment 20000087 PARAMETER Experiment Name: At_100uM_ABA_Mutants_cDNA_P Parameter: Timepoint (hr) Value: 6
  misc_feature: MA Experiment 20000087 PARAMETER Experiment Name: At_100uM_ABA_Mutants_cDNA_P Parameter: Tissue Value: Aerial
  misc_feature: MA Experiment 20000087 PARAMETER Experiment Name: At_100uM_ABA_Mutants_cDNA_P Parameter: Treatment Value: 100uM ABA vs. No Treatment
  misc_feature: MA Experiment ID: 20000179 Result: Up-regulated in Transcription
  misc_feature: MA Experiment 20000179 PARAMETER Experiment Name: At_Germinating_Seeds_P Parameter: Age (hr) Value: 6 vs. 0
  misc_feature: MA Experiment 20000179 PARAMETER Experiment Name: At_Germinating_Seeds_P Parameter: Tissue Value: Germinating Seeds
  misc_feature: MA Experiment ID: 20000180 Result: Up-regulated in Transcription
  misc_feature: MA Experiment 20000180 PARAMETER Experiment Name: At_Germinating_Seeds_P Parameter: Age (hr) Value: 24 vs. 0
  misc_feature: MA Experiment 20000180 PARAMETER Experiment Name: At_Germinating_Seeds_P Parameter: Tissue Value: Germinating Seeds
  misc_feature: MA Experiment ID: 20000185 Result: Down-regulated in Transcription
  misc_feature: MA Experiment 20000185 PARAMETER Experiment Name: At_Roots__P Parameter: Age (day) Value: 7 vs. 21
  misc_feature: MA Experiment 20000185 PARAMETER Experiment Name: At_Roots__P Parameter: Organism Value: A. thaliana
  misc_feature: MA Experiment 20000185 PARAMETER Experiment Name: At_Roots__P Parameter: Tissue Value: Roots vs. Whole Plant
  misc_feature: MA Experiment ID: 20000227 Result: Down-regulated in Transcription
  misc_feature: MA Experiment 20000227 PARAMETER Experiment Name: At_Root-Tips-vs-Tops_P Parameter: Tissue Value: Root Tips vs. Root Tops
  misc_feature: MA Experiment ID: 20000234 Result: Down-regulated in Transcription
  misc_feature: MA Experiment 20000234 PARAMETER Experiment Name: At_Siliques_P Parameter: Age (day) Value: 21
  misc_feature: MA Experiment 20000234 PARAMETER Experiment Name: At_Siliques_P Parameter: Organism Value: A. thaliana
  misc_feature: MA Experiment 20000234 PARAMETER Experiment Name: At_Siliques_P Parameter: Plant Line Value: WS
  misc_feature: MA Experiment 20000234 PARAMETER Experiment Name: At_Siliques_P Parameter: Tissue Value: Less Than 5mm Siliques vs. Whole Plant
  misc_feature: MA Experiment ID: 20000264 Result: Down-regulated in Transcription
  misc_feature: MA Experiment 20000264 PARAMETER Experiment Name: At_Open_Flower_P Parameter: Age (day) Value: 21
  misc_feature: MA Experiment 20000264 PARAMETER Experiment Name: At_Open_Flower_P Parameter: Plant Line Value: WS
  misc_feature: MA Experiment 20000264 PARAMETER Experiment Name: At_Open_Flower_P Parameter: Tissue Value: Open Flower vs. Whole Plant
  misc_feature: MA Experiment ID: 20000265 Result: Down-regulated in Transcription
  misc_feature: MA Experiment 20000265 PARAMETER Experiment Name: At_Open_Flower_P Parameter: Age (day) Value: 21
  misc_feature: MA Experiment 20000265 PARAMETER Experiment Name: At_Open_Flower_P Parameter: Plant Line Value: WS
  misc_feature: MA Experiment 20000265 PARAMETER Experiment Name: At_Open_Flower_P Parameter: Tissue Value: Closed Flower vs. Whole Plant
  misc_feature: MA Experiment ID: 20000269 Result: Down-regulated in Transcription
  misc_feature: MA Experiment 20000269 PARAMETER Experiment Name: At_1mM_KNO3_L-vs-H_Roots_P Parameter: Age (day) Value: 7,10,12
  misc_feature: MA Experiment 20000269 PARAMETER Experiment Name: At_1mM_KNO3_L-vs-H_Roots_P Parameter: Organism Value: A. thaliana
  misc_feature: MA Experiment 20000269 PARAMETER Experiment Name: At_1mM_KNO3_L-vs-H_Roots_P Parameter: Plant Line Value: WS
  misc_feature: MA Experiment 20000269 PARAMETER Experiment Name: At_1mM_KNO3_L-vs-H_Roots_P Parameter: Timepoint (day) Value: 7,10,12
  misc_feature: MA Experiment 20000269 PARAMETER Experiment Name: At_1mM_KNO3_L-vs-H_Roots_P Parameter: Tissue Value: Roots
  misc_feature: MA Experiment 20000269 PARAMETER Experiment Name: At_1mM_KNO3_L-vs-H_Roots_P Parameter: Treatment Value: 1mM KNO3 vs. 50mM KNO3
  misc_feature: MA Experiment ID: 20000286 Result: Down-regulated in Transcription
  misc_feature: MA Experiment 20000286 PARAMETER Experiment Name: At_Open_Flower_P Parameter: Age (day) Value: 21
  misc_feature: MA Experiment 20000286 PARAMETER Experiment Name: At_Open_Flower_P Parameter: Plant Line Value: WS
  misc_feature: MA Experiment 20000286 PARAMETER Experiment Name: At_Open_Flower_P Parameter: Tissue Value: Half Open vs. Whole Plant
  misc_feature: MA Experiment ID: 20000437 Result: Down-regulated in Transcription
  misc_feature: MA Experiment 20000437 PARAMETER Experiment Name: At_Drought_P Parameter: Age (day) Value: 8
  misc_feature: MA Experiment 20000437 PARAMETER Experiment Name: At_Drought_P Parameter: Organism Value: A. thaliana
  misc_feature: MA Experiment 20000437 PARAMETER Experiment Name: At_Drought_P Parameter: Plant Line Value: WS
  misc_feature: MA Experiment 20000437 PARAMETER Experiment Name: At_Drought_P Parameter: Timepoint (hr) Value: 24
  misc_feature: MA Experiment 20000437 PARAMETER Experiment Name: At_Drought_P Parameter: Tissue Value: Whole Plant
  misc_feature: MA Experiment 20000437 PARAMETER Experiment Name: At_Drought_P Parameter: Treatment Value: Drought vs. No Drought
  misc_feature: MA Experiment ID: 20000438 Result: Up-regulated in Transcription
  misc_feature: MA Experiment 20000438 PARAMETER Experiment Name: At_Shoots__P Parameter: Age (day) Value: 14
  misc_feature: MA Experiment 20000438 PARAMETER Experiment Name: At_Shoots__P Parameter: Tissue Value: Shoots vs. Whole Plant
  misc_feature: MA Experiment ID: 20000439 Result: Down-regulated in Transcription
  misc_feature: MA Experiment 20000439 PARAMETER Experiment Name: At_Roots__P Parameter: Age (day) Value: 14 vs. 21
  misc_feature: MA Experiment 20000439 PARAMETER Experiment Name: At_Roots__P Parameter: Organism Value: A. thaliana
  misc_feature: MA Experiment 20000439 PARAMETER Experiment Name: At_Roots__P Parameter: Tissue Value: Roots vs. Whole Plant
  misc_feature: MA Experiment ID: 20000495 Result: Down-regulated in Transcription
  misc_feature: MA Experiment 20000495 PARAMETER Experiment Name: At_Guard_Cells_P Parameter: Harvest Date Value: 8/2/2002
  misc_feature: MA Experiment 20000495 PARAMETER Experiment Name: At_Guard_Cells_P Parameter: Organism Value: A. thaliana
  misc_feature: MA Experiment 20000495 PARAMETER Experiment Name: At_Guard_Cells_P Parameter: Tissue Value: Guard Cells vs. Leaves
  misc_feature: MA Experiment ID: 20000496 Result: Down-regulated in Transcription
  misc_feature: MA Experiment 20000496 PARAMETER Experiment Name: At_Guard_Cells_P Parameter: Harvest Date Value: 7/19/2002
  misc_feature: MA Experiment 20000496 PARAMETER Experiment Name: At_Guard_Cells_P Parameter: Organism Value: Canola
  misc_feature: MA Experiment 20000496 PARAMETER Experiment Name: At_Guard_Cells_P Parameter: Tissue Value: Guard Cells vs. Leaves
  misc_feature: MA Experiment ID: 20000794 Result: Down-regulated in Transcription
  misc_feature: MA Experiment 20000794 PARAMETER Experiment Name: At_Petals_P Parameter: Age (day) Value: 23-25 days
  misc_feature: MA Experiment 20000794 PARAMETER Experiment Name: At_Petals_P Parameter: Plant Line Value: WS
  misc_feature: MA Experiment 20000794 PARAMETER Experiment Name: At_Petals_P Parameter: Tissue Value: Petals vs. Whole plant
  misc_feature: MA Experiment ID: 20001451 Result: Down-regulated in Transcription
  misc_feature: MA Experiment 20001451 PARAMETER Experiment Name: At_Far-red-induction_P Parameter: Age (day) Value: 7
  misc_feature: MA Experiment 20001451 PARAMETER Experiment Name: At_Far-red-induction_P Parameter: Light Value: Far-red vs. White
  misc_feature: MA Experiment 20001451 PARAMETER Experiment Name: At_Far-red-induction_P Parameter: Organism Value: A. thaliana
  misc_feature: MA Experiment 20001451 PARAMETER Experiment Name: At_Far-red-induction_P Parameter: Plant Line Value: Columbia
  misc_feature: MA Experiment 20001451 PARAMETER Experiment Name: At_Far-red-induction_P Parameter: Timepoint (hr) Value: 24
  misc_feature: MA Experiment 20001451 PARAMETER Experiment Name: At_Far-red-induction_P Parameter: Tissue Value: Whole Plant
  misc_feature: MA Experiment ID: 20001557 Result: Down-regulated in Transcription
  misc_feature: MA Experiment 20001557 PARAMETER Experiment Name: At_Drought_Soil_Dry_P Parameter: Age (day) Value: 27
  misc_feature: MA Experiment 20001557 PARAMETER Experiment Name: At_Drought_Soil_Dry_P Parameter: Organism Value: A. thaliana
  misc_feature: MA Experiment 20001557 PARAMETER Experiment Name: At_Drought_Soil_Dry_P Parameter: Plant Line Value: WS
  misc_feature: MA Experiment 20001557 PARAMETER Experiment Name: At_Drought_Soil_Dry_P Parameter: Post Timepoint (hr) Value: 3
  misc_feature: MA Experiment 20001557 PARAMETER Experiment Name: At_Drought_Soil_Dry_P Parameter: Post-Treatment Value: Re-Water vs. No Drought
  misc_feature: MA Experiment 20001557 PARAMETER Experiment Name: At_Drought_Soil_Dry_P Parameter: Timepoint (day) Value: 13
  misc_feature: MA Experiment 20001557 PARAMETER Experiment Name: At_Drought_Soil_Dry_P Parameter: Treatment Value: Drought vs. No Drought
  misc_feature: MA Experiment ID: 20001558 Result: Down-regulated in Transcription
  misc_feature: MA Experiment 20001558 PARAMETER Experiment Name: At_Drought_Soil_Dry_P Parameter: Age (day) Value: 27
  misc_feature: MA Experiment 20001558 PARAMETER Experiment Name: At_Drought_Soil_Dry_P Parameter: Organism Value: A. thaliana
  misc_feature: MA Experiment 20001558 PARAMETER Experiment Name: At_Drought_Soil_Dry_P Parameter: Plant Line Value: WS
  misc_feature: MA Experiment 20001558 PARAMETER Experiment Name: At_Drought_Soil_Dry_P Parameter: Post Timepoint (hr) Value: 6
  misc_feature: MA Experiment 20001558 PARAMETER Experiment Name: At_Drought_Soil_Dry_P Parameter: Post-Treatment Value: Re-Water vs. No Drought
  misc_feature: MA Experiment 20001558 PARAMETER Experiment Name: At_Drought_Soil_Dry_P Parameter: Timepoint (day) Value: 13
  misc_feature: MA Experiment 20001558 PARAMETER Experiment Name: At_Drought_Soil_Dry_P Parameter: Treatment Value: Drought vs. No Drought
  misc_feature: MA Experiment ID: 20001560 Result: Down-regulated in Transcription
  misc_feature: MA Experiment 20001560 PARAMETER Experiment Name: At_Drought_Soil_Dry_P Parameter: Age (day) Value: 28
  misc_feature: MA Experiment 20001560 PARAMETER Experiment Name: At_Drought_Soil_Dry_P Parameter: Organism Value: A. thaliana
  misc_feature: MA Experiment 20001560 PARAMETER Experiment Name: At_Drought_Soil_Dry_P Parameter: Plant Line Value: WS
  misc_feature: MA Experiment 20001560 PARAMETER Experiment Name: At_Drought_Soil_Dry_P Parameter: Post Timepoint (hr) Value: None
  misc_feature: MA Experiment 20001560 PARAMETER Experiment Name: At_Drought_Soil_Dry_P Parameter: Post-Treatment Value: None
  misc_feature: MA Experiment 20001560 PARAMETER Experiment Name: At_Drought_Soil_Dry_P Parameter: Timepoint (day) Value: 14
  misc_feature: MA Experiment 20001560 PARAMETER Experiment Name: At_Drought_Soil_Dry_P Parameter: Treatment Value: Drought vs. No Drought
  misc_feature: MA Experiment ID: 20001904 Result: Down-regulated in Transcription
  misc_feature: MA Experiment 20001904 PARAMETER Experiment Name: At_Drought_Reproduction_P Parameter: Age (day) Value: 37
  misc_feature: MA Experiment 20001904 PARAMETER Experiment Name: At_Drought_Reproduction_P Parameter: Organism Value: A. thaliana
  misc_feature: MA Experiment 20001904 PARAMETER Experiment Name: At_Drought_Reproduction_P Parameter: Plant Line Value: WS
  misc_feature: MA Experiment 20001904 PARAMETER Experiment Name: At_Drought_Reproduction_P Parameter: Timepoint (day) Value: 7
  misc_feature: MA Experiment 20001904 PARAMETER Experiment Name: At_Drought_Reproduction_P Parameter: Tissue Value: Rosettes
  misc_feature: MA Experiment 20001904 PARAMETER Experiment Name: At_Drought_Reproduction_P Parameter: Treatment Value: Drought vs. No Drought
  misc_feature: MA Experiment ID: 20001905 Result: Down-regulated in Transcription
  misc_feature: MA Experiment 20001905 PARAMETER Experiment Name: At_Drought_Reproduction_P Parameter: Age (day) Value: 40
  misc_feature: MA Experiment 20001905 PARAMETER Experiment Name: At_Drought_Reproduction_P Parameter: Organism Value: A. thaliana
  misc_feature: MA Experiment 20001905 PARAMETER Experiment Name: At_Drought_Reproduction_P Parameter: Plant Line Value: WS
  misc_feature: MA Experiment 20001905 PARAMETER Experiment Name: At_Drought_Reproduction_P Parameter: Timepoint (day) Value: 10
  misc_feature: MA Experiment 20001905 PARAMETER Experiment Name: At_Drought_Reproduction_P Parameter: Tissue Value: Rosettes
  misc_feature: MA Experiment 20001905 PARAMETER Experiment Name: At_Drought_Reproduction_P Parameter: Treatment Value: Drought vs. No Drought
  misc_feature: MA Experiment ID: 20001906 Result: Down-regulated in Transcription
  misc_feature: MA Experiment 20001906 PARAMETER Experiment Name: At_Drought_Reproduction_P Parameter: Age (day) Value: 35
  misc_feature: MA Experiment 20001906 PARAMETER Experiment Name: At_Drought_Reproduction_P Parameter: Organism Value: A. thaliana
  misc_feature: MA Experiment 20001906 PARAMETER Experiment Name: At_Drought_Reproduction_P Parameter: Plant Line Value: WS
  misc_feature: MA Experiment 20001906 PARAMETER Experiment Name: At_Drought_Reproduction_P Parameter: Timepoint (day) Value: 5
  misc_feature: MA Experiment 20001906 PARAMETER Experiment Name: At_Drought_Reproduction_P Parameter: Tissue Value: Siliques
  misc_feature: MA Experiment 20001906 PARAMETER Experiment Name: At_Drought_Reproduction_P Parameter: Treatment Value: Drought vs. No Drought
agcccttttgattattactctttagtctttactttgctcacagctttggatcaccaaaaaaaaaactcaagagagactttgtggccatggcagcctctctccaatccaccgctacattcctccagtcggcgaagatcgccaccgctccttctcgcggaagttctcacctccgatcgactcaagccgtcggcaaatcctttgggctcgaaacttcctcggctcgcctcacttgctccttccagtctgactttaagaacttcaccggtaaatgctccgacgctgtcaaaatcgccggattcgctcttgccacctctgctctcgtcgtctcgggagcaagtgcggagggagctccaaagagattgacctatgatgagattcagagcaagacatacatggaagtgaaaggaactggaacggctaaccagtgccctactattgacggtggctctgagactttctcgttcaaacccggaaagtatgcaggaaagaagttctgcttcgagcctacttccttcaccgtcaaggcagacagtgtaagcaagaacgctcctccagagttccagaacacaaagctcatgacccgtcttacctacacccttgacgagatcgaaggacccttcgaggttgcttcagacggaagcgtcaatttcaaggaagaagatggaatcgactatgctgcagtcacagtccaacttccaggaggtgaacgtgtgccattccttttcacagtcaaacagcttgacgcctcaggcaaaccagacagcttcaccggaaaattcttggttccatcgtaccgtggctcttccttcttggacccaaagggccgtggtggatccacaggatatgacaacgccgtggcattgccagctggaggcagaggagacgaggaggagcttgtaaaggagaacgtgaagaacactgccgcttcagtgggagagatcactctgaaagtgacaaagagcaagccggagacaggagaggtgatcggagtgttcgagagtcttcagccgtcggatactgacttgggtgctaaggtaccaaaggatgtgaagatccaaggggtgtggtatggtcaacttgagtgatcatgttattatattttccgttgattgtgtttgatgataatgataacatcttttgatgctttcttcgtttatctctcttatataaaatgcacatgcctaagatcttgaattttctgt

SEQ ID NO: 23854 - protein, 332 aa, Arabidopsis thaliana
  peptide (1)..(332): Ceres Seq. ID no. 12602499
  misc_feature (96)..(332): Pfam Name: Manganese-stabilising protein / photosystem II Pfam Description: Manganese-stabilising protein / photosystem II
  misc_feature (1)..(332): Homolog of NCBI NO: 11134054 NR Description: Oxygen-evolving enhancer protein 1, chloroplast (OEE1) (33 kDa subunit of oxygen evolving system of photosystem (OEC 33 kDa subunit) (33 kDa thylakoid membrane protein) kDa
  misc_feature (1)..(332): Homolog of NCBI NO: 30013657 NR Description: oxygen evolving complex 33 kDa photosystem II
  misc_feature (1)..(332): Homolog of NCBI NO: 15230324 NR Description: photosystem II oxygen-evolving complex 33 (OEC33)
  misc_feature (1)..(332): Homolog of NCBI NO: 99745 NR Description: photosystem II oxygen-evolving complex protein 1
  misc_feature (1)..(332): Homolog of NCBI NO: 15451006 NR Description: 33 kDa polypeptide of oxygen-evolving complex
  misc_feature (1)..(332): Homolog of NCBI NO: 15912247 NR Description: AT5g66570/K1F13_25 [Arabidopsis thaliana]
  misc_feature (1)..(332): Homolog of NCBI NO: 13926291 NR Description: AT5g66570/K1F13_25 [Arabidopsis thaliana]
  misc_feature (1)..(332): Homolog of NCBI NO: 21593220 NR Description: 33 kDa polypeptide of oxygen-evolving complex
  misc_feature (1)..(332): Homolog of NCBI NO: 15240013 NR Description: photosystem II oxygen-evolving complex 33 (OEC33)
  misc_feature (1)..(332): Homolog of NCBI NO: 22530906 NR Description: 33 kDa polypeptide of oxygen-evolving complex
MAASLQSTATFLQSAKIATAPSRGSSHLRSTQAVGKSFGLETSSARLTCSFQSDFKNFTGKCSDAVKIAGFALATSALVVSGASAEGAPKRLTYDEIQSKTYMEVKGTGTANQCPTIDGGSETFSFKPGKYAGKKFCFEPTSFTVKADSVSKNAPPEFQNTKLMTRLTYTLDEIEGPFEVASDGSVNFKEEDGIDYAAVTVQLPGGERVPFLFTVKQLDASGKPDSFTGKFLVPSYRGSSFLDPKGRGGSTGYDNAVALPAGGRGDEEELVKENVKNTAASVGEITLKVTKSKPETGEVIGVFESLQPSDTDLGAKVPKDVKIQGVWYGQLE

SEQ ID NO: 23855 - protein, 230 aa, Arabidopsis thaliana
  peptide (1)..(230): Ceres Seq. ID no. 12602500
  misc_feature (1)..(230): Pfam Name: Manganese-stabilising protein / photosystem II Pfam Description: Manganese-stabilising protein / photosystem II
  misc_feature (1)..(230): Homolog of NCBI NO: 11134054 NR Description: Oxygen-evolving enhancer protein 1, chloroplast (OEE1) (33 kDa subunit of oxygen evolving system of photosystem (OEC 33 kDa subunit) (33 kDa thylakoid membrane protein) kDa
  misc_feature (1)..(230): Homolog of NCBI NO: 30013657 NR Description: oxygen evolving complex 33 kDa photosystem II
  misc_feature (1)..(230): Homolog of NCBI NO: 15230324 NR Description: photosystem II oxygen-evolving complex 33 (OEC33)
  misc_feature (1)..(230): Homolog of NCBI NO: 99745 NR Description: photosystem II oxygen-evolving complex protein 1
  misc_feature (1)..(230): Homolog of NCBI NO: 15451006 NR Description: 33 kDa polypeptide of oxygen-evolving complex
  misc_feature (1)..(230): Homolog of NCBI NO: 15912247 NR Description: AT5g66570/K1F13_25 [Arabidopsis thaliana]
  misc_feature (1)..(230): Homolog of NCBI NO: 13926291 NR Description: AT5g66570/K1F13_25 [Arabidopsis thaliana]
  misc_feature (1)..(230): Homolog of NCBI NO: 21593220 NR Description: 33 kDa polypeptide of oxygen-evolving complex
  misc_feature (1)..(230): Homolog of NCBI NO: 15240013 NR Description: photosystem II oxygen-evolving complex 33 (OEC33)
  misc_feature (1)..(230): Homolog of NCBI NO: 22530906 NR Description: 33 kDa polypeptide of oxygen-evolving complex
MEVKGTGTANQCPTIDGGSETFSFKPGKYAGKKFCFEPTSFTVKADSVSKNAPPEFQNTKLMTRLTYTLDEIEGPFEVASDGSVNFKEEDGIDYAAVTVQLPGGERVPFLFTVKQLDASGKPDSFTGKFLVPSYRGSSFLDPKGRGGSTGYDNAVALPAGGRGDEEELVKENVKNTAASVGEITLKVTKSKPETGEVIGVFESLQPSDTDLGAKVPKDVKIQGVWYGQLE

SEQ ID NO: 23856 - protein, 169 aa, Arabidopsis thaliana
  peptide (1)..(169): Ceres Seq. ID no. 12602501
  misc_feature (1)..(169): Pfam Name: Manganese-stabilising protein / photosystem II Pfam Description: Manganese-stabilising protein / photosystem II
  misc_feature (1)..(169): Homolog of NCBI NO: 11134054 NR Description: Oxygen-evolving enhancer protein 1, chloroplast (OEE1) (33 kDa subunit of oxygen evolving system of photosystem (OEC 33 kDa subunit) (33 kDa thylakoid membrane protein) kDa
  misc_feature (1)..(169): Homolog of NCBI NO: 30013657 NR Description: oxygen evolving complex 33 kDa photosystem II
  misc_feature (1)..(169): Homolog of NCBI NO: 15230324 NR Description: photosystem II oxygen-evolving complex 33 (OEC33)
  misc_feature (1)..(169): Homolog of NCBI NO: 99745 NR Description: photosystem II oxygen-evolving complex protein 1
  misc_feature (1)..(169): Homolog of NCBI NO: 15451006 NR Description: 33 kDa polypeptide of oxygen-evolving complex
  misc_feature (1)..(169): Homolog of NCBI NO: 15912247 NR Description: AT5g66570/K1F13_25 [Arabidopsis thaliana]
  misc_feature (1)..(169): Homolog of NCBI NO: 13926291 NR Description: AT5g66570/K1F13_25 [Arabidopsis thaliana]
  misc_feature (1)..(169): Homolog of NCBI NO: 21593220 NR Description: 33 kDa polypeptide of oxygen-evolving complex
  misc_feature (1)..(169): Homolog of NCBI NO: 15240013 NR Description: photosystem II oxygen-evolving complex 33 (OEC33)
  misc_feature (1)..(169): Homolog of NCBI NO: 22530906 NR Description: 33 kDa polypeptide of oxygen-evolving complex
MTRLTYTLDEIEGPFEVASDGSVNFKEEDGIDYAAVTVQLPGGERVPFLFTVKQLDASGKPDSFTGKFLVPSYRGSSFLDPKGRGGSTGYDNAVALPAGGRGDEEELVKENVKNTAASVGEITLKVTKSKPETGEVIGVFESLQPSDTDLGAKVPKDVKIQGVWYGQLE

SEQ ID NO: 23857 - DNA, 922 bp, Arabidopsis thaliana
  misc_feature (1)..(922): Ceres Seq. ID no. 12395771
  misc_feature: MA Experiment ID: 20000227 Result: Up-regulated in Transcription
  misc_feature: MA Experiment 20000227 PARAMETER Experiment Name: At_Root-Tips-vs-Tops_P Parameter: Tissue Value: Root Tips vs. Root Tops
  misc_feature: MA Experiment ID: 20000234 Result: Down-regulated in Transcription
  misc_feature: MA Experiment 20000234 PARAMETER Experiment Name: At_Siliques_P Parameter: Age (day) Value: 21
  misc_feature: MA Experiment 20000234 PARAMETER Experiment Name: At_Siliques_P Parameter: Organism Value: A. thaliana
  misc_feature: MA Experiment 20000234 PARAMETER Experiment Name: At_Siliques_P Parameter: Plant Line Value: WS
  misc_feature: MA Experiment 20000234 PARAMETER Experiment Name: At_Siliques_P Parameter: Tissue Value: Less Than 5mm Siliques vs. Whole Plant
  misc_feature: MA Experiment ID: 20001248 Result: Up-regulated in Transcription
  misc_feature: MA Experiment 20001248 PARAMETER Experiment Name: At_Far-red-induction_P Parameter: Age (day) Value: 7
  misc_feature: MA Experiment 20001248 PARAMETER Experiment Name: At_Far-red-induction_P Parameter: Light Value: Far-red vs. White
  misc_feature: MA Experiment 20001248 PARAMETER Experiment Name: At_Far-red-induction_P Parameter: Organism Value: A. thaliana
  misc_feature: MA Experiment 20001248 PARAMETER Experiment Name: At_Far-red-induction_P Parameter: Plant Line Value: Columbia
  misc_feature: MA Experiment 20001248 PARAMETER Experiment Name: At_Far-red-induction_P Parameter: Timepoint (hr) Value: 4
  misc_feature: MA Experiment 20001248 PARAMETER Experiment Name: At_Far-red-induction_P Parameter: Tissue Value: Whole Plant
  misc_feature: MA Experiment ID: 20001450 Result: Up-regulated in Transcription
  misc_feature: MA Experiment 20001450 PARAMETER Experiment Name: At_Far-red-induction_P Parameter: Age (day) Value: 7
  misc_feature: MA Experiment 20001450 PARAMETER Experiment Name: At_Far-red-induction_P Parameter: Light Value: Far-red vs. White
  misc_feature: MA Experiment 20001450 PARAMETER Experiment Name: At_Far-red-induction_P Parameter: Organism Value: A. thaliana
  misc_feature: MA Experiment 20001450 PARAMETER Experiment Name: At_Far-red-induction_P Parameter: Plant Line Value: Columbia
  misc_feature: MA Experiment 20001450 PARAMETER Experiment Name: At_Far-red-induction_P Parameter: Timepoint (hr) Value: 8
  misc_feature: MA Experiment 20001450 PARAMETER Experiment Name: At_Far-red-induction_P Parameter: Tissue Value: Whole Plant
  misc_feature: MA Experiment ID: 20001451 Result: Up-regulated in Transcription
  misc_feature: MA Experiment 20001451 PARAMETER Experiment Name: At_Far-red-induction_P Parameter: Age (day) Value: 7
  misc_feature: MA Experiment 20001451 PARAMETER Experiment Name: At_Far-red-induction_P Parameter: Light Value: Far-red vs. White
  misc_feature: MA Experiment 20001451 PARAMETER Experiment Name: At_Far-red-induction_P Parameter: Organism Value: A. thaliana
  misc_feature: MA Experiment 20001451 PARAMETER Experiment Name: At_Far-red-induction_P Parameter: Plant Line Value: Columbia
  misc_feature: MA Experiment 20001451 PARAMETER Experiment Name: At_Far-red-induction_P Parameter: Timepoint (hr) Value: 24
  misc_feature: MA Experiment 20001451 PARAMETER Experiment Name: At_Far-red-induction_P Parameter: Tissue Value: Whole Plant
tcgttctcgtcatcgtcttaaagaaggaattcgatttttcgcctgaacctgcggatttttcgattcttcaaattcaatgtcttatgcttatcttttcaagtatatcatcatcggcgatactggagtggggaaatcatgtcttctgcttcagttcaccgacaagaggtttcagccggtgcatgaccttaccattggtgttgaatttggggctaggatgatcaccatcgataacaaacctatcaagcttcagatctgggatacggctggtcaagaatcctttaggtctattacaaggtcatactatagaggagctgcaggggcattgcttgtctatgatatcacaaggagggagacatttaaccatctagctagctggctagaagatgcaaggcagcatgcaaatgcaaatatgacgataatgctcattgggaataagtgtgatcttgctcacagaagggcagtgagtacagaggaaggagagcagtttgcaaaggagcacggtcttatattcatggaggcctctgccaagactgctcagaatgttgaggaggcattcattaagacagctgcaacaatatacaagaagattcaagatggtgtgtttgatgtgtcaaatgagtcatatggaatcaaagttggatatggaggaattccaggaccatcaggtggaagagatggatcaacctcgcaaggaggagggtgctgcggctgagatgggaaaaatatgtctatatcattatgtaaaaatgatcattatgtaaaaatgatcacatatgatatagcaaaaatgtctctgcttctttctatagttgtaaatcgttttggaattcgatttggtgactgttgtggttggttttggaacggtttgacaatacacgtgtatgcctattcatatatctaaaagttaagatgtgttttgcgc

SEQ ID NO: 23858 - protein, 211 aa, Arabidopsis thaliana
  peptide (1)..(211): Ceres Seq. ID no. 12395772
  misc_feature (8)..(169): Pfam Name: Ras family Pfam Description: Ras family
  misc_feature (1)..(210): Homolog of NCBI NO: 1370176 NR Description: RAB2A [Lotus japonicus]
  misc_feature (1)..(210): Homolog of NCBI NO: 16755592 NR Description: small GTPase Rab2 [Nicotiana tabacum]
  misc_feature (1)..(208): Homolog of NCBI NO: 7438379 NR Description: GTP-binding protein RAB2A - Arabidopsis thaliana
  misc_feature (1)..(211): Homolog of NCBI NO: 15235981 NR Description: GTP-binding protein (At-RAB2); protein id:
MSYAYLFKYIIIGDTGVGKSCLLLQFTDKRFQPVHDLTIGVEFGARMITIDNKPIKLQIWDTAGQESFRSITRSYYRGAAGALLVYDITRRETFNHLASWLEDARQHANANMTIMLIGNKCDLAHRRAVSTEEGEQFAKEHGLIFMEASAKTAQNVEEAFIKTAATIYKKIQDGVFDVSNESYGIKVGYGGIPGPSGGRDGSTSQGGGCCG

SEQ ID NO: 23859 - protein, 165 aa, Arabidopsis thaliana
  peptide (1)..(165): Ceres Seq. ID no. 12395773
  misc_feature (1)..(123): Pfam Name: Ras family Pfam Description: Ras family
  misc_feature (1)..(164): Homolog of NCBI NO: 1370176 NR Description: RAB2A [Lotus japonicus]
  misc_feature (1)..(164): Homolog of NCBI NO: 16755592 NR Description: small GTPase Rab2 [Nicotiana tabacum]
  misc_feature (1)..(162): Homolog of NCBI NO: 7438379 NR Description: GTP-binding protein RAB2A - Arabidopsis thaliana
  misc_feature (1)..(165): Homolog of NCBI NO: 15235981 NR Description: GTP-binding protein (At-RAB2); protein id:
MITIDNKPIKLQIWDTAGQESFRSITRSYYRGAAGALLVYDITRRETFNHLASWLEDARQHANANMTIMLIGNKCDLAHRRAVSTEEGEQFAKEHGLIFMEASAKTAQNVEEAFIKTAATIYKKIQDGVFDVSNESYGIKVGYGGIPGPSGGRDGSTSQGGGCCG

SEQ ID NO: 23860 - DNA, 1273 bp, Arabidopsis thaliana
  misc_feature (1)..(1273): Ceres Seq. ID no. 12421943
  misc_feature: MA Experiment ID: 108461 Result: Down-regulated in Transcription
  misc_feature: MA Experiment 108461 PARAMETER Experiment Name: At_Germinating_Seeds_cDNA_P Parameter: Age (day) Value: 1 vs. 0
  misc_feature: MA Experiment 108461 PARAMETER Experiment Name: At_Germinating_Seeds_cDNA_P Parameter: Tissue Value: Germinating Seeds
  misc_feature: MA Experiment ID: 108462 Result: Down-regulated in Transcription
  misc_feature: MA Experiment 108462 PARAMETER Experiment Name: At_Germinating_Seeds_cDNA_P Parameter: Age (day) Value: 2 vs. 0
  misc_feature: MA Experiment 108462 PARAMETER Experiment Name: At_Germinating_Seeds_cDNA_P Parameter: Tissue Value: Germinating Seeds
  misc_feature: MA Experiment ID: 108463 Result: Down-regulated in Transcription
  misc_feature: MA Experiment 108463 PARAMETER Experiment Name: At_Germinating_Seeds_cDNA_P Parameter: Age (day) Value: 3 vs. 0
  misc_feature: MA Experiment 108463 PARAMETER Experiment Name: At_Germinating_Seeds_cDNA_P Parameter: Tissue Value: Germinating Seeds
  misc_feature: MA Experiment ID: 108464 Result: Down-regulated in Transcription
  misc_feature: MA Experiment 108464 PARAMETER Experiment Name: At_Germinating_Seeds_cDNA_P Parameter: Age (day) Value: 4 vs. 0
  misc_feature: MA Experiment 108464 PARAMETER Experiment Name: At_Germinating_Seeds_cDNA_P Parameter: Tissue Value: Germinating Seeds
  misc_feature: MA Experiment ID: 108569 Result: Up-regulated in Transcription
  misc_feature: MA Experiment 108569 PARAMETER Experiment Name: At_0.001%_MeJA__cDNA_P Parameter: Timepoint (hr) Value: 6
  misc_feature: MA Experiment 108569 PARAMETER Experiment Name: At_0.001%_MeJA__cDNA_P Parameter: Tissue Value: Aerial
  misc_feature: MA Experiment 108569 PARAMETER Experiment Name: At_0.001%_MeJA__cDNA_P Parameter: Treatment Value: 0.001% MeJA vs. No Treatment
  misc_feature: MA Experiment ID: 20000112 Result: Down-regulated in Transcription
  misc_feature: MA Experiment 20000112 PARAMETER Experiment Name: At_42deg_Heat_cDNA_P Parameter: Temperature (deg C) Value: 42 vs. 22
  misc_feature: MA Experiment 20000112 PARAMETER Experiment Name: At_42deg_Heat_cDNA_P Parameter: Timepoint (hr) Value: 2
  misc_feature: MA Experiment 20000112 PARAMETER Experiment Name: At_42deg_Heat_cDNA_P Parameter: Tissue Value: Aerial
  misc_feature: MA Experiment ID: 20000113 Result: Down-regulated in Transcription
  misc_feature: MA Experiment 20000113 PARAMETER Experiment Name: At_42deg_Heat_cDNA_P Parameter: Temperature (deg C) Value: 42 vs. 22
  misc_feature: MA Experiment 20000113 PARAMETER Experiment Name: At_42deg_Heat_cDNA_P Parameter: Timepoint (hr) Value: 8
  misc_feature: MA Experiment 20000113 PARAMETER Experiment Name: At_42deg_Heat_cDNA_P Parameter: Tissue Value: Aerial
  misc_feature: Phenotype: WHOLE PLANT Color-Dark Green
  misc_feature: Phenotype: WHOLE PLANT Size-Small
  misc_feature: Phenotype: WHOLE PLANT Size-Small
  misc_feature: Phenotype: WHOLE PLANT Color-Dark Green
  misc_feature: Phenotype: WHOLE PLANT Size-Small
  misc_feature: Phenotype: WHOLE PLANT Size-Small
  misc_feature: Phenotype: WHOLE PLANT Color-Dark Green
  misc_feature: Phenotype: WHOLE PLANT Size-Small
  misc_feature: Phenotype: WHOLE PLANT Size-Small
  misc_feature: Phenotype: WHOLE PLANT Color-Dark Green
  misc_feature: Phenotype: WHOLE PLANT Size-Small
  misc_feature: Phenotype: WHOLE PLANT Size-Small
  misc_feature: Phenotype: WHOLE PLANT Color-Dark Green
  misc_feature: Phenotype: WHOLE PLANT Size-Small
  misc_feature: Phenotype: WHOLE PLANT Size-Small
  misc_feature: Phenotype: WHOLE PLANT Color-Dark Green
  misc_feature: Phenotype: WHOLE PLANT Size-Small
  misc_feature: Phenotype: WHOLE PLANT Size-Small
  misc_feature: Phenotype: WHOLE PLANT Color-Dark Green
  misc_feature: Phenotype: WHOLE PLANT Size-Small
  misc_feature: Phenotype: WHOLE PLANT Size-Small
  misc_feature: Phenotype: WHOLE PLANT Size-Small
aaagatcaggtttcgatttcaccaaaaaccgaacactgtgtcttccgtcctaaagattgtaaagggaaaccgttttcgattttcagagaagatcacacatctttcgtcccttcactgccatacgtgtcgataaagatggcggctatggcggcgaagcttcagttatcggcgaaatctgatcaaagcagtgtgcgattaccgagagtgatcaacctctcccgcgatccaacgactagagtctcgtttccgcgaaatggatcagtttgttccctccacaccaatttctcttctccacatctcgcgaaaccttgcgccggaggtggtggtggtggaagcaccggtaataacggcggcggaagcggaagcggaggaggaggtggtggttttggaggttcagggggtgaagcaagtgaagaatcatctccatggggaccaatagggttattcatccaaggatggagatcaagagttgcagctgatcctcagttcccttttaaggtactaatggaagagatcgtaggacttagcgcttgtgttctcggtgacatggcttcacgacctaatttcggattaaacgagctagatttcgtcttctccacgctcgttgtaggttcgattctcaatttcgtactcatgtacatgttagctcctactgcagcaactcttggctcctctcagactttgcctggaatctttagaaactgtccatcaagccatatgtttgaacagggtagcttcaccgttatgaaccgtttcgggactcttgtgtacaaaggaatggtttttgctagtgtaggattagctgcaggtcttgtaggtactgccatttctaatggggttgattatgctgaggaagaagatggacccgagcttcgaaacgccaaacaaaccgccaccgactgtgcttaattctttaacttgggcaactcatatgggagtgagtgcgaatgcaaggtaccaaacgttgaatgggattgagttcttgctggcaaaggtgttgcccccattggtgtttaagacaagtgtgatagttttgaggtgtgcaaacaatgttgctggaggaatgtcgtttgttttgttggcaaggatgacgggatcacagtcggtggaggagaagacagagatgtcagagatttcagagaaagagaaggatgattgaatctcatcctagtctttcaaggtttttgttcctgtgtgtttttcgccagttcataggcttcttgagttgaaaccatttgtgttggaataaataagatgaatcccttcttaggcc

SEQ ID NO: 23861 - protein, 302 aa, Arabidopsis thaliana
  peptide (1)..(302): Ceres Seq. ID no. 12421944
  misc_feature (47)..(155): Pfam Name: Keratin Pfam Description: Keratin
  misc_feature (139)..(278): Homolog of NCBI NO: 34900644 NR Description: hypothetical protein~similar to Arabidopsis
  misc_feature (144)..(278): Homolog of NCBI NO: 30687286 NR Description: expressed protein [Arabidopsis thaliana]
  misc_feature (139)..(278): Homolog of NCBI NO: 34395170 NR Description: chloroplast lumen common protein family-like
  misc_feature (139)..(278): Homolog of NCBI NO: 32489853 NR Description: OSJNBb0065J09.13 [Oryza sativa (japonica
  misc_feature (139)..(278): Homolog of NCBI NO: 6934300 NR Description: unknown [Euphorbia esula]
  misc_feature (107)..(141): Homolog of NCBI NO: 15242979 NR Description: putative protein
  misc_feature (139)..(278): Homolog of NCBI NO: 15242979 NR Description: putative protein
  misc_feature (37)..(280): Homolog of NCBI NO: 34909204 NR Description: P0425G02.25 [Oryza sativa (japonica
  misc_feature (46)..(280): Homolog of NCBI NO: 15231950 NR Description: unknown protein; protein id: At3g08630.1
  misc_feature (46)..(280): Homolog of NCBI NO: 15231951 NR Description: unknown protein
KDQVSISPKTEHCVFRPKDCKGKPFSIFREDHTSFVPSLPYVSIKMAAMAAKLQLSAKSDQSSVRLPRVINLSRDPTTRVSFPRNGSVCSLHTNFSSPHLAKPCAGGGGGGSTGNNGGGSGSGGGGGGFGGSGGEASEESSPWGPIGLFIQGWRSRVAADPQFPFKVLMEEIVGLSACVLGDMASRPNFGLNELDFVFSTLVVGSILNFVLMYMLAPTAATLGSSQTLPGIFRNCPSSHMFEQGSFTVMNRFGTLVYKGMVFASVGLAAGLVGTAISNGVDYAEEEDGPELRNAKQTATDCA

SEQ ID NO: 23862 - protein, 257 aa, Arabidopsis thaliana
  peptide (1)..(257): Ceres Seq. ID no. 12421945
  misc_feature (2)..(110): Pfam Name: Keratin Pfam Description: Keratin
  misc_feature (94)..(233): Homolog of NCBI NO: 34900644 NR Description: hypothetical protein~similar to Arabidopsis
  misc_feature (99)..(233): Homolog of NCBI NO: 30687286 NR Description: expressed protein [Arabidopsis thaliana]
  misc_feature (94)..(233): Homolog of NCBI NO: 34395170 NR Description: chloroplast lumen common protein family-like
  misc_feature (94)..(233): Homolog of NCBI NO: 32489853 NR Description: OSJNBb0065J09.13 [Oryza sativa (japonica
  misc_feature (94)..(233): Homolog of NCBI NO: 6934300 NR Description: unknown [Euphorbia esula]
  misc_feature (62)..(96): Homolog of NCBI NO: 15242979 NR Description: putative protein
  misc_feature (94)..(233): Homolog of NCBI NO: 15242979 NR Description: putative protein
  misc_feature (1)..(235): Homolog of NCBI NO: 34909204 NR Description: P0425G02.25 [Oryza sativa (japonica
  misc_feature (1)..(235): Homolog of NCBI NO: 15231950 NR Description: unknown protein; protein id: At3g08630.1
  misc_feature (1)..(235): Homolog of NCBI NO: 15231951 NR Description: unknown protein
MAAMAAKLQLSAKSDQSSVRLPRVINLSRDPTTRVSFPRNGSVCSLHTNFSSPHLAKPCAGGGGGGSTGNNGGGSGSGGGGGGFGGSGGEASEESSPWGPIGLFIQGWRSRVAADPQFPFKVLMEEIVGLSACVLGDMASRPNFGLNELDFVFSTLVVGSILNFVLMYMLAPTAATLGSSQTLPGIFRNCPSSHMFEQGSFTVMNRFGTLVYKGMVFASVGLAAGLVGTAISNGVDYAEEEDGPELRNAKQTATDCA

SEQ ID NO: 23863 - protein, 254 aa, Arabidopsis thaliana
  peptide (1)..(254): Ceres Seq. ID no. 12421946
  misc_feature (1)..(107): Pfam Name: Keratin Pfam Description: Keratin
  misc_feature (91)..(230): Homolog of NCBI NO: 34900644 NR Description: hypothetical protein~similar to Arabidopsis
  misc_feature (96)..(230): Homolog of NCBI NO: 30687286 NR Description: expressed protein [Arabidopsis thaliana]
  misc_feature (91)..(230): Homolog of NCBI NO: 34395170 NR Description: chloroplast lumen common protein family-like
  misc_feature (91)..(230): Homolog of NCBI NO: 32489853 NR Description: OSJNBb0065J09.13 [Oryza sativa (japonica
  misc_feature (91)..(230): Homolog of NCBI NO: 6934300 NR Description: unknown [Euphorbia esula]
  misc_feature (59)..(93): Homolog of NCBI NO: 15242979 NR Description: putative protein
  misc_feature (91)..(230): Homolog of NCBI NO: 15242979 NR Description: putative protein
  misc_feature (1)..(232): Homolog of NCBI NO: 34909204 NR Description: P0425G02.25 [Oryza sativa (japonica
  misc_feature (1)..(232): Homolog of NCBI NO: 15231950 NR Description: unknown protein; protein id: At3g08630.1
  misc_feature (1)..(232): Homolog of NCBI NO: 15231951 NR Description: unknown protein
MAAKLQLSAKSDQSSVRLPRVINLSRDPTTRVSFPRNGSVCSLHTNFSSPHLAKPCAGGGGGGSTGNNGGGSGSGGGGGGFGGSGGEASEESSPWGPIGLFIQGWRSRVAADPQFPFKVLMEEIVGLSACVLGDMASRPNFGLNELDFVFSTLVVGSILNFVLMYMLAPTAATLGSSQTLPGIFRNCPSSHMFEQGSFTVMNRFGTLVYKGMVFASVGLAAGLVGTAISNGVDYAEEEDGPELRNAKQTATDCA

SEQ ID NO: 23864 - DNA, 1209 bp, Arabidopsis thaliana
  misc_feature (1)..(1209): Ceres Seq. ID no. 12324683
  misc_feature: MA Experiment ID: 20000264 Result: Up-regulated in Transcription
  misc_feature: MA Experiment 20000264 PARAMETER Experiment Name: At_Open_Flower_P Parameter: Age (day) Value: 21
  misc_feature: MA Experiment 20000264 PARAMETER Experiment Name: At_Open_Flower_P Parameter: Plant Line Value: WS
  misc_feature: MA Experiment 20000264 PARAMETER Experiment Name: At_Open_Flower_P Parameter: Tissue Value: Open Flower vs. Whole Plant
  misc_feature: MA Experiment ID: 20000265 Result: Up-regulated in Transcription
  misc_feature: MA Experiment 20000265 PARAMETER Experiment Name: At_Open_Flower_P Parameter: Age (day) Value: 21
  misc_feature: MA Experiment 20000265 PARAMETER Experiment Name: At_Open_Flower_P Parameter: Plant Line Value: WS
  misc_feature: MA Experiment 20000265 PARAMETER Experiment Name: At_Open_Flower_P Parameter: Tissue Value: Closed Flower vs. Whole Plant
  misc_feature: MA Experiment ID: 20000286 Result: Up-regulated in Transcription
  misc_feature: MA Experiment 20000286 PARAMETER Experiment Name: At_Open_Flower_P Parameter: Age (day) Value: 21
  misc_feature: MA Experiment 20000286 PARAMETER Experiment Name: At_Open_Flower_P Parameter: Plant Line Value: WS
  misc_feature: MA Experiment 20000286 PARAMETER Experiment Name: At_Open_Flower_P Parameter: Tissue Value: Half Open vs. Whole Plant
  misc_feature: MA Experiment ID: 20000794 Result: Up-regulated in Transcription
  misc_feature: MA Experiment 20000794 PARAMETER Experiment Name: At_Petals_P Parameter: Age (day) Value: 23-25 days
  misc_feature: MA Experiment 20000794 PARAMETER Experiment Name: At_Petals_P Parameter: Plant Line Value: WS
  misc_feature: MA Experiment 20000794 PARAMETER Experiment Name: At_Petals_P Parameter: Tissue Value: Petals vs. Whole plant
  misc_feature: MA Experiment ID: 20001910 Result: Up-regulated in Transcription
  misc_feature: MA Experiment 20001910 PARAMETER Experiment Name: At_Drought_Reproduction_P Parameter: Age (day) Value: 37
  misc_feature: MA Experiment 20001910 PARAMETER Experiment Name: At_Drought_Reproduction_P Parameter: Organism Value: A. thaliana
  misc_feature: MA Experiment 20001910 PARAMETER Experiment Name: At_Drought_Reproduction_P Parameter: Plant Line Value: WS
  misc_feature: MA Experiment 20001910 PARAMETER Experiment Name: At_Drought_Reproduction_P Parameter: Timepoint (day) Value: 7
  misc_feature: MA Experiment 20001910 PARAMETER Experiment Name: At_Drought_Reproduction_P Parameter: Tissue Value: Flowers
  misc_feature: MA Experiment 20001910 PARAMETER Experiment Name: At_Drought_Reproduction_P Parameter: Treatment Value: Drought vs. No Drought
  misc_feature: MA Experiment ID: 20001911 Result: Up-regulated in Transcription
  misc_feature: MA Experiment 20001911 PARAMETER Experiment Name: At_Drought_Reproduction_P Parameter: Age (day) Value: 40
  misc_feature: MA Experiment 20001911 PARAMETER Experiment Name: At_Drought_Reproduction_P Parameter: Organism Value: A. thaliana
  misc_feature: MA Experiment 20001911 PARAMETER Experiment Name: At_Drought_Reproduction_P Parameter: Plant Line Value: WS
  misc_feature: MA Experiment 20001911 PARAMETER Experiment Name: At_Drought_Reproduction_P Parameter: Timepoint (day) Value: 10
  misc_feature: MA Experiment 20001911 PARAMETER Experiment Name: At_Drought_Reproduction_P Parameter: Tissue Value: Flowers
  misc_feature: MA Experiment 20001911 PARAMETER Experiment Name: At_Drought_Reproduction_P Parameter: Treatment Value: Drought vs. No Drought
aaccccattaaccgtttcaaaaggaaattaaggagttgttcatagtttcgtttgtaaattgcaattgtaagtttgtaactgtaatagaattagattatttagggtttgcttgatcctcgatctgtgatcgattgatctcgcttcgcacccagcaggtttatttaatgagcgtgaaagatggctaagataatgcttggatctcactcggttaagagccatggatggaaggtggctcgtgaacatctttgtgactggctcatcctcgtagtcctcggtctcatcgacattgtactcaatgttatcgagccttttcatcgctatattggacctgacatgttaaccgatctcactttcccattttatgaagacaccatccctatgtgggctgtcccgattatttgtatattggttccgatatgcatcttcatagtgtactattactatcgaagagatgtttatgatcttcatcacgccattctcggtatcggattctcatgtcttgtgactggagtcaccactgattccatcaaagacgcggtcggtaggccacgccctaacttcttttaccgatgttttcccaatggtaaaccgaaatttcatccggatactaaggatgttgtgtgtcatggagttaaaaagataatcaaagaaggttacaagagtttccctagtggtcacacttcatggtcattcgctggtttaactttcctagcgtggtacttatcgggtaaaatcaaagtctttgacagaagaggtcacgtggcgaagctatgcctcgtgttcttaccgatactcatatcaattctcatcggaatatcacgcgtagacgactattggcaccattggaccgatgtcttcgccggagctatcatcggaatttttgtcgcttctttctcttacctccacttttttccttacccttacgacgaaaacggatgggctccacatgcgtattttagaatgttggcggagaggagcactggtcgagccacgacgatgactcgaaccggttctcgaggaatgttggacaacgacgttgagcctggcaactccgcgtcctcgccgcacgatcgccaccgtgaaagcactgattctgacttttgaaaatttcctccacaatgttttaaaaaaaagaagttaattatccgtgtaatttttaattgtatgattgttttcacttactgatatataatatgtatacttttcatt

SEQ ID NO: 23865 - protein, 308 aa, Arabidopsis thaliana
  peptide (1)..(308): Ceres Seq. ID no. 12324684
  misc_feature (73)..(249): Pfam Name: PAP2 superfamily Pfam Description: PAP2 superfamily
  misc_feature (73)..(249): Pfam Name: PAP2 superfamily Pfam Description: PAP2 superfamily
  misc_feature (1)..(278): Homolog of NCBI NO: 15724220 NR Description: At2g01180/F10A8.6 [Arabidopsis thaliana]
  misc_feature (1)..(278): Homolog of NCBI NO: 21554001 NR Description: putative phosphatidic acid phosphatase
  misc_feature (1)..(269): Homolog of NCBI NO: 38637527 NR Description: putative phosphatidic acid phosphatase beta
  misc_feature (3)..(297): Homolog of NCBI NO: 9621903 NR Description: phosphatidic acid phosphatase alpha [Vigna
  misc_feature (1)..(298): Homolog of NCBI NO: 38637528 NR Description: unknown protein [Oryza sativa (japonica
  misc_feature (1)..(278): Homolog of NCBI NO: 15724220 NR Description: At2g01180/F10A8.6 [Arabidopsis thaliana]
  misc_feature (1)..(269): Homolog of NCBI NO: 38637527 NR Description: putative phosphatidic acid phosphatase beta
  misc_feature (1)..(298): Homolog of NCBI NO: 38637528 NR Description: unknown protein [Oryza sativa (japonica
  misc_feature (1)..(308): Homolog of NCBI NO: 21593222 NR Description: diacylglycerol pyrophosphate phosphatase,
  misc_feature (1)..(308): Homolog of NCBI NO: 18401811 NR Description: diacylglycerol pyrophosphate phosphatase, putative
  misc_feature (1)..(308): Homolog of NCBI NO: 9279656 NR Description: phosphatidic acid phosphatase-like protein
  misc_feature (1)..(265): Homolog of NCBI NO: 15218051 NR Description: putative phosphatidic acid phosphatase
  misc_feature (1)..(269): Homolog of NCBI NO: 10673973 NR Description: phosphatidic acid phosphatase beta [Vigna
  misc_feature (3)..(297): Homolog of NCBI NO: 9621903 NR Description: phosphatidic acid phosphatase alpha [Vigna
  misc_feature (1)..(278): Homolog of NCBI NO: 21554001 NR Description: putative phosphatidic acid phosphatase
  misc_feature (1)..(269): Homolog of NCBI NO: 10673973 NR Description: phosphatidic acid phosphatase beta [Vigna
  misc_feature (1)..(265): Homolog of NCBI NO: 15218051 NR Description: putative phosphatidic acid phosphatase
  misc_feature (1)..(308): Homolog of NCBI NO: 9279656 NR Description: phosphatidic acid phosphatase-like protein
  misc_feature (1)..(308): Homolog of NCBI NO: 18401811 NR Description: diacylglycerol pyrophosphate phosphatase, putative
  misc_feature (1)..(308): Homolog of NCBI NO: 21593222 NR Description: diacylglycerol pyrophosphate phosphatase,
MAKIMLGSHSVKSHGWKVAREHLCDWLILVVLGLIDIVLNVIEPFHRYIGPDMLTDLTFPFYEDTIPMWAVPIICILVPICIFIVYYYYRRDVYDLHHAILGIGFSCLVTGVTTDSIKDAVGRPRPNFFYRCFPNGKPKFHPDTKDVVCHGVKKIIKEGYKSFPSGHTSWSFAGLTFLAWYLSGKIKVFDRRGHVAKLCLVFLPILISILIGISRVDDYWHHWTDVFAGAIIGIFVASFSYLHFFPYPYDENGWAPHAYFRMLAERSTGRATTMTRTGSRGMLDNDVEPGNSASSPHDRHRESTDSDF

SEQ ID NO: 23866 - protein, 304 aa, Arabidopsis thaliana
  peptide (1)..(304): Ceres Seq. ID no. 12324685
  misc_feature (69)..(245): Pfam Name: PAP2 superfamily Pfam Description: PAP2 superfamily
  misc_feature (69)..(245): Pfam Name: PAP2 superfamily Pfam Description: PAP2 superfamily
  misc_feature (1)..(274): Homolog of NCBI NO: 15724220 NR Description: At2g01180/F10A8.6 [Arabidopsis thaliana]
  misc_feature (1)..(274): Homolog of NCBI NO: 21554001 NR Description: putative phosphatidic acid phosphatase
  misc_feature (1)..(265): Homolog of NCBI NO: 38637527 NR Description: putative phosphatidic acid phosphatase beta
  misc_feature (1)..(293): Homolog of NCBI NO: 9621903 NR Description: phosphatidic acid phosphatase alpha [Vigna
  misc_feature (1)..(294): Homolog of NCBI NO: 38637528 NR Description: unknown protein [Oryza sativa (japonica
  misc_feature (1)..(274): Homolog of NCBI NO: 21554001 NR Description: putative phosphatidic acid phosphatase
  misc_feature (1)..(293): Homolog of NCBI NO: 9621903 NR Description: phosphatidic acid phosphatase alpha [Vigna
  misc_feature (1)..(304): Homolog of NCBI NO: 21593222 NR Description: diacylglycerol pyrophosphate phosphatase,
  misc_feature (1)..(304): Homolog of NCBI NO: 18401811 NR Description: diacylglycerol pyrophosphate phosphatase, putative
  misc_feature (1)..(304): Homolog of NCBI NO: 9279656 NR Description: phosphatidic acid phosphatase-like protein
  misc_feature (1)..(261): Homolog of NCBI NO: 15218051 NR Description: putative phosphatidic acid phosphatase
  misc_feature (1)..(265): Homolog of NCBI NO: 10673973 NR Description: phosphatidic acid phosphatase beta [Vigna
  misc_feature (1)..(294): Homolog of NCBI NO: 38637528 NR Description: unknown protein [Oryza sativa (japonica
  misc_feature (1)..(265): Homolog of NCBI NO: 38637527 NR Description: putative phosphatidic acid phosphatase beta
  misc_feature (1)..(274): Homolog of NCBI NO: 15724220 NR Description: At2g01180/F10A8.6 [Arabidopsis thaliana]
  misc_feature (1)..(265): Homolog of NCBI NO: 10673973 NR Description: phosphatidic acid phosphatase beta [Vigna
  misc_feature (1)..(261): Homolog of NCBI NO: 15218051 NR Description: putative phosphatidic acid phosphatase
  misc_feature (1)..(304): Homolog of NCBI NO: 9279656 NR Description: phosphatidic acid phosphatase-like protein
  misc_feature (1)..(304): Homolog of NCBI NO: 18401811 NR Description: diacylglycerol pyrophosphate phosphatase, putative
  misc_feature (1)..(304): Homolog of NCBI NO: 21593222 NR Description: diacylglycerol pyrophosphate phosphatase,
MLGSHSVKSHGWKVAREHLCDWLILVVLGLIDIVLNVIEPFHRYIGPDMLTDLTFPFYEDTIPMWAVPIICILVPICIFIVYYYYRRDVYDLHHAILGIGFSCLVTGVTTDSIKDAVGRPRPNFFYRCFPNGKPKFHPDTKDVVCHGVKKIIKEGYKSFPSGHTSWSFAGLTFLAWYLSGKIKVFDRRGHVAKLCLVFLPILISILIGISRVDDYWHHWTDVFAGAIIGIFVASFSYLHFFPYPYDENGWAPHAYFRMLAERSTGRATTMTRTGSRGMLDNDVEPGNSASSPHDRHRESTDSDF

SEQ ID NO: 23867 - protein, 256 aa, Arabidopsis thaliana
  peptide (1)..(256): Ceres Seq. ID no. 12324686
  misc_feature (21)..(197): Pfam Name: PAP2 superfamily Pfam Description: PAP2 superfamily
  misc_feature (21)..(197): Pfam Name: PAP2 superfamily Pfam Description: PAP2 superfamily
  misc_feature (1)..(226): Homolog of NCBI NO: 15724220 NR Description: At2g01180/F10A8.6 [Arabidopsis thaliana]
  misc_feature (1)..(226): Homolog of NCBI NO: 21554001 NR Description: putative phosphatidic acid phosphatase
  misc_feature (1)..(217): Homolog of NCBI NO: 38637527 NR Description: putative phosphatidic acid phosphatase beta
  misc_feature (1)..(245): Homolog of NCBI NO: 9621903 NR Description: phosphatidic acid phosphatase alpha [Vigna
  misc_feature (1)..(246): Homolog of NCBI NO: 38637528 NR Description: unknown protein [Oryza sativa (japonica
  misc_feature (1)..(226): Homolog of NCBI NO: 15724220 NR Description: At2g01180/F10A8.6 [Arabidopsis thaliana]
  misc_feature (1)..(217): Homolog of NCBI NO: 38637527 NR Description: putative phosphatidic acid phosphatase beta
  misc_feature (1)..(246): Homolog of NCBI NO: 38637528 NR Description: unknown protein [Oryza sativa (japonica
  misc_feature (1)..(256): Homolog of NCBI NO: 21593222 NR Description: diacylglycerol pyrophosphate phosphatase,
  misc_feature (1)..(256): Homolog of NCBI NO: 18401811 NR Description: diacylglycerol pyrophosphate phosphatase, putative
  misc_feature (1)..(256): Homolog of NCBI NO: 9279656 NR Description: phosphatidic acid phosphatase-like protein
  misc_feature (1)..(213): Homolog of NCBI NO: 15218051 NR Description: putative phosphatidic acid phosphatase
  misc_feature (1)..(217): Homolog of NCBI NO: 10673973 NR Description: phosphatidic acid phosphatase beta [Vigna
  misc_feature (1)..(245): Homolog of NCBI NO: 9621903 NR Description: phosphatidic acid phosphatase alpha [Vigna
  misc_feature (1)..(226): Homolog of NCBI NO: 21554001 NR Description: putative phosphatidic acid phosphatase
  misc_feature (1)..(217): Homolog of NCBI NO: 10673973 NR Description: phosphatidic acid phosphatase beta [Vigna
  misc_feature (1)..(213): Homolog of NCBI NO: 15218051 NR Description: putative phosphatidic acid phosphatase
  misc_feature (1)..(256): Homolog of NCBI NO: 9279656 NR Description: phosphatidic acid phosphatase-like protein
  misc_feature (1)..(256): Homolog of NCBI NO: 18401811 NR Description: diacylglycerol pyrophosphate phosphatase, putative
  misc_feature (1)..(256): Homolog of NCBI NO: 21593222 NR Description: diacylglycerol pyrophosphate phosphatase,
MLTDLTFPFYEDTIPMWAVPIICILVPICIFIVYYYYRRDVYDLHHAILGIGFSCLVTGVTTDSIKDAVGRPRPNFFYRCFPNGKPKFHPDTKDVVCHGVKKIIKEGYKSFPSGHTSWSFAGLTFLAWYLSGKIKVFDRRGHVAKLCLVFLPILISILIGISRVDDYWHHWTDVFAGAIIGIFVASFSYLHFFPYPYDENGWAPHAYFRMLAERSTGRATTMTRTGSRGMLDNDVEPGNSASSPHDRHRESTDSDF

SEQ ID NO: 23868 - DNA, 888 bp, Arabidopsis thaliana
  misc_feature (1)..(888): Ceres Seq. ID no. 13504847
  misc_feature: MA Experiment ID: 108435 Result: Down-regulated in Transcription
  misc_feature: MA Experiment 108435 PARAMETER Experiment Name: At_stm_Mutants_cDNA_P Parameter: Plant Line Value: wt Landsburg vs stm
  misc_feature: MA Experiment 108435 PARAMETER Experiment Name: At_stm_Mutants_cDNA_P Parameter: Tissue Value: Shoot Apical Meristem Region
  misc_feature: MA Experiment ID: 108462 Result: Down-regulated in Transcription
  misc_feature: MA Experiment 108462 PARAMETER Experiment Name: At_Germinating_Seeds_cDNA_P Parameter: Age (day) Value: 2 vs. 0
  misc_feature: MA Experiment 108462 PARAMETER Experiment Name: At_Germinating_Seeds_cDNA_P Parameter: Tissue Value: Germinating Seeds
  misc_feature: MA Experiment ID: 108595 Result: Up-regulated in Transcription
  misc_feature: MA Experiment 108595 PARAMETER Experiment Name: At_Ler-pi_Ovule_cDNA_P Parameter: Plant Line Value: null
  misc_feature: MA Experiment ID: 20000180 Result: Down-regulated in Transcription
  misc_feature: MA Experiment 20000180 PARAMETER Experiment Name: At_Germinating_Seeds_P Parameter: Age (hr) Value: 24 vs. 0
  misc_feature: MA Experiment 20000180 PARAMETER Experiment Name: At_Germinating_Seeds_P Parameter: Tissue Value: Germinating Seeds
  misc_feature: MA Experiment ID: 20000184 Result: Up-regulated in Transcription
  misc_feature: MA Experiment 20000184 PARAMETER Experiment Name: At_Shoots__P Parameter: Age (day) Value: 7
  misc_feature: MA Experiment 20000184 PARAMETER Experiment Name: At_Shoots__P Parameter: Tissue Value: Shoots vs. Whole Plant
  misc_feature: MA Experiment ID: 20000185 Result: Up-regulated in Transcription
  misc_feature: MA Experiment 20000185 PARAMETER Experiment Name: At_Roots__P Parameter: Age (day) Value: 7 vs. 21
  misc_feature: MA Experiment 20000185 PARAMETER Experiment Name: At_Roots__P Parameter: Organism Value: A. thaliana
  misc_feature: MA Experiment 20000185 PARAMETER Experiment Name: At_Roots__P Parameter: Tissue Value: Roots vs. Whole Plant
  misc_feature: MA Experiment ID: 20000224 Result: Up-regulated in Transcription
  misc_feature: MA Experiment ID: 20000234 Result: Up-regulated in Transcription
  misc_feature: MA Experiment 20000234 PARAMETER Experiment Name: At_Siliques_P Parameter: Age (day) Value: 21
  misc_feature: MA Experiment 20000234 PARAMETER Experiment Name: At_Siliques_P Parameter: Organism Value: A. thaliana
  misc_feature: MA Experiment 20000234 PARAMETER Experiment Name: At_Siliques_P Parameter: Plant Line Value: WS
  misc_feature: MA Experiment 20000234 PARAMETER Experiment Name: At_Siliques_P Parameter: Tissue Value: Less Than 5mm Siliques vs. Whole Plant
  misc_feature: MA Experiment ID: 20000235 Result: Up-regulated in Transcription
  misc_feature: MA Experiment 20000235 PARAMETER Experiment Name: At_Siliques_P Parameter: Age (day) Value: 21
  misc_feature: MA Experiment 20000235 PARAMETER Experiment Name: At_Siliques_P Parameter: Organism Value: A. thaliana
  misc_feature: MA Experiment 20000235 PARAMETER Experiment Name: At_Siliques_P Parameter: Plant Line Value: WS
  misc_feature: MA Experiment 20000235 PARAMETER Experiment Name: At_Siliques_P Parameter: Tissue Value: 5-10mm Siliques vs. Whole Plant
  misc_feature: MA Experiment ID: 20000439 Result: Up-regulated in Transcription
  misc_feature: MA Experiment 20000439 PARAMETER Experiment Name: At_Roots__P Parameter: Age (day) Value: 14 vs. 21
  misc_feature: MA Experiment 20000439 PARAMETER Experiment Name: At_Roots__P Parameter: Organism Value: A. thaliana
  misc_feature: MA Experiment 20000439 PARAMETER Experiment Name: At_Roots__P Parameter: Tissue Value: Roots vs. Whole Plant
  misc_feature: MA Experiment ID: 20000527 Result: Down-regulated in Transcription
  misc_feature: MA Experiment 20000527 PARAMETER Experiment Name: At_10percent_PEG_P Parameter: Age (day) Value: 20
  misc_feature: MA Experiment 20000527 PARAMETER Experiment Name: At_10percent_PEG_P Parameter: Organism Value: A. thaliana
  misc_feature: MA Experiment 20000527 PARAMETER Experiment Name: At_10percent_PEG_P Parameter: Plant Line Value: WS
  misc_feature: MA Experiment 20000527 PARAMETER Experiment Name: At_10percent_PEG_P Parameter: Timepoint (day) Value: 20
  misc_feature: MA Experiment 20000527 PARAMETER Experiment Name: At_10percent_PEG_P Parameter: Tissue Value: Whole Plant
  misc_feature: MA Experiment 20000527 PARAMETER Experiment Name: At_10percent_PEG_P Parameter: Treatment Value: 10percent PEG vs. No Treatment
  misc_feature: MA Experiment ID: 20001248 Result: Up-regulated in Transcription
  misc_feature: MA Experiment 20001248 PARAMETER Experiment Name: At_Far-red-induction_P Parameter: Age (day) Value: 7
  misc_feature: MA Experiment 20001248 PARAMETER Experiment Name: At_Far-red-induction_P Parameter: Light Value: Far-red vs. White
  misc_feature: MA Experiment 20001248 PARAMETER Experiment Name: At_Far-red-induction_P Parameter: Organism Value: A. thaliana
  misc_feature: MA Experiment 20001248 PARAMETER Experiment Name: At_Far-red-induction_P Parameter: Plant Line Value: Columbia
  misc_feature: MA Experiment 20001248 PARAMETER Experiment Name: At_Far-red-induction_P Parameter: Timepoint (hr) Value: 4
  misc_feature: MA Experiment 20001248 PARAMETER Experiment Name: At_Far-red-induction_P Parameter: Tissue Value: Whole Plant
atcttcttaaacccaaacgttcaagaaaaagaaaaaaaaacgatacttacgatgagtgcggtaaaatcggcgttaggtgatatggtgataacctttttgtgggttattctctcggcgacgtttgggatacagacggcggcgattgtttccgccgtagggtttcatggtatcacttgggctcctcttgtgatctcaacgttggttgtttttgtctccatctcgatttttacggttattggaaacgttcttggtggtgctagcttcaatccttgtggaaacgcagcgttttataccgccggtgtttccagtgattctctcttctccttggccattagatctcctgctcaggcaattggtgcggcaggcggtgcgataacgatcatggagatgataccggaaaagtataagactaggattggaggaaagccttcattgcaatttggtgcacacaatggagctatttctgaagtggtcctaagttttagtgttacatttttggttttactaattatcctaagaggtcctcgaaaactgctcgcgaaaacgttcttgctcgcactcgctaccgtatcggtgtttgtcgtaggttctaaattcactagaccattcatgaatcctgccattgcgtttgggtgggcatatatctacaagtctcacaacacatgggaccatttttatgtgtattggatcagctcctacaccggagctattttatctgcgatgctctttagaattatatttccggctccacctctggttcagaaaaaacagaagaaagcttgagaaaaaaatggaaaaatctaagtaaaaatttcatgaatcataatcccatttgttgtatgttttatgctgttgtcgtatttgtacttaatttatagtttatagccc

SEQ ID NO: 23869 - protein, 260 aa, Arabidopsis thaliana
  peptide (1)..(260): Ceres Seq. ID no. 13504848
  misc_feature (20)..(243): Pfam Name: Major intrinsic protein Pfam Description: Major intrinsic protein
  misc_feature (11)..(255): Homolog of NCBI NO: 18411332 NR Description: transmembrane protein (MIP family) [Arabidopsis
  misc_feature (11)..(255): Homolog of NCBI NO: 21593526 NR Description: water channel-like protein [Arabidopsis thaliana]
  misc_feature (87)..(251): Homolog of NCBI NO: 15811692 NR Description: aquaporin [Pyrocoelia rufa]
  misc_feature (25)..(258): Homolog of NCBI NO: 13447817 NR Description: small basic membrane integral protein ZmSIP2-1
  misc_feature (18)..(258): Homolog of NCBI NO: 15230175 NR Description: expressed protein [Arabidopsis thaliana]
  misc_feature (16)..(260): Homolog of NCBI NO: 13447813 NR Description: small basic membrane integral protein ZmSIP1-1
  misc_feature (16)..(260): Homolog of NCBI NO: 34906220 NR Description: P0666G04.16 [Oryza sativa (japonica
  misc_feature (20)..(260): Homolog of NCBI NO: 13447815 NR Description: small basic membrane integral protein ZmSIP1-2
  misc_feature (18)..(260): Homolog of NCBI NO: 15229225 NR Description: major intrinsic protein (MIP) family [Arabidopsis
  misc_feature (18)..(260): Homolog of NCBI NO: 15238785 NR Description: expressed protein [Arabidopsis thaliana]
IFLNPNVQEKEKKTILTMSAVKSALGDMVITFLWVILSATFGIQTAAIVSAVGFHGITWAPLVISTLVVFVSISIFTVIGNVLGGASFNPCGNAAFYTAGVSSDSLFSLAIRSPAQAIGAAGGAITIMEMIPEKYKTRIGGKPSLQFGAHNGAISEVVLSFSVTFLVLLIILRGPRKLLAKTFLLALATVSVFVVGSKFTRPFMNPAIAFGWAYIYKSHNTWDHFYVYWISSYTGAILSAMLFRIIFPAPPLVQKKQKKA

SEQ ID NO: 23870 - protein, 243 aa, Arabidopsis thaliana
  peptide (1)..(243): Ceres Seq. ID no. 13504849
  misc_feature (3)..(226): Pfam Name: Major intrinsic protein Pfam Description: Major intrinsic protein
  misc_feature (1)..(238): Homolog of NCBI NO: 18411332 NR Description: transmembrane protein (MIP family) [Arabidopsis
  misc_feature (1)..(238): Homolog of NCBI NO: 21593526 NR Description: water channel-like protein [Arabidopsis thaliana]
  misc_feature (70)..(234): Homolog of NCBI NO: 15811692 NR Description: aquaporin [Pyrocoelia rufa]
  misc_feature (8)..(241): Homolog of NCBI NO: 13447817 NR Description: small basic membrane integral protein ZmSIP2-1
  misc_feature (1)..(241): Homolog of NCBI NO: 15230175 NR Description: expressed protein [Arabidopsis thaliana]
  misc_feature (1)..(243): Homolog of NCBI NO: 13447813 NR Description: small basic membrane integral protein ZmSIP1-1
  misc_feature (1)..(243): Homolog of NCBI NO: 34906220 NR Description: P0666G04.16 [Oryza sativa (japonica
  misc_feature (3)..(243): Homolog of NCBI NO: 13447815 NR Description: small basic membrane integral protein ZmSIP1-2
  misc_feature (1)..(243): Homolog of NCBI NO: 15229225 NR Description: major intrinsic protein (MIP) family [Arabidopsis
  misc_feature (1)..(243): Homolog of NCBI NO: 15238785 NR Description: expressed protein [Arabidopsis thaliana]
MSAVKSALGDMVITFLWVILSATFGIQTAAIVSAVGFHGITWAPLVISTLVVFVSISIFTVIGNVLGGASFNPCGNAAFYTAGVSSDSLFSLAIRSPAQAIGAAGGAITIMEMIPEKYKTRIGGKPSLQFGAHNGAISEVVLSFSVTFLVLLIILRGPRKLLAKTFLLALATVSVFVVGSKFTRPFMNPAIAFGWAYIYKSHNTWDHFYVYWISSYTGAILSAMLFRIIFPAPPLVQKKQKKA

SEQ ID NO: 23871 - protein, 233 aa, Arabidopsis thaliana
  peptide (1)..(233): Ceres Seq. ID no. 13504850
  misc_feature (1)..(216): Pfam Name: Major intrinsic protein Pfam Description: Major intrinsic protein
  misc_feature (1)..(228): Homolog of NCBI NO: 18411332 NR Description: transmembrane protein (MIP family) [Arabidopsis
  misc_feature (1)..(228): Homolog of NCBI NO: 21593526 NR Description: water channel-like protein [Arabidopsis thaliana]
  misc_feature (60)..(224): Homolog of NCBI NO: 15811692 NR Description: aquaporin [Pyrocoelia rufa]
  misc_feature (1)..(231): Homolog of NCBI NO: 13447817 NR Description: small basic membrane integral protein ZmSIP2-1
  misc_feature (1)..(231): Homolog of NCBI NO: 15230175 NR Description: expressed protein [Arabidopsis thaliana]
  misc_feature (1)..(233): Homolog of NCBI NO: 13447813 NR Description: small basic membrane integral protein ZmSIP1-1
  misc_feature (1)..(233): Homolog of NCBI NO: 34906220 NR Description: P0666G04.16 [Oryza sativa (japonica
  misc_feature (1)..(233): Homolog of NCBI NO: 13447815 NR Description: small basic membrane integral protein ZmSIP1-2
  misc_feature (1)..(233): Homolog of NCBI NO: 15229225 NR Description: major intrinsic protein (MIP) family [Arabidopsis
  misc_feature (1)..(233): Homolog of NCBI NO: 15238785 NR Description: expressed protein [Arabidopsis thaliana]
MVITFLWVILSATFGIQTAAIVSAVGFHGITWAPLVISTLVVFVSISIFTVIGNVLGGASFNPCGNAAFYTAGVSSDSLFSLAIRSPAQAIGAAGGAITIMEMIPEKYKTRIGGKPSLQFGAHNGAISEVVLSFSVTFLVLLIILRGPRKLLAKTFLLALATVSVFVVGSKFTRPFMNPAIAFGWAYIYKSHNTWDHFYVYWISSYTGAILSAMLFRIIFPAPPLVQKKQKKA

SEQ ID NO: 23872 - DNA, 1525 bp, Arabidopsis thaliana
  misc_feature (1)..(1525): Ceres Seq. ID no. 12335249
  misc_feature: MA Experiment ID: 108488 Result: Down-regulated in Transcription
  misc_feature: MA Experiment ID: 20000224 Result: Up-regulated in Transcription
agaggatattcttcgtcacaaaattaaaaaaaaaagagtaggagaagagggaagcgactagcaccttttgtagttttccgtttattttctgtataaggcgggtgatttcggctccttcatcggaaattatgagcaacgttatcggcgatcgcactgaagacggcctttccaccgccgctgcggcctctggctctacggctgtccagagttctcctcccactgatcgtcctgtccgcgtctacgccgatgggatctacgatcttttccactttggtcatgctcgatctctcgaacaagccaaattagcgtttccaaacaacacttaccttcttgttggatgttgcaatgatgagactacccataagtacaagggaaggactgtaatgactgcagaagagcgatatgaatcacttcgacattgcaagtgggtggatgaagtcatccctgatgcaccatgggtggtcaaccaggagtttcttgacaagcaccagattgactatgttgcccacgattctcttccctatgctgattcaagcggagctggaaaggatgtctatgaatttgttaagaaagttgggaggtttaaggaaacacagcgaactgaaggaatatcgacctcggatataataatgagaatagtgaaagattacaatcagtatgtcatgcgtaacttggatagaggatactcaagggaagatcttggagttagctttgtcaaggaaaagagacttagagttaatatgaggctaaagaaactccaggagagggtcaaagaacaacaagaaagagtgggagaaaagatccaaactgtaaaaatgctgcgcaacgagtgggtagagaatgcagatcgatgggtcgctggatttcttgaaatatttgaagaaggttgccataagatgggaactgcaatcgtagacagtatccaagaaaggttaatgagacaaaagtcggcagagaggctggagaacggtcaggatgatgacacagacgaccagttctatgaagaatacttcgatcatgacatgggtagtgacgatgatgaagatgaaaaattctacgacgaggaagaagtaaaggaagaagagacagagaaaactgttatgacggatgctaaagacaacaagtaagaacaaatttggcttgcagaaacctcagattagctctacttatggccacttctactaaactcccttaagcctcgcactctctctcgaaattcatctacttaacatataataccaatgtttagaaagagagagtgtgtgatgtgtttgtttgtgtgtgttgaacaaacgaacgtgcgtggttgtctttggtgagttggtctcatctttgttgatttttgaatgcgcatgtatttttttcttctttttcatgacgggcaaagtgttatgaagtacaatgcaattgtctaaaacaggataagtcaatggttcgtgtgtgccataaagtaaacatcgctgtgtacatcttccatgttccaaactcaactcgttttcttcaaatattgaaatacaaattggtc

SEQ ID NO: 23873 - protein, 332 aa, Arabidopsis thaliana
  peptide (1)..(332): Ceres Seq. ID no. 12335250
  misc_feature (28)..(322): Homolog of NCBI NO: 25288640 NR Description: probable phosphocholine cytidylyltransferase
  misc_feature (28)..(322): Homolog of NCBI NO: 30683147 NR Description: cholinephosphate cytidylyltransferase
  misc_feature (28)..(303): Homolog of NCBI NO: 21668498 NR Description: CTP:phosphorylcholine cytidylyltransferase
  misc_feature (32)..(292): Homolog of NCBI NO: 7488791 NR Description: choline-phosphate cytidylyltransferase (EC
  misc_feature (1)..(327): Homolog of NCBI NO: 7488485 NR Description: probable choline-phosphate cytidylyltransferase
  misc_feature (1)..(327): Homolog of NCBI NO: 7488446 NR Description: choline-phosphate cytidylyltransferase (EC
  misc_feature (1)..(332): Homolog of NCBI NO: 7488483 NR Description: probable choline-phosphate cytidylyltransferase
  misc_feature (1)..(332): Homolog of NCBI NO: 7488484 NR Description: probable choline-phosphate cytidylyltransferase
  misc_feature (1)..(332): Homolog of NCBI NO: 1236978 NR Description: CTP:phosphocholine cytidylyltransferase
  misc_feature (1)..(332): Homolog of NCBI NO: 15225218 NR Description: putative phospholipid cytidylyltransferase
MSNVIGDRTEDGLSTAAAASGSTAVQSSPPTDRPVRVYADGIYDLFHFGHARSLEQAKLAFPNNTYLLVGCCNDETTHKYKGRTVMTAEERYESLRHCKWVDEVIPDAPWVVNQEFLDKHQIDYVAHDSLPYADSSGAGKDVYEFVKKVGRFKETQRTEGISTSDIIMRIVKDYNQYVMRNLDRGYSREDLGVSFVKEKRLRVNMRLKKLQERVKEQQERVGEKIQTVKMLRNEWVENADRWVAGFLEIFEEGCHKMGTAIVDSIQERLMRQKSAERLENGQDDDTDDQFYEEYFDHDMGSDDDEDEKFYDEEEVKEEETEKTVMTDAKDNK

SEQ ID NO: 23874 - protein, 247 aa, Arabidopsis thaliana
  peptide (1)..(247): Ceres Seq. ID no. 12335251
  misc_feature (1)..(237): Homolog of NCBI NO: 25288640 NR Description: probable phosphocholine cytidylyltransferase
  misc_feature (1)..(237): Homolog of NCBI NO: 30683147 NR Description: cholinephosphate cytidylyltransferase
  misc_feature (1)..(218): Homolog of NCBI NO: 21668498 NR Description: CTP:phosphorylcholine cytidylyltransferase
  misc_feature (1)..(207): Homolog of NCBI NO: 7488791 NR Description: choline-phosphate cytidylyltransferase (EC
  misc_feature (1)..(242): Homolog of NCBI NO: 7488485 NR Description: probable choline-phosphate cytidylyltransferase
  misc_feature (1)..(242): Homolog of NCBI NO: 7488446 NR Description: choline-phosphate cytidylyltransferase (EC
  misc_feature (1)..(247): Homolog of NCBI NO: 7488483 NR Description: probable choline-phosphate cytidylyltransferase
  misc_feature (1)..(247): Homolog of NCBI NO: 7488484 NR Description: probable choline-phosphate cytidylyltransferase
  misc_feature (1)..(247): Homolog of NCBI NO: 1236978 NR Description: CTP:phosphocholine cytidylyltransferase
  misc_feature (1)..(247): Homolog of NCBI NO: 15225218 NR Description: putative phospholipid cytidylyltransferase
MTAEERYESLRHCKWVDEVIPDAPWVVNQEFLDKHQIDYVAHDSLPYADSSGAGKDVYEFVKKVGRFKETQRTEGISTSDIIMRIVKDYNQYVMRNLDRGYSREDLGVSFVKEKRLRVNMRLKKLQERVKEQQERVGEKIQTVKMLRNEWVENADRWVAGFLEIFEEGCHKMGTAIVDSIQERLMRQKSAERLENGQDDDTDDQFYEEYFDHDMGSDDDEDEKFYDEEEVKEEETEKTVMTDAKDNK

SEQ ID NO: 23875 - DNA, 986 bp, Arabidopsis thaliana
  misc_feature (1)..(986): Ceres Seq. ID no. 12377274
  misc_feature: MA Experiment ID: 108433 Result: Up-regulated in Transcription
  misc_feature: MA Experiment 108433 PARAMETER Experiment Name: At_rhl_Mutant2_cDNA_P Parameter: Age (day) Value: 7
  misc_feature: MA Experiment 108433 PARAMETER Experiment Name: At_rhl_Mutant2_cDNA_P Parameter: Organism Value: A. thaliana
  misc_feature: MA Experiment 108433 PARAMETER Experiment Name: At_rhl_Mutant2_cDNA_P Parameter: Plant Line Value: rhl Mutant vs. wt landsburg
  misc_feature: MA Experiment 108433 PARAMETER Experiment Name: At_rhl_Mutant2_cDNA_P Parameter: Tissue Value: Roots
  misc_feature: MA Experiment ID: 108434 Result: Down-regulated in Transcription
  misc_feature: MA Experiment 108434 PARAMETER Experiment Name: At_Root_Tips_cDNA_P Parameter: Tissue Value: Root Tips
  misc_feature: MA Experiment ID: 108461 Result: Up-regulated in Transcription
  misc_feature: MA Experiment 108461 PARAMETER Experiment Name: At_Germinating_Seeds_cDNA_P Parameter: Age (day) Value: 1 vs. 0
  misc_feature: MA Experiment 108461 PARAMETER Experiment Name: At_Germinating_Seeds_cDNA_P Parameter: Tissue Value: Germinating Seeds
  misc_feature: MA Experiment ID: 108488 Result: Down-regulated in Transcription
  misc_feature: MA Experiment ID: 108579 Result: Down-regulated in Transcription
  misc_feature: MA Experiment 108579 PARAMETER Experiment Name: At_4deg_Cold_cDNA_P Parameter: Temperature (deg C) Value: 4 vs. 22
  misc_feature: MA Experiment 108579 PARAMETER Experiment Name: At_4deg_Cold_cDNA_P Parameter: Timepoint (hr) Value: 6
  misc_feature: MA Experiment 108579 PARAMETER Experiment Name: At_4deg_Cold_cDNA_P Parameter: Tissue Value: Aerial
  misc_feature: MA Experiment ID: 108595 Result: Down-regulated in Transcription
  misc_feature: MA Experiment 108595 PARAMETER Experiment Name: At_Ler-pi_Ovule_cDNA_P Parameter: Plant Line Value: null
  misc_feature: MA Experiment ID: 20000179 Result: Up-regulated in Transcription
  misc_feature: MA Experiment 20000179 PARAMETER Experiment Name: At_Germinating_Seeds_P Parameter: Age (hr) Value: 6 vs. 0
  misc_feature: MA Experiment 20000179 PARAMETER Experiment Name: At_Germinating_Seeds_P Parameter: Tissue Value: Germinating Seeds
  misc_feature: MA Experiment ID: 20000180 Result: Up-regulated in Transcription
  misc_feature: MA Experiment 20000180 PARAMETER Experiment Name: At_Germinating_Seeds_P Parameter: Age (hr) Value: 24 vs. 0
  misc_feature: MA Experiment 20000180 PARAMETER Experiment Name: At_Germinating_Seeds_P Parameter: Tissue Value: Germinating Seeds
  misc_feature: MA Experiment ID: 20000214 Result: Down-regulated in Transcription
  misc_feature: MA Experiment 20000214 PARAMETER Experiment Name: At_4deg_Cold_P Parameter: Timepoint (hr) Value: 6
  misc_feature: MA Experiment ID: 20000452 Result: Down-regulated in Transcription
  misc_feature: MA Experiment 20000452 PARAMETER Experiment Name: At_CS6879_Shoots-Roots_P Parameter: Age (day) Value: 14
  misc_feature: MA Experiment 20000452 PARAMETER Experiment Name: At_CS6879_Shoots-Roots_P Parameter: Organism Value: A. thaliana
  misc_feature: MA Experiment 20000452 PARAMETER Experiment Name: At_CS6879_Shoots-Roots_P Parameter: Plant Line Value: CS6879 vs. WS
  misc_feature: MA Experiment 20000452 PARAMETER Experiment Name: At_CS6879_Shoots-Roots_P Parameter: Tissue Value: Shoots
  misc_feature: MA Experiment ID: 20000573 Result: Down-regulated in Transcription
  misc_feature: MA Experiment 20000573 PARAMETER Experiment Name: At_100uM_ABA_Mutants__P Parameter: Organism Value: A. thaliana
  misc_feature: MA Experiment 20000573 PARAMETER Experiment Name: At_100uM_ABA_Mutants__P Parameter: Plant Line Value: CS22 vs. Ler wt
  misc_feature: MA Experiment 20000573 PARAMETER Experiment Name: At_100uM_ABA_Mutants__P Parameter: Timepoint (hr) Value: N/A
  misc_feature: MA Experiment 20000573 PARAMETER Experiment Name: At_100uM_ABA_Mutants__P Parameter: Tissue Value: Whole Plant
  misc_feature: MA Experiment 20000573 PARAMETER Experiment Name: At_100uM_ABA_Mutants__P Parameter: Treatment Value: None
  misc_feature: MA Experiment ID: 20001248 Result: Up-regulated in Transcription
  misc_feature: MA Experiment 20001248 PARAMETER Experiment Name: At_Far-red-induction_P Parameter: Age (day) Value: 7
  misc_feature: MA Experiment 20001248 PARAMETER Experiment Name: At_Far-red-induction_P Parameter: Light Value: Far-red vs. White
  misc_feature: MA Experiment 20001248 PARAMETER Experiment Name: At_Far-red-induction_P Parameter: Organism Value: A. thaliana
  misc_feature: MA Experiment 20001248 PARAMETER Experiment Name: At_Far-red-induction_P Parameter: Plant Line Value: Columbia
  misc_feature: MA Experiment 20001248 PARAMETER Experiment Name: At_Far-red-induction_P Parameter: Timepoint (hr) Value: 4
  misc_feature: MA Experiment 20001248 PARAMETER Experiment Name: At_Far-red-induction_P Parameter: Tissue Value: Whole Plant
  misc_feature: MA Experiment ID: 20001450 Result: Up-regulated in Transcription
  misc_feature: MA Experiment 20001450 PARAMETER Experiment Name: At_Far-red-induction_P Parameter: Age (day) Value: 7
  misc_feature: MA Experiment 20001450 PARAMETER Experiment Name: At_Far-red-induction_P Parameter: Light Value: Far-red vs. White
  misc_feature: MA Experiment 20001450 PARAMETER Experiment Name: At_Far-red-induction_P Parameter: Organism Value: A. thaliana
  misc_feature: MA Experiment 20001450 PARAMETER Experiment Name: At_Far-red-induction_P Parameter: Plant Line Value: Columbia
  misc_feature: MA Experiment 20001450 PARAMETER Experiment Name: At_Far-red-induction_P Parameter: Timepoint (hr) Value: 8
  misc_feature: MA Experiment 20001450 PARAMETER Experiment Name: At_Far-red-induction_P Parameter: Tissue Value: Whole Plant
  misc_feature: MA Experiment ID: 20001451 Result: Up-regulated in Transcription
  misc_feature: MA Experiment 20001451 PARAMETER Experiment Name: At_Far-red-induction_P Parameter: Age (day) Value: 7
  misc_feature: MA Experiment 20001451 PARAMETER Experiment Name: At_Far-red-induction_P Parameter: Light Value: Far-red vs. White
  misc_feature: MA Experiment 20001451 PARAMETER Experiment Name: At_Far-red-induction_P Parameter: Organism Value: A. thaliana
  misc_feature: MA Experiment 20001451 PARAMETER Experiment Name: At_Far-red-induction_P Parameter: Plant Line Value: Columbia
  misc_feature: MA Experiment 20001451 PARAMETER Experiment Name: At_Far-red-induction_P Parameter: Timepoint (hr) Value: 24
  misc_feature: MA Experiment 20001451 PARAMETER Experiment Name: At_Far-red-induction_P Parameter: Tissue Value: Whole Plant
  misc_feature: MA Experiment ID: 20001557 Result: Down-regulated in Transcription
  misc_feature: MA Experiment 20001557 PARAMETER Experiment Name: At_Drought_Soil_Dry_P Parameter: Age (day) Value: 27
  misc_feature: MA Experiment 20001557 PARAMETER Experiment Name: At_Drought_Soil_Dry_P Parameter: Organism Value: A. thaliana
  misc_feature: MA Experiment 20001557 PARAMETER Experiment Name: At_Drought_Soil_Dry_P Parameter: Plant Line Value: WS
  misc_feature: MA Experiment 20001557 PARAMETER Experiment Name: At_Drought_Soil_Dry_P Parameter: Post Timepoint (hr) Value: 3
  misc_feature: MA Experiment 20001557 PARAMETER Experiment Name: At_Drought_Soil_Dry_P Parameter: Post-Treatment Value: Re-Water vs. No Drought
  misc_feature: MA Experiment 20001557 PARAMETER Experiment Name: At_Drought_Soil_Dry_P Parameter: Timepoint (day) Value: 13
  misc_feature: MA Experiment 20001557 PARAMETER Experiment Name: At_Drought_Soil_Dry_P Parameter: Treatment Value: Drought vs. No Drought
  misc_feature: MA Experiment ID: 20001905 Result: Up-regulated in Transcription
  misc_feature: MA Experiment 20001905 PARAMETER Experiment Name: At_Drought_Reproduction_P Parameter: Age (day) Value: 40
  misc_feature: MA Experiment 20001905 PARAMETER Experiment Name: At_Drought_Reproduction_P Parameter: Organism Value: A. thaliana
  misc_feature: MA Experiment 20001905 PARAMETER Experiment Name: At_Drought_Reproduction_P Parameter: Plant Line Value: WS
  misc_feature: MA Experiment 20001905 PARAMETER Experiment Name: At_Drought_Reproduction_P Parameter: Timepoint (day) Value: 10
  misc_feature: MA Experiment 20001905 PARAMETER Experiment Name: At_Drought_Reproduction_P Parameter: Tissue Value: Rosettes
  misc_feature: MA Experiment 20001905 PARAMETER Experiment Name: At_Drought_Reproduction_P Parameter: Treatment Value: Drought vs. No Drought
acaaattcactttccacaattaatctctctctctctttatctccctcacacctcagccttctgtgttcgtctctatctctctcccaaatctcaattttggactcgtctgcttttgtttatataaacacttctcttcttcttcaatctccacacaccacaacaaaaccacctaccttcttcgatttctccagaaatcctccttcaagttcatactcatggaagaagctaaagtggaagcaaaagatggtaccatctccgtagcttctgcattttccggtcaccaacaagctgttcacgatagcgaccataaattcctaacgcaagctgttgaagaagcttacaagggagtggactgtggtgatggtggcccatttggtgcggtgattgtgcataataacgaggttgtcgctagttgccacaatatggttttgaaatatactgacccaactgcacatgctgaagtcaccgccattagagaggcatgtaagaaacttaacaaaatcgagttatcagaatgcgagatttatgcatcttgtgagccgtgtcccatgtgcttcggagccatccatctctcgagactcaagaggttggtttatggagccaaagccgaagcagctatagccatcgggtttgatgacttcatagctgatgctttgagaggcacaggggtttaccagaaatctagtctggagatcaagaaagctgacgggaatggcgctgcgattgcggagcaagttttccagaacactaaggagaagttccgtttatactgaagcacttctccattaccacattcttcttcttcttctccttcatgatggtaattagaagtagtagaagaagaactgcacttgccttgactaaaataaatctctgtttcaaattgttcattttaaaaacagaaggaaacgaaaaaaaaaaaaaaatcaatttcggttcttgttgacacgatttgtaatttcttttcttcatttgaattgaactgg

SEQ ID NO: 23876 - protein, 185 aa, Arabidopsis thaliana
  peptide (1)..(185): Ceres Seq. ID no. 12377275
  misc_feature (27)..(129): Pfam Name: Cytidine and deoxycytidylate deaminase Pfam Description: Cytidine and deoxycytidylate deaminase
  misc_feature (30)..(181): Homolog of NCBI NO: 39591749 NR Description: Hypothetical protein CBG18226 [Caenorhabditis
  misc_feature (32)..(164): Homolog of NCBI NO: 39582012 NR Description: Hypothetical protein CBG09150 [Caenorhabditis
  misc_feature (32)..(164): Homolog of NCBI NO: 17554608 NR Description: Cytidine, cytosine, dCTP et al deaminase
  misc_feature (33)..(158): Homolog of NCBI NO: 23021911 NR Description: hypothetical protein [Clostridium thermocellum
  misc_feature (70)..(184): Homolog of NCBI NO: 15229953 NR Description: unknown protein; protein id: At3g05300.1
  misc_feature (6)..(185): Homolog of NCBI NO: 23928436 NR Description: putative cytidine deaminase [Zea mays]
  misc_feature (6)..(185): Homolog of NCBI NO: 3204108 NR Description: putative cytidine deaminase; putative
  misc_feature (1)..(185): Homolog of NCBI NO: 40714681 NR Description: putative deoxycytidine deaminase
  misc_feature (1)..(185): Homolog of NCBI NO: 18266045 NR Description: deoxycytidine deaminase [Brassica oleracea]
  misc_feature (1)..(185): Homolog of NCBI NO: 15241124 NR Description: putative cytidine deaminase - like
MEEAKVEAKDGTISVASAFSGHQQAVHDSDHKFLTQAVEEAYKGVDCGDGGPFGAVIVHNNEVVASCHNMVLKYTDPTAHAEVTAIREACKKLNKIELSECEIYASCEPCPMCFGAIHLSRLKRLVYGAKAEAAIAIGFDDFIADALRGTGVYQKSSLEIKKADGNGAAIAEQVFQNTKEKFRLY

SEQ ID NO: 23877 - protein, 116 aa, Arabidopsis thaliana
  peptide (1)..(116): Ceres Seq. ID no. 12377276
  misc_feature (1)..(60): Pfam Name: Cytidine and deoxycytidylate deaminase Pfam Description: Cytidine and deoxycytidylate deaminase
  misc_feature (1)..(112): Homolog of NCBI NO: 39591749 NR Description: Hypothetical protein CBG18226 [Caenorhabditis
  misc_feature (1)..(95): Homolog of NCBI NO: 39582012 NR Description: Hypothetical protein CBG09150 [Caenorhabditis
  misc_feature (1)..(95): Homolog of NCBI NO: 17554608 NR Description: Cytidine, cytosine, dCTP et al deaminase
  misc_feature (1)..(89): Homolog of NCBI NO: 23021911 NR Description: hypothetical protein [Clostridium thermocellum
  misc_feature (1)..(115): Homolog of NCBI NO: 15229953 NR Description: unknown protein; protein id: At3g05300.1
  misc_feature (1)..(116): Homolog of NCBI NO: 23928436 NR Description: putative cytidine deaminase [Zea mays]
  misc_feature (1)..(116): Homolog of NCBI NO: 3204108 NR Description: putative cytidine deaminase; putative
  misc_feature (1)..(116): Homolog of NCBI NO: 40714681 NR Description: putative deoxycytidine deaminase
  misc_feature (1)..(116): Homolog of NCBI NO: 18266045 NR Description: deoxycytidine deaminase [Brassica oleracea]
  misc_feature (1)..(116): Homolog of NCBI NO: 15241124 NR Description: putative cytidine deaminase - like
MVLKYTDPTAHAEVTAIREACKKLNKIELSECEIYASCEPCPMCFGAIHLSRLKRLVYGAKAEAAIAIGFDDFIADALRGTGVYQKSSLEIKKADGNGAAIAEQVFQNTKEKFRLY

SEQ ID NO: 23878 - DNA, 1301 bp, Arabidopsis thaliana
  misc_feature (1)..(1301): Ceres Seq. ID no. 13495742
  misc_feature: MA Experiment ID: 108434 Result: Down-regulated in Transcription
  misc_feature: MA Experiment 108434 PARAMETER Experiment Name: At_Root_Tips_cDNA_P Parameter: Tissue Value: Root Tips
  misc_feature: MA Experiment ID: 108461 Result: Up-regulated in Transcription
  misc_feature: MA Experiment 108461 PARAMETER Experiment Name: At_Germinating_Seeds_cDNA_P Parameter: Age (day) Value: 1 vs. 0
  misc_feature: MA Experiment 108461 PARAMETER Experiment Name: At_Germinating_Seeds_cDNA_P Parameter: Tissue Value: Germinating Seeds
  misc_feature: MA Experiment ID: 108462 Result: Up-regulated in Transcription
  misc_feature: MA Experiment 108462 PARAMETER Experiment Name: At_Germinating_Seeds_cDNA_P Parameter: Age (day) Value: 2 vs. 0
  misc_feature: MA Experiment 108462 PARAMETER Experiment Name: At_Germinating_Seeds_cDNA_P Parameter: Tissue Value: Germinating Seeds
  misc_feature: MA Experiment ID: 108463 Result: Up-regulated in Transcription
  misc_feature: MA Experiment 108463 PARAMETER Experiment Name: At_Germinating_Seeds_cDNA_P Parameter: Age (day) Value: 3 vs. 0
  misc_feature: MA Experiment 108463 PARAMETER Experiment Name: At_Germinating_Seeds_cDNA_P Parameter: Tissue Value: Germinating Seeds
  misc_feature: MA Experiment ID: 108464 Result: Up-regulated in Transcription
  misc_feature: MA Experiment 108464 PARAMETER Experiment Name: At_Germinating_Seeds_cDNA_P Parameter: Age (day) Value: 4 vs. 0
  misc_feature: MA Experiment 108464 PARAMETER Experiment Name: At_Germinating_Seeds_cDNA_P Parameter: Tissue Value: Germinating Seeds
  misc_feature: MA Experiment ID: 108469 Result: Up-regulated in Transcription
  misc_feature: MA Experiment ID: 108579 Result: Up-regulated in Transcription
  misc_feature: MA Experiment 108579 PARAMETER Experiment Name: At_4deg_Cold_cDNA_P Parameter: Temperature (deg C) Value: 4 vs. 22
  misc_feature: MA Experiment 108579 PARAMETER Experiment Name: At_4deg_Cold_cDNA_P Parameter: Timepoint (hr) Value: 6
  misc_feature: MA Experiment 108579 PARAMETER Experiment Name: At_4deg_Cold_cDNA_P Parameter: Tissue Value: Aerial
  misc_feature: MA Experiment ID: 108585 Result: Up-regulated in Transcription
  misc_feature: MA Experiment 108585 PARAMETER Experiment Name: At_5mM_NaNP_cDNA_P Parameter: Timepoint (hr) Value: 6
  misc_feature: MA Experiment 108585 PARAMETER Experiment Name: At_5mM_NaNP_cDNA_P Parameter: Tissue Value: Aerial
  misc_feature: MA Experiment 108585 PARAMETER Experiment Name: At_5mM_NaNP_cDNA_P Parameter: Treatment Value: null
  misc_feature: MA Experiment ID: 108595 Result: Up-regulated in Transcription
  misc_feature: MA Experiment 108595 PARAMETER Experiment Name: At_Ler-pi_Ovule_cDNA_P Parameter: Plant Line Value: null
  misc_feature: MA Experiment ID: 108668 Result: Up-regulated in Transcription
  misc_feature: MA Experiment 108668 PARAMETER Experiment Name: At_2mM_SA_cDNA_P Parameter: Plant Line Value: WS
  misc_feature: MA Experiment 108668 PARAMETER Experiment Name: At_2mM_SA_cDNA_P Parameter: Timepoint (hr) Value: 6
  misc_feature: MA Experiment 108668 PARAMETER Experiment Name: At_2mM_SA_cDNA_P Parameter: Treatment Value: 2mM SA vs. No Treatment
  misc_feature: MA Experiment ID: 20000069 Result: Up-regulated in Transcription
  misc_feature: MA Experiment 20000069 PARAMETER Experiment Name: At_100uM_ABA_Mutants_cDNA_P Parameter: Plant Line Value: CS23
  misc_feature: MA Experiment 20000069 PARAMETER Experiment Name: At_100uM_ABA_Mutants_cDNA_P Parameter: Timepoint (hr) Value: 6
  misc_feature: MA Experiment 20000069 PARAMETER Experiment Name: At_100uM_ABA_Mutants_cDNA_P Parameter: Tissue Value: Aerial
  misc_feature: MA Experiment 20000069 PARAMETER Experiment Name: At_100uM_ABA_Mutants_cDNA_P Parameter: Treatment Value: 100uM ABA vs. No Treatment
  misc_feature: MA Experiment ID: 20000070 Result: Up-regulated in Transcription
  misc_feature: MA Experiment 20000070 PARAMETER Experiment Name: At_100uM_ABA_Mutants_cDNA_P Parameter: Plant Line Value: CS24
  misc_feature: MA Experiment 20000070 PARAMETER Experiment Name: At_100uM_ABA_Mutants_cDNA_P Parameter: Timepoint (hr) Value: 6
  misc_feature: MA Experiment 20000070 PARAMETER Experiment Name: At_100uM_ABA_Mutants_cDNA_P Parameter: Tissue Value: Aerial
  misc_feature: MA Experiment 20000070 PARAMETER Experiment Name: At_100uM_ABA_Mutants_cDNA_P Parameter: Treatment Value: 100uM ABA vs. No Treatment
  misc_feature: MA Experiment ID: 20000072 Result: Up-regulated in Transcription
  misc_feature: MA Experiment 20000072 PARAMETER Experiment Name: At_100uM_ABA_Mutants_cDNA_P Parameter: Plant Line Value: CS8105
  misc_feature: MA Experiment 20000072 PARAMETER Experiment Name: At_100uM_ABA_Mutants_cDNA_P Parameter: Timepoint (hr) Value: 6
  misc_feature: MA Experiment 20000072 PARAMETER Experiment Name: At_100uM_ABA_Mutants_cDNA_P Parameter: Tissue Value: Aerial
  misc_feature: MA Experiment 20000072 PARAMETER Experiment Name: At_100uM_ABA_Mutants_cDNA_P Parameter: Treatment Value: 100uM ABA vs. No Treatment
  misc_feature: MA Experiment ID: 20000090 Result: Up-regulated in Transcription
  misc_feature: MA Experiment ID: 20000111 Result: Down-regulated in Transcription
  misc_feature: MA Experiment 20000111 PARAMETER Experiment Name: At_42deg_Heat_cDNA_P Parameter: Temperature (deg C) Value: 42 vs. 22
  misc_feature: MA Experiment 20000111 PARAMETER Experiment Name: At_42deg_Heat_cDNA_P Parameter: Timepoint (hr) Value: 6
  misc_feature: MA Experiment 20000111 PARAMETER Experiment Name: At_42deg_Heat_cDNA_P Parameter: Tissue Value: Aerial
  misc_feature: MA Experiment ID: 20000113 Result: Down-regulated in Transcription
  misc_feature: MA Experiment 20000113 PARAMETER Experiment Name: At_42deg_Heat_cDNA_P Parameter: Temperature (deg C) Value: 42 vs. 22
  misc_feature: MA Experiment 20000113 PARAMETER Experiment Name: At_42deg_Heat_cDNA_P Parameter: Timepoint (hr) Value: 8
  misc_feature: MA Experiment 20000113 PARAMETER Experiment Name: At_42deg_Heat_cDNA_P Parameter: Tissue Value: Aerial
  misc_feature: MA Experiment ID: 20000144 Result: Down-regulated in Transcription
  misc_feature: MA Experiment 20000144 PARAMETER Experiment Name: At_42deg_Heat_cDNA_P Parameter: Temperature (deg C) Value: 42 vs. 22
  misc_feature: MA Experiment 20000144 PARAMETER Experiment Name: At_42deg_Heat_cDNA_P Parameter: Timepoint (hr) Value: 1
  misc_feature: MA Experiment 20000144 PARAMETER Experiment Name: At_42deg_Heat_cDNA_P Parameter: Tissue Value: Aerial
  misc_feature: MA Experiment ID: 20000182 Result: Up-regulated in Transcription
  misc_feature: MA Experiment 20000182 PARAMETER Experiment Name: At_2mM_SA_P Parameter: Age (day) Value: 14
  misc_feature: MA Experiment 20000182 PARAMETER Experiment Name: At_2mM_SA_P Parameter: Organism Value: A. thaliana
  misc_feature: MA Experiment 20000182 PARAMETER Experiment Name: At_2mM_SA_P Parameter: Plant Line Value: WS
  misc_feature: MA Experiment 20000182 PARAMETER Experiment Name: At_2mM_SA_P Parameter: Timepoint (hr) Value: 6
  misc_feature: MA Experiment 20000182 PARAMETER Experiment Name: At_2mM_SA_P Parameter: Tissue Value: Aerial
  misc_feature: MA Experiment 20000182 PARAMETER Experiment Name: At_2mM_SA_P Parameter: Treatment Value: 2mM SA vs. No Treatment
  misc_feature: MA Experiment ID: 20000184 Result: Down-regulated in Transcription
  misc_feature: MA Experiment 20000184 PARAMETER Experiment Name: At_Shoots__P Parameter: Age (day) Value: 7
  misc_feature: MA Experiment 20000184 PARAMETER Experiment Name: At_Shoots__P Parameter: Tissue Value: Shoots vs. Whole Plant
  misc_feature: MA Experiment ID: 20000185 Result: Down-regulated in Transcription
  misc_feature: MA Experiment 20000185 PARAMETER Experiment Name: At_Roots__P Parameter: Age (day) Value: 7 vs. 21
  misc_feature: MA Experiment 20000185 PARAMETER Experiment Name: At_Roots__P Parameter: Organism Value: A. thaliana
  misc_feature: MA Experiment 20000185 PARAMETER Experiment Name: At_Roots__P Parameter: Tissue Value: Roots vs. Whole Plant
  misc_feature: MA Experiment ID: 20000213 Result: Up-regulated in Transcription
  misc_feature: MA Experiment 20000213 PARAMETER Experiment Name: At_4deg_Cold_P Parameter: Timepoint (hr) Value: 2
  misc_feature: MA Experiment ID: 20000224 Result: Down-regulated in Transcription
  misc_feature: MA Experiment ID: 20000227 Result: Down-regulated in Transcription
  misc_feature: MA Experiment 20000227 PARAMETER Experiment Name: At_Root-Tips-vs-Tops_P Parameter: Tissue Value: Root Tips vs. Root Tops
  misc_feature: MA Experiment ID: 20000234 Result: Down-regulated in Transcription
  misc_feature: MA Experiment 20000234 PARAMETER Experiment Name: At_Siliques_P Parameter: Age (day) Value: 21
  misc_feature: MA Experiment 20000234 PARAMETER Experiment Name: At_Siliques_P Parameter: Organism Value: A. thaliana
  misc_feature: MA Experiment 20000234 PARAMETER Experiment Name: At_Siliques_P Parameter: Plant Line Value: WS
  misc_feature: MA Experiment 20000234 PARAMETER Experiment Name: At_Siliques_P Parameter: Tissue Value: Less Than 5mm Siliques vs. Whole Plant
  misc_feature: MA Experiment ID: 20000235 Result: Down-regulated in Transcription
  misc_feature: MA Experiment 20000235 PARAMETER Experiment Name: At_Siliques_P Parameter: Age (day) Value: 21
  misc_feature: MA Experiment 20000235 PARAMETER Experiment Name: At_Siliques_P Parameter: Organism Value: A. thaliana
  misc_feature: MA Experiment 20000235 PARAMETER Experiment Name: At_Siliques_P Parameter: Plant Line Value: WS
  misc_feature: MA Experiment 20000235 PARAMETER Experiment Name: At_Siliques_P Parameter: Tissue Value: 5-10mm Siliques vs. Whole Plant
  misc_feature: MA Experiment ID: 20000264 Result: Down-regulated in Transcription
  misc_feature: MA Experiment 20000264 PARAMETER Experiment Name: At_Open_Flower_P Parameter: Age (day) Value: 21
  misc_feature: MA Experiment 20000264 PARAMETER Experiment Name: At_Open_Flower_P Parameter: Plant Line Value: WS
  misc_feature: MA Experiment 20000264 PARAMETER Experiment Name: At_Open_Flower_P Parameter: Tissue Value: Open Flower vs. Whole Plant
  misc_feature: MA Experiment ID: 20000265 Result: Down-regulated in Transcription
  misc_feature: MA Experiment 20000265 PARAMETER Experiment Name: At_Open_Flower_P Parameter: Age (day) Value: 21
  misc_feature: MA Experiment 20000265 PARAMETER Experiment Name: At_Open_Flower_P Parameter: Plant Line Value: WS
  misc_feature: MA Experiment 20000265 PARAMETER Experiment Name: At_Open_Flower_P Parameter: Tissue Value: Closed Flower vs. Whole Plant
  misc_feature: MA Experiment ID: 20000286 Result: Down-regulated in Transcription
  misc_feature: MA Experiment 20000286 PARAMETER Experiment Name: At_Open_Flower_P Parameter: Age (day) Value: 21
  misc_feature: MA Experiment 20000286 PARAMETER Experiment Name: At_Open_Flower_P Parameter: Plant Line Value: WS
  misc_feature: MA Experiment 20000286 PARAMETER Experiment Name: At_Open_Flower_P Parameter: Tissue Value: Half Open vs. Whole Plant
  misc_feature: MA Experiment ID: 20000438 Result: Down-regulated in Transcription
  misc_feature: MA Experiment 20000438 PARAMETER Experiment Name: At_Shoots__P Parameter: Age (day) Value: 14
  misc_feature: MA Experiment 20000438 PARAMETER Experiment Name: At_Shoots__P Parameter: Tissue Value: Shoots vs. Whole Plant
  misc_feature: MA Experiment ID: 20000439 Result: Down-regulated in Transcription
  misc_feature: MA Experiment 20000439 PARAMETER Experiment Name: At_Roots__P Parameter: Age (day) Value: 14 vs. 21
  misc_feature: MA Experiment 20000439 PARAMETER Experiment Name: At_Roots__P Parameter: Organism Value: A. thaliana
  misc_feature: MA Experiment 20000439 PARAMETER Experiment Name: At_Roots__P Parameter: Tissue Value: Roots vs. Whole Plant
  misc_feature: MA Experiment ID: 20000441 Result: Up-regulated in Transcription
  misc_feature: MA Experiment 20000441 PARAMETER Experiment Name: At_1uM_BR-BRZ__P Parameter: Tissue Value: Shoot Apices
  misc_feature: MA Experiment 20000441 PARAMETER Experiment Name: At_1uM_BR-BRZ__P Parameter: Treatment Value: 1uM BR vs. No Treatment
  misc_feature: MA Experiment ID: 20000443 Result: Up-regulated in Transcription
  misc_feature: MA Experiment 20000443 PARAMETER Experiment Name: At_1uM_BR-BRZ__P Parameter: Tissue Value: Shoot Apices
  misc_feature: MA Experiment 20000443 PARAMETER Experiment Name: At_1uM_BR-BRZ__P Parameter: Treatment Value: 1uM BRZ vs. No Treatment
  misc_feature: MA Experiment ID: 20000460 Result: Up-regulated in Transcription
  misc_feature: MA Experiment 20000460 PARAMETER Experiment Name: At_10percent_PEG_P Parameter: Age (day) Value: 12
  misc_feature: MA Experiment 20000460 PARAMETER Experiment Name: At_10percent_PEG_P Parameter: Organism Value: A. thaliana
  misc_feature: MA Experiment 20000460 PARAMETER Experiment Name: At_10percent_PEG_P Parameter: Plant Line Value: WS
  misc_feature: MA Experiment 20000460 PARAMETER Experiment Name: At_10percent_PEG_P Parameter: Timepoint (day) Value: 12
  misc_feature: MA Experiment 20000460 PARAMETER Experiment Name: At_10percent_PEG_P Parameter: Tissue Value: Whole Plant
  misc_feature: MA Experiment 20000460 PARAMETER Experiment Name: At_10percent_PEG_P Parameter: Treatment Value: 10percent PEG vs. No Treatment
  misc_feature: MA Experiment ID: 20000495 Result: Down-regulated in Transcription
  misc_feature: MA Experiment 20000495 PARAMETER Experiment Name: At_Guard_Cells_P Parameter: Harvest Date Value: 8/2/2002
  misc_feature: MA Experiment 20000495 PARAMETER Experiment Name: At_Guard_Cells_P Parameter: Organism Value: A. thaliana
  misc_feature: MA Experiment 20000495 PARAMETER Experiment Name: At_Guard_Cells_P Parameter: Tissue Value: Guard Cells vs. Leaves
  misc_feature: MA Experiment ID: 20000496 Result: Down-regulated in Transcription
  misc_feature: MA Experiment 20000496 PARAMETER Experiment Name: At_Guard_Cells_P Parameter: Harvest Date Value: 7/19/2002
  misc_feature: MA Experiment 20000496 PARAMETER Experiment Name: At_Guard_Cells_P Parameter: Organism Value: Canola
  misc_feature: MA Experiment 20000496 PARAMETER Experiment Name: At_Guard_Cells_P Parameter: Tissue Value: Guard Cells vs. Leaves
  misc_feature: MA Experiment ID: 20000527 Result: Up-regulated in Transcription
  misc_feature: MA Experiment 20000527 PARAMETER Experiment Name: At_10percent_PEG_P Parameter: Age (day) Value: 20
  misc_feature: MA Experiment 20000527 PARAMETER Experiment Name: At_10percent_PEG_P Parameter: Organism Value: A. thaliana
  misc_feature: MA Experiment 20000527 PARAMETER Experiment Name: At_10percent_PEG_P Parameter: Plant Line Value: WS
  misc_feature: MA Experiment 20000527 PARAMETER Experiment Name: At_10percent_PEG_P Parameter: Timepoint (day) Value: 20
  misc_feature: MA Experiment 20000527 PARAMETER Experiment Name: At_10percent_PEG_P Parameter: Tissue Value: Whole Plant
  misc_feature: MA Experiment 20000527 PARAMETER Experiment Name: At_10percent_PEG_P Parameter: Treatment Value: 10percent PEG vs. No Treatment
  misc_feature: MA Experiment ID: 20000794 Result: Down-regulated in Transcription
  misc_feature: MA Experiment 20000794 PARAMETER Experiment Name: At_Petals_P Parameter: Age (day) Value: 23-25 days
  misc_feature: MA Experiment 20000794 PARAMETER Experiment Name: At_Petals_P Parameter: Plant Line Value: WS
  misc_feature: MA Experiment 20000794 PARAMETER Experiment Name: At_Petals_P Parameter: Tissue Value: Petals vs. Whole plant
  misc_feature: MA Experiment ID: 20001247 Result: Up-regulated in Transcription
  misc_feature: MA Experiment 20001247 PARAMETER Experiment Name: At_Far-red-induction_P Parameter: Age (day) Value: 7
  misc_feature: MA Experiment 20001247 PARAMETER Experiment Name: At_Far-red-induction_P Parameter: Light Value: Far-red vs. White
  misc_feature: MA Experiment 20001247 PARAMETER Experiment Name: At_Far-red-induction_P Parameter: Organism Value: A. thaliana
  misc_feature: MA Experiment 20001247 PARAMETER Experiment Name: At_Far-red-induction_P Parameter: Plant Line Value: Columbia
  misc_feature: MA Experiment 20001247 PARAMETER Experiment Name: At_Far-red-induction_P Parameter: Timepoint (hr) Value: 1
  misc_feature: MA Experiment 20001247 PARAMETER Experiment Name: At_Far-red-induction_P Parameter: Tissue Value: Whole Plant
  misc_feature: MA Experiment ID: 20001248 Result: Up-regulated in Transcription
  misc_feature: MA Experiment 20001248 PARAMETER Experiment Name: At_Far-red-induction_P Parameter: Age (day) Value: 7
  misc_feature: MA Experiment 20001248 PARAMETER Experiment Name: At_Far-red-induction_P Parameter: Light Value: Far-red vs. White
  misc_feature: MA Experiment 20001248 PARAMETER Experiment Name: At_Far-red-induction_P Parameter: Organism Value: A. thaliana
  misc_feature: MA Experiment 20001248 PARAMETER Experiment Name: At_Far-red-induction_P Parameter: Plant Line Value: Columbia
  misc_feature: MA Experiment 20001248 PARAMETER Experiment Name: At_Far-red-induction_P Parameter: Timepoint (hr) Value: 4
  misc_feature: MA Experiment 20001248 PARAMETER Experiment Name: At_Far-red-induction_P Parameter: Tissue Value: Whole Plant
  misc_feature: MA Experiment ID: 20001554 Result: Down-regulated in Transcription
  misc_feature: MA Experiment 20001554 PARAMETER Experiment Name: At_Drought_Soil_Dry_P Parameter: Age (day) Value: 21
  misc_feature: MA Experiment 20001554 PARAMETER Experiment Name: At_Drought_Soil_Dry_P Parameter: Organism Value: A. thaliana
  misc_feature: MA Experiment 20001554 PARAMETER Experiment Name: At_Drought_Soil_Dry_P Parameter: Plant Line Value: WS
  misc_feature: MA Experiment 20001554 PARAMETER Experiment Name: At_Drought_Soil_Dry_P Parameter: Post Timepoint (hr) Value: None
  misc_feature: MA Experiment 20001554 PARAMETER Experiment Name: At_Drought_Soil_Dry_P Parameter: Post-Treatment Value: None
  misc_feature: MA Experiment 20001554 PARAMETER Experiment Name: At_Drought_Soil_Dry_P Parameter: Timepoint (day) Value: 7
  misc_feature: MA Experiment 20001554 PARAMETER Experiment Name: At_Drought_Soil_Dry_P Parameter: Treatment Value: Drought vs. No Drought
  misc_feature: MA Experiment ID: 20001555 Result: Down-regulated in Transcription
  misc_feature: MA Experiment 20001555 PARAMETER Experiment Name: At_Drought_Soil_Dry_P Parameter: Age (day) Value: 24
  misc_feature: MA Experiment 20001555 PARAMETER Experiment Name: At_Drought_Soil_Dry_P Parameter: Organism Value: A. thaliana
  misc_feature: MA Experiment 20001555 PARAMETER Experiment Name: At_Drought_Soil_Dry_P Parameter: Plant Line Value: WS
  misc_feature: MA Experiment 20001555 PARAMETER Experiment Name: At_Drought_Soil_Dry_P Parameter: Post Timepoint (hr) Value: None
  misc_feature: MA Experiment 20001555 PARAMETER Experiment Name: At_Drought_Soil_Dry_P Parameter: Post-Treatment Value: None
  misc_feature: MA Experiment 20001555 PARAMETER Experiment Name: At_Drought_Soil_Dry_P Parameter: Timepoint (day) Value: 10
  misc_feature: MA Experiment 20001555 PARAMETER Experiment Name: At_Drought_Soil_Dry_P Parameter: Treatment Value: Drought vs. No Drought
  misc_feature: MA Experiment ID: 20001556 Result: Down-regulated in Transcription
  misc_feature: MA Experiment 20001556 PARAMETER Experiment Name: At_Drought_Soil_Dry_P Parameter: Age (day) Value: 26
  misc_feature: MA Experiment 20001556 PARAMETER Experiment Name: At_Drought_Soil_Dry_P Parameter: Organism Value: A. thaliana
  misc_feature: MA Experiment 20001556 PARAMETER Experiment Name: At_Drought_Soil_Dry_P Parameter: Plant Line Value: WS
  misc_feature: MA Experiment 20001556 PARAMETER Experiment Name: At_Drought_Soil_Dry_P Parameter: Post Timepoint (hr) Value: None
  misc_feature: MA Experiment 20001556 PARAMETER Experiment Name: At_Drought_Soil_Dry_P Parameter: Post-Treatment Value: None
  misc_feature: MA Experiment 20001556 PARAMETER Experiment Name: At_Drought_Soil_Dry_P Parameter: Timepoint (day) Value: 12
  misc_feature: MA Experiment 20001556 PARAMETER Experiment Name: At_Drought_Soil_Dry_P Parameter: Treatment Value: Drought vs. No Drought
  misc_feature: MA Experiment ID: 20001558 Result: Down-regulated in Transcription
  misc_feature: MA Experiment 20001558 PARAMETER Experiment Name: At_Drought_Soil_Dry_P Parameter: Age (day) Value: 27
  misc_feature: MA Experiment 20001558 PARAMETER Experiment Name: At_Drought_Soil_Dry_P Parameter: Organism Value: A. thaliana
  misc_feature: MA Experiment 20001558 PARAMETER Experiment Name: At_Drought_Soil_Dry_P Parameter: Plant Line Value: WS
  misc_feature: MA Experiment 20001558 PARAMETER Experiment Name: At_Drought_Soil_Dry_P Parameter: Post Timepoint (hr) Value: 6
  misc_feature: MA Experiment 20001558 PARAMETER Experiment Name: At_Drought_Soil_Dry_P Parameter: Post-Treatment Value: Re-Water vs. No Drought
  misc_feature: MA Experiment 20001558 PARAMETER Experiment Name: At_Drought_Soil_Dry_P Parameter: Timepoint (day) Value: 13
  misc_feature: MA Experiment 20001558 PARAMETER Experiment Name: At_Drought_Soil_Dry_P Parameter: Treatment Value: Drought vs. No Drought
  misc_feature: MA Experiment ID: 20001559 Result: Down-regulated in Transcription
  misc_feature: MA Experiment 20001559 PARAMETER Experiment Name: At_Drought_Soil_Dry_P Parameter: Age (day) Value: 28
  misc_feature: MA Experiment 20001559 PARAMETER Experiment Name: At_Drought_Soil_Dry_P Parameter: Organism Value: A. thaliana
  misc_feature: MA Experiment 20001559 PARAMETER Experiment Name: At_Drought_Soil_Dry_P Parameter: Plant Line Value: WS
  misc_feature: MA Experiment 20001559 PARAMETER Experiment Name: At_Drought_Soil_Dry_P Parameter: Post Timepoint (hr) Value: 29
  misc_feature: MA Experiment 20001559 PARAMETER Experiment Name: At_Drought_Soil_Dry_P Parameter: Post-Treatment Value: Re-Water vs. No Drought
  misc_feature: MA Experiment 20001559 PARAMETER Experiment Name: At_Drought_Soil_Dry_P Parameter: Timepoint (day) Value: 14
  misc_feature: MA Experiment 20001559 PARAMETER Experiment Name: At_Drought_Soil_Dry_P Parameter: Treatment Value: Drought vs. No Drought
  misc_feature: MA Experiment ID: 20001560 Result: Down-regulated in Transcription
  misc_feature: MA Experiment 20001560 PARAMETER Experiment Name: At_Drought_Soil_Dry_P Parameter: Age (day) Value: 28
  misc_feature: MA Experiment 20001560 PARAMETER Experiment Name: At_Drought_Soil_Dry_P Parameter: Organism Value: A. thaliana
  misc_feature: MA Experiment 20001560 PARAMETER Experiment Name: At_Drought_Soil_Dry_P Parameter: Plant Line Value: WS
  misc_feature: MA Experiment 20001560 PARAMETER Experiment Name: At_Drought_Soil_Dry_P Parameter: Post Timepoint (hr) Value: None
  misc_feature: MA Experiment 20001560 PARAMETER Experiment Name: At_Drought_Soil_Dry_P Parameter: Post-Treatment Value: None
  misc_feature: MA Experiment 20001560 PARAMETER Experiment Name: At_Drought_Soil_Dry_P Parameter: Timepoint (day) Value: 14
  misc_feature: MA Experiment 20001560 PARAMETER Experiment Name: At_Drought_Soil_Dry_P Parameter: Treatment Value: Drought vs. No Drought
  misc_feature: MA Experiment ID: 20001760 Result: Down-regulated in Transcription
  misc_feature: MA Experiment 20001760 PARAMETER Experiment Name: At_50mM_NH4NO3_L-to-H_P Parameter: Timepoint (hr) Value: 2
  misc_feature: MA Experiment 20001760 PARAMETER Experiment Name: At_50mM_NH4NO3_L-to-H_P Parameter: Tissue Value: Siliques
  misc_feature: MA Experiment 20001760 PARAMETER Experiment Name: At_50mM_NH4NO3_L-to-H_P Parameter: Treatment Value: 50mM NH4NO3 vs 100mM Mannitol
  misc_feature: MA Experiment ID: 20001773 Result: Down-regulated in Transcription
  misc_feature: MA Experiment 20001773 PARAMETER Experiment Name: At_Far-red-enriched-adult_P Parameter: Age (day) Value: 30
  misc_feature: MA Experiment 20001773 PARAMETER Experiment Name: At_Far-red-enriched-adult_P Parameter: Light Value: Far-red enriched vs. White
  misc_feature: MA Experiment 20001773 PARAMETER Experiment Name: At_Far-red-enriched-adult_P Parameter: Organism Value: A. thaliana
  misc_feature: MA Experiment 20001773 PARAMETER Experiment Name: At_Far-red-enriched-adult_P Parameter: Plant Line Value: Columbia
  misc_feature: MA Experiment 20001773 PARAMETER Experiment Name: At_Far-red-enriched-adult_P Parameter: Timepoint (hr) Value: 48
  misc_feature: MA Experiment 20001773 PARAMETER Experiment Name: At_Far-red-enriched-adult_P Parameter: Tissue Value: Aerial
  misc_feature: MA Experiment ID: 20001904 Result: Down-regulated in Transcription
  misc_feature: MA Experiment 20001904 PARAMETER Experiment Name: At_Drought_Reproduction_P Parameter: Age (day) Value: 37
  misc_feature: MA Experiment 20001904 PARAMETER Experiment Name: At_Drought_Reproduction_P Parameter: Organism Value: A. thaliana
  misc_feature: MA Experiment 20001904 PARAMETER Experiment Name: At_Drought_Reproduction_P Parameter: Plant Line Value: WS
  misc_feature: MA Experiment 20001904 PARAMETER Experiment Name: At_Drought_Reproduction_P Parameter: Timepoint (day) Value: 7
  misc_feature: MA Experiment 20001904 PARAMETER Experiment Name: At_Drought_Reproduction_P Parameter: Tissue Value: Rosettes
  misc_feature: MA Experiment 20001904 PARAMETER Experiment Name: At_Drought_Reproduction_P Parameter: Treatment Value: Drought vs. No Drought
  misc_feature: MA Experiment ID: 20001907 Result: Down-regulated in Transcription
  misc_feature: MA Experiment 20001907 PARAMETER Experiment Name: At_Drought_Reproduction_P Parameter: Age (day) Value: 37
  misc_feature: MA Experiment 20001907 PARAMETER Experiment Name: At_Drought_Reproduction_P Parameter: Organism Value: A. thaliana
  misc_feature: MA Experiment 20001907 PARAMETER Experiment Name: At_Drought_Reproduction_P Parameter: Plant Line Value: WS
  misc_feature: MA Experiment 20001907 PARAMETER Experiment Name: At_Drought_Reproduction_P Parameter: Timepoint (day) Value: 7
  misc_feature: MA Experiment 20001907 PARAMETER Experiment Name: At_Drought_Reproduction_P Parameter: Tissue Value: Siliques
  misc_feature: MA Experiment 20001907 PARAMETER Experiment Name: At_Drought_Reproduction_P Parameter: Treatment Value: Drought vs. No Drought
ccatatttgactcgtcaatataaatacaattgtaacaaacagattttgatcaaaagattttacttttctcaattcctttcaactttcaaaatcgaagatctcttaagccatgaacgatcttctctccggctcgtttaaaacctccgtcgcggacggttcatcgccgccgcactcacacaacatcgagatgtcaaaagcgaaagtctccggcggaagttgccacggtggtaacaacctagacacgttcttcctcgacgtggaggttgtaaacgaagaccttaaagagctagatcgtctctgtcacaacctccgatcgagcaacgaacagagcaagacgcttcataacgctaacgcggtgaaggagctgaagaagaagatggacgctgacgtcactgctgcgcttaagacggcgaggcgcttgaaaggaaacctcgaggctttagatcgggctaatgaagtcaaccgaagtttaccggaaagtggaccgggttcgtcgtcggaccggcaaagaacttcggtggttaacgggttgaggaagaagctgaaggatgagatggaaaaatttagtcgagtgagagaaacgatcacgaatgagtacaaagagacggttgggagaatgtgcttcaccgtcaccggcgaatatcccgacgaagctaccctcgagcgtctcatctccacaggtgaaagtgaaacatttttgcagaaagcgattcaagaacaaggtcgtggtaggattttggacactattagcgagatacaggagaggcacgacgcagtgaaagatattgagaagagtttgaatgagttgcaccaagtgtttcttgatatggctgtgttggttgagcatcagggtgcacagcttgatgacattgaaggcaacgtcaaacgagctaactcgcttgttcggtctggtgcggaccggcttgttaaggcacggttttatcagaagaacacacggaagtggacttgctttgccattttgctattgctcattattgtggttttaattgtggtgtttactgttaagccttgggagagtaatggtgggggaggtggaggtgcacctcgtcaagctactccggttcaagctcagccaccgccacctccggctgtgaatcggcggctactacgctaaataattttttttttgaggttccctctgtctatgcatgagcatatctatgttttgaagattgttttttattttacagtattttgtctttaatgtttttgtaatgttttggttggttaaactctgtgtatatataatgcgatcaccacatttctttgttttattatgg

SEQ ID NO: 23879 - protein, 341 aa, Arabidopsis thaliana
  peptide (1)..(341): Ceres Seq. ID no. 13495743
  misc_feature (218)..(280): Pfam Name: SNARE domain Pfam Description: SNARE domain
  misc_feature (1)..(312): Homolog of NCBI NO: 15228637 NR Description: syntaxin of plants SYP131 [Arabidopsis thaliana]
  misc_feature (1)..(310): Homolog of NCBI NO: 11358872 NR Description: syntaxin-like protein - Arabidopsis thaliana
  misc_feature (1)..(310): Homolog of NCBI NO: 18415701 NR Description: syntaxin of plants SYP132 [Arabidopsis thaliana]
  misc_feature (1)..(305): Homolog of NCBI NO: 15236285 NR Description: syntaxin of plants SYP123 [Arabidopsis thaliana]
  misc_feature (1)..(302): Homolog of NCBI NO: 15220328 NR Description: syntaxin of plants SYP125 [Arabidopsis thaliana]
  misc_feature (1)..(302): Homolog of NCBI NO: 15219900 NR Description: syntaxin of plants SYP124 [Arabidopsis thaliana]
  misc_feature (1)..(309): Homolog of NCBI NO: 4206787 NR Description: syntaxin-related protein Nt-syr1 [Nicotiana
  misc_feature (1)..(341): Homolog of NCBI NO: 15229865 NR Description: syntaxin of plants SYP121 [Arabidopsis thaliana]
  misc_feature (1)..(341): Homolog of NCBI NO: 15231205 NR Description: syntaxin of plants SYP122 [Arabidopsis thaliana]
  misc_feature (1)..(341): Homolog of NCBI NO: 11358871 NR Description: syntaxin synt4 [imported] - Arabidopsis thaliana
MNDLLSGSFKTSVADGSSPPHSHNIEMSKAKVSGGSCHGGNNLDTFFLDVEVVNEDLKELDRLCHNLRSSNEQSKTLHNANAVKELKKKMDADVTAALKTARRLKGNLEALDRANEVNRSLPESGPGSSSDRQRTSVVNGLRKKLKDEMEKFSRVRETITNEYKETVGRMCFTVTGEYPDEATLERLISTGESETFLQKAIQEQGRGRILDTISEIQERHDAVKDIEKSLNELHQVFLDMAVLVEHQGAQLDDIEGNVKRANSLVRSGADRLVKARFYQKNTRKWTCFAILLLLIIVVLIVVFTVKPWESNGGGGGGAPRQATPVQAQPPPPPAVNRRLLR

SEQ ID NO: 23880 - protein, 315 aa, Arabidopsis thaliana
  peptide (1)..(315): Ceres Seq. ID no. 13495744
  misc_feature (192)..(254): Pfam Name: SNARE domain Pfam Description: SNARE domain
  misc_feature (1)..(286): Homolog of NCBI NO: 15228637 NR Description: syntaxin of plants SYP131 [Arabidopsis thaliana]
  misc_feature (1)..(284): Homolog of NCBI NO: 11358872 NR Description: syntaxin-like protein - Arabidopsis thaliana
  misc_feature (1)..(284): Homolog of NCBI NO: 18415701 NR Description: syntaxin of plants SYP132 [Arabidopsis thaliana]
  misc_feature (1)..(279): Homolog of NCBI NO: 15236285 NR Description: syntaxin of plants SYP123 [Arabidopsis thaliana]
  misc_feature (1)..(276): Homolog of NCBI NO: 15220328 NR Description: syntaxin of plants SYP125 [Arabidopsis thaliana]
  misc_feature (1)..(276): Homolog of NCBI NO: 15219900 NR Description: syntaxin of plants SYP124 [Arabidopsis thaliana]
  misc_feature (1)..(283): Homolog of NCBI NO: 4206787 NR Description: syntaxin-related protein Nt-syr1 [Nicotiana
  misc_feature (1)..(315): Homolog of NCBI NO: 15229865 NR Description: syntaxin of plants SYP121 [Arabidopsis thaliana]
  misc_feature (1)..(315): Homolog of NCBI NO: 15231205 NR Description: syntaxin of plants SYP122 [Arabidopsis thaliana]
  misc_feature (1)..(315): Homolog of NCBI NO: 11358871 NR Description: syntaxin synt4 [imported] - Arabidopsis thaliana
MSKAKVSGGSCHGGNNLDTFFLDVEVVNEDLKELDRLCHNLRSSNEQSKTLHNANAVKELKKKMDADVTAALKTARRLKGNLEALDRANEVNRSLPESGPGSSSDRQRTSVVNGLRKKLKDEMEKFSRVRETITNEYKETVGRMCFTVTGEYPDEATLERLISTGESETFLQKAIQEQGRGRILDTISEIQERHDAVKDIEKSLNELHQVFLDMAVLVEHQGAQLDDIEGNVKRANSLVRSGADRLVKARFYQKNTRKWTCFAILLLLIIVVLIVVFTVKPWESNGGGGGGAPRQATPVQAQPPPPPAVNRRLLR

SEQ ID NO: 23881 - protein, 252 aa, Arabidopsis thaliana
  peptide (1)..(252): Ceres Seq. ID no. 13495745
  misc_feature (129)..(191): Pfam Name: SNARE domain Pfam Description: SNARE domain
  misc_feature (1)..(223): Homolog of NCBI NO: 15228637 NR Description: syntaxin of plants SYP131 [Arabidopsis thaliana]
  misc_feature (1)..(221): Homolog of NCBI NO: 11358872 NR Description: syntaxin-like protein - Arabidopsis thaliana
  misc_feature (1)..(221): Homolog of NCBI NO: 18415701 NR Description: syntaxin of plants SYP132 [Arabidopsis thaliana]
  misc_feature (1)..(216): Homolog of NCBI NO: 15236285 NR Description: syntaxin of plants SYP123 [Arabidopsis thaliana]
  misc_feature (1)..(213): Homolog of NCBI NO: 15220328 NR Description: syntaxin of plants SYP125 [Arabidopsis thaliana]
  misc_feature (1)..(213): Homolog of NCBI NO: 15219900 NR Description: syntaxin of plants SYP124 [Arabidopsis thaliana]
  misc_feature (1)..(220): Homolog of NCBI NO: 4206787 NR Description: syntaxin-related protein Nt-syr1 [Nicotiana
  misc_feature (1)..(252): Homolog of NCBI NO: 15229865 NR Description: syntaxin of plants SYP121 [Arabidopsis thaliana]
  misc_feature (1)..(252): Homolog of NCBI NO: 15231205 NR Description: syntaxin of plants SYP122 [Arabidopsis thaliana]
  misc_feature (1)..(252): Homolog of NCBI NO: 11358871 NR Description: syntaxin synt4 [imported] - Arabidopsis thaliana
MDADVTAALKTARRLKGNLEALDRANEVNRSLPESGPGSSSDRQRTSVVNGLRKKLKDEMEKFSRVRETITNEYKETVGRMCFTVTGEYPDEATLERLISTGESETFLQKAIQEQGRGRILDTISEIQERHDAVKDIEKSLNELHQVFLDMAVLVEHQGAQLDDIEGNVKRANSLVRSGADRLVKARFYQKNTRKWTCFAILLLLIIVVLIVVFTVKPWESNGGGGGGAPRQATPVQAQPPPPPAVNRRLLR

SEQ ID NO: 23882 - DNA, 1297 bp, Arabidopsis thaliana
  misc_feature (1)..(1297): Ceres Seq. ID no. 12577564
  misc_feature: MA Experiment ID: 108433 Result: Down-regulated in Transcription
  misc_feature: MA Experiment 108433 PARAMETER Experiment Name: At_rhl_Mutant2_cDNA_P Parameter: Age (day) Value: 7
  misc_feature: MA Experiment 108433 PARAMETER Experiment Name: At_rhl_Mutant2_cDNA_P Parameter: Organism Value: A. thaliana
  misc_feature: MA Experiment 108433 PARAMETER Experiment Name: At_rhl_Mutant2_cDNA_P Parameter: Plant Line Value: rhl Mutant vs. wt landsburg
  misc_feature: MA Experiment 108433 PARAMETER Experiment Name: At_rhl_Mutant2_cDNA_P Parameter: Tissue Value: Roots
  misc_feature: MA Experiment ID: 20000451 Result: Down-regulated in Transcription
  misc_feature: MA Experiment 20000451 PARAMETER Experiment Name: At_CS6879_Shoots-Roots_P Parameter: Age (day) Value: 14
  misc_feature: MA Experiment 20000451 PARAMETER Experiment Name: At_CS6879_Shoots-Roots_P Parameter: Organism Value: A. thaliana
  misc_feature: MA Experiment 20000451 PARAMETER Experiment Name: At_CS6879_Shoots-Roots_P Parameter: Plant Line Value: CS6879 vs. WS
  misc_feature: MA Experiment 20000451 PARAMETER Experiment Name: At_CS6879_Shoots-Roots_P Parameter: Tissue Value: Roots
  misc_feature: MA Experiment ID: 20001905 Result: Down-regulated in Transcription
  misc_feature: MA Experiment 20001905 PARAMETER Experiment Name: At_Drought_Reproduction_P Parameter: Age (day) Value: 40
  misc_feature: MA Experiment 20001905 PARAMETER Experiment Name: At_Drought_Reproduction_P Parameter: Organism Value: A. thaliana
  misc_feature: MA Experiment 20001905 PARAMETER Experiment Name: At_Drought_Reproduction_P Parameter: Plant Line Value: WS
  misc_feature: MA Experiment 20001905 PARAMETER Experiment Name: At_Drought_Reproduction_P Parameter: Timepoint (day) Value: 10
  misc_feature: MA Experiment 20001905 PARAMETER Experiment Name: At_Drought_Reproduction_P Parameter: Tissue Value: Rosettes
  misc_feature: MA Experiment 20001905 PARAMETER Experiment Name: At_Drought_Reproduction_P Parameter: Treatment Value: Drought vs. No Drought
cttcctgcgtcaatggcgactcaaggtcaggttatcacttgcaaagctgcggtggcttacgagccgaacaagcctctgtcatcgaagatgtgcaagtggctccacctcaagctggtgaggttcggatcaagatcctctacactgctctttgtcacaccgacgcttacacttggagcggcaaggatcctgaaggtctctttccttgtattctaggtcatgaggctgctgggattgttgagagtgttggtgaaggagtaactgaagttcaagctggagatcatgttatcccttgttatcaagctgagtgtcgtgaatgcaagttttgcaaatctgggaagactaacctttgtggcaaggtgagatctgctactggtgttgggattatgatgaatgaccgtaagtcgaggttctcggttaatgggaaacccatttatcacttcatgggtacttccacgtttagtcagtatactgttgttcatgatgttagcgtcgccaaaattgatcctactgctcctttggataaagtttgccttcttggatgtggtgttcccactggccttggagcagtttggaatactgcaaaagtagaaccagggtcaaatgttgccattttcggtcttggcactgttggacttgctgttgccgagggtgcgaaaacagctggtgcttcaaggatcattggcattgacatcgatagcaagaagtatgaaactgcaaagaagtttggtgttaacgaatttgtgaacccaaaggatcacgacaagccaattcaggaagtgattgtcgatctcactgatggcggtgttgactacagctttgagtgcatcgggaatgtctccgtaatgagagctgcattggagtgctgtcacaagggatggggaacttcggtcatagttggtgttgcagcatcaggacaagagatatcaactcgtccgttccaactcgtgactggccgtgtgtggaaaggaacagcttttggtggtttcaagagtcgaacccaagtgccttggcttgtagaaaagtacatgaacaaggagataaaagtggatgaatacataacacacaacttgaccttgggagaaatcaataaggctttcgatctattgcacgaaggtacttgccttcgttgtgtcctcgataccagcaaatgactatatgggtcctctctgctttaatctatgtgttcttgtgactttcgtcttttatcggtattgacatttcctaagagcaacagactactctactcttgtgtgtctcgtttctatcttatgcttcaataaaatatcaattaagacct

SEQ ID NO: 23883 - protein, 382 aa, Arabidopsis thaliana
  peptide (1)..(382): Ceres Seq. ID no. 12577565
  misc_feature (27)..(378): Homolog of NCBI NO: 5902740 NR Description: ALCOHOL DEHYDROGENASE CLASS III H CHAIN
  misc_feature (27)..(378): Homolog of NCBI NO: 25283011 NR Description: alcohol dehydrogenase (EC 1.1.1.1) 3 - zebra fish
  misc_feature (27)..(378): Homolog of NCBI NO: 18858257 NR Description: alcohol dehydrogenase 5 [Danio rerio]
  misc_feature (27)..(378): Homolog of NCBI NO: 5902742 NR Description: ALCOHOL DEHYDROGENASE CLASS III
  misc_feature (27)..(378): Homolog of NCBI NO: 3121727 NR Description: ALCOHOL DEHYDROGENASE CLASS III
  misc_feature (26)..(378): Homolog of NCBI NO: 6225010 NR Description: ALCOHOL DEHYDROGENASE CLASS III
  misc_feature (21)..(382): Homolog of NCBI NO: 3023271 NR Description: ALCOHOL DEHYDROGENASE CLASS III
  misc_feature (26)..(382): Homolog of NCBI NO: 1498024 NR Description: glutathione-dependent formaldehyde dehydrogenase
  misc_feature (26)..(382): Homolog of NCBI NO: 2129562 NR Description: alcohol dehydrogenase (EC 1.1.1.1) class III -
  misc_feature (26)..(382): Homolog of NCBI NO: 15240054 NR Description: alcohol dehydrogenase (EC 1.1.1.1) class III
SCVNGDSRSGYHLQSCGGLRAEQASVIEDVQVAPPQAGEVRIKILYTALCHTDAYTWSGKDPEGLFPCILGHEAAGIVESVGEGVTEVQAGDHVIPCYQAECRECKFCKSGKTNLCGKVRSATGVGIMMNDRKSRFSVNGKPIYHFMGTSTFSQYTVVHDVSVAKIDPTAPLDKVCLLGCGVPTGLGAVWNTAKVEPGSNVAIFGLGTVGLAVAEGAKTAGASRIIGIDIDSKKYETAKKFGVNEFVNPKDHDKPIQEVIVDLTDGGVDYSFECIGNVSVMRAALECCHKGWGTSVIVGVAASGQEISTRPFQLVTGRVWKGTAFGGFKSRTQVPWLVEKYMNKEIKVDEYITHNLTLGEINKAFDLLHEGTCLRCVLDTSK

SEQ ID NO: 23884 - protein, 255 aa, Arabidopsis thaliana; identical to SEQ ID NO: 22338
  peptide (1)..(255): Ceres Seq. ID no. 12577566
  misc_feature (1)..(251): Homolog of NCBI NO: 5902740 NR Description: ALCOHOL DEHYDROGENASE CLASS III H CHAIN
  misc_feature (1)..(251): Homolog of NCBI NO: 25283011 NR Description: alcohol dehydrogenase (EC 1.1.1.1) 3 - zebra fish
  misc_feature (1)..(251): Homolog of NCBI NO: 18858257 NR Description: alcohol dehydrogenase 5 [Danio rerio]
  misc_feature (1)..(251): Homolog of NCBI NO: 5902742 NR Description: ALCOHOL DEHYDROGENASE CLASS III
  misc_feature (1)..(251): Homolog of NCBI NO: 3121727 NR Description: ALCOHOL DEHYDROGENASE CLASS III
  misc_feature (1)..(251): Homolog of NCBI NO: 6225010 NR Description: ALCOHOL DEHYDROGENASE CLASS III
  misc_feature (1)..(255): Homolog of NCBI NO: 3023271 NR Description: ALCOHOL DEHYDROGENASE CLASS III
  misc_feature (1)..(255): Homolog of NCBI NO: 1498024 NR Description: glutathione-dependent formaldehyde dehydrogenase
  misc_feature (1)..(255): Homolog of NCBI NO: 2129562 NR Description: alcohol dehydrogenase (EC 1.1.1.1) class III -
  misc_feature (1)..(255): Homolog of NCBI NO: 15240054 NR Description: alcohol dehydrogenase (EC 1.1.1.1) class III

SEQ ID NO: 23885 - protein, 254 aa, Arabidopsis thaliana
  peptide (1)..(254): Ceres Seq. ID no. 12577567
  misc_feature (1)..(250): Homolog of NCBI NO: 5902740 NR Description: ALCOHOL DEHYDROGENASE CLASS III H CHAIN
  misc_feature (1)..(250): Homolog of NCBI NO: 25283011 NR Description: alcohol dehydrogenase (EC 1.1.1.1) 3 - zebra fish
  misc_feature (1)..(250): Homolog of NCBI NO: 18858257 NR Description: alcohol dehydrogenase 5 [Danio rerio]
  misc_feature (1)..(250): Homolog of NCBI NO: 5902742 NR Description: ALCOHOL DEHYDROGENASE CLASS III
  misc_feature (1)..(250): Homolog of NCBI NO: 3121727 NR Description: ALCOHOL DEHYDROGENASE CLASS III
  misc_feature (1)..(250): Homolog of NCBI NO: 6225010 NR Description: ALCOHOL DEHYDROGENASE CLASS III
  misc_feature (1)..(254): Homolog of NCBI NO: 3023271 NR Description: ALCOHOL DEHYDROGENASE CLASS III
  misc_feature (1)..(254): Homolog of NCBI NO: 1498024 NR Description: glutathione-dependent formaldehyde dehydrogenase
  misc_feature (1)..(254): Homolog of NCBI NO: 2129562 NR Description: alcohol dehydrogenase (EC 1.1.1.1) class III -
  misc_feature (1)..(254): Homolog of NCBI NO: 15240054 NR Description: alcohol dehydrogenase (EC 1.1.1.1) class III
MNDRKSRFSVNGKPIYHFMGTSTFSQYTVVHDVSVAKIDPTAPLDKVCLLGCGVPTGLGAVWNTAKVEPGSNVAIFGLGTVGLAVAEGAKTAGASRIIGIDIDSKKYETAKKFGVNEFVNPKDHDKPIQEVIVDLTDGGVDYSFECIGNVSVMRAALECCHKGWGTSVIVGVAASGQEISTRPFQLVTGRVWKGTAFGGFKSRTQVPWLVEKYMNKEIKVDEYITHNLTLGEINKAFDLLHEGTCLRCVLDTSK

SEQ ID NO: 23886 - DNA, 1403 bp, Arabidopsis thaliana
  misc_feature (1)..(1403): Ceres Seq. ID no. 12601443
  misc_feature: MA Experiment ID: 20000496 Result: Up-regulated in Transcription
  misc_feature: MA Experiment 20000496 PARAMETER Experiment Name: At_Guard_Cells_P Parameter: Harvest Date Value: 7/19/2002
  misc_feature: MA Experiment 20000496 PARAMETER Experiment Name: At_Guard_Cells_P Parameter: Organism Value: Canola
  misc_feature: MA Experiment 20000496 PARAMETER Experiment Name: At_Guard_Cells_P Parameter: Tissue Value: Guard Cells vs. Leaves
  misc_feature: MA Experiment ID: 20000794 Result: Up-regulated in Transcription
  misc_feature: MA Experiment 20000794 PARAMETER Experiment Name: At_Petals_P Parameter: Age (day) Value: 23-25 days
  misc_feature: MA Experiment 20000794 PARAMETER Experiment Name: At_Petals_P Parameter: Plant Line Value: WS
  misc_feature: MA Experiment 20000794 PARAMETER Experiment Name: At_Petals_P Parameter: Tissue Value: Petals vs. Whole plant
aaaatttaccactccttccatgtttttgtttctctcttcttcttgattgttgcgcttttgttagctttctctggttcattttccatggacggaccttgacctctctgcttcccttcgtgcattttctctctctcactatcctctctctttctagtgtttgtttgatcctctgcgtactctgttcttcttctctcttcagataaaacaagtcctgcatattgaagatctgatgtcttatcgattgctaagtgtggataaggatgaactggttacgtcaccttgtttgaaagaacgtaactacttgggtctctctgattgttcctctgttgatagctcaactattcccaatgttgttgggaagagcaatctcaatttcaaagctactgaactgaggctaggtcttcctgagtctcaatctcctgagagagagactgatttcggtttgctgagtccgagaacacccgatgagaagcttctcttcccgttgctaccttctaaagacaatggttctgctactacagggcataagaatgttgtttctggtaacaagagaggatttgctgacacttgggatgagttttcgggtgtgaaaggatctgttagacctggaggaggaatcaacatgatgttgtcgccgaaagttaaggatgtctcgaagagtattcaagaagaaagatctcatgctaagggtggcttgaacaatgcaccagctgccaaggcacaggttgttggttggcctccaatcagatcataccggaagaatacaatggcttcttctacttcgaagaacactgatgaggttgatgggaaacctggtcttggtgttctgtttgtgaaggtgagcatggatggtgctccgtatctgagaaaggtcgacttgagaacttacacttcctatcaacagttgtcttctgcacttgagaaaatgttcagctgcttcacccttggtcaatgtggtcttcatggtgctcaagggagggaaagaatgagcgagattaaactgaaggatcttcttcatggatcagaatttgtgcttacttatgaagataaagacggtgattggatgcttgttggcgatgttccatgggagatatttactgaaacatgccagaaactgaagatcatgaagggttctgattctattggcttagctccaggtgcagtggagaaatcgaagaacaaagagcgggtttgaaacgaagatgctcaagacaaaaaaaaaacactatgcacagttccaatgtttaagttttatttactgatgtgtttgaaaactctttagtctttttactaatttgtgttgtaagactttggattctcttatttgtgtgtgcttgttcaaaacaaatacattcttatgtgtgtgtttctactttgaccttcaagatatttcgtctctacgc

SEQ ID NO: 23887 - protein, 321 aa, Arabidopsis thaliana
  peptide (1)..(321): Ceres Seq. ID no. 12601444
  misc_feature (47)..(311): Pfam Name: AUX/IAA family Pfam Description: AUX/IAA family
  misc_feature (47)..(311): Pfam Name: AUX/IAA family Pfam Description: AUX/IAA family
  misc_feature (19)..(316): Homolog of NCBI NO: 30698143 NR Description: auxin-responsive protein IAA9 (Indoleacetic
  misc_feature (19)..(316): Homolog of NCBI NO: 21592701 NR Description: auxin-induced protein IAA9 [Arabidopsis thaliana]
  misc_feature (19)..(316): Homolog of NCBI NO: 30698145 NR Description: auxin-responsive protein IAA9 (Indoleacetic
  misc_feature (19)..(137): Homolog of NCBI NO: 29465672 NR Description: Aux/IAA protein [Vitis vinifera]
  misc_feature (133)..(318): Homolog of NCBI NO: 29465672 NR Description: Aux/IAA protein [Vitis vinifera]
  misc_feature (19)..(316): Homolog of NCBI NO: 30698143 NR Description: auxin-responsive protein IAA9 (Indoleacetic
  misc_feature (19)..(316): Homolog of NCBI NO: 30698145 NR Description: auxin-responsive protein IAA9 (Indoleacetic
  misc_feature (133)..(318): Homolog of NCBI NO: 29465672 NR Description: Aux/IAA protein [Vitis vinifera]
  misc_feature (1)..(321): Homolog of NCBI NO: 15227275 NR Description: auxin-regulated protein (IAA8)
  misc_feature (1)..(321): Homolog of NCBI NO: 30681782 NR Description: auxin-responsive protein IAA8 (Indoleacetic
  misc_feature (19)..(318): Homolog of NCBI NO: 20257219 NR Description: auxin-regulated protein [Zinnia elegans]
  misc_feature (124)..(318): Homolog of NCBI NO: 20269051 NR Description: aux/IAA protein [Populus tremula x Populus
  misc_feature (19)..(137): Homolog of NCBI NO: 20269051 NR Description: aux/IAA protein [Populus tremula x Populus
  misc_feature (19)..(137): Homolog of NCBI NO: 29465672 NR Description: Aux/IAA protein [Vitis vinifera]
  misc_feature (19)..(316): Homolog of NCBI NO: 21592701 NR Description: auxin-induced protein IAA9 [Arabidopsis thaliana]
  misc_feature (19)..(137): Homolog of NCBI NO: 20269051 NR Description: aux/IAA protein [Populus tremula x Populus
  misc_feature (124)..(318): Homolog of NCBI NO: 20269051 NR Description: aux/IAA protein [Populus tremula x Populus
  misc_feature (19)..(318): Homolog of NCBI NO: 20257219 NR Description: auxin-regulated protein [Zinnia elegans]
  misc_feature (1)..(321): Homolog of NCBI NO: 30681782 NR Description: auxin-responsive protein IAA8 (Indoleacetic
  misc_feature (1)..(321): Homolog of NCBI NO: 15227275 NR Description: auxin-regulated protein (IAA8)
MSYRLLSVDKDELVTSPCLKERNYLGLSDCSSVDSSTIPNVVGKSNLNFKATELRLGLPESQSPERETDFGLLSPRTPDEKLLFPLLPSKDNGSATTGHKNVVSGNKRGFADTWDEFSGVKGSVRPGGGINMMLSPKVKDVSKSIQEERSHAKGGLNNAPAAKAQVVGWPPIRSYRKNTMASSTSKNTDEVDGKPGLGVLFVKVSMDGAPYLRKVDLRTYTSYQQLSSALEKMFSCFTLGQCGLHGAQGRERMSEIKLKDLLHGSEFVLTYEDKDGDWMLVGDVPWEIFTETCQKLKIMKGSDSIGLAPGAVEKSKNKERV

SEQ ID NO: 23888 - protein, 190 aa, Arabidopsis thaliana
  peptide (1)..(190): Ceres Seq. ID no. 12601445
  misc_feature (1)..(180): Pfam Name: AUX/IAA family Pfam Description: AUX/IAA family
  misc_feature (1)..(180): Pfam Name: AUX/IAA family Pfam Description: AUX/IAA family
  misc_feature (1)..(176): Homolog of NCBI NO: 10177324 NR Description: auxin-induced protein IAA9 [Arabidopsis thaliana]
  misc_feature (1)..(187): Homolog of NCBI NO: 25989504 NR Description: Aux/IAA protein [Solanum tuberosum]
  misc_feature (1)..(185): Homolog of NCBI NO: 30698143 NR Description: auxin-responsive protein IAA9 (Indoleacetic
  misc_feature (1)..(185): Homolog of NCBI NO: 21592701 NR Description: auxin-induced protein IAA9 [Arabidopsis thaliana]
  misc_feature (1)..(185): Homolog of NCBI NO: 30698145 NR Description: auxin-responsive protein IAA9 (Indoleacetic
  misc_feature (1)..(187): Homolog of NCBI NO: 20269051 NR Description: aux/IAA protein [Populus tremula x Populus
  misc_feature (1)..(190): Homolog of NCBI NO: 30681782 NR Description: auxin-responsive protein IAA8 (Indoleacetic
  misc_feature (2)..(187): Homolog of NCBI NO: 29465672 NR Description: Aux/IAA protein [Vitis vinifera]
  misc_feature (1)..(185): Homolog of NCBI NO: 30698145 NR Description: auxin-responsive protein IAA9 (Indoleacetic
  misc_feature (1)..(185): Homolog of NCBI NO: 21592701 NR Description: auxin-induced protein IAA9 [Arabidopsis thaliana]
  misc_feature (1)..(185): Homolog of NCBI NO: 30698143 NR Description: auxin-responsive protein IAA9 (Indoleacetic
  misc_feature (1)..(187): Homolog of NCBI NO: 25989504 NR Description: Aux/IAA protein [Solanum tuberosum]
  misc_feature (1)..(176): Homolog of NCBI NO: 10177324 NR Description: auxin-induced protein IAA9 [Arabidopsis thaliana]
  misc_feature (1)..(190): Homolog of NCBI NO: 15227275 NR Description: auxin-regulated protein (IAA8)
  misc_feature (1)..(187): Homolog of NCBI NO: 20257219 NR Description: auxin-regulated protein [Zinnia elegans]
  misc_feature (2)..(187): Homolog of NCBI NO: 29465672 NR Description: Aux/IAA protein [Vitis vinifera]
  misc_feature (1)..(187): Homolog of NCBI NO: 20269051 NR Description: aux/IAA protein [Populus tremula x Populus
  misc_feature (1)..(187): Homolog of NCBI NO: 20257219 NR Description: auxin-regulated protein [Zinnia elegans]
  misc_feature (1)..(190): Homolog of NCBI NO: 30681782 NR Description: auxin-responsive protein IAA8 (Indoleacetic
  misc_feature (1)..(190): Homolog of NCBI NO: 15227275 NR Description: auxin-regulated protein (IAA8)
MMLSPKVKDVSKSIQEERSHAKGGLNNAPAAKAQVVGWPPIRSYRKNTMASSTSKNTDEVDGKPGLGVLFVKVSMDGAPYLRKVDLRTYTSYQQLSSALEKMFSCFTLGQCGLHGAQGRERMSEIKLKDLLHGSEFVLTYEDKDGDWMLVGDVPWEIFTETCQKLKIMKGSDSIGLAPGAVEKSKNKERV

SEQ ID NO: 23889 - protein, 189 aa, Arabidopsis thaliana
  peptide (1)..(189): Ceres Seq. ID no. 12601446
  misc_feature (1)..(179): Pfam Name: AUX/IAA family Pfam Description: AUX/IAA family
  misc_feature (1)..(179): Pfam Name: AUX/IAA family Pfam Description: AUX/IAA family
  misc_feature (1)..(175): Homolog of NCBI NO: 10177324 NR Description: auxin-induced protein IAA9 [Arabidopsis thaliana]
  misc_feature (1)..(186): Homolog of NCBI NO: 25989504 NR Description: Aux/IAA protein [Solanum tuberosum]
  misc_feature (1)..(184): Homolog of NCBI NO: 30698143 NR Description: auxin-responsive protein IAA9 (Indoleacetic
  misc_feature (1)..(184): Homolog of NCBI NO: 21592701 NR Description: auxin-induced protein IAA9 [Arabidopsis thaliana]
  misc_feature (1)..(184): Homolog of NCBI NO: 30698145 NR Description: auxin-responsive protein IAA9 (Indoleacetic
  misc_feature (1)..(175): Homolog of NCBI NO: 10177324 NR Description: auxin-induced protein IAA9 [Arabidopsis thaliana]
  misc_feature (1)..(184): Homolog of NCBI NO: 30698143 NR Description: auxin-responsive protein IAA9 (Indoleacetic
  misc_feature (1)..(184): Homolog of NCBI NO: 30698145 NR Description: auxin-responsive protein IAA9 (Indoleacetic
  misc_feature (1)..(189): Homolog of NCBI NO: 15227275 NR Description: auxin-regulated protein (IAA8)
  misc_feature (1)..(189): Homolog of NCBI NO: 30681782 NR Description: auxin-responsive protein IAA8 (Indoleacetic
  misc_feature (1)..(186): Homolog of NCBI NO: 20257219 NR Description: auxin-regulated protein [Zinnia elegans]
  misc_feature (1)..(186): Homolog of NCBI NO: 20269051 NR Description: aux/IAA protein [Populus tremula x Populus
  misc_feature (1)..(186): Homolog of NCBI NO: 29465672 NR Description: Aux/IAA protein [Vitis vinifera]
  misc_feature (1)..(184): Homolog of NCBI NO: 21592701 NR Description: auxin-induced protein IAA9 [Arabidopsis thaliana]
  misc_feature (1)..(186): Homolog of NCBI NO: 25989504 NR Description: Aux/IAA protein [Solanum tuberosum]
  misc_feature (1)..(186): Homolog of NCBI NO: 29465672 NR Description: Aux/IAA protein [Vitis vinifera]
  misc_feature (1)..(186): Homolog of NCBI NO: 20269051 NR Description: aux/IAA protein [Populus tremula x Populus
  misc_feature (1)..(186): Homolog of NCBI NO: 20257219 NR Description: auxin-regulated protein [Zinnia elegans]
  misc_feature (1)..(189): Homolog of NCBI NO: 30681782 NR Description: auxin-responsive protein IAA8 (Indoleacetic
  misc_feature (1)..(189): Homolog of NCBI NO: 15227275 NR Description: auxin-regulated protein (IAA8)
MLSPKVKDVSKSIQEERSHAKGGLNNAPAAKAQVVGWPPIRSYRKNTMASSTSKNTDEVDGKPGLGVLFVKVSMDGAPYLRKVDLRTYTSYQQLSSALEKMFSCFTLGQCGLHGAQGRERMSEIKLKDLLHGSEFVLTYEDKDGDWMLVGDVPWEIFTETCQKLKIMKGSDSIGLAPGAVEKSKNKERV

SEQ ID NO: 23890 - DNA, 1058 bp, Arabidopsis thaliana
  misc_feature (1)..(1058): Ceres Seq. ID no. 12340085
  misc_feature: MA Experiment ID: 20000794 Result: Down-regulated in Transcription
  misc_feature: MA Experiment 20000794 PARAMETER Experiment Name: At_Petals_P Parameter: Age (day) Value: 23-25 days
  misc_feature: MA Experiment 20000794 PARAMETER Experiment Name: At_Petals_P Parameter: Plant Line Value: WS
  misc_feature: MA Experiment 20000794 PARAMETER Experiment Name: At_Petals_P Parameter: Tissue Value: Petals vs. Whole plant
  misc_feature: MA Experiment ID: 20001905 Result: Down-regulated in Transcription
  misc_feature: MA Experiment 20001905 PARAMETER Experiment Name: At_Drought_Reproduction_P Parameter: Age (day) Value: 40
  misc_feature: MA Experiment 20001905 PARAMETER Experiment Name: At_Drought_Reproduction_P Parameter: Organism Value: A. thaliana
  misc_feature: MA Experiment 20001905 PARAMETER Experiment Name: At_Drought_Reproduction_P Parameter: Plant Line Value: WS
  misc_feature: MA Experiment 20001905 PARAMETER Experiment Name: At_Drought_Reproduction_P Parameter: Timepoint (day) Value: 10
  misc_feature: MA Experiment 20001905 PARAMETER Experiment Name: At_Drought_Reproduction_P Parameter: Tissue Value: Rosettes
  misc_feature: MA Experiment 20001905 PARAMETER Experiment Name: At_Drought_Reproduction_P Parameter: Treatment Value: Drought vs. No Drought
gttttcttctagactttgcagtcacagagatagtgagtgagatagagagagtgataatggcgagtggactaagcgagatcgggagcacgaagatgttcgatggctacaacaaaagatacaaacacttcagtgagacacttggatgttccatgaccttttccatctacttccctccttctgcttcttcttcccataaatctcctgtgctttactggctttctggcctcacctgcacggacgagaacttcattatcaaatcaggagctcaacgtgctgcttctactcacggcattgctcttgttgctccagacacttctccaagaggactaaatgttgaaggggaggcagacagttacgactttggtgtaggagccggattctacctcaatgctactcaggaaaagtggaagaactggcgtatgtatgactatgttgtcaaagagttgccaaaactcctgagtgaaaacttttcccagcttgacacaacaaaagcatctatatctggacactccatgggtggacatggagctcttactatatacctgaggaacctcgataaatacaagtctgtatctgcgtttgcaccaatcacgaatcccataaattgtgcatggggacagaaggcattcaccaattatctaggtgacaacaaagctgcttgggaggaatacgatgccacttgtcttatttcaaagtacaacaatctttctgcaacaattctaattgatcagggagaaaacgaccagttctaccctgatcagttattgcccagcaagtttgaggaggcgtgcaagaaagtgaatgcaccgctcttattgcgcctccatccaggatacgaccactcctactatttcattgccaccttcatcgaagaccacattagtcaccatgctcaagcccttgagctatagctcacttcatctgcttggaaaccggctttgggtttgtccaagtattagtatctcaataaagcaagtggacttgtaatgttttatgttcaataactcccctgtgtgctcttttgtctacgataataataagaaaatcatctttgctac

SEQ ID NO: 23891 - protein, 302 aa, Arabidopsis thaliana
  peptide (1)..(302): Ceres Seq. ID no. 12340086
  misc_feature (23)..(300): Homolog of NCBI NO: 9857260 NR Description: esterase D [Sus scrofa]
  misc_feature (23)..(301): Homolog of NCBI NO: 23060276 NR Description: hypothetical protein [Pseudomonas fluorescens
  misc_feature (23)..(300): Homolog of NCBI NO: 34874491 NR Description: similar to esterase 10; esterase D [Rattus
  misc_feature (23)..(300): Homolog of NCBI NO: 28436838 NR Description: Similar to esterase 10 [Mus musculus]
  misc_feature (23)..(300): Homolog of NCBI NO: 13937355 NR Description: esterase 10; esterase D [Mus musculus]
  misc_feature (2)..(300): Homolog of NCBI NO: 12846304 NR Description: unnamed protein product [Mus musculus]
  misc_feature (21)..(107): Homolog of NCBI NO: 20161330 NR Description: putative esterase D [Oryza sativa (japonica
  misc_feature (118)..(301): Homolog of NCBI NO: 20161330 NR Description: putative esterase D [Oryza sativa (japonica
  misc_feature (31)..(302): Homolog of NCBI NO: 21593226 NR Description: putative esterase D [Arabidopsis thaliana]
  misc_feature (19)..(302): Homolog of NCBI NO: 15227376 NR Description: putative esterase D
FLLDFAVTEIVSEIERVIMASGLSEIGSTKMFDGYNKRYKHFSETLGCSMTFSIYFPPSASSSHKSPVLYWLSGLTCTDENFIIKSGAQRAASTHGIALVAPDTSPRGLNVEGEADSYDFGVGAGFYLNATQEKWKNWRMYDYVVKELPKLLSENFSQLDTTKASISGHSMGGHGALTIYLRNLDKYKSVSAFAPITNPINCAWGQKAFTNYLGDNKAAWEEYDATCLISKYNNLSATILIDQGENDQFYPDQLLPSKFEEACKKVNAPLLLRLHPGYDHSYYFIATFIEDHISHHAQALEL

SEQ ID NO: 23892 - protein, 284 aa, Arabidopsis thaliana
  peptide (1)..(284): Ceres Seq. ID no. 12340087
  misc_feature (5)..(282): Homolog of NCBI NO: 9857260 NR Description: esterase D [Sus scrofa]
  misc_feature (5)..(283): Homolog of NCBI NO: 23060276 NR Description: hypothetical protein [Pseudomonas fluorescens
  misc_feature (5)..(282): Homolog of NCBI NO: 34874491 NR Description: similar to esterase 10; esterase D [Rattus
  misc_feature (5)..(282): Homolog of NCBI NO: 28436838 NR Description: Similar to esterase 10 [Mus musculus]
  misc_feature (5)..(282): Homolog of NCBI NO: 13937355 NR Description: esterase 10; esterase D [Mus musculus]
  misc_feature (1)..(282): Homolog of NCBI NO: 12846304 NR Description: unnamed protein product [Mus musculus]
  misc_feature (3)..(89): Homolog of NCBI NO: 20161330 NR Description: putative esterase D [Oryza sativa (japonica
  misc_feature (100)..(283): Homolog of NCBI NO: 20161330 NR Description: putative esterase D [Oryza sativa (japonica
  misc_feature (13)..(284): Homolog of NCBI NO: 21593226 NR Description: putative esterase D [Arabidopsis thaliana]
  misc_feature (1)..(284): Homolog of NCBI NO: 15227376 NR Description: putative esterase D
MASGLSEIGSTKMFDGYNKRYKHFSETLGCSMTFSIYFPPSASSSHKSPVLYWLSGLTCTDENFIIKSGAQRAASTHGIALVAPDTSPRGLNVEGEADSYDFGVGAGFYLNATQEKWKNWRMYDYVVKELPKLLSENFSQLDTTKASISGHSMGGHGALTIYLRNLDKYKSVSAFAPITNPINCAWGQKAFTNYLGDNKAAWEEYDATCLISKYNNLSATILIDQGENDQFYPDQLLPSKFEEACKKVNAPLLLRLHPGYDHSYYFIATFIEDHISHHAQALEL

SEQ ID NO: 23893 - protein, 272 aa, Arabidopsis thaliana
  peptide (1)..(272): Ceres Seq. ID no. 12340088
  misc_feature (1)..(270): Homolog of NCBI NO: 9857260 NR Description: esterase D [Sus scrofa]
  misc_feature (1)..(271): Homolog of NCBI NO: 23060276 NR Description: hypothetical protein [Pseudomonas fluorescens
  misc_feature (1)..(270): Homolog of NCBI NO: 34874491 NR Description: similar to esterase 10; esterase D [Rattus
  misc_feature (1)..(270): Homolog of NCBI NO: 28436838 NR Description: Similar to esterase 10 [Mus musculus]
  misc_feature (1)..(270): Homolog of NCBI NO: 13937355 NR Description: esterase 10; esterase D [Mus musculus]
  misc_feature (1)..(270): Homolog of NCBI NO: 12846304 NR Description: unnamed protein product [Mus musculus]
  misc_feature (1)..(77): Homolog of NCBI NO: 20161330 NR Description: putative esterase D [Oryza sativa (japonica
  misc_feature (88)..(271): Homolog of NCBI NO: 20161330 NR Description: putative esterase D [Oryza sativa (japonica
  misc_feature (1)..(272): Homolog of NCBI NO: 21593226 NR Description: putative esterase D [Arabidopsis thaliana]
  misc_feature (1)..(272): Homolog of NCBI NO: 15227376 NR Description: putative esterase D
MFDGYNKRYKHFSETLGCSMTFSIYFPPSASSSHKSPVLYWLSGLTCTDENFIIKSGAQRAASTHGIALVAPDTSPRGLNVEGEADSYDFGVGAGFYLNATQEKWKNWRMYDYVVKELPKLLSENFSQLDTTKASISGHSMGGHGALTIYLRNLDKYKSVSAFAPITNPINCAWGQKAFTNYLGDNKAAWEEYDATCLISKYNNLSATILIDQGENDQFYPDQLLPSKFEEACKKVNAPLLLRLHPGYDHSYYFIATFIEDHISHHAQALEL

SEQ ID NO: 23894 - DNA, 1764 bp, Arabidopsis thaliana
  misc_feature (1)..(1764): Ceres Seq. ID no. 13487561
  misc_feature: MA Experiment ID: 108461 Result: Up-regulated in Transcription
  misc_feature: MA Experiment 108461 PARAMETER Experiment Name: At_Germinating_Seeds_cDNA_P Parameter: Age (day) Value: 1 vs. 0
  misc_feature: MA Experiment 108461 PARAMETER Experiment Name: At_Germinating_Seeds_cDNA_P Parameter: Tissue Value: Germinating Seeds
  misc_feature: MA Experiment ID: 108462 Result: Up-regulated in Transcription
  misc_feature: MA Experiment 108462 PARAMETER Experiment Name: At_Germinating_Seeds_cDNA_P Parameter: Age (day) Value: 2 vs. 0
  misc_feature: MA Experiment 108462 PARAMETER Experiment Name: At_Germinating_Seeds_cDNA_P Parameter: Tissue Value: Germinating Seeds
  misc_feature: MA Experiment ID: 108668 Result: Up-regulated in Transcription
  misc_feature: MA Experiment 108668 PARAMETER Experiment Name: At_2mM_SA_cDNA_P Parameter: Plant Line Value: WS
  misc_feature: MA Experiment 108668 PARAMETER Experiment Name: At_2mM_SA_cDNA_P Parameter: Timepoint (hr) Value: 6
  misc_feature: MA Experiment 108668 PARAMETER Experiment Name: At_2mM_SA_cDNA_P Parameter: Treatment Value: 2mM SA vs. No Treatment
  misc_feature: MA Experiment ID: 20000179 Result: Up-regulated in Transcription
  misc_feature: MA Experiment 20000179 PARAMETER Experiment Name: At_Germinating_Seeds_P Parameter: Age (hr) Value: 6 vs. 0
  misc_feature: MA Experiment 20000179 PARAMETER Experiment Name: At_Germinating_Seeds_P Parameter: Tissue Value: Germinating Seeds
  misc_feature: MA Experiment ID: 20000180 Result: Up-regulated in Transcription
  misc_feature: MA Experiment 20000180 PARAMETER Experiment Name: At_Germinating_Seeds_P Parameter: Age (hr) Value: 24 vs. 0
  misc_feature: MA Experiment 20000180 PARAMETER Experiment Name: At_Germinating_Seeds_P Parameter: Tissue Value: Germinating Seeds
  misc_feature: MA Experiment ID: 20000184 Result: Down-regulated in Transcription
  misc_feature: MA Experiment 20000184 PARAMETER Experiment Name: At_Shoots__P Parameter: Age (day) Value: 7
  misc_feature: MA Experiment 20000184 PARAMETER Experiment Name: At_Shoots__P Parameter: Tissue Value: Shoots vs. Whole Plant
  misc_feature: MA Experiment ID: 20000495 Result: Down-regulated in Transcription
  misc_feature: MA Experiment 20000495 PARAMETER Experiment Name: At_Guard_Cells_P Parameter: Harvest Date Value: 8/2/2002
  misc_feature: MA Experiment 20000495 PARAMETER Experiment Name: At_Guard_Cells_P Parameter: Organism Value: A. thaliana
  misc_feature: MA Experiment 20000495 PARAMETER Experiment Name: At_Guard_Cells_P Parameter: Tissue Value: Guard Cells vs. Leaves
tgctctctcgattgactttattgactgagagaaagcttttgacaatgggccacagacacagcaagtccaaatcctccgatccgccaccgtcctcctcctcctcttcctccggcaacgtagtccaccatgttaaacctgccggagaacgccgcggatcatccggttccggaaccgtcggatcgtcaggctccggaacaggcggatctcgttccaccacatctactcagcagaatggtcggatcttaggtcggccgatggaggaagtacggagaacctatgagtttggtcgtgagcttggtcgtggccagtttggtgtcacgtacctcgtaactcacaaagagacgaaacaacaggtcgcttgcaagtcaatccctacgcgccgccttgttcacaaagacgacattgaagatgttcgccgtgaagtccagattatgcaccatctcagcggtcaccggaacatagtggacttgaagggagcctacgaggacagacactctgtgaatctgataatggagttgtgtgaaggaggggaattgttcgataggatcatttctaaaggtctttactcagagagagctgctgcggatttgtgtaggcagatggtgatggttgtgcatagttgtcattctatgggtgtaatgcaccgagacttgaagcccgaaaactttctctttcttagtaaagatgagaactcaccattgaaagctacagactttggtctctctgtcttcttcaagccaggtgataagtttaaggatcttgttggaagtgcatactatgttgccccagaagttctaaaacggaactatggaccagaggctgatatctggagtgctggtgtgattctatacatccttctcagtggtgttccgcctttctggggagaaaatgaaacggggatctttgatgccattcttcaagggcaacttgatttttcagctgatccatggccagcactatcagatggtgccaaagatcttgtgaggaaaatgttaaaatatgaccctaaagatcggcttacagctgcggaagtgctaaatcatccgtggattagagaagatggggaggcatcagacaaaccgcttgacaatgcggtgttatccaggatgaaacaattccgggcgatgaacaaactaaaaaaaatggccctgaaggttatcgctgagaacctttctgaagaagaaatcattggtcttaaagagatgttcaaatctctagacactgataacaatggaatagtcaccttggaggaattgagaaccggtctcccaaaacttggttcaaagatctctgaagctgaaataaggcagttaatggaagcagctgatatggatggagatggatcaattgattacttggagtttatatcagccacaatgcatatgaacagaatcgaacgtgaggatcacttgtacaccgcattccagttctttgacaatgacaacagcggctacataacaatggaagagctagagctagccatgaagaaatacaacatgggtgatgataaatccatcaaagagatcattgctgaagtagacaccgatcgtgacggaaaaatcaactacgaagaatttgtagcgatgatgaagaagggaaatccagaattggtgccaaaccgacgcagaatgtgagagatcttttgatgttgtttgtttgtttttggttatcactttactcaaactttgtgtttctgttacaatcaattattttgtttcctgcaatctctttttatcaacacaacataaaaaatactttgagatc

SEQ ID NO: 23895 - protein, 543 aa, Arabidopsis thaliana
  peptide (1)..(543): Ceres Seq. ID no. 13487562
  misc_feature (92)..(350): Pfam Name: Protein kinase domain Pfam Description: Protein kinase domain
  misc_feature (80)..(532): Homolog of NCBI NO: 7428009 NR Description: calcium-dependent protein kinase (EC 2.7.1.-) 1 -
  misc_feature (132)..(542): Homolog of NCBI NO: 16754824 NR Description: calcium dependent calmodulin independent protein
  misc_feature (33)..(542): Homolog of NCBI NO: 15239888 NR Description: calcium-dependent protein kinase, putative (CDPK)
  misc_feature (33)..(542): Homolog of NCBI NO: 18175903 NR Description: putative calcium-dependent protein kinase
  misc_feature (48)..(542): Homolog of NCBI NO: 15239716 NR Description: calcium-dependent protein kinase, putative (CDPK)
  misc_feature (16)..(542): Homolog of NCBI NO: 5162878 NR Description: calcium-dependent protein kinase [Marchantia
  misc_feature (16)..(542): Homolog of NCBI NO: 5162877 NR Description: calcium-dependent protein kinase [Marchantia
  misc_feature (78)..(542): Homolog of NCBI NO: 14970920 NR Description: calcium dependent calmodulin independent protein
  misc_feature (15)..(543): Homolog of NCBI NO: 15450437 NR Description: AT4g23650/F9D16_120 [Arabidopsis thaliana]
  misc_feature (15)..(543): Homolog of NCBI NO: 15236560 NR Description: calcium-dependent protein kinase, putative (CDPK)
LSRLTLLTERKLLTMGHRHSKSKSSDPPPSSSSSSSGNVVHHVKPAGERRGSSGSGTVGSSGSGTGGSRSTTSTQQNGRILGRPMEEVRRTYEFGRELGRGQFGVTYLVTHKETKQQVACKSIPTRRLVHKDDIEDVRREVQIMHHLSGHRNIVDLKGAYEDRHSVNLIMELCEGGELFDRIISKGLYSERAAADLCRQMVMVVHSCHSMGVMHRDLKPENFLFLSKDENSPLKATDFGLSVFFKPGDKFKDLVGSAYYVAPEVLKRNYGPEADIWSAGVILYILLSGVPPFWGENETGIFDAILQGQLDFSADPWPALSDGAKDLVRKMLKYDPKDRLTAAEVLNHPWIREDGEASDKPLDNAVLSRMKQFRAMNKLKKMALKVIAENLSEEEIIGLKEMFKSLDTDNNGIVTLEELRTGLPKLGSKISEAEIRQLMEAADMDGDGSIDYLEFISATMHMNRIEREDHLYTAFQFFDNDNSGYITMEELELAMKKYNMGDDKSIKEIIAEVDTDRDGKINYEEFVAMMKKGNPELVPNRRRM

SEQ ID NO: 23896 - protein, 529 aa, Arabidopsis thaliana
  peptide (1)..(529): Ceres Seq. ID no. 13487563
  misc_feature (78)..(336): Pfam Name: Protein kinase domain Pfam Description: Protein kinase domain
  misc_feature (66)..(518): Homolog of NCBI NO: 7428009 NR Description: calcium-dependent protein kinase (EC 2.7.1.-) 1 -
  misc_feature (118)..(528): Homolog of NCBI NO: 16754824 NR Description: calcium dependent calmodulin independent protein
  misc_feature (19)..(528): Homolog of NCBI NO: 15239888 NR Description: calcium-dependent protein kinase, putative (CDPK)
  misc_feature (19)..(528): Homolog of NCBI NO: 18175903 NR Description: putative calcium-dependent protein kinase
  misc_feature (34)..(528): Homolog of NCBI NO: 15239716 NR Description: calcium-dependent protein kinase, putative (CDPK)
  misc_feature (2)..(528): Homolog of NCBI NO: 5162878 NR Description: calcium-dependent protein kinase [Marchantia
  misc_feature (2)..(528): Homolog of NCBI NO: 5162877 NR Description: calcium-dependent protein kinase [Marchantia
  misc_feature (64)..(528): Homolog of NCBI NO: 14970920 NR Description: calcium dependent calmodulin independent protein
  misc_feature (1)..(529): Homolog of NCBI NO: 15450437 NR Description: AT4g23650/F9D16_120 [Arabidopsis thaliana]
  misc_feature (1)..(529): Homolog of NCBI NO: 15236560 NR Description: calcium-dependent protein kinase, putative (CDPK)
MGHRHSKSKSSDPPPSSSSSSSGNVVHHVKPAGERRGSSGSGTVGSSGSGTGGSRSTTSTQQNGRILGRPMEEVRRTYEFGRELGRGQFGVTYLVTHKETKQQVACKSIPTRRLVHKDDIEDVRREVQIMHHLSGHRNIVDLKGAYEDRHSVNLIMELCEGGELFDRIISKGLYSERAAADLCRQMVMVVHSCHSMGVMHRDLKPENFLFLSKDENSPLKATDFGLSVFFKPGDKFKDLVGSAYYVAPEVLKRNYGPEADIWSAGVILYILLSGVPPFWGENETGIFDAILQGQLDFSADPWPALSDGAKDLVRKMLKYDPKDRLTAAEVLNHPWIREDGEASDKPLDNAVLSRMKQFRAMNKLKKMALKVIAENLSEEEIIGLKEMFKSLDTDNNGIVTLEELRTGLPKLGSKISEAEIRQLMEAADMDGDGSIDYLEFISATMHMNRIEREDHLYTAFQFFDNDNSGYITMEELELAMKKYNMGDDKSIKEIIAEVDTDRDGKINYEEFVAMMKKGNPELVPNRRRM

SEQ ID NO: 23897 - protein, 459 aa, Arabidopsis thaliana
  peptide (1)..(459): Ceres Seq. ID no. 13487564
  misc_feature (8)..(266): Pfam Name: Protein kinase domain Pfam Description: Protein kinase domain
  misc_feature (1)..(448): Homolog of NCBI NO: 7428009 NR Description: calcium-dependent protein kinase (EC 2.7.1.-) 1 -
  misc_feature (48)..(458): Homolog of NCBI NO: 16754824 NR Description: calcium dependent calmodulin independent protein
  misc_feature (1)..(458): Homolog of NCBI NO: 15239888 NR Description: calcium-dependent protein kinase, putative (CDPK)
  misc_feature (1)..(458): Homolog of NCBI NO: 18175903 NR Description: putative calcium-dependent protein kinase
  misc_feature (1)..(458): Homolog of NCBI NO: 15239716 NR Description: calcium-dependent protein kinase, putative (CDPK)
  misc_feature (1)..(458): Homolog of NCBI NO: 5162878 NR Description: calcium-dependent protein kinase [Marchantia
  misc_feature (1)..(458): Homolog of NCBI NO: 5162877 NR Description: calcium-dependent protein kinase [Marchantia
  misc_feature (1)..(458): Homolog of NCBI NO: 14970920 NR Description: calcium dependent calmodulin independent protein
  misc_feature (1)..(459): Homolog of NCBI NO: 15450437 NR Description: AT4g23650/F9D16_120 [Arabidopsis thaliana]
  misc_feature (1)..(459): Homolog of NCBI NO: 15236560 NR Description: calcium-dependent protein kinase, putative (CDPK)
MEEVRRTYEFGRELGRGQFGVTYLVTHKETKQQVACKSIPTRRLVHKDDIEDVRREVQIMHHLSGHRNIVDLKGAYEDRHSVNLIMELCEGGELFDRIISKGLYSERAAADLCRQMVMVVHSCHSMGVMHRDLKPENFLFLSKDENSPLKATDFGLSVFFKPGDKFKDLVGSAYYVAPEVLKRNYGPEADIWSAGVILYILLSGVPPFWGENETGIFDAILQGQLDFSADPWPALSDGAKDLVRKMLKYDPKDRLTAAEVLNHPWIREDGEASDKPLDNAVLSRMKQFRAMNKLKKMALKVIAENLSEEEIIGLKEMFKSLDTDNNGIVTLEELRTGLPKLGSKISEAEIRQLMEAADMDGDGSIDYLEFISATMHMNRIEREDHLYTAFQFFDNDNSGYITMEELELAMKKYNMGDDKSIKEIIAEVDTDRDGKINYEEFVAMMKKGNPELVPNRRRM

SEQ ID NO: 23898 - DNA, 1099 bp, Arabidopsis thaliana
  misc_feature (1)..(1099): Ceres Seq. ID no. 12331129
  misc_feature: MA Experiment ID: 20000071 Result: Up-regulated in Transcription
  misc_feature: MA Experiment 20000071 PARAMETER Experiment Name: At_100uM_ABA_Mutants_cDNA_P Parameter: Plant Line Value: CS8104
  misc_feature: MA Experiment 20000071 PARAMETER Experiment Name: At_100uM_ABA_Mutants_cDNA_P Parameter: Timepoint (hr) Value: 6
  misc_feature: MA Experiment 20000071 PARAMETER Experiment Name: At_100uM_ABA_Mutants_cDNA_P Parameter: Tissue Value: Aerial
  misc_feature: MA Experiment 20000071 PARAMETER Experiment Name: At_100uM_ABA_Mutants_cDNA_P Parameter: Treatment Value: 100uM ABA vs. No Treatment
  misc_feature: MA Experiment ID: 20000089 Result: Up-regulated in Transcription
  misc_feature: MA Experiment ID: 20000090 Result: Up-regulated in Transcription
  misc_feature: MA Experiment ID: 20000111 Result: Down-regulated in Transcription
  misc_feature: MA Experiment 20000111 PARAMETER Experiment Name: At_42deg_Heat_cDNA_P Parameter: Temperature (deg C) Value: 42 vs. 22
  misc_feature: MA Experiment 20000111 PARAMETER Experiment Name: At_42deg_Heat_cDNA_P Parameter: Timepoint (hr) Value: 6
  misc_feature: MA Experiment 20000111 PARAMETER Experiment Name: At_42deg_Heat_cDNA_P Parameter: Tissue Value: Aerial
  misc_feature: MA Experiment ID: 20000112 Result: Down-regulated in Transcription
  misc_feature: MA Experiment 20000112 PARAMETER Experiment Name: At_42deg_Heat_cDNA_P Parameter: Temperature (deg C) Value: 42 vs. 22
  misc_feature: MA Experiment 20000112 PARAMETER Experiment Name: At_42deg_Heat_cDNA_P Parameter: Timepoint (hr) Value: 2
  misc_feature: MA Experiment 20000112 PARAMETER Experiment Name: At_42deg_Heat_cDNA_P Parameter: Tissue Value: Aerial
  misc_feature: MA Experiment ID: 20000113 Result: Down-regulated in Transcription
  misc_feature: MA Experiment 20000113 PARAMETER Experiment Name: At_42deg_Heat_cDNA_P Parameter: Temperature (deg C) Value: 42 vs. 22
  misc_feature: MA Experiment 20000113 PARAMETER Experiment Name: At_42deg_Heat_cDNA_P Parameter: Timepoint (hr) Value: 8
  misc_feature: MA Experiment 20000113 PARAMETER Experiment Name: At_42deg_Heat_cDNA_P Parameter: Tissue Value: Aerial
  misc_feature: MA Experiment ID: 20000144 Result: Down-regulated in Transcription
  misc_feature: MA Experiment 20000144 PARAMETER Experiment Name: At_42deg_Heat_cDNA_P Parameter: Temperature (deg C) Value: 42 vs. 22
  misc_feature: MA Experiment 20000144 PARAMETER Experiment Name: At_42deg_Heat_cDNA_P Parameter: Timepoint (hr) Value: 1
  misc_feature: MA Experiment 20000144 PARAMETER Experiment Name: At_42deg_Heat_cDNA_P Parameter: Tissue Value: Aerial
  misc_feature: MA Experiment ID: 20001905 Result: Down-regulated in Transcription
  misc_feature: MA Experiment 20001905 PARAMETER Experiment Name: At_Drought_Reproduction_P Parameter: Age (day) Value: 40
  misc_feature: MA Experiment 20001905 PARAMETER Experiment Name: At_Drought_Reproduction_P Parameter: Organism Value: A. thaliana
  misc_feature: MA Experiment 20001905 PARAMETER Experiment Name: At_Drought_Reproduction_P Parameter: Plant Line Value: WS
  misc_feature: MA Experiment 20001905 PARAMETER Experiment Name: At_Drought_Reproduction_P Parameter: Timepoint (day) Value: 10
  misc_feature: MA Experiment 20001905 PARAMETER Experiment Name: At_Drought_Reproduction_P Parameter: Tissue Value: Rosettes
  misc_feature: MA Experiment 20001905 PARAMETER Experiment Name: At_Drought_Reproduction_P Parameter: Treatment Value: Drought vs. No Drought
acaacaaatcgtctccgtcttcctcgctcagcttcaacaaccagagccgacttgagattgagaatcaacgtaatcgatactctcgcaaagtctcatcctttctcagcaaaaaacactaggaaatggttgaaaggcatggagagttttgatttgctgcttaagatatatcatgtcgcagtgcgttgacggtatcaagcatttatgcacctctgttttagggtgttttgatcttgatttgtataaacaatctggtggccttggagatcctgaattgcttgcaagagacactgtttttagtgtgagtgaaatagaagctctttatgagctttttaagaaaatcagcagtgccgtgattgatgatgggctaataaacaaggaagagtttcagttggctttgtttaagacaaataaaaaagagagtttgtttgcagatcgggttttcgatttgtttgatacaaagcacaatggaatactggggtttgaggaatttgctcgtgctctctccgtctttcacccaaatgcgcctatagatgacaaaattcacttttcatttcagctatatgatcttaaacagcaagggtttatcgaacggcaagaggtgaaacaaatggttgtcgctacgcttgctgaatctggaatgaatttgaaggatactgtcattgaggatataatcgacaagacgtttgaggaagcagacacaaaacacgatggaaagatcgataaggaagagtggagaagccttgttcttagacatcccagccttctgaagaacatgactcttcaatatctcaaggatatcacgactacgtttccaagctttgtgttccattctcaggttgaagatacctgaaaaagcaaaagcaaaagcaagcagcggcaagacatcattgtattgttgaaggttgttctttcgttatggttctttatttgttacatttctaaatctctgaactcattttattttttattgagctttttttgtgaagcaaaattcttctttttagtttggtttttgtcctttttgatttcgctcggtctatctgtagatacaacttttgcatcttgatgttatggtaatgtaaagtttttcagtttattc

SEQ ID NO: 23899 - protein, 226 aa, Arabidopsis thaliana
  peptide (1)..(226): Ceres Seq. ID no. 12331130
  misc_feature (167)..(195): Pfam Name: EF hand Pfam Description: EF hand
  misc_feature (16)..(225): Homolog of NCBI NO: 18414931 NR Description: calcineurin B-like protein 1
  misc_feature (1)..(226): Homolog of NCBI NO: 13448027 NR Description: SOS3-like calcium binding protein [Arabidopsis
  misc_feature (1)..(226): Homolog of NCBI NO: 18414640 NR Description: expressed protein
  misc_feature (32)..(220): Homolog of NCBI NO: 38493047 NR Description: Chain A, The Crystal Structure Of The Calcium
  misc_feature (1)..(226): Homolog of NCBI NO: 22137326 NR Description: calcineurin B [Pisum sativum]
  misc_feature (1)..(226): Homolog of NCBI NO: 16924116 NR Description: putative calcineurin B-like protein [Oryza sativa]
  misc_feature (1)..(226): Homolog of NCBI NO: 30687272 NR Description: calcineurin B-like protein 3 (CBL3) [Arabidopsis
  misc_feature (1)..(226): Homolog of NCBI NO: 15236778 NR Description: calcineurin B-like protein 3
  misc_feature (1)..(226): Homolog of NCBI NO: 21593228 NR Description: calcineurin B-like protein 2 [Arabidopsis
  misc_feature (1)..(226): Homolog of NCBI NO: 15241101 NR Description: calcineurin B-like protein 2 (gb|AAC26009.1)
MSQCVDGIKHLCTSVLGCFDLDLYKQSGGLGDPELLARDTVFSVSEIEALYELFKKISSAVIDDGLINKEEFQLALFKTNKKESLFADRVFDLFDTKHNGILGFEEFARALSVFHPNAPIDDKIHFSFQLYDLKQQGFIERQEVKQMVVATLAESGMNLKDTVIEDIIDKTFEEADTKHDGKIDKEEWRSLVLRHPSLLKNMTLQYLKDITTTFPSFVFHSQVEDT

SEQ ID NO: 23900 - DNA, 1294 bp, Arabidopsis thaliana
  misc_feature (1)..(1294): Ceres Seq. ID no. 13487716
  misc_feature: MA Experiment ID: 108434 Result: Down-regulated in Transcription
  misc_feature: MA Experiment 108434 PARAMETER Experiment Name: At_Root_Tips_cDNA_P Parameter: Tissue Value: Root Tips
  misc_feature: MA Experiment ID: 108462 Result: Up-regulated in Transcription
  misc_feature: MA Experiment 108462 PARAMETER Experiment Name: At_Germinating_Seeds_cDNA_P Parameter: Age (day) Value: 2 vs. 0
  misc_feature: MA Experiment 108462 PARAMETER Experiment Name: At_Germinating_Seeds_cDNA_P Parameter: Tissue Value: Germinating Seeds
  misc_feature: MA Experiment ID: 108463 Result: Up-regulated in Transcription
  misc_feature: MA Experiment 108463 PARAMETER Experiment Name: At_Germinating_Seeds_cDNA_P Parameter: Age (day) Value: 3 vs. 0
  misc_feature: MA Experiment 108463 PARAMETER Experiment Name: At_Germinating_Seeds_cDNA_P Parameter: Tissue Value: Germinating Seeds
  misc_feature: MA Experiment ID: 108464 Result: Up-regulated in Transcription
  misc_feature: MA Experiment 108464 PARAMETER Experiment Name: At_Germinating_Seeds_cDNA_P Parameter: Age (day) Value: 4 vs. 0
  misc_feature: MA Experiment 108464 PARAMETER Experiment Name: At_Germinating_Seeds_cDNA_P Parameter: Tissue Value: Germinating Seeds
  misc_feature: MA Experiment ID: 108569 Result: Up-regulated in Transcription
  misc_feature: MA Experiment 108569 PARAMETER Experiment Name: At_0.001%_MeJA__cDNA_P Parameter: Timepoint (hr) Value: 6
  misc_feature: MA Experiment 108569 PARAMETER Experiment Name: At_0.001%_MeJA__cDNA_P Parameter: Tissue Value: Aerial
  misc_feature: MA Experiment 108569 PARAMETER Experiment Name: At_0.001%_MeJA__cDNA_P Parameter: Treatment Value: 0.001% MeJA vs. No Treatment
  misc_feature: MA Experiment ID: 108573 Result: Up-regulated in Transcription
  misc_feature: MA Experiment 108573 PARAMETER Experiment Name: At_Drought_cDNA_P Parameter: Timepoint (hr) Value: 6
  misc_feature: MA Experiment 108573 PARAMETER Experiment Name: At_Drought_cDNA_P Parameter: Tissue Value: Aerial
  misc_feature: MA Experiment 108573 PARAMETER Experiment Name: At_Drought_cDNA_P Parameter: Treatment Value: Drought vs. No Drought
  misc_feature: MA Experiment ID: 108595 Result: Down-regulated in Transcription
  misc_feature: MA Experiment 108595 PARAMETER Experiment Name: At_Ler-pi_Ovule_cDNA_P Parameter: Plant Line Value: null
  misc_feature: MA Experiment ID: 20000087 Result: Down-regulated in Transcription
  misc_feature: MA Experiment 20000087 PARAMETER Experiment Name: At_100uM_ABA_Mutants_cDNA_P Parameter: Plant Line Value: WS
  misc_feature: MA Experiment 20000087 PARAMETER Experiment Name: At_100uM_ABA_Mutants_cDNA_P Parameter: Timepoint (hr) Value: 6
  misc_feature: MA Experiment 20000087 PARAMETER Experiment Name: At_100uM_ABA_Mutants_cDNA_P Parameter: Tissue Value: Aerial
  misc_feature: MA Experiment 20000087 PARAMETER Experiment Name: At_100uM_ABA_Mutants_cDNA_P Parameter: Treatment Value: 100uM ABA vs. No Treatment
  misc_feature: MA Experiment ID: 20000180 Result: Up-regulated in Transcription
  misc_feature: MA Experiment 20000180 PARAMETER Experiment Name: At_Germinating_Seeds_P Parameter: Age (hr) Value: 24 vs. 0
  misc_feature: MA Experiment 20000180 PARAMETER Experiment Name: At_Germinating_Seeds_P Parameter: Tissue Value: Germinating Seeds
  misc_feature: MA Experiment ID: 20000185 Result: Up-regulated in Transcription
  misc_feature: MA Experiment 20000185 PARAMETER Experiment Name: At_Roots__P Parameter: Age (day) Value: 7 vs. 21
  misc_feature: MA Experiment 20000185 PARAMETER Experiment Name: At_Roots__P Parameter: Organism Value: A. thaliana
  misc_feature: MA Experiment 20000185 PARAMETER Experiment Name: At_Roots__P Parameter: Tissue Value: Roots vs. Whole Plant
  misc_feature: MA Experiment ID: 20000227 Result: Down-regulated in Transcription
  misc_feature: MA Experiment 20000227 PARAMETER Experiment Name: At_Root-Tips-vs-Tops_P Parameter: Tissue Value: Root Tips vs. Root Tops
  misc_feature: MA Experiment ID: 20000234 Result: Down-regulated in Transcription
  misc_feature: MA Experiment 20000234 PARAMETER Experiment Name: At_Siliques_P Parameter: Age (day) Value: 21
  misc_feature: MA Experiment 20000234 PARAMETER Experiment Name: At_Siliques_P Parameter: Organism Value: A. thaliana
  misc_feature: MA Experiment 20000234 PARAMETER Experiment Name: At_Siliques_P Parameter: Plant Line Value: WS
  misc_feature: MA Experiment 20000234 PARAMETER Experiment Name: At_Siliques_P Parameter: Tissue Value: Less Than 5mm Siliques vs. Whole Plant
  misc_feature: MA Experiment ID: 20000264 Result: Down-regulated in Transcription
  misc_feature: MA Experiment 20000264 PARAMETER Experiment Name: At_Open_Flower_P Parameter: Age (day) Value: 21
  misc_feature: MA Experiment 20000264 PARAMETER Experiment Name: At_Open_Flower_P Parameter: Plant Line Value: WS
  misc_feature: MA Experiment 20000264 PARAMETER Experiment Name: At_Open_Flower_P Parameter: Tissue Value: Open Flower vs. Whole Plant
  misc_feature: MA Experiment ID: 20000265 Result: Down-regulated in Transcription
  misc_feature: MA Experiment 20000265 PARAMETER Experiment Name: At_Open_Flower_P Parameter: Age (day) Value: 21
  misc_feature: MA Experiment 20000265 PARAMETER Experiment Name: At_Open_Flower_P Parameter: Plant Line Value: WS
  misc_feature: MA Experiment 20000265 PARAMETER Experiment Name: At_Open_Flower_P Parameter: Tissue Value: Closed Flower vs. Whole Plant
  misc_feature: MA Experiment ID: 20000286 Result: Down-regulated in Transcription
  misc_feature: MA Experiment 20000286 PARAMETER Experiment Name: At_Open_Flower_P Parameter: Age (day) Value: 21
  misc_feature: MA Experiment 20000286 PARAMETER Experiment Name: At_Open_Flower_P Parameter: Plant Line Value: WS
  misc_feature: MA Experiment 20000286 PARAMETER Experiment Name: At_Open_Flower_P Parameter: Tissue Value: Half Open vs. Whole Plant
  misc_feature: MA Experiment ID: 20000439 Result: Up-regulated in Transcription
  misc_feature: MA Experiment 20000439 PARAMETER Experiment Name: At_Roots__P Parameter: Age (day) Value: 14 vs. 21
  misc_feature: MA Experiment 20000439 PARAMETER Experiment Name: At_Roots__P Parameter: Organism Value: A. thaliana
  misc_feature: MA Experiment 20000439 PARAMETER Experiment Name: At_Roots__P Parameter: Tissue Value: Roots vs. Whole Plant
  misc_feature: MA Experiment ID: 20000460 Result: Down-regulated in Transcription
  misc_feature: MA Experiment 20000460 PARAMETER Experiment Name: At_10percent_PEG_P Parameter: Age (day) Value: 12
  misc_feature: MA Experiment 20000460 PARAMETER Experiment Name: At_10percent_PEG_P Parameter: Organism Value: A. thaliana
  misc_feature: MA Experiment 20000460 PARAMETER Experiment Name: At_10percent_PEG_P Parameter: Plant Line Value: WS
  misc_feature: MA Experiment 20000460 PARAMETER Experiment Name: At_10percent_PEG_P Parameter: Timepoint (day) Value: 12
  misc_feature: MA Experiment 20000460 PARAMETER Experiment Name: At_10percent_PEG_P Parameter: Tissue Value: Whole Plant
  misc_feature: MA Experiment 20000460 PARAMETER Experiment Name: At_10percent_PEG_P Parameter: Treatment Value: 10percent PEG vs. No Treatment
  misc_feature: MA Experiment ID: 20000527 Result: Down-regulated in Transcription
  misc_feature: MA Experiment 20000527 PARAMETER Experiment Name: At_10percent_PEG_P Parameter: Age (day) Value: 20
  misc_feature: MA Experiment 20000527 PARAMETER Experiment Name: At_10percent_PEG_P Parameter: Organism Value: A. thaliana
  misc_feature: MA Experiment 20000527 PARAMETER Experiment Name: At_10percent_PEG_P Parameter: Plant Line Value: WS
  misc_feature: MA Experiment 20000527 PARAMETER Experiment Name: At_10percent_PEG_P Parameter: Timepoint (day) Value: 20
  misc_feature: MA Experiment 20000527 PARAMETER Experiment Name: At_10percent_PEG_P Parameter: Tissue Value: Whole Plant
  misc_feature: MA Experiment 20000527 PARAMETER Experiment Name: At_10percent_PEG_P Parameter: Treatment Value: 10percent PEG vs. No Treatment
  misc_feature: MA Experiment ID: 20000794 Result: Down-regulated in Transcription
  misc_feature: MA Experiment 20000794 PARAMETER Experiment Name: At_Petals_P Parameter: Age (day) Value: 23-25 days
  misc_feature: MA Experiment 20000794 PARAMETER Experiment Name: At_Petals_P Parameter: Plant Line Value: WS
  misc_feature: MA Experiment 20000794 PARAMETER Experiment Name: At_Petals_P Parameter: Tissue Value: Petals vs. Whole plant
  misc_feature: MA Experiment ID: 20001450 Result: Down-regulated in Transcription
  misc_feature: MA Experiment 20001450 PARAMETER Experiment Name: At_Far-red-induction_P Parameter: Age (day) Value: 7
  misc_feature: MA Experiment 20001450 PARAMETER Experiment Name: At_Far-red-induction_P Parameter: Light Value: Far-red vs. White
  misc_feature: MA Experiment 20001450 PARAMETER Experiment Name: At_Far-red-induction_P Parameter: Organism Value: A. thaliana
  misc_feature: MA Experiment 20001450 PARAMETER Experiment Name: At_Far-red-induction_P Parameter: Plant Line Value: Columbia
  misc_feature: MA Experiment 20001450 PARAMETER Experiment Name: At_Far-red-induction_P Parameter: Timepoint (hr) Value: 8
  misc_feature: MA Experiment 20001450 PARAMETER Experiment Name: At_Far-red-induction_P Parameter: Tissue Value: Whole Plant
  misc_feature: MA Experiment ID: 20001906 Result: Down-regulated in Transcription
  misc_feature: MA Experiment 20001906 PARAMETER Experiment Name: At_Drought_Reproduction_P Parameter: Age (day) Value: 35
  misc_feature: MA Experiment 20001906 PARAMETER Experiment Name: At_Drought_Reproduction_P Parameter: Organism Value: A. thaliana
  misc_feature: MA Experiment 20001906 PARAMETER Experiment Name: At_Drought_Reproduction_P Parameter: Plant Line Value: WS
  misc_feature: MA Experiment 20001906 PARAMETER Experiment Name: At_Drought_Reproduction_P Parameter: Timepoint (day) Value: 5
  misc_feature: MA Experiment 20001906 PARAMETER Experiment Name: At_Drought_Reproduction_P Parameter: Tissue Value: Siliques
  misc_feature: MA Experiment 20001906 PARAMETER Experiment Name: At_Drought_Reproduction_P Parameter: Treatment Value: Drought vs. No Drought
tggtcttacgagagaccaaaacgatggagagcacgaagattgctccttcattcgatcgtgccagtgagcttaaagctttcgatgagacgaagactggtgtgaaaggactcgttgactctggaatctcaaagattccacgcattttccatcactcatctgtcgaactagcaaaccctaaaccacttccctcggacctgctacatctcaagacgatcccaacgatcgatctcggaggacgggacttccaggacgcgattaagcacaagaacgcgattgaagggattaaagaagcagctgccaagtggggtttcttccaagtgatcaaccatggagtttcgctcgagcttcttgagaagatgaaagatggagttcgtgactttcatgagcaacctcctgaagtgaggaaagatttgtacagccgcgatttcggcagaaagtttatctatttaagtaatttcgatctctacactgctgcagctgcgaattggagagacacattctattgttacatggctccagatcctccagaaccacaggatctgccagagatttgtagggatgttatgatggaatactcaaagcaagtgatgattttgggtgaatttctgtttgagcttttgtcagaagcactagggttgaaccctaatcacctcaaggacatggagtgcttaaagggtttgcgcatgctttgccactacttcccaccgtgtccggagcctgacctaacttttggcacaagtaagcactccgacggctcttttcttaccgtccttctaccagataacatagaagggcttcaggtttgtcgtgagggatactggttcgatgttcctcatgttcccggcgctctcatcatcaacatcggagatcttctgcagcttataacaaacgacaagttcatcagtttgaagcatagagtattggcgaacagagccacaagagctcgagtctctgtcgcatgtttcttccatacccacgtaaaaccaaatcctagagtgtacggacccattaaagagcttgtgtccgaagaaaatcctccaaagtacagagagaccaccatcagagattacgctacttacttcaatggcaaaggacttggcgggacctctgctttgctggattttaaagtatgaatcatgccgagctactactttctcacagatatacgacatgacattatatgtaacatgttggagatgtgtgaaccaaatgtggaatttatgtattgaacattgtcatcaaggtttggtccaaataaagtgtaatcggatatggttaatcaattggattacgc

SEQ ID NO: 23901 - protein, 376 aa, Arabidopsis thaliana
  peptide (1)..(376): Ceres Seq. ID no. 13487717
  misc_feature (224)..(324): Pfam Name: 2OG-Fe(II) oxygenase superfamily Pfam Description: 2OG-Fe(II) oxygenase superfamily
  misc_feature (8)..(208): Homolog of NCBI NO: 25406927 NR Description: protein F12K11.6 [imported] - Arabidopsis
  misc_feature (8)..(292): Homolog of NCBI NO: 30679763 NR Description: 2-oxoglutarate-dependent dioxygenase, putative
  misc_feature (8)..(376): Homolog of NCBI NO: 13878119 NR Description: putative oxidoreductase [Arabidopsis thaliana]
  misc_feature (8)..(376): Homolog of NCBI NO: 15221545 NR Description: 2-oxoglutarate-dependent dioxygenase, putative
  misc_feature (4)..(304): Homolog of NCBI NO: 25406927 NR Description: protein F12K11.6 [imported] - Arabidopsis
  misc_feature (185)..(273): Homolog of NCBI NO: 25406927 NR Description: protein F12K11.6 [imported] - Arabidopsis
  misc_feature (276)..(376): Homolog of NCBI NO: 25406927 NR Description: protein F12K11.6 [imported] - Arabidopsis
  misc_feature (8)..(376): Homolog of NCBI NO: 15221544 NR Description: 2-oxoglutarate-dependent dioxygenase, putative
  misc_feature (292)..(376): Homolog of NCBI NO: 25406927 NR Description: protein F12K11.6 [imported] - Arabidopsis
  misc_feature (1)..(300): Homolog of NCBI NO: 25406927 NR Description: protein F12K11.6 [imported] - Arabidopsis
VLRETKTMESTKIAPSFDRASELKAFDETKTGVKGLVDSGISKIPRIFHHSSVELANPKPLPSDLLHLKTIPTIDLGGRDFQDAIKHKNAIEGIKEAAAKWGFFQVINHGVSLELLEKMKDGVRDFHEQPPEVRKDLYSRDFGRKFIYLSNFDLYTAAAANWRDTFYCYMAPDPPEPQDLPEICRDVMMEYSKQVMILGEFLFELLSEALGLNPNHLKDMECLKGLRMLCHYFPPCPEPDLTFGTSKHSDGSFLTVLLPDNIEGLQVCREGYWFDVPHVPGALIINIGDLLQLITNDKFISLKHRVLANRATRARVSVACFFHTHVKPNPRVYGPIKELVSEENPPKYRETTIRDYATYFNGKGLGGTSALLDFKV

SEQ ID NO: 23902 - protein, 369 aa, Arabidopsis thaliana
  peptide (1)..(369): Ceres Seq. ID no. 13487718
  misc_feature (217)..(317): Pfam Name: 2OG-Fe(II) oxygenase superfamily Pfam Description: 2OG-Fe(II) oxygenase superfamily
  misc_feature (178)..(266): Homolog of NCBI NO: 25406927 NR Description: protein F12K11.6 [imported] - Arabidopsis
  misc_feature (1)..(201): Homolog of NCBI NO: 25406927 NR Description: protein F12K11.6 [imported] - Arabidopsis
  misc_feature (1)..(285): Homolog of NCBI NO: 30679763 NR Description: 2-oxoglutarate-dependent dioxygenase, putative
  misc_feature (1)..(369): Homolog of NCBI NO: 13878119 NR Description: putative oxidoreductase [Arabidopsis thaliana]
  misc_feature (1)..(369): Homolog of NCBI NO: 15221545 NR Description: 2-oxoglutarate-dependent dioxygenase, putative
  misc_feature (1)..(297): Homolog of NCBI NO: 25406927 NR Description: protein F12K11.6 [imported] - Arabidopsis
  misc_feature (269)..(369): Homolog of NCBI NO: 25406927 NR Description: protein F12K11.6 [imported] - Arabidopsis
  misc_feature (1)..(369): Homolog of NCBI NO: 15221544 NR Description: 2-oxoglutarate-dependent dioxygenase, putative
  misc_feature (285)..(369): Homolog of NCBI NO: 25406927 NR Description: protein F12K11.6 [imported] - Arabidopsis
  misc_feature (1)..(293): Homolog of NCBI NO: 25406927 NR Description: protein F12K11.6 [imported] - Arabidopsis
MESTKIAPSFDRASELKAFDETKTGVKGLVDSGISKIPRIFHHSSVELANPKPLPSDLLHLKTIPTIDLGGRDFQDAIKHKNAIEGIKEAAAKWGFFQVINHGVSLELLEKMKDGVRDFHEQPPEVRKDLYSRDFGRKFIYLSNFDLYTAAAANWRDTFYCYMAPDPPEPQDLPEICRDVMMEYSKQVMILGEFLFELLSEALGLNPNHLKDMECLKGLRMLCHYFPPCPEPDLTFGTSKHSDGSFLTVLLPDNIEGLQVCREGYWFDVPHVPGALIINIGDLLQLITNDKFISLKHRVLANRATRARVSVACFFHTHVKPNPRVYGPIKELVSEENPPKYRETTIRDYATYFNGKGLGGTSALLDFKV

SEQ ID NO: 23903 - protein, 258 aa, Arabidopsis thaliana
  peptide (1)..(258): Ceres Seq. ID no. 13487719
  misc_feature (106)..(206): Pfam Name: 2OG-Fe(II) oxygenase superfamily Pfam Description: 2OG-Fe(II) oxygenase superfamily
  misc_feature (67)..(155): Homolog of NCBI NO: 25406927 NR Description: protein F12K11.6 [imported] - Arabidopsis
  misc_feature (1)..(90): Homolog of NCBI NO: 25406927 NR Description: protein F12K11.6 [imported] - Arabidopsis
  misc_feature (1)..(174): Homolog of NCBI NO: 30679763 NR Description: 2-oxoglutarate-dependent dioxygenase, putative
  misc_feature (1)..(258): Homolog of NCBI NO: 13878119 NR Description: putative oxidoreductase [Arabidopsis thaliana]
  misc_feature (1)..(258): Homolog of NCBI NO: 15221545 NR Description: 2-oxoglutarate-dependent dioxygenase, putative
  misc_feature (1)..(186): Homolog of NCBI NO: 25406927 NR Description: protein F12K11.6 [imported] - Arabidopsis
  misc_feature (158)..(258): Homolog of NCBI NO: 25406927 NR Description: protein F12K11.6 [imported] - Arabidopsis
  misc_feature (1)..(258): Homolog of NCBI NO: 15221544 NR Description: 2-oxoglutarate-dependent dioxygenase, putative
  misc_feature (174)..(258): Homolog of NCBI NO: 25406927 NR Description: protein F12K11.6 [imported] - Arabidopsis
  misc_feature (1)..(182): Homolog of NCBI NO: 25406927 NR Description: protein F12K11.6 [imported] - Arabidopsis
MKDGVRDFHEQPPEVRKDLYSRDFGRKFIYLSNFDLYTAAAANWRDTFYCYMAPDPPEPQDLPEICRDVMMEYSKQVMILGEFLFELLSEALGLNPNHLKDMECLKGLRMLCHYFPPCPEPDLTFGTSKHSDGSFLTVLLPDNIEGLQVCREGYWFDVPHVPGALIINIGDLLQLITNDKFISLKHRVLANRATRARVSVACFFHTHVKPNPRVYGPIKELVSEENPPKYRETTIRDYATYFNGKGLGGTSALLDFKV

SEQ ID NO: 23904 - DNA, 1101 bp, Arabidopsis thaliana
  misc_feature (1)..(1101): Ceres Seq. ID no. 12338473
  misc_feature: MA Experiment ID: 108573 Result: Up-regulated in Transcription
  misc_feature: MA Experiment 108573 PARAMETER Experiment Name: At_Drought_cDNA_P Parameter: Timepoint (hr) Value: 6
  misc_feature: MA Experiment 108573 PARAMETER Experiment Name: At_Drought_cDNA_P Parameter: Tissue Value: Aerial
  misc_feature: MA Experiment 108573 PARAMETER Experiment Name: At_Drought_cDNA_P Parameter: Treatment Value: Drought vs. No Drought
  misc_feature: MA Experiment ID: 108579 Result: Down-regulated in Transcription
  misc_feature: MA Experiment 108579 PARAMETER Experiment Name: At_4deg_Cold_cDNA_P Parameter: Temperature (deg C) Value: 4 vs. 22
  misc_feature: MA Experiment 108579 PARAMETER Experiment Name: At_4deg_Cold_cDNA_P Parameter: Timepoint (hr) Value: 6
  misc_feature: MA Experiment 108579 PARAMETER Experiment Name: At_4deg_Cold_cDNA_P Parameter: Tissue Value: Aerial
  misc_feature: MA Experiment ID: 20000794 Result: Up-regulated in Transcription
  misc_feature: MA Experiment 20000794 PARAMETER Experiment Name: At_Petals_P Parameter: Age (day) Value: 23-25 days
  misc_feature: MA Experiment 20000794 PARAMETER Experiment Name: At_Petals_P Parameter: Plant Line Value: WS
  misc_feature: MA Experiment 20000794 PARAMETER Experiment Name: At_Petals_P Parameter: Tissue Value: Petals vs. Whole plant
aggaagattatttgacattttaagtaagaacagctagctttgccatctccctaaaggcaataaatctcggatccactttcacgatattttgatattttttctatttataatctttctgggttttgcgtcttttgaaggctgaattgctctgaaatctcaattgtataatcatctcctgggtcgtcgttatcgtgatcatctagaagaaagcatgactacactagatttgaccagagccgagcttgctcttattgttctctatttgaacaaagctgaggctagagataagatatgcagagctatccaatatggttccaaattcttgagcggtggccaacctggtactgctcaaactgtcgacaaaaacaccagcttggcgagaaaagttttccgtcttttcaagtttgtcaatgattttcacggtcttatcagccccgtgcctaaagggactccacttcctcttgtcttactcgggaagtcgaagaatgcgctcttgtctacctttttgtttcttgatcaaatcgtctggcttggtagatccggcatatacaagaacaaagaacgaactgaattgcttggacgtatatcacttttctgctggctgggatcatccgtttgtacaagtgcagtcgagattggtgagcttggaaggctctcttcatctatgaagaagatggaaaaggaactcaaagctgatgatgagctgtatcgtgctaagcttcagaaatcaaacgacagaactctagctttgattaaatcaagcatggacattattgtagccattggtctccttcagttagctccaaagacgattagtcctcgtgtcactggtgctttcgggtttaccacctcacttatctcttgttatcagttgcttccatcgcgccccaagttgaagacaccttgaagaaggaataagcttgttctctagactttcagaataattgtttcatattcatcagtaaacctattgtgttcaggtattctaaggagtctatgttcctcctttgaatgaatttgctgctcttataacgcgtttgcaagaataatgataagttttagaataagattattatgatacatcttcaagattttttgatt

SEQ ID NO: 23905 - protein, 231 aa, Arabidopsis thaliana
  peptide (1)..(231): Ceres Seq. ID no. 12338474
  misc_feature (11)..(222): Pfam Name: Peroxisomal biogenesis factor 11 (PEX11) Pfam Description: Peroxisomal biogenesis factor 11 (PEX11)
  misc_feature (131)..(231): Homolog of NCBI NO: 14335058 NR Description: At2g45740/F4I18.28 [Arabidopsis thaliana]
  misc_feature (1)..(227): Homolog of NCBI NO: 34898026 NR Description: ESTs AU064537(E31904),AU082147(E31904) correspond a region of the predicted gene.~Similar to Arabidopsis thaliana
  misc_feature (1)..(229): Homolog of NCBI NO: 25553559 NR Description: OSJNBa0038F22.7 [Oryza sativa (japonica
  misc_feature (1)..(229): Homolog of NCBI NO: 8489788 NR Description: unknown [Lycopersicon esculentum]
  misc_feature (2)..(221): Homolog of NCBI NO: 7486466 NR Description: hypothetical protein At2g45740 [imported] -
  misc_feature (1)..(229): Homolog of NCBI NO: 18378887 NR Description: expressed protein
  misc_feature (2)..(231): Homolog of NCBI NO: 18406877 NR Description: expressed protein
  misc_feature (1)..(231): Homolog of NCBI NO: 11358250 NR Description: hypothetical protein T27I15_160 - Arabidopsis
  misc_feature (1)..(231): Homolog of NCBI NO: 30695340 NR Description: expressed protein [Arabidopsis thaliana]
MTTLDLTRAELALIVLYLNKAEARDKICRAIQYGSKFLSGGQPGTAQTVDKNTSLARKVFRLFKFVNDFHGLISPVPKGTPLPLVLLGKSKNALLSTFLFLDQIVWLGRSGIYKNKERTELLGRISLFCWLGSSVCTSAVEIGELGRLSSSMKKMEKELKADDELYRAKLQKSNDRTLALIKSSMDIIVAIGLLQLAPKTISPRVTGAFGFTTSLISCYQLLPSRPKLKTP

SEQ ID NO: 23906 - DNA, 1153 bp, Arabidopsis thaliana
  misc_feature (1)..(1153): Ceres Seq. ID no. 13495746
  misc_feature: MA Experiment ID: 108595 Result: Up-regulated in Transcription
  misc_feature: MA Experiment 108595 PARAMETER Experiment Name: At_Ler-pi_Ovule_cDNA_P Parameter: Plant Line Value: null
  misc_feature: MA Experiment ID: 20000264 Result: Up-regulated in Transcription
  misc_feature: MA Experiment 20000264 PARAMETER Experiment Name: At_Open_Flower_P Parameter: Age (day) Value: 21
  misc_feature: MA Experiment 20000264 PARAMETER Experiment Name: At_Open_Flower_P Parameter: Plant Line Value: WS
  misc_feature: MA Experiment 20000264 PARAMETER Experiment Name: At_Open_Flower_P Parameter: Tissue Value: Open Flower vs. Whole Plant
  misc_feature: MA Experiment ID: 20001908 Result: Up-regulated in Transcription
  misc_feature: MA Experiment 20001908 PARAMETER Experiment Name: At_Drought_Reproduction_P Parameter: Age (day) Value: 40
  misc_feature: MA Experiment 20001908 PARAMETER Experiment Name: At_Drought_Reproduction_P Parameter: Organism Value: A. thaliana
  misc_feature: MA Experiment 20001908 PARAMETER Experiment Name: At_Drought_Reproduction_P Parameter: Plant Line Value: WS
  misc_feature: MA Experiment 20001908 PARAMETER Experiment Name: At_Drought_Reproduction_P Parameter: Timepoint (day) Value: 10
  misc_feature: MA Experiment 20001908 PARAMETER Experiment Name: At_Drought_Reproduction_P Parameter: Tissue Value: Siliques
  misc_feature: MA Experiment 20001908 PARAMETER Experiment Name: At_Drought_Reproduction_P Parameter: Treatment Value: Drought vs. No Drought
  misc_feature: Phenotype: ROSETTE LEAVES Shape-Serrate
  misc_feature: Phenotype: ROSETTE LEAVES Other
  misc_feature: Phenotype: WHOLE PLANT Color-Dark Green
  misc_feature: Phenotype: WHOLE PLANT Color-Dark Green
  misc_feature: Phenotype: WHOLE PLANT Size-Large
  misc_feature: Phenotype: INFLORESCENCE Flowering Time-Late Flowering
  misc_feature: Phenotype: INFLORESCENCE Height-Short
  misc_feature: Phenotype: INFLORESCENCE Strength-Strong
  misc_feature: Phenotype: INFLORESCENCE Other
  misc_feature: Phenotype: FERTILITY Fertility-Reduced
  misc_feature: Phenotype: ROSETTE LEAVES Petiole Length-Short Petioles
  misc_feature: Phenotype: ROSETTE LEAVES Shape-Serrate
  misc_feature: Phenotype: ROSETTE LEAVES Shape-Serrate
  misc_feature: Phenotype: ROSETTE LEAVES Other
  misc_feature: Phenotype: ROSETTE LEAVES Other
  misc_feature: Phenotype: WHOLE PLANT Color-Dark Green
  misc_feature: Phenotype: WHOLE PLANT Color-Dark Green
  misc_feature: Phenotype: WHOLE PLANT Size-Large
  misc_feature: Phenotype: WHOLE PLANT Size-Large
  misc_feature: Phenotype: CAULINE LEAVES Other
  misc_feature: Phenotype: INFLORESCENCE Flowering Time-Late Flowering
  misc_feature: Phenotype: INFLORESCENCE Height-Short
  misc_feature: Phenotype: INFLORESCENCE Strength-Strong
  misc_feature: Phenotype: INFLORESCENCE Other
  misc_feature: Phenotype: INFLORESCENCE Other
  misc_feature: Phenotype: INFLORESCENCE Other
  misc_feature: Phenotype: ROSETTE LEAVES Petiole Length-Short Petioles
  misc_feature: Phenotype: WHOLE PLANT Size-Small
  misc_feature: Phenotype: WHOLE PLANT Size-Small
  misc_feature: Phenotype: ROSETTE LEAVES Petiole Length-Short Petioles
  misc_feature: Phenotype: ROSETTE LEAVES Shape-Serrate
  misc_feature: Phenotype: ROSETTE LEAVES Other
  misc_feature: Phenotype: WHOLE PLANT Color-Dark Green
  misc_feature: Phenotype: INFLORESCENCE Height-Short
  misc_feature: Phenotype: INFLORESCENCE Strength-Strong
  misc_feature: Phenotype: ROSETTE LEAVES Petiole Length-Short Petioles
  misc_feature: Phenotype: ROSETTE LEAVES Shape-Serrate
  misc_feature: Phenotype: ROSETTE LEAVES Shape-Serrate
  misc_feature: Phenotype: ROSETTE LEAVES Shape-Serrate
  misc_feature: Phenotype: ROSETTE LEAVES Other
  misc_feature: Phenotype: WHOLE PLANT Color-Dark Green
  misc_feature: Phenotype: WHOLE PLANT Color-Dark Green
  misc_feature: Phenotype: WHOLE PLANT Color-Dark Green
  misc_feature: Phenotype: WHOLE PLANT Size-Large
  misc_feature: Phenotype: WHOLE PLANT Size-Large
  misc_feature: Phenotype: CAULINE LEAVES Other
  misc_feature: Phenotype: INFLORESCENCE Flowering Time-Late Flowering
  misc_feature: Phenotype: INFLORESCENCE Flowering Time-Late Flowering
  misc_feature: Phenotype: INFLORESCENCE Flowering Time-Late Flowering
  misc_feature: Phenotype: INFLORESCENCE Strength-Strong
  misc_feature: Phenotype: INFLORESCENCE Other
  misc_feature: Phenotype: ROSETTE LEAVES Petiole Length-Short Petioles
  misc_feature: Phenotype: ROSETTE LEAVES Shape-Serrate
  misc_feature: Phenotype: ROSETTE LEAVES Shape-Serrate
  misc_feature: Phenotype: ROSETTE LEAVES Other
  misc_feature: Phenotype: ROSETTE LEAVES Other
  misc_feature: Phenotype: WHOLE PLANT Color-Dark Green
  misc_feature: Phenotype: WHOLE PLANT Color-Dark Green
  misc_feature: Phenotype: WHOLE PLANT Size-Large
  misc_feature: Phenotype: WHOLE PLANT Size-Large
  misc_feature: Phenotype: CAULINE LEAVES Other
  misc_feature: Phenotype: INFLORESCENCE Flowering Time-Late Flowering
  misc_feature: Phenotype: INFLORESCENCE Height-Short
  misc_feature: Phenotype: INFLORESCENCE Strength-Strong
  misc_feature: Phenotype: INFLORESCENCE Other
  misc_feature: Phenotype: ROSETTE LEAVES Petiole Length-Short Petioles
  misc_feature: Phenotype: ROSETTE LEAVES Shape-Serrate
  misc_feature: Phenotype: ROSETTE LEAVES Shape-Serrate
  misc_feature: Phenotype: ROSETTE LEAVES Other
  misc_feature: Phenotype: ROSETTE LEAVES Other
  misc_feature: Phenotype: WHOLE PLANT Color-Dark Green
  misc_feature: Phenotype: WHOLE PLANT Color-Dark Green
  misc_feature: Phenotype: WHOLE PLANT Size-Large
  misc_feature: Phenotype: CAULINE LEAVES Other
  misc_feature: Phenotype: INFLORESCENCE Flowering Time-Late Flowering
  misc_feature: Phenotype: INFLORESCENCE Height-Short
  misc_feature: Phenotype: INFLORESCENCE Strength-Strong
  misc_feature: Phenotype: INFLORESCENCE Other
  misc_feature: Phenotype: ROSETTE LEAVES Petiole Length-Short Petioles
  misc_feature: Phenotype: ROSETTE LEAVES Shape-Serrate
  misc_feature: Phenotype: ROSETTE LEAVES Shape-Serrate
  misc_feature: Phenotype: ROSETTE LEAVES Other
  misc_feature: Phenotype: ROSETTE LEAVES Other
  misc_feature: Phenotype: WHOLE PLANT Color-Dark Green
  misc_feature: Phenotype: WHOLE PLANT Color-Dark Green
  misc_feature: Phenotype: WHOLE PLANT Size-Large
  misc_feature: Phenotype: CAULINE LEAVES Other
  misc_feature: Phenotype: INFLORESCENCE Flowering Time-Late Flowering
  misc_feature: Phenotype: INFLORESCENCE Height-Short
  misc_feature: Phenotype: INFLORESCENCE Strength-Strong
agcccctttcccaatatttgatcaatttctaaagaaaaccccttcctctactagtcctcctcctatatatacaaaatcttaagaaatctctctacttgtttcctctgttatcataatctcttctctctatatctcttctcttcttcttttaccctgtttttttttttcattccacagagcccaggttgattgattttgttattcagagatatggggagaggaaggattgagattaagaagattgagaatatcaacagtcgtcaagtcactttctctaagagacgaaacggtttgatcaagaaggctaaagagctttcgattctctgtgacgccgaggttgctcttatcatcttctccagcaccggcaagatttacgatttctccagcgtctgtatggagcaaattctttctagatatggatacactactgcgtccactgagcataaacaacaaagagaacaccaacttctaatttgtgcttcacatggaaatgaagctgtgttgcgaaatgatgattctatgaaggtggaacttgaaagattacagcttgcaattgagagacttaagggtaaggagcttgaaggtatgagtttcccggatcttatttcttttgaaaaccagttgaacgagagcttgcatagtgtcaaggatcaaaagacacaaatcctgctcaaccagattgagagatccaggatacaggagaaaaaagcattggaagaaaaccaaatcttgcgcaaacaggttgagatgttggggagaggttcaggaccaaaagtgttgaatgaaaggcctcaagattctagcccagaagccgatcccgagagctcttcatcagaagaggatgagaatgacaacgaggagcaccattccgacacttccttgcagttggggttgtcgtcgacggggtattgcacaaagagaaagaagccgaagatcgaactggtctgcgataactctgggagtcaagtggcttctgattgatggaatcgattatttttctaattctggttgtttaggggtctctatgtgtcttcttgtttctggctgttcttttgctttatttcatctcaagtagagttttcttaatgtttaggtggaacatttttccataatcaagaagggatttgatcaatcaataacattagattttctt

SEQ ID NO: 23907 - protein, 256 aa, Arabidopsis thaliana
  peptide (1)..(256): Ceres Seq. ID no. 13495747
  misc_feature (102)..(180): Pfam Name: K-box region Pfam Description: K-box region
  misc_feature (1)..(181): Homolog of NCBI NO: 7489303 NR Description: MADS-box transcription factor DEFH125 - garden
  misc_feature (1)..(233): Homolog of NCBI NO: 9956938 NR Description: MADS-domain protein PPM1 [Physcomitrella patens]
  misc_feature (1)..(227): Homolog of NCBI NO: 21396803 NR Description: MADS-box gene 6 protein [Lycopodium annotinum]
  misc_feature (1)..(227): Homolog of NCBI NO: 21396795 NR Description: MADS-box gene 2 protein [Lycopodium annotinum]
  misc_feature (1)..(239): Homolog of NCBI NO: 3831486 NR Description: Agamous-like MADS box protein AGL15
  misc_feature (1)..(243): Homolog of NCBI NO: 7446561 NR Description: MADS box protein AGL15 (type 2) - rape
  misc_feature (7)..(254): Homolog of NCBI NO: 862646 NR Description: MADS-box protein AGL15
  misc_feature (1)..(254): Homolog of NCBI NO: 15240706 NR Description: floral homeotic protein, AGL15 [Arabidopsis
  misc_feature (1)..(256): Homolog of NCBI NO: 15230284 NR Description: MADS-box protein [Arabidopsis thaliana]
  misc_feature (1)..(256): Homolog of NCBI NO: 21593229 NR Description: MADS transcription factor-like protein
MGRGRIEIKKIENINSRQVTFSKRRNGLIKKAKELSILCDAEVALIIFSSTGKIYDFSSVCMEQILSRYGYTTASTEHKQQREHQLLICASHGNEAVLRNDDSMKVELERLQLAIERLKGKELEGMSFPDLISFENQLNESLHSVKDQKTQILLNQIERSRIQEKKALEENQILRKQVEMLGRGSGPKVLNERPQDSSPEADPESSSSEEDENDNEEHHSDTSLQLGLSSTGYCTKRKKPKIELVCDNSGSQVASD

SEQ ID NO: 23908 - protein, 195 aa, Arabidopsis thaliana
  peptide (1)..(195): Ceres Seq. ID no. 13495748
  misc_feature (41)..(119): Pfam Name: K-box region Pfam Description: K-box region
  misc_feature (1)..(120): Homolog of NCBI NO: 7489303 NR Description: MADS-box transcription factor DEFH125 - garden
  misc_feature (1)..(172): Homolog of NCBI NO: 9956938 NR Description: MADS-domain protein PPM1 [Physcomitrella patens]
  misc_feature (1)..(166): Homolog of NCBI NO: 21396803 NR Description: MADS-box gene 6 protein [Lycopodium annotinum]
  misc_feature (1)..(166): Homolog of NCBI NO: 21396795 NR Description: MADS-box gene 2 protein [Lycopodium annotinum]
  misc_feature (1)..(178): Homolog of NCBI NO: 3831486 NR Description: Agamous-like MADS box protein AGL15
  misc_feature (1)..(182): Homolog of NCBI NO: 7446561 NR Description: MADS box protein AGL15 (type 2) - rape
  misc_feature (1)..(193): Homolog of NCBI NO: 862646 NR Description: MADS-box protein AGL15
  misc_feature (1)..(193): Homolog of NCBI NO: 15240706 NR Description: floral homeotic protein, AGL15 [Arabidopsis
  misc_feature (1)..(195): Homolog of NCBI NO: 15230284 NR Description: MADS-box protein [Arabidopsis thaliana]
  misc_feature (1)..(195): Homolog of NCBI NO: 21593229 NR Description: MADS transcription factor-like protein
MEQILSRYGYTTASTEHKQQREHQLLICASHGNEAVLRNDDSMKVELERLQLAIERLKGKELEGMSFPDLISFENQLNESLHSVKDQKTQILLNQIERSRIQEKKALEENQILRKQVEMLGRGSGPKVLNERPQDSSPEADPESSSSEEDENDNEEHHSDTSLQLGLSSTGYCTKRKKPKIELVCDNSGSQVASD

SEQ ID NO: 23909 - protein, 153 aa, Arabidopsis thaliana
  peptide (1)..(153): Ceres Seq. ID no. 13495749
  misc_feature (1)..(77): Pfam Name: K-box region Pfam Description: K-box region
  misc_feature (1)..(78): Homolog of NCBI NO: 7489303 NR Description: MADS-box transcription factor DEFH125 - garden
  misc_feature (1)..(130): Homolog of NCBI NO: 9956938 NR Description: MADS-domain protein PPM1 [Physcomitrella patens]
  misc_feature (1)..(124): Homolog of NCBI NO: 21396803 NR Description: MADS-box gene 6 protein [Lycopodium annotinum]
  misc_feature (1)..(124): Homolog of NCBI NO: 21396795 NR Description: MADS-box gene 2 protein [Lycopodium annotinum]
  misc_feature (1)..(136): Homolog of NCBI NO: 3831486 NR Description: Agamous-like MADS box protein AGL15
  misc_feature (1)..(140): Homolog of NCBI NO: 7446561 NR Description: MADS box protein AGL15 (type 2) - rape
  misc_feature (1)..(151): Homolog of NCBI NO: 862646 NR Description: MADS-box protein AGL15
  misc_feature (1)..(151): Homolog of NCBI NO: 15240706 NR Description: floral homeotic protein, AGL15 [Arabidopsis
  misc_feature (1)..(153): Homolog of NCBI NO: 15230284 NR Description: MADS-box protein [Arabidopsis thaliana]
  misc_feature (1)..(153): Homolog of NCBI NO: 21593229 NR Description: MADS transcription factor-like protein
MKVELERLQLAIERLKGKELEGMSFPDLISFENQLNESLHSVKDQKTQILLNQIERSRIQEKKALEENQILRKQVEMLGRGSGPKVLNERPQDSSPEADPESSSSEEDENDNEEHHSDTSLQLGLSSTGYCTKRKKPKIELVCDNSGSQVASD

SEQ ID NO: 23910 - DNA, 1396 bp, Arabidopsis thaliana
  misc_feature (1)..(1396): Ceres Seq. ID no. 12394721
  misc_feature: MA Experiment ID: 108461 Result: Up-regulated in Transcription
  misc_feature: MA Experiment 108461 PARAMETER Experiment Name: At_Germinating_Seeds_cDNA_P Parameter: Age (day) Value: 1 vs. 0
  misc_feature: MA Experiment 108461 PARAMETER Experiment Name: At_Germinating_Seeds_cDNA_P Parameter: Tissue Value: Germinating Seeds
  misc_feature: MA Experiment ID: 108573 Result: Down-regulated in Transcription
  misc_feature: MA Experiment 108573 PARAMETER Experiment Name: At_Drought_cDNA_P Parameter: Timepoint (hr) Value: 6
  misc_feature: MA Experiment 108573 PARAMETER Experiment Name: At_Drought_cDNA_P Parameter: Tissue Value: Aerial
  misc_feature: MA Experiment 108573 PARAMETER Experiment Name: At_Drought_cDNA_P Parameter: Treatment Value: Drought vs. No Drought
  misc_feature: MA Experiment ID: 108576 Result: Up-regulated in Transcription
  misc_feature: MA Experiment 108576 PARAMETER Experiment Name: At_42deg_Heat_cDNA_P Parameter: Temperature (deg C) Value: 42 vs. 22
  misc_feature: MA Experiment 108576 PARAMETER Experiment Name: At_42deg_Heat_cDNA_P Parameter: Timepoint (hr) Value: 1
  misc_feature: MA Experiment 108576 PARAMETER Experiment Name: At_42deg_Heat_cDNA_P Parameter: Tissue Value: Aerial
  misc_feature: MA Experiment ID: 108668 Result: Up-regulated in Transcription
  misc_feature: MA Experiment 108668 PARAMETER Experiment Name: At_2mM_SA_cDNA_P Parameter: Plant Line Value: WS
  misc_feature: MA Experiment 108668 PARAMETER Experiment Name: At_2mM_SA_cDNA_P Parameter: Timepoint (hr) Value: 6
  misc_feature: MA Experiment 108668 PARAMETER Experiment Name: At_2mM_SA_cDNA_P Parameter: Treatment Value: 2mM SA vs. No Treatment
  misc_feature: MA Experiment ID: 20000090 Result: Up-regulated in Transcription
  misc_feature: MA Experiment ID: 20000093 Result: Up-regulated in Transcription
  misc_feature: MA Experiment 20000093 PARAMETER Experiment Name: At_42deg_Heat_cDNA_P Parameter: Temperature (deg C) Value: 42 vs. 22
  misc_feature: MA Experiment 20000093 PARAMETER Experiment Name: At_42deg_Heat_cDNA_P Parameter: Timepoint (hr) Value: 0.5
  misc_feature: MA Experiment 20000093 PARAMETER Experiment Name: At_42deg_Heat_cDNA_P Parameter: Tissue Value: Aerial
  misc_feature: MA Experiment ID: 20000112 Result: Up-regulated in Transcription
  misc_feature: MA Experiment 20000112 PARAMETER Experiment Name: At_42deg_Heat_cDNA_P Parameter: Temperature (deg C) Value: 42 vs. 22
  misc_feature: MA Experiment 20000112 PARAMETER Experiment Name: At_42deg_Heat_cDNA_P Parameter: Timepoint (hr) Value: 2
  misc_feature: MA Experiment 20000112 PARAMETER Experiment Name: At_42deg_Heat_cDNA_P Parameter: Tissue Value: Aerial
  misc_feature: MA Experiment ID: 20000144 Result: Up-regulated in Transcription
  misc_feature: MA Experiment 20000144 PARAMETER Experiment Name: At_42deg_Heat_cDNA_P Parameter: Temperature (deg C) Value: 42 vs. 22
  misc_feature: MA Experiment 20000144 PARAMETER Experiment Name: At_42deg_Heat_cDNA_P Parameter: Timepoint (hr) Value: 1
  misc_feature: MA Experiment 20000144 PARAMETER Experiment Name: At_42deg_Heat_cDNA_P Parameter: Tissue Value: Aerial
  misc_feature: MA Experiment ID: 20000179 Result: Up-regulated in Transcription
  misc_feature: MA Experiment 20000179 PARAMETER Experiment Name: At_Germinating_Seeds_P Parameter: Age (hr) Value: 6 vs. 0
  misc_feature: MA Experiment 20000179 PARAMETER Experiment Name: At_Germinating_Seeds_P Parameter: Tissue Value: Germinating Seeds
  misc_feature: MA Experiment ID: 20000180 Result: Up-regulated in Transcription
  misc_feature: MA Experiment 20000180 PARAMETER Experiment Name: At_Germinating_Seeds_P Parameter: Age (hr) Value: 24 vs. 0
  misc_feature: MA Experiment 20000180 PARAMETER Experiment Name: At_Germinating_Seeds_P Parameter: Tissue Value: Germinating Seeds
  misc_feature: MA Experiment ID: 20000224 Result: Up-regulated in Transcription
  misc_feature: MA Experiment ID: 20000227 Result: Up-regulated in Transcription
  misc_feature: MA Experiment 20000227 PARAMETER Experiment Name: At_Root-Tips-vs-Tops_P Parameter: Tissue Value: Root Tips vs. Root Tops
  misc_feature: MA Experiment ID: 20001248 Result: Down-regulated in Transcription
  misc_feature: MA Experiment 20001248 PARAMETER Experiment Name: At_Far-red-induction_P Parameter: Age (day) Value: 7
  misc_feature: MA Experiment 20001248 PARAMETER Experiment Name: At_Far-red-induction_P Parameter: Light Value: Far-red vs. White
  misc_feature: MA Experiment 20001248 PARAMETER Experiment Name: At_Far-red-induction_P Parameter: Organism Value: A. thaliana
  misc_feature: MA Experiment 20001248 PARAMETER Experiment Name: At_Far-red-induction_P Parameter: Plant Line Value: Columbia
  misc_feature: MA Experiment 20001248 PARAMETER Experiment Name: At_Far-red-induction_P Parameter: Timepoint (hr) Value: 4
  misc_feature: MA Experiment 20001248 PARAMETER Experiment Name: At_Far-red-induction_P Parameter: Tissue Value: Whole Plant
  misc_feature: MA Experiment ID: 20001450 Result: Down-regulated in Transcription
  misc_feature: MA Experiment 20001450 PARAMETER Experiment Name: At_Far-red-induction_P Parameter: Age (day) Value: 7
  misc_feature: MA Experiment 20001450 PARAMETER Experiment Name: At_Far-red-induction_P Parameter: Light Value: Far-red vs. White
  misc_feature: MA Experiment 20001450 PARAMETER Experiment Name: At_Far-red-induction_P Parameter: Organism Value: A. thaliana
  misc_feature: MA Experiment 20001450 PARAMETER Experiment Name: At_Far-red-induction_P Parameter: Plant Line Value: Columbia
  misc_feature: MA Experiment 20001450 PARAMETER Experiment Name: At_Far-red-induction_P Parameter: Timepoint (hr) Value: 8
  misc_feature: MA Experiment 20001450 PARAMETER Experiment Name: At_Far-red-induction_P Parameter: Tissue Value: Whole Plant
aatcgtttccacgaaaacaagtagagagagtgattcgagttttccaatcataaaaatcagcgaagaagatcttcgttcttgttcattctgtgaggtttcattgttaaaatcgaaacgaatctcaggttggagtaatccttgggagagatccgatttccgtttccatggcgattcggtggtcggagctgtgtatcgtactgttcgctctttcctacgccatctgcgtccttgccgggaagagttactacgatgtgttgcaagtcccgaaaggtgcatctgatgaacagatcaagagagcttataggaaactagctttgaagtatcatcccgataagaatcaaggaaatgaggaagcgactcgcaaattcgctgagatcaacaatgcttatgaagtgttatcggatgaggagaagagggagatatataacaagtatggtgaagagggacttaaacagttttctgcaaatggaggaagaggaggaggaggaggcggcatgaatatgcaggacatcttcagctcgttttttggtggaggttcgatggaggaagaagagaaggttgtcaagggggatgacgtaattgtggaacttgaggcaactctagaagatttgtacatgggaggctctatgaaggtatggagggaaaagaatgtgataaaaccagctcctggaaagagaaagtgtaactgcaggaacgaggtctatcacagacaaattggtcctggaatgttccaacagatgacagagcaggtctgtgacaaatgccctaatgtcaaatacgaacgggagggatactttgtgacagttgatatcgagaaaggaatgaaagatggagaagaagtgtctttctatgaagacggcgaacccattcttgacggtgaccctggtgaccttaagttccgaatcagaactgcaccacatgcccgtttcagaagggatggcaacgatctacacatgaacgtgaacattacactggttgaggcgctagttggttttgagaaatcattcaaacacttggatgatcacgaagttgacatcagttccaagggaattacaaagccgaaggaagtaaagaagttcaaaggagaagggatgccacttcactacagcacaaagaaaggcaacctctttgtcacttttgaggttttgtttccgtcttctctcactgacgatcagaagaagaagattaaagaagtctttgcttagtgctcttctctcgctttcgctctctctctctttagaagtttggggattaaagagaagaacatgtgatggtcctaatgtataacatgattaggttttaatatagaaagaaaaaagatatggggagacaaagtcggaaggacgttttgatcaagttgtcatttttgtttgctctttgttaatcatattagtgt

SEQ ID NO: 23911 - protein, 346 aa, Arabidopsis thaliana
  peptide (1)..(346): Ceres Seq. ID no. 12394722
  misc_feature (224)..(345): Pfam Name: DnaJ C terminal region Pfam Description: DnaJ C terminal region
  misc_feature (6)..(344): Homolog of NCBI NO: 26344614 NR Description: unnamed protein product [Mus musculus]
  misc_feature (6)..(344): Homolog of NCBI NO: 14579002 NR Description: PWP1-interacting protein 4 [Homo sapiens]
  misc_feature (6)..(344): Homolog of NCBI NO: 30584551 NR Description: Homo sapiens DnaJ (Hsp40) homolog, subfamily B,
  misc_feature (6)..(344): Homolog of NCBI NO: 7706495 NR Description: DnaJ (Hsp40) homolog, subfamily B, member 11
  misc_feature (6)..(344): Homolog of NCBI NO: 27754067 NR Description: DnaJ (Hsp40) homolog, subfamily B, member 11
  misc_feature (6)..(344): Homolog of NCBI NO: 20892117 NR Description: RIKEN cDNA 1810031F23 [Mus musculus]
  misc_feature (6)..(344): Homolog of NCBI NO: 37361854 NR Description: LRRGT00084 [Rattus norvegicus]
  misc_feature (1)..(344): Homolog of NCBI NO: 38488745 NR Description: DnaJ (Hsp40) homolog, subfamily B, member 11
  misc_feature (2)..(344): Homolog of NCBI NO: 34897648 NR Description: hypothetical protein [Oryza sativa]
  misc_feature (1)..(346): Homolog of NCBI NO: 15228802 NR Description: putative protein
MAIRWSELCIVLFALSYAICVLAGKSYYDVLQVPKGASDEQIKRAYRKLALKYHPDKNQGNEEATRKFAEINNAYEVLSDEEKREIYNKYGEEGLKQFSANGGRGGGGGGMNMQDIFSSFFGGGSMEEEEKVVKGDDVIVELEATLEDLYMGGSMKVWREKNVIKPAPGKRKCNCRNEVYHRQIGPGMFQQMTEQVCDKCPNVKYEREGYFVTVDIEKGMKDGEEVSFYEDGEPILDGDPGDLKFRIRTAPHARFRRDGNDLHMNVNITLVEALVGFEKSFKHLDDHEVDISSKGITKPKEVKKFKGEGMPLHYSTKKGNLFVTFEVLFPSSLTDDQKKKIKEVFA

SEQ ID NO: 23912 - protein, 236 aa, Arabidopsis thaliana
  peptide (1)..(236): Ceres Seq. ID no. 12394723
  misc_feature (114)..(235): Pfam Name: DnaJ C terminal region Pfam Description: DnaJ C terminal region
  misc_feature (1)..(234): Homolog of NCBI NO: 26344614 NR Description: unnamed protein product [Mus musculus]
  misc_feature (1)..(234): Homolog of NCBI NO: 14579002 NR Description: PWP1-interacting protein 4 [Homo sapiens]
  misc_feature (1)..(234): Homolog of NCBI NO: 30584551 NR Description: Homo sapiens DnaJ (Hsp40) homolog, subfamily B,
  misc_feature (1)..(234): Homolog of NCBI NO: 7706495 NR Description: DnaJ (Hsp40) homolog, subfamily B, member 11
  misc_feature (1)..(234): Homolog of NCBI NO: 27754067 NR Description: DnaJ (Hsp40) homolog, subfamily B, member 11
  misc_feature (1)..(234): Homolog of NCBI NO: 20892117 NR Description: RIKEN cDNA 1810031F23 [Mus musculus]
  misc_feature (1)..(234): Homolog of NCBI NO: 37361854 NR Description: LRRGT00084 [Rattus norvegicus]
  misc_feature (1)..(234): Homolog of NCBI NO: 38488745 NR Description: DnaJ (Hsp40) homolog, subfamily B, member 11
  misc_feature (1)..(234): Homolog of NCBI NO: 34897648 NR Description: hypothetical protein [Oryza sativa]
  misc_feature (1)..(236): Homolog of NCBI NO: 15228802 NR Description: putative protein
MNMQDIFSSFFGGGSMEEEEKVVKGDDVIVELEATLEDLYMGGSMKVWREKNVIKPAPGKRKCNCRNEVYHRQIGPGMFQQMTEQVCDKCPNVKYEREGYFVTVDIEKGMKDGEEVSFYEDGEPILDGDPGDLKFRIRTAPHARFRRDGNDLHMNVNITLVEALVGFEKSFKHLDDHEVDISSKGITKPKEVKKFKGEGMPLHYSTKKGNLFVTFEVLFPSSLTDDQKKKIKEVFA

SEQ ID NO: 23913 - protein, 234 aa, Arabidopsis thaliana
  peptide (1)..(234): Ceres Seq. ID no. 12394724
  misc_feature (112)..(233): Pfam Name: DnaJ C terminal region Pfam Description: DnaJ C terminal region
  misc_feature (1)..(232): Homolog of NCBI NO: 20892117 NR Description: RIKEN cDNA 1810031F23 [Mus musculus]
  misc_feature (1)..(232): Homolog of NCBI NO: 37361854 NR Description: LRRGT00084 [Rattus norvegicus]
  misc_feature (1)..(232): Homolog of NCBI NO: 38488745 NR Description: DnaJ (Hsp40) homolog, subfamily B, member 11
  misc_feature (1)..(232): Homolog of NCBI NO: 14579002 NR Description: PWP1-interacting protein 4 [Homo sapiens]
  misc_feature (1)..(232): Homolog of NCBI NO: 7706495 NR Description: DnaJ (Hsp40) homolog, subfamily B, member 11
  misc_feature (1)..(232): Homolog of NCBI NO: 27754067 NR Description: DnaJ (Hsp40) homolog, subfamily B, member 11
  misc_feature (1)..(232): Homolog of NCBI NO: 30584551 NR Description: Homo sapiens DnaJ (Hsp40) homolog, subfamily B,
  misc_feature (1)..(232): Homolog of NCBI NO: 26344614 NR Description: unnamed protein product [Mus musculus]
  misc_feature (1)..(232): Homolog of NCBI NO: 34897648 NR Description: hypothetical protein [Oryza sativa]
  misc_feature (1)..(234): Homolog of NCBI NO: 15228802 NR Description: putative protein
MQDIFSSFFGGGSMEEEEKVVKGDDVIVELEATLEDLYMGGSMKVWREKNVIKPAPGKRKCNCRNEVYHRQIGPGMFQQMTEQVCDKCPNVKYEREGYFVTVDIEKGMKDGEEVSFYEDGEPILDGDPGDLKFRIRTAPHARFRRDGNDLHMNVNITLVEALVGFEKSFKHLDDHEVDISSKGITKPKEVKKFKGEGMPLHYSTKKGNLFVTFEVLFPSSLTDDQKKKIKEVFA

SEQ ID NO: 23914 - DNA, 1087 bp, Arabidopsis thaliana
  misc_feature (1)..(1087): Ceres Seq. ID no. 12322036
  misc_feature: MA Experiment ID: 108461 Result: Up-regulated in Transcription
  misc_feature: MA Experiment 108461 PARAMETER Experiment Name: At_Germinating_Seeds_cDNA_P Parameter: Age (day) Value: 1 vs. 0
  misc_feature: MA Experiment 108461 PARAMETER Experiment Name: At_Germinating_Seeds_cDNA_P Parameter: Tissue Value: Germinating Seeds
  misc_feature: MA Experiment ID: 108462 Result: Up-regulated in Transcription
  misc_feature: MA Experiment 108462 PARAMETER Experiment Name: At_Germinating_Seeds_cDNA_P Parameter: Age (day) Value: 2 vs. 0
  misc_feature: MA Experiment 108462 PARAMETER Experiment Name: At_Germinating_Seeds_cDNA_P Parameter: Tissue Value: Germinating Seeds
  misc_feature: MA Experiment ID: 108464 Result: Up-regulated in Transcription
  misc_feature: MA Experiment 108464 PARAMETER Experiment Name: At_Germinating_Seeds_cDNA_P Parameter: Age (day) Value: 4 vs. 0
  misc_feature: MA Experiment 108464 PARAMETER Experiment Name: At_Germinating_Seeds_cDNA_P Parameter: Tissue Value: Germinating Seeds
  misc_feature: MA Experiment ID: 108569 Result: Up-regulated in Transcription
  misc_feature: MA Experiment 108569 PARAMETER Experiment Name: At_0.001%_MeJA__cDNA_P Parameter: Timepoint (hr) Value: 6
  misc_feature: MA Experiment 108569 PARAMETER Experiment Name: At_0.001%_MeJA__cDNA_P Parameter: Tissue Value: Aerial
  misc_feature: MA Experiment 108569 PARAMETER Experiment Name: At_0.001%_MeJA__cDNA_P Parameter: Treatment Value: 0.001% MeJA vs. No Treatment
  misc_feature: MA Experiment ID: 108573 Result: Up-regulated in Transcription
  misc_feature: MA Experiment 108573 PARAMETER Experiment Name: At_Drought_cDNA_P Parameter: Timepoint (hr) Value: 6
  misc_feature: MA Experiment 108573 PARAMETER Experiment Name: At_Drought_cDNA_P Parameter: Tissue Value: Aerial
  misc_feature: MA Experiment 108573 PARAMETER Experiment Name: At_Drought_cDNA_P Parameter: Treatment Value: Drought vs. No Drought
  misc_feature: MA Experiment ID: 108579 Result: Down-regulated in Transcription
  misc_feature: MA Experiment 108579 PARAMETER Experiment Name: At_4deg_Cold_cDNA_P Parameter: Temperature (deg C) Value: 4 vs. 22
  misc_feature: MA Experiment 108579 PARAMETER Experiment Name: At_4deg_Cold_cDNA_P Parameter: Timepoint (hr) Value: 6
  misc_feature: MA Experiment 108579 PARAMETER Experiment Name: At_4deg_Cold_cDNA_P Parameter: Tissue Value: Aerial
  misc_feature: MA Experiment ID: 108595 Result: Down-regulated in Transcription
  misc_feature: MA Experiment 108595 PARAMETER Experiment Name: At_Ler-pi_Ovule_cDNA_P Parameter: Plant Line Value: null
  misc_feature: MA Experiment ID: 20000087 Result: Down-regulated in Transcription
  misc_feature: MA Experiment 20000087 PARAMETER Experiment Name: At_100uM_ABA_Mutants_cDNA_P Parameter: Plant Line Value: WS
  misc_feature: MA Experiment 20000087 PARAMETER Experiment Name: At_100uM_ABA_Mutants_cDNA_P Parameter: Timepoint (hr) Value: 6
  misc_feature: MA Experiment 20000087 PARAMETER Experiment Name: At_100uM_ABA_Mutants_cDNA_P Parameter: Tissue Value: Aerial
  misc_feature: MA Experiment 20000087 PARAMETER Experiment Name: At_100uM_ABA_Mutants_cDNA_P Parameter: Treatment Value: 100uM ABA vs. No Treatment
  misc_feature: MA Experiment ID: 20000224 Result: Down-regulated in Transcription
  misc_feature: MA Experiment ID: 20000355 Result: Down-regulated in Transcription
  misc_feature: MA Experiment 20000355 PARAMETER Experiment Name: At_Siliques_Sub_P Parameter: Age (day) Value: 21
  misc_feature: MA Experiment 20000355 PARAMETER Experiment Name: At_Siliques_Sub_P Parameter: Organism Value: A. thaliana
  misc_feature: MA Experiment 20000355 PARAMETER Experiment Name: At_Siliques_Sub_P Parameter: Plant Line Value: WS
  misc_feature: MA Experiment 20000355 PARAMETER Experiment Name: At_Siliques_Sub_P Parameter: Tissue Value: Less Than 5mm Siliques vs. Whole Plant
cttcttctcctcttcttctcgacgacgaaagagaaagagagaaaacaccgaagcgacgaagaagaagattataatctaatctctccttcgtgtagtttagcgaagagtgatgcgattttcttctggcgtttgatttcgttttctcgagttgttgtgcgggggagagattgattagaattagagatgatagtttcgtgatttcagatgaatttctggggacatttgtgccgattctggtgtattgggtgtattcagggatgtacatttgcttaggatctttggataaatatagattgcattcgaagatagatgaggatgagaagaatctcgtttctaaatctgccgtcgttaagggcgttcttcttcaacagactcttcaggctattatctccgttattctcttcaagataacaggaagtgatgcagatgctgctacgacacagcaattttccattctacttctggctaggcagtttatcatcgctatgcttgtaattgacacttggcaatatttcattcatcgatatatgcacctcaacaagttcttatacaagcacatccactctcagcatcatcgccttattgtgccttattcgtatggagctctatacaaccatccactagaaggtcttctcttggacactattggtggtgctttgtctttcctcttctctggtatgtccccaagaacagccatctttttcttctccttcgctaccatcaaaacagtagatgatcattgtggactatggcttccgggaaatccatttcacatcttcttcagtaataactctgcttaccatgatgttcaccaccaactctatgtaaccaaatacaacttctcgcagccattctttgttatgtgggataggattctcggcacttacttgccttattcattggagaaaagagccaatggaggatttgaaacacggccaatcaaagtatccaaagatgagtaatttctctttctttcttttggggcttcttgtcaatgctaagtcatcattttgctcgttagagaaccactgtaacctttgcgtacttgtaattgtacatacaattccaatctatccttttttcgatc

SEQ ID NO: 23915 - protein, 234 aa, Arabidopsis thaliana
  peptide (1)..(234): Ceres Seq. ID no. 12322037
  misc_feature (1)..(53): Homolog of NCBI NO: 19113281 NR Description: hypothetical integral membrane protein, putative
  misc_feature (64)..(212): Homolog of NCBI NO: 19113281 NR Description: hypothetical integral membrane protein, putative
  misc_feature (1)..(57): Homolog of NCBI NO: 34911990 NR Description: P0694A04.28 [Oryza sativa (japonica
  misc_feature (56)..(228): Homolog of NCBI NO: 34911990 NR Description: P0694A04.28 [Oryza sativa (japonica
  misc_feature (9)..(174): Homolog of NCBI NO: 5360721 NR Description: acid phosphatase [Lupinus albus]
  misc_feature (1)..(229): Homolog of NCBI NO: 34913184 NR Description: similar to acid phosphatase
  misc_feature (1)..(234): Homolog of NCBI NO: 25404823 NR Description: probable sterol desaturase T6C23.16
  misc_feature (1)..(234): Homolog of NCBI NO: 22330531 NR Description: acid phosphatase, putative
  misc_feature (1)..(234): Homolog of NCBI NO: 25511716 NR Description: F14L17.5 protein - Arabidopsis thaliana
  misc_feature (1)..(234): Homolog of NCBI NO: 18394095 NR Description: acid phosphatase, putative
MYICLGSLDKYRLHSKIDEDEKNLVSKSAVVKGVLLQQTLQAIISVILFKITGSDADAATTQQFSILLLARQFIIAMLVIDTWQYFIHRYMHLNKFLYKHIHSQHHRLIVPYSYGALYNHPLEGLLLDTIGGALSFLFSGMSPRTAIFFFSFATIKTVDDHCGLWLPGNPFHIFFSNNSAYHDVHHQLYVTKYNFSQPFFVMWDRILGTYLPYSLEKRANGGFETRPIKVSKDE

SEQ ID NO: 23916 - protein, 158 aa, Arabidopsis thaliana
  peptide (1)..(158): Ceres Seq. ID no. 12322038
  misc_feature (1)..(128): Homolog of NCBI NO: 37722567 NR Description: sphinganine hydroxylase [Pichia ciferrii]
  misc_feature (1)..(156): Homolog of NCBI NO: 40746027 NR Description: hypothetical protein AN0640.2 [Aspergillus
  misc_feature (1)..(136): Homolog of NCBI NO: 19113281 NR Description: hypothetical integral membrane protein, putative
  misc_feature (1)..(152): Homolog of NCBI NO: 34911990 NR Description: P0694A04.28 [Oryza sativa (japonica
  misc_feature (1)..(98): Homolog of NCBI NO: 5360721 NR Description: acid phosphatase [Lupinus albus]
  misc_feature (1)..(153): Homolog of NCBI NO: 34913184 NR Description: similar to acid phosphatase
  misc_feature (1)..(158): Homolog of NCBI NO: 25404823 NR Description: probable sterol desaturase T6C23.16
  misc_feature (1)..(158): Homolog of NCBI NO: 22330531 NR Description: acid phosphatase, putative
  misc_feature (1)..(158): Homolog of NCBI NO: 25511716 NR Description: F14L17.5 protein - Arabidopsis thaliana
  misc_feature (1)..(158): Homolog of NCBI NO: 18394095 NR Description: acid phosphatase, putative
MLVIDTWQYFIHRYMHLNKFLYKHIHSQHHRLIVPYSYGALYNHPLEGLLLDTIGGALSFLFSGMSPRTAIFFFSFATIKTVDDHCGLWLPGNPFHIFFSNNSAYHDVHHQLYVTKYNFSQPFFVMWDRILGTYLPYSLEKRANGGFETRPIKVSKDE

SEQ ID NO: 23917 - protein, 144 aa, Arabidopsis thaliana
  peptide (1)..(144): Ceres Seq. ID no. 12322039
  misc_feature (1)..(114): Homolog of NCBI NO: 37722567 NR Description: sphinganine hydroxylase [Pichia ciferrii]
  misc_feature (1)..(142): Homolog of NCBI NO: 40746027 NR Description: hypothetical protein AN0640.2 [Aspergillus
  misc_feature (1)..(122): Homolog of NCBI NO: 19113281 NR Description: hypothetical integral membrane protein, putative
  misc_feature (1)..(138): Homolog of NCBI NO: 34911990 NR Description: P0694A04.28 [Oryza sativa (japonica
  misc_feature (1)..(84): Homolog of NCBI NO: 5360721 NR Description: acid phosphatase [Lupinus albus]
  misc_feature (1)..(139): Homolog of NCBI NO: 34913184 NR Description: similar to acid phosphatase
  misc_feature (1)..(144): Homolog of NCBI NO: 25404823 NR Description: probable sterol desaturase T6C23.16
  misc_feature (1)..(144): Homolog of NCBI NO: 22330531 NR Description: acid phosphatase, putative
  misc_feature (1)..(144): Homolog of NCBI NO: 25511716 NR Description: F14L17.5 protein - Arabidopsis thaliana
  misc_feature (1)..(144): Homolog of NCBI NO: 18394095 NR Description: acid phosphatase, putative
MHLNKFLYKHIHSQHHRLIVPYSYGALYNHPLEGLLLDTIGGALSFLFSGMSPRTAIFFFSFATIKTVDDHCGLWLPGNPFHIFFSNNSAYHDVHHQLYVTKYNFSQPFFVMWDRILGTYLPYSLEKRANGGFETRPIKVSKDE

SEQ ID NO: 23918 - DNA, 1155 bp, Arabidopsis thaliana
  misc_feature (1)..(1155): Ceres Seq. ID no. 12339505
  misc_feature: MA Experiment ID: 108434 Result: Up-regulated in Transcription
  misc_feature: MA Experiment 108434 PARAMETER Experiment Name: At_Root_Tips_cDNA_P Parameter: Tissue Value: Root Tips
  misc_feature: MA Experiment ID: 108435 Result: Up-regulated in Transcription
  misc_feature: MA Experiment 108435 PARAMETER Experiment Name: At_stm_Mutants_cDNA_P Parameter: Plant Line Value: wt Landsburg vs stm
  misc_feature: MA Experiment 108435 PARAMETER Experiment Name: At_stm_Mutants_cDNA_P Parameter: Tissue Value: Shoot Apical Meristem Region
  misc_feature: MA Experiment ID: 108462 Result: Down-regulated in Transcription
  misc_feature: MA Experiment 108462 PARAMETER Experiment Name: At_Germinating_Seeds_cDNA_P Parameter: Age (day) Value: 2 vs. 0
  misc_feature: MA Experiment 108462 PARAMETER Experiment Name: At_Germinating_Seeds_cDNA_P Parameter: Tissue Value: Germinating Seeds
  misc_feature: MA Experiment ID: 108463 Result: Down-regulated in Transcription
  misc_feature: MA Experiment 108463 PARAMETER Experiment Name: At_Germinating_Seeds_cDNA_P Parameter: Age (day) Value: 3 vs. 0
  misc_feature: MA Experiment 108463 PARAMETER Experiment Name: At_Germinating_Seeds_cDNA_P Parameter: Tissue Value: Germinating Seeds
  misc_feature: MA Experiment ID: 108464 Result: Down-regulated in Transcription
  misc_feature: MA Experiment 108464 PARAMETER Experiment Name: At_Germinating_Seeds_cDNA_P Parameter: Age (day) Value: 4 vs. 0
  misc_feature: MA Experiment 108464 PARAMETER Experiment Name: At_Germinating_Seeds_cDNA_P Parameter: Tissue Value: Germinating Seeds
  misc_feature: MA Experiment ID: 108577 Result: Up-regulated in Transcription
  misc_feature: MA Experiment 108577 PARAMETER Experiment Name: At_42deg_Heat_cDNA_P Parameter: Temperature (deg C) Value: 42 vs. 22
  misc_feature: MA Experiment 108577 PARAMETER Experiment Name: At_42deg_Heat_cDNA_P Parameter: Timepoint (hr) Value: 6
  misc_feature: MA Experiment 108577 PARAMETER Experiment Name: At_42deg_Heat_cDNA_P Parameter: Tissue Value: Aerial
  misc_feature: MA Experiment ID: 20000093 Result: Up-regulated in Transcription
  misc_feature: MA Experiment 20000093 PARAMETER Experiment Name: At_42deg_Heat_cDNA_P Parameter: Temperature (deg C) Value: 42 vs. 22
  misc_feature: MA Experiment 20000093 PARAMETER Experiment Name: At_42deg_Heat_cDNA_P Parameter: Timepoint (hr) Value: 0.5
  misc_feature: MA Experiment 20000093 PARAMETER Experiment Name: At_42deg_Heat_cDNA_P Parameter: Tissue Value: Aerial
  misc_feature: MA Experiment ID: 20000111 Result: Up-regulated in Transcription
  misc_feature: MA Experiment 20000111 PARAMETER Experiment Name: At_42deg_Heat_cDNA_P Parameter: Temperature (deg C) Value: 42 vs. 22
  misc_feature: MA Experiment 20000111 PARAMETER Experiment Name: At_42deg_Heat_cDNA_P Parameter: Timepoint (hr) Value: 6
  misc_feature: MA Experiment 20000111 PARAMETER Experiment Name: At_42deg_Heat_cDNA_P Parameter: Tissue Value: Aerial
  misc_feature: MA Experiment ID: 20000112 Result: Up-regulated in Transcription
  misc_feature: MA Experiment 20000112 PARAMETER Experiment Name: At_42deg_Heat_cDNA_P Parameter: Temperature (deg C) Value: 42 vs. 22
  misc_feature: MA Experiment 20000112 PARAMETER Experiment Name: At_42deg_Heat_cDNA_P Parameter: Timepoint (hr) Value: 2
  misc_feature: MA Experiment 20000112 PARAMETER Experiment Name: At_42deg_Heat_cDNA_P Parameter: Tissue Value: Aerial
  misc_feature: MA Experiment ID: 20000113 Result: Up-regulated in Transcription
  misc_feature: MA Experiment 20000113 PARAMETER Experiment Name: At_42deg_Heat_cDNA_P Parameter: Temperature (deg C) Value: 42 vs. 22
  misc_feature: MA Experiment 20000113 PARAMETER Experiment Name: At_42deg_Heat_cDNA_P Parameter: Timepoint (hr) Value: 8
  misc_feature: MA Experiment 20000113 PARAMETER Experiment Name: At_42deg_Heat_cDNA_P Parameter: Tissue Value: Aerial
  misc_feature: MA Experiment ID: 20000144 Result: Up-regulated in Transcription
  misc_feature: MA Experiment 20000144 PARAMETER Experiment Name: At_42deg_Heat_cDNA_P Parameter: Temperature (deg C) Value: 42 vs. 22
  misc_feature: MA Experiment 20000144 PARAMETER Experiment Name: At_42deg_Heat_cDNA_P Parameter: Timepoint (hr) Value: 1
  misc_feature: MA Experiment 20000144 PARAMETER Experiment Name: At_42deg_Heat_cDNA_P Parameter: Tissue Value: Aerial
  misc_feature: MA Experiment ID: 20000171 Result: Up-regulated in Transcription
  misc_feature: MA Experiment 20000171 PARAMETER Experiment Name: At_42deg_Heat_P Parameter: Age (day) Value: 14
  misc_feature: MA Experiment 20000171 PARAMETER Experiment Name: At_42deg_Heat_P Parameter: Organism Value: A. thaliana
  misc_feature: MA Experiment 20000171 PARAMETER Experiment Name: At_42deg_Heat_P Parameter: Plant Line Value: WS
  misc_feature: MA Experiment 20000171 PARAMETER Experiment Name: At_42deg_Heat_P Parameter: Temperature (deg C) Value: 42 vs. 22
  misc_feature: MA Experiment 20000171 PARAMETER Experiment Name: At_42deg_Heat_P Parameter: Timepoint (hr) Value: 1
  misc_feature: MA Experiment 20000171 PARAMETER Experiment Name: At_42deg_Heat_P Parameter: Tissue Value: Aerial
  misc_feature: MA Experiment ID: 20000173 Result: Up-regulated in Transcription
  misc_feature: MA Experiment 20000173 PARAMETER Experiment Name: At_42deg_Heat_P Parameter: Age (day) Value: 14
  misc_feature: MA Experiment 20000173 PARAMETER Experiment Name: At_42deg_Heat_P Parameter: Organism Value: A. thaliana
  misc_feature: MA Experiment 20000173 PARAMETER Experiment Name: At_42deg_Heat_P Parameter: Plant Line Value: WS
  misc_feature: MA Experiment 20000173 PARAMETER Experiment Name: At_42deg_Heat_P Parameter: Temperature (deg C) Value: 42 vs. 22
  misc_feature: MA Experiment 20000173 PARAMETER Experiment Name: At_42deg_Heat_P Parameter: Timepoint (hr) Value: 6
  misc_feature: MA Experiment 20000173 PARAMETER Experiment Name: At_42deg_Heat_P Parameter: Tissue Value: Aerial
  misc_feature: MA Experiment ID: 20000184 Result: Up-regulated in Transcription
  misc_feature: MA Experiment 20000184 PARAMETER Experiment Name: At_Shoots__P Parameter: Age (day) Value: 7
  misc_feature: MA Experiment 20000184 PARAMETER Experiment Name: At_Shoots__P Parameter: Tissue Value: Shoots vs. Whole Plant
  misc_feature: MA Experiment ID: 20001247 Result: Down-regulated in Transcription
  misc_feature: MA Experiment 20001247 PARAMETER Experiment Name: At_Far-red-induction_P Parameter: Age (day) Value: 7
  misc_feature: MA Experiment 20001247 PARAMETER Experiment Name: At_Far-red-induction_P Parameter: Light Value: Far-red vs. White
  misc_feature: MA Experiment 20001247 PARAMETER Experiment Name: At_Far-red-induction_P Parameter: Organism Value: A. thaliana
  misc_feature: MA Experiment 20001247 PARAMETER Experiment Name: At_Far-red-induction_P Parameter: Plant Line Value: Columbia
  misc_feature: MA Experiment 20001247 PARAMETER Experiment Name: At_Far-red-induction_P Parameter: Timepoint (hr) Value: 1
  misc_feature: MA Experiment 20001247 PARAMETER Experiment Name: At_Far-red-induction_P Parameter: Tissue Value: Whole Plant
  misc_feature: MA Experiment ID: 20001451 Result: Down-regulated in Transcription
  misc_feature: MA Experiment 20001451 PARAMETER Experiment Name: At_Far-red-induction_P Parameter: Age (day) Value: 7
  misc_feature: MA Experiment 20001451 PARAMETER Experiment Name: At_Far-red-induction_P Parameter: Light Value: Far-red vs. White
  misc_feature: MA Experiment 20001451 PARAMETER Experiment Name: At_Far-red-induction_P Parameter: Organism Value: A. thaliana
  misc_feature: MA Experiment 20001451 PARAMETER Experiment Name: At_Far-red-induction_P Parameter: Plant Line Value: Columbia
  misc_feature: MA Experiment 20001451 PARAMETER Experiment Name: At_Far-red-induction_P Parameter: Timepoint (hr) Value: 24
  misc_feature: MA Experiment 20001451 PARAMETER Experiment Name: At_Far-red-induction_P Parameter: Tissue Value: Whole Plant
  misc_feature: MA Experiment ID: 20001557 Result: Up-regulated in Transcription
  misc_feature: MA Experiment 20001557 PARAMETER Experiment Name: At_Drought_Soil_Dry_P Parameter: Age (day) Value: 27
  misc_feature: MA Experiment 20001557 PARAMETER Experiment Name: At_Drought_Soil_Dry_P Parameter: Organism Value: A. thaliana
  misc_feature: MA Experiment 20001557 PARAMETER Experiment Name: At_Drought_Soil_Dry_P Parameter: Plant Line Value: WS
  misc_feature: MA Experiment 20001557 PARAMETER Experiment Name: At_Drought_Soil_Dry_P Parameter: Post Timepoint (hr) Value: 3
  misc_feature: MA Experiment 20001557 PARAMETER Experiment Name: At_Drought_Soil_Dry_P Parameter: Post-Treatment Value: Re-Water vs. No Drought
  misc_feature: MA Experiment 20001557 PARAMETER Experiment Name: At_Drought_Soil_Dry_P Parameter: Timepoint (day) Value: 13
  misc_feature: MA Experiment 20001557 PARAMETER Experiment Name: At_Drought_Soil_Dry_P Parameter: Treatment Value: Drought vs. No Drought
  misc_feature: MA Experiment ID: 20001558 Result: Up-regulated in Transcription
  misc_feature: MA Experiment 20001558 PARAMETER Experiment Name: At_Drought_Soil_Dry_P Parameter: Age (day) Value: 27
  misc_feature: MA Experiment 20001558 PARAMETER Experiment Name: At_Drought_Soil_Dry_P Parameter: Organism Value: A. thaliana
  misc_feature: MA Experiment 20001558 PARAMETER Experiment Name: At_Drought_Soil_Dry_P Parameter: Plant Line Value: WS
  misc_feature: MA Experiment 20001558 PARAMETER Experiment Name: At_Drought_Soil_Dry_P Parameter: Post Timepoint (hr) Value: 6
  misc_feature: MA Experiment 20001558 PARAMETER Experiment Name: At_Drought_Soil_Dry_P Parameter: Post-Treatment Value: Re-Water vs. No Drought
  misc_feature: MA Experiment 20001558 PARAMETER Experiment Name: At_Drought_Soil_Dry_P Parameter: Timepoint (day) Value: 13
  misc_feature: MA Experiment 20001558 PARAMETER Experiment Name: At_Drought_Soil_Dry_P Parameter: Treatment Value: Drought vs. No Drought
  misc_feature: MA Experiment ID: 20001560 Result: Up-regulated in Transcription
  misc_feature: MA Experiment 20001560 PARAMETER Experiment Name: At_Drought_Soil_Dry_P Parameter: Age (day) Value: 28
  misc_feature: MA Experiment 20001560 PARAMETER Experiment Name: At_Drought_Soil_Dry_P Parameter: Organism Value: A. thaliana
  misc_feature: MA Experiment 20001560 PARAMETER Experiment Name: At_Drought_Soil_Dry_P Parameter: Plant Line Value: WS
  misc_feature: MA Experiment 20001560 PARAMETER Experiment Name: At_Drought_Soil_Dry_P Parameter: Post Timepoint (hr) Value: None
  misc_feature: MA Experiment 20001560 PARAMETER Experiment Name: At_Drought_Soil_Dry_P Parameter: Post-Treatment Value: None
  misc_feature: MA Experiment 20001560 PARAMETER Experiment Name: At_Drought_Soil_Dry_P Parameter: Timepoint (day) Value: 14
  misc_feature: MA Experiment 20001560 PARAMETER Experiment Name: At_Drought_Soil_Dry_P Parameter: Treatment Value: Drought vs. No Drought
  misc_feature: MA Experiment ID: 20001757 Result: Up-regulated in Transcription
  misc_feature: MA Experiment 20001757 PARAMETER Experiment Name: At_50mM_NH4NO3_L-to-H_P Parameter: Timepoint (hr) Value: 6
  misc_feature: MA Experiment 20001757 PARAMETER Experiment Name: At_50mM_NH4NO3_L-to-H_P Parameter: Tissue Value: Leaf
  misc_feature: MA Experiment 20001757 PARAMETER Experiment Name: At_50mM_NH4NO3_L-to-H_P Parameter: Treatment Value: 50mM NH4NO3 vs 100mM Mannitol
  misc_feature: Phenotype: ROSETTE LEAVES Disorganized Rosette-Disorganized Rosette
  misc_feature: Phenotype: ROSETTE LEAVES Other
  misc_feature: Phenotype: WHOLE PLANT Color-Dark Green
  misc_feature: Phenotype: FLOWERS Other
  misc_feature: Phenotype: INFLORESCENCE Branching-Reduced Apical Dominance
  misc_feature: Phenotype: INFLORESCENCE Height-Short
  misc_feature: Phenotype: ROSETTE LEAVES Disorganized Rosette-Disorganized Rosette
  misc_feature: Phenotype: INFLORESCENCE Other
  misc_feature: Phenotype: ROSETTE LEAVES Other
  misc_feature: Phenotype: WHOLE PLANT Color-Dark Green
  misc_feature: Phenotype: WHOLE PLANT Size-Small
  misc_feature: Phenotype: INFLORESCENCE Flowering Time-Late Flowering
  misc_feature: Phenotype: ROSETTE LEAVES Disorganized Rosette-Disorganized Rosette
  misc_feature: Phenotype: ROSETTE LEAVES Other
  misc_feature: Phenotype: WHOLE PLANT Color-Dark Green
  misc_feature: Phenotype: WHOLE PLANT Other
  misc_feature: Phenotype: INFLORESCENCE Branching-Reduced Apical Dominance
  misc_feature: Phenotype: ROSETTE LEAVES Disorganized Rosette-Disorganized Rosette
  misc_feature: Phenotype: INFLORESCENCE Other
ctctctcgtcgtctcaaatctcttcttccttcttcttctctctcgattcaagataatccacacgcaaaaatgggaagccaacaagcggctgtttcgttcctttccaatttggcgaaggctgctttcggtcttggaacggcggcgacggtgctgaatacatcgcttttcaccgttgacggcggagaaagagctgttatcttcgatcgattcaggggagtgatggatcagactgtgggtgaagggactcatttcttgatcccgattcttcagaggcctcacatcttcgatatccgcacgaagcctcacacgttctcttcaatctctggtactaaggatctccagatggttaatctcactcttcgtgttctctctcgtcctgaggtgtcgcgtctcccgtacatcttccaaactttgggtctagagtatgacgagaaggttcttccttcgattggaaatgaggttttgaaagctgtggttgcacagttcaacgctgaccagcttctcactgagcgtcctcacgtctcagcacttgttcgggagtcactaatcacccgtgcgaaggacttcaacattgtgcttgatgatgtagctatcacgcatttgtcctatggtgtggagttttcaagggctgttgagcagaaacaagtggctcagcaagaggcagagaggtctaagtttgttgtgatgaaggctgatcaagagaggagagctgcggttataagagctgaaggtgaaagtgaagctgctcagttgatttctgatgctacggctaaagctggtatgggacttatcgagcttaggaggattgaagcttcaagggagattgcgtctacacttgctaggtctcctaatgtggcctacttacccggtggccagagcatgctctttgccctgaaccgttgatcttgatcagatatgatggttgtttgggagcattttgcgatattttaatgatcaagttgtgaatctgattgaatcaaaaaggtgaaatgctcttttgttttgatgaactctgaagaagaaaaagaaactagttgtttgagttgtcattattgtgttctgaatctcggcaaaatttactctacctgaagaatctttgttttcagcatcatgtttatctaattctcaacaaataaatgattttggctgaactgt

SEQ ID NO: 23919 - protein, 300 aa, Arabidopsis thaliana
  peptide (1)..(300): Ceres Seq. ID no. 12339506
  misc_feature (34)..(291): Homolog of NCBI NO: 32421789 NR Description: hypothetical protein [Neurospora crassa]
  misc_feature (30)..(292): Homolog of NCBI NO: 40746306 NR Description: conserved hypothetical protein [Aspergillus
  misc_feature (24)..(299): Homolog of NCBI NO: 38567717 NR Description: B1358B12.15 [Oryza sativa (japonica
  misc_feature (25)..(299): Homolog of NCBI NO: 7716460 NR Description: prohibitin [Zea mays]
  misc_feature (24)..(299): Homolog of NCBI NO: 7716458 NR Description: prohibitin [Zea mays]
  misc_feature (24)..(299): Homolog of NCBI NO: 7489185 NR Description: prohibitin - common tobacco
  misc_feature (24)..(299): Homolog of NCBI NO: 27765032 NR Description: At3g27280 [Arabidopsis thaliana]
  misc_feature (24)..(299): Homolog of NCBI NO: 15232129 NR Description: prohibitin, putative
  misc_feature (24)..(299): Homolog of NCBI NO: 21592895 NR Description: prohibitin, putative [Arabidopsis thaliana]
  misc_feature (24)..(300): Homolog of NCBI NO: 15237488 NR Description: prohibitin (gb|AAC49691.1)
LSRRLKSLLPSSSLSIQDNPHAKMGSQQAAVSFLSNLAKAAFGLGTAATVLNTSLFTVDGGERAVIFDRFRGVMDQTVGEGTHFLIPILQRPHIFDIRTKPHTFSSISGTKDLQMVNLTLRVLSRPEVSRLPYIFQTLGLEYDEKVLPSIGNEVLKAVVAQFNADQLLTERPHVSALVRESLITRAKDFNIVLDDVAITHLSYGVEFSRAVEQKQVAQQEAERSKFVVMKADQERRAAVIRAEGESEAAQLISDATAKAGMGLIELRRIEASREIASTLARSPNVAYLPGGQSMLFALNR
